United States Patent Application Publication US 2024/0327476 A1 - sequence listing, part 49

SEQ ID NO: 91711 - DNA, 3423 bp, synthetic construct
  misc_feature 1..3423: note = Description of Artificial Sequence: Synthetic coding sequence
  source 1..3423: mol_type = other DNA
atgggccccctggccggcctgggccccggcagcacccccagaaccgccagcagaaagggcctgcccctgggcagcgccgtgagcagccccgtgctgttcagccccgtgggcagaagaagcagcctgagcagcagaggcacccccaccagaatgttcccccaccacagcatcaccgagagcgtgaactacgacgtgaagaccttcggcagcagcctgcccgtgaaggtgatggaggccctgaccctggccgaggtggacgaccagctgaccatcaacatcgacgagggcggctgggcctgcctggtgtgcaaggagaagctgatcatctggaagatcgccctgagccccatcaccaagctgagcgtgtgcaaggagctgcagctgccccccagcgacttccactggagcgccgacctggtggccctgagctacagcagccccagcggcgaggcccacagcacccaggccgtggccgtgatggtggccaccagagagggcagcatcagatactggcccagcctggccggcgaggacacctacaccgaggccttcgtggacagcggcggcgacaagacctacagcttcctgaccgccgtgcagggcggcagcttcatcctgagcagcagcggcagccagctgatcagactgatccccgagagcagcggcaagatccaccagcacatcctgccccagggccagggcatgctgagcggcatcggcagaaaggtgagcagcctgttcggcatcctgagccccagcagcgacctgaccctgagcagcgtgctgtgggacagagagagaagcagcttctacagcctgaccagcagcaacatcagcaagtgggagctggacgacagcagcgagaagcacgcctacagctgggacatcaacagagccctgaaggagaacatcaccgacgccatctggggcagcgagagcaactacgaggccatcaaggagggcgtgaacatcagatacctggacctgaagcagaactgcgacggcctggtgatcctggccgccgcctggcacagcgccgacaacccctgcctgatctactacagcctgatcaccatcgaggacaacggctgccagatgagcgacgccgtgaccgtggaggtgacccagtacaacccccccttccagagcgaggacctgatcctgtgccagctgaccgtgcccaacttcagcaaccagaccgcctacctgtacaacgagagcgccgtgtacgtgtgcagcaccggcaccggcaagttcagcctgccccaggagaagatcgtgttcaacgcccagggcgacagcgtgctgggcgccggcgcctgcggcggcgtgcccatcatcttcagcagaaacagcggcctggtgagcatcaccagcagagagaacgtgagcatcctggccgaggacctggagggcagcctggccagcagcgtggccggccccaacagcgagagcatgatcttcgagaccaccaccaagaacgagaccatcgcccaggaggacaagatcaagctgctgaaggccgccttcctgcagtactgcagaaaggacctgggccacgcccagatggtggtggacgagctgttcagcagccacagcgacctggacagcgacagcgagctggacagagccgtgacccagatcagcgtggacctgatggacgactaccccgccagcgaccccagatgggccgagagcgtgcccgaggaggcccccggcttcagcaacaccagcctgatcatcctgcaccagctggaggacaagatgaaggcccacagcttcctgatggacttcatccaccaggtgggcctgttcggcagactgggcagcttccccgtgagaggcacccccatggccaccagactgctgctgtgcgagcacgccgagaagctgagcgccgccatcgtgctgaagaaccaccacagcagactgagcgacctggtgaacaccgccatcctgatcgccctgaacaagagagagtacgagatccccagcaacctgacccccgccgacgtgttcttcagagaggtgagccaggtggacaccatctgcgagtgcctgctggagcacgaggagcaggtgctgagagacgcccccatggacagcatcgagtgggccgaggtggtgatcaacgtgaacaacatcctgaaggacatgctgcaggccgccagccactacagacagaacagaaacagcctgtacagaagagaggagagcctggagaaggagcccgagtacgtgccctggaccgccaccagcggccccggcggcatcagaaccgtgatcatcagacagcacgagatcgtgctgaaggtggcctacccccaggccgacagcaacctgagaaacatcgtgaccgagcagctggtggccctgatcgactgcttcctggacggctacgtgagccagctgaagagcgtggacaagagcagcaacagagagagatacgacaacctggagatggagtacctgcagaagagaagcgacctgctgagccccctgctgagcctgggccagtacctgtgggccgccagcctggccgagaagtactgcgacttcgacatcctggtgcagatgtgcgagcagaccgacaaccagagcagactgcagagatacatgacccagttcgccgaccagaacttcagcgacttcctgttcagatggtacctggagaagggcaagagaggcaagctgctgagccagcccatcagccagcacggccagctggccaacttcctgcaggcccacgagcacctgagctggctgcacgagatcaacagccaggagctggagaaggcccacgccaccctgctgggcctggccaacatggagaccagatacttcgccaagaagaagaccctgctgggcctgagcaagctggccgccctggccagcgacttcagcgaggacatgctgcaggagaagatcgaggagatggccgagcaggagagattcctgctgcaccaggagaccctgcccgagcagctgctggccgagaagcagctgaacctgagcgccatgcccgtgctgaccgccccccagctgatcggcctgtacatctgcgaggagaacagaagagccaacgagtacgacttcaagaaggccctggacctgctggagtacatcgacgaggaggaggacatcaacatcaacgacctgaagctggagatcctgtgcaaggccctgcagagagacaactggagcagcagcgacggcaaggacgaccccatcgaggtgagcaaggacagcatcttcgtgaagatcctgcagaagctgctgaaggacggcatccagctgagcgagtacctgcccgaggtgaaggacctgctgcaggccgaccagctgggcagcctgaagagcaacccctacttcgagttcgtgctgaaggccaactacgagtactacgtgcagggccagatctag

SEQ ID NO: 91712 - DNA, 4428 bp, synthetic construct
  misc_feature 1..4428: note = Description of Artificial Sequence: Synthetic coding sequence
  source 1..4428: mol_type = other DNA
atggccagcggcgccggcggcgtgggcggcggcggcggcggcaagatcagaaccagaagatgccaccagggccccatcaagccctaccagcagggcagacagcagcaccagggcatcctgagcagagtgaccgagagcgtgaagaacatcgtgcccggctggctgcagagatacttcaacaagaacgaggacgtgtgcagctgcagcaccgacaccagcgaggtgcccagatggcccgagaacaaggaggaccacctggtgtacgccgacgaggagagcagcaacatcaccgacggcagaatcacccccgagcccgccgtgagcaacaccgaggagcccagcaccaccagcaccgccagcaactaccccgacgtgctgaccagacccagcctgcacagaagccacctgaacttcagcatgctggagagccccgccctgcactgccagcccagcaccagcagcgccttccccatcggcagcagcggcttcagcctggtgaaggagatcaaggacagcaccagccagcacgacgacgacaacatcagcaccaccagcggcttcagcagcagagccagcgacaaggacatcaccgtgagcaagaacaccagcctgccccccctgtggagccccgaggccgagagaagccacagcctgagccagcacaccgccaccagcagcaagaagcccgccttcaacctgagcgccttcggcaccctgagccccagcctgggcaacagcagcatcctgaagaccagccagctgggcgacagccccttctaccccggcaagaccacctacggcggcgccgccgccgccgtgagacagagcaagctgagaaacaccccctaccaggcccccgtgagaagacagatgaaggccaagcagctgagcgcccagagctacggcgtgaccagcagcaccgccagaagaatcctgcagagcctggagaagatgagcagccccctggccgacgccaagagaatccccagcatcgtgagcagccccctgaacagccccctggacagaagcggcatcgacatcaccgacttccaggccaagagagagaaggtggacagccagtacccccccgtgcagagactgatgacccccaagcccgtgagcatcgccaccaacagaagcgtgtacttcaagcccagcctgacccccagcggcgagttcagaaagaccaaccagagaatcgacaacaagtgcagcaccggctacgagaagaacatgacccccggccagaacagagagcagagagagagcggcttcagctaccccaacttcagcctgcccgccgccaacggcctgagcagcggcgtgggcggcggcggcggcaagatgagaagagagagaaccagattcgtggccagcaagcccctggaggaggaggagatggaggtgcccgtgctgcccaagatcagcctgcccatcaccagcagcagcctgcccaccttcaacttcagcagccccgagatcaccaccagcagccccagccccatcaacagcagccaggccctgaccaacaaggtgcagatgaccagccccagcagcaccggcagccccatgttcaagttcagcagccccatcgtgaagagcaccgaggccaacgtgctgccccccagcagcatcggcttcaccttcagcgtgcccgtggccaagaccgccgagctgagcggcagcagcagcaccctggagcccatcatcagcagcagcgcccaccacgtgaccaccgtgaacagcaccaactgcaagaagaccccccccgaggactgcgagggccccttcagacccgccgagatcctgaaggagggcagcgtgctggacatcctgaagagccccggcttcgccagccccaagatcgacagcgtggccgcccagcccaccgccaccagccccgtggtgtacaccagacccgccatcagcagcttcagcagcagcggcatcggcttcggcgagagcctgaaggccggcagcagctggcagtgcgacacctgcctgctgcagaacaaggtgaccgacaacaagtgcatcgcctgccaggccgccaagctgagccccagagacaccgccaagcagaccggcatcgagacccccaacaagagcggcaagaccaccctgagcgccagcggcaccggcttcggcgacaagttcaagcccgtgatcggcacctgggactgcgacacctgcctggtgcagaacaagcccgaggccatcaagtgcgtggcctgcgagacccccaagcccggcacctgcgtgaagagagccctgaccctgaccgtggtgagcgagagcgccgagaccatgaccgccagcagcagcagctgcaccgtgaccaccggcaccctgggcttcggcgacaagttcaagagacccatcggcagctgggagtgcagcgtgtgctgcgtgagcaacaacgccgaggacaacaagtgcgtgagctgcatgagcgagaagcccggcagcagcgtgcccgccagcagcagcagcaccgtgcccgtgagcctgcccagcggcggcagcctgggcctggagaagttcaagaagcccgagggcagctgggactgcgagctgtgcctggtgcagaacaaggccgacagcaccaagtgcctggcctgcgagagcgccaagcccggcaccaagagcggcttcaagggcttcgacaccagcagcagcagcagcaacagcgccgccagcagcagcttcaagttcggcgtgagcagcagcagcagcggccccagccagaccctgaccagcaccggcaacttcaagttcggcgaccagggcggcttcaagatcggcgtgagcagcgacagcggcagcatcaaccccatgagcgagggcttcaagttcagcaagcccatcggcgacttcaagttcggcgtgagcagcgagagcaagcccgaggaggtgaagaaggacagcaagaacgacaacttcaagttcggcctgagcagcggcctgagcaaccccgtgagcctgacccccttccagttcggcgtgagcaacctgggccaggaggagaagaaggaggagctgcccaagagcagcagcgccggcttcagcttcggcaccggcgtgatcaacagcacccccgcccccgccaacaccatcgtgaccagcgagaacaagagcagcttcaacctgggcaccatcgagaccaagagcgccagcgtggcccccttcacctgcaagaccagcgaggccaagaaggaggagatgcccgccaccaagggcggcttcagcttcggcaacgtggagcccgccagcctgcccagcgccagcgtgttcgtgctgggcagaaccgaggagaagcagcaggagcccgtgaccagcaccagcctggtgttcggcaagaaggccgacaacgaggagcccaagtgccagcccgtgttcagcttcggcaacagcgagcagaccaaggacgagaacagcagcaagagcaccttcagcttcagcatgaccaagcccagcgagaaggagagcgagcagcccgccaaggccaccttcgccttcggcgcccagaccagcaccaccgccgaccagggcgccgccaagcccgtgttcagcttcctgaacaacagcagcagcagcagcagcacccccgccaccagcgccggcggcggcatcttcggcagcagcaccagcagcagcaacccccccgtggccaccttcgtgttcggccagagcagcaaccccgtgagcagcagcgccttcggcaacaccgccgagagcagcaccagccagagcctgctgttcagccaggacagcaagctggccaccaccagcagcaccggcaccgccgtgacccccttcgtgttcggccccggcgccagcagcaacaacaccaccaccagcggcttcggcttcggcgccaccaccaccagcagcagcgccggcagcagcttcgtgttcggcaccggccccagcgcccccagcgccagccccgccttcggcgccaaccagacccccaccttcggccagagccagggcgccagccagcccaacccccccggcttcggcagcatcagcagcagcaccgccctgttccccaccggcagccagcccgccccccccaccttcggcaccgtgagcagcagcagccagccccccgtgttcggccagcagcccagccagagcgccttcggcagcggcaccacccccaacagcagcagcgccttccagttcggcagcagcaccaccaacttcaacttcaccaacaacagccccagcggcgtgttcaccttcggcgccaacagcagcacccccgccgccagcgcccagcccagcggcagcggcggcttccccttcaaccagagccccgccgccttcaccgtgggcagcaacggcaagaacgtgttcagcagcagcggcaccagcttcagcggcagaaagatcaagaccgccgtgagaagaagaaagtag

SEQ ID NO: 91713 - DNA, 4368 bp, synthetic construct
  misc_feature 1..4368: note = Description of Artificial Sequence: Synthetic coding sequence
  source 1..4368: mol_type = other DNA
ggcctgagactgtgcctgagcagacccctgaccagacccggcgccggcagcggcggcggcagcgccatggccagcggcgccggcggcgtgggcggcggcggcggcggcaagatcagaaccagaagatgccaccagggccccatcaagccctaccagcagggcagacagcagcaccagggcatcctgagcagagtgaccgagagcgtgaagaacatcgtgcccggctggctgcagagatacttcaacaagaacgaggacgtgtgcagctgcagcaccgacaccagcgaggtgcccagatggcccgagaacaaggaggaccacctggtgtacgccgacgaggagagcagcaacatcaccgacggcagaatcacccccgagcccgccgtgagcaacaccgaggagcccagcaccaccagcaccgccagcaactaccccgacgtgctgaccagacccagcctgcacagaagccacctgaacttcagcatgctggagagccccgccctgcactgccagcccagcaccagcagcgccttccccatcggcagcagcggcttcagcctggtgaaggagatcaaggacagcaccagccagcacgacgacgacaacatcagcaccaccagcggcttcagcagcagagccagcgacaaggacatcaccgtgagcaagaacaccagcctgccccccctgtggagccccgaggccgagagaagccacagcctgagccagcacaccgccaccagcagcaagaagcccgccttcaacctgagcgccttcggcaccctgagccccagcctgggcaacagcagcatcctgaagaccagccagctgggcgacagccccttctaccccggcaagaccacctacggcggcgccgccgccgccgtgagacagagcaagctgagaaacaccccctaccaggcccccgtgagaagacagatgaaggccaagcagctgagcgcccagagctacggcgtgaccagcagcaccgccagaagaatcctgcagagcctggagaagatgagcagccccctggccgacgccaagagaatccccagcatcgtgagcagccccctgaacagccccctggacagaagcggcatcgacatcaccgacttccaggccaagagagagaaggtggacagccagtacccccccgtgcagagactgatgacccccaagcccgtgagcatcgccaccaacagaagcgtgtacttcaagcccagcctgacccccagcggcgagttcagaaagaccaaccagagaatcgacaacaagtgcagcaccggctacgagaagaacatgacccccggccagaacagagagcagagagagagcggcttcagctaccccaacttcagcctgcccgccgccaacggcctgagcagcggcgtgggcggcggcggcggcaagatgagaagagagagaaccagattcgtggccagcaagcccctggaggaggaggagatggaggtgcccgtgctgcccaagatcagcctgcccatcaccagcagcagcctgcccaccttcaacttcagcagccccgagatcaccaccagcagccccagccccatcaacagcagccaggccctgaccaacaaggtgcagatgaccagccccagcagcaccggcagccccatgttcaagttcagcagccccatcgtgaagagcaccgaggccaacgtgctgccccccagcagcatcggcttcaccttcagcgtgcccgtggccaagaccgccgagctgagcggcagcagcagcaccctggagcccatcatcagcagcagcggcttcgccagccccaagatcgacagcgtggccgcccagcccaccgccaccagccccgtggtgtacaccagacccgccatcagcagcttcagcagcagcggcatcggcttcggcgagagcctgaaggccggcagcagctggcagtgcgacacctgcctgctgcagaacaaggtgaccgacaacaagtgcatcgcctgccaggccgccaagctgagccccagagacaccgccaagcagaccggcatcgagacccccaacaagagcggcaagaccaccctgagcgccagcggcaccggcttcggcgacaagttcaagcccgtgatcggcacctgggactgcgacacctgcctggtgcagaacaagcccgaggccatcaagtgcgtggcctgcgagacccccaagcccggcacctgcgtgaagagagccctgaccctgaccgtggtgagcgagagcgccgagaccatgaccgccagcagcagcagctgcaccgtgaccaccggcaccctgggcttcggcgacaagttcaagagacccatcggcagctgggagtgcagcgtgtgctgcgtgagcaacaacgccgaggacaacaagtgcgtgagctgcatgagcgagaagcccggcagcagcgtgcccgccagcagcagcagcaccgtgcccgtgagcctgcccagcggcggcagcctgggcctggagaagttcaagaagcccgagggcagctgggactgcgagctgtgcctggtgcagaacaaggccgacagcaccaagtgcctggcctgcgagagcgccaagcccggcaccaagagcggcttcaagggcttcgacaccagcagcagcagcagcaacagcgccgccagcagcagcttcaagttcggcgtgagcagcagcagcagcggccccagccagaccctgaccagcaccggcaacttcaagttcggcgaccagggcggcttcaagatcggcgtgagcagcgacagcggcagcatcaaccccatgagcgagggcttcaagttcagcaagcccatcggcgacttcaagttcggcgtgagcagcgagagcaagcccgaggaggtgaagaaggacagcaagaacgacaacttcaagttcggcctgagcagcggcctgagcaaccccgtgagcctgacccccttccagttcggcgtgagcaacctgggccaggaggagaagaaggaggagctgcccaagagcagcagcgccggcttcagcttcggcaccggcgtgatcaacagcacccccgcccccgccaacaccatcgtgaccagcgagaacaagagcagcttcaacctgggcaccatcgagaccaagagcgccagcgtggcccccttcacctgcaagaccagcgaggccaagaaggaggagatgcccgccaccaagggcggcttcagcttcggcaacgtggagcccgccagcctgcccagcgccagcgtgttcgtgctgggcagaaccgaggagaagcagcaggagcccgtgaccagcaccagcctggtgttcggcaagaaggccgacaacgaggagcccaagtgccagcccgtgttcagcttcggcaacagcgagcagaccaaggacgagaacagcagcaagagcaccttcagcttcagcatgaccaagcccagcgagaaggagagcgagcagcccgccaaggccaccttcgccttcggcgcccagaccagcaccaccgccgaccagggcgccgccaagcccgtgttcagcttcctgaacaacagcagcagcagcagcagcacccccgccaccagcgccggcggcggcatcttcggcagcagcaccagcagcagcaacccccccgtggccaccttcgtgttcggccagagcagcaaccccgtgagcagcagcgccttcggcaacaccgccgagagcagcaccagccagagcctgctgttcagccaggacagcaagctggccaccaccagcagcaccggcaccgccgtgacccccttcgtgttcggccccggcgccagcagcaacaacaccaccaccagcggcttcggcttcggcgccaccaccaccagcagcagcgccggcagcagcttcgtgttcggcaccggccccagcgcccccagcgccagccccgccttcggcgccaaccagacccccaccttcggccagagccagggcgccagccagcccaacccccccggcttcggcagcatcagcagcagcaccgccctgttccccaccggcagccagcccgccccccccaccttcggcaccgtgagcagcagcagccagccccccgtgttcggccagcagcccagccagagcgccttcggcagcggcaccacccccaacagcagcagcgccttccagttcggcagcagcaccaccaacttcaacttcaccaacaacagccccagcggcgtgttcaccttcggcgccaacagcagcacccccgccgccagcgcccagcccagcggcagcggcggcttccccttcaaccagagccccgccgccttcaccgtgggcagcaacggcaagaacgtgttcagcagcagcggcaccagcttcagcggcagaaagatcaagaccgccgtgagaagaagaaagtag

SEQ ID NO: 91714 - DNA, 4521 bp, synthetic construct
  misc_feature 1..4521: note = Description of Artificial Sequence: Synthetic coding sequence
  source 1..4521: mol_type = other DNA
atggccagcggcgccggcggcgtgggcggcggcggcggcggcaagatcagaaccagaagatgccaccagggccccatcaagccctaccagcagggcagacagcagcaccagggcatcctgagcagagtgaccgagagcgtgaagaacatcgtgcccggctggctgcagagatacttcaacaagaacgaggacgtgtgcagctgcagcaccgacaccagcgaggtgcccagatggcccgagaacaaggaggaccacctggtgtacgccgacgaggagagcagcaacatcaccgacggcagaatcacccccgagcccgccgtgagcaacaccgaggagcccagcaccaccagcaccgccagcaactaccccgacgtgctgaccagacccagcctgcacagaagccacctgaacttcagcatgctggagagccccgccctgcactgccagcccagcaccagcagcgccttccccatcggcagcagcggcttcagcctggtgaaggagatcaaggacagcaccagccagcacgacgacgacaacatcagcaccaccagcggcttcagcagcagagccagcgacaaggacatcaccgtgagcaagaacaccagcctgccccccctgtggagccccgaggccgagagaagccacagcctgagccagcacaccgccaccagcagcaagaagcccgccttcaacctgagcgccttcggcaccctgagccccagcctgggcaacagcagcatcctgaagaccagccagctgggcgacagccccttctaccccggcaagaccacctacggcggcgccgccgccgccgtgagacagagcaagctgagaaacaccccctaccaggcccccgtgagaagacagatgaaggccaagcagctgagcgcccagagctacggcgtgaccagcagcaccgccagaagaatcctgcagagcctggagaagatgagcagccccctggccgacgccaagagaatccccagcatcgtgagcagccccctgaacagccccctggacagaagcggcatcgacatcaccgacttccaggccaagagagagaaggtggacagccagtacccccccgtgcagagactgatgacccccaagcccgtgagcatcgccaccaacagaagcgtgtacttcaagcccagcctgacccccagcggcgagttcagaaagaccaaccagagaatcgacaacaagtgcagcaccggctacgagaagaacatgacccccggccagaacagagagcagagagagagcggcttcagctaccccaacttcagcctgcccgccgccaacggcctgagcagcggcgtgggcggcggcggcggcaagatgagaagagagagaaccagattcgtggccagcaagcccctggaggaggagagacagggcctgaccgtgctgcccaagctgatcagcagcagctgcgcccaggccatcatccccagctggcccctgaaggtgctgagactgcaggagatggaggtgcccgtgctgcccaagatcagcctgcccatcaccagcagcagcctgcccaccttcaacttcagcagccccgagatcaccaccagcagccccagccccatcaacagcagccaggccctgaccaacaaggtgcagatgaccagccccagcagcaccggcagccccatgttcaagttcagcagccccatcgtgaagagcaccgaggccaacgtgctgccccccagcagcatcggcttcaccttcagcgtgcccgtggccaagaccgccgagctgagcggcagcagcagcaccctggagcccatcatcagcagcagcgcccaccacgtgaccaccgtgaacagcaccaactgcaagaagaccccccccgaggactgcgagggccccttcagacccgccgagatcctgaaggagggcagcgtgctggacatcctgaagagccccggcttcgccagccccaagatcgacagcgtggccgcccagcccaccgccaccagccccgtggtgtacaccagacccgccatcagcagcttcagcagcagcggcatcggcttcggcgagagcctgaaggccggcagcagctggcagtgcgacacctgcctgctgcagaacaaggtgaccgacaacaagtgcatcgcctgccaggccgccaagctgagccccagagacaccgccaagcagaccggcatcgagacccccaacaagagcggcaagaccaccctgagcgccagcggcaccggcttcggcgacaagttcaagcccgtgatcggcacctgggactgcgacacctgcctggtgcagaacaagcccgaggccatcaagtgcgtggcctgcgagacccccaagcccggcacctgcgtgaagagagccctgaccctgaccgtggtgagcgagagcgccgagaccatgaccgccagcagcagcagctgcaccgtgaccaccggcaccctgggcttcggcgacaagttcaagagacccatcggcagctgggagtgcagcgtgtgctgcgtgagcaacaacgccgaggacaacaagtgcgtgagctgcatgagcgagaagcccggcagcagcgtgcccgccagcagcagcagcaccgtgcccgtgagcctgcccagcggcggcagcctgggcctggagaagttcaagaagcccgagggcagctgggactgcgagctgtgcctggtgcagaacaaggccgacagcaccaagtgcctggcctgcgagagcgccaagcccggcaccaagagcggcttcaagggcttcgacaccagcagcagcagcagcaacagcgccgccagcagcagcttcaagttcggcgtgagcagcagcagcagcggccccagccagaccctgaccagcaccggcaacttcaagttcggcgaccagggcggcttcaagatcggcgtgagcagcgacagcggcagcatcaaccccatgagcgagggcttcaagttcagcaagcccatcggcgacttcaagttcggcgtgagcagcgagagcaagcccgaggaggtgaagaaggacagcaagaacgacaacttcaagttcggcctgagcagcggcctgagcaaccccgtgagcctgacccccttccagttcggcgtgagcaacctgggccaggaggagaagaaggaggagctgcccaagagcagcagcgccggcttcagcttcggcaccggcgtgatcaacagcacccccgcccccgccaacaccatcgtgaccagcgagaacaagagcagcttcaacctgggcaccatcgagaccaagagcgccagcgtggcccccttcacctgcaagaccagcgaggccaagaaggaggagatgcccgccaccaagggcggcttcagcttcggcaacgtggagcccgccagcctgcccagcgccagcgtgttcgtgctgggcagaaccgaggagaagcagcaggagcccgtgaccagcaccagcctggtgttcggcaagaaggccgacaacgaggagcccaagtgccagcccgtgttcagcttcggcaacagcgagcagaccaaggacgagaacagcagcaagagcaccttcagcttcagcatgaccaagcccagcgagaaggagagcgagcagcccgccaaggccaccttcgccttcggcgcccagaccagcaccaccgccgaccagggcgccgccaagcccgtgttcagcttcctgaacaacagcagcagcagcagcagcacccccgccaccagcgccggcggcggcatcttcggcagcagcaccagcagcagcaacccccccgtggccaccttcgtgttcggccagagcagcaaccccgtgagcagcagcgccttcggcaacaccgccgagagcagcaccagccagagcctgctgttcagccaggacagcaagctggccaccaccagcagcaccggcaccgccgtgacccccttcgtgttcggccccggcgccagcagcaacaacaccaccaccagcggcttcggcttcggcgccaccaccaccagcagcagcgccggcagcagcttcgtgttcggcaccggccccagcgcccccagcgccagccccgccttcggcgccaaccagacccccaccttcggccagagccagggcgccagccagcccaacccccccggcttcggcagcatcagcagcagcaccgccctgttccccaccggcagccagcccgccccccccaccttcggcaccgtgagcagcagcagccagccccccgtgttcggccagcagcccagccagagcgccttcggcagcggcaccacccccaacagcagcagcgccttccagttcggcagcagcaccaccaacttcaacttcaccaacaacagccccagcggcgtgttcaccttcggcgccaacagcagcacccccgccgccagcgcccagcccagcggcagcggcggcttccccttcaaccagagccccgccgccttcaccgtgggcagcaacggcaagaacgtgttcagcagcagcggcaccagcttcagcggcagaaagatcaagaccgccgtgagaagaagaaagtag

SEQ ID NO: 91715 - DNA, 3555 bp, synthetic construct
  misc_feature 1..3555: note = Description of Artificial Sequence: Synthetic coding sequence
  source 1..3555: mol_type = other DNA
atgatgcagctgctgcagctgctgctgggcctgctgggccccggcggctacctgttcctgctgggcgactgccaggaggtgaccaccctgaccgtgaagtaccaggtgagcgaggaggtgcccagcggcaccgtgatcggcaagctgagccaggagctgggcagagaggagagaagaagacaggccggcgccgccttccaggtgctgcagctgccccaggccctgcccatccaggtggacagcgaggagggcctgctgagcaccggcagaagactggacagagagcagctgtgcagacagtgggacccctgcctggtgagcttcgacgtgctggccaccggcgacctggccctgatccacgtggagatccaggtgctggacatcaacgaccaccagcccagattccccaagggcgagcaggagctggagatcagcgagagcgccagcctgagaaccagaatccccctggacagagccctggaccccgacaccggccccaacaccctgcacacctacaccctgagccccagcgagcacttcgccctggacgtgatcgtgggccccgacgagaccaagcacgccgagctgatcgtggtgaaggagctggacagagagatccacagcttcttcgacctggtgctgaccgcctacgacaacggcaacccccccaagagcggcaccagcctggtgaaggtgaacgtgctggacagcaacgacaacagccccgccttcgccgagagcagcctggccctggagatccaggaggacgccgcccccggcaccctgctgatcaagctgaccgccaccgaccccgaccagggccccaacggcgaggtggagttcttcctgagcaagcacatgccccccgaggtgctggacaccttcagcatcgacgccaagaccggccaggtgatcctgagaagacccctggactacgagaagaaccccgcctacgaggtggacgtgcaggccagagacctgggccccaaccccatccccgcccactgcaaggtgctgatcaaggtgctggacgtgaacgacaacatccccagcatccacgtgacctgggccagccagcccagcctggtgagcgaggccctgcccaaggacagcttcatcgccctggtgatggccgacgacctggacagcggccacaacggcctggtgcactgctggctgagccaggagctgggccacttcagactgaagagaaccaacggcaacacctacatgctgctgaccaacgccaccctggacagagagcagtggcccaagtacaccctgaccctgctggcccaggaccagggcctgcagcccctgagcgccaagaagcagctgagcatccagatcagcgacatcaacgacaacgcccccgtgttcgagaagagcagatacgaggtgagcaccagagagaacaacctgcccagcctgcacctgatcaccatcaaggcccacgacgccgacctgggcatcaacggcaaggtgagctacagaatccaggacagccccgtggcccacctggtggccatcgacagcaacaccggcgaggtgaccgcccagagaagcctgaactacgaggagatggccggcttcgagttccaggtgatcgccgaggacagcggccagcccatgctggccagcagcgtgagcgtgtgggtgagcctgctggacgccaacgacaacgcccccgaggtggtgcagcccgtgctgagcgacggcaaggccagcctgagcgtgctggtgaacgccagcaccggccacctgctggtgcccatcgagacccccaacggcctgggccccgccggcaccgacaccccccccctggccacccacagcagcagacccttcctgctgaccaccatcgtggccagagacgccgacagcggcgccaacggcgagcccctgtacagcatcagaagcggcaacgaggcccacctgttcatcctgaacccccacaccggccagctgttcgtgaacgtgaccaacgccagcagcctgatcggcagcgagtgggagctggagatcgtggtggaggaccagggcagcccccccctgcagaccagagccctgctgagagtgatgttcgtgaccagcgtggaccacctgagagacagcgccagaaagcccggcgccctgagcatgagcatgctgaccgtgatctgcctggccgtgctgctgggcatcttcggcctgatcctggccctgttcatgagcatctgcagaaccgagaagaaggacaacagagcctacaactgcagagaggccgagagcacctacagacagcagcccaagagaccccagaagcacatccagaaggccgacatccacctggtgcccgtgctgagaggccaggccggcgagccctgcgaggtgggccagagccacaaggacgtggacaaggaggccatgatggaggccggctgggacccctgcctgcaggcccccttccacctgacccccaccctgtacagaaccctgagaaaccagggcaaccagggcgcccccgccgagagcagagaggtgctgcaggacaccgtgaacctgctgttcaaccaccccagacagagaaacgccagcagagagaacctgaacctgcccgagccccagcccgccaccggccagcccagaagcagacccctgaaggtggccggcagccccaccggcagactggccggcgaccagggcagcgaggaggccccccagagaccccccgccagcagcgccaccctgagaagacagagacacctgaacggcaaggtgagccccgagaaggagagcggccccagacagatcctgagaagcctggtgagactgagcgtggccgccttcgccgagagaaaccccgtggaggagctgaccgtggacagcccccccgtgcagcagatcagccagctgctgagcctgctgcaccagggccagttccagcccaagcccaaccacagaggcaacaagtacctggccaagcccggcggcagcagaagcgccatccccgacaccgacggccccagcgccagagccggcggccagaccgaccccgagcaggaggagggccccctggaccccgaggaggacctgagcgtgaagcagctgctggaggaggagctgagcagcctgctggaccccagcaccggcctggccctggacagactgagcgcccccgaccccgcctggatggccagactgagcctgcccctgaccaccaactacagagacaacgtgatcagccccgacgccgccgccaccgaggagcccagaaccttccagaccttcggcaaggccgaggcccccgagctgagccccaccggcaccagactggccagcaccttcgtgagcgagatgagcagcctgctggagatgctgctggagcagagaagcagcatgcccgtggaggccgccagcgaggccctgagaagactgagcgtgtgcggcagaaccctgagcctggacctggccaccagcgccgccagcggcatgaaggtgcagggcgaccccggcggcaagaccggcaccgagggcaagagcagaggcagcagcagcagcagcagatgcctgtag

SEQ ID NO: 91716 - DNA, 3999 bp, synthetic construct
  misc_feature 1..3999: note = Description of Artificial Sequence: Synthetic coding sequence
  source 1..3999: mol_type = other DNA
atgagcgacatggactaccccctgcagggccccggcctgctgagcgtgcccaacctgcccgagatcagcagcatcagaagagtgcccctgccccccgagctggtggagcagttcggccacatgcagtgcaactgcatgatgggcgtgttcccccccatcagcagagcctggctgaccatcgacagcgacatcttcatgtggaactacgaggacggcggcgacctggcctacttcgacggcctgagcgagaccatcctggccgtgggcctggtgaagcccaaggccggcatcttccagccccacgtgagacacctgctggtgctggccacccccgtggacatcgtgatcctgggcctgagctacgccaacctgcagaccggcagcggcgtgctgaacgacagcctgagcggcggcatgcagctgctgcccgaccccctgtacagcctgcccaccgacaacacctacctgctgaccatcaccagcaccgacaacggcagaatcttcctggccggcaaggacggctgcctgtacgaggtggcctaccaggccgaggccggctggttcagccagagatgcagaaagatcaaccacagcaagagcagcctgagcttcctggtgcccagcctgctgcagttcaccttcagcgaggacgaccccatcctgcagatcgccatcgacaacagcagaaacatcctgtacaccagaagcgagaagggcgtgatccaggtgtacgacctgggccaggacggccagggcatgagcagagtggccagcgtgagccagaacgccatcgtgagcgccgccggcaacatcgccagaaccatcgacagaagcgtgttcaagcccatcgtgcagatcgccgtgatcgagaacagcgagagcctggactgccagctgctggccgtgacccacgccggcgtgagactgtacttcagcacctgccccttcagacagcccctggccagacccaacaccctgaccctggtgcacgtgagactgccccccggcttcagcgccagcagcaccgtggagaagcccagcaaggtgcacagagccctgtacagcaagggcatcctgctgatggccgccagcgagaacgaggacaacgacatcctgtggtgcgtgaaccacgacaccttccccttccagaagcccatgatggagacccagatgaccgccggcgtggacggccacagctgggccctgagcgccatcgacgagctgaaggtggacaagatcatcacccccctgaacaaggaccacatccccatcaccgacagccccgtggtggtgcagcagcacatgctgccccccaagaagttcgtgctgctgagcgcccagggcagcctgatgttccacaagctgagacccgtggaccagctgagacacctgctggtgagcaacgtgggcggcgacggcgaggagatcgagagattcttcaagctgcaccaggaggaccaggcctgcgccacctgcctgatcctggcctgcagcaccgccgcctgcgacagagaggtgagcgcctgggccaccagagccttcttcagatacggcggcgaggcccagatgagattccccaccaccctgcccccccccagcaacgtgggccccatcctgggcagccccgtgtacagcagcagccccgtgcccagcggcagcccctaccccaaccccagcttcctgggcacccccagccacggcatccagccccccgccatgagcacccccgtgtgcgccctgggcaaccccgccacccaggccaccaacatgagctgcgtgaccggccccgagatcgtgtacagcggcaagcacaacggcatctgcatctacttcagcagaatcatgggcaacatctgggacgccagcctggtggtggagagaatcttcaagagcggcaacagagagatcaccgccatcgagagcagcgtgccctgccagctgctggagagcgtgctgcaggagctgaagggcctgcaggagttcctggacagaaacagccagttcgccggcggccccctgggcaaccccaacaccaccgccaaggtgcagcagagactgatcggcttcatgagacccgagaacggcaacccccagcagatgcagcaggagctgcagagaaagttccacgaggcccagctgagcgagaagatcagcctgcaggccatccagcagctggtgagaaagagctaccaggccctggccctgtggaagctgctgtgcgagcaccagttcaccatcatcgtggccgagctgcagaaggagctgcaggagcagctgaagatcaccaccttcaaggacctggtgatcagagacaaggagctgaccggcgccctgatcgccagcctgatcaactgctacatcagagacaacgccgccgtggacggcatcagcctgcacctgcaggacatctgccccctgctgtacagcaccgacgacgccatctgcagcaaggccaacgagctgctgcagagaagcagacaggtgcagaacaagaccgagaaggagagaatgctgagagagagcctgaaggagtaccagaagatcagcaaccaggtggacctgagcaacgtgtgcgcccagtacagacaggtgagattctacgagggcgtggtggagctgagcctgaccgccgccgagaagaaggacccccagggcctgggcctgcacttctacaagcacggcgagcccgaggaggacatcgtgggcctgcaggccttccaggagagactgaacagctacaagtgcatcaccgacaccctgcaggagctggtgaaccagagcaaggccgccccccagagccccagcgtgcccaagaagcccggcccccccgtgctgagcagcgaccccaacatgctgagcaacgaggaggccggccaccacttcgagcagatgctgaagctgagccagagaagcaaggacgagctgttcagcatcgccctgtacaactggctgatccaggtggacctggccgacaagctgctgcaggtggccagccccttcctggagccccacctggtgagaatggccaaggtggaccagaacagagtgagatacatggacctgctgtggagatactacgagaagaacagaagcttcagcaacgccgccagagtgctgagcagactggccgacatgcacagcaccgagatcagcctgcagcagagactggagtacatcgccagagccatcctgagcgccaagagcagcaccgccatcagcagcatcgccgccgacggcgagttcctgcacgagctggaggagaagatggaggtggccagaatccagctgcagatccaggagaccctgcagagacagtacagccaccacagcagcgtgcaggacgccgtgagccagctggacagcgagctgatggacatcaccaagctgtacggcgagttcgccgaccccttcaagctggccgagtgcaagctggccatcatccactgcgccggctacagcgaccccatcctggtgcagaccctgtggcaggacatcatcgagaaggagctgagcgacagcgtgaccctgagcagcagcgacagaatgcacgccctgagcctgaagatcgtgctgctgggcaagatctacgccggcacccccagattcttccccctggacttcatcgtgcagttcctggagcagcaggtgtgcaccctgaactgggacgtgggcttcgtgatccagaccatgaacgagatcggcgtgcccctgcccagactgctggaggtgtacgaccagctgttcaagagcagagaccccttctggaacagaatgaagaagcccctgcacctgctggactgcatccacgtgctgctgatcagatacgtggagaaccccagccaggtgctgaactgcgagagaagaagattcaccaacctgtgcctggacgccgtgtgcggctacctggtggagctgcagagcatgagcagcagcgtggccgtgcaggccatcaccggcaacttcaagagcctgcaggccaagctggagagactgcactag

SEQ ID NO: 91717 - DNA, 4062 bp, synthetic construct
  misc_feature 1..4062: note = Description of Artificial Sequence: Synthetic coding sequence
  source 1..4062: mol_type = other DNA
atgtaccccgacctgagcgagctgctgatggtgagcgcccccaacaaccccaccgtgagcggcatgagcgacatggactaccccctgcagggccccggcctgctgagcgtgcccaacctgcccgagatcagcagcatcagaagagtgcccctgccccccgagctggtggagcagttcggccacatgcagtgcaactgcatgatgggcgtgttcccccccatcagcagagcctggctgaccatcgacagcgacatcttcatgtggaactacgaggacggcggcgacctggcctacttcgacggcctgagcgagaccatcctggccgtgggcctggtgaagcccaaggccggcatcttccagccccacgtgagacacctgctggtgctggccacccccgtggacatcgtgatcctgggcctgagctacgccaacctgcagaccggcagcggcgtgctgaacgacagcctgagcggcggcatgcagctgctgcccgaccccctgtacagcctgcccaccgacaacacctacctgctgaccatcaccagcaccgacaacggcagaatcttcctggccggcaaggacggctgcctgtacgaggtggcctaccaggccgaggccggctggttcagccagagatgcagaaagatcaaccacagcaagagcagcctgagcttcctggtgcccagcctgctgcagttcaccttcagcgaggacgaccccatcctgcagatcgccatcgacaacagcagaaacatcctgtacaccagaagcgagaagggcgtgatccaggtgtacgacctgggccaggacggccagggcatgagcagagtggccagcgtgagccagaacgccatcgtgagcgccgccggcaacatcgccagaaccatcgacagaagcgtgttcaagcccatcgtgcagatcgccgtgatcgagaacagcgagagcctggactgccagctgctggccgtgacccacgccggcgtgagactgtacttcagcacctgccccttcagacagcccctggccagacccaacaccctgaccctggtgcacgtgagactgccccccggcttcagcgccagcagcaccgtggagaagcccagcaaggtgcacagagccctgtacagcaagggcatcctgctgatggccgccagcgagaacgaggacaacgacatcctgtggtgcgtgaaccacgacaccttccccttccagaagcccatgatggagacccagatgaccgccggcgtggacggccacagctgggccctgagcgccatcgacgagctgaaggtggacaagatcatcacccccctgaacaaggaccacatccccatcaccgacagccccgtggtggtgcagcagcacatgctgccccccaagaagttcgtgctgctgagcgcccagggcagcctgatgttccacaagctgagacccgtggaccagctgagacacctgctggtgagcaacgtgggcggcgacggcgaggagatcgagagattcttcaagctgcaccaggaggaccaggcctgcgccacctgcctgatcctggcctgcagcaccgccgcctgcgacagagaggtgagcgcctgggccaccagagccttcttcagatacggcggcgaggcccagatgagattccccaccaccctgcccccccccagcaacgtgggccccatcctgggcagccccgtgtacagcagcagccccgtgcccagcggcagcccctaccccaaccccagcttcctgggcacccccagccacggcatccagccccccgccatgagcacccccgtgtgcgccctgggcaaccccgccacccaggccaccaacatgagctgcgtgaccggccccgagatcgtgtacagcggcaagcacaacggcatctgcatctacttcagcagaatcatgggcaacatctgggacgccagcctggtggtggagagaatcttcaagagcggcaacagagagatcaccgccatcgagagcagcgtgccctgccagctgctggagagcgtgctgcaggagctgaagggcctgcaggagttcctggacagaaacagccagttcgccggcggccccctgggcaaccccaacaccaccgccaaggtgcagcagagactgatcggcttcatgagacccgagaacggcaacccccagcagatgcagcaggagctgcagagaaagttccacgaggcccagctgagcgagaagatcagcctgcaggccatccagcagctggtgagaaagagctaccaggccctggccctgtggaagctgctgtgcgagcaccagttcaccatcatcgtggccgagctgcagaaggagctgcaggagcagctgaagatcaccaccttcaaggacctggtgatcagagacaaggagctgaccggcgccctgatcgccagcctgatcaactgctacatcagagacaacgccgccgtggacggcatcagcctgcacctgcaggacatctgccccctgctgtacagcaccgacgacgccatctgcagcaaggccaacgagctgctgcagagaagcagacaggtgcagaacaagaccgagaaggagagaatgctgagagagagcctgaaggagtaccagaagatcagcaaccaggtggacctgagcaacgtgtgcgcccagtacagacaggtgagattctacgagggcgtggtggagctgagcctgaccgccgccgagaagaaggacccccagggcctgggcctgcacttctacaagcacggcgagcccgaggaggacatcgtgggcctgcaggccttccaggagagactgaacagctacaagtgcatcaccgacaccctgcaggagctggtgaaccagagcaaggccgccccccagagccccagcgtgcccaagaagcccggcccccccgtgctgagcagcgaccccaacatgctgagcaacgaggaggccggccaccacttcgagcagatgctgaagctgagccagagaagcaaggacgagctgttcagcatcgccctgtacaactggctgatccaggtggacctggccgacaagctgctgcaggtggccagccccttcctggagccccacctggtgagaatggccaaggtggaccagaacagagtgagatacatggacctgctgtggagatactacgagaagaacagaagcttcagcaacgccgccagagtgctgagcagactggccgacatgcacagcaccgagatcagcctgcagcagagactggagtacatcgccagagccatcctgagcgccaagagcagcaccgccatcagcagcatcgccgccgacggcgagttcctgcacgagctggaggagaagatggaggtggccagaatccagctgcagatccaggagaccctgcagagacagtacagccaccacagcagcgtgcaggacgccgtgagccagctggacagcgagctgatggacatcaccaagctgtacggcgagttcgccgaccccttcaagctggccgagtgcaagctggccatcatccactgcgccggctacagcgaccccatcctggtgcagaccctgtggcaggacatcatcgagaaggagctgagcgacagcgtgaccctgagcagcagcgacagaatgcacgccctgagcctgaagatcgtgctgctgggcaagatctacgccggcacccccagattcttccccctggacttcatcgtgcagttcctggagcagcaggtgtgcaccctgaactgggacgtgggcttcgtgatccagaccatgaacgagatcggcgtgcccctgcccagactgctggaggtgtacgaccagctgttcaagagcagagaccccttctggaacagaatgaagaagcccctgcacctgctggactgcatccacgtgctgctgatcagatacgtggagaaccccagccaggtgctgaactgcgagagaagaagattcaccaacctgtgcctggacgccgtgtgcggctacctggtggagctgcagagcatgagcagcagcgtggccgtgcaggccatcaccggcaacttcaagagcctgcaggccaagctggagagactgcactag

SEQ ID NO: 91718 - DNA, 3984 bp, synthetic construct
  misc_feature 1..3984: note = Description of Artificial Sequence: Synthetic coding sequence
  source 1..3984: mol_type = other DNA
atgcccagcagcctgctgggcgccgccatgcccgccagcaccagcgccgccgccctgcaggaggccctggagaacgccggcagactgatcgacagacagctgcaggaggacagaatgtaccccgacctgagcgagctgctgatggtgagcgcccccaacaaccccaccgtgagcggcatgagcgacatggactaccccctgcagggccccggcctgctgagcgtgcccaacctgcccgagatcagcagcatcagaagagtgcccctgccccccgagctggtggagcagttcggccacatgcagtgcaactgcatgatgggcgtgttcccccccatcagcagagcctggctgaccatcgacagcgacatcttcatgtggaactacgaggacggcggcgacctggcctacttcgacggcctgagcgagaccatcctggccgtgggcctggtgaagcccaaggccggcatcttccagccccacgtgagacacctgctggtgctggccacccccgtggacatcgtgatcctgggcctgagctacgccaacctgcagaccggcagcggcgtgctgaacgacagcctgagcggcggcatgcagctgctgcccgaccccctgtacagcctgcccaccgacaacacctacctgctgaccatcaccagcaccgacaacggcagaatcttcctggccggcaaggacggctgcctgtacgaggtggcctaccaggccgaggccggctggttcagccagagatgcagaaagatcaaccacagcaagagcagcctgagcttcctggtgcccagcctgctgcagttcaccttcagcgaggacgaccccatcctgcagatcgccatcgacaacagcagaaacatcctgtacaccagaagcgagaagggcgtgatccaggtgtacgacctgggccaggacggccagggcatgagcagagtggccagcgtgagccagaacgccatcgtgagcgccgccggcaacatcgccagaaccatcgacagaagcgtgttcaagcccatcgtgcagatcgccgtgatcgagaacagcgagagcctggactgccagctgctggccgtgacccacgccggcgtgagactgtacttcagcacctgccccttcagacagcccctggccagacccaacaccctgaccctggtgcacgtgagactgccccccggcttcagcgccagcagcaccgtggagaagcccagcaaggtgcacagagccctgtacagcaagggcatcctgctgatggccgccagcgagaacgaggacaacgacatcctgtggtgcgtgaaccacgacaccttccccttccagaagcccatgatggagacccagatgaccgccggcgtggacggccacagctgggccctgagcgccatcgacgagctgaaggtggacaagatcatcacccccctgaacaaggaccacatccccatcaccgacagccccgtggtggtgcagcagcacatgctgccccccaagaagttcgtgctgctgagcgcccagggcagcctgatgttccacaagctgagacccgtggaccagctgagacacctgctggtgagcaacgtgggcggcgacggcgaggagatcgagagattcttcaagctgcaccaggaggaccaggcctgcgccacctgcctgatcctggcctgcagcaccgccgcctgcgacagagaggtgagcgcctgggccaccagagccttcttcagatacggcggcgaggcccagatgagattccccaccaccctgcccccccccagcaacgtgggccccatcctgggcagccccgtgtacagcagcagccccgtgcccagcggcagcccctaccccaaccccagcttcctgggcacccccagccacggcatccagccccccgccatgagcacccccgtgtgcgccctgggcaaccccgccacccaggccaccaacatgagctgcgtgaccggccccgagatcgtgtacagcggcaagcacaacggcatctgcatctacttcagcagaatcatgggcaacatctgggacgccagcctggtggtggagagaatcttcaagagcggcaacagagagatcaccgccatcgagagcagcgtgccctgccagctgctggagagcgtgctgcaggagctgaagggcctgcaggagttcctggacagaaacagccagttcgccggcggccccctgggcaaccccaacaccaccgccaaggtgcagcagagactgatcggcttcatgagacccgagaacggcaacccccagcagatgcagcaggagctgcagagaaagttccacgaggcccagctgagcgagaagatcagcctgcaggccatccagcagctggtgagaaagagctaccaggccctggccctgtggaagctgctgtgcgagcaccagttcaccatcatcgtggccgagctgcagaaggccaacgagctgctgcagagaagcagacaggtgcagaacaagaccgagaaggagagaatgctgagagagagcctgaaggagtaccagaagatcagcaaccaggtggacctgagcaacgtgtgcgcccagtacagacaggtgagattctacgagggcgtggtggagctgagcctgaccgccgccgagaagaaggacccccagggcctgggcctgcacttctacaagcacggcgagcccgaggaggacatcgtgggcctgcaggccttccaggagagactgaacagctacaagtgcatcaccgacaccctgcaggagctggtgaaccagagcaaggccgccccccagagccccagcgtgcccaagaagcccggcccccccgtgctgagcagcgaccccaacatgctgagcaacgaggaggccggccaccacttcgagcagatgctgaagctgagccagagaagcaaggacgagctgttcagcatcgccctgtacaactggctgatccaggtggacctggccgacaagctgctgcaggtggccagccccttcctggagccccacctggtgagaatggccaaggtggaccagaacagagtgagatacatggacctgctgtggagatactacgagaagaacagaagcttcagcaacgccgccagagtgctgagcagactggccgacatgcacagcaccgagatcagcctgcagcagagactggagtacatcgccagagccatcctgagcgccaagagcagcaccgccatcagcagcatcgccgccgacggcgagttcctgcacgagctggaggagaagatggaggtggccagaatccagctgcagatccaggagaccctgcagagacagtacagccaccacagcagcgtgcaggacgccgtgagccagctggacagcgagctgatggacatcaccaagctgtacggcgagttcgccgaccccttcaagctggccgagtgcaagctggccatcatccactgcgccggctacagcgaccccatcctggtgcagaccctgtggcaggacatcatcgagaaggagctgagcgacagcgtgaccctgagcagcagcgacagaatgcacgccctgagcctgaagatcgtgctgctgggcaagatctacgccggcacccccagattcttccccctggacttcatcgtgcagttcctggagcagcaggtgtgcaccctgaactgggacgtgggcttcgtgatccagaccatgaacgagatcggcgtgcccctgcccagactgctggaggtgtacgaccagctgttcaagagcagagaccccttctggaacagaatgaagaagcccctgcacctgctggactgcatccacgtgctgctgatcagatacgtggagaaccccagccaggtgctgaactgcgagagaagaagattcaccaacctgtgcctggacgccgtgtgcggctacctggtggagctgcagagcatgagcagcagcgtggccgtgcaggccatcaccggcaacttcaagagcctgcaggccaagctggagagactgcactag

SEQ ID NO: 91719 - DNA, 4311 bp, synthetic construct
  misc_feature 1..4311: note = Description of Artificial Sequence: Synthetic coding sequence
  source 1..4311: mol_type = other DNA
atgctgcacctgagcgccgccccccccgcccccccccccgaggtgaccgccaccgccagaccctgcctgtgcagcgtgggcagaagaggcgacggcggcaagatggccgccgccggcgccctggagagaagcttcgtggagctgagcggcgccgagagagagagacccagacacttcagagagttcaccgtgtgcagcatcggcaccgccaacgccgtggccggcgccgtgaagtacagcgagagcgccggcggcttctactacgtggagagcggcaagctgttcagcgtgaccagaaacagattcatccactggaagaccagcggcgacaccctggagctgatggaggagagcctggacatcaacctgctgaacaacgccatcagactgaagttccagaactgcagcgtgctgcccggcggcgtgtacgtgagcgagacccagaacagagtgatcatcctgatgctgaccaaccagaccgtgcacagactgctgctgccccaccccagcagaatgtacagaagcgagctggtggtggacagccagatgcagagcatcttcaccgacatcggcaaggtggacttcaccgacccctgcaactaccagctgatccccgccgtgcccggcatcagccccaacagcaccgccagcaccgcctggctgagcagcgacggcgaggccctgttcgccctgccctgcgccagcggcggcatcttcgtgctgaagctgcccccctacgacatccccggcatggtgagcgtggtggagctgaagcagagcagcgtgatgcagagactgctgaccggctggatgcccaccgccatcagaggcgaccagagccccagcgacagacccctgagcctggccgtgcactgcgtggagcacgacgccttcatcttcgccctgtgccaggaccacaagctgagaatgtggagctacaaggagcagatgtgcctgatggtggccgacatgctggagtacgtgcccgtgaagaaggacctgagactgaccgccggcaccggccacaagctgagactggcctacagccccaccatgggcctgtacctgggcatctacatgcacgcccccaagagaggccagttctgcatcttccagctggtgagcaccgagagcaacagatacagcctggaccacatcagcagcctgttcaccagccaggagaccctgatcgacttcgccctgaccagcaccgacatctgggccctgtggcacgacgccgagaaccagaccgtggtgaagtacatcaacttcgagcacaacgtggccggccagtggaaccccgtgttcatgcagcccctgcccgaggaggagatcgtgatcagagacgaccaggaccccagagagatgtacctgcagagcctgttcacccccggccagttcaccaacgaggccctgtgcaaggccctgcagatcttctgcagaggcaccgagagaaacctggacctgagctggagcgagctgaagaaggaggtgaccctggccgtggagaacgagctgcagggcagcgtgaccgagtacgagttcagccaggaggagttcagaaacctgcagcaggagttctggtgcaagttctacgcctgctgcctgcagtaccaggaggccctgagccaccccctggccctgcacctgaacccccacaccaacatggtgtgcctgctgaagaagggctacctgagcttcctgatccccagcagcctggtggaccacctgtacctgctgccctacgagaacctgctgaccgaggacgagaccaccatcagcgacgacgtggacatcgccagagacgtgatctgcctgatcaagtgcctgagactgatcgaggagagcgtgaccgtggacatgagcgtgatcatggagatgagctgctacaacctgcagagccccgagaaggccgccgagcagatcctggaggacatgatcaccatcgacgtggagaacgtgatggaggacatctgcagcaagctgcaggagatcagaaaccccatccacgccatcggcctgctgatcagagagatggactacgagaccgaggtggagatggagaagggcttcaaccccgcccagcccctgaacatcagaatgaacctgacccagctgtacggcagcaacaccgccggctacatcgtgtgcagaggcgtgcacaagatcgccagcaccagattcctgatctgcagagacctgctgatcctgcagcagctgctgatgagactgggcgacgccgtgatctggggcaccggccagctgttccaggcccagcaggacctgctgcacagaaccgcccccctgctgctgagctactacctgatcaagtggggcagcgagtgcctggccaccgacgtgcccctggacaccctggagagcaacctgcagcacctgagcgtgctggagctgaccgacagcggcgccctgatggccaacagattcgtgagcagcccccagaccatcgtggagctgttcttccaggaggtggccagaaagcacatcatcagccacctgttcagccagcccaaggcccccctgagccagaccggcctgaactggcccgagatgatcaccgccatcaccagctacctgctgcagctgctgtggcccagcaaccccggctgcctgttcctggagtgcctgatgggcaactgccagtacgtgcagctgcaggactacatccagctgctgcacccctggtgccaggtgaacgtgggcagctgcagattcatgctgggcagatgctacctggtgaccggcgagggccagaaggccctggagtgcttctgccaggccgccagcgaggtgggcaaggaggagttcctggacagactgatcagaagcgaggacggcgagatcgtgagcacccccagactgcagtactacgacaaggtgctgagactgctggacgtgatcggcctgcccgagctggtgatccagctggccaccagcgccatcaccgaggccggcgacgactggaagagccaggccaccctgagaacctgcatcttcaagcaccacctggacctgggccacaacagccaggcctacgaggccctgacccagatccccgacagcagcagacagctggactgcctgagacagctggtggtggtgctgtgcgagagaagccagctgcaggacctggtggagttcccctacgtgaacctgcacaacgaggtggtgggcatcatcgagagcagagccagagccgtggacctgatgacccacaactactacgagctgctgtacgccttccacatctacagacacaactacagaaaggccggcaccgtgatgttcgagtacggcatgagactgggcagagaggtgagaaccctgagaggcctggagaagcagggcaactgctacctggccgccctgaactgcctgagactgatcagacccgagtacgcctggatcgtgcagcccgtgagcggcgccgtgtacgacagacccggcgccagccccaagagaaaccacgacggcgagtgcaccgccgcccccaccaacagacagatcgagatcctggagctggaggacctggagaaggagtgcagcctggccagaatcagactgaccctggcccagcacgaccccagcgccgtggccgtggccggcagcagcagcgccgaggagatggtgaccctgctggtgcaggccggcctgttcgacaccgccatcagcctgtgccagaccttcaagctgcccctgacccccgtgttcgagggcctggccttcaagtgcatcaagctgcagttcggcggcgaggccgcccaggccgaggcctgggcctggctggccgccaaccagctgagcagcgtgatcaccaccaaggagagcagcgccaccgacgaggcctggagactgctgagcacctacctggagagatacaaggtgcagaacaacctgtaccaccactgcgtgatcaacaagctgctgagccacggcgtgcccctgcccaactggctgatcaacagctacaagaaggtggacgccgccgagctgctgagactgtacctgaactacgacctgctggaggaggccgtggacctggtgagcgagtacgtggacgccgtgctgggcaagggccaccagtacttcggcatcgagttccccctgagcgccaccgcccccatggtgtggctgccctacagcagcatcgaccagctgctgcaggccctgggcgagaacagcgccaacagccacaacatcgccctgagccagaagatcctggacaagctggaggactaccagcagaaggtggacaaggccaccagagacctgctgtacagaagaaccctgtag

SEQ ID NO: 91720 - DNA, 1452 bp, synthetic construct
  misc_feature 1..1452: note = Description of Artificial Sequence: Synthetic coding sequence
  source 1..1452: mol_type = other DNA
atggtgagcgtggtggagctgaagcagagcagcgtgatgcagagactgctgaccggctggatgcccaccgccatcagaggcgaccagagccccagcgacagacccctgagcctggccgtgcactgcgtggagcacgacgccttcatcttcgccctgtgccaggaccacaagctgagaatgtggagctacaaggagcagatgtgcctgatggtggccgacatgctggagtacgtgcccgtgaagaaggacctgagactgaccgccggcaccggccacaagctgagactggcctacagccccaccatgggcctgtacctgggcatctacatgcacgcccccaagagaggccagagaagaggcttcgccatgctgcccggcctgaagctgctgagcagcagcagcccccccaccagcgccagccagtgcgccggcatcaccagcgtgaaccacagcacccagcccgagttcttcttctgcatcttccagctggtgagcaccgagagcaacagatacagcctggaccacatcagcagcctgttcaccagccaggagaccctgatcgacttcgccctgaccagcaccgacatctgggccctgtggcacgacgccgagaaccagaccgtggtgaagtacatcaacttcgagcacaacgtggccggccagtggaaccccgtgttcatgcagcccctgcccgaggaggagatcgtgatcagagacgaccaggaccccagagagatgtacctgcagagcctgttcacccccggccagttcaccaacgaggccctgtgcaaggccctgcagatcttctgcagaggcaccgagagaaacctggacctgagctggagcgagctgaagaaggaggtgaccctggccgtggagaacgagctgcagggcagcgtgaccgagtacgagttcagccaggaggagttcagaaacctgcagcaggagttctggtgcaagttctacgcctgctgcctgcagtaccaggaggccctgagccaccccctggccctgcacctgaacccccacaccaacatggtgtgcctgctgaagaagggctacctgagcttcctgatccccagcagcctggtggaccacctgtacctgctgccctacgagaacctgctgaccgaggacgagaccaccatcagcgacgacgtggacatcgccagagacgtgatctgcctgatcaagtgcctgagactgatcgaggagagcgtgaccgtggacatgagcgtgatcatggagatgagctgctacaacctgcagagccccgagaaggccgccgagcagatcctggaggacatgatcaccatcgacgtggagaacgtgatggaggacatctgcagcaagctgcaggagatcagaaaccccatccacgccatcggcctgctgatcagagagatggactacgagaccgaggtggagatggagaagggcttcaacccctag

SEQ ID NO: 91721 - DNA, 675 bp, synthetic construct
  misc_feature 1..675: note = Description of Artificial Sequence: Synthetic coding sequence
  source 1..675: mol_type = other DNA
atgctgcacctgagcgccgccccccccgcccccccccccgaggtgaccgccaccgccagaccctgcctgtgcagcgtgggcagaagaggcgacggcggcaagatggccgccgccggcgccctggagagaagcttcgtggagctgagcggcgccgagagagagagacccagacacttcagagagttcaccgtgtgcagcatcggcaccgccaacgccgtggccggcgccgtgaagtacagcgagagcgccggcggcttctactacgtggagagcggcaagctgttcagcgtgaccagaaacagattcatccactggaagaccagcggcgacaccctggagctgatggaggagagcctggacatcaacctgctgaacaacgccatcagactgaagttccagaactgcagcgtgctgcccggcggcgtgtacgtgagcgagacccagaacagagtgatcatcctgatgctgaccaaccagaccgtgcacagactgctgctgccccaccccagcagaatgtacagaagcgtgagctggctgagcgccatcagcttcatcagccagatcaccctgggcgtgaccaacgtggtgctggagagatgcctgctggagctgaaggagatctggatcctggtgatcccccaccaggcctacttcgacagctacagactgaagtag

SEQ ID NO: 91722 - DNA, 6039 bp, synthetic construct
  misc_feature 1..6039: note = Description of Artificial Sequence: Synthetic coding sequence
  source 1..6039: mol_type = other DNA
atggccacccccctggccgtgaacagcgccgccagcctgtggggcccctacaaggacatctggcacaaggtgggcaacgccctgtggagaagacagcccgaggccgtgcacctgctggacaagatcctgaagaagcacaagcccgacttcatcagcctgttcaagaacccccccaagaacgtgcagcagcacgagaaggtgcagaaggccagcaccgagggcgtggccatccagggccagcagggcaccagactgctgcccgagcagctgatcaaggaggccttcatcctgagcgacctgttcgacatcggcgagctggccgccgtggagctgctgctggccggcgagcaccagcagccccacttccccggcctgaccagaggcctggtggccgtgctgctgtactgggacggcaagagatgcatcgccaacagcctgaaggccctgatccagagcagaagaggcaagacctggaccctggagctgagccccgagctggccagcatgaccaccagattcaccgacgagctgatggagcagggcctgacctacaaggtgctgaccctggtgagccagatcgacgtgaacaacgagttcgagaagctgcagagagagagaggcctgggcagcgagaagcacagaaaggaggtgagcgacctgatcaaggagtgcagacagagcctggccgagagcctgttcgcctgggcctgccagagccccctgggcaaggaggacaccctgctgctgatcggccacctggagagagtgaccgtggaggccaacggcagcctggacgccgtgaacctggccctgctgatggccctgctgtactgcttcgacatcagcttcatcgagcagagcaccgaggagagagacgacatgatccaccagctgcccctgctgaccgagaagcagtacatcgccaccatccacagcagactgcaggacagccagctgtggaagctgcccggcctgcaggccaccgtgagactggcctgggccctggccctgagaggcatcagccagctgcccgacgtgaccgccctggccgagttcaccgaggccgacgaggccatggccgagctggccatcgccgacaacgtgttcctgttcctgatggagagcgtggtggtgagcgagtacttctaccaggaggagttctacatcagaagagtgcacaacctgatcaccgacttcctggccctgatgcccatgaaggtgaagcagctgagaaacagagccgacgaggacgccagaatgatccacatgagcatgcagatgggcaacgagccccccatcagcctgagaagagacctggagcacctgatgctgctgatcggcgagctgtacaagaagaaccccttccacctggagctggccctggagtactggtgccccaccgagcccctgcagacccccaccatcatgggcagctacctgggcgtggcccaccagagacccccccagagacaggtggtgctgagcaagttcgtgagacagatgggcgacctgctgccccccaccatctacatcccctacctgaagatgctgcagggcctggccaacggcccccagtgcgcccactactgcttcagcctgctgaaggtgaacggcagcagccacgtggagaacatccagggcgccggcggcagccccgtgagctgggagcacttcttccacagcctgatgctgtaccacgagcacctgagaaaggacctgcccagcgccgacagcgtgcagtacagacacctgcccagcagaggcatcacccagaaggagcaggacggcctgatcgccttcctgcagctgaccagcaccatcatcacctggagcgagaacgccagactggccctgtgcgagcacccccagtggacccccgtggtggtgatcctgggcctgctgcagtgcagcatcccccccgtgctgaaggccgagctgctgaagaccctggccgccttcggcaagagccccgagatcgccgccagcctgtggcagagcctggagtacacccagatcctgcagaccgtgagaatccccagccagagacaggccatcggcatcgaggtggagctgaacgagatcgagagcagatgcgaggagtaccccctgaccagagccttctgccagctgatcagcaccctggtggagagcagcttccccagcaacctgggcgccggcctgagaccccccggcttcgacccctacctgcagttcctgagagacagcgtgttcctgagattcagaaccagagcctacagaagagccgccgagaagtgggaggtggccgaggtggtgctggaggtgttctacaagctgctgagagactacgagccccagctggaggacttcgtggaccagttcgtggagctgcagggcgaggagatcatcgcctacaagccccccggcttcagcctgatgtaccacctgctgaacgagagccccatgctggagctggccctgagcctgctggaggagggcgtgaagcagctggacacctacgcccccttccccggcaagaagcacctggagaaggccgtgcagcactgcctggccctgctgaacctgaccctgcagaaggagaacctgttcatggacctgctgagagagagccagctggccctgatcgtgtgccccctggagcagctgctgcagggcatcaaccccagaaccaagaaggccgacaacgtggtgaacatcgccagatacctgtaccacggcaacaccaaccccgagctggccttcgagagcgccaagatcctgtgctgcatcagctgcaacagcaacatccagatcaagctggtgggcgacttcacccacgaccagagcatcagccagaagctgatggccggcttcgtggagtgcctggactgcgaggacgccgaggagttcgtgagactggaggagggcagcgagctggagaagaagctggtggccatcagacacgagaccagaatccacatcctgaacctgctgatcaccagcctggagtgcaacccccccaacctggccctgtacctgctgggcttcgagctgaagaagcccgtgagcaccaccaacctgcaggaccccggcgtgctgggctgccccagaacctgcctgcacgccatcctgaacatcctggagaagggcaccgagggcagaaccggccccgtggccgtgagagagagcccccagctggccgagctgtgctaccaggtgatctaccagctgtgcgcctgcagcgacaccagcggccccaccatgagatacctgagaaccagccaggacttcctgttcagccagctgcagtacctgcccttcagcaacaaggagtacgagatcagcatgctgaaccagatgagctggctgatgaagaccgccagcatcgagctgagagtgaccagcctgaacagacagagaagccacacccagagactgctgcacctgctgctggacgacatgcccgtgaagccctacagcgacggcgagggcggcatcgaggacgagaacagaagcgtgagcggcttcctgcacttcgacaccgccaccaaggtgagaagaaagatcctgaacatcctggacagcatcgacttcagccaggagatccccgagcccctgcagctggacttcttcgacagagcccagatcgagcaggtgatcgccaactgcgagcacaagaacctgagaggccagaccgtgtgcaacgtgaagctgctgcacagagtgctggtggccgaggtgaacgccctgcagggcatggccgccatcggccagagacccctgctgatggaggagatcagcaccgtgctgcagtacgtggtgggcagaaacaagctgctgcagtgcctgcacgccaagagacacgccctggagagctggagacagctggtggagatcatcctgaccgcctgcccccaggacctgatccaggccgaggacagacagctgatcatcagagacatcctgcaggacgtgcacgacaagatcctggacgacgaggccgcccaggagctgatgcccgtggtggccggcgccgtgttcaccctgaccgcccacctgagccaggccgtgctgaccgagcagaaggagaccagcgtgctgggccccgccgaggcccactacgccttcatgctggacagctgcttcaccagccccccccccgaggagaaccccctggtgggcttcgccagcatcggcgacagcagcctgtacatcatcctgaagaagctgctggacttcatcctgaagaccggcggcggcttccagagagtgagaacccacctgtacggcagcctgctgtactacctgcagatcgcccagagacccgacgagcccgacaccctggaggccgccaagaagaccatgtgggagagactgaccgcccccgaggacgtgttcagcaagctgcagagagagaacatcgccatcatcgagagctacggcgccgccctgatggaggtggtgtgcagagacgcctgcgacggccacgagatcggcagaatgctggccctggccctgctggacagaatcgtgagcgtggacaagcagcagcagtggctgctgtacctgagcaacagcggctacctgaaggtgctggtggacagcctggtggaggacgacagaaccctgcagagcctgctgaccccccagccccccctgctgaaggccctgtacacctacgagagcaagatggccttcctgaccagagtggccaagatccagcagggcgccctggagctgctgagaagcggcgtgatcgtgagactggcccagtgccaggtgtacgacatgagacccgagaccgacccccagagcatgttcggcatgagagacccccccatgttcatccccacccccgtggacagatacagacagatcctgctgcccgccctgcagctgtgccaggtgatcctgaccagcagcatggcccagcacctgcaggccgccggccaggtgctgcagttcctgatcagccacagcgacaccatccaggccatcctgagatgccaggacgtgagcgccggcagcctgcaggagctggccctgctgaccggcatcatcagcaaggccgccctgcccggcatcctgagcgagctggacgtggacgtgaacgagggcagcctgatggagctgcagggccacatcggcagattccagagacagtgcctgggcctgctgagcagattcggcggcagcgacagactgagacagttcaagttccaggacgacaacgtggagggcgacaaggtgagcaagaaggacgagatcgagctggccatgcagcagatctgcgccaacgtgatggagtactgccagagcctgatgctgcagagcagccccaccttccagcacgccgtgtgcctgttcacccccagcctgagcgagaccgtgaacagagacggccccagacaggacacccaggcccccgtggtgccctactggagactgcccggcctgggcatcatcatctacctgctgaagcagagcgccaacgacttcttcagctactacgacagccacagacagagcgtgagcaagctgcagaacgtggagcagctgccccccgacgagatcaaggagctgtgccagagcgtgatgcccgccggcgtggacaagatcagcaccgcccagaagtacgtgctggccagaagaagactggtgaaggtgatcaacaacagagccaagctgctgagcctgtgcagcttcatcatcgagacctgcctgttcatcctgtggagacacctggagtactacctgctgcactgcatgcccaccgacagccaggacagcctgttcgccagcagaaccctgttcaagagcagaagactgcaggacagcttcgccagcgagaccaacctggacttcagaagcggcctggccatcgtgagccagcacgacctggaccagctgcaggccgacgccatcaacgccttcggcgagagcctgcagaagaagctgctggacatcgagggcctgtacagcaaggtgagaagcagatacagcttcatccaggccctggtgagaagaatcagaggcctgctgagaatcagcagaaactag

SEQ ID NO: 91723 - DNA, 750 bp, synthetic construct
  misc_feature 1..750: note = Description of Artificial Sequence: Synthetic coding sequence
  source 1..750: mol_type = other DNA
atgagcctgagaaactacagcgagagagaggtgagcgacctgatcaaggagtgcagacagagcctggccgagagcctgttcgcctgggcctgccagagccccctgggcaaggaggacaccctgctgctgatcggccacctggagagagtgaccgtggaggccaacggcagcctggacgccgtgaacctggccctgctgatggccctgctgtactgcttcgacatcagcttcatcgagcagagcaccgaggagagagacgacatgatccaccagctgcccctgctgaccgagaagcagtacatcgccaccatccacagcagactgcaggacagccagctgtggaagctgcccggcctgcaggccaccgtgagactggcctgggccctggccctgagaggcatcagccagctgcccgacgtgaccgccctggccgagttcaccgaggccgacgaggccatggccgagctggccatcgccgacaacgtgttcctgttcctgatggagagcgtggtggtgagcgagtacttctaccaggaggagttctacatcagaagagtgcacaacctgatcaccgacttcctggccctgatgcccatgaaggtgaagcagctgagaaacagagccgacgaggacgccagaatgatccacatgagcatgcagatgggcaacgagccccccatcagcctgagaagagacctggagcacctgatgctgctggtgagcaagctgctggtgctgagactgaactag

SEQ ID NO: 91724 - DNA, 5664 bp, synthetic construct
  misc_feature 1..5664: note = Description of Artificial Sequence: Synthetic coding sequence
  source 1..5664: mol_type = other DNA
atggccgccagaggcagaggcctgctgctgctgaccctgagcgtgctgctggccgccggccccagcgccgccgccgccaagctgaacatccccaaggtgctgctgcccttcaccagagccaccagagtgaacttcaccctggaggccagcgagggctgctacagatggctgagcaccagacccgaggtggccagcatcgagcccctgggcctggacgagcagcagtgcagccagaaggccgtggtgcaggccagactgacccagcccgccagactgaccagcatcatcttcgccgaggacatcaccaccggccaggtgctgagatgcgacgccatcgtggacctgatccacgacatccagatcgtgagcaccaccagagagctgtacctggaggacagccccctggagctgaagatccaggccctggacagcgagggcaacaccttcagcaccctggccggcctggtgttcgagtggaccatcgtgaaggacagcgaggccgacagattcagcgacagccacaacgccctgagaatcctgaccttcctggagagcacctacatcccccccagctacatcagcgagatggagaaggccgccaagcagggcgacaccatcctggtgagcggcatgaagaccggcagcagcaagctgaaggccagaatccaggaggccgtgtacaagaacgtgagacccgccgaggtgagactgctgatcctggagaacatcctgctgaaccccgcctacgacgtgtacctgatggtgggcaccagcatccactacaaggtgcagaagatcagacagggcaagatcaccgagctgagcatgcccagcgaccagtacgagctgcagctgcagaacagcatccccggccccgagggcgaccccgccagacccgtggccgtgctggcccaggacaccagcatggtgaccgccctgcagctgggccagagcagcctggtgctgggccacagaagcatcagaatgcagggcgccagcagactgcccaacagcaccatctacgtggtggagcccggctacctgggcttcaccgtgcaccccggcgacagatgggtgctggagaccggcagactgtacgagatcaccatcgaggtgttcgacaagttcagcaacaaggtgtacgtgagcgacaacatcagaatcgagaccgtgctgcccgccgagttcttcgaggtgctgagcagcagccagaacggcagctaccacagaatcagagccctgaagagaggccagaccgccatcgacgccgccctgaccagcgtggtggaccaggacggcggcgtgcacatcctgcaggtgcccgtgtggaaccagcaggaggtggagatccacatccccatcaccctgtaccccagcatcctgaccttcccctggcagcccaagaccggcgcctaccagtacaccatcagagcccacggcggcagcggcaacttcagctggagcagcagcagccacctggtggccaccgtgaccgtgaagggcgtgatgaccaccggcagcgacatcggcttcagcgtgatccaggcccacgacgtgcagaaccccctgcacttcggcgagatgaaggtgtacgtgatcgagccccacagcatggagttcgccccctgccaggtggaggccagagtgggccaggccctggagctgcccctgagaatcagcggcctgatgcccggcggcgccagcgaggtggtgaccctgagcgactgcagccacttcgacctggccgtggaggtggagaaccagggcgtgttccagcccctgcccggcagactgccccccggcagcgagcactgcagcggcatcagagtgaaggccgaggcccagggcagcaccaccctgctggtgagctacagacacggccacgtgcacctgagcgccaagatcaccatcgccgcctacctgcccctgaaggccgtggaccccagcagcgtggccctggtgaccctgggcagcagcaaggagatgctgttcgagggcggccccagaccctggatcctggagcccagcaagttcttccagaacgtgaccgccgaggacaccgacagcatcggcctggccctgttcgccccccacagcagcagaaactaccagcagcactggatcctggtgacctgccaggccctgggcgagcaggtgatcgccctgagcgtgggcaacaagcccagcctgaccaaccccttccccgccgtggagcccgccgtggtgaagttcgtgtgcgccccccccagcagactgaccctggcccccgtgtacaccagcccccagctggacatgagctgccccctgctgcagcagaacaagcaggtggtgcccgtgagcagccacagaaaccccagactggacctggccgcctacgaccaggagggcagaagattcgacaacttcagcagcctgagcatccagtgggagagcaccagacccgtgctggccagcatcgagcccgagctgcccatgcagctggtgagccaggacgacgagagcggccagaagaagctgcacggcctgcaggccatcctggtgcacgaggccagcggcaccaccgccatcaccgccaccgccaccggctaccaggagagccacctgagcagcgccagaaccaagcagccccacgaccccctggtgcccctgagcgccagcatcgagctgatcctggtggaggacgtgagagtgagccccgaggaggtgaccatctacaaccaccccggcatccaggccgagctgagaatcagagagggcagcggctacttcttcctgaacaccagcaccgccgacgtggtgaaggtggcctaccaggaggccagaggcgtggccatggtgcaccccctgctgcccggcagcagcaccatcatgatccacgacctgtgcctggtgttccccgcccccgccaaggccgtggtgtacgtgagcgacatccaggagctgtacatcagagtggtggacaaggtggagatcggcaagaccgtgaaggcctacgtgagagtgctggacctgcacaagaagcccttcctggccaagtacttccccttcatggacctgaagctgagagccgccagccccatcatcaccctggtggccctggacgaggccctggacaactacaccatcaccttcctgatcagaggcgtggccatcggccagaccagcctgaccgccagcgtgaccaacaaggccggccagagaatcaacagcgccccccagcagatcgaggtgttcccccccttcagactgatgcccagaaaggtgaccctgctgatcggcgccaccatgcaggtgaccagcgagggcggcccccagccccagagcaacatcctgttcagcatcagcaacgagagcgtggccctggtgagcgccgccggcctggtgcagggcctggccatcggcaacggcaccgtgagcggcctggtgcaggccgtggacgccgagaccggcaaggtggtgatcatcagccaggacctggtgcaggtggaggtgctgctgctgagagccgtgagaatcagagcccccatcatgagaatgagaaccggcacccagatgcccatctacgtgaccggcatcaccaaccaccagaaccccttcagcttcggcaacgccgtgcccggcctgaccttccactggagcgtgaccaagagagacgtgctggacctgagaggcagacaccacgaggccagcatcagactgcccagccagtacaacttcgccatgaacgtgctgggcagagtgaagggcagaaccggcctgagagtggtggtgaaggccgtggaccccaccagcggccagctgtacggcctggccagagagctgagcgacgagatccaggtgcaggtgttcgagaagctgcagctgctgaaccccgagatcgaggccgagcagatcctgatgagccccaacagctacatcaagctgcagaccaacagagacggcgccgccagcctgagctacagagtgctggacggccccgagaaggtgcccgtggtgcacgtggacgagaagggcttcctggccagcggcagcatgatcggcaccagcaccatcgaggtgatcgcccaggagcccttcggcgccaaccagaccatcatcgtggccgtgaaggtgagccccgtgagctacctgagagtgagcatgagccccgtgctgcacacccagaacaaggaggccctggtggccgtgcccctgggcatgaccgtgaccttcaccgtgcacttccacgacaacagcggcgacgtgttccacgcccacagcagcgtgctgaacttcgccaccaacagagacgacttcgtgcagatcggcaagggccccaccaacaacacctgcgtggtgagaaccgtgagcgtgggcctgaccctgctgagagtgtgggacgccgagcaccccggcctgagcgacttcatgcccctgcccgtgctgcaggccatcagccccgagctgagcggcgccatggtggtgggcgacgtgctgtgcctggccaccgtgctgaccagcctggagggcctgagcggcacctggagcagcagcgccaacagcatcctgcacatcgaccccaagaccggcgtggccgtggccagagccgtgggcagcgtgaccgtgtactacgaggtggccggccacctgagaacctacaaggaggtggtggtgagcgtgccccagagaatcatggccagacacctgcaccccatccagaccagcttccaggaggccaccgccagcaaggtgatcgtggccgtgggcgacagaagcagcaacctgagaggcgagtgcacccccacccagagagaggtgatccaggccctgcaccccgagaccctgatcagctgccagagccagttcaagcccgccgtgttcgacttccccagccaggacgtgttcaccgtggagccccagttcgacaccgccctgggccagtacttctgcagcatcaccatgcacagactgaccgacaagcagagaaagcacctgagcatgaagaagaccgccctggtggtgagcgccagcctgagcagcagccacttcagcaccgagcaggtgggcgccgaggtgcccttcagccccggcctgttcgccgaccaggccgagatcctgctgagcaaccactacaccagcagcgagatcagagtgttcggcgcccccgaggtgctggagaacctggaggtgaagagcggcagccccgccgtgctggccttcgccaaggagaagagcttcggctggcccagcttcatcacctacaccgtgggcgtgctggaccccgccgccggcagccagggccccctgagcaccaccctgaccttcagcagccccgtgaccaaccaggccatcgccatccccgtgaccgtggccttcgtggtggacagaagaggccccggcccctacggcgccagcctgttccagcacttcctggacagctaccaggtgatgttcttcaccctgttcgccctgctggccggcaccgccgtgatgatcatcgcctaccacaccgtgtgcacccccagagacctggccgtgcccgccgccctgacccccagagccagccccggccacagcccccactacttcgccgccagcagccccaccagccccaacgccctgccccccgccagaaaggccagcccccccagcggcctgtggagccccgcctacgccagccactag

SEQ ID NO: 91725 - DNA, 6273 bp, synthetic construct
  misc_feature 1..6273: note = Description of Artificial Sequence: Synthetic coding sequence
  source 1..6273: mol_type = other DNA
atgggcgacgagatggacgccatgatccccgagagagagatgaaggacttccagttcagagccctgaagaaggtgagaatcttcgacagccccgaggagctgcccaaggagagaagcagcctgctggccgtgagcaacaagtacggcctggtgttcgccggcggcgccagcggcctgcagatcttccccaccaagaacctgctgatccagaacaagcccggcgacgaccccaacaagatcgtggacaaggtgcagggcctgctggtgcccatgaagttccccatccaccacctggccctgagctgcgacaacctgaccctgagcgcctgcatgatgagcagcgagtacggcagcatcatcgccttcttcgacgtgagaaccttcagcaacgaggccaagcagcagaagagacccttcgcctaccacaagctgctgaaggacgccggcggcatggtgatcgacatgaagtggaaccccaccgtgcccagcatggtggccgtgtgcctggccgacggcagcatcgccgtgctgcaggtgaccgagaccgtgaaggtgtgcgccaccctgcccagcaccgtggccgtgaccagcgtgtgctggagccccaagggcaagcagctggccgtgggcaagcagaacggcaccgtggtgcagtacctgcccaccctgcaggagaagaaggtgatcccctgcccccccttctacgagagcgaccaccccgtgagagtgctggacgtgctgtggatcggcacctacgtgttcgccatcgtgtacgccgccgccgacggcaccctggagaccagccccgacgtggtgatggccctgctgcccaagaaggaggagaagcaccccgagatcttcgtgaacttcatggagccctgctacggcagctgcaccgagagacagcaccactactacctgagctacatcgaggagtgggacctggtgctggccgccagcgccgccagcaccgaggtgagcatcctggccagacagagcgaccagatcaactgggagagctggctgctggaggacagcagcagagccgagctgcccgtgaccgacaagagcgacgacagcctgcccatgggcgtggtggtggactacaccaaccaggtggagatcaccatcagcgacgagaagaccctgccccccgcccccgtgctgatgctgctgagcaccgacggcgtgctgtgccccttctacatgatcaaccagaaccccggcgtgaagagcctgatcaagacccccgagagactgagcctggagggcgagagacagcccaagagccccggcagcacccccaccacccccaccagcagccaggccccccagaagctggacgccagcgccgccgccgcccccgccagcctgccccccagcagccccgccgcccccatcgccaccttcagcctgctgcccgccggcggcgcccccaccgtgttcagcttcggcagcagcagcctgaagagcagcgccaccgtgaccggcgagccccccagctacagcagcggcagcgacagcagcaaggccgcccccggccccggccccagcaccttcagcttcgtgccccccagcaaggccagcctggcccccacccccgccgccagccccgtggcccccagcgccgccagcttcagcttcggcagcagcggcttcaagcccaccctggagagcacccccgtgcccagcgtgagcgcccccaacatcgccatgaagcccagcttcccccccagcaccagcgccgtgaaggtgaacctgagcgagaagttcaccgccgccgccaccagcacccccgtgagcagcagccagagcgccccccccatgagccccttcagcagcgccagcaagcccgccgccagcggccccctgagccaccccacccccctgagcgccccccccagcagcgtgcccctgaagagcagcgtgctgcccagccccagcggcagaagcgcccagggcagcagcagccccgtgcccagcatggtgcagaagagccccagaatcaccccccccgccgccaagcccggcagcccccaggccaagagcctgcagcccgccgtggccgagaagcagggccaccagtggaaggacagcgaccccgtgatggccggcatcggcgaggagatcgcccacttccagaaggagctggaggagctgaaggccagaaccagcaaggcctgcttccaggtgggcaccagcgaggagatgaagatgctgagaaccgagagcgacgacctgcacaccttcctgctggagatcaaggagaccaccgagagcctgcacggcgacatcagcagcctgaagaccaccctgctggagggcttcgccggcgtggaggaggccagagagcagaacgagagaaacagagacagcggctacctgcacctgctgtacaagagacccctggaccccaagagcgaggcccagctgcaggagatcagaagactgcaccagtacgtgaagttcgccgtgcaggacgtgaacgacgtgctggacctggagtgggaccagcacctggagcagaagaagaagcagagacacctgctggtgcccgagagagagaccctgttcaacaccctggccaacaacagagagatcatcaaccagcagagaaagagactgaaccacctggtggacagcctgcagcagctgagactgtacaagcagaccagcctgtggagcctgagcagcgccgtgcccagccagagcagcatccacagcttcgacagcgacctggagagcctgtgcaacgccctgctgaagaccaccatcgagagccacaccaagagcctgcccaaggtgcccgccaagctgagccccatgaagcaggcccagctgagaaacttcctggccaagagaaagaccccccccgtgagaagcaccgcccccgccagcctgagcagaagcgccttcctgagccagagatactacgaggacctggacgaggtgagcagcaccagcagcgtgagccagagcctggagagcgaggacgccagaaccagctgcaaggacgacgaggccgtggtgcaggcccccagacacgcccccgtggtgagaacccccagcatccagcccagcctgctgccccacgccgcccccttcgccaagagccacctggtgcacggcagcagccccggcgtgatgggcaccagcgtggccaccagcgccagcaagatcatcccccagggcgccgacagcaccatgctggccaccaagaccgtgaagcacggcgcccccagccccagccaccccatcagcgccccccaggccgccgccgccgccgccctgagaagacagatggccagccaggcccccgccgtgaacaccctgaccgagagcaccctgaagaacgtgccccaggtggtgaacgtgcaggagctgaagaacaaccccgccacccccagcaccgccatgggcagcagcgtgccctacagcaccgccaagaccccccaccccgtgctgacccccgtggccgccaaccaggccaagcagggcagcctgatcaacagcctgaagcccagcggccccacccccgccagcggccagctgagcagcggcgacaaggccagcggcaccgccaagatcgagaccgccgtgaccagcacccccagcgccagcggccagttcagcaagcccttcagcttcagccccagcggcaccggcttcaacttcggcatcatcacccccacccccagcagcaacttcaccgccgcccagggcgccacccccagcaccaaggagagcagccagcccgacgccttcagcagcggcggcggcagcaagcccagctacgaggccatccccgagagcagcccccccagcggcatcaccagcgccagcaacaccacccccggcgagcccgccgccagcagcagcagacccgtggcccccagcggcaccgccctgagcaccaccagcagcaagctggagaccccccccagcaagctgggcgagctgctgttccccagcagcctggccggcgagaccctgggcagcttcagcggcctgagagtgggccaggccgacgacagcaccaagcccaccaacaaggccagcagcaccagcctgaccagcacccagcccaccaagaccagcggcgtgcccagcggcttcaacttcaccgccccccccgtgctgggcaagcacaccgagccccccgtgaccagcagcgccaccaccaccagcgtggccccccccgccgccaccagcaccagcagcaccgccgtgttcggcagcctgcccgtgaccagcgccggcagcagcggcgtgatcagcttcggcggcaccagcctgagcgccggcaagaccagcttcagcttcggcagccagcagaccaacagcaccgtgccccccagcgcccccccccccaccaccgccgccacccccctgcccaccagcttccccaccctgagcttcggcagcctgctgagcagcgccaccacccccagcctgcccatgagcgccggcagaagcaccgaggaggccaccagcagcgccctgcccgagaagcccggcgacagcgaggtgagcgccagcgccgccagcctgctggaggagcagcagagcgcccagctgccccaggcccccccccagaccagcgacagcgtgaagaaggagcccgtgctggcccagcccgccgtgagcaacagcggcaccgccgccagcagcaccagcctggtggccctgagcgccgaggccacccccgccaccaccggcgtgcccgacgccagaaccgaggccgtgccccccgccagcagcttcagcgtgcccggccagaccgccgtgaccgccgccgccatcagcagcgccggccccgtggccgtggagaccagcagcacccccatcgccagcagcaccaccagcatcgtggcccccggccccagcgccgaggccgccgccttcggcaccgtgaccagcggcagcagcgtgttcgcccagccccccgccgccagcagcagcagcgccttcaaccagctgaccaacaacaccgccaccgcccccagcgccacccccgtgttcggccaggtggccgccagcaccgcccccagcctgttcggccagcagaccggcagcaccgccagcaccgccgccgccaccccccaggtgagcagcagcggcttcagcagccccgccttcggcaccaccgcccccggcgtgttcggccagaccaccttcggccaggccagcgtgttcggccagagcgccagcagcgccgccagcgtgttcagcttcagccagcccggcttcagcagcgtgcccgccttcggccagcccgccagcagcacccccaccagcaccagcggcagcgtgttcggcgccgccagcagcaccagcagcagcagcagcttcagcttcggccagagcagccccaacaccggcggcggcctgttcggccagagcaacgcccccgccttcggccagagccccggcttcggccagggcggcagcgtgttcggcggcaccagcgccgccaccaccaccgccgccaccagcggcttcagcttctgccaggccagcggcttcggcagcagcaacaccggcagcgtgttcggccaggccgccagcaccggcggcatcgtgttcggccagcagagcagcagcagcagcggcagcgtgttcggcagcggcaacaccggcagaggcggcggcttcttcagcggcctgggcggcaagcccagccaggacgccgccaacaagaaccccttcagcagcgccagcggcggcttcggcagcaccgccaccagcaacaccagcaacctgttcggcaacagcggcgccaagaccttcggcggcttcgccagcagcagcttcggcgagcagaagcccaccggcaccttcagcagcggcggcggcagcgtggccagccagggcttcggcttcagcagccccaacaagaccggcggcttcggcgccgcccccgtgttcggcagcccccccaccttcggcggcagccccggcttcggcggcgtgcccgccttcggcagcgcccccgccttcaccagccccctgggcagcaccggcggcaaggtgttcggcgagggcaccgccgccgccagcgccggcggcttcggcttcggcagcagcagcaacaccaccagcttcggcaccctggccagccagaacgcccccaccttcggcagcctgagccagcagaccagcggcttcggcacccagagcagcggcttcagcggcttcggcagcggcaccggcggcttcagcttcggcagcaacaacagcagcgtgcagggcttcggcggctggagaagctag

SEQ ID NO: 91726 - DNA, 6243 bp, synthetic construct
  misc_feature 1..6243: note = Description of Artificial Sequence: Synthetic coding sequence
  source 1..6243: mol_type = other DNA
atgggcgacgagatggacgccatgatccccgagagagagatgaaggacttccagttcagagccctgaagaaggtgagaatcttcgacagccccgaggagctgcccaaggagagaagcagcctgctggccgtgagcaacaagtacggcctggtgttcgccggcggcgccagcggcctgcagatcttccccaccaagaacctgctgatccagaacaagcccggcgacgaccccaacaagatcgtggacaaggtgcagggcctgctggtgcccatgaagttccccatccaccacctggccctgagctgcgacaacctgaccctgagcgcctgcatgatgagcagcgagtacggcagcatcatcgccttcttcgacgtgagaaccttcagcaacgaggccaagcagcagaagagacccttcgcctaccacaagctgctgaaggacgccggcggcatggtgatcgacatgaagtggaaccccaccgtgcccagcatggtggccgtgtgcctggccgacggcagcatcgccgtgctgcaggtgaccgagaccgtgaaggtgtgcgccaccctgcccagcaccgtggccgtgaccagcgtgtgctggagccccaagggcaagcagctggccgtgggcaagcagaacggcaccgtggtgcagtacctgcccaccctgcaggagaagaaggtgatcccctgcccccccttctacgagagcgaccaccccgtgagagtgctggacgtgctgtggatcggcacctacgtgttcgccatcgtgtacgccgccgccgacggcaccctggagaccagccccgacgtggtgatggccctgctgcccaagaaggaggagaagcaccccgagatcttcgtgaacttcatggagccctgctacggcagctgcaccgagagacagcaccactactacctgagctacatcgaggagtgggacctggtgctggccgccagcgccgccagcaccgaggtgagcatcctggccagacagagcgaccagatcaactgggagagctggctgctggaggacagcagcagagccgagctgcccgtgaccgacaagagcgacgacagcctgcccatgggcgtggtggtggactacaccaaccaggtggagatcaccatcagcgacgagaagaccctgccccccgcccccgtgctgatgctgctgagcaccgacggcgtgctgtgccccttctacatgatcaaccagaaccccggcgtgaagagcctgatcaagacccccgagagactgagcctggagggcgagagacagcccaagagccccggcagcacccccaccacccccaccagcagccaggccccccagaagctggacgccagcgccgccgccgcccccgccagcctgccccccagcagccccgccgcccccatcgccaccttcagcctgctgcccgccggcggcgcccccaccgtgttcagcttcggcagcagcagcctgaagagcagcgccaccgtgaccggcgagccccccagctacagcagcggcagcgacagcagcaaggccgcccccggccccggccccagcaccttcagcttcgtgccccccagcaaggccagcctggcccccacccccgccgccagccccgtggcccccagcgccgccagcttcagcttcggcagcagcggcttcaagcccaccctggagagcacccccgtgcccagcgtgagcgcccccaacatcgccatgaagcccagcttcccccccagcaccagcgccgtgaaggtgaacctgagcgagaacagcagccagagcgccccccccatgagccccttcagcagcgccagcaagcccgccgccagcggccccctgagccaccccacccccctgagcgccccccccagcagcgtgcccctgaagagcagcgtgctgcccagccccagcgccggcagaagcgcccagggcagcagcagccccgtgcccagcatggtgcagaagagccccagaatcaccccccccgccgccaagcccggcagcccccaggccaagagcctgcagcccgccgtggccgagaagcagggccaccagtggaaggacagcgaccccgtgatggccggcatcggcgaggagatcgcccacttccagaaggagctggaggagctgaaggccagaaccagcaaggcctgcttccaggtgggcaccagcgaggagatgaagatgctgagaaccgagagcgacgacctgcacaccttcctgctggagatcaaggagaccaccgagagcctgcacggcgacatcagcagcctgaagaccaccctgctggagggcttcgccggcgtggaggaggccagagagcagaacgagagaaacagagacagcggctacctgcacctgctgtacaagagacccctggaccccaagagcgaggcccagctgcaggagatcagaagactgcaccagtacgtgaagttcgccgtgcaggacgtgaacgacgtgctggacctggagtgggaccagcacctggagcagaagaagaagcagagacacctgctggtgcccgagagagagaccctgttcaacaccctggccaacaacagagagatcatcaaccagcagagaaagagactgaaccacctggtggacagcctgcagcagctgagactgtacaagcagaccagcctgtggagcctgagcagcgccgtgcccagccagagcagcatccacagcttcgacagcgacctggagagcctgtgcaacgccctgctgaagaccaccatcgagagccacaccaagagcctgcccaaggtgcccgccaagctgagccccatgaagcaggcccagctgagaaacttcctggccaagagaaagaccccccccgtgagaagcaccgcccccgccagcctgagcagaagcgccttcctgagccagagatactacgaggacctggacgaggtgagcagcaccagcagcgtgagccagagcctggagagcgaggacgccagaaccagctgcaaggacgacgaggccgtggtgcaggcccccagacacgcccccgtggtgagaacccccagcatccagcccagcctgctgccccacgccgcccccttcgccaagagccacctggtgcacggcagcagccccggcgtgatgggcaccagcgtggccaccagcgccagcaagatcatcccccagggcgccgacagcaccatgctggccaccaagaccgtgaagcacggcgcccccagccccagccaccccatcagcgccccccaggccgccgccgccgccgccctgagaagacagatggccagccaggcccccgccgtgaacaccctgaccgagagcaccctgaagaacgtgccccaggtggtgaacgtgcaggagctgaagaacaaccccgccacccccagcaccgccatgggcagcagcgtgccctacagcaccgccaagaccccccaccccgtgctgacccccgtggccgccaaccaggccaagcagggcagcctgatcaacagcctgaagcccagcggccccacccccgccagcggccagctgagcagcggcgacaaggccagcggcaccgccaagatcgagaccgccgtgaccagcacccccagcgccagcggccagttcagcaagcccttcagcttcagccccagcggcaccggcttcaacttcggcatcatcacccccacccccagcagcaacttcaccgccgcccagggcgccacccccagcaccaaggagagcagccagcccgacgccttcagcagcggcggcggcagcaagcccagctacgaggccatccccgagagcagcccccccagcggcatcaccagcgccagcaacaccacccccggcgagcccgccgccagcagcagcagacccgtggcccccagcggcaccgccctgagcaccaccagcagcaagctggagaccccccccagcaagctgggcgagctgctgttccccagcagcctggccggcgagaccctgggcagcttcagcggcctgagagtgggccaggccgacgacagcaccaagcccaccaacaaggccagcagcaccagcctgaccagcacccagcccaccaagaccagcggcgtgcccagcggcttcaacttcaccgccccccccgtgctgggcaagcacaccgagccccccgtgaccagcagcgccaccaccaccagcgtggccccccccgccgccaccagcaccagcagcaccgccgtgttcggcagcctgcccgtgaccagcgccggcagcagcggcgtgatcagcttcggcggcaccagcctgagcgccggcaagaccagcttcagcttcggcagccagcagaccaacagcaccgtgccccccagcgcccccccccccaccaccgccgccacccccctgcccaccagcttccccaccctgagcttcggcagcctgctgagcagcgccaccacccccagcctgcccatgagcgccggcagaagcaccgaggaggccaccagcagcgccctgcccgagaagcccggcgacagcgaggtgagcgccagcgccgccagcctgctggaggagcagcagagcgcccagctgccccaggcccccccccagaccagcgacagcgtgaagaaggagcccgtgctggcccagcccgccgtgagcaacagcggcaccgccgccagcagcaccagcctggtggccctgagcgccgaggccacccccgccaccaccggcgtgcccgacgccagaaccgaggccgtgccccccgccagcagcttcagcgtgcccggccagaccgccgtgaccgccgccgccatcagcagcgccggccccgtggccgtggagaccagcagcacccccatcgccagcagcaccaccagcatcgtggcccccggccccagcgccgaggccgccgccttcggcaccgtgaccagcggcagcagcgtgttcgcccagccccccgccgccagcagcagcagcgccttcaaccagctgaccaacaacaccgccaccgcccccagcgccacccccgtgttcggccaggtggccgccagcaccgcccccagcctgttcggccagcagaccggcagcaccgccagcaccgccgccgccaccccccaggtgagcagcagcggcttcagcagccccgccttcggcaccaccgcccccggcgtgttcggccagaccaccttcggccaggccagcgtgttcggccagagcgccagcagcgccgccagcgtgttcagcttcagccagcccggcttcagcagcgtgcccgccttcggccagcccgccagcagcacccccaccagcaccagcggcagcgtgttcggcgccgccagcagcaccagcagcagcagcagcttcagcttcggccagagcagccccaacaccggcggcggcctgttcggccagagcaacgcccccgccttcggccagagccccggcttcggccagggcggcagcgtgttcggcggcaccagcgccgccaccaccaccgccgccaccagcggcttcagcttctgccaggccagcggcttcggcagcagcaacaccggcagcgtgttcggccaggccgccagcaccggcggcatcgtgttcggccagcagagcagcagcagcagcggcagcgtgttcggcagcggcaacaccggcagaggcggcggcttcttcagcggcctgggcggcaagcccagccaggacgccgccaacaagaaccccttcagcagcgccagcggcggcttcggcagcaccgccaccagcaacaccagcaacctgttcggcaacagcggcgccaagaccttcggcggcttcgccagcagcagcttcggcgagcagaagcccaccggcaccttcagcagcggcggcggcagcgtggccagccagggcttcggcttcagcagccccaacaagaccggcggcttcggcgccgcccccgtgttcggcagcccccccaccttcggcggcagccccggcttcggcggcgtgcccgccttcggcagcgcccccgccttcaccagccccctgggcagcaccggcggcaaggtgttcggcgagggcaccgccgccgccagcgccggcggcttcggcttcggcagcagcagcaacaccaccagcttcggcaccctggccagccagaacgcccccaccttcggcagcctgagccagcagaccagcggcttcggcacccagagcagcggcttcagcggcttcggcagcggcaccggcggcttcagcttcggcagcaacaacagcagcgtgcagggcttcggcggctggagaagctag

SEQ ID NO: 91727 - DNA, 4560 bp, synthetic construct
  misc_feature 1..4560: note = Description of Artificial Sequence: Synthetic coding sequence
  source 1..4560: mol_type = other DNA
atgaagcccagcttcccccccagcaccagcgccgtgaaggtgaacctgagcgagaagttcaccgccgccgccaccagcacccccgtgagcagcagccagagcgccccccccatgagccccttcagcagcgccagcaagcccgccgccagcggccccctgagccaccccacccccctgagcgccccccccagcagcgtgcccctgaagagcagcgtgctgcccagccccagcggcagaagcgcccagggcagcagcagccccgtgcccagcatggtgcagaagagccccagaatcaccccccccgccgccaagcccggcagcccccaggccaagagcctgcagcccgccgtggccgagaagcagggccaccagtggaaggacagcgaccccgtgatggccggcatcggcgaggagatcgcccacttccagaaggagctggaggagctgaaggccagaaccagcaaggcctgcttccaggtgggcaccagcgaggagatgaagatgctgagaaccgagagcgacgacctgcacaccttcctgctggagatcaaggagaccaccgagagcctgcacggcgacatcagcagcctgaagaccaccctgctggagggcttcgccggcgtggaggaggccagagagcagaacgagagaaacagagacagcggctacctgcacctgctgtacaagagacccctggaccccaagagcgaggcccagctgcaggagatcagaagactgcaccagtacgtgaagttcgccgtgcaggacgtgaacgacgtgctggacctggagtgggaccagcacctggagcagaagaagaagcagagacacctgctggtgcccgagagagagaccctgttcaacaccctggccaacaacagagagatcatcaaccagcagagaaagagactgaaccacctggtggacagcctgcagcagctgagactgtacaagcagaccagcctgtggagcctgagcagcgccgtgcccagccagagcagcatccacagcttcgacagcgacctggagagcctgtgcaacgccctgctgaagaccaccatcgagagccacaccaagagcctgcccaaggtgcccgccaagctgagccccatgaagcaggcccagctgagaaacttcctggccaagagaaagaccccccccgtgagaagcaccgcccccgccagcctgagcagaagcgccttcctgagccagagatactacgaggacctggacgaggtgagcagcaccagcagcgtgagccagagcctggagagcgaggacgccagaaccagctgcaaggacgacgaggccgtggtgcaggcccccagacacgcccccgtggtgagaacccccagcatccagcccagcctgctgccccacgccgcccccttcgccaagagccacctggtgcacggcagcagccccggcgtgatgggcaccagcgtggccaccagcgccagcaagatcatcccccagggcgccgacagcaccatgctggccaccaagaccgtgaagcacggcgcccccagccccagccaccccatcagcgccccccaggccgccgccgccgccgccctgagaagacagatggccagccaggcccccgccgtgaacaccctgaccgagagcaccctgaagaacgtgccccaggtggtgaacgtgcaggagctgaagaacaaccccgccacccccagcaccgccatgggcagcagcgtgccctacagcaccgccaagaccccccaccccgtgctgacccccgtggccgccaaccaggccaagcagggcagcctgatcaacagcctgaagcccagcggccccacccccgccagcggccagctgagcagcggcgacaaggccagcggcaccgccaagatcgagaccgccgtgaccagcacccccagcgccagcggccagttcagcaagcccttcagcttcagccccagcggcaccggcttcaacttcggcatcatcacccccacccccagcagcaacttcaccgccgcccagggcgccacccccagcaccaaggagagcagccagcccgacgccttcagcagcggcggcggcagcaagcccagctacgaggccatccccgagagcagcccccccagcggcatcaccagcgccagcaacaccacccccggcgagcccgccgccagcagcagcagacccgtggcccccagcggcaccgccctgagcaccaccagcagcaagctggagaccccccccagcaagctgggcgagctgctgttccccagcagcctggccggcgagaccctgggcagcttcagcggcctgagagtgggccaggccgacgacagcaccaagcccaccaacaaggccagcagcaccagcctgaccagcacccagcccaccaagaccagcggcgtgcccagcggcttcaacttcaccgccccccccgtgctgggcaagcacaccgagccccccgtgaccagcagcgccaccaccaccagcgtggccccccccgccgccaccagcaccagcagcaccgccgtgttcggcagcctgcccgtgaccagcgccggcagcagcggcgtgatcagcttcggcggcaccagcctgagcgccggcaagaccagcttcagcttcggcagccagcagaccaacagcaccgtgccccccagcgcccccccccccaccaccgccgccacccccctgcccaccagcttccccaccctgagcttcggcagcctgctgagcagcgccaccacccccagcctgcccatgagcgccggcagaagcaccgaggaggccaccagcagcgccctgcccgagaagcccggcgacagcgaggtgagcgccagcgccgccagcctgctggaggagcagcagagcgcccagctgccccaggcccccccccagaccagcgacagcgtgaagaaggagcccgtgctggcccagcccgccgtgagcaacagcggcaccgccgccagcagcaccagcctggtggccctgagcgccgaggccacccccgccaccaccggcgtgcccgacgccagaaccgaggccgtgccccccgccagcagcttcagcgtgcccggccagaccgccgtgaccgccgccgccatcagcagcgccggccccgtggccgtggagaccagcagcacccccatcgccagcagcaccaccagcatcgtggcccccggccccagcgccgaggccgccgccttcggcaccgtgaccagcggcagcagcgtgttcgcccagccccccgccgccagcagcagcagcgccttcaaccagctgaccaacaacaccgccaccgcccccagcgccacccccgtgttcggccaggtggccgccagcaccgcccccagcctgttcggccagcagaccggcagcaccgccagcaccgccgccgccaccccccaggtgagcagcagcggcttcagcagccccgccttcggcaccaccgcccccggcgtgttcggccagaccaccttcggccaggccagcgtgttcggccagagcgccagcagcgccgccagcgtgttcagcttcagccagcccggcttcagcagcgtgcccgccttcggccagcccgccagcagcacccccaccagcaccagcggcagcgtgttcggcgccgccagcagcaccagcagcagcagcagcttcagcttcggccagagcagccccaacaccggcggcggcctgttcggccagagcaacgcccccgccttcggccagagccccggcttcggccagggcggcagcgtgttcggcggcaccagcgccgccaccaccaccgccgccaccagcggcttcagcttctgccaggccagcggcttcggcagcagcaacaccggcagcgtgttcggccaggccgccagcaccggcggcatcgtgttcggccagcagagcagcagcagcagcggcagcgtgttcggcagcggcaacaccggcagaggcggcggcttcttcagcggcctgggcggcaagcccagccaggacgccgccaacaagaaccccttcagcagcgccagcggcggcttcggcagcaccgccaccagcaacaccagcaacctgttcggcaacagcggcgccaagaccttcggcggcttcgccagcagcagcttcggcgagcagaagcccaccggcaccttcagcagcggcggcggcagcgtggccagccagggcttcggcttcagcagccccaacaagaccggcggcttcggcgccgcccccgtgttcggcagcccccccaccttcggcggcagccccggcttcggcggcgtgcccgccttcggcagcgcccccgccttcaccagccccctgggcagcaccggcggcaaggtgttcggcgagggcaccgccgccgccagcgccggcggcttcggcttcggcagcagcagcaacaccaccagcttcggcaccctggccagccagaacgcccccaccttcggcagcctgagccagcagaccagcggcttcggcacccagagcagcggcttcagcggcttcggcagcggcaccggcggcttcagcttcggcagcaacaacagcagcgtgcagggcttcggcggctggagaagctag

SEQ ID NO: 91728 - DNA, 6276 bp, synthetic construct
  misc_feature 1..6276: note = Description of Artificial Sequence: Synthetic coding sequence
  source 1..6276: mol_type = other DNA
atgggcgacgagatggacgccatgatccccgagagagagatgaaggacttccagttcagagccctgaagaaggtgagaatcttcgacagccccgaggagctgcccaaggagagaagcagcctgctggccgtgagcaacaagtacggcctggtgttcgccggcggcgccagcggcctgcagatcttccccaccaagaacctgctgatccagaacaagcccggcgacgaccccaacaagatcgtggacaaggtgcagggcctgctggtgcccatgaagttccccatccaccacctggccctgagctgcgacaacctgaccctgagcgcctgcatgatgagcagcgagtacggcagcatcatcgccttcttcgacgtgagaaccttcagcaacgaggccaagcagcagaagagacccttcgcctaccacaagctgctgaaggacgccggcggcatggtgatcgacatgaagtggaaccccaccgtgcccagcatggtggccgtgtgcctggccgacggcagcatcgccgtgctgcaggtgaccgagaccgtgaaggtgtgcgccaccctgcccagcaccgtggccgtgaccagcgtgtgctggagccccaagggcaagcagctggccgtgggcaagcagaacggcaccgtggtgcagtacctgcccaccctgcaggagaagaaggtgatcccctgcccccccttctacgagagcgaccaccccgtgagagtgctggacgtgctgtggatcggcacctacgtgttcgccatcgtgtacgccgccgccgacggcaccctggagaccagccccgacgtggtgatggccctgctgcccaagaaggaggagaagcaccccgagatcttcgtgaacttcatggagccctgctacggcagctgcaccgagagacagcaccactactacctgagctacatcgaggagtgggacctggtgctggccgccagcgccgccagcaccgaggtgagcatcctggccagacagagcgaccagatcaactgggagagctggctgctggaggacagcagcagagccgagctgcccgtgaccgacaagagcgacgacagcctgcccatgggcgtggtggtggactacaccaaccaggtggagatcaccatcagcgacgagaagaccctgccccccgcccccgtgctgatgctgctgagcaccgacggcgtgctgtgccccttctacatgatcaaccagaaccccggcgtgaagagcctgatcaagacccccgagagactgagcctggagggcgagagacagcccaagagccccggcagcacccccaccacccccaccagcagccaggccccccagaagctggacgccagcgccgccgccgcccccgccagcctgccccccagcagccccgccgcccccatcgccaccttcagcctgctgcccgccggcggcgcccccaccgtgttcagcttcggcagcagcagcctgaagagcagcgccaccgtgaccggcgagccccccagctacagcagcggcagcgacagcagcaaggccgcccccggccccggccccagcaccttcagcttcgtgccccccagcaaggccagcctggcccccacccccgccgccagccccgtggcccccagcgccgccagcttcagcttcggcagcagcggcttcaagcccaccctggagagcacccccgtgcccagcgtgagcgcccccaacatcgccatgaagcccagcttcccccccagcaccagcgccgtgaaggtgaacctgagcgagaagttcaccgccgccgccaccagcacccccgtgagcagcagccagagcgccccccccatgagccccttcagcagcgccagcaagcccgccgccagcggccccctgagccaccccacccccctgagcgccccccccagcagcgtgcccctgaagagcagcgtgctgcccagccccagcgccggcagaagcgcccagggcagcagcagccccgtgcccagcatggtgcagaagagccccagaatcaccccccccgccgccaagcccggcagcccccaggccaagagcctgcagcccgccgtggccgagaagcagggccaccagtggaaggacagcgaccccgtgatggccggcatcggcgaggagatcgcccacttccagaaggagctggaggagctgaaggccagaaccagcaaggcctgcttccaggtgggcaccagcgaggagatgaagatgctgagaaccgagagcgacgacctgcacaccttcctgctggagatcaaggagaccaccgagagcctgcacggcgacatcagcagcctgaagaccaccctgctggagggcttcgccggcgtggaggaggccagagagcagaacgagagaaacagagacagcggctacctgcacctgctgtacaagagacccctggaccccaagagcgaggcccagctgcaggagatcagaagactgcaccagtacgtgaagttcgccgtgcaggacgtgaacgacgtgctggacctggagtgggaccagcacctggagcagaagaagaagcagagacacctgctggtgcccgagagagagaccctgttcaacaccctggccaacaacagagagatcatcaaccagcagagaaagagactgaaccacctggtggacagcctgcagcagctgagactgtacaagcagaccagcctgtggagcctgagcagcgccgtgcccagccagagcagcatccacagcttcgacagcgacctggagagcctgtgcaacgccctgctgaagaccaccatcgagagccacaccaagagcctgcccaaggtgcccgccaagctgagccccatgaagcaggcccagctgagaaacttcctggccaagagaaagaccccccccgtgagaagcaccgcccccgccagcctgagcagaagcgccttcctgagccagagatactacgaggacctggacgaggtgagcagcaccagcagcgtgagccagagcctggagagcgaggacgccagaaccagctgcaaggacgacgaggccgtggtgcaggcccccagacacgcccccgtggtgagaacccccagcatccagcccagcctgctgccccacgccgcccccttcgccaagagccacctggtgcacggcagcagccccggcgtgatgggcaccagcgtggccaccagcgccagcaagatcatcccccagggcgccgacagcaccatgctggccaccaagaccgtgaagcacggcgcccccagccccagccaccccatcagcgccccccaggccgccgccgccgccgccctgagaagacagatggccagccaggcccccgccgtgaacaccctgaccgagagcaccctgaagaacgtgccccaggtggtgaacgtgcaggagctgaagaacaaccccgccacccccagcaccgccatgggcagcagcgtgccctacagcaccgccaagaccccccaccccgtgctgacccccgtggccgccaaccaggccaagcagggcagcctgatcaacagcctgaagcccagcggccccacccccgccagcggccagctgagcagcggcgacaaggccagcggcaccgccaagatcgagaccgccgtgaccagcacccccagcgccagcggccagttcagcaagcccttcagcttcagccccagcggcaccggcttcaacttcggcatcatcacccccacccccagcagcaacttcaccgccgcccagggcgccacccccagcaccaaggagagcagccagcccgacgccttcagcagcggcggcggcagcaagcccagctacgaggccatccccgagagcagcccccccagcggcatcaccagcgccagcaacaccacccccggcgagcccgccgccagcagcagcagacccgtggcccccagcggcaccgccctgagcaccaccagcagcaagctggagaccccccccagcaagctgggcgagctgctgttccccagcagcctggccggcgagaccctgggcagcttcagcggcctgagagtgggccaggccgacgacagcaccaagcccaccaacaaggccagcagcaccagcctgaccagcacccagcccaccaagaccagcggcgtgcccagcggcttcaacttcaccgccccccccgtgctgggcaagcacaccgagccccccgtgaccagcagcgccaccaccaccagcgtggccccccccgccgccaccagcaccagcagcaccgccgtgttcggcagcctgcccgtgaccagcgccggcagcagcggcgtgatcagcttcggcggcaccagcctgagcgccggcaagaccagcttcagcttcggcagccagcagaccaacagcaccgtgccccccagcgcccccccccccaccaccgccgccacccccctgcccaccagcttccccaccctgagcttcggcagcctgctgagcagcgccaccacccccagcctgcccatgagcgccggcagaagcaccgaggaggccaccagcagcgccctgcccgagaagcccggcgacagcgaggtgagcgccagcgccgccagcctgctggaggagcagcagagcgcccagctgccccaggcccccccccagaccagcgacagcgtgaagaaggagcccgtgctggcccagcccgccgtgagcaacagcggcaccgccgccagcagcaccagcctggtggccctgagcgccgaggccacccccgccaccaccggcgtgcccgacgccagaaccgaggccgtgccccccgccagcagcttcagcgtgcccggccagaccgccgtgaccgccgccgccatcagcagcgccggccccgtggccgtggagaccagcagcacccccatcgccagcagcaccaccagcatcgtggcccccggccccagcgccgaggccgccgccttcggcaccgtgaccagcggcagcagcgtgttcgcccagccccccgccgccagcagcagcagcgccttcaaccagctgaccaacaacaccgccaccgcccccagcgccacccccgtgttcggccaggtggccgccagcaccgcccccagcctgttcggccagcagaccggcagcaccgccagcaccgccgccgccaccccccaggtgagcagcagcggcttcagcagccccgccttcggcaccaccgcccccggcgtgttcggccagaccaccttcggccaggccagcgtgttcggccagagcgccagcagcgccgccagcgtgttcagcttcagccagcccggcttcagcagcgtgcccgccttcggccagcccgccagcagcacccccaccagcaccagcggcagcgtgttcggcgccgccagcagcaccagcagcagcagcagcttcagcttcggccagagcagccccaacaccggcggcggcctgttcggccagagcaacgcccccgccttcggccagagccccggcttcggccagggcggcagcgtgttcggcggcaccagcgccgccaccaccaccgccgccaccagcggcttcagcttctgccaggccagcggcttcggcagcagcaacaccggcagcgtgttcggccaggccgccagcaccggcggcatcgtgttcggccagcagagcagcagcagcagcggcagcgtgttcggcagcggcaacaccggcagaggcggcggcttcttcagcggcctgggcggcaagcccagccaggacgccgccaacaagaaccccttcagcagcgccagcggcggcttcggcagcaccgccaccagcaacaccagcaacctgttcggcaacagcggcgccaagaccttcggcggcttcgccagcagcagcttcggcgagcagaagcccaccggcaccttcagcagcggcggcggcagcgtggccagccagggcttcggcttcagcagccccaacaagaccggcggcttcggcgccgcccccgtgttcggcagcccccccaccttcggcggcagccccggcttcggcggcgtgcccgccttcggcagcgcccccgccttcaccagccccctgggcagcaccggcggcaaggtgttcggcgagggcaccgccgccgccagcgccggcggcttcggcttcggcagcagcagcaacaccaccagcttcggcaccctggccagccagaacgcccccaccttcggcagcctgagccagcagaccagcggcttcggcacccagagcagcggcttcagcggcttcggcagcggcaccggcggcttcagcttcggcagcaacaacagcagcgtgcagggcttcggcggctggagaagctag

SEQ ID NO: 91729 - DNA, 237 bp, synthetic construct
  misc_feature 1..237: note = Description of Artificial Sequence: Synthetic coding sequence
  source 1..237: mol_type = other DNA
ggcgagggcaccgccgccgccagcgccggcggcttcggcttcggcagcagcagcaacaccaccagcttcggcaccctggccagccagaacgcccccaccttcggcagcctgagccagcagaccagcggcttcggcacccagagcagcggcttcagcggcttcggcagcggcaccggcggcttcagcttcggcagcaacaacagcagcgtgcagggcttcggcggctggagaagctag

SEQ ID NO: 91730 - DNA, 5055 bp, synthetic construct
  misc_feature 1..5055: note = Description of Artificial Sequence: Synthetic coding sequence
  source 1..5055: mol_type = other DNA
ggcgccgagggcagaaagttcgccgtggagagacccggcttcagaggccagggcagaggcagacagagatggctgctgagacacaccacccccaccagcagccaggccccccagaagctggacgccagcgccgccgccgcccccgccagcctgccccccagcagccccgccgcccccatcgccaccttcagcctgctgcccgccggcggcgcccccaccgtgttcagcttcggcagcagcagcctgaagagcagcgccaccgtgaccggcgagccccccagctacagcagcggcagcgacagcagcaaggccgcccccggccccggccccagcaccttcagcttcgtgccccccagcaaggccagcctggcccccacccccgccgccagccccgtggcccccagcgccgccagcttcagcttcggcagcagcggcttcaagcccaccctggagagcacccccgtgcccagcgtgagcgcccccaacatcgccatgaagcccagcttcccccccagcaccagcgccgtgaaggtgaacctgagcgagaagttcaccgccgccgccaccagcacccccgtgagcagcagccagagcgccccccccatgagccccttcagcagcgccagcaagcccgccgccagcggccccctgagccaccccacccccctgagcgccccccccagcagcgtgcccctgaagagcagcgtgctgcccagccccagcgccggcagaagcgcccagggcagcagcagccccgtgcccagcatggtgcagaagagccccagaatcaccccccccgccgccaagcccggcagcccccaggccaagagcctgcagcccgccgtggccgagaagcagggccaccagtggaaggacagcgaccccgtgatggccggcatcggcgaggagatcgcccacttccagaaggagctggaggagctgaaggccagaaccagcaaggcctgcttccaggtgggcaccagcgaggagatgaagatgctgagaaccgagagcgacgacctgcacaccttcctgctggagatcaaggagaccaccgagagcctgcacggcgacatcagcagcctgaagaccaccctgctggagggcttcgccggcgtggaggaggccagagagcagaacgagagaaacagagacagcggctacctgcacctgctgtacaagagacccctggaccccaagagcgaggcccagctgcaggagatcagaagactgcaccagtacgtgaagttcgccgtgcaggacgtgaacgacgtgctggacctggagtgggaccagcacctggagcagaagaagaagcagagacacctgctggtgcccgagagagagaccctgttcaacaccctggccaacaacagagagatcatcaaccagcagagaaagagactgaaccacctggtggacagcctgcagcagctgagactgtacaagcagaccagcctgtggagcctgagcagcgccgtgcccagccagagcagcatccacagcttcgacagcgacctggagagcctgtgcaacgccctgctgaagaccaccatcgagagccacaccaagagcctgcccaaggtgcccgccaagctgagccccatgaagcaggcccagctgagaaacttcctggccaagagaaagaccccccccgtgagaagcaccgcccccgccagcctgagcagaagcgccttcctgagccagagatactacgaggacctggacgaggtgagcagcaccagcagcgtgagccagagcctggagagcgaggacgccagaaccagctgcaaggacgacgaggccgtggtgcaggcccccagacacgcccccgtggtgagaacccccagcatccagcccagcctgctgccccacgccgcccccttcgccaagagccacctggtgcacggcagcagccccggcgtgatgggcaccagcgtggccaccagcgccagcaagatcatcccccagggcgccgacagcaccatgctggccaccaagaccgtgaagcacggcgcccccagccccagccaccccatcagcgccccccaggccgccgccgccgccgccctgagaagacagatggccagccaggcccccgccgtgaacaccctgaccgagagcaccctgaagaacgtgccccaggtggtgaacgtgcaggagctgaagaacaaccccgccacccccagcaccgccatgggcagcagcgtgccctacagcaccgccaagaccccccaccccgtgctgacccccgtggccgccaaccaggccaagcagggcagcctgatcaacagcctgaagcccagcggccccacccccgccagcggccagctgagcagcggcgacaaggccagcggcaccgccaagatcgagaccgccgtgaccagcacccccagcgccagcggccagttcagcaagcccttcagcttcagccccagcggcaccggcttcaacttcggcatcatcacccccacccccagcagcaacttcaccgccgcccagggcgccacccccagcaccaaggagagcagccagcccgacgccttcagcagcggcggcggcagcaagcccagctacgaggccatccccgagagcagcccccccagcggcatcaccagcgccagcaacaccacccccggcgagcccgccgccagcagcagcagacccgtggcccccagcggcaccgccctgagcaccaccagcagcaagctggagaccccccccagcaagctgggcgagctgctgttccccagcagcctggccggcgagaccctgggcagcttcagcggcctgagagtgggccaggccgacgacagcaccaagcccaccaacaaggccagcagcaccagcctgaccagcacccagcccaccaagaccagcggcgtgcccagcggcttcaacttcaccgccccccccgtgctgggcaagcacaccgagccccccgtgaccagcagcgccaccaccaccagcgtggccccccccgccgccaccagcaccagcagcaccgccgtgttcggcagcctgcccgtgaccagcgccggcagcagcggcgtgatcagcttcggcggcaccagcctgagcgccggcaagaccagcttcagcttcggcagccagcagaccaacagcaccgtgccccccagcgcccccccccccaccaccgccgccacccccctgcccaccagcttccccaccctgagcttcggcagcctgctgagcagcgccaccacccccagcctgcccatgagcgccggcagaagcaccgaggaggccaccagcagcgccctgcccgagaagcccggcgacagcgaggtgagcgccagcgccgccagcctgctggaggagcagcagagcgcccagctgccccaggcccccccccagaccagcgacagcgtgaagaaggagcccgtgctggcccagcccgccgtgagcaacagcggcaccgccgccagcagcaccagcctggtggccctgagcgccgaggccacccccgccaccaccggcgtgcccgacgccagaaccgaggccgtgccccccgccagcagcttcagcgtgcccggccagaccgccgtgaccgccgccgccatcagcagcgccggccccgtggccgtggagaccagcagcacccccatcgccagcagcaccaccagcatcgtggcccccggccccagcgccgaggccgccgccttcggcaccgtgaccagcggcagcagcgtgttcgcccagccccccgccgccagcagcagcagcgccttcaaccagctgaccaacaacaccgccaccgcccccagcgccacccccgtgttcggccaggtggccgccagcaccgcccccagcctgttcggccagcagaccggcagcaccgccagcaccgccgccgccaccccccaggtgagcagcagcggcttcagcagccccgccttcggcaccaccgcccccggcgtgttcggccagaccaccttcggccaggccagcgtgttcggccagagcgccagcagcgccgccagcgtgttcagcttcagccagcccggcttcagcagcgtgcccgccttcggccagcccgccagcagcacccccaccagcaccagcggcagcgtgttcggcgccgccagcagcaccagcagcagcagcagcttcagcttcggccagagcagccccaacaccggcggcggcctgttcggccagagcaacgcccccgccttcggccagagccccggcttcggccagggcggcagcgtgttcggcggcaccagcgccgccaccaccaccgccgccaccagcggcttcagcttctgccaggccagcggcttcggcagcagcaacaccggcagcgtgttcggccaggccgccagcaccggcggcatcgtgttcggccagcagagcagcagcagcagcggcagcgtgttcggcagcggcaacaccggcagaggcggcggcttcttcagcggcctgggcggcaagcccagccaggacgccgccaacaagaaccccttcagcagcgccagcggcggcttcggcagcaccgccaccagcaacaccagcaacctgttcggcaacagcggcgccaagaccttcggcggcttcgccagcagcagcttcggcgagcagaagcccaccggcaccttcagcagcggcggcggcagcgtggccagccagggcttcggcttcagcagccccaacaagaccggcggcttcggcgccgcccccgtgttcggcagcccccccaccttcggcggcagccccggcttcggcggcgtgcccgccttcggcagcgcccccgccttcaccagccccctgggcagcaccggcggcaaggtgttcggcgagggcaccgccgccgccagcgccggcggcttcggcttcggcagcagcagcaacaccaccagcttcggcaccctggccagccagaacgcccccaccttcggcagcctgagccagcagaccagcggcttcggcacccagagcagcggcttcagcggcttcggcagcggcaccggcggcttcagcttcggcagcaacaacagcagcgtgcagggcttcggcggctggagaagctag

SEQ ID NO: 91731 - DNA, 6282 bp, synthetic construct
  misc_feature 1..6282: note = Description of Artificial Sequence: Synthetic coding sequence
  source 1..6282: mol_type = other DNA
atgggcgacgagatggacgccatgatccccgagagagagatgaaggacttccagttcagagccctgaagaaggtgagaatcttcgacagccccgaggagctgcccaaggagagaagcagcctgctggccgtgagcaacaagtacggcctggtgttcgccggcggcgccagcggcctgcagatcttccccaccaagaacctgctgatccagaacaagcccggcgacgaccccaacaagatcgtggacaaggtgcagggcctgctggtgcccatgaagttccccatccaccacctggccctgagctgcgacaacctgaccctgagcgcctgcatgatgagcagcgagtacggcagcatcatcgccttcttcgacgtgagaaccttcagcaacgaggccaagcagcagaagagacccttcgcctaccacaagctgctgaaggacgccggcggcatggtgatcgacatgaagtggaaccccaccgtgcccagcatggtggccgtgtgcctggccgacggcagcatcgccgtgctgcaggtgaccgagaccgtgaaggtgtgcgccaccctgcccagcaccgtggccgtgaccagcgtgtgctggagccccaagggcaagcagctggccgtgggcaagcagaacggcaccgtggtgcagtacctgcccaccctgcaggagaagaaggtgatcccctgcccccccttctacgagagcgaccaccccgtgagagtgctggacgtgctgtggatcggcacctacgtgttcgccatcgtgtacgccgccgccgacggcaccctggagaccagccccgacgtggtgatggccctgctgcccaagaaggaggagaagcaccccgagatcttcgtgaacttcatggagccctgctacggcagctgcaccgagagacagcaccactactacctgagctacatcgaggagtgggacctggtgctggccgccagcgccgccagcaccgaggtgagcatcctggccagacagagcgaccagatcaactgggagagctggctgctggaggacagcagcagagccgagctgcccgtgaccgacaagagcgacgacagcctgcccatgggcgtggtggtggactacaccaaccaggtggagatcaccatcagcgacgagaagaccctgccccccgcccccgtgctgatgctgctgagcaccgacggcgtgctgtgccccttctacatgatcaaccagaaccccggcgtgaagagcctgatcaagacccccgagagactgagcctggagggcgagagacagcccaagagccccggcagcacccccaccacccccaccagcagccaggccccccagaagctggacgccagcgccgccgccgcccccgccagcctgccccccagcagccccgccgcccccatcgccaccttcagcctgctgcccgccggcggcgcccccaccgtgttcagcttcggcagcagcagcctgaagagcagcgccaccgtgaccggcgagccccccagctacagcagcggcagcgacagcagcaaggccgcccccggccccggccccagcaccttcagcttcgtgccccccagcaaggccagcctggcccccacccccgccgccagccccgtggcccccagcgccgccagcttcagcttcggcagcagcggcttcaagcccaccctggagagcacccccgtgcccagcgtgagcgcccccaacatcgccatgaagcccagcttcccccccagcaccagcgccgtgaaggtgaacctgagcgagaacagcagccagagcgccccccccatgagccccttcagcagcgccagcaagcccgccgccagcggccccctgagccaccccacccccctgagcgccccccccagcagcgtgcccctgaagagcagcgtgctgcccagccccagcggcagaagcgcccagggcagcagcagccccgtgcccagcatggtgcagaagagccccagaatcaccccccccgccgccaagcccggcagcccccaggccaagagcctgcagcccgccgtggccgagaagcagggccaccagtggaaggacagcgaccccgtgatggccggcatcggcgaggagatcgcccacttccagaaggagctggaggagctgaaggccagaaccagcaaggcctgcttccaggtgggcaccagcgaggagatgaagatgctgagaaccgagagcgacgacctgcacaccttcctgctggagatcaaggagaccaccgagagcctgcacggcgacatcagcagcctgaagaccaccctgctggagggcttcgccggcgtggaggaggccagagagcagaacgagagaaacagagacagcggctacctgcacctgctgtacaagagacccctggaccccaagagcgaggcccagctgcaggagatcagaagactgcaccagtacgtgaagttcgccgtgcaggacgtgaacgacgtgctggacctggagtgggaccagcacctggagcagaagaagaagcagagacacctgctggtgcccgagagagagaccctgttcaacaccctggccaacaacagagagatcatcaaccagcagagaaagagactgaaccacctggtggacagcctgcagcagctgagactgtacaagcagaccagcctgtggagcctgagcagcgccgtgcccagccagagcagcatccacagcttcgacagcgacctggagagcctgtgcaacgccctgctgaagaccaccatcgagagccacaccaagagcctgcccaaggtgcccgccaagctgagccccatgaagcaggcccagctgagaaacttcctggccaagagaaagaccccccccgtgagaagcaccgcccccgccagcctgagcagaagcgccttcctgagccagagatactacgaggacctggacgaggtgagcagcaccagcagcgtgagccagagcctggagagcgaggacgccagaaccagctgcaaggacgacgaggccgtggtgcaggcccccagacacgcccccgtggtgagaacccccagcatccagcccagcctgctgccccacgccgcccccttcgccaagagccacctggtgcacggcagcagccccggcgtgatgggcaccagcgtggccaccagcgccagcaagatcatcccccagggcgccgacagcaccatgctggccaccaagaccgtgaagcacggcgcccccagccccagccaccccatcagcgccccccaggccgccgccgccgccgccctgagaagacagatggccagccaggcccccgccgtgaacaccctgaccgagagcaccctgaagaacgtgccccaggtggtgaacgtgcaggagctgaagaacaaccccgccacccccagcaccgccaagaccccccaccccgtgctgacccccgtggccgccaaccaggccaagcagggcagcctgatcaacagcctgaagcccagcggccccacccccgccagcggccagctgagcagcggcgacaaggccagcggcaccgccaagatcgagaccgccgtgaccagcacccccagcgccagcggccagttcagcaagcccttcagcttcagccccagcggcaccggcttcaacttcggcatcatcacccccacccccagcagcaacttcaccgccgcccagggcgccacccccagcaccaaggagagcagccagcccgacgccttcagcagcggcggcggcagcaagcccagctacgaggccatccccgagagcagcccccccagcggcatcaccagcgccagcaacaccacccccggcgagcccgccgccagcagcagcagacccgtggcccccagcggcaccgccctgagcaccaccagcagcaagctggagaccccccccagcaagctgggcgagctgctgttccccagcagcctggccggcgagaccctgggcagcttcagcggcctgagagtgggccaggccgacgacagcaccaagcccaccaacaaggccagcagcaccagcctgaccagcacccagcccaccaagaccagcggcgtgcccagcggcttcaacttcaccgccccccccgtgctgggcaagcacaccgagccccccgtgaccagcagcgccaccaccaccagcgtggccccccccgccgccaccagcaccagcagcaccgccgtgttcggcagcctgcccgtgaccagcgccggcagcagcggcgtgatcagcttcggcggcaccagcctgagcgccggcaagaccagcttcagcttcggcagccagcagaccaacagcaccgtgccccccagcgcccccccccccaccaccgccgccacccccctgcccaccagcttccccaccctgagcttcggcagcctgctgagcagcgccaccacccccagcctgcccatgagcgccggcagaagcaccgaggaggccaccagcagcgccctgcccgagaagcccggcgacagcgaggtgagcgccagcgccgccagcctgctggaggagcagcagagcgcccagctgccccaggcccccccccagaccagcgacagcgtgaagaaggagcccgtgctggcccagcccgccgtgagcaacagcggcaccgccgccagcagcaccagcctggtggccctgagcgccgaggccacccccgccaccaccggcgtgcccgacgccagaaccgaggccgtgccccccgccagcagcttcagcgtgcccggccagaccgccgtgaccgccgccgccatcagcagcgccggccccgtggccgtggagaccagcagcacccccatcgccagcagcaccaccagcatcgtggcccccggccccagcgccgaggccgccgccttcggcaccgtgaccagcggcagcagcgtgttcgcccagccccccgccgccagcagcagcagcgccttcaaccagctgaccaacaacaccgccaccgcccccagcgccacccccgtgttcggccaggtggccgccagcaccgcccccagcctgttcggccagcagaccggcagcaccgccagcaccgccgccgccaccccccaggtgagcagcagcggcttcagcagccccgccttcggcaccaccgcccccggcgtgttcggccagaccaccttcggccaggccagcgtgttcggccagagcgccagcagcgccgccagcgtgttcagcttcagccagcccggcttcagcagcgtgcccgccttcggccagcccgccagcagcacccccaccagcaccagcggcagcgtgttcggcgccgccagcagcaccagcagcagcagcagcttcagcttcggccagagcagccccaacaccggcggcggcctgttcggccagagcaacgcccccgccttcggccagagccccggcttcggccagggcggcagcgtgttcggcggcaccagcgccgccaccaccaccgccgccaccagcggcttcagcttctgccaggccagcggcttcggcagcagcaacaccggcagcgtgttcggccaggccgccagcaccggcggcatcgtgttcggccagcagagcagcagcagcagcggcagcgtgttcggcagcggcaacaccggcagaggcggcggcttcttcagcggcctgggcggcaagcccagccaggacgccgccaacaagaaccccttcagcagcgccagcggcggcttcggcagcaccgccaccagcaacaccagcaacctgttcggcaacagcggcgccaagaccttcggcggcttcgccagcagcagcttcggcgagcagaagcccaccggcaccttcagcagcggcggcggcagcgtggccagccagggcttcggcttcagcagccccaacaagaccggcggcttcggcgccgcccccgtgttcggcagcccccccaccttcggcggcagccccggcttcggcggcgtgcccgccttcggcagcgcccccgccttcaccagccccctgggcagcaccggcggcaaggtgttcggcgagggcaccgccgccgccagcgccggcggcttcggcagcctggccatgagcctgagccccaccctgaagggcagactgctgctgatgagacccaaggccggcggcggcagagagcaggccgcccccggcagaaagagcaacgagagcagaagcctgggccacctgtgcatggagagagccctgaccagccccctgaaggtgtgggagcagcagcagcaccacatcctgagacacgccagagagagcgagtgcccccacttcagaatcaccgtgcccaccgacttctggttctgggaccccgagtag

SEQ ID NO: 91732 - DNA, 1308 bp, synthetic construct
  misc_feature 1..1308: note = Description of Artificial Sequence: Synthetic coding sequence
  source 1..1308: mol_type = other DNA
atgaagagcagcctgctgctgagaggcgtgcacttctgcttccacctgcccggcgccacccccagcaccaaggagagcagccagcccgacgccttcagcagcggcggcggcagcaagcccagctacgaggccatccccgagagcagcccccccagcggcatcaccagcgccagcaacaccacccccggcgagcccgccgccagcagcagcagacccgtggcccccagcggcaccgccctgagcaccaccagcagcaagctggagaccccccccagcaagctgggcgagctgctgttccccagcagcctggccggcgagaccctgggcagcttcagcggcctgagagtgggccaggccgacgacagcaccaagcccaccaacaaggccagcagcaccagcctgaccagcacccagcccaccaagaccagcggcgtgcccagcggcttcaacttcaccgccccccccgtgctgggcaagcacaccgagccccccgtgaccagcagcgccaccaccaccagcgtggccccccccgccgccaccagcaccagcagcaccgccgtgttcggcagcctgcccgtgaccagcgccggcagcagcggcgtgatcagcttcggcggcaccagcctgagcgccggcaagaccagcttcagcttcggcagccagcagaccaacagcaccgtgccccccagcgcccccccccccaccaccgccgccacccccctgcccaccagcttccccaccctgagcttcggcagcctgctgagcagcgccaccacccccagcctgcccatgagcgccggcagaagcaccgaggaggccaccagcagcgccctgcccgagaagcccggcgacagcgaggtgagcgccagcgccgccagcctgctggaggagcagcagagcgcccagctgccccaggcccccccccagaccagcgacagcgtgaagaaggagcccgtgctggcccagcccgccgtgagcaacagcggcaccgccgccagcagcaccagcctggtggccctgagcgccgaggccacccccgccaccaccggcgtgcccgacgccagaaccgaggccgtgccccccgccagcagcttcagcgtgcccggccagaccgccgtgaccgccgccgccatcagcagcgccggccccgtggccgtggagaccagcagcacccccatcgccagcagcaccaccagcatcgtggcccccggccccagcgccgaggccgccgccttcggcaccgtgaccagcggcagcagcgtgttcgcccagccccccgccgccagcagcagcagcgccttcaactag

SEQ ID NO: 91733 - DNA, 981 bp, synthetic construct
  misc_feature 1..981: note = Description of Artificial Sequence: Synthetic coding sequence
  source 1..981: mol_type = other DNA
atggccgccttcgccgtggagccccagggccccgccctgggcagcgagcccatgatgctgggcagccccaccagccccaagcccggcgtgaacgcccagttcctgcccggcttcctgatgggcgacctgcccgcccccgtgaccccccagcccagaagcatcagcggccccagcgtgggcgtgatggagatgagaagccccctgctggccggcggcagccccccccagcccgtggtgcccgcccacaaggacaagagcggcgccccccccgtgagaagcatctacgacgacatcagcagccccggcctgggcagcacccccctgaccagcagaagacagcccaacatcagcgtgatgcagagccccctggtgggcgtgaccagcacccccggcaccggccagagcatgttcagccccgccagcatcggccagcccagaaagaccaccctgagccccgcccagctggaccccttctacacccagggcgacagcctgaccagcgaggaccacctggacgacagctgggtgaccgtgttcggcttcccccaggccagcgccagctacatcctgctgcagttcgcccagtacggcaacatcctgaagcacgtgatgagcaacaccggcaactggatgcacatcagataccagagcaagctgcaggccagaaaggccctgagcaaggacggcagaatcttcggcgagagcatcatgatcggcgtgaagccctgcatcgacaagagcgtgatggagagcagcgacagatgcgccctgagcagccccagcctggccttcaccccccccatcaagaccctgggcacccccacccagcccggcagcacccccagaatcagcaccatgagacccctggccaccgcctacaaggccagcaccagcgactaccaggtgatcagcgacagacagacccccaagaaggacgagagcctggtgagcaaggccatggagtacatgttcggctggtag

SEQ ID NO: 91734 - DNA, 930 bp, synthetic construct
  misc_feature 1..930: note = Description of Artificial Sequence: Synthetic coding sequence
  source 1..930: mol_type = other DNA
atgatgctgggcagccccaccagccccaagcccggcgtgaacgcccagttcctgcccggcttcctgatgggcgacctgcccgcccccgtgaccccccagcccagaagcatcagcggccccagcgtgggcgtgatggagatgagaagccccctgctggccggcggcagccccccccagcccgtggtgcccgcccacaaggacaagagcggcgccccccccgtgagaagcatctacgacgacatcagcagccccggcctgggcagcacccccctgaccagcagaagacagcccaacatcagcgtgatgcagagccccctggtgggcgtgaccagcacccccggcaccggccagagcatgttcagccccgccagcatcggccagcccagaaagaccaccctgagccccgcccagctggaccccttctacacccagggcgacagcctgaccagcgaggaccacctggacgacagctgggtgaccgtgttcggcttcccccaggccagcgccagctacatcctgctgcagttcgcccagtacggcaacatcctgaagcacgtgatgagcaacaccggcaactggatgcacatcagataccagagcaagctgcaggccagaaaggccctgagcaaggacggcagaatcttcggcgagagcatcatgatcggcgtgaagccctgcatcgacaagagcgtgatggagagcagcgacagatgcgccctgagcagccccagcctggccttcaccccccccatcaagaccctgggcacccccacccagcccggcagcacccccagaatcagcaccatgagacccctggccaccgcctacaaggccagcaccagcgactaccaggtgatcagcgacagacagacccccaagaaggacgagagcctggtgagcaaggccatggagtacatgttcggctggtag

SEQ ID NO: 91735 - DNA, 576 bp, synthetic construct
  misc_feature 1..576: note = Description of Artificial Sequence: Synthetic coding sequence
  source 1..576: mol_type = other DNA
atgttcagccccgccagcatcggccagcccagaaagaccaccctgagccccgcccagctggaccccttctacacccagggcgacagcctgaccagcgaggaccacctggacgacagctgggtgaccgtgttcggcttcccccaggccagcgccagctacatcctgctgcagttcgcccagtacggcaacatcctgaagcacgtgatgagcaacaccggcaactggatgcacatcagataccagagcaagctgcaggccagaaaggccctgagcaaggacggcagaatcttcggcgagagcatcatgatcggcgtgaagccctgcatcgacaagagcgtgatggagagcagcgacagatgcgccctgagcagccccagcctggccttcaccccccccatcaagaccctgggcacccccacccagcccggcagcacccccagaatcagcaccatgagacccctggccaccgcctacaaggccagcaccagcgactaccaggtgatcagcgacagacagacccccaagaaggacgagagcctggtgagcaaggccatggagtacatgttcggctggtag

SEQ ID NO: 91736 - DNA, 981 bp, synthetic construct
  misc_feature 1..981: note = Description of Artificial Sequence: Synthetic coding sequence
  source 1..981: mol_type = other DNA
atgaagcaggacgccagcagaaacgccgcctacaccgtggactgcgaggactacgtgcacgtggtggagttcaaccccttcgagaacggcgacagcggcaacctgatcgcctacggcggcaacaactacgtggtgatcggcacctgcaccttccaggaggaggaggccgacgtggagggcatccagtacaagaccctgagaaccttccaccacggcgtgagagtggacggcatcgcctggagccccgagaccagactggacagcctgccccccgtgatcaagttctgcaccagcgccgccgacatgaagatcagactgttcaccagcgacctgcaggacaagaacgagtacaaggtgctggagggccacaccgacttcatcaacggcctggtgttcgaccccaaggagggccaggagatcgccagcgtgagcgacgaccacacctgcagaatctggaacctggagggcgtgcagaccgcccacttcgtgctgcacagccccggcatgagcgtgtgctggcaccccgaggagaccttcaagctgatggtggccgagaagaacggcaccatcagattctacgacctgctggcccagcaggccatcctgagcctggagagcgagcaggtgcccctgatgagcgcccactggtgcctgaagaacaccttcaaggtgggcgccgtggccggcaacgactggctgatctgggacatcaccagaagcagctacccccagaacaagagacccgtgcacatggacagagcctgcctgttcagatggagcaccatcagcgagaacctgttcgccaccaccggctaccccggcaagatggccagccagttccagatccaccacctgggccacccccagcccatcctgatgggcagcgtggccgtgggcagcggcctgagctggcacagaaccctgcccctgtgcgtgatcggcggcgaccacaagctgctgttctgggtgaccgaggtgtag

SEQ ID NO: 91737 - DNA, 156 bp, synthetic construct
  misc_feature 1..156: note = Description of Artificial Sequence: Synthetic coding sequence
  source 1..156: mol_type = other DNA
atgaagcaggacgccagcagaaacgccgcctacaccgtggactgcgaggactacgtgcacgtggtggagttcaaccccttcgagaacggcgacagcggcaacctgatcgcctacggcggcaacaactacgtggtgatcggcacctgcaccttctag

SEQ ID NO: 91738 - DNA, 981 bp, synthetic construct; identical to SEQ ID NO: 91736
  misc_feature 1..981: note = Description of Artificial Sequence: Synthetic coding sequence
  source 1..981: mol_type = other DNA

SEQ ID NO: 91739 - DNA, 1143 bp, synthetic construct
  misc_feature 1..1143: note = Description of Artificial Sequence: Synthetic coding sequence
  source 1..1143: mol_type = other DNA
atggaggagatctacgccaagttcgtgagccagaagatcagcaagaccagatggagacccctgccccccggcagcctgcagaccgccgagaccttcgccaccggcagctgggacaacgaggagaactacatcagcctgtggagcatcggcgacttcggcaacctggacagcgacggcggcttcgagggcgaccaccagctgctgtgcgacatcagacaccacggcgacgtgatggacctgcagttcttcgaccaggagagaatcgtggccgccagcagcaccggctgcgtgaccgtgttcctgcaccaccccaacaaccagaccctgagcgtgaaccagcagtggaccaccgcccactaccacaccggccccggcagccccagctacagcagcgccccctgcaccggcgtggtgtgcaacaaccccgagatcgtgaccgtgggcgaggacggcagaatcaacctgttcagagccgaccacaaggaggccgtgagaaccatcgacaacgccgacagcagcaccctgcacgccgtgaccttcctgagaacccccgagatcctgaccgtgaacagcatcggccagctgaagatctgggacttcagacagcagggcaacgagcccagccagatcctgagcctgaccggcgacagagtgcccctgcactgcgtggacagacaccccaaccagcagcacgtggtggccaccggcggccaggacggcatgctgagcatctgggacgtgagacagggcaccatgcccgtgagcctgctgaaggcccacgaggccgagatgtgggaggtgcacttccaccccagcaaccccgagcacctgttcacctgcagcgaggacggcagcctgtggcactgggacgccagcaccgacgtgcccgagaagagcagcctgttccaccagggcggcagaagcagcaccttcctgagccacagcatcagcaaccaggccaacgtgcaccagagcgtgatcagcagctggctgagcaccgaccccgccaaggacagaatcgagatcaccagcctgctgcccagcagaagcctgagcgtgaacaccctggacgtgctgggcccctgcctggtgtgcggcaccgacgccgaggccatctacgtgaccagacacctgttcagctag

SEQ ID NO: 91740 - DNA, 747 bp, synthetic construct
  misc_feature 1..747: note = Description of Artificial Sequence: Synthetic coding sequence
  source 1..747: mol_type = other DNA
atgggcggccccctgagcctgggcaccgactgcgcccacaccggctacagaagagagctgaccctgtgcagccacagactgagacccaaggtgcccagcaaccagggcagcgccggcagaggcggcgccgagagaagagtgctgtgcctgctgttcgccgtgcccgccgccgccgccttcggcatggaggagatctacgccaagttcgtgagccagaagatcagcaagaccagatggagacccctgccccccggcagcctgcagaccgccgagaccttcgccaccggcagctgggacaacgaggagaactacatcagcctgtggagcatcggcgacttcggcaacctggacagcgacggcggcttcgagggcgaccaccagctgctgtgcgacatcagacaccacggcgacgtgatggacctgcagttcttcgaccaggagagaatcgtggccgccagcagcaccggctgcgtgaccgtgttcctgcaccaccccaacaaccagaccctgagcgtgaaccagcagtggaccaccgcccactaccacaccggccccggcagccccagctacagcagcgccccctgcaccggcgtggtgtgcaacaaccccgagatcgtgaccgtgggcgaggacggcagaatcaacctgttcagagccgaccacaaggaggccgtgagaaccatcggcctggtgaccgagtgccacagcaccgtgctgatcgacatccccaccaacagcatgctgtag

SEQ ID NO: 91741 - DNA, 1143 bp, synthetic construct; identical to SEQ ID NO: 91739
  misc_feature 1..1143: note = Description of Artificial Sequence: Synthetic coding sequence
  source 1..1143: mol_type = other DNA

SEQ ID NO: 91742 - DNA, 1407 bp, synthetic construct
  misc_feature 1..1407: note = Description of Artificial Sequence: Synthetic coding sequence
  source 1..1407: mol_type = other DNA
atggccaagagaaacgccgagaaggagctgaccgacagaaactgggaccaggaggacgaggccgaggaggtgggcaccttcagcatggccagcgaggaggtgctgaagaacagagccatcaagaaggccaagagaagaaacgtgggcttcgagagcgacaccggcggcgccttcaagggcttcaagggcctggtggtgcccagcggcggcggcagattcagcggcttcggcagcggcgccggcggcaagcccctggagggcctgagcaacggcaacaacatcaccagcgccccccccttcgccagcgccaaggccgccgccgaccccaaggtggccttcggcagcctggccgccaacggccccaccaccctggtggacaaggtgagcaaccccaagaccaacggcgacagccagcagcccagcagcagcggcctggccagcagcaaggcctgcgtgggcaacgcctaccacaagcagctggccgccctgaactgcagcgtgagagactggatcgtgaagcacgtgaacaccaaccccctgtgcgacctgacccccatcttcaaggactacgagaagtacctggccaacatcgagcagcagcacggcaacagcggcagaaacagcgagagcgagagcaacaaggtggccgccgagacccagagccccagcctgttcggcagcaccaagctgcagcaggagagcaccttcctgttccacggcaacaagaccgaggacacccccgacaagaagatggaggtggccagcgagaagaagaccgaccccagcagcctgggcgccaccagcgccagcttcaacttcggcaagaaggtggacagcagcgtgctgggcagcctgagcagcgtgcccctgaccggcttcagcttcagccccggcaacagcagcctgttcggcaaggacaccacccagagcaagcccgtgagcagccccttccccaccaagcccctggagggccaggccgagggcgacagcggcgagtgcaagggcggcgacgaggaggagaacgacgagccccccaaggtggtggtgaccgaggtgaaggaggaggacgccttctacagcaagaagtgcaagctgttctacaagaaggacaacgagttcaaggagaagggcatcggcaccctgcacctgaagcccaccgccaaccagaagacccagctgctggtgagagccgacaccaacctgggcaacatcctgctgaacgtgctgatcccccccaacatgccctgcaccagaaccggcaagaacaacgtgctgatcgtgtgcgtgcccaacccccccatcgacgagaagaacgccaccatgcccgtgaccatgctgatcagagtgaagaccagcgaggacgccgacgagctgcacaagatcctgctggagaagaaggacgcctag

SEQ ID NO: 91743 - DNA, 1323 bp, synthetic construct
  misc_feature 1..1323: note = Description of Artificial Sequence: Synthetic coding sequence
  source 1..1323: mol_type = other DNA
atggccagcgaggaggtgctgaagaacagagccatcaagaaggccaagagaagaaacgtgggcttcgagagcgacaccggcggcgccttcaagggcttcaagggcctggtggtgcccagcggcggcggcagattcagcggcttcggcagcggcgccggcggcaagcccctggagggcctgagcaacggcaacaacatcaccagcgccccccccttcgccagcgccaaggccgccgccgaccccaaggtggccttcggcagcctggccgccaacggccccaccaccctggtggacaaggtgagcaaccccaagaccaacggcgacagccagcagcccagcagcagcggcctggccagcagcaaggcctgcgtgggcaacgcctaccacaagcagctggccgccctgaactgcagcgtgagagactggatcgtgaagcacgtgaacaccaaccccctgtgcgacctgacccccatcttcaaggactacgagaagtacctggccaacatcgagcagcagcacggcaacagcggcagaaacagcgagagcgagagcaacaaggtggccgccgagacccagagccccagcctgttcggcagcaccaagctgcagcaggagagcaccttcctgttccacggcaacaagaccgaggacacccccgacaagaagatggaggtggccagcgagaagaagaccgaccccagcagcctgggcgccaccagcgccagcttcaacttcggcaagaaggtggacagcagcgtgctgggcagcctgagcagcgtgcccctgaccggcttcagcttcagccccggcaacagcagcctgttcggcaaggacaccacccagagcaagcccgtgagcagccccttccccaccaagcccctggagggccaggccgagggcgacagcggcgagtgcaagggcggcgacgaggaggagaacgacgagccccccaaggtggtggtgaccgaggtgaaggaggaggacgccttctacagcaagaagtgcaagctgttctacaagaaggacaacgagttcaaggagaagggcatcggcaccctgcacctgaagcccaccgccaaccagaagacccagctgctggtgagagccgacaccaacctgggcaacatcctgctgaacgtgctgatcccccccaacatgccctgcaccagaaccggcaagaacaacgtgctgatcgtgtgcgtgcccaacccccccatcgacgagaagaacgccaccatgcccgtgaccatgctgatcagagtgaagaccagcgaggacgccgacgagctgcacaagatcctgctggagaagaaggacgcctag

SEQ ID NO: 91744 - DNA, 1323 bp, synthetic construct; identical to SEQ ID NO: 91743
  misc_feature 1..1323: note = Description of Artificial Sequence: Synthetic coding sequence
  source 1..1323: mol_type = other DNA

SEQ ID NO: 91745 - DNA, 27 bp, synthetic construct
  misc_feature 1..27: note = Description of Artificial Sequence: Synthetic coding sequence
  source 1..27: mol_type = other DNA
atggccagcgaggaggtgctgaagtag

SEQ ID NO: 91746 - DNA, 537 bp, synthetic construct
  misc_feature 1..537: note = Description of Artificial Sequence: Synthetic coding sequence
  source 1..537: mol_type = other DNA
atggccaagagaaacgccgagaaggagctgaccgacagaaactgggaccaggaggacgaggccgaggaggtgggcaccttcagcatggccagcgaggaggtgctgaagaacagagccatcaagaaggccaagagaagaaacgtgggcttcgagagcgacaccggcggcgccttcaagggcttcaagggcctggtggtgcccagcggcggcggcagattcagcggcttcggcagcggcgccggcggcaagcccctggagggcctgagcaacggcaacaacatcaccagcgccccccccttcgccagcgccaaggccgccgccgaccccaaggtggccttcggcggcgacgaggaggagaacgacgagccccccaaggtggtggtgaccgaggtgaaggaggaggacgccttctacagcaagaagtgcaagctgttctacaagaaggacaacgagttcaaggagaagggcatcggcaccctgcacctgaagcccaccgccaaccagaagacccagctgctggtgagagccgacacctag

SEQ ID NO: 91747 - DNA, 138 bp, synthetic construct
  misc_feature 1..138: note = Description of Artificial Sequence: Synthetic coding sequence
  source 1..138: mol_type = other DNA
atggccaagagaaacgccgagaaggagctgaccgacagaaactgggaccaggaggacgaggccgaggaggtgggcaccttcagcatggccagcgaggaggtgctgaagaacagagccatcaagaaggccaagagatag

SEQ ID NO: 91748 - DNA, 657 bp, synthetic construct
  misc_feature 1..657: note = Description of Artificial Sequence: Synthetic coding sequence
  source 1..657: mol_type = other DNA
atggaggtggccagcgagaagaagaccgaccccagcagcctgggcgccaccagcgccagcttcaacttcggcaagaaggtggacagcagcgtgctgggcagcctgagcagcgtgcccctgaccggcttcagcttcagccccggcaacagcagcctgttcggcaaggacaccacccagagcaagcccgtgagcagccccttccccaccaagcccctggagggccaggccgagggcgacagcggcgagtgcaagggcggcgacgaggaggagaacgacgagccccccaaggtggtggtgaccgaggtgaaggaggaggacgccttctacagcaagaagtgcaagctgttctacaagaaggacaacgagttcaaggagaagggcatcggcaccctgcacctgaagcccaccgccaaccagaagacccagctgctggtgagagccgacaccaacctgggcaacatcctgctgaacgtgctgatcccccccaacatgccctgcaccagaaccggcaagaacaacgtgctgatcgtgtgcgtgcccaacccccccatcgacgagaagaacgccaccatgcccgtgaccatgctgatcagagtgaagaccagcgaggacgccgacgagctgcacaagatcctgctggagaagaaggacgcctag

SEQ ID NO: 91749 - DNA, 231 bp, synthetic construct
  misc_feature 1..231: note = Description of Artificial Sequence: Synthetic coding sequence
  source 1..231: mol_type = other DNA
atggccaagagaaacgccgagaaggagctgaccgacagaaactgggaccaggaggacgaggccgaggaggtgggcaccttcagcatggccagcgaggaggtgctgaagaacagagccatcaagaaggccaagagaagaaacgtgggcttcgaggtgctgctgctgcagatggccctgcccccctggctgatcaagttccagatccccaagctgatgggcaccgtgagctag

SEQ ID NO: 91750 - DNA, 15 bp, synthetic construct
  misc_feature 1..15: note = Description of Artificial Sequence: Synthetic coding sequence
  source 1..15: mol_type = other DNA
atggccaagagatag

SEQ ID NO: 91751 - DNA, 33 bp, synthetic construct
  misc_feature 1..33: note = Description of Artificial Sequence: Synthetic coding sequence
  source 1..33: mol_type = other DNA
atggccaagagaaacgccgagaaggagctgtag

SEQ ID NO: 91752 - DNA, 1524 bp, synthetic construct
  misc_feature 1..1524: note = Description of Artificial Sequence: Synthetic coding sequence
  source 1..1524: mol_type = other DNA
atggccttcaacttcggcgcccccagcggcaccagcggcaccgccgccgccaccgccgcccccgccggcggcttcggcggcttcggcaccaccagcaccaccgccggcagcgccttcagcttcagcgcccccaccaacaccggcaccaccggcctgttcggcggcacccagaacaagggcttcggcttcggcaccggcttcggcaccaccaccggcaccagcaccggcctgggcaccggcctgggcaccggcctgggcttcggcggcttcaacacccagcagcagcagcagaccaccctgggcggcctgttcagccagcccacccaggcccccacccagagcaaccagctgatcaacaccgccagcgccctgagcgcccccaccctgctgggcgacgagagagacgccatcctggccaagtggaaccagctgcaggccttctggggcaccggcaagggctacttcaacaacaacatcccccccgtggagttcacccaggagaaccccttctgcagattcaaggccgtgggctacagctgcatgcccagcaacaaggacgaggacggcctggtggtgctggtgttcaacaagaaggagaccgagatcagaagccagcagcagcagctggtggagagcctgcacaaggtgctgggcggcaaccagaccctgaccgtgaacgtggagggcaccaagaccctgcccgacgaccagaccgaggtggtgatctacgtggtggagagaagccccaacggcaccagcagaagagtgcccgccaccaccctgtacgcccacttcgagcaggccaacatcaagacccagctgcagcagctgggcgtgaccctgagcatgaccagaaccgagctgagccccgcccagatcaagcagctgctgcagaacccccccgccggcgtggaccccatcatctgggagcaggccaaggtggacaaccccgacagcgagaagctgatccccgtgcccatggtgggcttcaaggagctgctgagaagactgaaggtgcaggaccagatgaccaagcagcaccagaccagactggacatcatcagcgaggacatcagcgagctgcagaagaaccagaccaccagcgtggccaagatcgcccagtacaagagaaagctgatggacctgagccacagaaccctgcaggtgctgatcaagcaggagatccagagaaagagcggctacgccatccaggccgacgaggagcagctgagagtgcagctggacaccatccagggcgagctgaacgcccccacccagttcaagggcagactgaacgagctgatgagccagatcagaatgcagaaccacttcggcgccgtgagaagcgaggagagatactacatcgacgccgacctgctgagagagatcaagcagcacctgaagcagcagcaggagggcctgagccacctgatcagcatcatcaaggacgacctggaggacatcaagctggtggagcacggcctgaacgagaccatccacatcagaggcggcgtgttcagctag

SEQ ID NO: 91753 - DNA, 876 bp, synthetic construct
  misc_feature 1..876: note = Description of Artificial Sequence: Synthetic coding sequence
  source 1..876: mol_type = other DNA
atgcccagcaacaaggacgaggacggcctggtggtgctggtgttcaacaagaaggagaccgagatcagaagccagcagcagcagctggtggagagcctgcacaaggtgctgggcggcaaccagaccctgaccgtgaacgtggagggcaccaagaccctgcccgacgaccagaccgaggtggtgatctacgtggtggagagaagccccaacggcaccagcagaagagtgcccgccaccaccctgtacgcccacttcgagcaggccaacatcaagacccagctgcagcagctgggcgtgaccctgagcatgaccagaaccgagctgagccccgcccagatcaagcagctgctgcagaacccccccgccggcgtggaccccatcatctgggagcaggccaaggtggacaaccccgacagcgagaagctgatccccgtgcccatggtgggcttcaaggagctgctgagaagactgaaggtgcaggaccagatgaccaagcagcaccagaccagactggacgtgctgatcaagcaggagatccagagaaagagcggctacgccatccaggccgacgaggagcagctgagagtgcagctggacaccatccagggcgagctgaacgcccccacccagttcaagggcagactgaacgagctgatgagccagatcagaatgcagaaccacttcggcgccgtgagaagcgaggagagatactacatcgacgccgacctgctgagagagatcaagcagcacctgaagcagcagcaggagggcctgagccacctgatcagcatcatcaaggacgacctggaggacatcaagctggtggagcacggcctgaacgagaccatccacatcagaggcggcgtgttcagctag

SEQ ID NO: 91754 - DNA, 984 bp, synthetic construct
  misc_feature 1..984: note = Description of Artificial Sequence: Synthetic coding sequence
  source 1..984: mol_type = other DNA
atgcccagcaacaaggacgaggacggcctggtggtgctggtgttcaacaagaaggagaccgagatcagaagccagcagcagcagctggtggagagcctgcacaaggtgctgggcggcaaccagaccctgaccgtgaacgtggagggcaccaagaccctgcccgacgaccagaccgaggtggtgatctacgtggtggagagaagccccaacggcaccagcagaagagtgcccgccaccaccctgtacgcccacttcgagcaggccaacatcaagacccagctgcagcagctgggcgtgaccctgagcatgaccagaaccgagctgagccccgcccagatcaagcagctgctgcagaacccccccgccggcgtggaccccatcatctgggagcaggccaaggtggacaaccccgacagcgagaagctgatccccgtgcccatggtgggcttcaaggagctgctgagaagactgaaggtgcaggaccagatgaccaagcagcaccagaccagactggacatcatcagcgaggacatcagcgagctgcagaagaaccagaccaccagcgtggccaagatcgcccagtacaagagaaagctgatggacctgagccacagaaccctgcaggtgctgatcaagcaggagatccagagaaagagcggctacgccatccaggccgacgaggagcagctgagagtgcagctggacaccatccagggcgagctgaacgcccccacccagttcaagggcagactgaacgagctgatgagccagatcagaatgcagaaccacttcggcgccgtgagaagcgaggagagatactacatcgacgccgacctgctgagagagatcaagcagcacctgaagcagcagcaggagggcctgagccacctgatcagcatcatcaaggacgacctggaggacatcaagctggtggagcacggcctgaacgagaccatccacatcagaggcggcgtgttcagctag

SEQ ID NO: 91755 - DNA, 1380 bp, synthetic construct
  misc_feature 1..1380: note = Description of Artificial Sequence: Synthetic coding sequence
  source 1..1380: mol_type = other DNA
atggccttcaacttcggcgcccccagcggcaccagcggcaccgccgccgccaccgccgcccccgccggcggcttcggcggcttcggcaccaccagcaccaccgccggcagcgccttcagcttcagcgcccccaccaacaccggcaccaccgccctgggcggcctgttcagccagcccacccaggcccccacccagagcaaccagctgatcaacaccgccagcgccctgagcgcccccaccctgctgggcgacgagagagacgccatcctggccaagtggaaccagctgcaggccttctggggcaccggcaagggctacttcaacaacaacatcccccccgtggagttcacccaggagaaccccttctgcagattcaaggccgtgggctacagctgcatgcccagcaacaaggacgaggacggcctggtggtgctggtgttcaacaagaaggagaccgagatcagaagccagcagcagcagctggtggagagcctgcacaaggtgctgggcggcaaccagaccctgaccgtgaacgtggagggcaccaagaccctgcccgacgaccagaccgaggtggtgatctacgtggtggagagaagccccaacggcaccagcagaagagtgcccgccaccaccctgtacgcccacttcgagcaggccaacatcaagacccagctgcagcagctgggcgtgaccctgagcatgaccagaaccgagctgagccccgcccagatcaagcagctgctgcagaacccccccgccggcgtggaccccatcatctgggagcaggccaaggtggacaaccccgacagcgagaagctgatccccgtgcccatggtgggcttcaaggagctgctgagaagactgaaggtgcaggaccagatgaccaagcagcaccagaccagactggacatcatcagcgaggacatcagcgagctgcagaagaaccagaccaccagcgtggccaagatcgcccagtacaagagaaagctgatggacctgagccacagaaccctgcaggtgctgatcaagcaggagatccagagaaagagcggctacgccatccaggccgacgaggagcagctgagagtgcagctggacaccatccagggcgagctgaacgcccccacccagttcaagggcagactgaacgagctgatgagccagatcagaatgcagaaccacttcggcgccgtgagaagcgaggagagatactacatcgacgccgacctgctgagagagatcaagcagcacctgaagcagcagcaggagggcctgagccacctgatcagcatcatcaaggacgacctggaggacatcaagctggtggagcacggcctgaacgagaccatccacatcagaggcggcgtgttcagctag

SEQ ID NO: 91756 - DNA, 582 bp, synthetic construct
  misc_feature 1..582: note = Description of Artificial Sequence: Synthetic coding sequence
  source 1..582: mol_type = other DNA
atgagcggcttcaacttcggcggcaccggcgcccccaccggcggcttcaccttcggcaccgccaagaccgccaccaccacccccgccaccggcttcagcttcagcaccagcggcaccggcggcttcaacttcggcgcccccttccagcccgccaccagcacccccagcaccggcctgttcagcctggccacccagacccccgccacccagaccaccggcttcaccttcggcaccgccaccctggccagcggcggcaccggcttcagcctgggcatcggcgccagcaagctgaacctgagcaacaccgccgccacccccgccatggccaaccccagcggcttcggcctgggcagcagcaacctgaccaacgccatcagcagcaccgtgaccagcagccagggcaccgcccccaccggcttcgtgttcggccccagcaccaccagcgtggcccccgccaccaccagcggcggcttcagcttcaccggcggcagcaccgcccagcccagcggcttcaacatcggcagcgccggcaacagcgcccagcccaccgcccccgccaccctgcccttcacccccgcctag

SEQ ID NO: 91757 - DNA, 1569 bp, synthetic construct
  misc_feature 1..1569: note = Description of Artificial Sequence: Synthetic coding sequence
  source 1..1569: mol_type = other DNA
atgagcggcttcaacttcggcggcaccggcgcccccaccggcggcttcaccttcggcaccgccaagaccgccaccaccacccccgccaccggcttcagcttcagcaccagcggcaccggcggcttcaacttcggcgcccccttccagcccgccaccagcacccccagcaccggcctgttcagcctggccacccagacccccgccacccagaccaccggcttcaccttcggcaccgccaccctggccagcggcggcaccggcttcagcctgggcatcggcgccagcaagctgaacctgagcaacaccgccgccacccccgccatggccaaccccagcggcttcggcctgggcagcagcaacctgaccaacgccatcagcagcaccgtgaccagcagccagggcaccgcccccaccggcttcgtgttcggccccagcaccaccagcgtggcccccgccaccaccagcggcggcttcagcttcaccggcggcagcaccgcccagcccagcggcttcaacatcggcagcgccggcaacagcgcccagcccaccgcccccgccaccctgcccttcacccccgccacccccgccgccaccaccgccggcgccacccagcccgccgcccccacccccaccgccaccatcaccagcaccggccccagcctgttcgccagcatcgccaccgcccccaccagcagcgccaccaccggcctgagcctgtgcacccccgtgaccaccgccggcgcccccaccgccggcacccagggcttcagcctgaaggcccccggcgccgccagcggcaccagcaccaccaccagcaccgccgccaccgccaccgccaccaccaccagcagcagcagcaccaccggcttcgccctgaacctgaagcccctggcccccgccggcatccccagcaacaccgccgccgccgtgaccgccccccccggccccggcgccgccgccggcgccgccgccagcagcgccatgacctacgcccagctggagagcctgatcaacaagtggagcctggagctggaggaccaggagagacacttcctgcagcaggccacccaggtgaacgcctgggacagaaccctgatcgagaacggcgagaagatcaccagcctgcacagagaggtggagaaggtgaagctggaccagaagagactggaccaggagctggacttcatcctgagccagcagaaggagctggaggacctgctgagccccctggaggagctggtgaaggagcagagcggcaccatctacctgcagcacgccgacgaggagagagagaagacctacaagctggccgagaacatcgacgcccagctgaagagaatggcccaggacctgaaggacatcatcgagcacctgaacaccagcggcgcccccgccgacaccagcgaccccctgcagcagatctgcaagatcctgaacgcccacatggacagcctgcagtggatcgaccagaacagcgccctgctgcagagaaaggtggaggaggtgaccaaggtgtgcgagggcagaagaaaggagcaggagagaagcttcagaatcaccttcgactag

SEQ ID NO: 91758 - DNA, 1569 bp, synthetic construct; identical to SEQ ID NO: 91757
  misc_feature 1..1569: note = Description of Artificial Sequence: Synthetic coding sequence
  source 1..1569: mol_type = other DNA

SEQ ID NO: 91759 - DNA, 1569 bp, synthetic construct; identical to SEQ ID NO: 91757
  misc_feature 1..1569: note = Description of Artificial Sequence: Synthetic coding sequence
  source 1..1569: mol_type = other DNA

SEQ ID NO: 91760 - DNA, 1971 bp, synthetic construct
  misc_feature 1..1971: note = Description of Artificial Sequence: Synthetic coding sequence
  source 1..1971: mol_type = other DNA
atggaggagctggacggcgagcccaccgtgaccctgatccccggcgtgaacagcaagaagaaccagatgtacttcgactggggccccggcgagatgctggtgtgcgagaccagcttcaacaagaaggagaagagcgagatggtgcccagctgccccttcatctacatcatcagaaaggacgtggacgtgtacagccagatcctgagaaagctgttcaacgagagccacggcatcttcctgggcctgcagagaatcgacgaggagctgaccggcaagagcagaaagagccagctggtgagagtgagcaagaactacagaagcgtgatcagagcctgcatggaggagatgcaccaggtggccatcgccgccaaggaccccgccaacggcagacagttcagcagccaggtgagcatcctgagcgccatggagctgatctggaacctgtgcgagatcctgttcatcgaggtggcccccgccggccccctgctgctgcacctgctggactgggtgagactgcacgtgtgcgaggtggacagcctgagcgccgacgtgctgggcagcgagaaccccagcaagcacgacagcttctggaacctggtgaccatcctggtgctgcagggcagactggacgaggccagacagatgctgagcaaggaggccgacgccagccccgccagcgccggcatctgcagaatcatgggcgacctgatgagaaccatgcccatcctgagccccggcaacacccagaccctgaccgagctggagctgaagtggcagcactggcacgaggagtgcgagagatacctgcaggacagcaccttcgccaccagcccccacctggagagcctgctgaagatcatgctgggcgacgaggccgccctgctggagcagaaggagctgctgagcaactggtaccacttcctggtgaccagactgctgtacagcaaccccaccgtgaagcccatcgacctgcactactacgcccagagcagcctggacctgttcctgggcggcgagagcagccccgagcccctggacaacatcctgctggccgccttcgagttcgacatccaccaggtgatcaaggagtgcagcatcgccctgagcaactggtggttcgtggcccacctgaccgacctgctggaccactgcaagctgctgcagagccacaacctgtacttcggcagcaacatgagagagttcctgctgctggagtacgccagcggcctgttcgcccaccccagcctgtggcagctgggcgtggactacttcgactactgccccgagctgggcagagtgagcctggagctgcacatcgagagaatccccctgaacaccgagcagaaggccctgaaggtgctgagaatctgcgagcagagacagatgaccgagcaggtgagaagcatctgcaagatcctggccatgaaggccgtgagaaacaacagactgggcagcgccctgagctggagcatcagagccaaggacgccgccttcgccaccctggtgagcgacagattcctgagagactactgcgagagaggctgcttcagcgacctggacctgatcgacaacctgggccccgccatgatgctgagcgacagactgaccttcctgggcaagtacagagagttccacagaatgtacggcgagaagagattcgccgacgccgccagcctgctgctgagcctgatgaccagcagaatcgcccccagaagcttctggatgaccctgctgaccgacgccctgcccctgctggagcagaagcaggtgatcttcagcgccgagcagacctacgagctgatgagatgcctggaggacctgaccagcagaagacccgtgcacggcgagagcgacaccgagcagctgcaggacgacgacatcgagaccaccaaggtggagatgctgagactgagcctggccagaaacctggccagagccatcatcagagagggcagcctggagggcagctag

SEQ ID NO: 91761 - DNA, 1389 bp, synthetic construct
  misc_feature 1..1389: note = Description of Artificial Sequence: Synthetic coding sequence
  source 1..1389: mol_type = other DNA
atggccgccagcagcgccgccagaagccccttctgccagcagtggagcagcagcggcacctgcgtgagattcttcctgctgaagtggccccaggtgaccatcctggtgctgcagggcagactggacgaggccagacagatgctgagcaaggaggccgacgccagccccgccagcgccggcatctgcagaatcatgggcgacctgatgagaaccatgcccatcctgagccccggcaacacccagaccctgaccgagctggagctgaagtggcagcactggcacgaggagtgcgagagatacctgcaggacagcaccttcgccaccagcccccacctggagagcctgctgaagatcatgctgggcgacgaggccgccctgctggagcagaaggagctgctgagcaactggtaccacttcctggtgaccagactgctgtacagcaaccccaccgtgaagcccatcgacctgcactactacgcccagagcagcctggacctgttcctgggcggcgagagcagccccgagcccctggacaacatcctgctggccgccttcgagttcgacatccaccaggtgatcaaggagtgcagcatcgccctgagcaactggtggttcgtggcccacctgaccgacctgctggaccactgcaagctgctgcagagccacaacctgtacttcggcagcaacatgagagagttcctgctgctggagtacgccagcggcctgttcgcccaccccagcctgtggcagctgggcgtggactacttcgactactgccccgagctgggcagagtgagcctggagctgcacatcgagagaatccccctgaacaccgagcagaaggccctgaaggtgctgagaatctgcgagcagagacagatgaccgagcaggtgagaagcatctgcaagatcctggccatgaaggccgtgagaaacaacagactgggcagcgccctgagctggagcatcagagccaaggacgccgccttcgccaccctggtgagcgacagattcctgagagactactgcgagagaggctgcttcagcgacctggacctgatcgacaacctgggccccgccatgatgctgagcgacagactgaccttcctgggcaagtacagagagttccacagaatgtacggcgagaagagattcgccgacgccgccagcctgctgctgagcctgatgaccagcagaatcgcccccagaagcttctggatgaccctgctgaccgacgccctgcccctgctggagcagaagcaggtgaaggtggccgccgccgtggtgttcttcgcctgccagagcctgctggagctgagctgcatcgccgtggccgacgtgagagtgagcagcttcgtggtgctgcccgtgagagtgtacagcccctag

SEQ ID NO: 91762 - DNA, 975 bp, synthetic construct
  misc_feature 1..975: note = Description of Artificial Sequence: Synthetic coding sequence
  source 1..975: mol_type = other DNA
atggtgcccagctgccccttcatctacatcatcagaaaggacgtggacgtgtacagccagatcctgagaaagctgttcaacgagagccacggcatcttcctgggcctgcagagaatcgacgaggagctgaccggcaagagcagaaagagccagctggtgagagtgagcaagaactacagaagcgtgatcagagcctgcatggaggagatgcaccaggtggccatcgccgccaaggaccccgccaacggcagacagttcagcagccaggtgagcatcctgagcgccatggagctgatctggaacctgtgcgagatcctgttcatcgaggtggcccccgccggccccctgctgctgcacctgctggactgggtgagactgcacgtgtgcgaggtggacagcctgagcgccgacgtgctgggcagcgagaaccccagcaagcacgacagcttctggaacctggtgaccatcctggtgctgcagggcagactggacgaggccagacagatgctgagcaaggaggccgacgccagccccgccagcgccggcatctgcagaatcatgggcgacctgatgagaaccatgcccatcctgagccccggcaacacccagaccctgaccgagctggagctgaagtggcagcactggcacgaggagtgcgagagatacctgcaggacagcaccttcgccaccagcccccacctggagagcctgctgaagatcatgctgggcgacgaggccgccctgctggagcagaaggagctgctgagcaactggtaccacttcctggtgaccagactgctgtacagcaaccccaccgtgaagcccatcgacctgcactactacgcccagagcagcctggacctgttcctgggcggcgagagcagccccgagcccctggacaacatcctgctggccgccttcgagttcgacatccaccaggtgatcaaggagtgcagagacgtgcacctgaagtag

SEQ ID NO: 91763 - DNA, 780 bp, synthetic construct
  misc_feature 1..780: note = Description of Artificial Sequence: Synthetic coding sequence
  source 1..780: mol_type = other DNA
atgagagagttcctgctgctggagtacgccagcggcctgttcgcccaccccagcctgtggcagctgggcgtggactacttcgactactgccccgagctgggcagagtgagcctggagctgcacatcgagagaatccccctgaacaccgagcagaaggccctgaaggtgctgagaatctgcgagcagagacagatgaccgagcaggtgagaagcatctgcaagatcctggccatgaaggccgtgagaaacaacagactgggcagcgccctgagctggagcatcagagccaaggacgccgccttcgccaccctggtgagcgacagattcctgagagactactgcgagagaggctgcttcagcgacctggacctgatcgacaacctgggccccgccatgatgctgagcgacagactgaccttcctgggcaagtacagagagttccacagaatgtacggcgagaagagattcgccgacgccgccagcctgctgctgagcctgatgaccagcagaatcgcccccagaagcttctggatgaccctgctgaccgacgccctgcccctgctggagcagaagcaggtgatcttcagcgccgagcagacctacgagctgatgagatgcctggaggacctgaccagcagaagacccgtgcacggcgagagcgacaccgagcagctgcaggacgacgacatcgagaccaccaaggtggagatgctgagactgagcctggccagaaacctggccagagccatcatcagagagggcagcctggagggcagctag

SEQ ID NO: 91764 - DNA, 1833 bp, synthetic construct
  misc_feature 1..1833: note = Description of Artificial Sequence: Synthetic coding sequence
  source 1..1833: mol_type = other DNA
atggtgcccagctgccccttcatctacatcatcagaaaggacgtggacgtgtacagccagatcctgagaaagctgttcaacgagagccacggcatcttcctgggcctgcagagaatcgacgaggagctgaccggcaagagcagaaagagccagctggtgagagtgagcaagaactacagaagcgtgatcagagcctgcatggaggagatgcaccaggtggccatcgccgccaaggaccccgccaacggcagacagttcagcagccaggtgagcatcctgagcgccatggagctgatctggaacctgtgcgagatcctgttcatcgaggtggcccccgccggccccctgctgctgcacctgctggactgggtgagactgcacgtgtgcgaggtggacagcctgagcgccgacgtgctgggcagcgagaaccccagcaagcacgacagcttctggaacctggtgaccatcctggtgctgcagggcagactggacgaggccagacagatgctgagcaaggaggccgacgccagccccgccagcgccggcatctgcagaatcatgggcgacctgatgagaaccatgcccatcctgagccccggcaacacccagaccctgaccgagctggagctgaagtggcagcactggcacgaggagtgcgagagatacctgcaggacagcaccttcgccaccagcccccacctggagagcctgctgaagatcatgctgggcgacgaggccgccctgctggagcagaaggagctgctgagcaactggtaccacttcctggtgaccagactgctgtacagcaaccccaccgtgaagcccatcgacctgcactactacgcccagagcagcctggacctgttcctgggcggcgagagcagccccgagcccctggacaacatcctgctggccgccttcgagttcgacatccaccaggtgatcaaggagtgcagcatcgccctgagcaactggtggttcgtggcccacctgaccgacctgctggaccactgcaagctgctgcagagccacaacctgtacttcggcagcaacatgagagagttcctgctgctggagtacgccagcggcctgttcgcccaccccagcctgtggcagctgggcgtggactacttcgactactgccccgagctgggcagagtgagcctggagctgcacatcgagagaatccccctgaacaccgagcagaaggccctgaaggtgctgagaatctgcgagcagagacagatgaccgagcaggtgagaagcatctgcaagatcctggccatgaaggccgtgagaaacaacagactgggcagcgccctgagctggagcatcagagccaaggacgccgccttcgccaccctggtgagcgacagattcctgagagactactgcgagagaggctgcttcagcgacctggacctgatcgacaacctgggccccgccatgatgctgagcgacagactgaccttcctgggcaagtacagagagttccacagaatgtacggcgagaagagattcgccgacgccgccagcctgctgctgagcctgatgaccagcagaatcgcccccagaagcttctggatgaccctgctgaccgacgccctgcccctgctggagcagaagcaggtgatcttcagcgccgagcagacctacgagctgatgagatgcctggaggacctgaccagcagaagacccgtgcacggcgagagcgacaccgagcagctgcaggacgacgacatcgagaccaccaaggtggagatgctgagactgagcctggccagaaacctggccagagccatcatcagagagggcagcctggagggcagctag

SEQ ID NO: 91765 - DNA, 846 bp, synthetic construct
  misc_feature 1..846: note = Description of Artificial Sequence: Synthetic coding sequence
  source 1..846: mol_type = other DNA
atgaagctggccgccatgatcaagaagatgtgccccagcgacagcgagctgagcatccccgccaagaactgctacagaatggtgatcctgggcagcagcaaggtgggcaagaccgccatcgtgagcagattcctgaccggcagattcgaggacgcctacacccccaccatcgaggacttccacagaaagttctacagcatcagaggcgaggtgtaccagctggacatcctggacaccagcggcaaccaccccttccccgccatgagaagactgagcatcctgaccggcgacgtgttcatcctggtgttcagcctggacaacagagacagcttcgaggaggtgcagagactgagacagcagatcctggacaccaagagctgcctgaagaacaagaccaaggagaacgtggacgtgcccctggtgatctgcggcaacaagggcgacagagacttctacagagaggtggaccagagagagatcgagcagctggtgggcgacgacccccagagatgcgcctacttcgagatcagcgccaagaagaacagcagcctggaccagatgttcagagccctgttcgccatggccaagctgcccagcgagatgagccccgacctgcacagaaaggtgagcgtgcagtactgcgacgtgctgcacaagaaggccctgagaaacaagaagctgctgagagccggcagcggcggcggcggcggcgaccccggcgacgccttcggcatcgtggcccccttcgccagaagacccagcgtgcacagcgacctgatgtacatcagagagaaggccagcgccggcagccaggccaaggacaaggagagatgcgtgatcagctag

SEQ ID NO: 91766 - DNA, 1881 bp, synthetic construct
  misc_feature 1..1881: note = Description of Artificial Sequence: Synthetic coding sequence
  source 1..1881: mol_type = other DNA
atggtgctggagctgcccaagagatggggcaagaacagcgagttcgagggcggcaagagcaccgtgaactgcagcaccacccccgtggccgagagattcttcaccagcagcaccagcctgaccctgaagcacgccgcctggtaccccagcgagatcctggacccccacgtggtgctgctgaccagcgacaacgtgatcagaatctacagcctgagagagccccagacccccaccaacgtgatcatcctgagcgaggccgaggaggagagcctggtgctgaacaagggcagagcctacaccgccagcctgggcgagaccgccgtggccttcgacttcggccccctggccgccgtgcccaagaccctgttcggccagaacggcaaggacgaggtggtggcctaccccctgtacatcctgtacgagaacggcgagaccttcctgacctacatcagcctgctgcacagccccggcaacatcggcaagctgctgggccccctgcccatgcaccccgccgccgaggacaactacggctacgacgcctgcgccgtgctgtgcctgccctgcgtgcccaacatcctggtgatcgccaccgagagcggcatgctgtaccactgcgtggtgctggagggcgaggaggaggacgaccacaccagcgagaagagctgggacagcagaatcgacctgatccccagcctgtacgtgttcgagtgcgtggagctggagctggccctgaagctggccagcggcgaggacgaccccttcgacagcgacttcagctgccccgtgaagctgcacagagaccccaagtgccccagcagataccactgcacccacgaggccggcgtgcacagcgtgggcctgacctggatccacaagctgcacaagttcctgggcagcgacgaggaggacaaggacagcctgcaggagctgagcaccgagcagaagtgcttcgtggagcacatcctgtgcaccaagcccctgccctgcagacagcccgcccccatcagaggcttctggatcgtgcccgacatcctgggccccaccatgatctgcatcaccagcacctacgagtgcctgatctggcccctgctgagcaccgtgcaccccgccagcccccccctgctgtgcaccagagaggacgtggaggtggccgagagccccctgagagtgctggccgagacccccgacagcttcgagaagcacatcagaagcatcctgcagagaagcgtggccaaccccgccttcctgaactgcttcacccagctgagaaagatcaaggtggagaccctgttcctgagagccagcgagaaggacatcgcccccccccccgaggagtgcctgcagctgctgagcagagccacccaggtgttcagagagcagtacatcctgaagcaggacctggccaaggaggagatccagagaagagtgaagctgctgtgcgaccagaagaagaagcagctggaggacctgagctactgcagagaggagagaaagagcctgagagagatggccgagagactggccgacaagtacgaggaggccaaggagaagcaggaggacatcatgaacagaatgaagaagctgctgcacagcttccacagcgagctgcccgtgctgagcgacagcgagagagacatgaagaaggagctgcagctgatccccgaccagctgagacacctgggcaacgccatcaagcaggtgaccatgaagaaggactaccagcagcagaagatggagaaggtgctgagcctgcccaagcccaccatcatcctgagcgcctaccagagaaagtgcatccagagcatcctgaaggaggagggcgagcacatcagagagatggtgaagcagatcaacgacatcagaaaccacgtgaacttctag

SEQ ID NO: 91767 - DNA, 2226 bp, synthetic construct; identical to SEQ ID NO: 77359
  misc_feature 1..2226: note = Description of Artificial Sequence: Synthetic coding sequence
  source 1..2226: mol_type = other DNA

SEQ ID NO: 91768 - DNA, 2460 bp, synthetic construct
  misc_feature 1..2460: note = Description of Artificial Sequence: Synthetic coding sequence
  source 1..2460: mol_type = other DNA
atggacaccgagggcttcggcgagctgctgcagcaggccgagcagctggccgccgagaccgagggcatcagcgagctgccccacgtggagagaaacctgcaggagatccagcaggccggcgagagactgagaagcagaaccctgaccagaaccagccaggagaccgccgacgtgaaggccagcgtgctgctgggcagcagaggcctggacatcagccacatcagccagagactggagagcctgagcgccgccaccaccttcgagcccctggagcccgtgaaggacaccgacatccagggcttcctgaagaacgagaaggacaacgccctgctgagcgccatcgaggagagcagaaagagaaccttcggcatggccgaggagtaccacagagagagcatgctggtggagtgggagcaggtgaagcagagaatcctgcacaccctgctggccagcggcgaggacgccctggacttcacccaggagagcgagcccagctacatcagcgacgtgggcccccccggcagaagcagcctggacaacatcgagatggcctacgccagacagatctacatctacaacgagaagatcgtgaacggccacctgcagcccaacctggtggacctgtgcgccagcgtggccgagctggacgacaagagcatcagcgacatgtggaccatggtgaagcagatgaccgacgtgctgctgacccccgccaccgacgccctgaagaacagaagcagcgtggaggtgagaatggagttcgtgagacaggccctggcctacctggagcagagctacaagaactacaccctggtgaccgtgttcggcaacctgcaccaggcccagctgggcggcgtgcccggcacctaccagctggtgagaagcttcctgaacatcaagctgcccgcccccctgcccggcctgcaggacggcgaggtggagggccaccccgtgtgggccctgatctactactgcatgagatgcggcgacctgctggccgccagccaggtggtgaacagagcccagcaccagctgggcgagttcaagacctggttccaggagtacatgaacagcaaggacagaagactgagccccgccaccgagaacaagctgagactgcactacagaagagccctgagaaacaacaccgacccctacaagagagccgtgtactgcatcatcggcagatgcgacgtgaccgacaaccagagcgaggtggccgacaagaccgaggactacctgtggctgaagctgaaccaggtgtgcttcgacgacgacggcaccagcagcccccaggacagactgaccctgagccagttccagaagcagctgctggaggactacggcgagagccacttcaccgtgaaccagcagcccttcctgtacttccaggtgctgttcctgaccgcccagttcgaggccgccgtggccttcctgttcagaatggagagactgagatgccacgccgtgcacgtggccctggtgctgttcgagctgaagctgctgctgaagagcagcggccagagcgcccagctgctgagccacgagcccggcgaccccccctgcctgagaagactgaacttcgtgagactgctgatgctgtacaccagaaagttcgagagcaccgaccccagagaggccctgcagtacttctacttcctgagagacgagaaggacagccagggcgagaacatgttcctgagatgcgtgagcgagctggtgatcgagagcagagagttcgacatgatcctgggcaagctggagaacgacggcagcagaaagcccggcgtgatcgacaagttcaccagcgacaccaagcccatcatcaacaaggtggccagcgtggccgagaacaagggcctgttcgaggaggccgccaagctgtacgacctggccaagaacgccgacaaggtgctggagctgatgaacaagctgctgagccccgtggtgccccagatcagcgccccccagagcaacaaggagagactgaagaacatggccctgagcatcgccgagagatacagagcccagggcatcagcgccaacaagttcgtggacagcaccttctacctgctgctggacctgatcaccttcttcgacgagtaccacagcggccacatcgacagagccttcgacatcatcgagagactgaagctggtgcccctgaaccaggagagcgtggaggagagagtggccgccttcagaaacttcagcgacgagatcagacacaacctgagcgaggtgctgctggccaccatgaacatcctgttcacccagttcaagagactgaagggcaccagccccagcagcagcagcagaccccagagagtgatcgaggacagagacagccagctgagaagccaggccagaaccctgatcaccttcgccggcatgatcccctacagaaccagcggcgacaccaacgccagactggtgcagatggaggtgctgatgaactag

SEQ ID NO: 91769 - DNA, 2091 bp, synthetic construct
  misc_feature 1..2091: note = Description of Artificial Sequence: Synthetic coding sequence
  source 1..2091: mol_type = other DNA
atggccgaggagtaccacagagagagcatgctggtggagtgggagcaggtgaagcagagaatcctgcacaccctgctggccagcggcgaggacgccctggacttcacccaggagagcgagcccagctacatcagcgacgtgggcccccccggcagaagcagcctggacaacatcgagatggcctacgccagacagatctacatctacaacgagaagatcgtgaacggccacctgcagcccaacctggtggacctgtgcgccagcgtggccgagctggacgacaagagcatcagcgacatgtggaccatggtgaagcagatgaccgacgtgctgctgacccccgccaccgacgccctgaagaacagaagcagcgtggaggtgagaatggagttcgtgagacaggccctggcctacctggagcagagctacaagaactacaccctggtgaccgtgttcggcaacctgcaccaggcccagctgggcggcgtgcccggcacctaccagctggtgagaagcttcctgaacatcaagctgcccgcccccctgcccggcctgcaggacggcgaggtggagggccaccccgtgtgggccctgatctactactgcatgagatgcggcgacctgctggccgccagccaggtggtgaacagagcccagcaccagctgggcgagttcaagacctggttccaggagtacatgaacagcaaggacagaagactgagccccgccaccgagaacaagctgagactgcactacagaagagccctgagaaacaacaccgacccctacaagagagccgtgtactgcatcatcggcagatgcgacgtgaccgacaaccagagcgaggtggccgacaagaccgaggactacctgtggctgaagctgaaccaggtgtgcttcgacgacgacggcaccagcagcccccaggacagactgaccctgagccagttccagaagcagctgctggaggactacggcgagagccacttcaccgtgaaccagcagcccttcctgtacttccaggtgctgttcctgaccgcccagttcgaggccgccgtggccttcctgttcagaatggagagactgagatgccacgccgtgcacgtggccctggtgctgttcgagctgaagctgctgctgaagagcagcggccagagcgcccagctgctgagccacgagcccggcgaccccccctgcctgagaagactgaacttcgtgagactgctgatgctgtacaccagaaagttcgagagcaccgaccccagagaggccctgcagtacttctacttcctgagagacgagaaggacagccagggcgagaacatgttcctgagatgcgtgagcgagctggtgatcgagagcagagagttcgacatgatcctgggcaagctggagaacgacggcagcagaaagcccggcgtgatcgacaagttcaccagcgacaccaagcccatcatcaacaaggtggccagcgtggccgagaacaagggcctgttcgaggaggccgccaagctgtacgacctggccaagaacgccgacaaggtgctggagctgatgaacaagctgctgagccccgtggtgccccagatcagcgccccccagagcaacaaggagagactgaagaacatggccctgagcatcgccgagagatacagagcccagggcatcagcgccaacaagttcgtggacagcaccttctacctgctgctggacctgatcaccttcttcgacgagtaccacagcggccacatcgacagagccttcgacatcatcgagagactgaagctggtgcccctgaaccaggagagcgtggaggagagagtggccgccttcagaaacttcagcgacgagatcagacacaacctgagcgaggtgctgctggccaccatgaacatcctgttcacccagttcaagagactgaagggcaccagccccagcagcagcagcagaccccagagagtgatcgaggacagagacagccagctgagaagccaggccagaaccctgatcaccttcgccggcatgatcccctacagaaccagcggcgacaccaacgccagactggtgcagatggaggtgctgatgaactag

SEQ ID NO: 91770 - DNA, 2091 bp, synthetic construct; identical to SEQ ID NO: 91769
  misc_feature 1..2091: note = Description of Artificial Sequence: Synthetic coding sequence
  source 1..2091: mol_type = other DNA

SEQ ID NO: 91771 - DNA, 5403 bp, synthetic construct
  misc_feature 1..5403: note = Description of Artificial Sequence: Synthetic coding sequence
  source 1..5403: mol_type = other DNA
atgttcaacaagagcttcggcacccccttcggcggcggcaccggcggcttcggcaccaccagcaccttcggccagaacaccggcttcggcaccaccagcggcggcgccttcggcaccagcgccttcggcagcagcaacaacaccggcggcctgttcggcaacagccagaccaagcccggcggcctgttcggcaccagcagcttcagccagcccgccaccagcaccagcaccggcttcggcttcggcaccagcaccggcaccgccaacaccctgttcggcaccgccagcaccggcaccagcctgttcagcagccagaacaacgccttcgcccagaacaagcccaccggcttcggcaacttcggcaccagcaccagcagcggcggcctgttcggcaccaccaacaccaccagcaaccccttcggcagcaccagcggcagcctgttcggccccagcagcttcaccgccgcccccaccggcaccaccatcaagttcaacccccccaccggcaccgacaccatggtgaaggccggcgtgagcaccaacatcagcaccaagcaccagtgcatcaccgccatgaaggagtacgagagcaagagcctggaggagctgagactggaggactaccaggccaacagaaagggcccccagaaccaggtgggcgccggcaccaccaccggcctgttcggcagcagccccgccaccagcagcgccaccggcctgttcagcagcagcaccaccaacagcggcttcgcctacggccagaacaagaccgccttcggcaccagcaccaccggcttcggcaccaaccccggcggcctgttcggccagcagaaccagcagaccaccagcctgttcagcaagcccttcggccaggccaccaccacccagaacaccggcttcagcttcggcaacaccagcaccatcggccagcccagcaccaacaccatgggcctgttcggcgtgacccaggccagccagcccggcggcctgttcggcaccgccaccaacaccagcaccggcaccgccttcggcaccggcaccggcctgttcggccagaccaacaccggcttcggcgccgtgggcagcaccctgttcggcaacaacaagctgaccaccttcggcagcagcaccaccagcgcccccagcttcggcaccaccagcggcggcctgttcggcttcggcaccaacaccagcggcaacagcatcttcggcagcaagcccgcccccggcaccctgggcaccggcctgggcgccggcttcggcaccgccctgggcgccggccaggccagcctgttcggcaacaaccagcccaagatcggcggccccctgggcaccggcgccttcggcgcccccggcttcaacaccaccaccgccaccctgggcttcggcgccccccaggcccccgtggccctgaccgaccccaacgccagcgccgcccagcaggccgtgctgcagcagcacatcaacagcctgacctacagccccttcggcgacagccccctgttcagaaaccccatgagcgaccccaagaagaaggaggagagactgaagcccaccaaccccgccgcccagaaggccctgaccacccccacccactacaagctgacccccagacccgccaccagagtgagacccaaggccctgcagaccaccggcaccgccaagagccacctgttcgacggcctggacgacgacgagcccagcctggccaacggcgccttcatgcccaagaagagcatcaagaagctggtgctgaagaacctgaacaacagcaacctgttcagccccgtgaacagagacagcgagaacctggccagccccagcgagtaccccgagaacggcgagagattcagcttcctgagcaagcccgtggacgagaaccaccagcaggacggcgacgaggacagcctggtgagccacttctacaccaaccccatcgccaagcccatcccccagacccccgagagcgccggcaacaagcacagcaacagcaacagcgtggacgacaccatcgtggccctgaacatgagagccgccctgagaaacggcctggagggcagcagcgaggagaccagcttccacgacgagagcctgcaggacgacagagaggagatcgagaacaacagctaccacatgcaccccgccggcatcatcctgaccaaggtgggctactacaccatccccagcatggacgacctggccaagatcaccaacgagaagggcgagtgcatcgtgagcgacttcaccatcggcagaaagggctacggcagcatctacttcgagggcgacgtgaacctgaccaacctgaacctggacgacatcgtgcacatcagaagaaaggaggtggtggtgtacctggacgacaaccagaagccccccgtgggcgagggcctgaacagaaaggccgaggtgaccctggacggcgtgtggcccaccgacaagaccagcagatgcctgatcaagagccccgacagactggccgacatcaactacgagggcagactggaggccgtgagcagaaagcagggcgcccagttcaaggagtacagacccgagaccggcagctgggtgttcaaggtgagccacttcagcaagtacggcctgcaggacagcgacgaggaggaggaggagcaccccagcaagaccagcaccaagaagctgaagaccgcccccctgccccccgccagccagaccacccccctgcagatggccctgaacggcaagcccgccccccccccccagagccagagccccgaggtggagcagctgggcagagtggtggagctggacagcgacatggtggacatcacccaggagcccgtgctggacaccatgctggaggagagcatgcccgaggaccaggagcccgtgagcgccagcacccacatcgccagcagcctgggcatcaacccccacgtgctgcagatcatgaaggccagcctgctgaccgacgaggaggacgtggacatggccctggaccagagattcagcagactgcccagcaaggccgacaccagccaggagatctgcagccccagactgcccatcagcgccagccacagcagcaagaccagaagcctggtgggcggcctgctgcagagcaagttcaccagcggcgccttcctgagccccagcgtgagcgtgcaggagtgcagaacccccagagccgccagcctgatgaacatccccagcaccagcagctggagcgtgcccccccccctgaccagcgtgttcaccatgcccagccccgcccccgaggtgcccctgaagaccgtgggcaccagaagacagctgggcctggtgcccagagagaagagcgtgacctacggcaagggcaagctgctgatggacatggccctgttcatgggcagaagcttcagagtgggctggggccccaactggaccctggccaacagcggcgagcagctgaacggcagccacgagctggagaaccaccagatcgccgacagcatggagttcggcttcctgcccaaccccgtggccgtgaagcccctgaccgagagccccttcaaggtgcacctggagaagctgagcctgagacagagaaagcccgacgaggacatgaagctgtaccagacccccctggagctgaagctgaagcacagcaccgtgcacgtggacgagctgtgccccctgatcgtgcccaacctgggcgtggccgtgatccacgactacgccgactgggtgaaggaggccagcggcgacctgcccgaggcccagatcgtgaagcactggagcctgacctggaccctgtgcgaggccctgtggggccacctgaaggagctggacagccagctgaacgagcccagagagtacatccagatcctggagagaagaagagccttcagcagatggctgagctgcaccgccaccccccagatcgaggaggaggtgagcctgacccagaagaacagccccgtggaggccgtgttcagctacctgaccggcaagagaatcagcgaggcctgcagcctggcccagcagagcggcgaccacagactggccctgctgctgagccagttcgtgggcagccagagcgtgagagagctgctgaccatgcagctggtggactggcaccagctgcaggccgacagcttcatccaggacgagagactgagaatcttcgccctgctggccggcaagcccgtgtggcagctgagcgagaagaagcagatcaacgtgtgcagccagctggactggaagagaagcctggccatccacctgtggtacctgctgccccccaccgccagcatcagcagagccctgagcatgtacgaggaggccttccagaacaccagcgacagcgacagatacgcctgcagccccctgcccagctacctggagggcagcggctgcgtgatcgccgaggagcagaacagccagacccccctgagagacgtgtgcttccacctgctgaagctgtacagcgacagacactacgacctgaaccagctgctggagcccagaagcatcaccgccgaccccctggactacagactgagctggcacctgtgggaggtgctgagagccctgaactacacccacctgagcgcccagtgcgagggcgtgctgcaggccagctacgccggccagctggagagcgagggcctgtgggagtgggccatcttcgtgctgctgcacatcgacaacagcggcatcagagagaaggccgtgagagagctgctgaccagacactgccagctgctggagacccccgagagctgggccaaggagaccttcctgacccagaagctgagagtgcccgccaagtggatccacgaggccaaggccgtgagagcccacatggagagcgacaagcacctggaggccctgtgcctgttcaaggccgagcactggaacagatgccacaagctgatcatcagacacctggccagcgacgccatcatcaacgagaactacgactacctgaagggcttcctggaggacctggccccccccgagagaagcagcctgatccaggactgggagaccagcggcctggtgtacctggactacatcagagtgatcgagatgctgagacacatccagcaggtggactgcagcggcaacgacctggagcagctgcacatcaaggtgaccagcctgtgcagcagaatcgagcagatccagtgctacagcgccaaggacagactggcccagagcgacatggccaagagagtggccaacctgctgagagtggtgctgagcctgcaccacccccccgacagaaccagcgacagcacccccgacccccagagagtgcccctgagactgctggccccccacatcggcagactgcccatgcccgaggactacgccatggacgagctgagaagcctgacccagagctacctgagagagctggccgtgggcagcctgtag

SEQ ID NO: 91772 - DNA, 5181 bp, synthetic construct
  misc_feature 1..5181: note = Description of Artificial Sequence: Synthetic coding sequence
  source 1..5181: mol_type = other DNA
atgttcaacaagagcttcggcacccccttcggcggcggcaccggcggcttcggcaccaccagcaccttcggccagaacaccggcttcggcaccaccagcggcggcgccttcggcaccagcgccttcggcagcagcaacaacaccggcggcctgttcggcaacagccagaccaagcccggcggcctgttcggcaccagcagcttcagccagcccgccaccagcaccagcaccggcttcggcttcggcaccagcaccggcaccgccaacaccctgttcggcaccgccagcaccggcaccagcctgttcagcagccagaacaacgccttcgcccagaacaagcccaccggcttcggcaacttcggcaccagcaccagcagcggcggcctgttcggcaccaccaacaccaccagcaaccccttcggcagcaccagcggcagcctgttcggccccagcagcttcaccgccgcccccaccggcaccaccatcaagttcaacccccccaccggcaccgacaccatggtgaaggccggcgtgagcaccaacatcagcaccaagcaccagtgcatcaccgccatgaaggagtacgagagcaagagcctggaggagctgagactggaggactaccaggccaacagaaagggcccccagaaccaggtgggcgccggcaccaccaccggcctgttcggcagcagccccgccaccagcagcgccaccggcctgttcagcagcagcaccaccaacagcggcttcgcctacggccagaacaagaccgccttcggcaccagcaccaccggcttcggcaccaaccccggcggcctgttcggccagcagaaccagcagaccaccagcctgttcagcaagcccttcggccaggccaccaccacccagaacaccggcttcagcttcggcaacaccagcaccatcggccagcccagcaccaacaccatgggcctgttcggcgtgacccaggccagccagcccggcggcctgttcggcaccgccaccaacaccagcaccggcaccgccttcggcaccggcaccggcctgttcggccagaccaacaccggcttcggcgccgtgggcagcaccctgttcggcaacaacaagctgaccaccttcggcagcagcaccaccagcgcccccagcttcggcaccaccagcggcggcctgttcggcttcggcaccaacaccagcggcaacagcatcttcggcagcaagcccgcccccggcaccctgggcaccggcctgggcgccggcttcggcaccgccctgggcgccggccaggccagcctgttcggcaacaaccagcccaagatcggcggccccctgggcaccggcgccttcggcgcccccggcttcaacaccaccaccgccaccctgggcttcggcgccccccaggcccccgtggccctgaccgaccccaacgccagcgccgcccagcaggccgtgctgcagcagcacatcaacagcctgacctacagccccttcggcgacagccccctgttcagaaaccccatgagcgaccccaagaagaaggaggagagactgaagcccaccaaccccgccgcccagaaggccctgaccacccccacccactacaagctgacccccagacccgccaccagagtgagacccaaggccctgcagaccaccggcaccgccaagagccacctgttcgacggcctggacgacgacgagcccagcctggccaacggcgccttcatgcccaagaagagcatcaagaagctggtgctgaagaacctgaacaacagcaacctgttcagccccgtgaacagagacagcgagaacctggccagccccagcgagtaccccgagaacggcgagagattcagcttcctgagcaagcccgtggacgagaaccaccagcaggacggcgacgaggacagcctggtgagccacttctacaccaaccccatcgccaagcccatcccccagacccccgagagcgccggcaacaagcacagcaacagcaacagcgtggacgacaccatcgtggccctgaacatgagagccgccctgagaaacggcctggagggcagcagcgaggagaccagcttccacgacgagagcctgcaggacgacagagaggagatcgagaacaacagctaccacatgcaccccgccggcatcatcctgaccaaggtgggctactacaccatccccagcatggacgacctggccaagatcaccaacgagaagggcgagtgcatcgtgagcgacttcaccatcggcagaaagggctacggcagcatctacttcgagggcgacgtgaacctgaccaacctgaacctggacgacatcgtgcacatcagaagaaaggaggtggtggtgtacctggacgacaaccagaagccccccgtgggcgagggcctgaacagaaaggccgaggtgaccctggacggcgtgtggcccaccgacaagaccagcagatgcctgatcaagagccccgacagactggccgacatcaactacgagggcagactggaggccgtgagcagaaagcagggcgcccagttcaaggagtacagacccgagaccggcagctgggtgttcaaggtgagccacttcagcaagtacggcctgcaggacagcgacgaggaggaggaggagcaccccagcaagaccagcaccaagaagctgaagaccgcccccctgccccccgccagccagaccacccccctgcagatggccctgaacggcaagcccgccccccccccccagagccagagccccgaggtggagcagctgggcagagtggtggagctggacagcgacatggtggacatcacccaggagcccgtgctggacaccatgctggaggagagcatgcccgaggaccaggagcccgtgagcgccagcacccacatcgccagcagcctgggcatcaacccccacgtgctgcagatcatgaaggccagcctgctgaccgacgaggaggacgtggacatggccctggaccagagattcagcagactgcccagcaaggccgacaccagccaggagatctgcagccccagactgcccatcagcgccagccacagcagcaagaccagaagcctggtgggcggcctgctgcagagcaagttcaccagcggcgccttcctgagccccagcgtgagcgtgcaggagtgcagaacccccagagccgccagcctgatgaacatccccagcaccagcagctggagcgtgcccccccccctgaccagcgtgttcaccatgcccagccccgcccccgaggtgcccctgaagaccgtgggcaccagaagacagctgggcctggtgcccagagagaagagcgtgacctacggcaagggcaagctgctgatggacatggccctgttcatgggcagaagcttcagagtgggctggggccccaactggaccctggccaacagcggcgagcagctgaacggcagccacgagctggagaaccaccagatcgccgacagcatggagttcggcttcctgcccaaccccgtggccgtgaagcccctgaccgagagccccttcaaggtgcacctggagaagctgagcctgagacagagaaagcccgacgaggacatgaagctgtaccagacccccctggagctgaagctgaagcacagcaccgtgcacgtggacgagctgtgccccctgatcgtgcccaacctgggcgtggccgtgatccacgactacgccgactgggtgaaggaggccagcggcgacctgcccgaggcccagatcgtgaagcactggagcctgacctggaccctgtgcgaggccctgtggggccacctgaaggagctggacagccagctgaacgagcccagagagtacatccagatcctggagagaagaagagccttcagcagatggctgagctgcaccgccaccccccagatcgaggaggaggtgagcctgacccagaagaacagccccgtggaggccgtgttcagctacctgaccggcaagagaatcagcgaggcctgcagcctggcccagcagagcggcgaccacagactggccctgctgctgagccagttcgtgggcagccagagcgtgagagagctgctgaccatgcagctggtggactggcaccagctgcaggccgacagcttcatccaggacgagagactgagaatcttcgccctgctggccggcaagcccgtgtggcagctgagcgagaagaagcagatcaacgtgtgcagccagctggactggaagagaagcctggccatccacctgtggtacctgctgccccccaccgccagcatcagcagagccctgagcatgtacgaggaggccttccagaacaccagcgacagcgacagatacgcctgcagccccctgcccagctacctggagggcagcggctgcgtgatcgccgaggagcagaacagccagacccccctgagagacgtgtgcttccacctgctgaagctgtacagcgacagcatcagagagaaggccgtgagagagctgctgaccagacactgccagctgctggagacccccgagagctgggccaaggagaccttcctgacccagaagctgagagtgcccgccaagtggatccacgaggccaaggccgtgagagcccacatggagagcgacaagcacctggaggccctgtgcctgttcaaggccgagcactggaacagatgccacaagctgatcatcagacacctggccagcgacgccatcatcaacgagaactacgactacctgaagggcttcctggaggacctggccccccccgagagaagcagcctgatccaggactgggagaccagcggcctggtgtacctggactacatcagagtgatcgagatgctgagacacatccagcaggtggactgcagcggcaacgacctggagcagctgcacatcaaggtgaccagcctgtgcagcagaatcgagcagatccagtgctacagcgccaaggacagactggcccagagcgacatggccaagagagtggccaacctgctgagagtggtgctgagcctgcaccacccccccgacagaaccagcgacagcacccccgacccccagagagtgcccctgagactgctggccccccacatcggcagactgcccatgcccgaggactacgccatggacgagctgagaagcctgacccagagctacctgagagagctggccgtgggcagcctgtag

SEQ ID NO: 91773 - DNA, 4917 bp, synthetic construct
  misc_feature 1..4917: note = Description of Artificial Sequence: Synthetic coding sequence
  source 1..4917: mol_type = other DNA
atgttcaacaagagcttcggcacccccttcggcggcggcaccggcggcttcggcaccaccagcaccttcggccagaacaccggcttcggcaccaccagcggcggcgccttcggcaccagcgccttcggcagcagcaacaacaccggcggcctgttcggcaacagccagaccaagcccggcggcctgttcggcaccagcagcttcagccagcccgccaccagcaccagcaccggcttcggcttcggcaccagcaccggcaccgccaacaccctgttcggcaccgccagcaccggcaccagcctgttcagcagccagaacaacgccttcgcccagaacaagcccaccggcttcggcaacttcggcaccagcaccagcagcggcggcctgttcggcaccaccaacaccaccagcaaccccttcggcagcaccagcggcagcctgttcggccccagcagcttcaccgccgcccccaccggcaccaccatcaagttcaacccccccaccggcaccgacaccatggtgaaggccggcgtgagcaccaacatcagcaccaagcaccagtgcatcaccgccatgaaggagtacgagagcaagagcctggaggagctgagactggaggactaccaggccaacagaaagggcccccagaaccaggtgggcgccggcaccaccaccggcctgttcggcagcagccccgccaccagcagcgccaccggcctgttcagcagcagcaccaccaacagcggcttcgcctacggccagaacaagaccgccttcggcaccagcaccaccggcttcggcaccaaccccggcggcctgttcggccagcagaaccagcagaccaccagcctgttcagcaagcccttcggccaggccaccaccacccagaacaccggcttcagcttcggcaacaccagcaccatcggccagcccagcaccaacaccatgggcctgttcggcgtgacccaggccagccagcccggcggcctgttcggcaccgccaccaacaccagcaccggcaccgccttcggcaccggcaccggcctgttcggccagaccaacaccggcttcggcgccgtgggcagcaccctgttcggcaacaacaagctgaccaccttcggcagcagcaccaccagcgcccccagcttcggcaccaccagcggcggcctgttcggcttcggcaccaacaccagcggcaacagcatcttcggcagcaagcccgcccccggcaccctgggcaccggcctgggcgccggcttcggcaccgccctgggcgccggccaggccagcctgttcggcaacaaccagcccaagatcggcggccccctgggcaccggcgccttcggcgcccccggcttcaacaccaccaccgccaccctgggcttcggcgccccccaggcccccgtggccctgaccgaccccaacgccagcgccgcccagcaggccgtgctgcagcagcacatcaacagcctgacctacagccccttcggcgacagccccctgttcagaaaccccatgagcgaccccaagaagaaggaggagagactgaagcccaccaaccccgccgcccagaaggccctgaccacccccacccactacaagctgacccccagacccgccaccagagtgagacccaaggccctgcagaccaccggcaccgccaagagccacctgttcgacggcctggacgacgacgagcccagcctggccaacggcgccttcatgcccaagaagagcatcaagaagctggtgctgaagaacctgaacaacagcaacctgttcagccccgtgaacagagacagcgagaacctggccagccccagcgagtaccccgagaacggcgagagattcagcttcctgagcaagcccgtggacgagaaccaccagcaggacggcgacgaggacagcctggtgagccacttctacaccaaccccatcgccaagcccatcccccagacccccgagagcgccggcaacaagcacagcaacagcaacagcgtggacgacaccatcgtggccctgaacatgagagccgccctgagaaacggcctggagggcagcagcgaggagaccagcttccacgacgagagcctgcaggacgacagagaggagatcgagaacaacagctaccacatgcaccccgccggcatcatcctgaccaaggtgggctactacaccatccccagcatggacgacctggccaagatcaccaacgagaagggcgagtgcatcgtgagcgacttcaccatcggcagaaagggctacggcagcatctacttcgagggcgacgtgaacctgaccaacctgaacctggacgacatcgtgcacatcagaagaaaggaggtggtggtgtacctggacgacaaccagaagccccccgtgggcgagggcctgaacagaaaggccgaggtgaccctggacggcgtgtggcccaccgacaagaccagcagatgcctgatcaagagccccgacagactggccgacatcaactacgagggcagactggaggccgtgagcagaaagcagggcgcccagttcaaggagtacagacccgagaccggcagctgggtgttcaaggtgagccacttcagcaagtacggcctgcaggacagcgacgaggaggaggaggagcaccccagcaagaccagcaccaagaagctgaagaccgcccccctgccccccgccagccagaccacccccctgcagatggccctgaacggcaagcccgccccccccccccagagccagagccccgaggtggagcagctgggcagagtggtggagctggacagcgacatggtggacatcacccaggagcccgtgctggacaccatgctggaggagagcatgcccgaggaccaggagcccgtgagcgccagcacccacatcgccagcagcctgggcatcaacccccacgtgctgcagatcatgaaggccagcctgctgaccgacgaggaggacgtggacatggccctggaccagagattcagcagactgcccagcaaggccgacaccagccaggagatctgcagccccagactgcccatcagcgccagccacagcagcaagaccagaagcctggtgggcggcctgctgcagagcaagttcaccagcggcgccttcctgagccccagcgtgagcgtgcaggagtgcagaacccccagagccgccagcctgatgaacatccccagcaccagcagctggagcgtgcccccccccctgaccagcgtgttcaccatgcccagccccgcccccgaggtgcccctgaagaccgtgggcaccagaagacagctgggcctggtgcccagagagaagagcgtgacctacggcaagggcaagctgctgatggacatggccctgttcatgggcagaagcttcagagtgggctggggccccaactggaccctggccaacagcggcgagcagctgaacggcagccacgagctggagaaccaccagatcgccgacagcatggagttcggcttcctgcccaaccccgtggccgtgaagcccctgaccgagagccccttcaaggtgcacctggagaagctgagcctgagacagagaaagcccgacgaggacatgaagctgtaccagacccccctggagctgaagctgaagcacagcaccgtgcacgtggacgagctgtgccccctgatcgtgcccaacctgggcgtggccgtgatccacgactacgccgactgggtgaaggaggccagcggcgacctgcccgaggcccagatcgtgaagcactggagcctgacctggaccctgtgcgaggccctgtggggccacctgaaggagctggacagccagctgaacgagcccagagagtacatccagatcctggagagaagaagagccttcagcagatggctgagctgcaccgccaccccccagatcgaggaggaggtgagcctgacccagaagaacagccccgtggaggccgtgttcagctacctgaccggcaagagaatcagcgaggcctgcagcctggcccagcagagcggcgaccacagactggccctgctgctgagccagttcgtgggcagccagagcgtgagagagctgctgaccatgcagctggtggactggcaccagctgcaggccgacagcttcatccaggacgagagactgagaatcttcgccctgctggccggcaagcccgtgtggcagctgagcgagaagaagcagatcaacgtgtgcagccagctggactggaagagaagcctggccatccacctgtggtacctgctgccccccaccgccagcatcagcagagccctgagcatgtacgaggaggccttccagaacaccagcgacagcgacagatacgcctgcagccccctgcccagctacctggagggcagcggctgcgtgatcgccgaggagcagaacagccagacccccctgagagacgtgtgcttccacctgctgaagctgtacagcgacagcatcagagagaaggccgtgagagagctgctgaccagacactgccagctgctggagacccccgagagctgggccaaggagaccttcctgacccagaagctgagagtgcccgccaagtggatccacgaggccaaggccgtgagagcccacatggagagcgacaagcacctggaggccctgtgcctgttcaaggccgagcactggaacagatgccacaagctgatcatcagacacctggccagcgacgccatcatcaacgagaactacgactacctgaagggcttcctggaggacctggccccccccgagagaagcagcctgatccaggactgggagaccagcggcctggtgtacctggactacatcagagtgatcgagatgctgagacacatccagcagatcgccctgttctgcgtggagtggatcgcccaggtgatgacctggagcagctacaccagcaagtag

SEQ ID NO: 91774 - DNA, 2763 bp, synthetic construct
  misc_feature 1..2763: note = Description of Artificial Sequence: Synthetic coding sequence
  source 1..2763: mol_type = other DNA
atgttcaacaagagcttcggcacccccttcggcggcggcaccggcggcttcggcaccaccagcaccttcggccagaacaccggcttcggcaccaccagcggcggcgccttcggcaccagcgccttcggcagcagcaacaacaccggcggcctgttcggcaacagccagaccaagcccggcggcctgttcggcaccagcagcttcagccagcccgccaccagcaccagcaccggcttcggcttcggcaccagcaccggcaccgccaacaccctgttcggcaccgccagcaccggcaccagcctgttcagcagccagaacaacgccttcgcccagaacaagcccaccggcttcggcaacttcggcaccagcaccagcagcggcggcctgttcggcaccaccaacaccaccagcaaccccttcggcagcaccagcggcagcctgttcggccccagcagcttcaccgccgcccccaccggcaccaccatcaagttcaacccccccaccggcaccgacaccatggtgaaggccggcgtgagcaccaacatcagcaccaagcaccagtgcatcaccgccatgaaggagtacgagagcaagagcctggaggagctgagactggaggactaccaggccaacagaaagggcccccagaaccaggtgggcgccggcaccaccaccggcctgttcggcagcagccccgccaccagcagcgccaccggcctgttcagcagcagcaccaccaacagcggcttcgcctacggccagaacaagaccgccttcggcaccagcaccaccggcttcggcaccaaccccggcggcctgttcggccagcagaaccagcagaccaccagcctgttcagcaagcccttcggccaggccaccaccacccagaacaccggcttcagcttcggcaacaccagcaccatcggccagcccagcaccaacaccatgggcctgttcggcgtgacccaggccagccagcccggcggcctgttcggcaccgccaccaacaccagcaccggcaccgccttcggcaccggcaccggcctgttcggccagaccaacaccggcttcggcgccgtgggcagcaccctgttcggcaacaacaagctgaccaccttcggcagcagcaccaccagcgcccccagcttcggcaccaccagcggcggcctgttcggcttcggcaccaacaccagcggcaacagcatcttcggcagcaagcccgcccccggcaccctgggcaccggcctgggcgccggcttcggcaccgccctgggcgccggccaggccagcctgttcggcaacaaccagcccaagatcggcggccccctgggcaccggcgccttcggcgcccccggcttcaacaccaccaccgccaccctgggcttcggcgccccccaggcccccgtggccctgaccgaccccaacgccagcgccgcccagcaggccgtgctgcagcagcacatcaacagcctgacctacagccccttcggcgacagccccctgttcagaaaccccatgagcgaccccaagaagaaggaggagagactgaagcccaccaaccccgccgcccagaaggccctgaccacccccacccactacaagctgacccccagacccgccaccagagtgagacccaaggccctgcagaccaccggcaccgccaagagccacctgttcgacggcctggacgacgacgagcccagcctggccaacggcgccttcatgcccaagaagagcatcaagaagctggtgctgaagaacctgaacaacagcaacctgttcagccccgtgaacagagacagcgagaacctggccagccccagcgagtaccccgagaacggcgagagattcagcttcctgagcaagcccgtggacgagaaccaccagcaggacggcgacgaggacagcctggtgagccacttctacaccaaccccatcgccaagcccatcccccagacccccgagagcgccggcaacaagcacagcaacagcaacagcgtggacgacaccatcgtggccctgaacatgagagccgccctgagaaacggcctggagggcagcagcgaggagaccagcttccacgacgagagcctgcaggacgacagagaggagatcgagaacaacagctaccacatgcaccccgccggcatcatcctgaccaaggtgggctactacaccatccccagcatggacgacctggccaagatcaccaacgagaagggcgagtgcatcgtgagcgacttcaccatcggcagaaagggctacggcagcatctacttcgagggcgacgtgaacctgaccaacctgaacctggacgacatcgtgcacatcagaagaaaggaggtggtggtgtacctggacgacaaccagaagccccccgtgggcgagggcctgaacagaaaggccgaggtgaccctggacggcgtgtggcccaccgacaagaccagcagatgcctgatcaagagccccgacagactggccgacatcaactacgagggcagactggaggccgtgagcagaaagcagggcgcccagttcaaggagtacagacccgagaccggcagctgggtgttcaaggtgagccacttcagcaagtacggcctgcaggacagcgacgaggaggaggaggagcaccccagcaagaccagcaccaagaagctgaagaccgcccccctgccccccgccagccagaccacccccctgcagatggccctgaacggcaagcccgccccccccccccaggtggagaagaagggccagtag

SEQ ID NO: 91775 - DNA, 2814 bp, synthetic construct
  misc_feature 1..2814: note = Description of Artificial Sequence: Synthetic coding sequence
  source 1..2814: mol_type = other DNA
atgttcaacaagagcttcggcacccccttcggcggcggcaccggcggcttcggcaccaccagcaccttcggccagaacaccggcttcggcaccaccagcggcggcgccttcggcaccagcgccttcggcagcagcaacaacaccggcggcctgttcggcaacagccagaccaagcccggcggcctgttcggcaccagcagcttcagccagcccgccaccagcaccagcaccggcttcggcttcggcaccagcaccggcaccgccaacaccctgttcggcaccgccagcaccggcaccagcctgttcagcagccagaacaacgccttcgcccagaacaagcccaccggcttcggcaacttcggcaccagcaccagcagcggcggcctgttcggcaccaccaacaccaccagcaaccccttcggcagcaccagcggcagcctgttcggccccagcagcttcaccgccgcccccaccggcaccaccatcaagttcaacccccccaccggcaccgacaccatggtgaaggccggcgtgagcaccaacatcagcaccaagcaccagtgcatcaccgccatgaaggagtacgagagcaagagcctggaggagctgagactggaggactaccaggccaacagaaagggcccccagaaccaggtgggcgccggcaccaccaccggcctgttcggcagcagccccgccaccagcagcgccaccggcctgttcagcagcagcaccaccaacagcggcttcgcctacggccagaacaagaccgccttcggcaccagcaccaccggcttcggcaccaaccccggcggcctgttcggccagcagaaccagcagaccaccagcctgttcagcaagcccttcggccaggccaccaccacccagaacaccggcttcagcttcggcaacaccagcaccatcggccagcccagcaccaacaccatgggcctgttcggcgtgacccaggccagccagcccggcggcctgttcggcaccgccaccaacaccagcaccggcaccgccttcggcaccggcaccggcctgttcggccagaccaacaccggcttcggcgccgtgggcagcaccctgttcggcaacaacaagctgaccaccttcggcagcagcaccaccagcgcccccagcttcggcaccaccagcggcggcctgttcggcaacaagcccaccctgaccctgggcaccaacaccaacaccagcaacttcggcttcggcaccaacaccagcggcaacagcatcttcggcagcaagcccgcccccggcaccctgggcaccggcctgggcgccggcttcggcaccgccctgggcgccggccaggccagcctgttcggcaacaaccagcccaagatcggcggccccctgggcaccggcgccttcggcgcccccggcttcaacaccaccaccgccaccctgggcttcggcgccccccaggcccccgtggccctgaccgaccccaacgccagcgccgcccagcaggccgtgctgcagcagcacatcaacagcctgacctacagccccttcggcgacagccccctgttcagaaaccccatgagcgaccccaagaagaaggaggagagactgaagcccaccaaccccgccgcccagaaggccctgaccacccccacccactacaagctgacccccagacccgccaccagagtgagacccaaggccctgcagaccaccggcaccgccaagagccacctgttcgacggcctggacgacgacgagcccagcctggccaacggcgccttcatgcccaagaagagcatcaagaagctggtgctgaagaacctgaacaacagcaacctgttcagccccgtgaacagagacagcgagaacctggccagccccagcgagtaccccgagaacggcgagagattcagcttcctgagcaagcccgtggacgagaaccaccagcaggacggcgacgaggacagcctggtgagccacttctacaccaaccccatcgccaagcccatcccccagacccccgagagcgccggcaacaagcacagcaacagcaacagcgtggacgacaccatcgtggccctgaacatgagagccgccctgagaaacggcctggagggcagcagcgaggagaccagcttccacgacgagagcctgcaggacgacagagaggagatcgagaacaacagctaccacatgcaccccgccggcatcatcctgaccaaggtgggctactacaccatccccagcatggacgacctggccaagatcaccaacgagaagggcgagtgcatcgtgagcgacttcaccatcggcagaaagggctacggcagcatctacttcgagggcgacgtgaacctgaccaacctgaacctggacgacatcgtgcacatcagaagaaaggaggtggtggtgtacctggacgacaaccagaagccccccgtgggcgagggcctgaacagaaaggccgaggtgaccctggacggcgtgtggcccaccgacaagaccagcagatgcctgatcaagagccccgacagactggccgacatcaactacgagggcagactggaggccgtgagcagaaagcagggcgcccagttcaaggagtacagacccgagaccggcagctgggtgttcaaggtgagccacttcagcaagtacggcctgcaggacagcgacgaggaggaggaggagcaccccagcaagaccagcaccaagaagctgaagaccgcccccctgccccccgccagccagaccacccccctgcagatggccctgaacggcaagcccgccccccccccccaggtggagaagaagggccagtag

SEQ ID NO: 91776 - DNA, 1731 bp, synthetic construct
  misc_feature 1..1731: note = Description of Artificial Sequence: Synthetic coding sequence
  source 1..1731: mol_type = other DNA
atgagcaccggcttcagcttcggcaccggcgccagcagcaaccccagcgtgggcctgaacttcggcaacctgggcagcaccagcacccccgccaccaccagcgcccccagcagcggcttcggcaccggcctgttcggcagcaagcccgccaccggcttcaccctgggcggcaccaacaccggcatcgccaccaccatcaccaccggcctgaccctgggcacccccgccaccaccagcgccgccaccaccggcttcagcctgggcttcaacaagcccgccgccagcgccacccccttcgccctgcccatcaccagcaccagcgccagcggcctgaccctgagcagcgccctgaccagcacccccgccgccagcaccggcttcaccctgaacaacctgggcggcaccaccgccaccaccaccaccgccagcaccggcctgagcctgggcggcgccctggccggcctgggcggcagcctgttccagagcaccaacaccggcaccagcggcctgggccagaacgccctgggcctgaccctgggcaccaccgccgccaccagcaccgccggcaacgagggcctgggcggcatcgacttcagcagcagcagcgacaagaagagcgacaagaccggcaccagacccgaggacagcaaggccctgaaggacgagaacctgccccccgtgatctgccaggacgtggagaacctgcagaagttcgtgaaggagcagaagcaggtgcaggaggagatcagcagaatgagcagcaaggccatgctgaaggtgcaggaggacatcaaggccctgaagcagctgctgagcctggccgccaacggcatccagagaaacaccctgaacatcgacaagctgaagatcgagaccgcccaggagctgaagaacgccgagatcgccctgagaacccagaagaccccccccggcctgcagcacgagtacgccgcccccgccgactacttcagaatcctggtgcagcagttcgaggtgcagctgcagcagtacagacagcagatcgaggagctggagaaccacctggccacccaggccaacaacagccacatcaccccccaggacctgagcatggccatgcagaagatctaccagaccttcgtggccctggccgcccagctgcagagcatccacgagaacgtgaaggtgctgaaggagcagtacctgggctacagaaagatgttcctgggcgacgccgtggacgtgttcgagaccagaagagccgaggccaagaagtggcagaacacccccagagtgaccaccggccccacccccttcagcaccatgcccaacgccgccgccgtggccatggccgccaccctgacccagcagcagcagcccgccaccggcccccagcccagcctgggcgtgagcttcggcacccccttcggcagcggcatcggcaccggcctgcagagcagcggcctgggcagcagcaacctgggcggcttcggcaccagcagcggcttcggctgcagcaccaccggcgccagcaccttcggcttcggcaccaccaacaagcccagcggcagcctgagcgccggcttcggcagcagcagcaccagcggcttcaacttcagcaaccccggcatcaccgccagcgccggcctgaccttcggcgtgagcaaccccgccagcgccggcttcggcaccggcggccagctgctgcagctgaagaagccccccgccggcaacaagagaggcaagagatag

SEQ ID NO: 91777 - DNA, 1764 bp, synthetic construct
  misc_feature 1..1764: note = Description of Artificial Sequence: Synthetic coding sequence
  source 1..1764: mol_type = other DNA
atgagcaccggcttcagcttcggcagcggcaccctgggcagcaccaccgtggccgccggcggcaccagcaccggcggcgtgttcagcttcggcaccggcgccagcagcaaccccagcgtgggcctgaacttcggcaacctgggcagcaccagcacccccgccaccaccagcgcccccagcagcggcttcggcaccggcctgttcggcagcaagcccgccaccggcttcaccctgggcggcaccaacaccggcacccccgccaccaccagcgccgccaccaccggcttcagcctgggcttcaacaagcccgccgccagcgccacccccttcgccctgcccatcaccagcaccagcgccagcggcctgaccctgagcagcgccctgaccagcacccccgccgccagcaccggcttcaccctgaacaacctgggcggcaccaccgccaccaccaccaccgccagcaccggcctgagcctgggcggcgccctggccggcctgggcggcagcctgttccagagcaccaacaccggcaccagcggcctgggccagaacgccctgggcctgaccctgggcaccaccgccgccaccagcaccgccggcaacgagggcctgggcggcatcgacttcagcagcagcagcgacaagaagagcgacaagaccggcaccagacccgaggacagcaaggccctgaaggacgagaacctgccccccgtgatctgccaggacgtggagaacctgcagaagttcgtgaaggagcagaagcaggtgcaggaggagatcagcagaatgagcagcaaggccatgctgaaggtgcaggaggacatcaaggccctgaagcagctgctgagcctggccgccaacggcatccagagaaacaccctgaacatcgacaagctgaagatcgagaccgcccaggagctgaagaacgccgagatcgccctgagaacccagaagaccccccccggcctgcagcacgagtacgccgcccccgccgactacttcagaatcctggtgcagcagttcgaggtgcagctgcagcagtacagacagcagatcgaggagctggagaaccacctggccacccaggccaacaacagccacatcaccccccaggacctgagcatggccatgcagaagatctaccagaccttcgtggccctggccgcccagctgcagagcatccacgagaacgtgaaggtgctgaaggagcagtacctgggctacagaaagatgttcctgggcgacgccgtggacgtgttcgagaccagaagagccgaggccaagaagtggcagaacacccccagagtgaccaccggccccacccccttcagcaccatgcccaacgccgccgccgtggccatggccgccaccctgacccagcagcagcagcccgccaccggcccccagcccagcctgggcgtgagcttcggcacccccttcggcagcggcatcggcaccggcctgcagagcagcggcctgggcagcagcaacctgggcggcttcggcaccagcagcggcttcggctgcagcaccaccggcgccagcaccttcggcttcggcaccaccaacaagcccagcggcagcctgagcgccggcttcggcagcagcagcaccagcggcttcaacttcagcaaccccggcatcaccgccagcgccggcctgaccttcggcgtgagcaaccccgccagcgccggcttcggcaccggcggccagctgctgcagctgaagaagccccccgccggcaacaagagaggcaagagatag

SEQ ID NO: 91778 - DNA, 1800 bp, synthetic construct
  misc_feature 1..1800: note = Description of Artificial Sequence: Synthetic coding sequence
  source 1..1800: mol_type = other DNA
atgagcaccggcttcagcttcggcagcggcaccctgggcagcaccaccgtggccgccggcggcaccagcaccggcggcgtgttcagcttcggcaccggcgccagcagcaaccccagcgtgggcctgaacttcggcaacctgggcagcaccagcacccccgccaccaccagcgcccccagcagcggcttcggcaccggcctgttcggcagcaagcccgccaccggcttcaccctgggcggcaccaacaccggcatcgccaccaccatcaccaccggcctgaccctgggcacccccgccaccaccagcgccgccaccaccggcttcagcctgggcttcaacaagcccgccgccagcgccacccccttcgccctgcccatcaccagcaccagcgccagcggcctgaccctgagcagcgccctgaccagcacccccgccgccagcaccggcttcaccctgaacaacctgggcggcaccaccgccaccaccaccaccgccagcaccggcctgagcctgggcggcgccctggccggcctgggcggcagcctgttccagagcaccaacaccggcaccagcggcctgggccagaacgccctgggcctgaccctgggcaccaccgccgccaccagcaccgccggcaacgagggcctgggcggcatcgacttcagcagcagcagcgacaagaagagcgacaagaccggcaccagacccgaggacagcaaggccctgaaggacgagaacctgccccccgtgatctgccaggacgtggagaacctgcagaagttcgtgaaggagcagaagcaggtgcaggaggagatcagcagaatgagcagcaaggccatgctgaaggtgcaggaggacatcaaggccctgaagcagctgctgagcctggccgccaacggcatccagagaaacaccctgaacatcgacaagctgaagatcgagaccgcccaggagctgaagaacgccgagatcgccctgagaacccagaagaccccccccggcctgcagcacgagtacgccgcccccgccgactacttcagaatcctggtgcagcagttcgaggtgcagctgcagcagtacagacagcagatcgaggagctggagaaccacctggccacccaggccaacaacagccacatcaccccccaggacctgagcatggccatgcagaagatctaccagaccttcgtggccctggccgcccagctgcagagcatccacgagaacgtgaaggtgctgaaggagcagtacctgggctacagaaagatgttcctgggcgacgccgtggacgtgttcgagaccagaagagccgaggccaagaagtggcagaacacccccagagtgaccaccggccccacccccttcagcaccatgcccaacgccgccgccgtggccatggccgccaccctgacccagcagcagcagcccgccaccggcccccagcccagcctgggcgtgagcttcggcacccccttcggcagcggcatcggcaccggcctgcagagcagcggcctgggcagcagcaacctgggcggcttcggcaccagcagcggcttcggctgcagcaccaccggcgccagcaccttcggcttcggcaccaccaacaagcccagcggcagcctgagcgccggcttcggcagcagcagcaccagcggcttcaacttcagcaaccccggcatcaccgccagcgccggcctgaccttcggcgtgagcaaccccgccagcgccggcttcggcaccggcggccagctgctgcagctgaagaagccccccgccggcaacaagagaggcaagagatag

SEQ ID NO: 91779 - DNA, 1515 bp, synthetic construct
  misc_feature 1..1515: note = Description of Artificial Sequence: Synthetic coding sequence
  source 1..1515: mol_type = other DNA
atgagcaccggcttcagcttcggcagcggcaccctgggcagcaccaccgtggccgccggcggcaccagcaccggcggcgtgttcagcttcggcaccggcgccagcagcaaccccagcgtgggcctgaacttcggcaacctgggcagcaccagcacccccgccaccaccagcgcccccagcagcggcttcggcaccggcctgttcggcagcaagcccgccaccggcttcaccctgggcggcaccaacaccggcacccccgccaccaccagcgccgccaccaccggcttcagcctgggcttcaacaagcccgccgccagcgccacccccttcgccctgcccatcaccagcaccagcgccagcggcctgaccctgagcagcgccctgaccagcacccccgccgccagcaccggcttcaccctgaacaacctgggcggcaccaccgccaccaccaccaccgccagcaccggcctgagcctgggcggcgccctggccggcctgggcggcagcctgttccagagcaccaacaccggcaccagcggcctgggccagaacgccctgggcctgaccctgggcaccaccgccgccaccagcaccgccggcaacgagggcctgggcggcatcgacttcagcagcagcagcgacaagaagagcgacaagaccggcaccagacccgaggacagcaaggccctgaaggacgagaacctgccccccgtgatctgccaggacgtggagaacctgcagaagttcgtgaaggagcagaagcaggtgcaggaggagatcagcagaatgagcagcaaggccatgctgaaggtgcaggaggacatcaaggccctgaagcagctgctgagcctggccgccaacggcatccagagaaacaccctgaacatcgacaagctgaagatcgagaccgcccaggagctgaagaacgccgagatcgccctgagaacccagaagaccccccccggcctgcagcacgagtacgccgcccccgccgactacttcagaatcctggtgcagcagttcgaggtgcagctgcagcagtacagacagcagatcgaggagctggagaaccacctggccacccaggccaacaacagccacatcaccccccaggacctgagcatggccatgcagaagatctaccagaccttcgtggccctggccgcccagctgcagagcatccacgagaacgtgaaggtgctgaaggagcagtacctgggctacagaaagatgttcctgggcgacgccgtggacgtgttcgagaccagaagagccgaggccaagaagtggcagaacacccccagagtgaccaccggccccacccccttcagcaccatgcccaacgccgccgccgtggccatggccgccaccctgacccagcagcagcagcccgccaccggcgacaagtggtgcaacgtggccgagctgaagaacagaacccagctgagcctgttcgtgaacaagctggagctgagctgctactgcgtgatcgacctgctgtacaacgagcagtag

SEQ ID NO: 91780 - DNA, 1458 bp, synthetic construct
  misc_feature 1..1458: note = Description of Artificial Sequence: Synthetic coding sequence
  source 1..1458: mol_type = other DNA
atgagcaccggcttcagcttcggcagcggcaccctgggcagcaccaccgtggccgccggcggcaccagcaccggcggcgtgttcagcttcggcaccggcgccagcagcaaccccagcgtgggcctgaacttcggcaacctgggcagcaccagcacccccgccaccaccagcgcccccagcagcggcttcggcaccggcctgttcggcagcaagcccgccaccggcttcaccctgggcggcaccaacaccggcatcgccaccaccatcaccaccggcctgaccctgggcacccccgccaccaccagcgccgccaccaccggcttcagcctgggcttcaacaagcccgccgccagcgccacccccttcgccctgcccatcaccagcaccagcgccagcggcctgaccctgagcagcgccctgaccagcacccccgccgccagcaccggcttcaccctgaacaacctgggcggcaccaccgccaccaccaccaccgccagcaccggcctgagcctgggcggcgccctggccggcctgggcggcagcctgttccagagcaccaacaccggcaccagcggcctgggccagaacgccctgggcctgaccctgggcaccaccgccgccaccagcaccgccggcaacgagggcctgggcggcatcgacttcagcagcagcagcgacaagaagagcgacaagaccggcaccagacccgaggacagcaaggccctgaaggacgagaacctgccccccgtgatctgccaggacgtggagaacctgcagaagttcgtgaaggagcagaagcaggtgcaggaggagatcagcagaatgagcagcaaggccatgctgaaggtgcaggaggacatcaaggccctgaagcagctgctgagcctggccgccaacggcatccagagaaacaccctgaacatcgacaagctgaagatcgagaccgcccaggagctgaagaacgccgagatcgccctgagaacccagaagaccccccccggcctgcagcacgagtacgccgcccccgccgactacttcagaatcctggtgcagcagttcgaggtgcagctgcagcagtacagacagcagatcgaggagctggagaaccacctggccacccaggccaacaacagccacatcaccccccaggacctgagcatggccatgcagaagatctaccagaccttcgtggccctggccgcccagctgcagagcatccacgagaacgtgaaggtgctgaaggagcagtacctgggctacagaaagatgttcctgggcgacgccgtggacgtgttcgagaccagaagagccgaggccaagaagtggcagaacacccccagagtgaccaccggccccacccccttcagcaccatgcccaacgccgccgccgtggccatggccgccaccctgacccagcagcagcagcccgccaccggcctgaacgccttcaagctgtag

SEQ ID NO: 91781 - DNA, 1308 bp, synthetic construct
  misc_feature 1..1308: note = Description of Artificial Sequence: Synthetic coding sequence
  source 1..1308: mol_type = other DNA
atgagcggcttcctggaggagctgctgggcgagaagctggtgaccggcggcggcgaggaggtggacgtgcacagcctgggcgccagaggcatcagcctgctgggcctgtacttcggctgcagcctgagcgccccctgcgcccagctgagcgccagcctggccgccttctacggcagactgagaggcgacgccgccgccggccccggccccggcgccggcgccggcgccgccgccgagcccgagcccagaagaagactggagatcgtgttcgtgagcagcgaccaggaccagagacagtggcaggacttcgtgagagacatgccctggctggccctgccctacaaggagaagcacagaaagctgaagctgtggaacaagtacagaatcagcaacatccccagcctgatcttcctggacgccaccaccggcaaggtggtgtgcagaaacggcctgctggtgatcagagacgaccccgagggcctggagttcccctggggccccaagcccttcagagaggtgatcgccggccccctgctgagaaacaacggccagagcctggagagcagcagcctggagggcagccacgtgggcgtgtacttcagcgcccactggtgccccccctgcagaagcctgaccagagtgctggtggagagctacagaaagatcaaggaggccggccagaacttcgagatcatcttcgtgagcgccgacagaagcgaggagagcttcaagcagtacttcagcgagatgccctggctggccgtgccctacaccgacgaggccagaagaagcagactgaacagactgtacggcatccagggcatccccaccctgatcatgctggacccccagggcgaggtgatcaccagacagggcagagtggaggtgctgaacgacgaggactgcagagagttcccctggcaccccaagcccgtgctggagctgagcgacagcaacgccgcccagctgaacgagggcccctgcctggtgctgttcgtggacagcgaggacgacggcgagagcgaggccgccaagcagctgatccagcccatcgccgagaagatcatcgccaagtacaaggccaaggaggaggaggcccccctgctgttcttcgtggccggcgaggacgacatgaccgacagcctgagagactacaccaacctgcccgaggccgcccccctgctgaccatcctggacatgagcgccagagccaagtacgtgatggacgtggaggagatcacccccgccatcgtggaggccttcgtgaacgacttcctggccgagaagctgaagcccgagcccatctag

SEQ ID NO: 91782 - DNA, 984 bp, synthetic construct
  misc_feature 1..984: note = Description of Artificial Sequence: Synthetic coding sequence
  source 1..984: mol_type = other DNA
atggccgacgtgagcctgcacagaaaccccgccaccctgaagctgtggaacaagtacagaatcagcaacatccccagcctgatcttcctggacgccaccaccggcaaggtggtgtgcagaaacggcctgctggtgatcagagacgaccccgagggcctggagttcccctggggccccaagcccttcagagaggtgatcgccggccccctgctgagaaacaacggccagagcctggagagcagcagcctggagggcagccacgtgggcgtgtacttcagcgcccactggtgccccccctgcagaagcctgaccagagtgctggtggagagctacagaaagatcaaggaggccggccagaacttcgagatcatcttcgtgagcgccgacagaagcgaggagagcttcaagcagtacttcagcgagatgccctggctggccgtgccctacaccgacgaggccagaagaagcagactgaacagactgtacggcatccagggcatccccaccctgatcatgctggacccccagggcgaggtgatcaccagacagggcagagtggaggtgctgaacgacgaggactgcagagagttcccctggcaccccaagcccgtgctggagctgagcgacagcaacgccgcccagctgaacgagggcccctgcctggtgctgttcgtggacagcgaggacgacggcgagagcgaggccgccaagcagctgatccagcccatcgccgagaagatcatcgccaagtacaaggccaaggaggaggaggcccccctgctgttcttcgtggccggcgaggacgacatgaccgacagcctgagagactacaccaacctgcccgaggccgcccccctgctgaccatcctggacatgagcgccagagccaagtacgtgatggacgtggaggagatcacccccgccatcgtggaggccttcgtgaacgacttcctggccgagaagctgaagcccgagcccatctag

SEQ ID NO: 91783 - DNA, 381 bp, synthetic construct
  misc_feature 1..381: note = Description of Artificial Sequence: Synthetic coding sequence
  source 1..381: mol_type = other DNA
atgccctggctggccgtgccctacaccgacgaggccagaagaagcagactgaacagactgtacggcatccaggacagcgaggacgacggcgagagcgaggccgccaagcagctgatccagcccatcgccgagaagatcatcgccaagtacaaggccaaggaggaggaggcccccctgctgttcttcgtggccggcgaggacgacatgaccgacagcctgagagactacaccaacctgcccgaggccgcccccctgctgaccatcctggacatgagcgccagagccaagtacgtgatggacgtggaggagatcacccccgccatcgtggaggccttcgtgaacgacttcctggccgagaagctgaagcccgagcccatctag

SEQ ID NO: 91784 - DNA, 984 bp, synthetic construct; identical to SEQ ID NO: 91782
  misc_feature 1..984: note = Description of Artificial Sequence: Synthetic coding sequence
  source 1..984: mol_type = other DNA

SEQ ID NO: 91785 - DNA, 1176 bp, synthetic construct
  misc_feature 1..1176: note = Description of Artificial Sequence: Synthetic coding sequence
  source 1..1176: mol_type = other DNA
atggccgacatcgacaacaaggagcagagcgagctggaccaggacctggacgacgtggaggaggtggaggaggaggagaccggcgaggagaccaagctgaaggccagacagctgaccgtgcagatgatgcagaacccccagatcctggccgccctgcaggagagactggacggcctggtggagacccccaccggctacatcgagagcctgcccagagtggtgaagagaagagtgaacgccctgaagaacctgcaggtgaagtgcgcccagatcgaggccaagttctacgaggaggtgcacgacctggagagaaagtacgccgtgctgtaccagcccctgttcgacaagagattcgagatcatcaacgccatctacgagcccaccgaggaggagtgcgagtggaagcccgacgaggaggacgagatcagcgaggagctgaaggagaaggccaagatcgaggacgagaagaaggacgaggagaaggaggaccccaagggcatccccgagttctggctgaccgtgttcaagaacgtggacctgctgagcgacatggtgcaggagcacgacgagcccatcctgaagcacctgaaggacatcaaggtgaagttcagcgacgccggccagcccatgagcttcgtgctggagttccacttcgagcccaacgagtacttcaccaacgaggtgctgaccaagacctacagaatgagaagcgagcccgacgacagcgaccccttcagcttcgacggccccgagatcatgggctgcaccggctgccagatcgactggaagaagggcaagaacgtgaccctgaagaccatcaagaagaagcagaagcacaagggcagaggcaccgtgagaaccgtgaccaagaccgtgagcaacgacagcttcttcaacttcttcgccccccccgaggtgcccgagagcggcgacctggacgacgacgccgaggccatcctggccgccgacttcgagatcggccacttcctgagagagagaatcatccccagaagcgtgctgtacttcaccggcgaggccatcgaggacgacgacgacgactacgacgaggagggcgaggaggccgacgaggagggcgaggaggagggcgacgaggagaacgaccccgactacgaccccaagaaggaccagaaccccgccgagtgcaagcagcagtag

SEQ ID NO: 91786 - DNA, 1176 bp, synthetic construct; identical to SEQ ID NO: 91785
  misc_feature 1..1176: note = Description of Artificial Sequence: Synthetic coding sequence
  source 1..1176: mol_type = other DNA

SEQ ID NO: 91787 - DNA, 972 bp, synthetic construct
  misc_feature 1..972: note = Description of Artificial Sequence: Synthetic coding sequence
  source 1..972: mol_type = other DNA
atgatgcagaacccccagatcctggccgccctgcaggagagactggacggcctggtggagacccccaccggctacatcgagagcctgcccagagtggtgaagagaagagtgaacgccctgaagaacctgcaggtgaagtgcgcccagatcgaggccaagttctacgaggaggtgcacgacctggagagaaagtacgccgtgctgtaccagcccctgttcgacaaggaggagctgaaggagaaggccaagatcgaggacgagaagaaggacgaggagaaggaggaccccaagggcatccccgagttctggctgaccgtgttcaagaacgtggacctgctgagcgacatggtgcaggagcacgacgagcccatcctgaagcacctgaaggacatcaaggtgaagttcagcgacgccggccagcccatgagcttcgtgctggagttccacttcgagcccaacgagtacttcaccaacgaggtgctgaccaagacctacagaatgagaagcgagcccgacgacagcgaccccttcagcttcgacggccccgagatcatgggctgcaccggctgccagatcgactggaagaagggcaagaacgtgaccctgaagaccatcaagaagaagcagaagcacaagggcagaggcaccgtgagaaccgtgaccaagaccgtgagcaacgacagcttcttcaacttcttcgccccccccgaggtgcccgagagcggcgacctggacgacgacgccgaggccatcctggccgccgacttcgagatcggccacttcctgagagagagaatcatccccagaagcgtgctgtacttcaccggcgaggccatcgaggacgacgacgacgactacgacgaggagggcgaggaggccgacgaggagggcgaggaggagggcgacgaggagaacgaccccgactacgaccccaagaaggaccagaaccccgccgagtgcaagcagcagtag

SEQ ID NO: 91788 - DNA, 1050 bp, synthetic construct
  misc_feature 1..1050: note = Description of Artificial Sequence: Synthetic coding sequence
  source 1..1050: mol_type = other DNA
atgatgcagaacccccagatcctggccgccctgcaggagagactggacggcctggtggagacccccaccggctacatcgagagcctgcccagagtggtgaagagaagagtgaacgccctgaagaacctgcaggtgaagtgcgcccagatcgaggccaagttctacgaggaggtgcacgacctggagagaaagtacgccgtgctgtaccagcccctgttcgacaagagattcgagatcatcaacgccatctacgagcccaccgaggaggagtgcgagtggaagcccgacgaggaggacgagatcagcgagctgaaggagaaggccaagatcgaggacgagaagaaggacgaggagaaggaggaccccaagggcatccccgagttctggctgaccgtgttcaagaacgtggacctgctgagcgacatggtgcaggagcacgacgagcccatcctgaagcacctgaaggacatcaaggtgaagttcagcgacgccggccagcccatgagcttcgtgctggagttccacttcgagcccaacgagtacttcaccaacgaggtgctgaccaagacctacagaatgagaagcgagcccgacgacagcgaccccttcagcttcgacggccccgagatcatgggctgcaccggctgccagatcgactggaagaagggcaagaacgtgaccctgaagaccatcaagaagaagcagaagcacaagggcagaggcaccgtgagaaccgtgaccaagaccgtgagcaacgacagcttcttcaacttcttcgccccccccgaggtgcccgagagcggcgacctggacgacgacgccgaggccatcctggccgccgacttcgagatcggccacttcctgagagagagaatcatccccagaagcgtgctgtacttcaccggcgaggccatcgaggacgacgacgacgactacgacgaggagggcgaggaggccgacgaggagggcgaggaggagggcgacgaggagaacgaccccgactacgaccccaagaaggaccagaaccccgccgagtgcaagcagcagtag

SEQ ID NO: 91789 - DNA, 627 bp, synthetic construct
  misc_feature 1..627: note = Description of Artificial Sequence: Synthetic coding sequence
  source 1..627: mol_type = other DNA
atggtgcaggagcacgacgagcccatcctgaagcacctgaaggacatcaaggtgaagttcagcgacgccggccagcccatgagcttcgtgctggagttccacttcgagcccaacgagtacttcaccaacgaggtgctgaccaagacctacagaatgagaagcgagcccgacgacagcgaccccttcagcttcgacggccccgagatcatgggctgcaccggctgccagatcgactggaagaagggcaagaacgtgaccctgaagaccatcaagaagaagcagaagcacaagggcagaggcaccgtgagaaccgtgaccaagaccgtgagcaacgacagcttcttcaacttcttcgccccccccgaggtgcccgagagcggcgacctggacgacgacgccgaggccatcctggccgccgacttcgagatcggccacttcctgagagagagaatcatccccagaagcgtgctgtacttcaccggcgaggccatcgaggacgacgacgacgactacgacgaggagggcgaggaggccgacgaggagggcgaggaggagggcgacgaggagaacgaccccgactacgaccccaagaaggaccagaaccccgccgagtgcaagcagcagtag

SEQ ID NO: 91790 - DNA, 987 bp, synthetic construct
  misc_feature 1..987: note = Description of Artificial Sequence: Synthetic coding sequence
  source 1..987: mol_type = other DNA
atggccgacatcgacaacctgcccagagtggtgaagagaagagtgaacgccctgaagaacctgcaggtgaagtgcgcccagatcgaggccaagttctacgaggaggtgcacgacctggagagaaagtacgccgtgctgtaccagcccctgttcgacaagagattcgagatcatcaacgccatctacgagcccaccgaggaggagtgcgagtggaagcccgacgaggaggacgagatcagcgaggagctgaaggagaaggccaagatcgaggacgagaagaaggacgaggagaaggaggaccccaagggcatccccgagttctggctgaccgtgttcaagaacgtggacctgctgagcgacatggtgcaggagcacgacgagcccatcctgaagcacctgaaggacatcaaggtgaagttcagcgacgccggccagcccatgagcttcgtgctggagttccacttcgagcccaacgagtacttcaccaacgaggtgctgaccaagacctacagaatgagaagcgagcccgacgacagcgaccccttcagcttcgacggccccgagatcatgggctgcaccggctgccagatcgactggaagaagggcaagaacgtgaccctgaagaccatcaagaagaagcagaagcacaagggcagaggcaccgtgagaaccgtgaccaagaccgtgagcaacgacagcttcttcaacttcttcgccccccccgaggtgcccgagagcggcgacctggacgacgacgccgaggccatcctggccgccgacttcgagatcggccacttcctgagagagagaatcatccccagaagcgtgctgtacttcaccggcgaggccatcgaggacgacgacgacgactacgacgaggagggcgaggaggccgacgaggagggcgaggaggagggcgacgaggagaacgaccccgactacgaccccaagaaggaccagaaccccgccgagtgcaagcagcagtag

SEQ ID NO: 91791 - DNA, 1107 bp, synthetic construct
  misc_feature 1..1107: note = Description of Artificial Sequence: Synthetic coding sequence
  source 1..1107: mol_type = other DNA
atggccgacatcgacaacaaggagcagagcgagctggaccaggacctggacgacgtggaggaggtggaggaggaggagaccggcgaggagaccaagctgaaggccagacagctgaccgtgcagatgatgcagaacccccagatcctggccgccctgcaggagagactggacggcctggtggagacccccaccggctacatcgagagcctgcccagagtggtgaagagaagagtgaacgccctgaagaacctgcaggtgaagtgcgcccagatcgaggccaagttctacgaggaggtgcacgacctggagagaaagtacgccgtgctgtaccagcccctgttcgacaagagattcgagatcatcaacgccatctacgagcccaccgaggaggagtgcgagtggaagcccgacgaggaggacgagatcagcgaggagctgaaggagaaggccaagatcgaggacgagaagaaggacgaggagaaggaggaccccaagggcatccccgagttctggctgaccgtgttcaagaacgtggacctgctgagcgacatggtgcaggagcacgacgagcccatcctgaagcacctgaaggacatcaaggtgaagttcagcgacgccggccagcccatgagcttcgtgctggagttccacttcgagcccaacgagtacttcaccaacgaggtgctgaccaagacctacagaatgagaagcgagcccgacgacagcgaccccttcagcttcgacggccccgagatcatgggctgcaccggctgccagatcgactggaagaagggcaagaacgtgaccctgaagaccatcaagaagaagcagaagcacaagggcagaggcaccgtgagaaccgtgaccaagaccgtgagcaacgacagcttcttcaacttcttcgccccccccgaggtgcccgagagcggcgacctggacgacgacgccgaggccatcctggccgccgacttcgagatcggccacttcctgagagagagaatcatccccagaagcgtgctgtacttcaccggcgaggccatcgaggacgacgacgacgactacgacgaggagggcgaggaggccgacgaggtgatgttcaccaagtag

SEQ ID NO: 91792 - DNA, 795 bp, synthetic construct
  misc_feature 1..795: note = Description of Artificial Sequence: Synthetic coding sequence
  source 1..795: mol_type = other DNA
atggccgacatcgacaacaaggagcagagcgagctggaccaggacctggacgacgtggaggaggtggaggaggaggagaccggcgaggagaccaagctgaaggccagacagctgaccgtgcagatgatgcagaacccccagatcctggccgccctgcaggagagactggacggcctggtggagacccccaccggctacatcgagagcctgcccagagtggtgaagagaagagtgaacgccctgaagaacctgcaggtgaagtgcgcccagatcgaggccaagttctacgaggaggtgcacgacctggagagaaagtacgccgtgctgtaccagcccctgttcgacaagagattcgagatcatcaacgccatctacgagcccaccgaggaggagtgcgagtggaagcccgacgaggaggacgagatcagcgaggagctgaaggagaaggccaagatcgaggacgagaagaaggacgaggagaaggaggaccccaagggcatccccgagttctggctgaccgtgttcaagaacgtggacctgctgagcgacatggtgcaggagcacgacgagcccatcctgaagcacctgaaggacatcaaggtgaagttcagcgacgccggccagcccatgagcttcgtgctggagttccacttcgagcccaacgagtacttcaccaacgaggtgctgaccaagacctacagaatgagaagcgagcccgacgacagcgaccccttcagcttcgacggccccgagatcatgggctgcaccggctgccagatcgactggaagaagtag

SEQ ID NO: 91793 - DNA, 1158 bp, synthetic construct
  misc_feature 1..1158: note = Description of Artificial Sequence: Synthetic coding sequence
  source 1..1158: mol_type = other DNA
aaggagcagagcgagctggaccaggacctggacgacgtggaggaggtggaggaggaggagaccggcgaggagaccaagctgaaggccagacagctgaccgtgcagatgatgcagaacccccagatcctggccgccctgcaggagagactggacggcctggtggagacccccaccggctacatcgagagcctgcccagagtggtgaagagaagagtgaacgccctgaagaacctgcaggtgaagtgcgcccagatcgaggccaagttctacgaggaggtgcacgacctggagagaaagtacgccgtgctgtaccagcccctgttcgacaagagattcgagatcatcaacgccatctacgagcccaccgaggaggagtgcgagtggaagcccgacgaggaggacgagatcagcgaggagctgaaggagaaggccaagatcgaggacgagaagaaggacgaggagaaggaggaccccaagggcatccccgagttctggctgaccgtgttcaagaacgtggacctgctgagcgacatggtgcaggagcacgacgagcccatcctgaagcacctgaaggacatcaaggtgaagttcagcgacgccggccagcccatgagcttcgtgctggagttccacttcgagcccaacgagtacttcaccaacgaggtgctgaccaagacctacagaatgagaagcgagcccgacgacagcgaccccttcagcttcgacggccccgagatcatgggctgcaccggctgccagatcgactggaagaagggcaagaacgtgaccctgaagaccatcaagaagaagcagaagcacaagggcagaggcaccgtgagaaccgtgaccaagaccgtgagcaacgacagcttcttcaacttcttcgccccccccgaggtgcccgagagcggcgacctggacgacgacgccgaggccatcctggccgccgacttcgagatcggccacttcctgagagagagaatcatccccagaagcgtgctgtacttcaccggcgaggccatcgaggacgacgacgacgactacgacgaggagggcgaggaggccgacgaggagggcgaggaggagggcgacgaggagaacgaccccgactacgaccccaagaaggaccagaaccccgccgagtgcaagcagcagtag

SEQ ID NO: 91794 - DNA, 1521 bp, synthetic construct
  misc_feature 1..1521: note = Description of Artificial Sequence: Synthetic coding sequence
  source 1..1521: mol_type = other DNA
atggccgaggccgacttcaagatggtgagcgagcccgtggcccacggcgtggccgaggaggagatggccagcagcaccagcgacagcggcgaggagagcgacagcagcagcagcagcagcagcaccagcgacagcagcagcagcagcagcaccagcggcagcagcagcggcagcggcagcagcagcagcagcagcggcagcaccagcagcagaagcagactgtacagaaagaagagagtgcccgagcccagcagaagagccagaagagcccccctgggcaccaacttcgtggacagactgccccaggccgtgagaaacagagtgcaggccctgagaaacatccaggacgagtgcgacaaggtggacaccctgttcctgaaggccatccacgacctggagagaaagtacgccgagctgaacaagcccctgtacgacagaagattccagatcatcaacgccgagtacgagcccaccgaggaggagtgcgagtggaacagcgaggacgaggagttcagcagcgacgaggaggtgcaggacaacacccccagcgagatgccccccctggagggcgaggaggaggagaaccccaaggagaaccccgaggtgaaggccgaggagaaggaggtgcccaaggagatccccgaggtgaaggacgaggagaaggaggtgcccaaggagatccccgaggtgaaggccgaggagaaggccgacagcaaggactgcatggaggccacccccgaggtgaaggaggaccccaaggaggtgccccaggtgaaggccgacgacaaggagcagcccaaggccaccgaggccaaggccagagccgccgtgagagagacccacaagagagtgcccgaggagagactgcaggacagcgtggacctgaagagagccagaaagggcaagcccaagagagaggaccccaagggcatccccgactactggctgatcgtgctgaagaacgtggacaagctgggccccatgatccagaagtacgacgagcccatcctgaagttcctgagcgacgtgagcctgaagttcagcaagcccggccagcccgtgagctacaccttcgagttccacttcctgcccaacccctacttcagaaacgaggtgctggtgaagacctacatcatcaaggccaagcccgaccacaacgaccccttcttcagctggggctgggagatcgaggactgcaagggctgcaagatcgactggagaagaggcaaggacgtgaccgtgaccaccacccagagcagaaccaccgccaccggcgagatcgagatccagcccagagtggtgcccaacgccagcttcttcaacttcttcagcccccccgagatccccatgatcggcaagctggagcccagagaggacgccatcctggacgaggacttcgagatcggccagatcctgcacgacaacgtgatcctgaagagcatctactactacaccggcgaggtgaacggcacctactaccagttcggcaagcactacggcaacaagaagtacagaaagtag

SEQ ID NO: 91795 - DNA, 1500 bp, synthetic construct
  misc_feature 1..1500: note = Description of Artificial Sequence: Synthetic coding sequence
  source 1..1500: mol_type = other DNA
atggtgagcgagcccgtggcccacggcgtggccgaggaggagatggccagcagcaccagcgacagcggcgaggagagcgacagcagcagcagcagcagcagcaccagcgacagcagcagcagcagcagcaccagcggcagcagcagcggcagcggcagcagcagcagcagcagcggcagcaccagcagcagaagcagactgtacagaaagaagagagtgcccgagcccagcagaagagccagaagagcccccctgggcaccaacttcgtggacagactgccccaggccgtgagaaacagagtgcaggccctgagaaacatccaggacgagtgcgacaaggtggacaccctgttcctgaaggccatccacgacctggagagaaagtacgccgagctgaacaagcccctgtacgacagaagattccagatcatcaacgccgagtacgagcccaccgaggaggagtgcgagtggaacagcgaggacgaggagttcagcagcgacgaggaggtgcaggacaacacccccagcgagatgccccccctggagggcgaggaggaggagaaccccaaggagaaccccgaggtgaaggccgaggagaaggaggtgcccaaggagatccccgaggtgaaggacgaggagaaggaggtgcccaaggagatccccgaggtgaaggccgaggagaaggccgacagcaaggactgcatggaggccacccccgaggtgaaggaggaccccaaggaggtgccccaggtgaaggccgacgacaaggagcagcccaaggccaccgaggccaaggccagagccgccgtgagagagacccacaagagagtgcccgaggagagactgcaggacagcgtggacctgaagagagccagaaagggcaagcccaagagagaggaccccaagggcatccccgactactggctgatcgtgctgaagaacgtggacaagctgggccccatgatccagaagtacgacgagcccatcctgaagttcctgagcgacgtgagcctgaagttcagcaagcccggccagcccgtgagctacaccttcgagttccacttcctgcccaacccctacttcagaaacgaggtgctggtgaagacctacatcatcaaggccaagcccgaccacaacgaccccttcttcagctggggctgggagatcgaggactgcaagggctgcaagatcgactggagaagaggcaaggacgtgaccgtgaccaccacccagagcagaaccaccgccaccggcgagatcgagatccagcccagagtggtgcccaacgccagcttcttcaacttcttcagcccccccgagatccccatgatcggcaagctggagcccagagaggacgccatcctggacgaggacttcgagatcggccagatcctgcacgacaacgtgatcctgaagagcatctactactacaccggcgaggtgaacggcacctactaccagttcggcaagcactacggcaacaagaagtacagaaagtag

SEQ ID NO: 91796 - DNA, 1128 bp, synthetic construct
  misc_feature 1..1128: note = Description of Artificial Sequence: Synthetic coding sequence
  source 1..1128: mol_type = other DNA
atggccgaccacagcttcagcgacggcgtgcccagcgacagcgtggaggccgccaagaacgccagcaacaccgagaagctgaccgaccaggtgatgcagaaccccagagtgctggccgccctgcaggagagactggacaacgtgccccacacccccagcagctacatcgagaccctgcccaaggccgtgaagagaagaatcaacgccctgaagcagctgcaggtgagatgcgcccacatcgaggccaagttctacgaggaggtgcacgacctggagagaaagtacgccgccctgtaccagcccctgttcgacaagagaagagagttcatcaccggcgacgtggagcccaccgacgccgagagcgagtggcacagcgagaacgaggaggaggagaagctggccggcgacatgaagagcaaggtggtggtgaccgagaaggccgccgccaccgccgaggagcccgaccccaagggcatccccgagttctggttcaccatcttcagaaacgtggacatgctgagcgagctggtgcaggagtacgacgagcccatcctgaagcacctgcaggacatcaaggtgaagttcagcgaccccggccagcccatgagcttcgtgctggagttccacttcgagcccaacgactacttcaccaacagcgtgctgaccaagacctacaagatgaagagcgagcccgacaaggccgaccccttcagcttcgagggccccgagatcgtggactgcgacggctgcaccatcgactggaagaagggcaagaacgtgaccgtgaagaccatcaagaagaagcagaagcacaagggcagaggcaccgtgagaaccatcaccaagcaggtgcccaacgagagcttcttcaacttcttcaaccccctgaaggccagcggcgacggcgagagcctggacgaggacagcgagttcaccctggccagcgacttcgagatcggccacttcttcagagagagaatcgtgcccagagccgtgctgtacttcaccggcgaggccatcgaggacgacgacaacttcgaggagggcgaggagggcgaggaggaggagctggagggcgacgaggagggcgaggacgaggacgacgccgagatcaaccccaaggtgtag

SEQ ID NO: 91797 - DNA, 1161 bp, synthetic construct
  misc_feature 1..1161: note = Description of Artificial Sequence: Synthetic coding sequence
  source 1..1161: mol_type = other DNA
atggccgaccacagcttcagcgacggcgtgcccagcgacagcgtggaggccgccaagaacgccagcaacaccgagaagctgaccgaccaggtgatgcagaaccccagagtgctggccgccctgcaggagagactggacaacgtgccccacacccccagcagctacatcgagaccctgcccaaggccgtgaagagaagaatcaacgccctgaagcagctgcaggtgagatgcgcccacatcgaggccaagttctacgaggaggtgcacgacctggagagaaagtacgccgccctgtaccagcccctgttcgacaagagaagagagttcatcaccggcgacgtggagcccaccgacgccgagagcgagtggcacagcgagaacgaggaggaggagaagctggccggcgacatgaagagcaaggtggtggtgaccgagaaggccgccgccaccgccgaggagcccgaccccaagggcatccccgagttctggttcaccatcttcagaaacgtggacatgctgagcgagctggtgcaggagtacgacgagcccatcctgaagcacctgcaggacatcaaggtgaagttcagcgaccccggccagcccatgagcttcgtgctggagttccacttcgagcccaacgactacttcaccaacagcgtgctgaccaagacctacaagatgaagagcgagcccgacaaggccgaccccttcagcttcgagggccccgagatcgtggactgcgacggctgcaccatcgactggaagaagggcaagaacgtgaccgtgaagaccatcaagaagaagcagaagcacaagggcagaggcaccgtgagaaccatcaccaagcaggtgcccaacgagagcttcttcaacttcttcaaccccctgaagggcaagggccagagcaagagcaaggacgaggacagcgagttcaccctggccagcgacttcgagatcggccacttcttcagagagagaatcgtgcccagagccgtgctgtacttcaccggcgaggccatcgaggacgacgacaacttcgaggagggcgaggagggcgaggaggaggagctggagggcgacgaggagggcgaggacgaggacgacgccgagatcaaccccaagaaggagcccagccagcccgccgagtgcaagcagcagtag

SEQ ID NO: 91798 - DNA, 537 bp, synthetic construct
  misc_feature 1..537: note = Description of Artificial Sequence: Synthetic coding sequence
  source 1..537: mol_type = other DNA
atggccgaccacagcttcagcgacggcgtgcccagcgacagcgtggaggccgccaagaacgccagcaacaccgagaagctgaccgaccaggtgatgcagaaccccagagtgctggccgccctgcaggagagactggacaacgtgccccacacccccagcagctacatcgagaccctgcccaaggccgtgaagagaagaatcaacgccctgaagcagctgcaggtgagatgcgcccacatcgaggccaagttctacgaggaggtgcacgacctggagagaaagtacgccgccctgtaccagcccctgttcgacaagagaagagagttcatcaccggcgacgtggagcccaccgacgccgagagcgagtggcacagcgagaacgaggaggaggagaagctggccggcgacatgaagagcaaggtggtggtgaccgagaaggccgccgccaccgccgaggagcccgaccccaagggcatccccgagttctggttcaccatcttcagaaacgtggacatgctgagcgagctggtgcagtag

SEQ ID NO: 91799 - DNA, 1161 bp, synthetic construct
  misc_feature 1..1161: note = Description of Artificial Sequence: Synthetic coding sequence
  source 1..1161: mol_type = other DNA
atggccgaccacagcttcagcgacggcgtgcccagcgacagcgtggaggccgccaagaacgccagcaacaccgagaagctgaccgaccaggtgatgcagaaccccagagtgctggccgccctgcaggagagactggacaacgtgccccacacccccagcagctacatcgagaccctgcccaaggccgtgaagagaagaatcaacgccctgaagcagctgcaggtgagatgcgcccacatcgaggccaagttctacgaggaggtgcacgacctggagagaaagtacgccgccctgtaccagcccctgttcgacaagagaagagagttcatcaccggcgacgtggagcccaccgacgccgagagcgagtggcacagcgagaacgaggaggaggagaagctggccggcgacatgaagagcaaggtggtggtgaccgagaaggccgccgccaccgccgaggagcccgaccccaagggcatccccgagttctggttcaccatcttcagaaacgtggacatgctgagcgagctggtgcaggagtacgacgagcccatcctgaagcacctgcaggacatcaaggtgaagttcagcgaccccggccagcccatgagcttcgtgctggagttccacttcgagcccaacgactacttcaccaacagcgtgctgaccaagacctacaagatgaagagcgagcccgacaaggccgaccccttcagcttcgagggccccgagatcgtggactgcgacggctgcaccatcgactggaagaagggcaagaacgtgaccgtgaagaccatcaagaagaagcagaagcacaagggcagaggcaccgtgagaaccatcaccaagcaggtgcccaacgagagcttcttcaacttcttcaaccccctgaaggccagcggcgacggcgagagcctggacgaggacagcgagttcaccctggccagcgacttcgagatcggccacttcttcagagagagaatcgtgcccagagccgtgctgtacttcaccggcgaggccatcgaggacgacgacaacttcgaggagggcgaggagggcgaggaggaggagctggagggcgacgaggagggcgaggacgaggacgacgccgagatcaaccccaagaaggagcccagccagcccgccgagtgcaagcagcagtag

SEQ ID NO: 91800 - DNA, 387 bp, synthetic construct
  misc_feature 1..387: note = Description of Artificial Sequence: Synthetic coding sequence
  source 1..387: mol_type = other DNA
atggccgaccacagcttcagcgacggcgtgcccagcgacagcgtggaggccgccaagaacgccagcaacaccgagaagctgaccgaccaggtgatgcagaaccccagagtgctggccgccctgcaggagagactggacaacgtgccccacacccccagcagctacatcgagaccctgcccaaggccgtgaagagaagaatcaacgccctgaagcagctgcaggtgagatgcgcccacatcgaggccaagttctacgaggaggtgcacgacctggagagaaagtacgccgccctgtaccagcccctgttcgacaagagaagagagttcatcaccggcgacgtggagcccaccgacgccgagagcgagtggcacagcgagaacgagtag

SEQ ID NO: 91801 - DNA, 423 bp, synthetic construct
  misc_feature 1..423: note = Description of Artificial Sequence: Synthetic coding sequence
  source 1..423: mol_type = other DNA
atggccgaccacagcttcagcgacggcgtgcccagcgacagcgtggaggccgccaagaacgccagcaacaccgagaagctgaccgaccaggtgatgcagaaccccagagtgctggccgccctgcaggagagactggacaacgtgccccacacccccagcagctacatcgagaccctgcccaaggccgtgaagagaagaatcaacgccctgaagcagctgcaggtgagatgcgcccacatcgaggccaagttctacgaggaggtgcacgacctggagagaaagtacgccgccctgtaccagcccctgttcgacaagagaagagagttcatcaccggcgacgtggagcccaccgacgccgagagcgagtggcacagcgagaacgaggaggaggagaagctggccggcgacatgaagagcaagtag

SEQ ID NO: 91802 - DNA, 402 bp, synthetic construct
  misc_feature 1..402: note = Description of Artificial Sequence: Synthetic coding sequence
  source 1..402: mol_type = other DNA
atggccgaccacagcttcagcgacggcgtgcccagcgacagcgtggaggccgccaagaacgccagcaacaccgagaagctgaccgaccaggtgatgcagaaccccagagtgctggccgccctgcaggagagactggacaacgtgccccacacccccagcagctacatcgagaccctgcccaaggccgtgaagagaagaatcaacgccctgaagcagctgcaggtgagatgcgcccacatcgaggccaagttctacgaggaggtgcacgacctggagagaaagtacgccgccctgtaccagcccctgttcgacaagagaagagagttcatcaccggcgacgtggagcccaccgacgccgagagcgagtggcacagcgagaacgaggaggaggagaagctgtag

SEQ ID NO: 91803 - DNA, 324 bp, synthetic construct
  misc_feature 1..324: note = Description of Artificial Sequence: Synthetic coding sequence
  source 1..324: mol_type = other DNA
atggccgaccacagcttcagcgacggcgtgcccagcgacagcgtggaggccgccaagaacgccagcaacaccgagaagctgaccgaccaggtgatgcagaaccccagagtgctggccgccctgcaggagagactggacaacgtgccccacacccccagcagctacatcgagaccctgcccaaggccgtgaagagaagaatcaacgccctgaagcagctgcaggtgagatgcgcccacatcgaggccaagttctacgaggaggtgcacgacctggagagaaagtacgccgccctgtaccagcccctgttcgacaagagaagatag

SEQ ID NO: 91804 - DNA, 237 bp, synthetic construct
  misc_feature 1..237: note = Description of Artificial Sequence: Synthetic coding sequence
  source 1..237: mol_type = other DNA
atggccgaccacagcttcagcgacggcgtgcccagcgacagcgtggaggccgccaagaacgccagcaacaccgagaagctgaccgaccaggtgatgcagaaccccagagtgctggccgccctgcaggagagactggacaacgtgccccacacccccagcagctacatcgagaccctgcccaaggccgtgaagagaagaatcaacgccctgaagcagctgcaggtgagatgcgcctag

SEQ ID NO: 91805 - DNA, 549 bp, synthetic construct
  misc_feature 1..549: note = Description of Artificial Sequence: Synthetic coding sequence
  source 1..549: mol_type = other DNA
atggccgacagcgagaaccagggccccgccgagcccagccaggccgccgccgccgccgaggccgccgccgaggaggtgatggccgagggcggcgcccagggcggcgactgcgacagcgccgccggcgaccccgacagcgccgccggccagatggccgaggagccccagacccccgccgagaacgcccccaagcccaagaacgacttcatcgagagcctgcccaacagcgtgaagtgcagagtgctggccctgaagaagctgcagaagagatgcgacaagatcgaggccaagttcgacaaggagttccaggccctggagaagaagtacaacgacatctacaagcccctgctggccaagatccaggagctgaccggcgagatggagggctgcgcctggaccctggagggcgaggaggaggaggaggaggagtacgaggacgacgaggaggagggcgaggacgaggaggaggaggaggccgccgccgaggccgccgccggcgccaagcacgacgacgcccacgccgagatgcccgacgacgccaagaagtag

SEQ ID NO: 91806 - DNA, 438 bp, synthetic construct
  misc_feature 1..438: note = Description of Artificial Sequence: Synthetic coding sequence
  source 1..438: mol_type = other DNA
atggccgacagcgagaaccagggccccgccgagcccagccaggccgccgccgccgccgaggccgccgccgaggaggtgatggccgagggcggcgcccagggcggcgactgcgacagcgccgccggcgaccccgacagcgccgccggccagatggccgaggagccccagacccccgccgagaacgcccccaagcccaagaacgacttcatcgagagcctgcccaacagcgtgaagtgcagagtgctggccctgaagaagctgcagaagagatgcgacaagatcgaggccaagttcgacaaggagttccaggccctggagaagaagtacaacgacatctacaagcccctgctggccaagatccaggagctgaccggcgagatggagggctgcgcctggaccctggagggcgaggagagaagaaagagagtgagaggctag

SEQ ID NO: 91807 - DNA, 963 bp, synthetic construct
  misc_feature 1..963: note = Description of Artificial Sequence: Synthetic coding sequence
  source 1..963: mol_type = other DNA
atggaggaggtgccccacgactgccccggcgccgacagcgcccaggccggcagaggcgccagctgccagggctgccccaaccagagactgtgcgccagcggcgccggcgccacccccgacaccgccatcgaggagatcaaggagaagatgaagaccgtgaagcacaagatcctggtgctgagcggcaagggcggcgtgggcaagagcaccttcagcgcccacctggcccacggcctggccgaggacgagaacacccagatcgccctgctggacatcgacatctgcggccccagcatccccaagatcatgggcctggagggcgagcaggtgcaccagagcggcagcggctggagccccgtgtacgtggaggacaacctgggcgtgatgagcgtgggcttcctgctgagcagccccgacgacgccgtgatctggagaggccccaagaagaacggcatgatcaagcagttcctgagagacgtggactggggcgaggtggactacctgatcgtggacaccccccccggcaccagcgacgagcacctgagcgtggtgagatacctggccaccgcccacatcgacggcgccgtgatcatcaccaccccccaggaggtgagcctgcaggacgtgagaaaggagatcaacttctgcagaaaggtgaagctgcccatcatcggcgtggtggagaacatgagcggcttcatctgccccaagtgcaagaaggagagccagatcttcccccccaccaccggcggcgccgagctgatgtgccaggacctggaggtgcccctgctgggcagagtgcccctggaccccctgatcggcaagaactgcgacaagggccagagcttcttcatcgacgcccccgacagccccgccaccctggcctacagaagcatcatccagagaatccaggagttctgcaacctgcaccagagcaaggaggagaacctgatcagcagctag

SEQ ID NO: 91808 - DNA, 930 bp, synthetic construct
  misc_feature 1..930: note = Description of Artificial Sequence: Synthetic coding sequence
  source 1..930: mol_type = other DNA
atggaggaggtgccccacgactgccccggcgccgacagcgcccaggccggcagaggcgccagctgccagggctgccccaaccagagactgtgcgccagcggcgccggcgccacccccgacaccgccatcgaggagatcaaggagaagatgaagaccgtgaagcacaagatcctggtgctgagcggcaagggcggcgtgggcaagagcaccttcagcgcccacctggcccacggcctggccgaggacgagaacacccagatcgccctgctggacatcgacatctgcggccccagcatccccaagatcatgggcctggagggcgagcagtacgtggaggacaacctgggcgtgatgagcgtgggcttcctgctgagcagccccgacgacgccgtgatctggagaggccccaagaagaacggcatgatcaagcagttcctgagagacgtggactggggcgaggtggactacctgatcgtggacaccccccccggcaccagcgacgagcacctgagcgtggtgagatacctggccaccgcccacatcgacggcgccgtgatcatcaccaccccccaggaggtgagcctgcaggacgtgagaaaggagatcaacttctgcagaaaggtgaagctgcccatcatcggcgtggtggagaacatgagcggcttcatctgccccaagtgcaagaaggagagccagatcttcccccccaccaccggcggcgccgagctgatgtgccaggacctggaggtgcccctgctgggcagagtgcccctggaccccctgatcggcaagaactgcgacaagggccagagcttcttcatcgacgcccccgacagccccgccaccctggcctacagaagcatcatccagagaatccaggagttctgcaacctgcaccagagcaaggaggagaacctgatcagcagctag

SEQ ID NO: 91809 - DNA, 816 bp, synthetic construct
  misc_feature 1..816: note = Description of Artificial Sequence: Synthetic coding sequence
  source 1..816: mol_type = other DNA
atggaggccgccgccgagcccggcaacctggccggcgtgagacacatcatcctggtgctgagcggcaagggcggcgtgggcaagagcaccatcagcaccgagctggccctggccctgagacacgccggcaagaaggtgggcatcctggacgtggacctgtgcggccccagcatccccagaatgctgggcgcccagggcagagccgtgcaccagtgcgacagaggctgggcccccgtgttcctggacagagagcagagcatcagcctgatgagcgtgggcttcctgctggagaagcccgacgaggccgtggtgtggagaggccccaagaagaacgccctgatcaagcagttcgtgagcgacgtggcctggggcgagctggactacctggtggtggacaccccccccggcaccagcgacgagcacatggccaccatcgaggccctgagaccctaccagcccctgggcgccctggtggtgaccaccccccaggccgtgagcgtgggcgacgtgagaagagagctgaccttctgcagaaagaccggcctgagagtgatgggcatcgtggagaacatgagcggcttcacctgcccccactgcaccgagtgcaccagcgtgttcagcagaggcggcggcgaggagctggcccagctggccggcgtgcccttcctgggcagcgtgcccctggaccccgccctgatgagaaccctggaggagggccacgacttcatccaggagttccccggcagccccgccttcgccgccctgaccagcatcgcccagaagatcctggacgccacccccgcctgcctgccctag

SEQ ID NO: 91810 - DNA, 393 bp, synthetic construct
  misc_feature 1..393: note = Description of Artificial Sequence: Synthetic coding sequence
  source 1..393: mol_type = other DNA
atggccaccatcgaggccctgagaccctaccagcccctgggcgccctggtggtgaccaccccccaggccgtgagcgtgggcgacgtgagaagagagctgaccttctgcagaaagaccggcctgagagtgatgggcatcgtggagaacatgagcggcttcacctgcccccactgcaccgagtgcaccagcgtgttcagcagaggcggcggcgaggagctggcccagctggccggcgtgcccttcctgggcagcgtgcccctggaccccgccctgatgagaaccctggaggagggccacgacttcatccaggagttccccggcagccccgccttcgccgccctgaccagcatcgcccagaagatcctggacgccacccccgcctgcctgccctag

SEQ ID NO: 91811 - DNA, 960 bp, synthetic construct
  misc_feature 1..960: note = Description of Artificial Sequence: Synthetic coding sequence
  source 1..960: mol_type = other DNA
atgggcatctggcagagactgctgctgttcggcggcgtgagcctgagagccggcggcggcgccaccgcccccctgggcggcagcagagccatggtgtgcggcagacagctgagcggcgccggcagcgagaccctgaagcagagaagaacccagatcatgagcagaggcctgcccaagcagaagcccatcgagggcgtgaagcaggtgatcgtggtggccagcggcaagggcggcgtgggcaagagcaccaccgccgtgaacctggccctggccctggccgccaacgacagcagcaaggccatcggcctgctggacgtggacgtgtacggccccagcgtgcccaagatgatgaacctgaagggcaaccccgagctgagccagagcaacctgatgagacccctgctgaactacggcatcgcctgcatgagcatgggcttcctggtggaggagagcgagcccgtggtgtggagaggcctgatggtgatgagcgccatcgagaagctgctgagacaggtggactggggccagctggactacctggtggtggacatgccccccggcaccggcgacgtgcagctgagcgtgagccagaacatccccatcaccggcgccgtgatcgtgagcaccccccaggacatcgccctgatggacgcccacaagggcgccgagatgttcagaagagtgcacgtgcccgtgctgggcctggtgcagaacatgagcgtgttccagtgccccaagtgcaagcacaagacccacatcttcggcgccgacggcgccagaaagctggcccagaccctgggcctggaggtgctgggcgacatccccctgcacctgaacatcagagaggccagcgacaccggccagcccatcgtgttcagccagcccgagagcgacgaggccaaggcctacctgagaatcgccgtggaggtggtgagaagactgcccagccccagcgagtag

SEQ ID NO: 91812 - DNA, 672 bp, synthetic construct
  misc_feature 1..672: note = Description of Artificial Sequence: Synthetic coding sequence
  source 1..672: mol_type = other DNA
atgagcaaggccatcggcctgctggacgtggacgtgtacggccccagcgtgcccaagatgatgaacctgaagggcaaccccgagctgagccagagcaacctgatgagacccctgctgaactacggcatcgcctgcatgagcatgggcttcctggtggaggagagcgagcccgtggtgtggagaggcctgatggtgatgagcgccatcgagaagctgctgagacaggtggactggggccagctggactacctggtggtggacatgccccccggcaccggcgacgtgcagctgagcgtgagccagaacatccccatcaccggcgccgtgatcgtgagcaccccccaggacatcgccctgatggacgcccacaagggcgccgagatgttcagaagagtgcacgtgcccgtgctgggcctggtgcagaacatgagcgtgttccagtgccccaagtgcaagcacaagacccacatcttcggcgccgacggcgccagaaagctggcccagaccctgggcctggaggtgctgggcgacatccccctgcacctgaacatcagagaggccagcgacaccggccagcccatcgtgttcagccagcccgagagcgacgaggccaaggcctacctgagaatcgccgtggaggtggtgagaagactgcccagccccagcgagtag

SEQ ID NO: 91813 - DNA, 3123 bp, synthetic construct
  misc_feature 1..3123: note = Description of Artificial Sequence: Synthetic coding sequence
  source 1..3123: mol_type = other DNA
atgggcgaggagggcggcagcgccagccacgacgaggaggagagagccagcgtgctgctgggccacagccccggctgcgagatgtgcagccaggaggccttccaggcccagagaagccagctggtggagctgctggtgagcggcagcctggagggcttcgagagcgtgctggactggctgctgagctgggaggtgctgagctgggaggactacgagggcttccacctgctgggccagcccctgagccacctggccagaagactgctggacaccgtgtggaacaagggcacctgggcctgccagaagctgatcgccgccgcccaggaggcccaggccgacagccagagccccaagctgcacggctgctgggacccccacagcctgcaccccgccagagacctgcagagccacagacccgccatcgtgagaagactgcacagccacgtggagaacatgctggacctggcctgggagagaggcttcgtgagccagtacgagtgcgacgagatcagactgcccatcttcacccccagccagagagccagaagactgctggacctggccaccgtgaaggccaacggcctggccgccttcctgctgcagcacgtgcaggagctgcccgtgcccctggccctgcccctggaggccgccacctgcaagaagtacatggccaagctgagaaccaccgtgagcgcccagagcagattcctgagcacctacgacggcgccgagaccctgtgcctggaggacatctacaccgagaacgtgctggaggtgtgggccgacgtgggcatggccggccccccccagaagagccccgccaccctgggcctggaggagctgttcagcacccccggccacctgaacgacgacgccgacaccgtgctggtggtgggcgaggccggcagcggcaagagcaccctgctgcagagactgcacctgctgtgggccgccggccaggacttccaggagttcctgttcgtgttccccttcagctgcagacagctgcagtgcatggccaagcccctgagcgtgagaaccctgctgttcgagcactgctgctggcccgacgtgggccaggaggacatcttccagctgctgctggaccaccccgacagagtgctgctgaccttcgacggcttcgacgagttcaagttcagattcaccgacagagagagacactgcagccccaccgaccccaccagcgtgcagaccctgctgttcaacctgctgcagggcaacctgctgaagaacgccagaaaggtggtgaccagcagacccgccgccgtgagcgccttcctgagaaagtacatcagaaccgagttcaacctgaagggcttcagcgagcagggcatcgagctgtacctgagaaagagacaccacgagcccggcgtggccgacagactgatcagactgctgcaggagaccagcgccctgcacggcctgtgccacctgcccgtgttcagctggatggtgagcaagtgccaccaggagctgctgctgcaggagggcggcagccccaagaccaccaccgacatgtacctgctgatcctgcagcacttcctgctgcacgccaccccccccgacagcgccagccagggcctgggccccagcctgctgagaggcagactgcccaccctgctgcacctgggcagactggccctgtggggcctgggcatgtgctgctacgtgttcagcgcccagcagctgcaggccgcccaggtgagccccgacgacatcagcctgggcttcctggtgagagccaagggcgtggtgcccggcagcaccgcccccctggagttcctgcacatcaccttccagtgcttcttcgccgccttctacctggccctgagcgccgacgtgccccccgccctgctgagacacctgttcaactgcggcagacccggcaacagccccatggccagactgctgcccaccatgtgcatccaggccagcgagggcaaggacagcagcgtggccgccctgctgcagaaggccgagccccacaacctgcagatcaccgccgccttcctggccggcctgctgagcagagagcactggggcctgctggccgagtgccagaccagcgagaaggccctgctgagaagacaggcctgcgccagatggtgcctggccagaagcctgagaaagcacttccacagcatcccccccgccgcccccggcgaggccaagagcgtgcacgccatgcccggcttcatctggctgatcagaagcctgtacgagatgcaggaggagagactggccagaaaggccgccagaggcctgaacgtgggccacctgaagctgaccttctgcagcgtgggccccaccgagtgcgccgccctggccttcgtgctgcagcacctgagaagacccgtggccctgcagctggactacaacagcgtgggcgacatcggcgtggagcagctgctgccctgcctgggcgtgtgcaaggccctgtacctgagagacaacaacatcagcgacagaggcatctgcaagctgatcgagtgcgccctgcactgcgagcagctgcagaagctggccctgttcaacaacaagctgaccgacggctgcgcccacagcatggccaagctgctggcctgcagacagaacttcctggccctgagactgggcaacaactacatcaccgccgccggcgcccaggtgctggccgagggcctgagaggcaacaccagcctgcagttcctgggcttctggggcaacagagtgggcgacgagggcgcccaggccctggccgaggccctgggcgaccaccagagcctgagatggctgagcctggtgggcaacaacatcggcagcgtgggcgcccaggccctggccctgatgctggccaagaacgtgatgctggaggagctgtgcctggaggagaaccacctgcaggacgagggcgtgtgcagcctggccgagggcctgaagaagaacagcagcctgaagatcctgaagctgagcaacaactgcatcacctacctgggcgccgaggccctgctgcaggccctggagagaaacgacaccatcctggaggtgtggctgagaggcaacaccttcagcctggaggaggtggacaagctgggctgcagagacaccagactgctgctgtag

SEQ ID NO: 91814 - DNA, 543 bp, synthetic construct
  misc_feature 1..543: note = Description of Artificial Sequence: Synthetic coding sequence
  source 1..543: mol_type = other DNA
atgtggctgctgccccccggccaggtgttcaacgccttcttccccagcagactgggcaacaactacatcaccgccgccggcgcccaggtgctggccgagggcctgagaggcaacaccagcctgcagttcctgggcttctggggcaacagagtgggcgacgagggcgcccaggccctggccgaggccctgggcgaccaccagagcctgagatggctgagcctggtgggcaacaacatcggcagcgtgggcgcccaggccctggccctgatgctggccaagaacgtgatgctggaggagctgtgcctggaggagaaccacctgcaggacgagggcgtgtgcagcctggccgagggcctgaagaagaacagcagcctgaagatcctgaagctgagcaacaactgcatcacctacctgggcgccgaggccctgctgcaggccctggagagaaacgacaccatcctggaggtgtggctgagaggcaacaccttcagcctggaggaggtggacaagctgggctgcagagacaccagactgctgctgtag

SEQ ID NO: 91815 - DNA, 1008 bp, synthetic construct
  misc_feature 1..1008: note = Description of Artificial Sequence: Synthetic coding sequence
  source 1..1008: mol_type = other DNA
atggaggacagcggcaagaccttcagcagcgaggaggaggaggccaactactggaaggacctggccatgacctacaagcagagagccgagaacacccaggaggagctgagagagttccaggagggcagcagagagtacgaggccgagctggagacccagctgcagcagatcgagaccagaaacagagacctgctgagcgagaacaacagactgagaatggagctggagaccatcaaggagaagttcgaggtgcagcacagcgagggctacagacagatcagcgccctggaggacgacctggcccagaccaaggccatcaaggaccagctgcagaagtacatcagagagctggagcaggccaacgacgacctggagagagccaagagagccaccatcatgagcctggaggacttcgagcagagactgaaccaggccatcgagagaaacgccttcctggagagcgagctggacgagaaggagaacctgctggagagcgtgcagagactgaaggacgaggccagagacctgagacaggagctggccgtgcagcagaagcaggagaagcccagaacccccatgcccagcagcgtggaggccgagagaaccgacaccgccgtgcaggccaccggcagcgtgcccagcacccccatcgcccacagaggccccagcagcagcctgaacacccccggcagcttcagaagaggcctggacgacagcaccggcggcacccccctgacccccgccgccagaatcagcgccctgaacatcgtgggcgacctgctgagaaaggtgggcgccctggagagcaagctggccagctgcagaaacctggtgtacgaccagagccccaacagaaccggcggccccgccagcggcagaagcagcaagaacagagacggcggcgagagaagacccagcagcaccagcgtgcccctgggcgacaagggcctggacaccagctgcagatggctgagcaagagcaccaccagaagcagcagcagctgctag

SEQ ID NO: 91816 - DNA, 1041 bp, synthetic construct
  misc_feature 1..1041: note = Description of Artificial Sequence: Synthetic coding sequence
  source 1..1041: mol_type = other DNA
atggaggacagcggcaagaccttcagcagcgaggaggaggaggccaactactggaaggacctggccatgacctacaagcagagagccgagaacacccaggaggagctgagagagttccaggagggcagcagagagtacgaggccgagctggagacccagctgcagcagatcgagaccagaaacagagacctgctgagcgagaacaacagactgagaatggagctggagaccatcaaggagaagttcgaggtgcagcacagcgagggctacagacagatcagcgccctggaggacgacctggcccagaccaaggccatcaaggaccagctgcagaagtacatcagagagctggagcaggccaacgacgacctggagagagccaagagagccaccatcatgagcctggaggacttcgagcagagactgaaccaggccatcgagagaaacgccttcctggagagcgagctggacgagaaggagaacctgctggagagcgtgcagagactgaaggacgaggccagagacctgagacaggagctggccgtgcagcagaagcaggagaagcccagaacccccatgcccagcagcgtggaggccgagagaaccgacaccgccgtgcaggccaccggcagcgtgcccagcacccccatcgcccacagaggccccagcagcagcctgaacacccccggcagcttcagaagaggcctggacgacagcaccggcggcacccccctgacccccgccgccagaatcagcgccctgaacatcgtgggcgacctgctgagaaaggtgggcgccctggagagcaagctggccagctgcagaaacctggtgtacgaccagagccccaacagaaccggcggccccgccagcggcagaagcagcaagaacagagacggcggcgagagaagacccagcagcaccagcgtgcccctgggcgacaagggcctgggcaagagactggagttcggcaagccccccagccacatgagcagcagccccctgcccagcgcccagggcgtggtgaagatgctgctgtag

SEQ ID NO: 91817 - DNA, 1008 bp, synthetic construct; identical to SEQ ID NO: 91815
  misc_feature 1..1008: note = Description of Artificial Sequence: Synthetic coding sequence
  source 1..1008: mol_type = other DNA

SEQ ID NO: 91818 - DNA, 1008 bp, synthetic construct; identical to SEQ ID NO: 91815
  misc_feature 1..1008: note = Description of Artificial Sequence: Synthetic coding sequence
  source 1..1008: mol_type = other DNA

SEQ ID NO: 91819 - DNA, 471 bp, synthetic construct
  misc_feature 1..471: note = Description of Artificial Sequence: Synthetic coding sequence
  source 1..471: mol_type = other DNA
atgggcgccagcagactgtacaccctggtgctggtgctgcagccccagagagtgctgctgggcatgaagaagagaggcttcggcgccggcagatggaacggcttcggcggcaaggtgcaggagggcgagaccatcgaggacggcgccagaagagagctgcaggaggagagcggcctgaccgtggacgccctgcacaaggtgggccagatcgtgttcgagttcgtgggcgagcccgagctgatggacgtgcacgtgttctgcaccgacagcatccagggcacccccgtggagagcgacgagatgagaccctgctggttccagctggaccagatccccttcaaggacatgtggcccgacgacagctactggttccccctgctgctgcagaagaagaagttccacggctacttcaagttccagggccaggacaccatcctggactacaccctgagagaggtggacaccgtgtag

SEQ ID NO: 91820 - DNA, 540 bp, synthetic construct
  misc_feature 1..540: note = Description of Artificial Sequence: Synthetic coding sequence
  source 1..540: mol_type = other DNA
atgagcggcatcagcccccagcagatgggcgagcccgagggcagctggagcggcaagaaccccggcaccatgggcgccagcagactgtacaccctggtgctggtgctgcagccccagagagtgctgctgggcatgaagaagagaggcttcggcgccggcagatggaacggcttcggcggcaaggtgcaggagggcgagaccatcgaggacggcgccagaagagagctgcaggaggagagcggcctgaccgtggacgccctgcacaaggtgggccagatcgtgttcgagttcgtgggcgagcccgagctgatggacgtgcacgtgttctgcaccgacagcatccagggcacccccgtggagagcgacgagatgagaccctgctggttccagctggaccagatccccttcaaggacatgtggcccgacgacagctactggttccccctgctgctgcagaagaagaagttccacggctacttcaagttccagggccaggacaccatcctggactacaccctgagagaggtggacaccgtgtag

SEQ ID NO: 91821 - DNA, 471 bp, synthetic construct; identical to SEQ ID NO: 91819
  misc_feature 1..471: note = Description of Artificial Sequence: Synthetic coding sequence
  source 1..471: mol_type = other DNA

SEQ ID NO: 91822 - DNA, 471 bp, synthetic construct; identical to SEQ ID NO: 91819
  misc_feature 1..471: note = Description of Artificial Sequence: Synthetic coding sequence
  source 1..471: mol_type = other DNA

SEQ ID NO: 91823 - DNA, 540 bp, synthetic construct; identical to SEQ ID NO: 91820
  misc_feature 1..540: note = Description of Artificial Sequence: Synthetic coding sequence
  source 1..540: mol_type = other DNA

SEQ ID NO: 91824 - DNA, 540 bp, synthetic construct; identical to SEQ ID NO: 91820
  misc_feature 1..540: note = Description of Artificial Sequence: Synthetic coding sequence
  source 1..540: mol_type = other DNA

SEQ ID NO: 91825 - DNA, 114 bp, synthetic construct
  misc_feature 1..114: note = Description of Artificial Sequence: Synthetic coding sequence
  source 1..114: mol_type = other DNA
atgggcgccagcagactgtacaccctggtgctggtgctgcagccccagagagtgctgctgggcatgaagaagagaggcttcggcgccggcagatggaacggcttcggcggctag

SEQ ID NO: 91826 - DNA, 495 bp, synthetic construct
  misc_feature 1..495: note = Description of Artificial Sequence: Synthetic coding sequence
  source 1..495: mol_type = other DNA
atgaagtgcaagcccaaccagaccagaacctacgaccccgagggcttcaagaagagagccgcctgcctgtgcttcagaagcgagagagaggacgaggtgctgctggtgagcagcagcagataccccgacagatggatcgtgcccggcggcggcatggagcccgaggaggagcccggcggcgccgccgtgagagaggtgtacgaggaggccggcgtgaagggcaagctgggcagactgctgggcgtgttcgagcagaaccaggaccccaagcacagaacctacgtgtacgtgctgaccgtgaccgagctgctggaggactgggaggacagcgtgagcatcggcagaaagagagagtggttcaaggtggaggacgccatcaaggtgctgcagtgccacaagcccgtgcacgccgagtacctggagaagctgaagctgggcggcagccccaccaacggcaacagcatggcccccagcagccccgacagcgacccctag

SEQ ID NO: 91827 - DNA, 495 bp, synthetic construct; identical to SEQ ID NO: 91826
  misc_feature 1..495: note = Description of Artificial Sequence: Synthetic coding sequence
  source 1..495: mol_type = other DNA

SEQ ID NO: 91828 - DNA, 444 bp, synthetic construct
  misc_feature 1..444: note = Description of Artificial Sequence: Synthetic coding sequence
  source 1..444: mol_type = other DNA
atggccctgagagcctgcggcctgatcatcttcagaagatgcctgatccccaaggtggacaacaacgccatcgagttcctgctgctgcaggccagcgacggcatccaccactggaccccccccaagggccacgtggagcccggcgaggacgacctggagaccgccctgagagagacccaggaggaggccggcatcgaggccggccagctgaccatcatcgagggcttcaagagagagctgaactacgtggccagaaacaagcccaagaccgtgatctactggctggccgaggtgaaggactacgacgtggagatcagactgagccacgagcaccaggcctacagatggctgggcctggaggaggcctgccagctggcccagttcaaggagatgaaggccgccctgcaggagggccaccagttcctgtgcagcatcgaggcctag

SEQ ID NO: 91829 - DNA, 444 bp, synthetic construct; identical to SEQ ID NO: 91828
  misc_feature 1..444: note = Description of Artificial Sequence: Synthetic coding sequence
  source 1..444: mol_type = other DNA

SEQ ID NO: 91830 - DNA, 444 bp, synthetic construct; identical to SEQ ID NO: 91828
  misc_feature 1..444: note = Description of Artificial Sequence: Synthetic coding sequence
  source 1..444: mol_type = other DNA

SEQ ID NO: 91831 - DNA, 444 bp, synthetic construct; identical to SEQ ID NO: 91828
  misc_feature 1..444: note = Description of Artificial Sequence: Synthetic coding sequence
  source 1..444: mol_type = other DNA

SEQ ID NO: 91832 - DNA, 444 bp, synthetic construct; identical to SEQ ID NO: 91828
  misc_feature 1..444: note = Description of Artificial Sequence: Synthetic coding sequence
  source 1..444: mol_type = other DNA

SEQ ID NO: 91833 - DNA, 1395 bp, synthetic construct
  misc_feature 1..1395: note = Description of Artificial Sequence: Synthetic coding sequence
  source 1..1395: mol_type = other DNA
atggagaccctgagcttccccagatacaacgtggccgagatcgtgatccacatcagaaacaagatcctgaccggcgccgacggcaagaacctgaccaagaacgacctgtaccccaaccccaagcccgaggtgctgcacatgatctacatgagagccctgcagatcgtgtacggcatcagactggagcacttctacatgatgcccgtgaacagcgaggtgatgtacccccacctgatggagggcttcctgcccttcagcaacctggtgacccacctggacagcttcctgcccatctgcagagtgaacgacttcgagaccgccgacatcctgtgccccaaggccaagagaaccagcagattcctgagcggcatcatcaacttcatccacttcagagaggcctgcagagagacctacatggagttcctgtggcagtacaagagcagcgccgacaagatgcagcagctgaacgccgcccaccaggaggccctgatgaagctggagagactggacagcgtgcccgtggaggagcaggaggagttcaagcagctgagcgacggcatccaggagctgcagcagagcctgaaccaggacttccaccagaagaccatcgtgctgcaggagggcaacagccagaagaagagcaacatcagcgagaagaccaagagactgaacgagctgaagctgagcgtggtgagcctgaaggagatccaggagagcctgaagaccaagatcgtggacagccccgagaagctgaagaactacaaggagaagatgaaggacaccgtgcagaagctgaagaacgccagacaggaggtggtggagaagtacgagatctacggcgacagcgtggactgcctgcccagctgccagctggaggtgcagctgtaccagaagaagatccaggacctgagcgacaacagagagaagctggccagcatcctgaaggagagcctgaacctggaggaccagatcgagagcgacgagagcgagctgaagaagctgaagaccgaggagaacagcttcaagagactgatgatcgtgaagaaggagaagctggccaccgcccagttcaagatcaacaagaagcacgaggacgtgaagcagtacaagagaaccgtgatcgaggactgcaacaaggtgcaggagaagagaggcgccgtgtacgagagagtgaccaccatcaaccaggagatccagaagatcaagctgggcatccagcagctgaaggacgccgccgagagagagaagctgaagagccaggagatcttcctgaacctgaagaccgccctggagaagtaccacgacggcatcgagaaggccgccgaggacagctacgccaagatcgacgagaagaccgccgagctgaagagaaagatgttcaagatgagcacctag

SEQ ID NO: 91834 - DNA, 1395 bp, synthetic construct; identical to SEQ ID NO: 91833
  misc_feature 1..1395: note = Description of Artificial Sequence: Synthetic coding sequence
  source 1..1395: mol_type = other DNA

SEQ ID NO: 91835 - DNA, 609 bp, synthetic construct
  misc_feature 1..609: note = Description of Artificial Sequence: Synthetic coding sequence
  source 1..609: mol_type = other DNA
atggagaccctgagcttccccagatacaacgtggccgagatcgtgatccacatcagaaacaagatcctgaccggcgccgacggcaagaacctgaccaagaacgacctgtaccccaaccccaagcccgaggtgctgcacatgatctacatgagagccctgcagatcgtgtacggcatcagactggagcacttctacatgatgcccgtgaacagcgaggtgatgtacccccacctgatggagggcttcctgcccttcagcaacctggtgacccacctggacagcttcctgcccatctgcagagtgaacgacttcgagaccgccgacatcctgtgccccaaggccaagagaaccagcagattcctgagcggcatcatcaacttcatccacttcagagaggcctgcagagagacctacatggagttcctgtggcagtacaagagcagcgccgacaagatgcagcagctgaacgccgcccaccaggaggccctgatgaagctggagagactggacagcgtgcccgtggaggagcaggaggagttcaagcagctgagcgacggcatccaggagctgcagcagagcctgaaccaggacttccaccagaagacctag

SEQ ID NO: 91836 - DNA, 438 bp, synthetic construct
  misc_feature 1..438: note = Description of Artificial Sequence: Synthetic coding sequence
  source 1..438: mol_type = other DNA
atggagaccctgagcttccccagatacaacgtggccgagatcgtgatccacatcagaaacaagatcctgaccggcgccgacggcaagaacctgaccaagaacgacctgtaccccaaccccaagcccgaggtgctgcacatgatctacatgagagccctgcagatcgtgtacggcatcagactggagcacttctacatgatgcccgtgaacagcgaggtgatgtacccccacctgatggagggcttcctgcccttcagcaacctggtgacccacctggacagcttcctgcccatctgcagagtgaacgacttcgagaccgccgacatcctgtgccccaaggccaagagaaccagcagattcctgagcggcatcatcaacttcatccacttcagagaggcctgcagagagacctacatggagttcctgtggcagtactag

SEQ ID NO: 91837 - DNA, 666 bp, synthetic construct
  misc_feature 1..666: note = Description of Artificial Sequence: Synthetic coding sequence
  source 1..666: mol_type = other DNA
atggagaccctgagcttccccagatacaacgtggccgagatcgtgatccacatcagaaacaagatcctgaccggcgccgacggcaagaacctgaccaagaacgacctgtaccccaaccccaagcccgaggtgctgcacatgatctacatgagagccctgcagatcgtgtacggcatcagactggagcacttctacatgatgcccgtgaacagcgaggtgatgtacccccacctgatggagggcttcctgcccttcagcaacctggtgacccacctggacagcttcctgcccatctgcagagtgaacgacttcgagaccgccgacatcctgtgccccaaggccaagagaaccagcagattcctgagcggcatcatcaacttcatccacttcagagaggcctgcagagagacctacatggagttcctgtggcagtacaagagcagcgccgacaagatgcagcagctgaacgccgcccaccaggaggccctgatgaagctggagagactggacagcgtgcccgtggaggagcaggaggagttcaagcagctgagcgacggcatccaggagctgcagcagagcctgaaccaggacttccaccagaagacctgctgcaagagagagatccccaagagaagccagatcttccagagaaagcccagcgtgtag

SEQ ID NO: 91838 - DNA, 1254 bp, synthetic construct
  misc_feature 1..1254: note = Description of Artificial Sequence: Synthetic coding sequence
  source 1..1254: mol_type = other DNA
atggagaccctgagcttccccagatacaacgtggccgagatcgtgatccacatcagaaacaagatcctgaccggcgccgacggcaagaacctgaccaagaacgacctgtaccccaaccccaagcccgaggtgctgcacatgatctacatgagagccctgcagatcgtgtacggcatcagactggagcacttctacatgatgcccgtgaacagcgaggtgatgtacccccacctgatggagggcttcctgcccttcagcaacctggtgacccacctggacagcttcctgcccatctgcagagtgaacgacttcgagaccgccgacatcctgtgccccaaggccaagagaaccagcagattcctgagcggcatcatcaacttcatccacttcagagaggcctgcagagagacctacatggagttcctgtggcagtacaagagcagcgccgacaagatgcagcagctgaacgccgcccaccaggaggccctgatgaagctggagagactggacagcgtgcccgtggaggagcaggaggagttcaagcagctgagcgacggcatccaggagctgcagcagagcctgaaccaggacttccaccagaagaccatcgtgctgcaggagggcaacagccagaagaagagcaacatcagcgagaagaccaagagactgaacgagctgaagctgagcgtggtgagcctgaaggagatccaggagagcctgaagaccaagatcgtggacagccccgagaagctgaagaactacaaggagaagatgaaggacaccgtgcagaagctgaagaacgccagaagcctgaacctggaggaccagatcgagagcgacgagagcgagctgaagaagctgaagaccgaggagaacagcttcaagagactgatgatcgtgaagaaggagaagctggccaccgcccagttcaagatcaacaagaagcacgaggacgtgaagcagtacaagagaaccgtgatcgaggactgcaacaaggtgcaggagaagagaggcgccgtgtacgagagagtgaccaccatcaaccaggagatccagaagatcaagctgggcatccagcagctgaaggacgccgccgagagagagaagctgaagagccaggagatcttcctgaacctgaagaccgccctggagaagtaccacgacggcatcgagaaggccgccgaggacagctacgccaagatcgacgagaagaccgccgagctgaagagaaagatgttcaagatgagcacctag

SEQ ID NO: 91839 - DNA, 375 bp, synthetic construct
  misc_feature 1..375: note = Description of Artificial Sequence: Synthetic coding sequence
  source 1..375: mol_type = other DNA
atggagaccctgagcttccccagatacaacgtggccgagatcgtgatccacatcagaaacaagatcctgaccggcgccgacggcaagaacctgaccaagaacgacctgtaccccaaccccaagcccgaggtgctgcacatgatctacatgagagccctgcagatcgtgtacggcatcagactggagcacttctacatgatgcccgtgaacagcgaggtgatgtacccccacctgatggagggcttcctgcccttcagcaacctggtgacccacctggacagcttcctgcccatctgcagagtgaacgacttcgagaccgccgacatcctgtgccccaaggccaagagaaccagcagattcctgagcggcatctag

SEQ ID NO: 91840 - DNA, 702 bp, synthetic construct
  misc_feature 1..702: note = Description of Artificial Sequence: Synthetic coding sequence
  source 1..702: mol_type = other DNA
atgaacaagctgagacagagcttcagaagaaagaaggacgtgtacgtgcccgaggccagcagaccccaccagtggcagaccgacgaggagggcgtgagaaccggcaagtgcagcttccccgtgaagaccggcaagaaggccgtgaaggccgtgctgtgggtgagcgccgacggcctgagagtggtggacgagaagaccaaggacctgatcgtggaccagaccatcgagaaggtgagcttctgcgcccccgacagaaacttcgacagagccttcagctacatctgcagagacggcaccaccagaagatggatctgccactgcttcatggccgtgaaggacaccggcgagagactgagccacgccgtgggctgcgccttcgccgcctgcctggagagaaagcagaagagagagaaggagtgcggcgtgaccgccaccttcgacgccagcagaaccaccttcaccagagagggcagcttcagagtgaccaccgccaccgagcaggccgagagagaggagatcatgaagcagatgcaggacgccaagaaggccgagaccgacaagatcgtggtgggcagcagcgtggcccccggcaacaccgcccccagccccagcagccccaccagccccaccagcgacgccaccaccagcctggagatgaacaacccccacgccatccccagaagacacgcccccatcgagtag

SEQ ID NO: 91841 - DNA, 1956 bp, synthetic construct
  misc_feature 1..1956: note = Description of Artificial Sequence: Synthetic coding sequence
  source 1..1956: mol_type = other DNA
atgaacaagctgagacagagcttcagaagaaagaaggacgtgtacgtgcccgaggccagcagaccccaccagtggcagaccgacgaggagggcgtgagaaccggcaagtgcagcttccccgtgaagtacctgggccacgtggaggtggacgagagcagaggcatgcacatctgcgaggacgccgtgaagagactgaaggccgagagaaagttcttcaagggcttcttcggcaagaccggcaagaaggccgtgaaggccgtgctgtgggtgagcgccgacggcctgagagtggtggacgagaagaccaaggacctgatcgtggaccagaccatcgagaaggtgagcttctgcgcccccgacagaaacttcgacagagccttcagctacatctgcagagacggcaccaccagaagatggatctgccactgcttcatggccgtgaaggacaccggcgagagactgagccacgccgtgggctgcgccttcgccgcctgcctggagagaaagcagaagagagagaaggagtgcggcgtgaccgccaccttcgacgccagcagaaccaccttcaccagagagggcagcttcagagtgaccaccgccaccgagcaggccgagagagaggagatcatgaagcagatgcaggacgccaagaaggccgagaccgacaagatcgtggtgggcagcagcgtggcccccggcaacaccgcccccagccccagcagccccaccagccccaccagcgacgccaccaccagcctggagatgaacaacccccacgccatccccagaagacacgcccccatcgagcagctggccagacagggcagcttcagaggcttccccgccctgagccagaagatgagccccttcaagagacagctgagcctgagaatcaacgagctgcccagcaccatgcagagaaagaccgacttccccatcaagaacgccgtgcccgaggtggagggcgaggccgagagcatcagcagcctgtgcagccagatcaccaacgccttcagcacccccgaggaccccttcagcagcgcccccatgaccaagcccgtgaccgtggtggccccccagagccccaccttccaggccaacggcaccgacagcgccttccacgtgctggccaagcccgcccacaccgccctggcccccgtggccatgcccgtgagagagaccaacccctgggcccacgcccccgacgccgccaacaaggagatcgccgccacctgcagcggcaccgagtggggccagagcagcggcgccgccagccccggcctgttccaggccggccacagaagaacccccagcgaggccgacagatggctggaggaggtgagcaagagcgtgagagcccagcagccccaggccagcgccgcccccctgcagcccgtgctgcagccccccccccccaccgccatcagccagcccgccagccccttccagggcaacgccttcctgaccagccagcccgtgcccgtgggcgtggtgcccgccctgcagcccgccttcgtgcccgcccagagctaccccgtggccaacggcatgccctaccccgcccccaacgtgcccgtggtgggcatcacccccagccagatggtggccaacgtgttcggcaccgccggccacccccaggccgcccacccccaccagagccccagcctggtgagacagcagaccttcccccactacgaggccagcagcgccaccaccagccccttcttcaagccccccgcccagcacctgaacggcagcgccgccttcaacggcgtggacgacggcagactggccagcgccgacagacacaccgaggtgcccaccggcacctgccccgtggaccccttcgaggcccagtgggccgccctggagaacaagagcaagcagagaaccaaccccagccccaccaaccccttcagcagcgacctgcagaagaccttcgagatcgagctgtag

SEQ ID NO: 91842 - DNA, 1812 bp, synthetic construct
  misc_feature 1..1812: note = Description of Artificial Sequence: Synthetic coding sequence
  source 1..1812: mol_type = other DNA
atgaacaagctgagacagagcttcagaagaaagaaggacgtgtacgtgcccgaggccagcagaccccaccagtggcagaccgacgaggagggcgtgagaaccggcaagtgcagcttccccgtgaagtacctgggccacgtggaggtggacgagagcagaggcatgcacatctgcgaggacgccgtgaagagactgaaggccgagagaaagttcttcaagggcttcttcggcaagaccggcaagaaggccgtgaaggccgtgctgtgggtgagcgccgacggcctgagagtggtggacgagaagaccaaggacctgatcgtggaccagaccatcgagaaggtgagcttctgcgcccccgacagaaacttcgacagagccttcagctacatctgcagagacggcaccaccagaagatggatctgccactgcttcatggccgtgaaggacaccggcgagagactgagccacgccgtgggctgcgccttcgccgcctgcctggagagaaagcagaagagagagaaggagtgcggcgtgaccgccaccttcgacgccagcagaaccaccttcaccagagagggcagcttcagagtgaccaccgccaccgagcaggccgagagagaggagatcatgaagcagatgcaggacgccaagaaggccgagaccgacaagatcgtggtgggcagcagcgtggcccccggcaacaccgcccccagccccagcagccccaccagccccaccagcgacgccaccaccagcctggagatgaacaacccccacgccatccccagaagacacgcccccatcgagcagctggccagacagggcagcttcagaggcttccccgccctgagccagaagatgagccccttcaagagacagctgagcctgagaatcaacgagctgcccagcaccatgcagagaaagaccgacttccccatcaagaacgccgtgcccgaggtggagggcgaggccgagagcatcagcagcctgtgcagccagatcaccaacgccttcagcacccccgaggaccccttcagcagcgcccccatgaccaagcccgtgaccgtggtggccccccagagccccaccttccagggcaccgagtggggccagagcagcggcgccgccagccccggcctgttccaggccggccacagaagaacccccagcgaggccgacagatggctggaggaggtgagcaagagcgtgagagcccagcagccccaggccagcgccgcccccctgcagcccgtgctgcagccccccccccccaccgccatcagccagcccgccagccccttccagggcaacgccttcctgaccagccagcccgtgcccgtgggcgtggtgcccgccctgcagcccgccttcgtgcccgcccagagctaccccgtggccaacggcatgccctaccccgcccccaacgtgcccgtggtgggcatcacccccagccagatggtggccaacgtgttcggcaccgccggccacccccaggccgcccacccccaccagagccccagcctggtgagacagcagaccttcccccactacgaggccagcagcgccaccaccagccccttcttcaagccccccgcccagcacctgaacggcagcgccgccttcaacggcgtggacgacggcagactggccagcgccgacagacacaccgaggtgcccaccggcacctgccccgtggaccccttcgaggcccagtgggccgccctggagaacaagagcaagcagagaaccaaccccagccccaccaaccccttcagcagcgacctgcagaagaccttcgagatcgagctgtag

SEQ ID NO: 91843 - DNA, 1923 bp, synthetic construct
  misc_feature 1..1923: note = Description of Artificial Sequence: Synthetic coding sequence
  source 1..1923: mol_type = other DNA
atgaacaagctgagacagagcttcagaagaaagaaggacgtgtacgtgcccgaggccagcagaccccaccagtggcagaccgacgaggagggcgtgagaaccggcaagtgcagcttccccgtgaagtacctgggccacgtggaggtggacgagagcagaggcatgcacatctgcgaggacgccgtgaagagactgaaggccaccggcaagaaggccgtgaaggccgtgctgtgggtgagcgccgacggcctgagagtggtggacgagaagaccaaggacctgatcgtggaccagaccatcgagaaggtgagcttctgcgcccccgacagaaacttcgacagagccttcagctacatctgcagagacggcaccaccagaagatggatctgccactgcttcatggccgtgaaggacaccggcgagagactgagccacgccgtgggctgcgccttcgccgcctgcctggagagaaagcagaagagagagaaggagtgcggcgtgaccgccaccttcgacgccagcagaaccaccttcaccagagagggcagcttcagagtgaccaccgccaccgagcaggccgagagagaggagatcatgaagcagatgcaggacgccaagaaggccgagaccgacaagatcgtggtgggcagcagcgtggcccccggcaacaccgcccccagccccagcagccccaccagccccaccagcgacgccaccaccagcctggagatgaacaacccccacgccatccccagaagacacgcccccatcgagcagctggccagacagggcagcttcagaggcttccccgccctgagccagaagatgagccccttcaagagacagctgagcctgagaatcaacgagctgcccagcaccatgcagagaaagaccgacttccccatcaagaacgccgtgcccgaggtggagggcgaggccgagagcatcagcagcctgtgcagccagatcaccaacgccttcagcacccccgaggaccccttcagcagcgcccccatgaccaagcccgtgaccgtggtggccccccagagccccaccttccaggccaacggcaccgacagcgccttccacgtgctggccaagcccgcccacaccgccctggcccccgtggccatgcccgtgagagagaccaacccctgggcccacgcccccgacgccgccaacaaggagatcgccgccacctgcagcggcaccgagtggggccagagcagcggcgccgccagccccggcctgttccaggccggccacagaagaacccccagcgaggccgacagatggctggaggaggtgagcaagagcgtgagagcccagcagccccaggccagcgccgcccccctgcagcccgtgctgcagccccccccccccaccgccatcagccagcccgccagccccttccagggcaacgccttcctgaccagccagcccgtgcccgtgggcgtggtgcccgccctgcagcccgccttcgtgcccgcccagagctaccccgtggccaacggcatgccctaccccgcccccaacgtgcccgtggtgggcatcacccccagccagatggtggccaacgtgttcggcaccgccggccacccccaggccgcccacccccaccagagccccagcctggtgagacagcagaccttcccccactacgaggccagcagcgccaccaccagccccttcttcaagccccccgcccagcacctgaacggcagcgccgccttcaacggcgtggacgacggcagactggccagcgccgacagacacaccgaggtgcccaccggcacctgccccgtggaccccttcgaggcccagtgggccgccctggagaacaagagcaagcagagaaccaaccccagccccaccaaccccttcagcagcgacctgcagaagaccttcgagatcgagctgtag

SEQ ID NO: 91844 - DNA, 1518 bp, synthetic construct
  misc_feature 1..1518: note = Description of Artificial Sequence: Synthetic coding sequence
  source 1..1518: mol_type = other DNA
atgaacaagctgagacagagcttcagaagaaagaaggacgtgtacgtgcccgaggccagcagaccccaccagtggcagaccgacgaggagggcgtgagaaccggcaagtgcagcttccccgtgaagtacctgggccacgtggaggtggacgagagcagaggcatgcacatctgcgaggacgccgtgaagagactgaaggccgagagaaagttcttcaagggcttcttcggcaagaccggcaagaaggccgtgaaggccgtgctgtgggtgagcgccgacggcctgagagtggtggacgagaagaccaaggacctgatcgtggaccagaccatcgagaaggtgagcttctgcgcccccgacagaaacttcgacagagccttcagctacatctgcagagacggcaccaccagaagatggatctgccactgcttcatggccgtgaaggacaccggcgagagactgagccacgccgtgggctgcgccttcgccgcctgcctggagagaaagcagaagagagagaaggagtgcggcgtgaccgccaccttcgacgccagcagaaccaccttcaccagagagggcagcttcagagtgaccaccgccaccgagcaggccgagagagaggagatcatgaagcagatgcaggacgccaagaaggtgcccgaggtggagggcgaggccgagagcatcagcagcctgtgcagccagatcaccaacgccttcagcacccccgaggaccccttcagcagcgcccccatgaccaagcccgtgaccgtggtggccccccagagccccaccttccagggcaccgagtggggccagagcagcggcgccgccagccccggcctgttccaggccggccacagaagaacccccagcgaggccgacagatggctggaggaggtgagcaagagcgtgagagcccagcagccccaggccagcgccgcccccctgcagcccgtgctgcagccccccccccccaccgccatcagccagcccgccagccccttccagggcaacgccttcctgaccagccagcccgtgcccgtgggcgtggtgcccgccctgcagcccgccttcgtgcccgcccagagctaccccgtggccaacggcatgccctaccccgcccccaacgtgcccgtggtgggcatcacccccagccagatggtggccaacgtgttcggcaccgccggccacccccaggccgcccacccccaccagagccccagcctggtgagacagcagaccttcccccactacgaggccagcagcgccaccaccagccccttcttcaagccccccgcccagcacctgaacggcagcgccgccttcaacggcgtggacgacggcagactggccagcgccgacagacacaccgaggtgcccaccggcacctgccccgtggaccccttcgaggcccagtgggccgccctggagaacaagagcaagcagagaaccaaccccagccccaccaaccccttcagcagcgacctgcagaagaccttcgagatcgagctgtag

SEQ ID NO: 91845 - DNA, 1923 bp, synthetic construct; identical to SEQ ID NO: 91843
  misc_feature 1..1923: note = Description of Artificial Sequence: Synthetic coding sequence
  source 1..1923: mol_type = other DNA

SEQ ID NO: 91846 - DNA, 1371 bp, synthetic construct
  misc_feature 1..1371: note = Description of Artificial Sequence: Synthetic coding sequence
  source 1..1371: mol_type = other DNA
atgaacaagctgagacagagcttcagaagaaagaaggacgtgtacgtgcccgaggccagcagaccccaccagtggcagaccgacgaggagggcgtgagaaccggcaagtgcagcttccccgtgaagtacctgggccacgtggaggtggacgagagcagaggcatgcacatctgcgaggacgccgtgaagagactgaaggccgagagaaagttcttcaagggcttcttcggcaagaccggcaagaaggccgtgaaggccgtgctgtgggtgagcgccgacggcctgagagtggtggacgagaagaccaaggacctgatcgtggaccagaccatcgagaaggtgagcttctgcgcccccgacagaaacttcgacagagccttcagctacatctgcagagacggcaccaccagaagatggatctgccactgcttcatggccgtgaaggacaccggcgagagactgagccacgccgtgggctgcgccttcgccgcctgcctggagagaaagcagaagagagagaaggagtgcggcgtgaccgccaccttcgacgccagcagaaccaccttcaccagagagggcagcttcagagtgaccaccgccaccgagcaggccgagagagaggagatcatgaagcagatgcaggacgccaagaagggcaccgagtggggccagagcagcggcgccgccagccccggcctgttccaggccggccacagaagaacccccagcgaggccgacagatggctggaggaggtgagcaagagcgtgagagcccagcagccccaggccagcgccgcccccctgcagcccgtgctgcagccccccccccccaccgccatcagccagcccgccagccccttccagggcaacgccttcctgaccagccagcccgtgcccgtgggcgtggtgcccgccctgcagcccgccttcgtgcccgcccagagctaccccgtggccaacggcatgccctaccccgcccccaacgtgcccgtggtgggcatcacccccagccagatggtggccaacgtgttcggcaccgccggccacccccaggccgcccacccccaccagagccccagcctggtgagacagcagaccttcccccactacgaggccagcagcgccaccaccagccccttcttcaagccccccgcccagcacctgaacggcagcgccgccttcaacggcgtggacgacggcagactggccagcgccgacagacacaccgaggtgcccaccggcacctgccccgtggaccccttcgaggcccagtgggccgccctggagaacaagagcaagcagagaaccaaccccagccccaccaaccccttcagcagcgacctgcagaagaccttcgagatcgagctgtag

SEQ ID NO: 91847 - DNA, 777 bp, synthetic construct
  misc_feature 1..777: note = Description of Artificial Sequence: Synthetic coding sequence
  source 1..777: mol_type = other DNA
atgaacaagctgagacagagcttcagaagaaagaaggacgtgtacgtgcccgaggccagcagaccccaccagtggcagaccgacgaggagggcgtgagaaccggcaagtgcagcttccccgtgaagtacctgggccacgtggaggtggacgagagcagaggcatgcacatctgcgaggacgccgtgaagagactgaaggccgagagaaagttcttcaagggcttcttcggcaagaccggcaagaaggccgtgaaggccgtgctgtgggtgagcgccgacggcctgagagtggtggacgagaagaccaaggacctgatcgtggaccagaccatcgagaaggtgagcttctgcgcccccgacagaaacttcgacagagccttcagctacatctgcagagacggcaccaccagaagatggatctgccactgcttcatggccgtgaaggacaccggcgagagactgagccacgccgtgggctgcgccttcgccgcctgcctggagagaaagcagaagagagagaaggagtgcggcgtgaccgccaccttcgacgccagcagaaccaccttcaccagagagggcagcttcagagtgaccaccgccaccgagcaggccgagagagaggagatcatgaagcagatgcaggacgccaagaaggccgagaccgacaagatcgtggtgggcagcagcgtggcccccggcaacaccgcccccagccccagcagccccaccagccccaccagcgacgccaccaccagcctggagatgaacaacccctag

SEQ ID NO: 91848 - DNA, 1779 bp, synthetic construct
  misc_feature 1..1779: note = Description of Artificial Sequence: Synthetic coding sequence
  source 1..1779: mol_type = other DNA
atgaacaagctgagacagagcttcagaagaaagaaggacgtgtacgtgcccgaggccagcagaccccaccagtggcagaccgacgaggagggcgtgagaaccggcaagtgcagcttccccgtgaagtacctgggccacgtggaggtggacgagagcagaggcatgcacatctgcgaggacgccgtgaagagactgaaggccaccggcaagaaggccgtgaaggccgtgctgtgggtgagcgccgacggcctgagagtggtggacgagaagaccaaggacctgatcgtggaccagaccatcgagaaggtgagcttctgcgcccccgacagaaacttcgacagagccttcagctacatctgcagagacggcaccaccagaagatggatctgccactgcttcatggccgtgaaggacaccggcgagagactgagccacgccgtgggctgcgccttcgccgcctgcctggagagaaagcagaagagagagaaggagtgcggcgtgaccgccaccttcgacgccagcagaaccaccttcaccagagagggcagcttcagagtgaccaccgccaccgagcaggccgagagagaggagatcatgaagcagatgcaggacgccaagaaggccgagaccgacaagatcgtggtgggcagcagcgtggcccccggcaacaccgcccccagccccagcagccccaccagccccaccagcgacgccaccaccagcctggagatgaacaacccccacgccatccccagaagacacgcccccatcgagcagctggccagacagggcagcttcagaggcttccccgccctgagccagaagatgagccccttcaagagacagctgagcctgagaatcaacgagctgcccagcaccatgcagagaaagaccgacttccccatcaagaacgccgtgcccgaggtggagggcgaggccgagagcatcagcagcctgtgcagccagatcaccaacgccttcagcacccccgaggaccccttcagcagcgcccccatgaccaagcccgtgaccgtggtggccccccagagccccaccttccagggcaccgagtggggccagagcagcggcgccgccagccccggcctgttccaggccggccacagaagaacccccagcgaggccgacagatggctggaggaggtgagcaagagcgtgagagcccagcagccccaggccagcgccgcccccctgcagcccgtgctgcagccccccccccccaccgccatcagccagcccgccagccccttccagggcaacgccttcctgaccagccagcccgtgcccgtgggcgtggtgcccgccctgcagcccgccttcgtgcccgcccagagctaccccgtggccaacggcatgccctaccccgcccccaacgtgcccgtggtgggcatcacccccagccagatggtggccaacgtgttcggcaccgccggccacccccaggccgcccacccccaccagagccccagcctggtgagacagcagaccttcccccactacgaggccagcagcgccaccaccagccccttcttcaagccccccgcccagcacctgaacggcagcgccgccttcaacggcgtggacgacggcagactggccagcgccgacagacacaccgaggtgcccaccggcacctgccccgtggaccccttcgaggcccagtgggccgccctggagaacaagagcaagcagagaaccaaccccagccccaccaaccccttcagcagcgacctgcagaagaccttcgagatcgagctgtag

SEQ ID NO: 91849 - DNA, 204 bp, synthetic construct
  misc_feature 1..204: note = Description of Artificial Sequence: Synthetic coding sequence
  source 1..204: mol_type = other DNA
atgaacaagctgagacagagcttcagaagaaagaaggacgtgtacgtgcccgaggccagcagaccccaccagtggcagaccgacgaggagggcgtgagaaccggcaagtgcagcttccccgtgaagtacctgggccacgtggaggtggacgagagcagaggcatgcacatctgcgaggacgccgtgaagagactgaaggcctag

SEQ ID NO: 91850 - DNA, 1956 bp, synthetic construct; identical to SEQ ID NO: 91841
  misc_feature 1..1956: note = Description of Artificial Sequence: Synthetic coding sequence
  source 1..1956: mol_type = other DNA

SEQ ID NO: 91851 - DNA, 777 bp, synthetic construct; identical to SEQ ID NO: 91847
  misc_feature 1..777: note = Description of Artificial Sequence: Synthetic coding sequence
  source 1..777: mol_type = other DNA

SEQ ID NO: 91852 - DNA, 1812 bp, synthetic construct; identical to SEQ ID NO: 91842
  misc_feature 1..1812: note = Description of Artificial Sequence: Synthetic coding sequence
  source 1..1812: mol_type = other DNA

SEQ ID NO: 91853 - DNA, 1923 bp, synthetic construct; identical to SEQ ID NO: 91843
  misc_feature 1..1923: note = Description of Artificial Sequence: Synthetic coding sequence
  source 1..1923: mol_type = other DNA

SEQ ID NO: 91854 - DNA, 1830 bp, synthetic construct
  misc_feature 1..1830: note = Description of Artificial Sequence: Synthetic coding sequence
  source 1..1830: mol_type = other DNA
atgagcagaagcgccgccgccagcggcggccccagaagacccgagagacacctgccccccgccccctgcggcgcccccggcccccccgagacctgcagaaccgagcccgacggcgccggcaccatgaacaagctgagacagagcctgagaagaagaaagcccgcctacgtgcccgaggccagcagaccccaccagtggcaggccgacgaggacgccgtgagaaagggcacctgcagcttccccgtgagatacctgggccacgtggaggtggaggagagcagaggcatgcacgtgtgcgaggacgccgtgaagaagctgaaggccatgggcagaaagagcgtgaagagcgtgctgtgggtgagcgccgacggcctgagagtggtggacgacaagaccaaggacctgctggtggaccagaccatcgagaaggtgagcttctgcgcccccgacagaaacctggacaaggccttcagctacatctgcagagacggcaccaccagaagatggatctgccactgcttcctggccctgaaggacagcggcgagagactgagccacgccgtgggctgcgccttcgccgcctgcctggagagaaagcagagaagagagaaggagtgcggcgtgaccgccgccttcgacgccagcagaaccagcttcgccagagagggcagcttcagactgagcggcggcggcagacccgccgagagagaggcccccgacaagaagaaggccgaggccgccgccgcccccaccgtggcccccggccccgcccagcccggccacgtgagccccacccccgccaccaccagccccggcgagaagggcgaggccggcacccccgtggccgccggcaccaccgccgccgccatccccagaagacacgcccccctggagcagctggtgagacagggcagcttcagaggcttccccgccctgagccagaagaacagccccttcaagagacagctgagcctgagactgaacgagctgcccagcaccctgcagagaagaaccgacttccaggtgaagggcaccgtgcccgagatggagccccccggcgccggcgacagcgacagcatcaacgccctgtgcacccagatcagcagcagcttcgccagcgccggcgcccccgcccccggccccccccccgccaccaccggcaccagcgcctggggcgagcccagcgtgccccccgccgccgccttccagcccggccacaagagaacccccagcgaggccgagagatggctggaggaggtgagccaggtggccaaggcccagcagcagcagcagcagcagcagcagcagcagcagcagcagcagcagcagcagcagcaggccgccagcgtggcccccgtgcccaccatgccccccgccctgcagcccttccccgcccccgtgggccccttcgacgccgcccccgcccaggtggccgtgttcctgccccccccccacatgcagccccccttcgtgcccgcctaccccggcctgggctacccccccatgcccagagtgcccgtggtgggcatcacccccagccagatggtggccaacgccttctgcagcgccgcccagctgcagccccagcccgccaccctgctgggcaaggccggcgccttccccccccccgccatccccagcgcccccggcagccaggccagacccagacccaacggcgccccctggccccccgagcccgcccccgcccccgcccccgagctggaccccttcgaggcccagtgggccgccctggagggcaaggccaccgtggagaagcccagcaaccccttcagcggcgacctgcagaagaccttcgagatcgagctgtag

SEQ ID NO: 91855 - DNA, 1707 bp, synthetic construct
  misc_feature 1..1707: note = Description of Artificial Sequence: Synthetic coding sequence
  source 1..1707: mol_type = other DNA
atgaacaagctgagacagagcctgagaagaagaaagcccgcctacgtgcccgaggccagcagaccccaccagtggcaggccgacgaggacgccgtgagaaagggcacctgcagcttccccgtgagatacctgggccacgtggaggtggaggagagcagaggcatgcacgtgtgcgaggacgccgtgaagaagctgaaggccatgggcagaaagagcgtgaagagcgtgctgtgggtgagcgccgacggcctgagagtggtggacgacaagaccaaggacctgctggtggaccagaccatcgagaaggtgagcttctgcgcccccgacagaaacctggacaaggccttcagctacatctgcagagacggcaccaccagaagatggatctgccactgcttcctggccctgaaggacagcggcgagagactgagccacgccgtgggctgcgccttcgccgcctgcctggagagaaagcagagaagagagaaggagtgcggcgtgaccgccgccttcgacgccagcagaaccagcttcgccagagagggcagcttcagactgagcggcggcggcagacccgccgagagagaggcccccgacaagaagaaggccgaggccgccgccgcccccaccgtggcccccggccccgcccagcccggccacgtgagccccacccccgccaccaccagccccggcgagaagggcgaggccggcacccccgtggccgccggcaccaccgccgccgccatccccagaagacacgcccccctggagcagctggtgagacagggcagcttcagaggcttccccgccctgagccagaagaacagccccttcaagagacagctgagcctgagactgaacgagctgcccagcaccctgcagagaagaaccgacttccaggtgaagggcaccgtgcccgagatggagccccccggcgccggcgacagcgacagcatcaacgccctgtgcacccagatcagcagcagcttcgccagcgccggcgcccccgcccccggccccccccccgccaccaccggcaccagcgcctggggcgagcccagcgtgccccccgccgccgccttccagcccggccacaagagaacccccagcgaggccgagagatggctggaggaggtgagccaggtggccaaggcccagcagcagcagcagcagcagcagcagcagcagcagcagcagcagcagcagcagcagcaggccgccagcgtggcccccgtgcccaccatgccccccgccctgcagcccttccccgcccccgtgggccccttcgacgccgcccccgcccaggtggccgtgttcctgccccccccccacatgcagccccccttcgtgcccgcctaccccggcctgggctacccccccatgcccagagtgcccgtggtgggcatcacccccagccagatggtggccaacgccttctgcagcgccgcccagctgcagccccagcccgccaccctgctgggcaaggccggcgccttccccccccccgccatccccagcgcccccggcagccaggccagacccagacccaacggcgccccctggccccccgagcccgcccccgcccccgcccccgagctggaccccttcgaggcccagtgggccgccctggagggcaaggccaccgtggagaagcccagcaaccccttcagcggcgacctgcagaagaccttcgagatcgagctgtag

SEQ ID NO: 91856 - DNA, 1446 bp, synthetic construct
  misc_feature 1..1446: note = Description of Artificial Sequence: Synthetic coding sequence
  source 1..1446: mol_type = other DNA
atgaagggcagaggcatgctggtgctgctgctgcacgccgtggtgctgggcctgcccagcgcctgggccgtgggcgcctgcgccagagcctgccccgccgcctgcgcctgcagcaccgtggagagaggctgcagcgtgagatgcgacagagccggcctgctgagagtgcccgccgagctgccctgcgaggccgtgagcatcgacctggacagaaacggcctgagattcctgggcgagagagccttcggcaccctgcccagcctgagaagactgagcctgagacacaacaacctgagcttcatcacccccggcgccttcaagggcctgcccagactggccgagctgagactggcccacaacggcgacctgagatacctgcacgccagaaccttcgccgccctgagcagactgagaagactggacctggccgcctgcagactgttcagcgtgcccgagagactgctggccgagctgcccgccctgagagagctggccgccttcgacaacctgttcagaagagtgcccggcgccctgagaggcctggccaacctgacccacgcccacctggagagaggcagaatcgaggccgtggccagcagcagcctgcagggcctgagaagactgagaagcctgagcctgcaggccaacagagtgagagccgtgcacgccggcgccttcggcgactgcggcgtgctggagcacctgctgctgaacgacaacctgctggccgagctgcccgccgacgccttcagaggcctgagaagactgagaaccctgaacctgggcggcaacgccctggacagagtggccagagcctggttcgccgacctggccgagctggagctgctgtacctggacagaaacagcatcgccttcgtggaggagggcgccttccagaacctgagcggcctgctggccctgcacctgaacggcaacagactgaccgtgctggcctgggtggccttccagcccggcttcttcctgggcagactgttcctgttcagaaacccctggtgctgcgactgcagactggagtggctgagagactggatggagggcagcggcagagtgaccgacgtgccctgcgccagccccggcagcgtggccggcctggacctgagccaggtgaccttcggcagaagcagcgacggcctgtgcgtggaccccgaggagctgaacctgaccaccagcagccccggccccagccccgagcccgccgccaccaccgtgagcagattcagcagcctgctgagcaagctgctggcccccagagtgcccgtggaggaggccgccaacaccaccggcggcctggccaacgccagcctgagcgacagcctgagcagcagaggcgtgggcggcgccggcagacagccctggttcctgctggccagctgcctgctgcccagcgtggcccagcacgtggtgttcggcctgcagatggactag

SEQ ID NO: 91857 - DNA, 1446 bp, synthetic construct; identical to SEQ ID NO: 91856
  misc_feature 1..1446: note = Description of Artificial Sequence: Synthetic coding sequence
  source 1..1446: mol_type = other DNA

SEQ ID NO: 91858 - DNA, 1191 bp, synthetic construct
  misc_feature 1..1191: note = Description of Artificial Sequence: Synthetic coding sequence
  source 1..1191: mol_type = other DNA
atgccccccaagaagggcggcgacggcatcaagcccccccccatcatcggcagattcggcaccagcctgaagatcggcatcgtgggcctgcccaacgtgggcaagagcaccttcttcaacgtgctgaccaacagccaggccagcgccgagaacttccccttctgcaccatcgaccccaacgagagcagagtgcccgtgcccgacgagagattcgacttcctgtgccagtaccacaagcccgccagcaagatccccgccttcctgaacgtggtggacatcgccggcctggtgaagggcgcccacaacggccagggcctgggcaacgccttcctgagccacatcagcgcctgcgacggcatcttccacctgaccagagccttcgaggacgacgacatcacccacgtggagggcagcgtggaccccatcagagacatcgagatcatccacgaggagctgcagctgaaggacgaggagatgatcggccccatcatcgacaagctggagaaggtggccgtgagaggcggcgacaagaagctgaagcccgagtacgacatcatgtgcaaggtgaagagctgggtgatcgaccagaagaagcccgtgagattctaccacgactggaacgacaaggagatcgaggtgctgaacaagcacctgttcctgaccagcaagcccatggtgtacctggtgaacctgagcgagaaggactacatcagaaagaagaacaagtggctgatcaagatcaaggagtgggtggacaagtacgaccccggcgccctggtgatccccttcagcggcgccctggagctgaagctgcaggagctgagcgccgaggagagacagaagtacctggaggccaacatgacccagagcgccctgcccaagatcatcaaggccggcttcgccgccctgcagctggagtacttcttcaccgccggccccgacgaggtgagagcctggaccatcagaaagggcaccaaggccccccaggccgccggcaagatccacaccgacttcgagaagggcttcatcatggccgaggtgatgaagtacgaggacttcaaggaggagggcagcgagaacgccgtgaaggccgccggcaagtacagacagcagggcagaaactacatcgtggaggacggcgacatcatcttcttcaagttcaacaccccccagcagcccaagaagaagtag

SEQ ID NO: 91859 - DNA, 717 bp, synthetic construct
  misc_feature 1..717: note = Description of Artificial Sequence: Synthetic coding sequence
  source 1..717: mol_type = other DNA
atgatcggccccatcatcgacaagctggagaaggtggccgtgagaggcggcgacaagaagctgaagcccgagtacgacatcatgtgcaaggtgaagagctgggtgatcgaccagaagaagcccgtgagattctaccacgactggaacgacaaggagatcgaggtgctgaacaagcacctgttcctgaccagcaagcccatggtgtacctggtgaacctgagcgagaaggactacatcagaaagaagaacaagtggctgatcaagatcaaggagtgggtggacaagtacgaccccggcgccctggtgatccccttcagcggcgccctggagctgaagctgcaggagctgagcgccgaggagagacagaagtacctggaggccaacatgacccagagcgccctgcccaagatcatcaaggccggcttcgccgccctgcagctggagtacttcttcaccgccggccccgacgaggtgagagcctggaccatcagaaagggcaccaaggccccccaggccgccggcaagatccacaccgacttcgagaagggcttcatcatggccgaggtgatgaagtacgaggacttcaaggaggagggcagcgagaacgccgtgaaggccgccggcaagtacagacagcagggcagaaactacatcgtggaggacggcgacatcatcttcttcaagttcaacaccccccagcagcccaagaagaagtag

SEQ ID NO: 91860 - DNA, 1251 bp, synthetic construct
  misc_feature 1..1251: note = Description of Artificial Sequence: Synthetic coding sequence
  source 1..1251: mol_type = other DNA
atgagcagaaccttcagcgccaagggcggcagagacctggtggagggcccccagtacctgatgccccccaagaagggcggcgacggcatcaagcccccccccatcatcggcagattcggcaccagcctgaagatcggcatcgtgggcctgcccaacgtgggcaagagcaccttcttcaacgtgctgaccaacagccaggccagcgccgagaacttccccttctgcaccatcgaccccaacgagagcagagtgcccgtgcccgacgagagattcgacttcctgtgccagtaccacaagcccgccagcaagatccccgccttcctgaacgtggtggacatcgccggcctggtgaagggcgcccacaacggccagggcctgggcaacgccttcctgagccacatcagcgcctgcgacggcatcttccacctgaccagagccttcgaggacgacgacatcacccacgtggagggcagcgtggaccccatcagagacatcgagatcatccacgaggagctgcagctgaaggacgaggagatgatcggccccatcatcgacaagctggagaaggtggccgtgagaggcggcgacaagaagctgaagcccgagtacgacatcatgtgcaaggtgaagagctgggtgatcgaccagaagaagcccgtgagattctaccacgactggaacgacaaggagatcgaggtgctgaacaagcacctgttcctgaccagcaagcccatggtgtacctggtgaacctgagcgagaaggactacatcagaaagaagaacaagtggctgatcaagatcaaggagtgggtggacaagtacgaccccggcgccctggtgatccccttcagcggcgccctggagctgaagctgcaggagctgagcgccgaggagagacagaagtacctggaggccaacatgacccagagcgccctgcccaagatcatcaaggccggcttcgccgccctgcagctggagtacttcttcaccgccggccccgacgaggtgagagcctggaccatcagaaagggcaccaaggccccccaggccgccggcaagatccacaccgacttcgagaagggcttcatcatggccgaggtgatgaagtacgaggacttcaaggaggagggcagcgagaacgccgtgaaggccgccggcaagtacagacagcagggcagaaactacatcgtggaggacggcgacatcatcttcttcaagttcaacaccccccagcagcccaagaagaagtag

SEQ ID NO: 91861 - DNA, 351 bp, synthetic construct
  misc_feature 1..351: note = Description of Artificial Sequence: Synthetic coding sequence
  source 1..351: mol_type = other DNA
atgccccccaagaagggcggcgacggcatcaagcccccccccatcatcggcagattcggcaccagcctgaagatcggcatcgtgggcctgcccaacgtgggcaagagcaccttcttcaacgtgctgaccaacagccaggccagcgccgagaacttccccttctgcaccatcgaccccaacgagagcagagtgcccgtgcccgacgagagattcgacttcctgtgccagtaccacaagcccgccagcaagatccccgccttcctgaacgtggtggacatcgccggcctggtgaagggcgcccacaacggccagggcctgggcaacgccttcctgagccacatcagcgcctag

SEQ ID NO: 91862 - DNA, 837 bp, synthetic construct
  misc_feature 1..837: note = Description of Artificial Sequence: Synthetic coding sequence
  source 1..837: mol_type = other DNA
atgccccccaagaagggcggcgacggcatcaagcccccccccatcatcggcagattcggcaccagcctgaagatcggcatcgtgggcctgcccaacgtgggcaagagcaccttcttcaacgtgctgaccaacagccaggccagcgccgagaacttccccttctgcaccatcgaccccaacgagagcagagtgcccgtgcccgacgagagattcgacttcctgtgccagtaccacaagcccgccagcaagatccccgccttcctgaacgtggtggacatcgccggcctggtgaagggcgcccacaacggccagggcctgggcaacgccttcctgagccacatcagcgcctgcgacggcatcttccacctgaccagagccttcgaggacgacgacatcacccacgtggagggcagcgtggaccccatcagagacatcgagatcatccacgaggagctgcagctgaaggacgaggagatgatcggccccatcatcgacaagctggagaaggtggccgtgagaggcggcgacaagaagctgaagcccgagtacgacatcatgtgcaaggtgaagagctgggtgatcgaccagaagaagcccgtgagattctaccacgactggaacgacaaggagatcgaggtgctgaacaagcacctgttcctgaccagcaagcccatggtgtacctggtgaacctgagcgagaaggactacatcagaaagaagaacaagtggctgctggagagcaccgacaacaaggccgagatcatcctgctgaagatggagatcctgagcagcagcaacctgacccacctgaacaacagaagaagaaacaagatctag

SEQ ID NO: 91863 - DNA, 312 bp, synthetic construct
  misc_feature 1..312: note = Description of Artificial Sequence: Synthetic coding sequence
  source 1..312: mol_type = other DNA
atgatcggccccatcatcgacaagctggagaaggtggccgtgagaggcggcgacaagaagctgaagcccgagtacgacatcatgtgcaaggtgaagagctgggtgatcgaccagaagaagcccgtgagattctaccacgactggaacgacaaggagatcgaggtgctgaacaagcacctgttcctgaccagcaagcccatggtgtacctggtgaacctgagcgagaaggactacatcagaaagaagaacaagtggctgatcaagatcaaggagtgggtggacaagtacgaccccggcgccctggtgatctag

SEQ ID NO: 91864 - DNA, 1329 bp, synthetic construct
  misc_feature 1..1329: note = Description of Artificial Sequence: Synthetic coding sequence
  source 1..1329: mol_type = other DNA
atgtgcgagctgagcagagaggacgcccccgtgagatggtacaaggacggcctggaggtggaggagagcgaggccctggtgctggagagagacggccccagatgcagactggtgctgcccgccgcccagcccgaggacggcggcgagttcgtgtgcgacgccggcgacgacagcgccttcttcaccgtgaccgtgaccgccccccccgagagaatcgtgcaccccgccgccagaagcctggacctgcacttcggcgcccccggcagagtggagctgagatgcgaggtggcccccgccggcagccaggtgagatggtacaaggacggcctggaggtggaggccagcgacgccctgcagctgggcgccgagggccccaccagaaccctgaccctgccccacgcccagcccgaggacgccggcgagtacgtgtgcgagaccagacacgaggccatcaccttcaacgtgatcctggccgagccccccgtgcagttcctggccctggagaccacccccagccccctgtgcgtggcccccggcgagcccgtggtgctgagctgcgagctgagcagagccggcgcccccgtggtgtggagccacaacggcagacccgtgcaggagggcgagggcctggagctgcacgccgagggccccagaagagtgctgtgcatccaggccgccggccccgcccacgccggcctgtacacctgccagagcggcgccgcccccggcgcccccagcctgagcttcaccgtgcaggtggccgagcccctgctggtgaagctggtgagcgagctgacccccctgaccgtgcacgagggcgacgacgccaccttcagatgcgaggtgagcccccccgacgccgacgtgacctggctgagaaacggcgccgtggtgacccccggcccccaggtggagatggcccagaacggcagcagcagaatcctgaccctgagaggctgccagctgggcgacgccggcaccgtgaccctgagagccggcagcaccgccaccagcgccagactgcacgtgagagagaccgagctgctgttcctgagaagactgcaggacgtgagagccgaggagggccaggacgtgtgcctggaggtggagaccggcagagtgggcgccgccggcgccgtgagatgggtgagaggcggccagcccctgccccacgacagcagactgagcatggcccaggacggccacatccacagactgttcatccacggcgtgatcctggccgaccagggcacctacggctgcgagagccaccacgacagaaccctggccagactgagcgtgagaagagagtgccccgtgctgagctag

SEQ ID NO: 91865 - DNA, 4206 bp, synthetic construct
  misc_feature 1..4206: note = Description of Artificial Sequence: Synthetic coding sequence
  source 1..4206: mol_type = other DNA
atgaaggccagcagcggcgaccagggcagccccccctgcttcctgagattccccagacccgtgagagtggtgagcggcgccgaggccgagctgaagtgcgtggtgctgggcgagcccccccccgtggtggtgtgggagaagggcggccagcagctggccgccagcgagagactgagcttccccgccgacggcgccgagcacggcctgctgctgaccgccgccctgcccaccgacgccggcgtgtacgtgtgcagagccagaaacgccgccggcgaggcctacgccgccgccgccgtgaccgtgctggagccccccgccagcgaccccgagctgcagcccgccgagagacccctgcccagccccggcagcggcgagggcgcccccgtgttcctgaccggccccagaagccagtgggtgctgagaggcgccgaggtggtgctgacctgcagagccggcggcctgcccgagcccaccctgtactgggagaaggacggcatggccctggacgaggtgtgggacagcagccacttcgccctgcagcccggcagagccgaggacggccccggcgccagcctggccctgagaatcctggccgccagactgcccgacagcggcgtgtacgtgtgccacgccagaaacgcccacggccacgcccaggccggcgccctgctgcaggtgcaccagccccccgagagcccccccgccgaccccgacgaggcccccgcccccgtggtggagcccctgaagtgcgcccccaagaccttctgggtgaacgagggcaagcacgccaagttcagatgctacgtgatgggcaagcccgagcccgagatcgagtggcactgggagggcagacccctgctgcccgacagaagaagactgatgtacagagacagagacggcggcttcgtgctgaaggtgctgtactgccaggccaaggacagaggcctgtacgtgtgcgccgccagaaacagcgccggccagaccctgagcgccgtgcagctgcacgtgaaggagcccagactgagattcaccagacccctgcaggacgtggagggcagagagcacggcatcgccgtgctggagtgcaaggtgcccaacagcagaatccccaccgcctggttcagagaggaccagagactgctgccctgcagaaagtacgagcagatcgaggagggcaccgtgagaagactgatcatccacagactgaaggccgacgacgacggcatctacctgtgcgagatgagaggcagagtgagaaccgtggccaacgtgaccgtgaagggccccatcctgaagagactgcccagaaagctggacgtgctggagggcgagaacgccgtgctgctggtggagaccctggaggccggcgtggagggcagatggagcagagacggcgaggagctgcccgtgatctgccagagcagcagcggccacatgcacgccctggtgctgcccggcgtgaccagagaggacgccggcgaggtgaccttcagcctgggcaacagcagaaccaccaccctgctgagagtgaagtgcgtgaagcacagcccccccggcccccccatcctggccgagatgttcaagggccacaagaacaccgtgctgctgacctggaagccccccgagcccgcccccgagacccccttcatctacagactggagagacaggaggtgggcagcgaggactggatccagtgcttcagcatcgagaaggccggcgccgtggaggtgcccggcgactgcgtgcccagcgagggcgactacagattcagaatctgcaccgtgagcggccacggcagaagcccccacgtggtgttccacggcagcgcccacctggtgcccaccgccagactggtggccggcctggaggacgtgcaggtgtacgacggcgaggacgccgtgttcagcctggacctgagcaccatcatccagggcacctggttcctgaacggcgaggagctgaagagcaacgagcccgagggccaggtggagcccggcgccctgagatacagaatcgagcagaagggcctgcagcacagactgatcctgcacgccgtgaagcaccaggacagcggcgccctggtgggcttcagctgccccggcgtgcaggacagcgccgccctgaccatccaggagagccccgtgcacatcctgagcccccaggacagagtgagcctgaccttcaccaccagcgagagagtggtgctgacctgcgagctgagcagagtggacttccccgccacctggtacaaggacggccagaaggtggaggagagcgagctgctggtggtgaagatggacggcagaaagcacagactgatcctgcccgaggccaaggtgcaggacagcggcgagttcgagtgcagaaccgagggcgtgagcgccttcttcggcgtgaccgtgcaggacccccccgtgcacatcgtggaccccagagagcacgtgttcgtgcacgccatcaccagcgagtgcgtgatgctggcctgcgaggtggacagagaggacgcccccgtgagatggtacaaggacggccaggaggtggaggagagcgacttcgtggtgctggagaacgagggcccccacagaagactggtgctgcccgccacccagcccagcgacggcggcgagttccagtgcgtggccggcgacgagtgcgcctacttcaccgtgaccatcaccgacgtgagcagctggatcgtgtaccccagcggcaaggtgtacgtggccgccgtgagactggagagagtggtgctgacctgcgagctgtgcagaccctgggccgaggtgagatggaccaaggacggcgaggaggtggtggagagccccgccctgctgctgcagaaggaggacaccgtgagaagactggtgctgcccgccgtgcagctggaggacagcggcgagtacctgtgcgagatcgacgacgagagcgccagcttcaccgtgaccgtgaccgagccccccgtgagaatcatctaccccagagacgaggtgaccctgatcgccgtgaccctggagtgcgtggtgctgatgtgcgagctgagcagagaggacgcccccgtgagatggtacaaggacggcctggaggtggaggagagcgaggccctggtgctggagagagacggccccagatgcagactggtgctgcccgccgcccagcccgaggacggcggcgagttcgtgtgcgacgccggcgacgacagcgccttcttcaccgtgaccgtgaccgagccccccgtgcagttcctggccctggagaccacccccagccccctgtgcgtggcccccggcgagcccgtggtgctgagctgcgagctgagcagagccggcgcccccgtggtgtggagccacaacggcagacccgtgcaggagggcgagggcctggagctgcacgccgagggccccagaagagtgctgtgcatccaggccgccggccccgcccacgccggcctgtacacctgccagagcggcgccgcccccggcgcccccagcctgagcttcaccgtgcaggtggccgagccccccgtgagagtggtggcccccgaggccgcccagaccagagtgagaagcacccccggcggcgacctggagctggtggtgcacctgagcggccccggcggccccgtgagatggtacaaggacggcgagagactggccagccagggcagagtgcagctggagcaggccggcgccagacaggtgctgagagtgcagggcgccagaagcggcgacgccggcgagtacctgtgcgacgccccccaggacagcagaatcttcctggtgagcgtggaggagcccctgctggtgaagctggtgagcgagctgacccccctgaccgtgcacgagggcgacgacgccaccttcagatgcgaggtgagcccccccgacgccgacgtgacctggctgagaaacggcgccgtggtgacccccggcccccagagacagagctgctgcagctacggcggctgcagaatgtgcggccagagaaaggccagaatgtgcgtgagcaagtggagacaggccgagtgggtgcagagaggcccctgcgccggctgcgaggtgggcagcccctgccccaccaccctggcctgcccctggcccagaatgggcaccagcaccgccagcagcagcatggtgagctactggcccaccagagcccccaccgccgccagagccaccaccatcgccccctggcccggcagcgcctag

SEQ ID NO: 91866 - DNA, 3078 bp, synthetic construct
  misc_feature 1..3078: note = Description of Artificial Sequence: Synthetic coding sequence
  source 1..3078: mol_type = other DNA
atgaaggccagcagcggcgaccagggcagccccccctgcttcctgagattccccagacccgtgagagtggtgagcggcgccgaggccgagctgaagtgcgtggtgctgggcgagcccccccccgtggtggtgtgggagaagggcggccagcagctggccgccagcgagagactgagcttccccgccgacggcgccgagcacggcctgctgctgaccgccgccctgcccaccgacgccggcgtgtacgtgtgcagagccagaaacgccgccggcgaggcctacgccgccgccgccgtgaccgtgctggagccccccgccagcgaccccgagctgcagcccgccgagagacccctgcccagccccggcagcggcgagggcgcccccgtgttcctgaccggccccagaagccagtgggtgctgagaggcgccgaggtggtgctgacctgcagagccggcggcctgcccgagcccaccctgtactgggagaaggacggcatggccctggacgaggtgtgggacagcagccacttcgccctgcagcccggcagagccgaggacggccccggcgccagcctggccctgagaatcctggccgccagactgcccgacagcggcgtgtacgtgtgccacgccagaaacgcccacggccacgcccaggccggcgccctgctgcaggtgcaccagccccccgagagcccccccgccgaccccgacgaggcccccgcccccgtggtggagcccctgaagtgcgcccccaagaccttctgggtgaacgagggcaagcacgccaagttcagatgctacgtgatgggcaagcccgagcccgagatcgagtggcactgggagggcagacccctgctgcccgacagaagaagactgatgtacagagacagagacggcggcttcgtgctgaaggtgctgtactgccaggccaaggacagaggcctgtacgtgtgcgccgccagaaacagcgccggccagaccctgagcgccgtgcagctgcacgtgaaggagcccagactgagattcaccagacccctgcaggacgtggagggcagagagcacggcatcgccgtgctggagtgcaaggtgcccaacagcagaatccccaccgcctggttcagagaggaccagagactgctgccctgcagaaagtacgagcagatcgaggagggcaccgtgagaagactgatcatccacagactgaaggccgacgacgacggcatctacctgtgcgagatgagaggcagagtgagaaccgtggccaacgtgaccgtgaagggccccatcctgaagagactgcccagaaagctggacgtgctggagggcgagaacgccgtgctgctggtggagaccctggaggccggcgtggagggcagatggagcagagacggcgaggagctgcccgtgatctgccagagcagcagcggccacatgcacgccctggtgctgcccggcgtgaccagagaggacgccggcgaggtgaccttcagcctgggcaacagcagaaccaccaccctgctgagagtgaagtgcgtgaagcacagcccccccggcccccccatcctggccgagatgttcaagggccacaagaacaccgtgctgctgacctggaagccccccgagcccgcccccgagacccccttcatctacagactggagagacaggaggtgggcagcgaggactggatccagtgcttcagcatcgagaaggccggcgccgtggaggtgcccggcgactgcgtgcccagcgagggcgactacagattcagaatctgcaccgtgagcggccacggcagaagcccccacgtggtgttccacggcagcgcccacctggtgcccaccgccagactggtggccggcctggaggacgtgcaggtgtacgacggcgaggacgccgtgttcagcctggacctgagcaccatcatccagggcacctggttcctgaacggcgaggagctgaagagcaacgagcccgagggccaggtggagcccggcgccctgagatacagaatcgagcagaagggcctgcagcacagactgatcctgcacgccgtgaagcaccaggacagcggcgccctggtgggcttcagctgccccggcgtgcaggacagcgccgccctgaccatccaggagagccccgtgcacatcctgagcccccaggacagagtgagcctgaccttcaccaccagcgagagagtggtgctgacctgcgagctgagcagagtggacttccccgccacctggtacaaggacggccagaaggtggaggagagcgagctgctggtggtgaagatggacggcagaaagcacagactgatcctgcccgaggccaaggtgcaggacagcggcgagttcgagtgcagaaccgagggcgtgagcgccttcttcggcgtgaccgtgcaggacccccccgtgcacatcgtggaccccagagagcacgtgttcgtgcacgccatcaccagcgagtgcgtgatgctggcctgcgaggtggacagagaggacgcccccgtgagatggtacaaggacggccaggaggtggaggagagcgacttcgtggtgctggagaacgagggcccccacagaagactggtgctgcccgccacccagcccagcgacggcggcgagttccagtgcgtggccggcgacgagtgcgcctacttcaccgtgaccatcaccgacgtgagcagctggatcgtgtaccccagcggcaaggtgtacgtggccgccgtgagactggagagagtggtgctgacctgcgagctgtgcagaccctgggccgaggtgagatggaccaaggacggcgaggaggtggtggagagccccgccctgctgctgcagaaggaggacaccgtgagaagactggtgctgcccgccgtgcagctggaggacagcggcgagtacctgtgcgagatcgacgacgagagcgccagcttcaccgtgaccgtgaccgagagctaccagagccaggacagcagcaacaacaaccccgagctgtgcgtgctgctgaagaagcccaagaccagaagactgtggagcagattccccccctggagaagaaccgccggcaccgagtag

SEQ ID NO: 91867 - DNA, 5691 bp, synthetic construct
  misc_feature 1..5691: note = Description of Artificial Sequence: Synthetic coding sequence
  source 1..5691: mol_type = other DNA
atgaaggccagcagcggcgaccagggcagccccccctgcttcctgagattccccagacccgtgagagtggtgagcggcgccgaggccgagctgaagtgcgtggtgctgggcgagcccccccccgtggtggtgtgggagaagggcggccagcagctggccgccagcgagagactgagcttccccgccgacggcgccgagcacggcctgctgctgaccgccgccctgcccaccgacgccggcgtgtacgtgtgcagagccagaaacgccgccggcgaggcctacgccgccgccgccgtgaccgtgctggagccccccgccagcgaccccgagctgcagcccgccgagagacccctgcccagccccggcagcggcgagggcgcccccgtgttcctgaccggccccagaagccagtgggtgctgagaggcgccgaggtggtgctgacctgcagagccggcggcctgcccgagcccaccctgtactgggagaaggacggcatggccctggacgaggtgtgggacagcagccacttcgccctgcagcccggcagagccgaggacggccccggcgccagcctggccctgagaatcctggccgccagactgcccgacagcggcgtgtacgtgtgccacgccagaaacgcccacggccacgcccaggccggcgccctgctgcaggtgcaccagccccccgagagcccccccgccgaccccgacgaggcccccgcccccgtggtggagcccctgaagtgcgcccccaagaccttctgggtgaacgagggcaagcacgccaagttcagatgctacgtgatgggcaagcccgagcccgagatcgagtggcactgggagggcagacccctgctgcccgacagaagaagactgatgtacagagacagagacggcggcttcgtgctgaaggtgctgtactgccaggccaaggacagaggcctgtacgtgtgcgccgccagaaacagcgccggccagaccctgagcgccgtgcagctgcacgtgaaggagcccagactgagattcaccagacccctgcaggacgtggagggcagagagcacggcatcgccgtgctggagtgcaaggtgcccaacagcagaatccccaccgcctggttcagagaggaccagagactgctgccctgcagaaagtacgagcagatcgaggagggcaccgtgagaagactgatcatccacagactgaaggccgacgacgacggcatctacctgtgcgagatgagaggcagagtgagaaccgtggccaacgtgaccgtgaagggccccatcctgaagagactgcccagaaagctggacgtgctggagggcgagaacgccgtgctgctggtggagaccctggaggccggcgtggagggcagatggagcagagacggcgaggagctgcccgtgatctgccagagcagcagcggccacatgcacgccctggtgctgcccggcgtgaccagagaggacgccggcgaggtgaccttcagcctgggcaacagcagaaccaccaccctgctgagagtgaagtgcgtgaagcacagcccccccggcccccccatcctggccgagatgttcaagggccacaagaacaccgtgctgctgacctggaagccccccgagcccgcccccgagacccccttcatctacagactggagagacaggaggtgggcagcgaggactggatccagtgcttcagcatcgagaaggccggcgccgtggaggtgcccggcgactgcgtgcccagcgagggcgactacagattcagaatctgcaccgtgagcggccacggcagaagcccccacgtggtgttccacggcagcgcccacctggtgcccaccgccagactggtggccggcctggaggacgtgcaggtgtacgacggcgaggacgccgtgttcagcctggacctgagcaccatcatccagggcacctggttcctgaacggcgaggagctgaagagcaacgagcccgagggccaggtggagcccggcgccctgagatacagaatcgagcagaagggcctgcagcacagactgatcctgcacgccgtgaagcaccaggacagcggcgccctggtgggcttcagctgccccggcgtgcaggacagcgccgccctgaccatccaggagagccccgtgcacatcctgagcccccaggacagagtgagcctgaccttcaccaccagcgagagagtggtgctgacctgcgagctgagcagagtggacttccccgccacctggtacaaggacggccagaaggtggaggagagcgagctgctggtggtgaagatggacggcagaaagcacagactgatcctgcccgaggccaaggtgcaggacagcggcgagttcgagtgcagaaccgagggcgtgagcgccttcttcggcgtgaccgtgcaggacccccccgtgcacatcgtggaccccagagagcacgtgttcgtgcacgccatcaccagcgagtgcgtgatgctggcctgcgaggtggacagagaggacgcccccgtgagatggtacaaggacggccaggaggtggaggagagcgacttcgtggtgctggagaacgagggcccccacagaagactggtgctgcccgccacccagcccagcgacggcggcgagttccagtgcgtggccggcgacgagtgcgcctacttcaccgtgaccatcaccgacgtgagcagctggatcgtgtaccccagcggcaaggtgtacgtggccgccgtgagactggagagagtggtgctgacctgcgagctgtgcagaccctgggccgaggtgagatggaccaaggacggcgaggaggtggtggagagccccgccctgctgctgcagaaggaggacaccgtgagaagactggtgctgcccgccgtgcagctggaggacagcggcgagtacctgtgcgagatcgacgacgagagcgccagcttcaccgtgaccgtgaccgagccccccgtgagaatcatctaccccagagacgaggtgaccctgatcgccgtgaccctggagtgcgtggtgctgatgtgcgagctgagcagagaggacgcccccgtgagatggtacaaggacggcctggaggtggaggagagcgaggccctggtgctggagagagacggccccagatgcagactggtgctgcccgccgcccagcccgaggacggcggcgagttcgtgtgcgacgccggcgacgacagcgccttcttcaccgtgaccgtgaccgccccccccgagagaatcgtgcaccccgccgccagaagcctggacctgcacttcggcgcccccggcagagtggagctgagatgcgaggtggcccccgccggcagccaggtgagatggtacaaggacggcctggaggtggaggccagcgacgccctgcagctgggcgccgagggccccaccagaaccctgaccctgccccacgcccagcccgaggacgccggcgagtacgtgtgcgagaccagacacgaggccatcaccttcaacgtgatcctggccgagccccccgtgcagttcctggccctggagaccacccccagccccctgtgcgtggcccccggcgagcccgtggtgctgagctgcgagctgagcagagccggcgcccccgtggtgtggagccacaacggcagacccgtgcaggagggcgagggcctggagctgcacgccgagggccccagaagagtgctgtgcatccaggccgccggccccgcccacgccggcctgtacacctgccagagcggcgccgcccccggcgcccccagcctgagcttcaccgtgcaggtggccgagccccccgtgagagtggtggcccccgaggccgcccagaccagagtgagaagcacccccggcggcgacctggagctggtggtgcacctgagcggccccggcggccccgtgagatggtacaaggacggcgagagactggccagccagggcagagtgcagctggagcaggccggcgccagacaggtgctgagagtgcagggcgccagaagcggcgacgccggcgagtacctgtgcgacgccccccaggacagcagaatcttcctggtgagcgtggaggagcccctgctggtgaagctggtgagcgagctgacccccctgaccgtgcacgagggcgacgacgccaccttcagatgcgaggtgagcccccccgacgccgacgtgacctggctgagaaacggcgccgtggtgacccccggcccccaggtggagatggcccagaacggcagcagcagaatcctgaccctgagaggctgccagctgggcgacgccggcaccgtgaccctgagagccggcagcaccgccaccagcgccagactgcacgtgagagagaccgagctgctgttcctgagaagactgcaggacgtgagagccgaggagggccaggacgtgtgcctggaggtggagaccggcagagtgggcgccgccggcgccgtgagatgggtgagaggcggccagcccctgccccacgacagcagactgagcatggcccaggacggccacatccacagactgttcatccacggcgtgatcctggccgaccagggcacctacggctgcgagagccaccacgacagaaccctggccagactgagcgtgagacccagacagctgagagtgctgagacccctggaggacgtgaccatcagcgagggcggcagcgccaccttccagctggagctgagccaggagggcgtgaccggcgagtgggccagaggcggcgtgcagctgtaccccggccccaagtgccacatccacagcgacggccacagacacagactggtgctgaacggcctgggcctggccgacagcggctgcgtgagcttcaccgccgacagcctgagatgcgccgccagactgatcgtgagagaggtgcccgtgaccatcgtgagaggcccccacgacctggaggtgaccgagggcgacaccgccaccttcgagtgcgagctgagccaggccctggccgacgtgacctgggagaaggacggcaacgccctgacccccagccccagactgagactgcaggccctgggcaccagaagactgctgcagctgagaagatgcggccccagcgacgccggcacctacagctgcgccgtgggcaccgccagagccggccccgtgagactgaccgtgagagagagaaccgtggccgtgctgagcgagctgagaagcgtgagcgccagagagggcgacggcgccaccttcgagtgcaccgtgagcgaggtggagaccaccggcagatgggagctgggcggcagacccctgagacccggcgccagagtgagaatcagacaggagggcaagaagcacatcctggtgctgagcgagctgagagccgaggacgccggcgaggtgagattccaggccggccccgcccagagcctggccctgctggaggtggaggccctgcccctgcagatgtgcagacacccccccagagagaagaccgtgctggtgggcagaagagccgtgctggaggtgaccgtgagcagaagcggcggccacgtgtgctggctgagagagggcgccgagctgtgccccggcgacaagtacgagatgagaagccacggccccacccacagcctggtgatccacgacgtgagacccgaggaccagggcacctactgctgccaggccggccaggacagcacccacaccagactgctggtggagggcaactag

SEQ ID NO: 91868 - DNA, 2682 bp, synthetic construct
  misc_feature 1..2682: note = Description of Artificial Sequence: Synthetic coding sequence
  source 1..2682: mol_type = other DNA
atggagccccccctgcccgtgggcgcccagcccctggccaccgtggagggcatggagatgaagggccccctgagagagccctgcgccctgaccctggcccagagaaacggccagtacgagctgatcatccagctgcacgagaaggagcagcacgtgcaggacatcatccccatcaacagccacttcagatgcgtgcaggaggccgaggagaccctgctgatcgacatcgccagcaacagcggctgcaagatcagagtgcagggcgactggatcagagagagaagattcgagatccccgacgaggagcactgcctgaagttcctgagcgccgtgctggccgcccagaaggcccagagccagctgctggtgcccgagcagaaggacagcagcagctggtaccagaagctggacaccaaggacaagcccagcgtgttcagcggcctgctgggcttcgaggacaacttcagcagcatgaacctggacaagaagatcaacagccagaaccagcccaccggcatccacagagagcccccccccccccccttcagcgtgaacaagatgctgcccagagagaaggaggccagcaacaaggagcagcccaaggtgaccaacaccatgagaaagctgttcgtgcccaacacccagagcggccagagagagggcctgatcaagcacatcctggccaagagagagaaggagtacgtgaacatccagaccttcagattcttcgtgggcacctggaacgtgaacggccagagccccgacagcggcctggagccctggctgaactgcgaccccaacccccccgacatctactgcatcggcttccaggagctggacctgagcaccgaggccttcttctacttcgagagcgtgaaggagcaggagtggagcatggccgtggagagaggcctgcacagcaaggccaagtacaagaaggtgcagctggtgagactggtgggcatgatgctgctgatcttcgccagaaaggaccagtgcagatacatcagagacatcgccaccgagaccgtgggcaccggcatcatgggcaagatgggcaacaagggcggcgtggccgtgagattcgtgttccacaacaccaccttctgcatcgtgaacagccacctggccgcccacgtggaggacttcgagagaagaaaccaggactacaaggacatctgcgccagaatgagcttcgtggtgcccaaccagaccctgccccagctgaacatcatgaagcacgaggtggtgatctggctgggcgacctgaactacagactgtgcatgcccgacgccaacgaggtgaagagcctgatcaacaagaaggacctgcagagactgctgaagttcgaccagctgaacatccagagaacccagaagaaggccttcgtggacttcaacgagggcgagatcaagttcatccccacctacaagtacgacagcaagaccgacagatgggacagcagcggcaagtgcagagtgcccgcctggtgcgacagaatcctgtggagaggcaccaacgtgaaccagctgaactacagaagccacatggagctgaagaccagcgaccacaagcccgtgagcgccctgttccacatcggcgtgaaggtggtggacgagagaagatacagaaaggtgttcgaggacagcgtgagaatcatggacagaatggagaacgacttcctgcccagcctggagctgagcagaagagagttcgtgttcgagaacgtgaagttcagacagctgcagaaggagaagttccagatcagcaacaacggccaggtgccctgccacttcagcttcatccccaagctgaacgacagccagtactgcaagccctggctgagagccgagcccttcgagggctacctggagcccaacgagaccgtggacatcagcctggacgtgtacgtgagcaaggacagcgtgaccatcctgaacagcggcgaggacaagatcgaggacatcctggtgctgcacctggacagaggcaaggactacttcctgaccatcagcggcaactacctgcccagctgcttcggcaccagcctggaggccctgtgcagaatgaagagacccatcagagaggtgcccgtgaccaagctgatcgacctggagaagagcctgctgcagatggtgcccctggacgagggcgccagcgagagacccctgcaggtgcccaaggagatctggctgctggtggaccacctgttcaagtacgcctgccaccaggaggacctgttccagacccccggcatgcaggaggagctgcagcagatcatcgactgcctggacaccagcatccccgagaccatccccggcagcaaccacagcgtggccgaggccctgctgatcttcctggaggccctgcccgagcccgtgatctgctacgagctgtaccagagatgcctggacagcgcctacgaccccagaatctgcagacaggtgatcagccagctgcccagatgccacagaaacgtgttcagatacctgatggccttcctgagagagctgctgaagttcagcgagtacaacagcgtgaacgccaacatgatcgccaccctgttcaccagcctgctgctgagacccccccccaacctgatggccagacagacccccagcgacagacagagagccatccagttcctgctgggcttcctgctgggcagcgaggaggactag

SEQ ID NO: 91869 - DNA, 2706 bp, synthetic construct
  misc_feature 1..2706: note = Description of Artificial Sequence: Synthetic coding sequence
  source 1..2706: mol_type = other DNA
atggagccccccctgcccgtgggcgcccagcccctggccaccgtggagggcatggagatgaagggccccctgagagagccctgcgccctgaccctggcccagagaaacggccagtacgagctgatcatccagctgcacgagaaggagcagcacgtgcaggacatcatccccatcaacagccacttcagatgcgtgcaggaggccgaggagaccctgctgatcgacatcgccagcaacagcggctgcaagatcagagtgcagggcgactggatcagagagagaagattcgagatccccgacgaggagcactgcctgaagttcctgagcgccgtgctggccgcccagaaggcccagagccagctgctggtgcccgagcagaaggacagcagcagctggtaccagaagctggacaccaaggacaagcccagcgtgttcagcggcctgctgggcttcgaggacaacttcagcagcatgaacctggacaagaagatcaacagccagaaccagcccaccggcatccacagagagcccccccccccccccttcagcgtgaacaagatgctgcccagagagaaggaggccagcaacaaggagcagcccaaggtgaccaacaccatgagaaagctgttcgtgcccaacacccagagcggccagagagagggcctgatcaagcacatcctggccaagagagagaaggagtacgtgaacatccagaccttcagattcttcgtgggcacctggaacgtgaacggccagagccccgacagcggcctggagccctggctgaactgcgaccccaacccccccgacatctactgcatcggcttccaggagctggacctgagcaccgaggccttcttctacttcgagagcgtgaaggagcaggagtggagcatggccgtggagagaggcctgcacagcaaggccaagtacaagaaggtgcagctggtgagactggtgggcatgatgctgctgatcttcgccagaaaggaccagtgcagatacatcagagacatcgccaccgagaccgtgggcaccggcatcatgggcaagatgggcaacaagggcggcgtggccgtgagattcgtgttccacaacaccaccttctgcatcgtgaacagccacctggccgcccacgtggaggacttcgagagaagaaaccaggactacaaggacatctgcgccagaatgagcttcgtggtgcccaaccagaccctgccccagctgaacatcatgaagcacgaggtggtgatctggctgggcgacctgaactacagactgtgcatgcccgacgccaacgaggtgaagagcctgatcaacaagaaggacctgcagagactgctgaagttcgaccagctgaacatccagagaacccagaagaaggccttcgtggacttcaacgagggcgagatcaagttcatccccacctacaagtacgacagcaagaccgacagatgggacagcagcggcaagtgcagagtgcccgcctggtgcgacagaatcctgtggagaggcaccaacgtgaaccagctgaactacagaagccacatggagctgaagaccagcgaccacaagcccgtgagcgccctgttccacatcggcgtgaaggtggtggacgagagaagatacagaaaggtgttcgaggacagcgtgagaatcatggacagaatggagaacgacttcctgcccagcctggagctgagcagaagagagttcgtgttcgagaacgtgaagttcagacagctgcagaaggagaagttccagatcagcaacaacggccaggtgccctgccacttcagcttcatccccaagctgaacgacagccagtactgcaagccctggctgagagccgagcccttcgagggctacctggagcccaacgagaccgtggacatcagcctggacgtgtacgtgagcaaggacagcgtgaccatcctgaacagcggcgaggacaagatcgaggacatcctggtgctgcacctggacagaggcaaggactacttcctgaccatcagcggcaactacctgcccagctgcttcggcaccagcctggaggccctgtgcagaatgaagagacccatcagagaggtgcccgtgaccaagctgatcgacctggaggaggacagcttcctggagaaggagaagagcctgctgcagatggtgcccctggacgagggcgccagcgagagacccctgcaggtgcccaaggagatctggctgctggtggaccacctgttcaagtacgcctgccaccaggaggacctgttccagacccccggcatgcaggaggagctgcagcagatcatcgactgcctggacaccagcatccccgagaccatccccggcagcaaccacagcgtggccgaggccctgctgatcttcctggaggccctgcccgagcccgtgatctgctacgagctgtaccagagatgcctggacagcgcctacgaccccagaatctgcagacaggtgatcagccagctgcccagatgccacagaaacgtgttcagatacctgatggccttcctgagagagctgctgaagttcagcgagtacaacagcgtgaacgccaacatgatcgccaccctgttcaccagcctgctgctgagacccccccccaacctgatggccagacagacccccagcgacagacagagagccatccagttcctgctgggcttcctgctgggcagcgaggaggactag

SEQ ID NO: 91870 - DNA, 2445 bp, synthetic construct
  misc_feature 1..2445: note = Description of Artificial Sequence: Synthetic coding sequence
  source 1..2445: mol_type = other DNA
atgcacctggagggcagagacggcagaagataccccggcgcccccgccgtggagctgctgcagaccagcgtgcccagcggcctggccgagctggtggccggcaagagaagactgcccagaggcgccggcggcgccgaccccagccacagctgccccagaggcgccgccggccagagcagctgggcccccgccggccaggagttcgccagcttcctgaccaagggcagaagccacagcagcctgccccagatgagcagcagcagaagcaaggacagctgcttcaccgagaacacccccctgctgagaaacagcctgcaggagaagggcagcagatgcatccccgtgtaccaccccgagttcatcaccgccgaggagagctgggaggacagcagcgccgactgggagagaagatacctgctgagcagagaggtgagcggcctgagcgccagcgccagcagcgagaagggcgacctgctggacagcccccacatcagactgagactgagcaagctgagaagatgcgtgcagtggctgaaggtgatgggcctgttcgccttcgtggtgctgtgcagcatcctgttcagcctgtaccccgaccagggcaagctgtggcagctgctggccctgagccccctggagaactacagcgtgaacctgagcagccacgtggacagcaccctgctgcaggtggacctggccggcgccctggtggccagcggccccagcagacccggcagagaggagcacatcgtggtggagctgacccaggccgacgccctgggcagcagatggagaagaccccagcaggtgacccacaactggaccgtgtacctgaaccccagaagaagcgagcacagcgtgatgagcagaaccttcgaggtgctgaccagagagaccgtgagcatcagcatcagagccagcctgcagcagacccaggccgtgcccctgctgatggcccaccagtacctgagaggcagcgtggagacccaggtgaccatcgccaccgccatcctggccggcgtgtacgccctgatcatcttcgagagacccagcctgacccacgtggtggagtggatcgacttcgagaccctggccctgctgttcggcatgatgatcctggtggccatcttcagcgagaccggcttcttcgactactgcgccgtgaaggcctacagactgagcagaggcagagtgtgggccatgatcatcatgctgtgcctgatcgccgccgtgctgagcgccttcctggacaacgtgaccaccatgctgctgttcacccccgtgaccatcagactgtgcgaggtgctgaacctggaccccagacaggtgctgatcgccgaggtgatcttcaccaacatcggcggcgccgccaccgccatcggcgacccccccaacgtgatcatcgtgagcaaccaggagctgagaaagatgggcctggacttcgccggcttcaccgcccacatgttcatcggcatctgcctggtgctgctggtgtgcttccccctgctgagactgctgtactggaacagaaagctgtacaacaaggagcccagcgagatcgtggagctgaagcacgagatccacgtgtggagactgaccgcccagagaatcagccccgccagcagagaggagaccgccgtgagaagactgctgctgggcaaggtgctggccctggagcacctgctggccagaagactgcacaccttccacagacagatcagccaggaggacaagaactgggagaccaacatccaggagctgcagaagaagcacagaatcagcgacggcatcctgctggccaagtgcctgaccgtgctgggcttcgtgatcttcatgttcttcctgaacagcttcgtgcccggcatccacctggacctgggctggatcgccatcctgggcgccatctggctgctgatcctggccgacatccacgacttcgagatcatcctgcacagagtggagtgggccaccctgctgttcttcgccgccctgttcgtgctgatggaggccctggcccacctgcacctgatcgagtacgtgggcgagcagaccgccctgctgatcaagatggtgcccgaggagcagagactgatcgccgccatcgtgctggtggtgtgggtgagcgccctggccagcagcctgatcgacaacatccccttcaccgccaccatgatccccgtgctgctgaacctgagccacgaccccgaggtgggcctgcccgccccccccctgatgtacgccctggccttcggcgcctgcctgggcggcaacggcaccctgatcggcgccagcgccaacgtggtgtgcgccggcatcgccgagcagcacggctacggcttcagcttcatggagttcttcagactgggcttccccatgatggtggtgagctgcaccgtgggcatgtgctacctgctggtggcccacgtggtggtgggctggaactag

SEQ ID NO: 91871 - DNA, 2517 bp, synthetic construct
  misc_feature 1..2517: note = Description of Artificial Sequence: Synthetic coding sequence
  source 1..2517: mol_type = other DNA
atgcacctggagggcagagacggcagaagataccccggcgcccccgccgtggagctgctgcagaccagcgtgcccagcggcctggccgagctggtggccggcaagagaagactgcccagaggcgccggcggcgccgaccccagccacagctgccccagaggcgccgccggccagagcagctgggcccccgccggccaggagttcgccagcttcctgaccaagggcagaagccacagcagcctgccccagatgagcagcagcagaagcaaggacagctgcttcaccgagaacacccccctgctgagaaacagcctgcaggagaagggcagcagatgcatccccgtgtaccaccccgagttcatcaccgccgaggagagctgggaggacagcagcgccgactgggagagaagatacctgctgagcagagaggtgagcggcctgagcgccagcgccagcagcgagaagggcgacctgctggacagcccccacatcagactgagactgagcaagctgagaagatgcgtgcagtggctgaaggtgatgggcctgttcgccttcgtggtgctgtgcagcatcctgttcagcctgtaccccgaccagggcaagctgtggcagctgctggccctgagccccctggagaactacagcgtgaacctgagcagccacgtggacagcaccctgctgcaggtggacctggccggcgccctggtggccagcggccccagcagacccggcagagaggagcacatcgtggtggagctgacccaggccgacgccctgggcagcagatggagaagaccccagcaggtgacccacaactggaccgtgtacctgaaccccagaagaagcgagcacagcgtgatgagcagaaccttcgaggtgctgaccagagagaccgtgagcatcagcatcagagccagcctgcagcagacccaggccgtgcccctgctgatggcccaccagtacctgagaggcagcgtggagacccaggtgaccatcgccaccgccatcctggccggcgtgtacgccctgatcatcttcgagatcgtgcacagaaccctggccgccatgctgggcagcctggccgccctggccgccctggccgtgatcggcgacagacccagcctgacccacgtggtggagtggatcgacttcgagaccctggccctgctgttcggcatgatgatcctggtggccatcttcagcgagaccggcttcttcgactactgcgccgtgaaggcctacagactgagcagaggcagagtgtgggccatgatcatcatgctgtgcctgatcgccgccgtgctgagcgccttcctggacaacgtgaccaccatgctgctgttcacccccgtgaccatcagactgtgcgaggtgctgaacctggaccccagacaggtgctgatcgccgaggtgatcttcaccaacatcggcggcgccgccaccgccatcggcgacccccccaacgtgatcatcgtgagcaaccaggagctgagaaagatgggcctggacttcgccggcttcaccgcccacatgttcatcggcatctgcctggtgctgctggtgtgcttccccctgctgagactgctgtactggaacagaaagctgtacaacaaggagcccagcgagatcgtggagctgaagcacgagatccacgtgtggagactgaccgcccagagaatcagccccgccagcagagaggagaccgccgtgagaagactgctgctgggcaaggtgctggccctggagcacctgctggccagaagactgcacaccttccacagacagatcagccaggaggacaagaactgggagaccaacatccaggagctgcagaagaagcacagaatcagcgacggcatcctgctggccaagtgcctgaccgtgctgggcttcgtgatcttcatgttcttcctgaacagcttcgtgcccggcatccacctggacctgggctggatcgccatcctgggcgccatctggctgctgatcctggccgacatccacgacttcgagatcatcctgcacagagtggagtgggccaccctgctgttcttcgccgccctgttcgtgctgatggaggccctggcccacctgcacctgatcgagtacgtgggcgagcagaccgccctgctgatcaagatggtgcccgaggagcagagactgatcgccgccatcgtgctggtggtgtgggtgagcgccctggccagcagcctgatcgacaacatccccttcaccgccaccatgatccccgtgctgctgaacctgagccacgaccccgaggtgggcctgcccgccccccccctgatgtacgccctggccttcggcgcctgcctgggcggcaacggcaccctgatcggcgccagcgccaacgtggtgtgcgccggcatcgccgagcagcacggctacggcttcagcttcatggagttcttcagactgggcttccccatgatggtggtgagctgcaccgtgggcatgtgctacctgctggtggcccacgtggtggtgggctggaactag

SEQ ID NO: 91872 - DNA, 2007 bp, synthetic construct
  misc_feature 1..2007: note = Description of Artificial Sequence: Synthetic coding sequence
  source 1..2007: mol_type = other DNA
atgcacctggagggcagagacggcagaagataccccggcgcccccgccgtggagctgctgcagaccagcgtgcccagcggcctggccgagctggtggccggcaagagaagactgcccagaggcgccggcggcgccgaccccagccacagctgccccagaggcgccgccggccagagcagctgggcccccgccggccaggagttcgccagcttcctgaccaagggcagaagccacagcagcctgccccagatgagcagcagcagaagcaaggacagctgcttcaccgagaacacccccctgctgagaaacagcctgcaggagaagggcagcagatgcatccccgtgtaccaccccgagttcatcaccgccgaggagagctgggaggacagcagcgccgactgggagagaagatacctgctgagcagagaggtgagcggcctgagcgccagcgccagcagcgagaagggcgacctgctggacagcccccacatcagactgagactgagcaagctgagaagatgcgtgcagtggctgaaggtgatgggcctgttcgccttcgtggtgctgtgcagcatcctgttcagcctgtaccccgaccagggcaagctgtggcagctgctggccctgagccccctggagaactacagcgtgaacctgagcagccacgtggacagcaccctgctgcaggtggacctggccggcgccctggtggccagcggccccagcagacccggcagagaggagcacatcgtggtggagctgacccaggccgacgccctgggcagcagatggagaagaccccagcaggtgacccacaactggaccgtgtacctgaaccccagaagaagcgagcacagcgtgatgagcagaaccttcgaggtgctgaccagagagaccgtgagcatcagcatcagagccagcctgcagcagacccaggccgtgcccctgctgatggcccaccagtacctgagaggcagcgtggagacccaggtgaccatcgccaccgccatcctggccggcgtgtacgccctgatcatcttcgagatcgtgcacagaaccctggccgccatgctgggcagcctggccgccctggccgccctggccgtgatcggcgacagacccagcctgacccacgtggtggagtggatcgacttcgagaccctggccctgctgttcggcatgatgatcctggtggccatcttcagcgagaccggcttcttcgactactgcgccgtgaaggcctacagactgagcagaggcagagtgtgggccatgatcatcatgctgtgcctgatcgccgccgtgctgagcgccttcctggacaacgtgaccaccatgctgctgttcacccccgtgaccatcagactgtgcgaggtgctgaacctggaccccagacaggtgctgatcgccgaggtgatcttcaccaacatcggcggcgccgccaccgccatcggcgacccccccaacgtgatcatcgtgagcaaccaggagctgagaaagatgggcctggacttcgccggcttcaccgcccacatgttcatcggcatctgcctggtgctgctggtgtgcttccccctgctgagactgctgtactggaacagaaagctgtacaacaaggagcccagcgagatcgtggagctgaagcacgagatccacgtgtggagactgaccgcccagagaatcagccccgccagcagagaggagaccgccgtgagaagactgctgctgggcaaggtgctggccctggagcacctgctggccagaagactgcacaccttccacagacagatcagccaggaggacaagaactgggagaccaacatccaggagctgcagaagaagcacagaatcagcgacggcatcctgctggccaagtgcctgaccgtgctgggcttcgtgatcttcatgttcttcctgaacagcttcgtgcccggcatccacctggacctgggcggcctgggcctggtgcaggccggcagatactacctgagcacccccgagagctag

SEQ ID NO: 91873 - DNA, 795 bp, synthetic construct
  misc_feature 1..795: note = Description of Artificial Sequence: Synthetic coding sequence
  source 1..795: mol_type = other DNA
atgcacctggagggcagagacggcagaagataccccggcgcccccgccgtggagctgctgcagaccagcgtgcccagcggcctggccgagctggtggccggcaagagaagactgcccagaggcgccggcggcgccgaccccagccacagctgccccagaggcgccgccggccagagcagctgggcccccgccggccaggagttcgccagcttcctgaccaagggcagaagccacagcagcctgccccagatgagcagcagcagaagcaaggacagctgcttcaccgagaacacccccctgctgagaaacagcctgcaggagaagggcagcagatgcatccccgtgtaccaccccgagttcatcaccgccgaggagagctgggaggacagcagcgccgactgggagagaagatacctgctgagcagagaggtgagcggcctgagcgccagcgccagcagcgagaagggcgacctgctggacagcccccacatcagactgagactgagcaagctgagaagatgcgtgcagtggctgaaggtgatgggcctgttcgccttcgtggtgctgtgcagcatcctgttcagcctgtaccccgaccagggcaagctgtggcagctgctggccctgagccccctggagaactacagcgtgaacctgagcagccacgtggacagcaccctgctgcaggtggacctggccggcgccctggtggccagcggccccagcagacccggcagagaggagcacatcgtggtggagctgacccaggccgacgccctgggcagcagatggtag

SEQ ID NO: 91874 - DNA, 657 bp, synthetic construct
  misc_feature 1..657: note = Description of Artificial Sequence: Synthetic coding sequence
  source 1..657: mol_type = other DNA
atgcacctggagggcagagacggcagaagataccccggcgcccccgccgtggagctgctgcagaccagcgtgcccagcggcctggccgagctggtggccggcaagagaagactgcccagaggcgccggcggcgccgaccccagccacagctgccccagaggcgccgccggccagagcagctgggcccccgccggccaggagttcgccagcttcctgaccaagggcagaagccacagcagcctgccccagatgagcagcagcagaagcaaggacagctgcttcaccgagaacacccccctgctgagaaacagcctgcaggagaagggcagcagatgcatccccgtgtaccaccccgagttcatcaccgccgaggagagctgggaggacagcagcgccgactgggagagaagatacctgctgagcagagaggtgagcggcctgagcgccagcgccagcagcgagaagggcgacctgctggacagcccccacatcagactgagactgagcaagctgagaagatgcgtgcagtggctgaaggtgatgggcctgttcgccttcgtggtgctgtgcagcgtgacccacaactggaccgtgtacctgaaccccagaagaagcgagcacagcgtgatgagcagaaccttcgaggtgctgacctag

SEQ ID NO: 91875 - DNA, 801 bp, synthetic construct
  misc_feature 1..801: note = Description of Artificial Sequence: Synthetic coding sequence
  source 1..801: mol_type = other DNA
atgggcagcaagaccctgcccgcccccgtgcccatccaccccagcctgcagctgaccaactacagcttcctgcaggccgtgaacggcctgcccaccgtgcccagcgaccacctgcccaacctgtacggcttcagcgccctgcacgccgtgcacctgcaccagtggaccctgggctaccccgccatgcacctgcccagaagcagcttcagcaaggtgcccggcaccgtgagcagcctggtggacgccagattccagctgcccgccttcccctggttcccccacgtgatccagcccaagcccgagatcaccgccggcggcagcgtgcccgccctgaagaccaagcccagattcgacttcgccaacctggccctggccgccacccaggaggaccccgccaagctgggcagaggcgagggccccggcagccccgccggcggcctgggcgccctgctggacgtgaccaagctgagccccgagaagaagcccaccagaggcagactgcccagcaagaccaagaaggagttcgtgtgcaagttctgcggcagacacttcaccaagagctacaacctgctgatccacgagagaacccacaccgacgagagaccctacacctgcgacatctgccacaaggccttcagaagacaggaccacctgagagaccacagatacatccacagcaaggagaagcccttcaagtgccaggagtgcggcaagggcttctgccagagcagaaccctggccgtgcacaagaccctgcacagccaggtgaaggagctgaagaccagcaagatcaagtgctag

SEQ ID NO: 91876 - DNA, 801 bp, synthetic construct; identical to SEQ ID NO: 91875
  misc_feature 1..801: note = Description of Artificial Sequence: Synthetic coding sequence
  source 1..801: mol_type = other DNA

SEQ ID NO: 91877 - DNA, 939 bp, synthetic construct
  misc_feature 1..939: note = Description of Artificial Sequence: Synthetic coding sequence
  source 1..939: mol_type = other DNA
atgggcagcaaggccctgcccgcccccatccccctgcaccccagcctgcagctgaccaactacagcttcctgcaggccgtgaacaccttccccgccaccgtggaccacctgcagggcctgtacggcctgagcgccgtgcagaccatgcacatgaaccactggaccctgggctaccccaacgtgcacgagatcaccagaagcaccatcaccgagatggccgccgcccagggcctggtggacgccagattccccttccccgccctgcccttcaccacccacctgttccaccccaagcagggcgccatcgcccacgtgctgcccgccctgcacaaggacagacccagattcgacttcgccaacctggccgtggccgccacccaggaggacccccccaagatgggcgacctgagcaagctgagccccggcctgggcagccccatcagcggcctgagcaagctgacccccgacagaaagcccagcagaggcagactgcccagcaagaccaagaaggagttcatctgcaagttctgcggcagacacttcaccaagagctacaacctgctgatccacgagagaacccacaccgacgagagaccctacacctgcgacatctgccacaaggccttcagaagacaggaccacctgagagaccacagatacatccacagcaaggagaagcccttcaagtgccaggagtgcggcaagggcttctgccagagcagaaccctggccgtgcacaagaccctgcacatgcaggagagcccccacaagtgccccacctgcggcagaaccttcaaccagagaagcaacctgaagacccacctgctgacccacaccgacatcaagccctacagctgcgagcagtgcggcaaggtgttcagaagaaactgcgacctgagaagacacagcctgacccacacccccagacaggacttctag

SEQ ID NO: 91878 - DNA, 831 bp, synthetic construct
  misc_feature 1..831: note = Description of Artificial Sequence: Synthetic coding sequence
  source 1..831: mol_type = other DNA
atgggcagcaaggccctgcccgcccccatccccctgcaccccagcctgcagctgaccaactacagcttcctgcaggccgtgaacaccttccccgccaccgtggaccacctgcagggcctgtacggcctgagcgccgtgcagaccatgcacatgaaccactggaccctgggctaccccaacgtgcacgagatcaccagaagcaccatcaccgagatggccgccgcccagggcctggtggacgccagattccccttccccgccctgcccttcaccacccacctgttccaccccaagcagggcgccatcgcccacgtgctgcccgccctgcacaaggacagacccagattcgacttcgccaacctggccgtggccgccacccaggaggacccccccaagatgggcgacctgagcaagctgagccccggcctgggcagccccatcagcggcctgagcaagctgacccccgacagaaagcccagcagaggcagactgcccagcaagaccaagaaggagttcatctgcaagttctgcggcagacacttcaccaagagctacaacctgctgatccacgagagaacccacaccgacgagagaccctacacctgcgacatctgccacaaggccttcagaagacaggaccacctgagagaccacagatacatccacagcaaggagaagcccttcaagtgccaggagtgcggcaagggcttctgccagagcagaaccctggccgtgcacaagaccctgcacatgcagaccagcagccccaccgccgccagcagcgccgccaagtgcagcggcgagaccgtgatctgcggcggcaccgcctag

SEQ ID NO: 91879 - DNA, 1302 bp, synthetic construct
  misc_feature 1..1302: note = Description of Artificial Sequence: Synthetic coding sequence
  source 1..1302: mol_type = other DNA
atgggcctgagagccgaggagggcaagagaaagccccccagaagcgtgagaggcgaggtgagccccagccagggccccctggcccaggaggacgaggccagaagactgagaagctgcacccccgcctgccaccccggcaagagaggcaagggcggccacagagccagaagacagagaagcgcctgggacctgaccacccaccccctgacccacagaagccaggagctgagaggcgccgccgccaccgagggcttcctgtacgtgctgctgagccactgggtgttcgtgggcgcccccagaccccccgccagcgacagctggaagaagggcctggtgcccagcgccccccccgccagcagaaagatgggcagcaaggccctgcccgcccccatccccctgcaccccagcctgcagctgaccaactacagcttcctgcaggccgtgaacaccttccccgccaccgtggaccacctgcagggcctgtacggcctgagcgccgtgcagaccatgcacatgaaccactggaccctgggctaccccaacgtgcacgagatcaccagaagcaccatcaccgagatggccgccgcccagggcctggtggacgccagattccccttccccgccctgcccttcaccacccacctgttccaccccaagcagggcgccatcgcccacgtgctgcccgccctgcacaaggacagacccagattcgacttcgccaacctggccgtggccgccacccaggaggacccccccaagatgggcgacctgagcaagctgagccccggcctgggcagccccatcagcggcctgagcaagctgacccccgacagaaagcccagcagaggcagactgcccagcaagaccaagaaggagttcatctgcaagttctgcggcagacacttcaccaagagctacaacctgctgatccacgagagaacccacaccgacgagagaccctacacctgcgacatctgccacaaggccttcagaagacaggaccacctgagagaccacagatacatccacagcaaggagaagcccttcaagtgccaggagtgcggcaagggcttctgccagagcagaaccctggccgtgcacaagaccctgcacatgcaggagagcccccacaagtgccccacctgcggcagaaccttcaaccagagaagcaacctgaagacccacctgctgacccacaccgacatcaagccctacagctgcgagcagtgcggcaaggtgttcagaagaaactgcgacctgagaagacacagcctgacccacacccccagacaggacttctag

SEQ ID NO: 91880 - DNA, 642 bp, synthetic construct
  misc_feature 1..642: note = Description of Artificial Sequence: Synthetic coding sequence
  source 1..642: mol_type = other DNA
atgggcagcaaggccctgcccgcccccatccccctgcaccccagcctgcagctgaccaactacagcttcctgcaggccgtgaacaccttccccgccaccgtggaccacctgcagggcctgtacggcctgagcgccgtgcagaccatgcacatgaaccactggaccctgggctaccccaacgtgcacgagatcaccagaagcaccatcaccgagatggccgccgcccagggcctggtggacgccagattccccttccccgccctgcccttcaccacccacctgttccaccccaagcagggcgccatcgcccacgtgctgcccgccctgcacaaggacagacccagattcgacttcgccaacctggccgtggccgccacccaggaggacccccccaagatgggcgacctgagcaagctgagccccggcctgggcagccccatcagcggcctgagcaagctgacccccgacagaaagcccagcagaggcagactgcccagcaagaccaagaaggagttcatctgcaagttctgcggcagacacttcaccaagagctacaacctgctgatccacgagagaacccacaccgacgagagaccctacacctgcgacatctgccacaaggccttcagaagacaggactag

SEQ ID NO: 91881 - DNA, 939 bp, synthetic construct; identical to SEQ ID NO: 91877
  misc_feature 1..939: note = Description of Artificial Sequence: Synthetic coding sequence
  source 1..939: mol_type = other DNA

SEQ ID NO: 91882 - DNA, 687 bp, synthetic construct
  misc_feature 1..687: note = Description of Artificial Sequence: Synthetic coding sequence
  source 1..687: mol_type = other DNA
atgaagaccctgttcctgggcgtgaccctgggcctggccgccgccctgagcttcaccctggaggaggaggacatcaccggcacctggtacgtgaaggccatggtggtggacaaggacttccccgaggacagaagacccagaaaggtgagccccgtgaaggtgaccgccctgggcggcggcaacctggaggccaccttcaccttcatgagagaggacagatgcatccagaagaagatcctgatgagaaagaccgaggagcccggcaagttcagcgcctacggcggcagaaagctgatctacctgcaggagctgcccggcaccgacgactacgtgttctactgcaaggaccagagaagaggcggcctgagatacatgggcaagctggtggccagcgccccctgcagagccgtgcccctgagccccccctggctgacctggcccccccacctgcaggtgggcatcctgatccccacctggagaccctggaagaacctgagaaactggtgcagcaccagagacagcagaagaagaaccttcagctgcccctgcagaagagaggccgccttcagcaacaccagacagccccccggcctgcacctgcagagccccccctaccaccagacccagagccccgaccacctggacctgcccagcagccacgaccccagcctgctgccccccacctag

SEQ ID NO: 91883 - DNA, 444 bp, synthetic construct
  misc_feature 1..444: note = Description of Artificial Sequence: Synthetic coding sequence
  source 1..444: mol_type = other DNA
atgaagaccctgttcctgggcgtgaccctgggcctggccgccgccctgagcttcaccctggaggaggaggacgagggcggcagcgtgcaccccgaggagaaccccgacgccgaggacggcggcgcctggcagatccagagactgtggggccaggaggcccacatccccgccggcgccgccagagacggcagactgagactgctgctgcagagacccgccccctggggccccgccctgcacggcaaggcctgcggcatctgcagcctgcagggcagagccgccgtgcccaccctggcccacctggccaccagccccgccggcagaaaccccaacaccaacctggaggccctggaggagttcaagaagctggtgcagcacaagggcctgagcgaggaggacatcttcatgcccctgcagaccggcagctgcgtgctggagcactag

SEQ ID NO: 91884 - DNA, 513 bp, synthetic construct
  misc_feature 1..513: note = Description of Artificial Sequence: Synthetic coding sequence
  source 1..513: mol_type = other DNA
atgaagaccctgttcctgggcgtgaccctgggcctggccgccgccctgagcttcaccctggaggaggaggacatcaccggcacctggtacgtgaaggccatggtggtggacaaggacttccccgaggacagaagacccagaaaggtgagccccgtgaaggtgaccgccctgggcggcggcaacctggaggccaccttcaccttcatgagagaggacagatgcatccagaagaagatcctgatgagaaagaccgaggagcccggcaagttcagcgcctacggcggcagaaagctgatctacctgcaggagctgcccggcaccgacgactacgtgttctactgcaaggaccagagaagaggcggcctgagatacatgggcaagctggtgggcagaaaccccaacaccaacctggaggccctggaggagttcaagaagctggtgcagcacaagggcctgagcgaggaggacatcttcatgcccctgcagaccggcagctgcgtgctggagcactag

SEQ ID NO: 91885 - DNA, 513 bp, synthetic construct; identical to SEQ ID NO: 91884
  misc_feature 1..513: note = Description of Artificial Sequence: Synthetic coding sequence
  source 1..513: mol_type = other DNA

SEQ ID NO: 91886 - DNA, 258 bp, synthetic construct
  misc_feature 1..258: note = Description of Artificial Sequence: Synthetic coding sequence
  source 1..258: mol_type = other DNA
atgaagaccctgttcctgggcgtgaccctgggcctggccgccgccctgagcttcaccctggaggaggaggacgacggcccctgggtgcaccccgaggagaaccccgacgccgaggacggcggcgcctggcagatccagagactgtggggccaggaggcccacgtgcccgccggcgccgcccaggagggccccctgcacctgctgctgcagagacccgccccctggggccccgccccccacggcaaggcctgcggctag

SEQ ID NO: 91887 - DNA, 513 bp, synthetic construct
  misc_feature 1..513: note = Description of Artificial Sequence: Synthetic coding sequence
  source 1..513: mol_type = other DNA
atgaagaccctgttcctgggcgtgaccctgggcctggccgccgccctgagcttcaccctggaggaggaggacatcaccggcacctggtacgtgaaggccatggtggtggacaaggacttccccgaggacagaagacccagaaaggtgagccccgtgaaggtgaccgccctgggcggcggcaagctggaggccaccttcaccttcatgagagaggacagatgcatccagaagaagatcctgatgagaaagaccgaggagcccggcaagtacagcgcctacggcggcagaaagctgatgtacctgcaggagctgcccagaagagaccactacatcttctactgcaaggaccagcaccacggcggcctgctgcacatgggcaagctggtgggcagaaacagcgacaccaacagagaggccctggaggagttcaagaagctggtgcagagaaagggcctgagcgaggaggacatcttcacccccctgcagaccggcagctgcgtgcccgagcactag

SEQ ID NO: 91888 - DNA, 8310 bp, synthetic construct
  misc_feature 1..8310: note = Description of Artificial Sequence: Synthetic coding sequence
  source 1..8310: mol_type = other DNA
atggacgtgaaggagagaaagccctacagaagcctgaccagaagaagagacgccgagagaagatacaccagcagcagcgccgacagcgaggagggcaaggccccccagaagagctacagcagcagcgagaccctgaaggcctacgaccaggacgccagactggcctacggcagcagagtgaaggacatcgtgccccaggaggccgaggagttctgcagaaccggcgccaacttcaccctgagagagctgggcctggaggaggtgacccccccccacggcaccctgtacagaaccgacatcggcctgccccactgcggctacagcatgggcgccggcagcgacgccgacatggaggccgacaccgtgctgagccccgagcaccccgtgagactgtggggcagaagcaccagaagcggcagaagcagctgcctgagcagcagagccaacagcaacctgaccctgaccgacaccgagcacgagaacaccgagaccgaccaccccggcggcctgcagaaccacgccagactgagaaccccccccccccccctgagccacgcccacacccccaaccagcaccacgccgccagcatcaacagcctgaacagaggcaacttcacccccagaagcaaccccagccccgcccccaccgaccacagcctgagcggcgagccccccgccggcggcgcccaggagcccgcccacgcccaggagaactggctgctgaacagcaacatccccctggagaccagaaacctgggcaagcagcccttcctgggcaccctgcaggacaacctgatcgagatggacatcctgggcgccagcagacacgacggcgcctacagcgacggccacttcctgttcaagcccggcggcaccagccccctgttctgcaccaccagccccggctaccccctgaccagcagcaccgtgtacagccccccccccagacccctgcccagaagcaccttcgccagacccgccttcaacctgaagaagcccagcaagtactgcaactggaagtgcgccgccctgagcgccatcgtgatcagcgccaccctggtgatcctgctggcctacttcgtggccatgcacctgttcggcctgaactggcacctgcagcccatggagggccagatgtacgagatcaccgaggacaccgccagcagctggcccgtgcccaccgacgtgagcctgtaccccagcggcggcaccggcctggagacccccgacagaaagggcaagggcaccaccgagggcaagcccagcagcttcttccccgaggacagcttcatcgacagcggcgagatcgacgtgggcagaagagccagccagaagatcccccccggcaccttctggagaagccaggtgttcatcgaccaccccgtgcacctgaagttcaacgtgagcctgggcaaggccgccctggtgggcatctacggcagaaagggcctgccccccagccacacccagttcgacttcgtggagctgctggacggcagaagactgctgacccaggaggccagaagcctggagggcacccccagacagagcagaggcaccgtgccccccagcagccacgagaccggcttcatccagtacctggacagcggcatctggcacctggccttctacaacgacggcaaggagagcgaggtggtgagcttcctgaccaccgccatcgagagcgtggacaactgccccagcaactgctacggcaacggcgactgcatcagcggcacctgccactgcttcctgggcttcctgggccccgactgcggcagagccagctgccccgtgctgtgcagcggcaacggccagtacatgaagggcagatgcctgtgccacagcggctggaagggcgccgagtgcgacgtgcccaccaaccagtgcatcgacgtggcctgcagcaaccacggcacctgcatcaccggcacctgcatctgcaaccccggctacaagggcgagagctgcgaggaggtggactgcatggaccccacctgcagcggcagaggcgtgtgcgtgagaggcgagtgccactgcagcgtgggctggggcggcaccaactgcgagacccccagagccacctgcctggaccagtgcagcggccacggcaccttcctgcccgacaccggcctgtgcagctgcgaccccagctggaccggccacgactgcagcatcgagatctgcgccgccgactgcggcggccacggcgtgtgcgtgggcggcacctgcagatgcgaggacggctggatgggcgccgcctgcgaccagagagcctgccaccccagatgcgccgagcacggcacctgcagagacggcaagtgcgagtgcagccccggctggaacggcgagcactgcaccatcgcccactacctggacagagtggtgaaggagggctgccccggcctgtgcaacggcaacggcagatgcaccctggacctgaacggctggcactgcgtgtgccagctgggctggagaggcgccggctgcgacaccagcatggagaccgcctgcggcgacagcaaggacaacgacggcgacggcctggtggactgcatggaccccgactgctgcctgcagcccctgtgccacatcaaccccctgtgcctgggcagccccaaccccctggacatcatccaggagacccaggtgcccgtgagccagcagaacctgcacagcttctacgacagaatcaagttcctggtgggcagagacagcacccacatcatccccggcgagaaccccttcgacggcggccacgcctgcgtgatcagaggccaggtgatgaccagcgacggcacccccctggtgggcgtgaacatcagcttcgtgaacaaccccctgttcggctacaccatcagcagacaggacggcagcttcgacctggtgaccaacggcggcatcagcatcatcctgagattcgagagagcccccttcatcacccaggagcacaccctgtggctgccctgggacagattcttcgtgatggagaccatcatcatgagacacgaggagaacgagatccccagctgcgacctgagcaacttcgccagacccaaccccgtggtgagccccagccccctgaccagcttcgccagcagctgcgccgagaagggccccatcgtgcccgagatccaggccctgcaggaggagatcagcatcagcggctgcaagatgagactgagctacctgagcagcagaacccccggctacaagagcgtgctgagaatcagcctgacccaccccaccatccccttcaacctgatgaaggtgcacctgatggtggccgtggagggcagactgttcagaaagtggttcgccgccgcccccgacctgagctactacttcatctgggacaagaccgacgtgtacaaccagaaggtgttcggcctgagcgaggccttcgtgagcgtgggctacgagtacgagagctgccccgacctgatcctgtgggagaagagaaccaccgtgctgcagggctacgagatcgacgccagcaagctgggcggctggagcctggacaagcaccacgccctgaacatccagagcggcatcctgcacaagggcaacggcgagaaccagttcgtgagccagcagccccccgtgatcggcagcatcatgggcaacggcagaagaagaagcatcagctgccccagctgcaacggcctggccgacggcaacaagctgctggcccccgtggccctgacctgcggcagcgacggcagcctgtacgtgggcgacttcaactacatcagaagaatcttccccagcggcaacgtgaccaacatcctggagctgagaaacaaggacttcagacacagccacagccccgcccacaagtactacctggccaccgaccccatgagcggcgccgtgttcctgagcgacagcaacagcagaagagtgttcaagatcaagagcaccgtggtggtgaaggacctggtgaagaacagcgaggtggtggccggcaccggcgaccagtgcctgcccttcgacgacaccagatgcggcgacggcggcaaggccaccgaggccaccctgaccaaccccagaggcatcaccgtggacaagttcggcctgatctacttcgtggacggcaccatgatcagaagaatcgaccagaacggcatcatcagcaccctgctgggcagcaacgacctgaccagcgccagacccctgagctgcgacagcgtgatggacatcagccaggtgcacctggagtggcccaccgacctggccatcaaccccatggacaacagcctgtacgtgctggacaacaacgtggtgctgcagatcagcgagaaccaccaggtgagaatcgtggccggcagacccatgcactgccaggtgcccggcatcgaccacttcctgctgagcaaggtggccatccacgccaccctggagagcgccaccgccctggccgtgagccacaacggcgtgctgtacatcgccgagaccgacgagaagaagatcaacagaatcagacaggtgaccaccagcggcgagatcagcctggtggccggcgcccccagcggctgcgactgcaagaacgacgccaactgcgactgcttcagcggcgacgacggctacgccaaggacgccaagctgaacacccccagcagcctggccgtgtgcgccgacggcgagctgtacgtggccgacctgggcaacatcagaatcagattcatcagaaagaacaagcccttcctgaacacccagaacatgtacgagctgagcagccccatcgaccaggagctgtacctgttcgacaccaccggcaagcacctgtacacccagagcctgcccaccggcgactacctgtacaacttcacctacaccggcgacggcgacatcaccctgatcaccgacaacaacggcaacatggtgaacgtgagaagagacagcaccggcatgcccctgtggctggtggtgcccgacggccaggtgtactgggtgaccatgggcaccaacagcgccctgaagagcgtgaccacccagggccacgagctggccatgatgacctaccacggcaacagcggcctgctggccaccaagagcaacgagaacggctggaccaccttctacgagtacgacagcttcggcagactgaccaacgtgaccttccccaccggccaggtgagcagcttcagaagcgacaccgacagcagcgtgcacgtgcaggtggagaccagcagcaaggacgacgtgaccatcaccaccaacctgagcgccagcggcgccttctacaccctgctgcaggaccaggtgagaaacagctactacatcggcgccgacggcagcctgagactgctgctggccaacggcatggaggtggccctgcagaccgagccccacctgctggccggcaccgtgaaccccaccgtgggcaagagaaacgtgaccctgcccatcgacaacggcctgaacctggtggagtggagacagagaaaggagcaggccagaggccaggtgaccgtgttcggcagaagactgagagtgcacaacagaaacctgctgagcctggacttcgacagagtgaccagaaccgagaagatctacgacgaccacagaaagttcaccctgagaatcctgtacgaccaggccggcagacccagcctgtggagccccagcagcagactgaacggcgtgaacgtgacctacagccccggcggctacatcgccggcatccagagaggcatcatgagcgagagaatggagtacgaccaggccggcagaatcaccagcagaatcttcgccgacggcaagacctggagctacacctacctggagaagagcatggtgctgctgctgcacagccagagacagtacatcttcgagttcgacaagaacgacagactgagcagcgtgaccatgcccaacgtggccagacagaccctggagaccatcagaagcgtgggctactacagaaacatctaccagccccccgagggcaacgccagcgtgatccaggacttcaccgaggacggccacctgctgcacaccttctacctgggcaccggcagaagagtgatctacaagtacggcaagctgagcaagctggccgagaccctgtacgacaccaccaaggtgagcttcacctacgacgagaccgccggcatgctgaagaccatcaacctgcagaacgagggcttcacctgcaccatcagatacagacagatcggccccctgatcgacagacagatcttcagattcaccgaggagggcatggtgaacgccagattcgactacaactacgacaacagcttcagagtgaccagcatgcaggccgtgatcaacgagacccccctgcccatcgacctgtacagatacgacgacgtgagcggcaagaccgagcagttcggcaagttcggcgtgatctactacgacatcaaccagatcatcaccaccgccgtgatgacccacaccaagcacttcgacgcctacggcagaatgaaggaggtgcagtacgagatcttcagaagcctgatgtactggatgaccgtgcagtacgacaacatgggcagagtggtgaagaaggagctgaaggtgggcccctacgccaacaccaccagatacagctacgagtacgacgccgacggccagctgcagaccgtgagcatcaacgacaagcccctgtggagatacagctacgacctgaacggcaacctgcacctgctgagccccggcaacagcgccagactgacccccctgagatacgacatcagagacagaatcaccagactgggcgacgtgcagtacaagatggacgaggacggcttcctgagacagagaggcggcgacatcttcgagtacaacagcgccggcctgctgatcaaggcctacaacagagccggcagctggagcgtgagatacagatacgacggcctgggcagaagagtgagcagcaagagcagccacagccaccacctgcagttcttctacgccgacctgaccaaccccaccaaggtgacccacctgtacaaccacagcagcagcgagatcaccagcctgtactacgacctgcagggccacctgttcgccatggagctgagcagcggcgacgagttctacatcgcctgcgacaacatcggcacccccctggccgtgttcagcggcaccggcctgatgatcaagcagatcctgtacaccgcctacggcgagatctacatggacaccaaccccaacttccagatcatcatcggctaccacggcggcctgtacgaccccctgaccaagctggtgcacatgggcagaagagactacgacgtgctggccggcagatggaccagccccgaccacgagctgtggaagcacctgagcagcagcaacgtgatgcccttcaacctgtacatgttcaagaacaacaaccccatcagcaacagccaggacatcaagtgcttcatgaccgacgtgaacagctggctgctgaccttcggcttccagctgcacaacgtgatccccggctaccccaagcccgacatggacgccatggagcccagctacgagctgatccacacccagatgaagacccaggagtgggacaacagcaagagcatcctgggcgtgcagtgcgaggtgcagaagcagctgaaggccttcgtgaccctggagagattcgaccagctgtacggcagcaccatcaccagctgccagcaggcccccaagaccaagaagttcgccagcagcggcagcgtgttcggcaagggcgtgaagttcgccctgaaggacggcagagtgaccaccgacatcatcagcgtggccaacgaggacggcagaagagtggccgccatcctgaaccacgcccactacctggagaacctgcacttcaccatcgacggcgtggacacccactacttcgtgaagcccggccccagcgagggcgacctggccatcctgggcctgagcggcggcagaagaaccctggagaacggcgtgaacgtgaccgtgagccagatcaacaccgtgctgaacggcagaaccagaagatacaccgacatccagctgcagtacggcgccctgtgcctgaacaccagatacggcaccaccctggacgaggagaaggccagagtgctggagctggccagacagagagccgtgagacaggcctgggccagagagcagcagagactgagagagggcgaggagggcctgagagcctggaccgagggcgagaagcagcaggtgctgagcaccggcagagtgcagggctacgacggcttcttcgtgatcagcgtggagcagtaccccgagctgagcgacagcgccaacaacatccacttcatgagacagagcgagatgggcagaagatag

SEQ ID NO: 91889 - skipped

SEQ ID NO: 91890 - DNA, 1404 bp, synthetic construct
  misc_feature 1..1404: note = Description of Artificial Sequence: Synthetic coding sequence
  source 1..1404: mol_type = other DNA
atgcccggcagatggagatggcagagagacatgcaccccgccagaaagctgctgagcctgctgttcctgatcctgatgggcaccgagctgacccaggtgctgcccaccaaccccgaggagagctggcaggtgtacagcagcgcccaggacagcgagggcagatgcatctgcaccgtggtggccccccagcagaccatgtgcagcagagacgccagaaccaagcagctgagacagctgctggagaaggtgcagaacatgagccagagcatcgaggtgctggacagaagaacccagagagacctgcagtacgtggagaagatggagaaccagatgaagggcctggagagcaagttcaagcaggtggaggagagccacaagcagcacctggccagacagttcaaggccatcaaggccaagatggacgagctgagacccctgatccccgtgctggaggagtacaaggccgacgccaagctggtgctgcagttcaaggaggaggtgcagaacctgaccagcgtgctgaacgagctgcaggaggagatcggcgcctacgactacgacgagctgcagagcagagtgagcaacctggaggagagactgagagcctgcatgcagaagctggcctgcggcaagctgaccggcatcagcgaccccgtgaccgtgaagaccagcggcagcagattcggcagctggatgaccgaccccctggcccccgagggcgacaacagagtgtggtacatggacggctaccacaacaacagattcgtgagagagtacaagagcatggtggacttcatgaacaccgacaacttcaccagccacagactgccccacccctggagcggcaccggccaggtggtgtacaacggcagcatctacttcaacaagttccagagccacatcatcatcagattcgacctgaagaccgagaccatcctgaagaccagaagcctggactacgccggctacaacaacatgtaccactacgcctggggcggccacagcgacatcgacctgatggtggacgagagcggcctgtgggccgtgtacgccaccaaccagaacgccggcaacatcgtggtgagcagactggaccccgtgagcctgcagaccctgcagacctggaacaccagctaccccaagagaagcgccggcgaggccttcatcatctgcggcaccctgtacgtgaccaacggctacagcggcggcaccaaggtgcactacgcctaccagaccaacgccagcacctacgagtacatcgacatccccttccagaacaagtacagccacatcagcatgctggactacaaccccaaggacagagccctgtacgcctggaacaacggccaccagatcctgtacaacgtgaccctgttccacgtgatcagaagcgacgagctgtag

SEQ ID NO: 91891 - DNA, 408 bp, synthetic construct
  misc_feature 1..408: note = Description of Artificial Sequence: Synthetic coding sequence
  source 1..408: mol_type = other DNA
atgcccggcagatggagatggcagagagacatgcaccccgccagaaagctgctgagcctgctgttcctgatcctgatgggcaccgagctgacccaggtgctgcccaccaaccccgaggagagctggcaggtgtacagcagcgcccaggacagcgagggcagatgcatctgcaccgtggtggccccccagcagaccatgtgcagcagagacgccagaaccaagcagctgagacagctgctggagaaggtgcagaacatgagccagagcatcgaggtgctggacagaagaacccagagagacctgcagtacgtggagaagatggagaaccagatgaagggcctggagagcaagttcaagcaggtggaggagagccacaagcagcacctggccagacagttcaagggctag

SEQ ID NO: 91892 - DNA, 1458 bp, synthetic construct
  misc_feature 1..1458: note = Description of Artificial Sequence: Synthetic coding sequence
  source 1..1458: mol_type = other DNA
atgagcgtgcccctgctgaagatcggcgtggtgctgagcaccatggccatgatcaccaactggatgagccagaccctgcccagcctggtgggcctgaacaccaccaagctgagcgccgccggcggcggcaccctggacagaagcaccggcgtgctgcccaccaaccccgaggagagctggcaggtgtacagcagcgcccaggacagcgagggcagatgcatctgcaccgtggtggccccccagcagaccatgtgcagcagagacgccagaaccaagcagctgagacagctgctggagaaggtgcagaacatgagccagagcatcgaggtgctggacagaagaacccagagagacctgcagtacgtggagaagatggagaaccagatgaagggcctggagagcaagttcaagcaggtggaggagagccacaagcagcacctggccagacagttcaaggccatcaaggccaagatggacgagctgagacccctgatccccgtgctggaggagtacaaggccgacgccaagctggtgctgcagttcaaggaggaggtgcagaacctgaccagcgtgctgaacgagctgcaggaggagatcggcgcctacgactacgacgagctgcagagcagagtgagcaacctggaggagagactgagagcctgcatgcagaagctggcctgcggcaagctgaccggcatcagcgaccccgtgaccgtgaagaccagcggcagcagattcggcagctggatgaccgaccccctggcccccgagggcgacaacagagtgtggtacatggacggctaccacaacaacagattcgtgagagagtacaagagcatggtggacttcatgaacaccgacaacttcaccagccacagactgccccacccctggagcggcaccggccaggtggtgtacaacggcagcatctacttcaacaagttccagagccacatcatcatcagattcgacctgaagaccgagaccatcctgaagaccagaagcctggactacgccggctacaacaacatgtaccactacgcctggggcggccacagcgacatcgacctgatggtggacgagagcggcctgtgggccgtgtacgccaccaaccagaacgccggcaacatcgtggtgagcagactggaccccgtgagcctgcagaccctgcagacctggaacaccagctaccccaagagaagcgccggcgaggccttcatcatctgcggcaccctgtacgtgaccaacggctacagcggcggcaccaaggtgcactacgcctaccagaccaacgccagcacctacgagtacatcgacatccccttccagaacaagtacagccacatcagcatgctggactacaaccccaaggacagagccctgtacgcctggaacaacggccaccagatcctgtacaacgtgaccctgttccacgtgatcagaagcgacgagctgtag

SEQ ID NO: 91893 - DNA, 1377 bp, synthetic construct
  misc_feature 1..1377: note = Description of Artificial Sequence: Synthetic coding sequence
  source 1..1377: mol_type = other DNA
atgggcgaggcccccggcagagagggcagaggcccctgcccccagctggagagccccagaagaagaagagtgctgcccaccaaccccgaggagagctggcaggtgtacagcagcgcccaggacagcgagggcagatgcatctgcaccgtggtggccccccagcagaccatgtgcagcagagacgccagaaccaagcagctgagacagctgctggagaaggtgcagaacatgagccagagcatcgaggtgctggacagaagaacccagagagacctgcagtacgtggagaagatggagaaccagatgaagggcctggagagcaagttcaagcaggtggaggagagccacaagcagcacctggccagacagttcaaggccatcaaggccaagatggacgagctgagacccctgatccccgtgctggaggagtacaaggccgacgccaagctggtgctgcagttcaaggaggaggtgcagaacctgaccagcgtgctgaacgagctgcaggaggagatcggcgcctacgactacgacgagctgcagagcagagtgagcaacctggaggagagactgagagcctgcatgcagaagctggcctgcggcaagctgaccggcatcagcgaccccgtgaccgtgaagaccagcggcagcagattcggcagctggatgaccgaccccctggcccccgagggcgacaacagagtgtggtacatggacggctaccacaacaacagattcgtgagagagtacaagagcatggtggacttcatgaacaccgacaacttcaccagccacagactgccccacccctggagcggcaccggccaggtggtgtacaacggcagcatctacttcaacaagttccagagccacatcatcatcagattcgacctgaagaccgagaccatcctgaagaccagaagcctggactacgccggctacaacaacatgtaccactacgcctggggcggccacagcgacatcgacctgatggtggacgagagcggcctgtgggccgtgtacgccaccaaccagaacgccggcaacatcgtggtgagcagactggaccccgtgagcctgcagaccctgcagacctggaacaccagctaccccaagagaagcgccggcgaggccttcatcatctgcggcaccctgtacgtgaccaacggctacagcggcggcaccaaggtgcactacgcctaccagaccaacgccagcacctacgagtacatcgacatccccttccagaacaagtacagccacatcagcatgctggactacaaccccaaggacagagccctgtacgcctggaacaacggccaccagatcctgtacaacgtgaccctgttccacgtgatcagaagcgacgagctgtag

SEQ ID NO: 91894 - DNA, 462 bp, synthetic construct
  misc_feature 1..462: note = Description of Artificial Sequence: Synthetic coding sequence
  source 1..462: mol_type = other DNA
atgagcgtgcccctgctgaagatcggcgtggtgctgagcaccatggccatgatcaccaactggatgagccagaccctgcccagcctggtgggcctgaacaccaccaagctgagcgccgccggcggcggcaccctggacagaagcaccggcgtgctgcccaccaaccccgaggagagctggcaggtgtacagcagcgcccaggacagcgagggcagatgcatctgcaccgtggtggccccccagcagaccatgtgcagcagagacgccagaaccaagcagctgagacagctgctggagaaggtgcagaacatgagccagagcatcgaggtgctggacagaagaacccagagagacctgcagtacgtggagaagatggagaaccagatgaagggcctggagagcaagttcaagcaggtggaggagagccacaagcagcacctggccagacagttcaagggctag

SEQ ID NO: 91895 - DNA, 729 bp, synthetic construct
  misc_feature 1..729: note = Description of Artificial Sequence: Synthetic coding sequence
  source 1..729: mol_type = other DNA
atgaacctgcacgtgaagaccctgagcctgatgacctggagaagcagattcctggaggagagcttctggagcctggaggagaccgccgccctggccaagcagctgcccctgaagagccccagcgagaacatcttcctgcacatcgtggacctgagcgaccccaagcagatctggaagttcgtggagaacttcaagcaggagcacaagctgcacgtgctgatcaacaacgccggctgcatggtgaacaagagagagctgaccgaggacggcctggagaagaacttcgccgccaacaccctgggcgtgtacatcctgaccaccggcctgatccccgtgctggagaaggagcacgaccccagagtgatcaccgtgagcagcggcggcatgctggtgcagaagctgaacaccaacgacctgcagagcgagagaacccccttcgacggcaccatggtgtacgcccagaacaagagacagcaggtggtgctgaccgagagatgggcccagggccaccccgccatccacttcagcagcatgcaccccggctgggccgacacccccggcgtgagacaggccatgcccggcttccacgccagattcggcgacagactgagaagcgaggcccagggcgccgacaccatgctgtggctggccctgagcagcgccgccgccgcccagcccagcggcagattcttccagggcgacttcctgcccggctgcgagggcagctag

SEQ ID NO: 91896 - DNA, 492 bp, synthetic construct
  misc_feature 1..492: note = Description of Artificial Sequence: Synthetic coding sequence
  source 1..492: mol_type = other DNA
atggccgaggacagaccccagcagccccagctggacatgcccctggtgctggaccagggcctgaccagacagatgagactgagagtggagagcctgaagcagagaggcgagaagagacaggacggcgagaagctgctgcagcccgccgagagcgtgtacagactgaacttcacccagcagcagagactgcagttcgagagatggaacgtggtgctggacaagcccggcaaggtgaccatcaccggcaccagccagaactggacccccgacctgaccaacctgatgaccagacagctgctggaccccaccgccatcttctggagaaaggaggacagcgacgccatcgactggaacgaggccgacgccctggagttcggcgagagactgagcgacctggccaagatcagaaaggtgatgtacttcctggtgaccttcggcgagggcgtggagcccgccaacctgaaggccagcgtggtgttcaaccagctgtag

SEQ ID NO: 91897 - DNA, 939 bp, synthetic construct
  misc_feature 1..939: note = Description of Artificial Sequence: Synthetic coding sequence
  source 1..939: mol_type = other DNA
atggacggcggcaaccagagcgagggcagcgagttcctgctgctgggcatgagcgagagccccgagcagcagagaatcctgttctggatgttcctgagcatgtacctggtgaccgtggtgggcaacgtgctgatcatcctggccatcagcagcgacagcagactgcacacccccgtgtacttcttcctggccaacctgagcttcaccgacctgttcttcgtgaccaacaccatccccaagatgctggtgaacctgcagagccacaacaaggccatcagctacgccggctgcctgacccagctgtacttcctggtgagcctggtggccctggacaacctgatcctggccgtgatggcctacgacagatacgtggccatctgctgccccctgcactacaccaccgccatgagccccaagctgtgcatcctgctgctgagcctgtgctgggtgctgagcgtgctgtacggcctgatccacaccctgctgatgaccagagtgaccttctgcggcagcagaaagatccactacatcttctgcgagatgtacgtgctgctgagaatggcctgcagcaacatccagatcaaccacaccgtgctgatcgccaccggctgcttcatcttcctgatccccttcggcttcgtgatcatcagctacgtgctgatcatcagagccatcctgagaatccccagcgtgagcaagaagtacaaggccttcagcacctgcgccagccacctgggcgccgtgagcctgttctacggcaccctgtgcatggtgtacctgaagcccctgcacacctacagcgtgaaggacagcgtggccaccgtgatgtacgccgtggtgacccccatgatgaaccccttcatctacagcctgagaaacaaggacatgcacggcgccctgggcagactgctggacaagcacttcaagagactgacctag

SEQ ID NO: 91898 - DNA, 939 bp, synthetic construct
  misc_feature 1..939: note = Description of Artificial Sequence: Synthetic coding sequence
  source 1..939: mol_type = other DNA
atgagcggcaccaaccagagcagcgtgagcgagttcctgctgctgggcctgagcagacagccccagcagcagcacctgctgttcgtgttcttcctgagcatgtacctggccaccgtgctgggcaacctgctgatcatcctgagcgtgagcatcgacagctgcctgcacacccccatgtacttcttcctgagcaacctgagcttcgtggacatctgcttcagcttcaccaccgtgcccaagatgctggccaaccacatcctggagacccagaccatcagcttctgcggctgcctgacccagatgtacttcgtgttcatgttcgtggacatggacaacttcctgctggccgtgatggcctacgaccacttcgtggccgtgtgccaccccctgcactacaccgccaagatgacccaccagctgtgcgccctgctggtggccggcctgtgggtggtggccaacctgaacgtgctgctgcacaccctgctgatggcccccctgagcttctgcgccgacaacgccatcacccacttcttctgcgacgtgacccccctgctgaagctgagctgcagcgacacccacctgaacgaggtgatcatcctgagcgagggcgccctggtgatgatcacccccttcctgtgcatcctggccagctacatgcacatcacctgcaccgtgctgaaggtgcccagcaccaagggcagatggaaggccttcagcacctgcggcagccacctggccgtggtgctgctgttctacagcaccatcatcgccgtgtacttcaaccccctgagcagccacagcgccgagaaggacaccatggccaccgtgctgtacaccgtggtgacccccatgctgaaccccttcatctacagcctgagaaacagatacctgaagggcgccctgaagaaggtggtgggcagagtggtgttcagcgtgtag

SEQ ID NO: 91899 - DNA, 924 bp, synthetic construct
  misc_feature 1..924: note = Description of Artificial Sequence: Synthetic coding sequence
  source 1..924: mol_type = other DNA
atgaaccacagcgtggtgaccgagttcatcatcctgggcctgaccaagaagcccgagctgcagggcatcatcttcctgttcttcctgatcgtgtacctggtggccttcctgggcaacatgctgatcatcatcgccaagatctacaacaacaccctgcacacccccatgtacgtgttcctgctgaccctggccgtggtggacatcatctgcaccaccagcatcatccccaagatgctgggcaccatgctgaccagcgagaacaccatcagctacgccggctgcatgagccagctgttcctgttcacctggagcctgggcgccgagatggtgctgttcaccaccatggcctacgacagatacgtggccatctgcttccccctgcactacagcaccatcatgaaccaccacatgtgcgtggccctgctgagcatggtgatggccatcgccgtgaccaacagctgggtgcacaccgccctgatcatgagactgaccttctgcggccccaacaccatcgaccacttcttctgcgagatcccccccctgctggccctgagctgcagccccgtgagaatcaacgaggtgatggtgtacgtggccgacatcaccctggccatcggcgacttcatcctgacctgcatcagctacggcttcatcatcgtggccatcctgagaatcagaaccgtggagggcaagagaaaggccttcagcacctgcagcagccacctgaccgtggtgaccctgtactacagccccgtgatctacacctacatcagacccgccagcagctacaccttcgagagagacaaggtggtggccgccctgtacaccctggtgacccccaccctgaaccccatggtgtacagcttccagaacagagagatgcaggccggcatcagaaaggtgttcgccttcctgaagcactag

SEQ ID NO: 91900 - DNA, 930 bp, synthetic construct
  misc_feature 1..930: note = Description of Artificial Sequence: Synthetic coding sequence
  source 1..930: mol_type = other DNA
atggagaacagaaacaacatgaccgagttcgtgctgctgggcctgaccgagaaccccaagatgcagaagatcatcttcgtggtgttcttcgtgatctacatcatcaccgtggtgggctacgtgctgatcgtggtgaccatcaccgccagccccagcctgggcagccccatgtacctgagcctggcctacctgagcttcatcgacgcctgctacagcagcgtgaacacccccaacctgatcacccacagcctgtacggcaagaaggccatcctgttcaacggctgcatgacccaggtgttcggcgagcacttcttcggcggcgccgagggcatcctgctgaccgtgatggcctacgaccactacgtggccatctgcaagcccctgcactacatgaccatcatgaaccagtgcgtgtgcgccctgctgatgggcgtggtgtggatgggcggcttcctgcacgccaccatccagatcctgttcatcttccagctgcccttctgcggccccaacgtgatcgaccacttcatgtgcgacctgaaccccctgctgaacctggcctgcaccgacacccacatgctggagctgttcatcgccgccaacagcggcttcatctgcctgctgaacttcgccctgctgctggtgagctacgtggtgatcctgtgcagcctgagaacccacagcctggaggccagacacaaggccctgagcacctgcgtgagccacatcaccgtggtgatcctgttcttcgtgccctgcatcttcgtgtacatgagacccgccgccaccctgcccatcgacaaggccgtggccatcttctacaccatgatcacccccatgctgaaccccctgatctacaccctgaagaacgcccagatgaagaacgccatcagaaagctgtgcagcagaaaggacatcagcggcgacaagtag

SEQ ID NO: 91901 - DNA, 978 bp, synthetic construct
  misc_feature 1..978: note = Description of Artificial Sequence: Synthetic coding sequence
  source 1..978: mol_type = other DNA
atgttcctgtacctgtgcttcatcttccagagaacctgcagcgaggagatggaggaggagaacgccaccctgctgaccgagttcgtgctgaccggcttcctgcaccagcccgactgcaagatccccctgttcctggccttcctggtgatctacctgatcaccatcatgggcaacctgggcctgatcgtgctgatctggaaggacccccacctgcacatccccatgtacctgttcctgggcagcctggccttcgtggacgccagcctgagcagcaccgtgacccccaagatgctgatcaacttcctggccaagagcaagatgatcagcctgagcgagtgcatggtgcagttcttcagcctggtgaccaccgtgaccaccgagtgcttcctgctggccaccatggcctacgacagatacgtggccatctgcaaggccctgctgtaccccgtgatcatgaccaacgagctgtgcatccagctgctggtgctgagcttcatcggcggcctgctgcacgccctgatccacgaggccttcagcttcagactgaccttctgcaacagcaacatcatccagcacttctactgcgacatcatccccctgctgaagatcagctgcaccgacagcagcatcaacttcctgatggtgttcatcttcgccggcagcgtgcaggtgttcaccatcggcaccatcctgatcagctacaccatcatcctgttcaccatcctggagaagaagagcatcaagggcatcagaaaggccgtgagcacctgcggcgcccacctgctgagcgtgagcctgtactacggccccctgaccttcaagtacctgggcagcgccagcccccaggccgacgaccaggacatgatggagagcctgttctacaccgtgatcgtgcccctgctgaaccccatgatctacagcctgagaaacaagcaggtgatcgccagcttcaccaagatgttcaagagcaacgtgtag

SEQ ID NO: 91902 - DNA, 963 bp, synthetic construct
  misc_feature 1..963: note = Description of Artificial Sequence: Synthetic coding sequence
  source 1..963: mol_type = other DNA
atggagaccggcaaccagacccacgcccaggagttcctgctgctgggcttcagcgccaccagcgagatccagttcatcctgttcggcctgttcctgagcatgtacctggtgaccttcaccggcaacctgctgatcatcctggccatctgcagcgacagccacctgcacacccccatgtacttcttcctgagcaacctgagcttcgccgacctgtgcttcaccagcaccaccgtgcccaagatgctgctgaacatcctgacccagaacaagttcatcacctacgccggctgcctgagccagatcttcttcttcaccagcttcggctgcctggacaacctgctgctgaccgtgatggcctacgacagattcgtggccgtgtgccaccccctgcactacaccgtgatcatgaacccccagctgtgcggcctgctggtgctgggcagctggtgcatcagcgtgatgggcagcctgctggagaccctgaccgtgctgagactgagcttctgcaccgagatggagatcccccacttcttctgcgacctgctggaggtgctgaagctggcctgcagcgacaccttcatcaacaacgtggtgatctacttcgccaccggcgtgctgggcgtgatcagcttcaccggcatcttcttcagctactacaagatcgtgttcagcatcctgagaatcagcagcgccggcagaaagcacaaggccttcagcacctgcggcagccacctgagcgtggtgaccctgttctacggcaccggcttcggcgtgtacctgagcagcgccgccacccccagcagcagaaccagcctggtggccagcgtgatgtacaccatggtgacccccatgctgaaccccttcatctacagcctgagaaacaccgacatgaagagagccctgggcagactgctgagcagagccaccttcttcaacggcgacatcaccgccggcctgagctag

SEQ ID NO: 91903 - DNA, 960 bp, synthetic construct
  misc_feature 1..960: note = Description of Artificial Sequence: Synthetic coding sequence
  source 1..960: mol_type = other DNA
atggagagaggcaaccagaccgaggtgggcaacttcctgctgctgggcttcgccgaggacagcgacatgcagctgctgctgcacggcctgttcctgagcatgtacctggtgaccatcatcggcaacctgctgatcatcctgaccatcagcagcgacagccacctgcacacccccatgtacttcttcctgagcaacctgagcttcgccgacatctgcttcaccagcaccaccgtgcccaagatgctggtgaacatccagacccagagcaagatgatcaccttcgccggctgcctgacccagatcttcttcttcatcgccttcggctgcctggacaacctgctgctgaccatgaccgcctacgacagattcgtggccatctgctaccccctgcactacaccgtgatcatgaaccccagactgtgcggcctgctggtgctgggcagctggtgcatcagcgtgatgggcagcctgctggagaccctgaccatcctgagactgagcttctgcaccaacatggagatcccccacttcttctgcgaccccagcgaggtgctgaagctggcctgcagcgacaccttcatcaacaacatcgtgatgtacttcgtgaccatcgtgctgggcgtgttccccctgtgcggcatcctgttcagctacagccagatcttcagcagcgtgctgagagtgagcgccagaggccagcacaaggccttcagcacctgcggcagccacctgagcgtggtgagcctgttctacggcaccggcctgggcgtgtacctgagcagcgccgtgaccccccccagcagaaccagcctggccgccagcgtgatgtacaccatggtgacccccatgctgaaccccttcatctacagcctgagaaacaaggacatgaagggcagcctgggcagactgctgctgagagccaccagcctgaaggagggcaccatcgccaagctgagctag

SEQ ID NO: 91904 - DNA, 939 bp, synthetic construct
  misc_feature 1..939: note = Description of Artificial Sequence: Synthetic coding sequence
  source 1..939: mol_type = other DNA
atggaggccgagaacctgaccgagctgagcaagttcctgctgctgggcctgagcgacgaccccgagctgcagcccgtgctgttcggcctgttcctgagcatgtacctggtgaccgtgctgggcaacctgctgatcatcctggccgtgagcagcgacagccacctgcacacccccatgtacttcttcctgagcaacctgagcttcgtggacatctgcttcatcagcaccaccgtgcccaagatgctggtgagcatccaggccagaagcaaggacatcagctacatgggctgcctgacccaggtgtacttcctgatgatgttcgccggcatggacaccttcctgctggccgtgatggcctacgacagattcgtggccatctgccaccccctgcactacaccgtgatcatgaacccctgcctgtgcggcctgctggtgctggccagctggttcatcatcttctggttcagcctggtgcacatcctgctgatgaagagactgaccttcagcaccggcaccgagatcccccacttcttctgcgagcccgcccaggtgctgaaggtggcctgcagcaacaccctgctgaacaacatcgtgctgtacgtggccaccgccctgctgggcgtgttccccgtggccggcatcctgttcagctacagccagatcgtgagcagcctgatgggcatgagcagcaccaagggcaagtacaaggccttcagcacctgcggcagccacctgtgcgtggtgagcctgttctacggcaccggcctgggcgtgtacctgagcagcgccgtgacccacagcagccagagcagcagcaccgccagcgtgatgtacgccatggtgacccccatgctgaaccccttcatctacagcctgagaaacaaggacgtgaagggcgccctggagagactgctgagcagagccgacagctgcccctag

SEQ ID NO: 91905 - DNA, 972 bp, synthetic construct
  misc_feature 1..972: note = Description of Artificial Sequence: Synthetic coding sequence
  source 1..972: mol_type = other DNA
atggacagcgacgccagcctggtgagcagcagacccagcagccccgagcccgacgacctgttcctgcccgccagaagcaagggcagcagcggcagcgccttcaccggcggcaccgtgagcagcagcacccccagcgactgcccccccgagctgagcgccgagctgagaggcgccatgggcagcgccggcgcccaccccggcgacaagctgggcggcagcggcttcaagagcagcagcagcagcaccagcagcagcaccagcagcgccgccgccagcagcaccaagaaggacaagaagcagatgaccgagcccgagctgcagcagctgagactgaagatcaacagcagagagagaaagagaatgcacgacctgaacatcgccatggacggcctgagagaggtgatgccctacgcccacggccccagcgtgagaaagctgagcaagatcgccaccctgctgctggccagaaactacatcctgatgctgaccaacagcctggaggagatgaagagactggtgagcgagatctacggcggccaccacgccggcttccaccccagcgcctgcggcggcctggcccacagcgcccccctgcccgccgccaccgcccaccccgccgccgccgcccacgccgcccaccaccccgccgtgcaccaccccatcctgccccccgccgccgccgccgccgccgccgccgccgccgccgccgccgtgagcagcgccagcctgcccggcagcggcctgcccagcgtgggcagcatcagacccccccacggcctgctgaagagccccagcgccgccgccgccgcccccctgggcggcggcggcggcggcagcggcgccagcggcggcttccagcactggggcggcatgccctgcccctgcagcatgtgccaggtgccccccccccaccaccacgtgagcgccatgggcgccggcagcctgcccagactgaccagcgacgccaagtag

SEQ ID NO: 91906 - DNA, 972 bp, synthetic construct; identical to SEQ ID NO: 91905
  misc_feature 1..972: note = Description of Artificial Sequence: Synthetic coding sequence
  source 1..972: mol_type = other DNA

SEQ ID NO: 91907 - DNA, 189 bp, synthetic construct
  misc_feature 1..189: note = Description of Artificial Sequence: Synthetic coding sequence
  source 1..189: mol_type = other DNA
atggacagcgacgccagcctggtgagcagcagacccagcagccccgagcccgacgacctgttcctgcccgccagaagcaagggcagcagcggcagcgccttcaccggcggcaccgtgagcagcagcacccccagcgactgcccccccgagctgagcgccgagctgagaggcgccatgggcagcgcctag

SEQ ID NO: 91908 - DNA, 1323 bp, synthetic construct
  misc_feature 1..1323: note = Description of Artificial Sequence: Synthetic coding sequence
  source 1..1323: mol_type = other DNA
atggagtaccagatcctgaagatgagcctgtgcctgttcatcctgctgttcctgacccccggcatcctgtgcatctgccccctgcagtgcatctgcaccgagagacacagacacgtggactgcagcggcagaaacctgagcaccctgcccagcggcctgcaggagaacatcatccacctgaacctgagctacaaccacttcaccgacctgcacaaccagctgacccagtacaccaacctgagaaccctggacatcagcaacaacagactggagagcctgcccgcccacctgcccagaagcctgtggaacatgagcgccgccaacaacaacatcaagctgctggacaagagcgacaccgcctaccagtggaacctgaagtacctggacgtgagcaagaacatgctggagaaggtggtgctgatcaagaacaccctgagaagcctggaggtgctgaacctgagcagcaacaagctgtggaccgtgcccaccaacatgcccagcaagctgcacatcgtggacctgagcaacaacagcctgacccagatcctgcccggcaccctgatcaacctgaccaacctgacccacctgtacctgcacaacaacaagttcaccttcatccccgaccagagcttcgaccagctgttccagctgcaggagatcaccctgtacaacaacagatggagctgcgaccacaagcagaacatcacctacctgctgaagtggatgatggagaccaaggcccacgtgatcggcaccccctgcagcacccagatcagcagcctgaaggagcacaacatgtaccccacccccagcggcttcaccagcagcctgttcaccgtgagcggcatgcagaccgtggacaccatcaacagcctgagcgtggtgacccagcccaaggtgaccaagatccccaagcagtacagaaccaaggagaccaccttcggcgccaccctgagcaaggacaccaccttcaccagcaccgacaaggccttcgtgccctaccccgaggacaccagcaccgagaccatcaacagccacgaggccgccgccgccaccctgaccatccacctgcaggacggcatggtgaccaacaccagcctgaccagcagcaccaagagcagccccacccccatgaccctgagcatcaccagcggcatgcccaacaacttcagcgagatgccccagcagagcaccaccctgaacctgtggagagaggagaccaccaccaacgtgaagacccccctgcccagcgtggccaacgcctggaaggtgaacgccagcttcctgctgctgctgaacgtggtggtgatgctggccgtgtag

SEQ ID NO: 91909 - DNA, 819 bp, synthetic construct
  misc_feature 1..819: note = Description of Artificial Sequence: Synthetic coding sequence
  source 1..819: mol_type = other DNA
atgaacagcgacagcagcagcgtgagcagcagagccagcagccccgacatggacgagatgtacctgagagaccaccaccacagacaccaccaccaccaggagagcagactgaacagcgtgagcagcacccagggcgacatgatgcagaagatgcccggcgagagcctgagcagagccggcgccaaggccgccggcgagagcagcaagtacaagatcaagaagcagctgagcgagcaggacctgcagcagctgagactgaagatcaacggcagagagagaaagagaatgcacgacctgaacctggccatggacggcctgagagaggtgatgccctacgcccacggccccagcgtgagaaagctgagcaagatcgccaccctgctgctggccagaaactacatcctgatgctgaccagcagcctggaggagatgaagagactggtgggcgagatctacggcggccaccacagcgccttccactgcggcaccgtgggccacagcgccggccaccccgcccacgccgccaacagcgtgcaccccgtgcaccccatcctgggcggcgccctgagcagcggcaacgccagcagccccctgagcgccgccagcctgcccgccatcggcaccatcagacccccccacagcctgctgaaggcccccagcaccccccccgccctgcagctgggcagcggcttccagcactgggccggcctgccctgcccctgcaccatctgccagatgcccccccccccccacctgagcgccctgagcaccgccaacatggccagactgagcgccgagagcaaggacctgctgaagtag

SEQ ID NO: 91910 - DNA, 375 bp, synthetic construct
  misc_feature 1..375: note = Description of Artificial Sequence: Synthetic coding sequence
  source 1..375: mol_type = other DNA
atgtggaagggctgcctgaccctgtacaccggcagaggcggcgagctgcagaagatcggcgagttctgcatggtgtacagcgaggtgcccaacttcagcgagcccaaccccgactacagaggccagcagaacaagggcgcccagagcgagcagaagaacaacagcatgaacagcaacatgggcaccggcaccttcggccccgtgggcaacggcgtgcacaccggccccgagagcagagagcaccagttcagccacgccggcagaagcaacggcagaggcctgatcaacccccagctgcagggcaccgccagcaaccagaccgtgatgaccaccatcagcaacggcagagaccccagaagagccttcaagagatag

SEQ ID NO: 91911 - DNA, 375 bp, synthetic construct; identical to SEQ ID NO: 91910
  misc_feature 1..375: note = Description of Artificial Sequence: Synthetic coding sequence
  source 1..375: mol_type = other DNA

SEQ ID NO: 91912 - DNA, 615 bp, synthetic construct
  misc_feature 1..615: note = Description of Artificial Sequence: Synthetic coding sequence
  source 1..615: mol_type = other DNA
atgaacagagtgaacgaccccctgatcttcatcagagacatcaagcccggcctgaagaacctgaacgtggtgttcatcgtgctggagatcggcagagtgaccaagaccaaggacggccacgaggtgagaagctgcaaggtggccgacaagaccggcagcatcaccatcagcgtgtgggacgagatcggcggcctgatccagcccggcgacatcatcagactgaccagaggctacgccagcatgtggaagggctgcctgaccctgtacaccggcagaggcggcgagctgcagaagatcggcgagttctgcatggtgtacagcgaggtgcccaacttcagcgagcccaaccccgactacagaggccagcagaacaagggcgcccagagcgagcagaagaacaacagcatgaacagcaacatgggcaccggcaccttcggccccgtgggcaacggcgtgcacaccggccccgagagcagagagcaccagttcagccacgccggcagaagcaacggcagaggcctgatcaacccccagctgcagggcaccgccagcaaccagaccgtgatgaccaccatcagcaacggcagagaccccagaagagccttcaagagatag

SEQ ID NO: 91913 - DNA, 636 bp, synthetic construct
  misc_feature 1..636: note = Description of Artificial Sequence: Synthetic coding sequence
  source 1..636: mol_type = other DNA
atgaccaccgagaccttcgtgaaggacatcaagcccggcctgaagaacctgaacctgatcttcatcgtgctggagaccggcagagtgaccaagaccaaggacggccacgaggtgagaacctgcaaggtggccgacaagaccggcagcatcaacatcagcgtgtgggacgacgtgggcaacctgatccagcccggcgacatcatcagactgaccaagggctacgccagcgtgttcaagggctgcctgaccctgtacaccggcagaggcggcgacctgcagaagatcggcgagttctgcatggtgtacagcgaggtgcccaacttcagcgagcccaaccccgagtacagcacccagcaggcccccaacaaggccgtgcagaacgacagcaaccccagcgccagccagcccaccaccggccccagcgccgccagccccgccagcgagaaccagaacggcaacggcctgagcgccccccccggccccggcggcggcccccaccccccccacacccccagccacccccccagcaccagaatcaccagaagccagcccaaccacacccccgccggcccccccggccccagcagcaaccccgtgagcaacggcaaggagaccagaagaagcagcaagagatag

SEQ ID NO: 91914 - DNA, 636 bp, synthetic construct; identical to SEQ ID NO: 91913
  misc_feature 1..636: note = Description of Artificial Sequence: Synthetic coding sequence
  source 1..636: mol_type = other DNA

SEQ ID NO: 91915 - DNA, 636 bp, synthetic construct; identical to SEQ ID NO: 91913
  misc_feature 1..636: note = Description of Artificial Sequence: Synthetic coding sequence
  source 1..636: mol_type = other DNA

SEQ ID NO: 91916 - DNA, 459 bp, synthetic construct
  misc_feature 1..459: note = Description of Artificial Sequence: Synthetic coding sequence
  source 1..459: mol_type = other DNA
atgaccaccgagaccttcgtgaaggacatcaagcccggcctgaagaacctgaacctgatcttcatcgtgctggagaccggcagagtgaccaagaccaaggacggccacgaggtgagaacctgcaaggtggccgacaagaccggcagcatcaacatcagcgtgtgggacgacgtgggcaacctgatccagcccggcgacatcatcagactgaccaagggctacgccagcgtgttcaagggctgcctgaccctgtacaccggcagaggcggcgacctgcagaagatcggcgagttctgcatggtgtacagcgaggtgcccaacttcagcgagcccaaccccgagtacagcacccagcaggcccccaacaaggccgtgcagaacgacagcaaccccagcgccagccagcccaccaccggccccagcgccgccagccccgccagcgagaaccagaacggctag

SEQ ID NO: 91917 - DNA, 435 bp, synthetic construct
  misc_feature 1..435: note = Description of Artificial Sequence: Synthetic coding sequence
  source 1..435: mol_type = other DNA
atgaccaccgagaccttcgtgaaggacatcaagcccggcctgaagaacctgaacctgatcttcatcgtgctggagaccggcagagtgaccaagaccaaggacggccacgaggtgagaacctgcaaggtggccgacaagaccggcagcatcaacatcagcgtgtgggacgacgtgggcaacctgatccagcccggcgacatcatcagactgaccaagggctacgccagcgtgttcaagggctgcctgaccctgtacaccggcagaggcggcgacctgcagaagatcggcgagttctgcatggtgtacagcgaggtgcccaacttcagcgagcccaaccccgagtacagcacccagcaggcccccaacaaggccgtgcagaacgacagcaaccccagcgccagccagcccaccaccggccccagcgccgccagctag

SEQ ID NO: 91918 - DNA, 2409 bp, synthetic construct
  misc_feature 1..2409: note = Description of Artificial Sequence: Synthetic coding sequence
  source 1..2409: mol_type = other DNA
atgggccacccccccctggagttcagcgactgctacctggacagccccgacttcagagagagactgaagtgctacgagcaggagctggagagaaccaacaagttcatcaaggacgtgatcaaggacggcaacgccctgatcagcgccatgagaaactacagcagcgccgtgcagaagttcagccagaccctgcagagcttccagttcgacttcatcggcgacaccctgaccgacgacgagatcaacatcgccgagagcttcaaggagttcgccgagctgctgaacgaggtggagaacgagagaatgatgatggtgcacaacgccagcgacctgctgatcaagcccctggagaacttcagaaaggagcagatcggcttcaccaaggagagaaagaagaagttcgagaaggacggcgagagattctacagcctgctggacagacacctgcacctgagcagcaagaagaaggagagccagctgcaggaggccgacctgcaggtggacaaggagagacacaacttcttcgagagcagcctggactacgtgtaccagatccaggaggtgcaggagagcaagaagttcaacatcgtggagcccgtgctggccttcctgcacagcctgttcatcagcaacagcctgaccgtggagctgacccaggacttcctgccctacaagcagcagctgcagctgagcctgcagaacaccagaaaccacttcagcagcaccagagaggagatggaggagctgaagaagagaatgaaggaggccccccagacctgcaagctgcccggccagcccaccatcgagggctacctgtacacccaggagaagtgggccctgggcatcagctgggtgaagtactactgccagtacgagaaggagaccaagaccctgaccatgacccccatggagcagaagcccggcgccaagcagggccccctggacctgaccctgaagtactgcgtgagaagaaagaccgagagcatcgacaagagattctgcttcgacatcgagaccaacgagagacccggcaccatcaccctgcaggccctgagcgaggccaacagaagactgtggatggaggccatggacggcaaggagcccatctaccacagccccatcaccaagcagcaggagatggagctgaacgaggtgggcttcaagttcgtgagaaagtgcatcaacatcatcgagaccaagggcatcaagaccgagggcctgtacagaaccgtgggcagcaacatccaggtgcagaagctgctgaacgccttcttcgaccccaagtgccccggcgacgtggacttccacaacagcgactgggacatcaagaccatcaccagcagcctgaagttctacctgagaaacctgagcgagcccgtgatgacctacagactgcacaaggagctggtgagcgccgccaagagcgacaacctggactacagactgggcgccatccacagcctggtgtacaagctgcccgagaagaacagagagatgctggagctgctgatcagacacctggtgaacgtgtgcgagcacagcaaggagaacctgatgacccccagcaacatgggcgtgatcttcggccccaccctgatgagagcccaggaggacaccgtggccgccatgatgaacatcaagttccagaacatcgtggtggagatcctgatcgagcacttcggcaagatctacctgggcccccccgaggagagcgccgccccccccgtgcccccccccagagtgaccgccagaagacacaagcccatcaccatcagcaagagactgctgagagagagaaccgtgttctacaccagcagcctggacgagagcgaggacgagatccagcaccagacccccaacggcaccatcaccagcagcatcgagccccccaagcccccccagcaccccaagctgcccatccagagaagcggcgagaccgaccccggcagaaagagccccagcagacccatcctggacggcaagctggagccctgccccgaggtggacgtgggcaagctggtgagcagactgcaggacggcggcaccaagatcacccccaaggccaccaacggccccatgcccggcagcggccccaccaagacccccagcttccacatcaagagacccgcccccagacccctggcccaccacaaggagggcgacgccgacagcttcagcaaggtgagaccccccggcgagaagcccaccatcatcagaccccccgtgagaccccccgaccccccctgcagagccgccaccccccagaagcccgagcccaagcccgacatcgtggccggcaacgccggcgagatcaccagcagcgtggtggccagcagaaccagattcttcgagaccgccagcagaaagaccggcagcagccagggcagactgcccggcgacgagagctag

SEQ ID NO: 91919 - DNA, 2085 bp, synthetic construct
  misc_feature 1..2085: note = Description of Artificial Sequence: Synthetic coding sequence
  source 1..2085: mol_type = other DNA
atgggccacccccccctggagttcagcgactgctacctggacagccccgacttcagagagagactgaagtgctacgagcaggagctggagagaaccaacaagttcatcaaggacgtgatcaaggacggcaacgccctgatcagcgccatgagaaactacagcagcgccgtgcagaagttcagccagaccctgcagagcttccagttcgacttcatcggcgacaccctgaccgacgacgagatcaacatcgccgagagcttcaaggagttcgccgagctgctgaacgaggtggagaacgagagaatgatgatggtgcacaacgccagcgacctgctgatcaagcccctggagaacttcagaaaggagcagatcggcttcaccaaggagagaaagaagaagttcgagaaggacggcgagagattctacagcctgctggacagacacctgcacctgagcagcaagaagaaggagagccagctgcaggaggccgacctgcaggtggacaaggagagacacaacttcttcgagagcagcctggactacgtgtaccagatccaggaggtgcaggagagcaagaagttcaacatcgtggagcccgtgctggccttcctgcacagcctgttcatcagcaacagcctgaccgtggagctgacccaggacttcctgccctacaagcagcagctgcagctgagcctgcagaacaccagaaaccacttcagcagcaccagagaggagatggaggagctgaagaagagaatgaaggaggccccccagacctgcaagctgcccggccagcccaccatcgagggctacctgtacacccaggagaagtgggccctgggcatcagctgggtgaagtactactgccagtacgagaaggagaccaagaccctgaccatgacccccatggagcagaagcccggcgccaagcagggccccctggacctgaccctgaagtactgcgtgagaagaaagaccgagagcatcgacaagagattctgcttcgacatcgagaccaacgagagacccggcaccatcaccctgcaggccctgagcgaggccaacagaagactgtggatggaggccatggacggcaaggagcccatctaccacagccccatcaccaagcagcaggagatggagctgaacgaggtgggcttcaagttcgtgagaaagtgcatcaacatcatcgagaccaagggcatcaagaccgagggcctgtacagaaccgtgggcagcaacatccaggtgcagaagctgctgaacgccttcttcgaccccaagtgccccggcgacgtggacttccacaacagcgactgggacatcaagaccatcaccagcagcctgaagttctacctgagaaacctgagcgagcccgtgatgacctacagactgcacaaggagctggtgagcgccgccaagagcgacaacctggactacagactgggcgccatccacagcctggtgtacaagctgcccgagaagaacagagagatgctggagctgctgatcagacacctggtgaacgtgtgcgagcacagcaaggagaacctgatgacccccagcaacatgggcgtgatcttcggccccaccctgatgagagcccaggaggacaccgtggccgccatgatgaacatcaagttccagaacatcgtggtggagatcctgatcgagcacttcggcaagatctacctgggcccccccgaggagagcgccgccccccccgtgcccccccccagagtgaccgccagaagacacaagcccatcaccatcagcaagagactgctgagagagagaaccgtgttctacaccagcagcctggacgagagcgagggcgacgccgacagcttcagcaaggtgagaccccccggcgagaagcccaccatcatcagaccccccgtgagaccccccgaccccccctgcagagccgccaccccccagaagcccgagcccaagcccgacatcgtggccggcaacgccggcgagatcaccagcagcgtggtggccagcagaaccagattcttcgagaccgccagcagaaagaccggcagcagccagggcagactgcccggcgacgagagctag

SEQ ID NO: 91920 - DNA, 225 bp, synthetic construct
  misc_feature 1..225: note = Description of Artificial Sequence: Synthetic coding sequence
  source 1..225: mol_type = other DNA
atgctggagctgctgatcagacacctggtgaacgtgtgcgagcacagcaaggagaacctgatgacccccagcaacatgggcgtgatcttcggccccaccctgatgagagcccaggaggacaccgtggccgccatgatgaacatcaagttccagaacatcgtggtggagatcctgatcgagcacttcggcaagatcagcagcttcttcctgcacagaagcatctag

SEQ ID NO: 91921 - DNA, 3111 bp, synthetic construct
  misc_feature 1..3111: note = Description of Artificial Sequence: Synthetic coding sequence
  source 1..3111: mol_type = other DNA
atggccagcagcgtgggcaacgtggccgacagcaccggcctggccgagctggcccacagagagtaccaggccggcgacttcgaggccgccgagagacactgcatgcagctgtggagacaggagcccgacaacaccggcgtgctgctgctgctgagcagcatccacttccagtgcagaagactggacagaagcgcccacttcagcaccctggccatcaagcagaaccccctgctggccgaggcctacagcaacctgggcaacgtgtacaaggagagaggccagctgcaggaggccatcgagcactacagacacgccctgagactgaagcccgacttcatcgacggctacatcaacctggccgccgccctggtggccgccggcgacatggagggcgccgtgcaggcctacgtgagcgccctgcagtacaaccccgacctgtactgcgtgagaagcgacctgggcaacctgctgaaggccctgggcagactggaggaggccaaggcctgctacctgaaggccatcgagacccagcccaacttcgccgtggcctggagcaacctgggctgcgtgttcaacgcccagggcgagatctggctggccatccaccacttcgagaaggccgtgaccctggaccccaacttcctggacgcctacatcaacctgggcaacgtgctgaaggaggccagaatcttcgacagagccgtggccgcctacctgagagccctgagcctgagccccaaccacgccgtggtgcacggcaacctggcctgcgtgtactacgagcagggcctgatcgacctggccatcgacacctacagaagagccatcgagctgcagccccacttccccgacgcctactgcaacctggccaacgccctgaaggagaagggcagcgtggccgaggccgaggactgctacaacaccgccctgagactgtgccccacccacgccgacagcctgaacaacctggccaacatcaagagagagcagggcaacatcgaggaggccgtgagactgtacagaaaggccctggaggtgttccccgagttcgccgccgcccacagcaacctggccagcgtgctgcagcagcagggcaagctgcaggaggccctgatgcactacaaggaggccatcagaatcagccccaccttcgccgacgcctacagcaacatgggcaacaccctgaaggagatgcaggacgtgcagggcgccctgcagtgctacaccagagccatccagatcaaccccgccttcgccgacgcccacagcaacctggccagcatccacaaggacagcggcaacatccccgaggccatcgccagctacagaaccgccctgaagctgaagcccgacttccccgacgcctactgcaacctggcccactgcctgcagatcgtgtgcgactggaccgactacgacgagagaatgaagaagctggtgagcatcgtggccgaccagctggagaagaacagactgcccagcgtgcacccccaccacagcatgctgtaccccctgagccacggcttcagaaaggccatcgccgagagacacggcaacctgtgcctggacaagatcaacgtgctgcacaagcccccctacgagcaccccaaggacctgaagctgagcgacggcagactgagagtgggctacgtgagcagcgacttcggcaaccaccccaccagccacctgatgcagagcatccccggcatgcacaaccccgacaagttcgaggtgttctgctacgccctgagccccgacgacggcaccaacttcagagtgaaggtgatggccgaggccaaccacttcatcgacctgagccagatcccctgcaacggcaaggccgccgacagaatccaccaggacggcatccacatcctggtgaacatgaacggctacaccaagggcgccagaaacgagctgttcgccctgagacccgcccccatccaggccatgtggctgggctaccccggcaccagcggcgccctgttcatggactacatcatcaccgaccaggagaccagccccgccgaggtggccgagcagtacagcgagaagctggcctacatgccccacaccttcttcatcggcgaccacgccaacatgttcccccacctgaagaagaaggccgtgatcgacttcaagagcaacggccacatctacgacaacagaatcgtgctgaacggcatcgacctgaaggccttcctggacagcctgcccgacgtgaagatcgtgaagatgaagtgccccgacggcggcgacaacgccgacagcagcaacaccgccctgaacatgcccgtgatccccatgaacaccatcgccgaggccgtgatcgagatgatcaacagaggccagatccagatcaccatcaacggcttcagcatcagcaacggcctggccaccacccagatcaacaacaaggccgccaccggcgaggaggtgcccagaaccatcatcgtgaccaccagaagccagtacggcctgcccgaggacgccatcgtgtactgcaacttcaaccagctgtacaagatcgaccccagcaccctgcagatgtgggccaacatcctgaagagagtgcccaacagcgtgctgtggctgctgagattccccgccgtgggcgagcccaacatccagcagtacgcccagaacatgggcctgccccagaacagaatcatcttcagccccgtggcccccaaggaggagcacgtgagaagaggccagctggccgacgtgtgcctggacacccccctgtgcaacggccacaccaccggcatggacgtgctgtgggccggcacccccatggtgaccatgcccggcgagaccctggccagcagagtggccgccagccagctgacctgcctgggctgcctggagctgatcgccaagaacagacaggagtacgaggacatcgccgtgaagctgggcaccgacctggagtacctgaagaaggtgagaggcaaggtgtggaagcagagaatcagcagccccctgttcaacaccaagcagtacaccatggagctggagagactgtacctgcagatgtgggagcactacgccgccggcaacaagcccgaccacatgatcaagcccgtggaggtgaccgagagcgcctag

SEQ ID NO: 91922 - DNA, 3141 bp, synthetic construct
  misc_feature 1..3141: note = Description of Artificial Sequence: Synthetic coding sequence
  source 1..3141: mol_type = other DNA
atggccagcagcgtgggcaacgtggccgacagcaccgagcccaccaagagaatgctgagcttccagggcctggccgagctggcccacagagagtaccaggccggcgacttcgaggccgccgagagacactgcatgcagctgtggagacaggagcccgacaacaccggcgtgctgctgctgctgagcagcatccacttccagtgcagaagactggacagaagcgcccacttcagcaccctggccatcaagcagaaccccctgctggccgaggcctacagcaacctgggcaacgtgtacaaggagagaggccagctgcaggaggccatcgagcactacagacacgccctgagactgaagcccgacttcatcgacggctacatcaacctggccgccgccctggtggccgccggcgacatggagggcgccgtgcaggcctacgtgagcgccctgcagtacaaccccgacctgtactgcgtgagaagcgacctgggcaacctgctgaaggccctgggcagactggaggaggccaaggcctgctacctgaaggccatcgagacccagcccaacttcgccgtggcctggagcaacctgggctgcgtgttcaacgcccagggcgagatctggctggccatccaccacttcgagaaggccgtgaccctggaccccaacttcctggacgcctacatcaacctgggcaacgtgctgaaggaggccagaatcttcgacagagccgtggccgcctacctgagagccctgagcctgagccccaaccacgccgtggtgcacggcaacctggcctgcgtgtactacgagcagggcctgatcgacctggccatcgacacctacagaagagccatcgagctgcagccccacttccccgacgcctactgcaacctggccaacgccctgaaggagaagggcagcgtggccgaggccgaggactgctacaacaccgccctgagactgtgccccacccacgccgacagcctgaacaacctggccaacatcaagagagagcagggcaacatcgaggaggccgtgagactgtacagaaaggccctggaggtgttccccgagttcgccgccgcccacagcaacctggccagcgtgctgcagcagcagggcaagctgcaggaggccctgatgcactacaaggaggccatcagaatcagccccaccttcgccgacgcctacagcaacatgggcaacaccctgaaggagatgcaggacgtgcagggcgccctgcagtgctacaccagagccatccagatcaaccccgccttcgccgacgcccacagcaacctggccagcatccacaaggacagcggcaacatccccgaggccatcgccagctacagaaccgccctgaagctgaagcccgacttccccgacgcctactgcaacctggcccactgcctgcagatcgtgtgcgactggaccgactacgacgagagaatgaagaagctggtgagcatcgtggccgaccagctggagaagaacagactgcccagcgtgcacccccaccacagcatgctgtaccccctgagccacggcttcagaaaggccatcgccgagagacacggcaacctgtgcctggacaagatcaacgtgctgcacaagcccccctacgagcaccccaaggacctgaagctgagcgacggcagactgagagtgggctacgtgagcagcgacttcggcaaccaccccaccagccacctgatgcagagcatccccggcatgcacaaccccgacaagttcgaggtgttctgctacgccctgagccccgacgacggcaccaacttcagagtgaaggtgatggccgaggccaaccacttcatcgacctgagccagatcccctgcaacggcaaggccgccgacagaatccaccaggacggcatccacatcctggtgaacatgaacggctacaccaagggcgccagaaacgagctgttcgccctgagacccgcccccatccaggccatgtggctgggctaccccggcaccagcggcgccctgttcatggactacatcatcaccgaccaggagaccagccccgccgaggtggccgagcagtacagcgagaagctggcctacatgccccacaccttcttcatcggcgaccacgccaacatgttcccccacctgaagaagaaggccgtgatcgacttcaagagcaacggccacatctacgacaacagaatcgtgctgaacggcatcgacctgaaggccttcctggacagcctgcccgacgtgaagatcgtgaagatgaagtgccccgacggcggcgacaacgccgacagcagcaacaccgccctgaacatgcccgtgatccccatgaacaccatcgccgaggccgtgatcgagatgatcaacagaggccagatccagatcaccatcaacggcttcagcatcagcaacggcctggccaccacccagatcaacaacaaggccgccaccggcgaggaggtgcccagaaccatcatcgtgaccaccagaagccagtacggcctgcccgaggacgccatcgtgtactgcaacttcaaccagctgtacaagatcgaccccagcaccctgcagatgtgggccaacatcctgaagagagtgcccaacagcgtgctgtggctgctgagattccccgccgtgggcgagcccaacatccagcagtacgcccagaacatgggcctgccccagaacagaatcatcttcagccccgtggcccccaaggaggagcacgtgagaagaggccagctggccgacgtgtgcctggacacccccctgtgcaacggccacaccaccggcatggacgtgctgtgggccggcacccccatggtgaccatgcccggcgagaccctggccagcagagtggccgccagccagctgacctgcctgggctgcctggagctgatcgccaagaacagacaggagtacgaggacatcgccgtgaagctgggcaccgacctggagtacctgaagaaggtgagaggcaaggtgtggaagcagagaatcagcagccccctgttcaacaccaagcagtacaccatggagctggagagactgtacctgcagatgtgggagcactacgccgccggcaacaagcccgaccacatgatcaagcccgtggaggtgaccgagagcgcctag

SEQ ID NO: 91923 - DNA, 330 bp, synthetic construct
  misc_feature 1..330: note = Description of Artificial Sequence: Synthetic coding sequence
  source 1..330: mol_type = other DNA
atgagcatcaccgacgtgctgagcgccgacgacatcgccgccgccctgcaggagtgcagagaccccgacaccttcgagccccagaagttcttccagaccagcggcctgagcaagatgagcgccaaccaggtgaaggacgtgttcagattcatcgacaacgaccagagcggctacctggacgaggaggagctgaagttcttcctgcagaagttcgagagcggcgccagagagctgaccgagagcgagaccaagagcctgatggccgccgccgacaacgacggcgacggcaagatcggcgccgaggagttccaggagatggtgcacagctag

SEQ ID NO: 91924 - DNA, 330 bp, synthetic construct; identical to SEQ ID NO: 91923
  misc_feature 1..330: note = Description of Artificial Sequence: Synthetic coding sequence
  source 1..330: mol_type = other DNA

SEQ ID NO: 91925 - DNA, 1638 bp, synthetic construct
  misc_feature 1..1638: note = Description of Artificial Sequence: Synthetic coding sequence
  source 1..1638: mol_type = other DNA
atgccccccttcctgctgctgacctgcctgttcatcaccggcaccagcgtgagccccgtggccctggacccctgcagcgcctacatcagcctgaacgagccctggagaaacaccgaccaccagctggacgagagccagggcccccccctgtgcgacaaccacgtgaacggcgagtggtaccacttcaccggcatggccggcgacgccatgcccaccttctgcatccccgagaaccactgcggcacccacgcccccgtgtggctgaacggcagccaccccctggagggcgacggcatcgtgcagagacaggcctgcgccagcttcaacggcaactgctgcctgtggaacaccaccgtggaggtgaaggcctgccccggcggctactacgtgtacagactgaccaagcccagcgtgtgcttccacgtgtactgcggccacttctacgacatctgcgacgaggactgccacggcagctgcagcgacaccagcgagtgcacctgcgcccccggcaccgtgctgggccccgacagacagacctgcttcgacgagaacgagtgcgagcagaacaacggcggctgcagcgagatctgcgtgaacctgaagaacagctacagatgcgagtgcggcgtgggcagagtgctgagaagcgacggcaagacctgcgaggacgtggagggctgccacaacaacaacggcggctgcagccacagctgcctgggcagcgagaagggctaccagtgcgagtgccccagaggcctggtgctgagcgaggacaaccacacctgccaggtgcccgtgctgtgcaagagcaacgccatcgaggtgaacatccccagagagctggtgggcggcctggagctgttcctgaccaacaccagctgcagaggcgtgagcaacggcacccacgtgaacatcctgttcagcctgaagacctgcggcaccgtggtggacgtggtgaacgacaagatcgtggccagcaacctggtgaccggcctgcccaagcagacccccggcagcagcggcgacttcatcatcagaaccagcaagctgctgatccccgtgacctgcgagttccccagactgtacaccatcagcgagggctacgtgcccaacctgagaaacagccccctggagatcatgagcagaaaccacggcatcttccccttcaccctggagatcttcaaggacaacgagttcgaggagccctacagagaggccctgcccaccctgaagctgagagacagcctgtacttcggcatcgagcccgtggtgcacgtgagcggcctggagagcctggtggagagctgcttcgccacccccaccagcaagatcgacgaggtgctgaagtactacctgatcagagacggctgcgtgagcgacgacagcgtgaagcagtacaccagcagagaccacctggccaagcacttccaggtgcccgtgttcaagttcgtgggcaaggaccacaaggaggtgttcctgcactgcagagtgctggtgtgcggcgtgctggacgagagaagcagatgcgcccagggctgccacagaagaatgagaagaggcgccggcggcgaggacagcgccggcctgcagggccagaccctgaccggcggccccatcagaatcgactgggaggactag

SEQ ID NO: 91926 - DNA, 966 bp, synthetic construct
  misc_feature 1..966: note = Description of Artificial Sequence: Synthetic coding sequence
  source 1..966: mol_type = other DNA
atgccccccttcctgctgctgacctgcctgttcatcaccggcaccagcgtgagccccgtggccctggacccctgcagcgcctacatcagcctgaacgagccctggagaaacaccgaccaccagctggacgagagccagggcccccccctgtgcgacaaccacgtgaacggcgagtggtaccacttcaccggcatggccggcgacgccatgcccaccttctgcatccccgagaaccactgcggcacccacgcccccgtgtggctgaacggcagccaccccctggagggcgacggcatcgtgcagagacaggcctgcgccagcttcaacggcaactgctgcctgtggaacaccaccgtggaggtgaaggcctgccccggcggctactacgtgtacagactgaccaagcccagcgtgtgcttccacgtgtactgcggccacttctacgacatctgcgacgaggactgccacggcagctgcagcgacaccagcgagtgcacctgcgcccccggcaccgtgctgggccccgacagacagacctgcttcgacgagaacgagtgcgagcagaacaacggcggctgcagcgagatctgcgtgaacctgaagaacagctacagatgcgagtgcggcgtgggcagagtgctgagaagcgacggcaagacctgcgaggacgtggagggctgccacaacaacaacggcggctgcagccacagctgcctgggcagcgagaagggctaccagtgcgagtgccccagaggcctggtgctgagcgaggacaaccacacctgccaggtgcccgtgctgtgcaagagcaacgccatcgaggtgaacatccccagagagctggtgggcggcctggagctgttcctgaccaacaccagctgcagaggcgtgagcaacggcacccacgtgaacatcctgttcagcctgaagacctgcggcaccgtggtggacagctgcttccagtag

SEQ ID NO: 91927 - DNA, 735 bp, synthetic construct
  misc_feature 1..735: note = Description of Artificial Sequence: Synthetic coding sequence
  source 1..735: mol_type = other DNA
atgggcctggagctgttcctggacctggtgagccagcccagcagagccgtgtacatcttcgccaagaagaacggcatccccctggagctgagaaccgtggacctggtgaagggccagcacaagagcaaggagttcctgcagatcaacagcctgggcaagctgcccaccctgaaggacggcgacttcatcctgaccgagagcagcgccatcctgatctacctgagctgcaagtaccagacccccgaccactggtaccccagcgacctgcaggccagagccagagtgcacgagtacctgggctggcacgccgactgcatcagaggcaccttcggcatccccctgtgggtgcaggtgctgggccccctgatcggcgtgcaggtgcccaaggagaaggtggagagaaacagaaccgccatggaccaggccctgcagtggctggaggacaagttcctgggcgacagacccttcctggccggccagcaggtgaccctggccgacctgatggccctggaggagctgatgcagcccgtggccctgggctacgagctgttcgagggcagacccagactggccgcctggagaggcagagtggaggccttcctgggcgccgagctgtgccaggaggcccacagcatcatcctgagcatcctggagcaggccgccaagaagaccctgcccacccccagccccgaggcctaccaggccatgctgctgagaatcgccagaatcccctag

SEQ ID NO: 91928 - DNA, 696 bp, synthetic construct
  misc_feature 1..696: note = Description of Artificial Sequence: Synthetic coding sequence
  source 1..696: mol_type = other DNA
atggccagcatggccgccatcggcagctgcagcaaggagtacagagtgctgctgggccagctgcagaagcagaccgacctgatgcaggacaccagcagactgctggacccctacatcagaatccagggcctggacgtgcccaagctgagagagcactgcagagagagacccggcgccttccccagcgaggagaccctgagaggcctgggcagaagaggcttcctgcagaccctgaacgccaccctgggctgcgtgctgcacagactggccgacctggagcagagactgcccaaggcccaggacctggagagaagcggcctgaacatcgaggacctggagaagctgcagatggccagacccaacatcctgggcctgagaaacaacatctactgcatggcccagctgctggacaacagcgacaccgccgagcccaccaaggccggcagaggcgccagccagccccccacccccacccccgccagcgacgccttccagagaaagctggagggctgcagattcctgcacggctaccacagattcatgcacagcgtgggcagagtgttcagcaagtggggcgagagccccaacagaagcagaagacacagcccccaccaggccctgagaaagggcgtgagaagaaccagacccagcagaaagggcaagagactgatgaccagaggccagctgcccagatag

SEQ ID NO: 91929 - DNA, 2940 bp, synthetic construct
  misc_feature 1..2940: note = Description of Artificial Sequence: Synthetic coding sequence
  source 1..2940: mol_type = other DNA
atggccctgttcgccgtgttccagaccaccttcttcctgaccctgctgagcctgagaacctaccagagcgaggtgctggccgagagactgcccctgacccccgtgagcctgaaggtgagcaccaacagcaccagacagagcctgcacctgcagtggaccgtgcacaacctgccctaccaccaggagctgaagatggtgttccagatccagatcagcagaatcgagaccagcaacgtgatctgggtgggcaactacagcaccaccgtgaagtggaaccaggtgctgcactggagctgggagagcgagctgcccctggagtgcgccacccacttcgtgagaatcaagagcctggtggacgacgccaagttccccgagcccaacttctggagcaactggagcagctgggaggaggtgagcgtgcaggacagcaccggccaggacatcctgttcgtgttccccaaggacaagctggtggaggagggcaccaacgtgaccatctgctacgtgagcagaaacatccagaacaacgtgagctgctacctggagggcaagcagatccacggcgagcagctggacccccacgtgaccgccttcaacctgaacagcgtgcccttcatcagaaacaagggcaccaacatctactgcgaggccagccagggcaacgtgagcgagggcatgaagggcatcgtgctgttcgtgagcaaggtgctggaggagcccaaggacttcagctgcgagaccgaggacttcaagaccctgcactgcacctgggaccccggcaccgacaccgccctgggctggagcaagcagcccagccagagctacaccctgttcgagagcttcagcggcgagaagaagctgtgcacccacaagaactggtgcaactggcagatcacccaggacagccaggagacctacaacttcaccctgatcgccgagaactacctgagaaagagaagcgtgaacatcctgttcaacctgacccacagagtgtacctgatgaaccccttcagcgtgaacttcgagaacgtgaacgccaccaacgccatcatgacctggaaggtgcacagcatcagaaacaacttcacctacctgtgccagatcgagctgcacggcgagggcaagatgatgcagtacaacgtgagcatcaaggtgaacggcgagtacttcctgagcgagctggagcccgccaccgagtacatggccagagtgagatgcgccgacgccagccacttctggaagtggagcgagtggagcggccagaacttcaccaccctggaggccgcccccagcgaggcccccgacgtgtggagaatcgtgagcctggagcccggcaaccacaccgtgaccctgttctggaagcccctgagcaagctgcacgccaacggcaagatcctgttctacaacgtggtggtggagaacctggacaagcccagcagcagcgagctgcacagcatccccgcccccgccaacagcaccaagctgatcctggacagatgcagctaccagatctgcgtgatcgccaacaacagcgtgggcgccagccccgccagcgtgatcgtgatcagcgccgaccccgagaacaaggaggtggaggaggagagaatcgccggcaccgagggcggcttcagcctgagctggaagccccagcccggcgacgtgatcggctacgtggtggactggtgcgaccacacccaggacgtgctgggcgacttccagtggaagaacgtgggccccaacaccaccagcaccgtgatcagcaccgacgccttcagacccggcgtgagatacgacttcagaatctacggcctgagcaccaagagaatcgcctgcctgctggagaagaagaccggctacagccaggagctggcccccagcgacaacccccacgtgctggtggacaccctgaccagccacagcttcaccctgagctggaaggactacagcaccgagagccagcccggcttcatccagggctaccacgtgtacctgaagagcaaggccagacagtgccaccccagattcgagaaggccgtgctgagcgacggcagcgagtgctgcaagtacaagatcgacaaccccgaggagaaggccctgatcgtggacaacctgaagcccgagagcttctacgagttcttcatcacccccttcaccagcgccggcgagggccccagcgccaccttcaccaaggtgaccacccccgacgagcacagcagcatgctgatccacatcctgctgcccatggtgttctgcgtgctgctgatcatggtgatgtgctacctgaagagccagtggatcaaggagacctgctaccccgacatccccgacccctacaagagcagcatcctgagcctgatcaagttcaaggagaacccccacctgatcatcatgaacgtgagcgactgcatccccgacgccatcgaggtggtgagcaagcccgagggcaccaagatccagttcctgggcaccagaaagagcctgaccgagaccgagctgaccaagcccaactacctgtacctgctgcccaccgagaagaaccacagcggccccggcccctgcatctgcttcgagaacctgacctacaaccaggccgccagcgacagcggcagctgcggccacgtgcccgtgagccccaaggcccccagcatgctgggcctgatgaccagccccgagaacgtgctgaaggccctggagaagaactacatgaacagcctgggcgagatccccgccggcgagaccagcctgaactacgtgagccagctggccagccccatgttcggcgacaaggacagcctgcccaccaaccccgtggaggccccccactgcagcgagtacaagatgcagatggccgtgagcctgagactggccctgcccccccccaccgagaacagcagcctgagcagcatcaccctgctggaccccggcgagcactactgctag

SEQ ID NO: 91930 - DNA, 1029 bp, synthetic construct
  misc_feature 1..1029: note = Description of Artificial Sequence: Synthetic coding sequence
  source 1..1029: mol_type = other DNA
atggccctgttcgccgtgttccagaccaccttcttcctgaccctgctgagcctgagaacctaccagagcgaggtgctggccgagagactgcccctgacccccgtgagcctgaaggtgagcaccaacagcaccagacagagcctgcacctgcagtggaccgtgcacaacctgccctaccaccaggagctgaagatggtgttccagatccagatcagcagaatcgagaccagcaacgtgatctgggtgggcaactacagcaccaccgtgaagtggaaccaggtgctgcactggagctgggagagcgagctgcccctggagtgcgccacccacttcgtgagaatcaagagcctggtggacgacgccaagttccccgagcccaacttctggagcaactggagcagctgggaggaggtgagcgtgcaggacagcaccggccaggacatcctgttcgtgttccccaaggacaagctggtggaggagggcaccaacgtgaccatctgctacgtgagcagaaacatccagaacaacgtgagctgctacctggagggcaagcagatccacggcgagcagctggacccccacgtgaccgccttcaacctgaacagcgtgcccttcatcagaaacaagggcaccaacatctactgcgaggccagccagggcaacgtgagcgagggcatgaagggcatcgtgctgttcgtgagcaaggtgctggaggagcccaaggacttcagctgcgagaccgaggacttcaagaccctgcactgcacctgggaccccggcaccgacaccgccctgggctggagcaagcagcccagccagagctacaccctgttcgagagcttcagcggcgagaagaagctgtgcacccacaagaactggtgcaactggcagatcacccaggacagccaggagacctacaacttcaccctgatcgccgagaactacctgagaaagagaagcgtgaacatcctgttcaacctgacccacagaggcgagaccagagtggtgaccgcccacagaggccactag

SEQ ID NO: 91931 - DNA, 1398 bp, synthetic construct
  misc_feature 1..1398: note = Description of Artificial Sequence: Synthetic coding sequence
  source 1..1398: mol_type = other DNA
atgaacgcccagctgaccatggaggccatcggcgagctgcacggcgtgagccacgagcccgtgcccgcccccgccgacctgctgggcggcagcccccacgccagaagcagcgtggcccacagaggcagccacctgccccccgcccaccccagaagcatgggcatggccagcctgctggacggcggcagcggcggcggcgactaccaccaccaccacagagcccccgagcacagcctggccggccccctgcaccccaccatgaccatggcctgcgagaccccccccggcatgagcatgcccaccacctacaccaccctgacccccctgcagcccctgccccccatcagcaccgtgagcgacaagttcccccaccaccaccaccaccaccaccaccaccaccacccccaccaccaccagagactggccggcaacgtgagcggcagcttcaccctgatgagagacgagagaggcctggccagcatgaacaacctgtacaccccctaccacaaggacgtggccggcatgggccagagcctgagccccctgagcagcagcggcctgggcagcatccacaacagccagcagggcctgccccactacgcccaccccggcgccgccatgcccaccgacaagatgctgacccccaacggcttcgaggcccaccaccccgccatgctgggcagacacggcgagcagcacctgacccccaccagcgccggcatggtgcccatcaacggcctgcccccccaccacccccacgcccacctgaacgcccagggccacggccagctgctgggcaccgccagagagcccaaccccagcgtgaccggcgcccaggtgagcaacggcagcaacagcggccagatggaggagatcaacaccaaggaggtggcccagagaatcaccaccgagctgaagagatacagcatcccccaggccatcttcgcccagagagtgctgtgcagaagccagggcaccctgagcgacctgctgagaaaccccaagccctggagcaagctgaagagcggcagagagaccttcagaagaatgtggaagtggctgcaggagcccgagttccagagaatgagcgccctgagactggccgcctgcaagagaaaggagcaggagcacggcaaggacagaggcaacacccccaagaagcccagactggtgttcaccgacgtgcagagaagaaccctgcacgccatcttcaaggagaacaagagacccagcaaggagctgcagatcaccatcagccagcagctgggcctggagctgagcaccgtgagcaacttcttcatgaacgccagaagaagaagcctggacaagtggcaggacgagggcagcagcaacagcggcaacagcagcagcagcagcagcacctgcaccaaggcctag

SEQ ID NO: 91932 - DNA, 1515 bp, synthetic construct
  misc_feature 1..1515: note = Description of Artificial Sequence: Synthetic coding sequence
  source 1..1515: mol_type = other DNA
atgaaggccgcctacaccgcctacagatgcctgaccaaggacctggagggctgcgccatgaaccccgagctgaccatggagagcctgggcaccctgcacggccccgccggcggcggcagcggcggcggcggcggcggcggcggcggcggcggcggcggcggccccggccacgagcaggagctgctggccagccccagcccccaccacgccggcagaggcgccgccggcagcctgagaggccccccccccccccccaccgcccaccaggagctgggcaccgccgccgccgccgccgccgccgccagcagaagcgccatggtgaccagcatggccagcatcctggacggcggcgactacagacccgagctgagcatccccctgcaccacgccatgagcatgagctgcgacagcagcccccccggcatgggcatgagcaacacctacaccaccctgacccccctgcagcccctgccccccatcagcaccgtgagcgacaagttccaccacccccacccccaccaccacccccaccaccaccaccaccaccaccaccagagactgagcggcaacgtgagcggcagcttcaccctgatgagagacgagagaggcctgcccgccatgaacaacctgtacagcccctacaaggagatgcccggcatgagccagagcctgagccccctggccgccacccccctgggcaacggcctgggcggcctgcacaacgcccagcagagcctgcccaactacggcccccccggccacgacaagatgctgagccccaacttcgacgcccaccacaccgccatgctgaccagaggcgagcagcacctgagcagaggcctgggcaccccccccgccgccatgatgagccacctgaacggcctgcaccaccccggccacacccagagccacggccccgtgctggcccccagcagagagagaccccccagcagcagcagcggcagccaggtggccaccagcggccagctggaggagatcaacaccaaggaggtggcccagagaatcaccgccgagctgaagagatacagcatcccccaggccatcttcgcccagagagtgctgtgcagaagccagggcaccctgagcgacctgctgagaaaccccaagccctggagcaagctgaagagcggcagagagaccttcagaagaatgtggaagtggctgcaggagcccgagttccagagaatgagcgccctgagactggccgcctgcaagagaaaggagcaggagcccaacaaggacagaaacaacagccagaagaagagcagactggtgttcaccgacctgcagagaagaaccctgttcgccatcttcaaggagaacaagagacccagcaaggagatgcagatcaccatcagccagcagctgggcctggagctgaccaccgtgagcaacttcttcatgaacgccagaagaagaagcctggagaagtggcaggacgacctgagcaccggcggcagcagcagcaccagcagcacctgcaccaaggcctag

SEQ ID NO: 91933 - DNA, 1458 bp, synthetic construct
  misc_feature 1..1458: note = Description of Artificial Sequence: Synthetic coding sequence
  source 1..1458: mol_type = other DNA
atgaaccccgagctgaccatggagagcctgggcaccctgcacggccccgccggcggcggcagcggcggcggcggcggcggcggcggcggcggcggcggcggcggccccggccacgagcaggagctgctggccagccccagcccccaccacgccggcagaggcgccgccggcagcctgagaggccccccccccccccccaccgcccaccaggagctgggcaccgccgccgccgccgccgccgccgccagcagaagcgccatggtgaccagcatggccagcatcctggacggcggcgactacagacccgagctgagcatccccctgcaccacgccatgagcatgagctgcgacagcagcccccccggcatgggcatgagcaacacctacaccaccctgacccccctgcagcccctgccccccatcagcaccgtgagcgacaagttccaccacccccacccccaccaccacccccaccaccaccaccaccaccaccaccagagactgagcggcaacgtgagcggcagcttcaccctgatgagagacgagagaggcctgcccgccatgaacaacctgtacagcccctacaaggagatgcccggcatgagccagagcctgagccccctggccgccacccccctgggcaacggcctgggcggcctgcacaacgcccagcagagcctgcccaactacggcccccccggccacgacaagatgctgagccccaacttcgacgcccaccacaccgccatgctgaccagaggcgagcagcacctgagcagaggcctgggcaccccccccgccgccatgatgagccacctgaacggcctgcaccaccccggccacacccagagccacggccccgtgctggcccccagcagagagagaccccccagcagcagcagcggcagccaggtggccaccagcggccagctggaggagatcaacaccaaggaggtggcccagagaatcaccgccgagctgaagagatacagcatcccccaggccatcttcgcccagagagtgctgtgcagaagccagggcaccctgagcgacctgctgagaaaccccaagccctggagcaagctgaagagcggcagagagaccttcagaagaatgtggaagtggctgcaggagcccgagttccagagaatgagcgccctgagactggccgcctgcaagagaaaggagcaggagcccaacaaggacagaaacaacagccagaagaagagcagactggtgttcaccgacctgcagagaagaaccctgttcgccatcttcaaggagaacaagagacccagcaaggagatgcagatcaccatcagccagcagctgggcctggagctgaccaccgtgagcaacttcttcatgaacgccagaagaagaagcctggagaagtggcaggacgacctgagcaccggcggcagcagcagcaccagcagcacctgcaccaaggcctag

SEQ ID NO: 91934 - DNA, 450 bp, synthetic construct
  misc_feature 1..450: note = Description of Artificial Sequence: Synthetic coding sequence
  source 1..450: mol_type = other DNA
atggtggacgacgccggcgccgccgagagccagagaggcaagcagacccccgcccacagcctggagcagctgagaagactgcccctgccccccccccagatcagaatcagaccctggtggttccccgtgcaggagctgagagaccccctggtgttctacctggaggcctggctggccgacgagctgttcggccccgacagagccatcatccccgagatggagtggaccagccaggccctgctgaccgtggacatcgtggacagcggcaacctggtggagatcaccgtgttcggcagacccagagtgcagaacagagtgaagagcatgctgctgtgcctggcctggttccacagagagcacagagccagagccgagaagatgaagcacctggagaagaacctgaaggcccacgccagcgacccccacagcccccaggaccccgtggcctag

SEQ ID NO: 91935 - DNA, 387 bp, synthetic construct
  misc_feature 1..387: note = Description of Artificial Sequence: Synthetic coding sequence
  source 1..387: mol_type = other DNA
atggcccccgtgaagaagctggtggtgaagggcggcaagaagaagaagcaggtgctgaagttcaccctggactgcacccaccccgtggaggacggcatcatggacgccgccaacttcgagcagttcctgcaggagagaatcaaggtgaacggcaaggccggcaacctgggcggcggcgtggtgaccatcgagagaagcaagagcaagatcaccgtgaccagcgaggtgcccttcagcaagagatacctgaagtacctgaccaagaagtacctgaagaagaacaacctgagagactggctgagagtggtggccaacagcaaggagagctacgagctgagatacttccagatcaaccaggacgaggaggaggaggaggacgaggactag

SEQ ID NO: 91936 - DNA, 975 bp, synthetic construct
  misc_feature 1..975: note = Description of Artificial Sequence: Synthetic coding sequence
  source 1..975: mol_type = other DNA
atggagcccgcccccagcgccggcgccgagctgcagccccccctgttcgccaacgccagcgacgcctaccccagcgcctgccccagcgccggcgccaacgccagcggcccccccggcgccagaagcgccagcagcctggccctggccatcgccatcaccgccctgtacagcgccgtgtgcgccgtgggcctgctgggcaacgtgctggtgatgttcggcatcgtgagatacaccaagatgaagaccgccaccaacatctacatcttcaacctggccctggccgacgccctggccaccagcaccctgcccttccagagcgccaagtacctgatggagacctggcccttcggcgagctgctgtgcaaggccgtgctgagcatcgactactacaacatgttcaccagcatcttcaccctgaccatgatgagcgtggacagatacatcgccgtgtgccaccccgtgaaggccctggacttcagaacccccgccaaggccaagctgatcaacatctgcatctgggtgctggccagcggcgtgggcgtgcccatcatggtgatggccgtgaccagacccagagacggcgccgtggtgtgcatgctgcagttccccagccccagctggtactgggacaccgtgaccaagatctgcgtgttcctgttcgccttcgtggtgtgctgggcccccatccacatcttcgtgatcgtgtggaccctggtggacatcgacagaagagaccccctggtggtggccgccctgcacctgtgcatcgccctgggctacgccaacagcagcctgaaccccgtgctgtacgccttcctggacgagaacttcaagagatgcttcagacagctgtgcagaaagccctgcggcagacccgaccccagcagcttcagcagagccagagaggccaccgccagagagagagtgaccgcctgcacccccagcgacggccccggcggcggcgccgccgcctag

SEQ ID NO: 91937 - DNA, 1143 bp, synthetic construct
  misc_feature 1..1143: note = Description of Artificial Sequence: Synthetic coding sequence
  source 1..1143: mol_type = other DNA
atggacagccccatccagatcttcagaggcgagcccggccccacctgcgcccccagcgcctgcctgccccccaacagcagcgcctggttccccggctgggccgagcccgacagcaacggcagcgccggcagcgaggacgcccagctggagcccgcccacatcagccccgccatccccgtgatcatcaccgccgtgtacagcgtggtgttcgtggtgggcctggtgggcaacagcctggtgatgttcgtgatcatcagatacaccaagatgaagaccgccaccaacatctacatcttcaacctggccctggccgacgccctggtgaccaccaccatgcccttccagagcaccgtgtacctgatgaacagctggcccttcggcgacgtgctgtgcaagatcgtgatcagcatcgactactacaacatgttcaccagcatcttcaccctgaccatgatgagcgtggacagatacatcgccgtgtgccaccccgtgaaggccctggacttcagaacccccctgaaggccaagatcatcaacatctgcatctggctgctgagcagcagcgtgggcatcagcgccatcgtgctgggcggcaccaaggtgagagaggacgtggacgtgatcgagtgcagcctgcagttccccgacgacgactacagctggtgggacctgttcatgaagatctgcgtgttcatcttcgccttcgtgatccccgtgctgatcatcatcgtgtgctacaccctgatgatcctgagactgaagagcgtgagactgctgagcggcagcagagagaaggacagaaacctgagaagaatcaccagactggtgctggtggtggtggccgtgttcgtggtgtgctggacccccatccacatcttcatcctggtggaggccctgggcagcaccagccacagcaccgccgccctgagcagctactacttctgcatcgccctgggctacaccaacagcagcctgaaccccatcctgtacgccttcctggacgagaacttcaagagatgcttcagagacttctgcttccccctgaagatgagaatggagagacagagcaccagcagagtgagaaacaccgtgcaggaccccgcctacctgagagacatcgacggcatgaacaagcccgtgtag

SEQ ID NO: 91938 - DNA, 1101 bp, synthetic construct
  misc_feature 1..1101: note = Description of Artificial Sequence: Synthetic coding sequence
  source 1..1101: mol_type = other DNA
atggacagccccatccagatcttcagaggcgagcccggccccacctgcgcccccagcgcctgcctgccccccaacagcagcgccggcagcgaggacgcccagctggagcccgcccacatcagccccgccatccccgtgatcatcaccgccgtgtacagcgtggtgttcgtggtgggcctggtgggcaacagcctggtgatgttcgtgatcatcagatacaccaagatgaagaccgccaccaacatctacatcttcaacctggccctggccgacgccctggtgaccaccaccatgcccttccagagcaccgtgtacctgatgaacagctggcccttcggcgacgtgctgtgcaagatcgtgatcagcatcgactactacaacatgttcaccagcatcttcaccctgaccatgatgagcgtggacagatacatcgccgtgtgccaccccgtgaaggccctggacttcagaacccccctgaaggccaagatcatcaacatctgcatctggctgctgagcagcagcgtgggcatcagcgccatcgtgctgggcggcaccaaggtgagagaggacgtggacgtgatcgagtgcagcctgcagttccccgacgacgactacagctggtgggacctgttcatgaagatctgcgtgttcatcttcgccttcgtgatccccgtgctgatcatcatcgtgtgctacaccctgatgatcctgagactgaagagcgtgagactgctgagcggcagcagagagaaggacagaaacctgagaagaatcaccagactggtgctggtggtggtggccgtgttcgtggtgtgctggacccccatccacatcttcatcctggtggaggccctgggcagcaccagccacagcaccgccgccctgagcagctactacttctgcatcgccctgggctacaccaacagcagcctgaaccccatcctgtacgccttcctggacgagaacttcaagagatgcttcagagacttctgcttccccctgaagatgagaatggagagacagagcaccagcagagtgagaaacaccgtgcaggaccccgcctacctgagagacatcgacggcatgaacaagcccgtgtag

SEQ ID NO: 91939 - DNA, 1143 bp, synthetic construct; identical to SEQ ID NO: 91937
  misc_feature 1..1143: note = Description of Artificial Sequence: Synthetic coding sequence
  source 1..1143: mol_type = other DNA

SEQ ID NO: 91940 - DNA, 1344 bp, synthetic construct
  misc_feature 1..1344: note = Description of Artificial Sequence: Synthetic coding sequence
  source 1..1344: mol_type = other DNA
atgagcagaagaccctgcagctgcgccctgagaccccccagatgcagctgcagcgccagccccagcgccgtgaccgccgccggcagacccagacccagcgacagctgcaaggaggagagcagcaccctgagcgtgaagatgaagtgcgacttcaactgcaaccacgtgcacagcggcctgaagctggtgaagcccgacgacatcggcagactggtgagctacacccccgcctacctggagggcagctgcaaggactgcatcaaggactacgagagactgagctgcatcggcagccccatcgtgagccccagaatcgtgcagctggagaccgagagcaagagactgcacaacaaggagaaccagcacgtgcagcagaccctgaacagcaccaacgagatcgaggccctggagaccagcagactgtacgaggacagcggctacagcagcttcagcctgcagagcggcctgagcgagcacgaggagggcagcctgctggaggagaacttcggcgacagcctgcagagctgcctgctgcagatccagagccccgaccagtaccccaacaagaacctgctgcccgtgctgcacttcgagaaggtggtgtgcagcaccctgaagaagaacgccaagagaaaccccaaggtggacagagagatgctgaaggagatcatcgccagaggcaacttcagactgcagaacatcatcggcagaaagatgggcctggagtgcgtggacatcctgagcgagctgttcagaagaggcctgagacacgtgctggccaccatcctggcccagctgagcgacatggacctgatcaacgtgagcaaggtgagcaccacctggaagaagatcctggaggacgacaagggcgccttccagctgtacagcaaggccatccagagagtgaccgagaacaacaacaagttcagcccccacgccagcaccagagagtacgtgatgttcagaacccccctggccagcgtgcagaagagcgccgcccagaccagcctgaagaaggacgcccagaccaagctgagcaaccagggcgaccagaagggcagcacctacagcagacacaacgagttcagcgaggtggccaagaccctgaagaagaacgagagcctgaaggcctgcatcagatgcaacagccccgccaagtacgactgctacctgcagagagccacctgcaagagagagggctgcggcttcgactactgcaccaagtgcctgtgcaactaccacaccaccaaggactgcagcgacggcaagctgctgaaggccagctgcaagatcggccccctgcccggcaccaagaagagcaagaagaacctgagaagactgtag

SEQ ID NO: 91941 - DNA, 1203 bp, synthetic construct
  misc_feature 1..1203: note = Description of Artificial Sequence: Synthetic coding sequence
  source 1..1203: mol_type = other DNA
atggacagcagcgccgcccccaccaacgccagcaactgcaccgacgccctggcctacagcagctgcagccccgcccccagccccggcagctgggtgaacctgagccacctggacggcaacctgagcgacccctgcggccccaacagaaccgacctgggcggcagagacagcctgtgcccccccaccggcagccccagcatgatcaccgccatcaccatcatggccctgtacagcatcgtgtgcgtggtgggcctgttcggcaacttcctggtgatgtacgtgatcgtgagatacaccaagatgaagaccgccaccaacatctacatcttcaacctggccctggccgacgccctggccaccagcaccctgcccttccagagcgtgaactacctgatgggcacctggcccttcggcaccatcctgtgcaagatcgtgatcagcatcgactactacaacatgttcaccagcatcttcaccctgtgcaccatgagcgtggacagatacatcgccgtgtgccaccccgtgaaggccctggacttcagaacccccagaaacgccaagatcatcaacgtgtgcaactggatcctgagcagcgccatcggcctgcccgtgatgttcatggccaccaccaagtacagacagggcagcatcgactgcaccctgaccttcagccaccccacctggtactgggagaacctgctgaagatctgcgtgttcatcttcgccttcatcatgcccgtgctgatcatcaccgtgtgctacggcctgatgatcctgagactgaagagcgtgagaatgctgagcggcagcaaggagaaggacagaaacctgagaagaatcaccagaatggtgctggtggtggtggccgtgttcatcgtgtgctggacccccatccacatctacgtgatcatcaaggccctggtgaccatccccgagaccaccttccagaccgtgagctggcacttctgcatcgccctgggctacaccaacagctgcctgaaccccgtgctgtacgccttcctggacgagaacttcaagagatgcttcagagagttctgcatccccaccagcagcaacatcgagcagcagaacagcaccagaatcagacagaacaccagagaccaccccagcaccgccaacaccgtggacagaaccaaccaccagctggagaacctggaggccgagaccgcccccctgccctag

SEQ ID NO: 91942 - DNA, 1257 bp, synthetic construct
  misc_feature 1..1257: note = Description of Artificial Sequence: Synthetic coding sequence
  source 1..1257: mol_type = other DNA
atggacagcagcgccgcccccaccaacgccagcaactgcaccgacgccctggcctacagcagctgcagccccgcccccagccccggcagctgggtgaacctgagccacctggacggcaacctgagcgacccctgcggccccaacagaaccgacctgggcggcagagacagcctgtgcccccccaccggcagccccagcatgatcaccgccatcaccatcatggccctgtacagcatcgtgtgcgtggtgggcctgttcggcaacttcctggtgatgtacgtgatcgtgagatacaccaagatgaagaccgccaccaacatctacatcttcaacctggccctggccgacgccctggccaccagcaccctgcccttccagagcgtgaactacctgatgggcacctggcccttcggcaccatcctgtgcaagatcgtgatcagcatcgactactacaacatgttcaccagcatcttcaccctgtgcaccatgagcgtggacagatacatcgccgtgtgccaccccgtgaaggccctggacttcagaacccccagaaacgccaagatcatcaacgtgtgcaactggatcctgagcagcgccatcggcctgcccgtgatgttcatggccaccaccaagtacagacagggcagcatcgactgcaccctgaccttcagccaccccacctggtactgggagaacctgctgaagatctgcgtgttcatcttcgccttcatcatgcccgtgctgatcatcaccgtgtgctacggcctgatgatcctgagactgaagagcgtgagaatgctgagcggcagcaaggagaaggacagaaacctgagaagaatcaccagaatggtgctggtggtggtggccgtgttcatcgtgtgctggacccccatccacatctacgtgatcatcaaggccctggtgaccatccccgagaccaccttccagaccgtgagctggcacttctgcatcgccctgggctacaccaacagctgcctgaaccccgtgctgtacgccttcctggacgagaacttcaagagatgcttcagagagttctgcatccccaccagcagcaacatcgagcagcagaacagcaccagaatcagacagaacaccagagaccaccccagcaccgccaacaccgtggacagaaccaaccaccagccccccctggccgtgagcatggcccagatcttcaccagataccccccccccacccacagagagaagacctgcaacgactacatgaagagatag

SEQ ID NO: 91943 - DNA, 1209 bp, synthetic construct
  misc_feature 1..1209: note = Description of Artificial Sequence: Synthetic coding sequence
  source 1..1209: mol_type = other DNA
atggacagcagcgccgcccccaccaacgccagcaactgcaccgacgccctggcctacagcagctgcagccccgcccccagccccggcagctgggtgaacctgagccacctggacggcaacctgagcgacccctgcggccccaacagaaccgacctgggcggcagagacagcctgtgcccccccaccggcagccccagcatgatcaccgccatcaccatcatggccctgtacagcatcgtgtgcgtggtgggcctgttcggcaacttcctggtgatgtacgtgatcgtgagatacaccaagatgaagaccgccaccaacatctacatcttcaacctggccctggccgacgccctggccaccagcaccctgcccttccagagcgtgaactacctgatgggcacctggcccttcggcaccatcctgtgcaagatcgtgatcagcatcgactactacaacatgttcaccagcatcttcaccctgtgcaccatgagcgtggacagatacatcgccgtgtgccaccccgtgaaggccctggacttcagaacccccagaaacgccaagatcatcaacgtgtgcaactggatcctgagcagcgccatcggcctgcccgtgatgttcatggccaccaccaagtacagacagggcagcatcgactgcaccctgaccttcagccaccccacctggtactgggagaacctgctgaagatctgcgtgttcatcttcgccttcatcatgcccgtgctgatcatcaccgtgtgctacggcctgatgatcctgagactgaagagcgtgagaatgctgagcggcagcaaggagaaggacagaaacctgagaagaatcaccagaatggtgctggtggtggtggccgtgttcatcgtgtgctggacccccatccacatctacgtgatcatcaaggccctggtgaccatccccgagaccaccttccagaccgtgagctggcacttctgcatcgccctgggctacaccaacagctgcctgaaccccgtgctgtacgccttcctggacgagaacttcaagagatgcttcagagagttctgcatccccaccagcagcaacatcgagcagcagaacagcaccagaatcagacagaacaccagagaccaccccagcaccgccaacaccgtggacagaaccaaccaccagatcagagaccccatcagcaacctgcccagagtgagcgtgttctag

SEQ ID NO: 91944 - DNA, 1212 bp, synthetic construct
  misc_feature 1..1212: note = Description of Artificial Sequence: Synthetic coding sequence
  source 1..1212: mol_type = other DNA
atggacagcagcgccgcccccaccaacgccagcaactgcaccgacgccctggcctacagcagctgcagccccgcccccagccccggcagctgggtgaacctgagccacctggacggcaacctgagcgacccctgcggccccaacagaaccgacctgggcggcagagacagcctgtgcccccccaccggcagccccagcatgatcaccgccatcaccatcatggccctgtacagcatcgtgtgcgtggtgggcctgttcggcaacttcctggtgatgtacgtgatcgtgagatacaccaagatgaagaccgccaccaacatctacatcttcaacctggccctggccgacgccctggccaccagcaccctgcccttccagagcgtgaactacctgatgggcacctggcccttcggcaccatcctgtgcaagatcgtgatcagcatcgactactacaacatgttcaccagcatcttcaccctgtgcaccatgagcgtggacagatacatcgccgtgtgccaccccgtgaaggccctggacttcagaacccccagaaacgccaagatcatcaacgtgtgcaactggatcctgagcagcgccatcggcctgcccgtgatgttcatggccaccaccaagtacagacagggcagcatcgactgcaccctgaccttcagccaccccacctggtactgggagaacctgctgaagatctgcgtgttcatcttcgccttcatcatgcccgtgctgatcatcaccgtgtgctacggcctgatgatcctgagactgaagagcgtgagaatgctgagcggcagcaaggagaaggacagaaacctgagaagaatcaccagaatggtgctggtggtggtggccgtgttcatcgtgtgctggacccccatccacatctacgtgatcatcaaggccctggtgaccatccccgagaccaccttccagaccgtgagctggcacttctgcatcgccctgggctacaccaacagctgcctgaaccccgtgctgtacgccttcctggacgagaacttcaagagatgcttcagagagttctgcatccccaccagcagcaacatcgagcagcagaacagcaccagaatcagacagaacaccagagaccaccccagcaccgccaacaccgtggacagaaccaaccaccagggcccccccgccaagttcgtggccgaccagctggccggcagcagctag

SEQ ID NO: 91945 - DNA, 1263 bp, synthetic construct
  misc_feature 1..1263: note = Description of Artificial Sequence: Synthetic coding sequence
  source 1..1263: mol_type = other DNA
atggacagcagcgccgcccccaccaacgccagcaactgcaccgacgccctggcctacagcagctgcagccccgcccccagccccggcagctgggtgaacctgagccacctggacggcaacctgagcgacccctgcggccccaacagaaccgacctgggcggcagagacagcctgtgcccccccaccggcagccccagcatgatcaccgccatcaccatcatggccctgtacagcatcgtgtgcgtggtgggcctgttcggcaacttcctggtgatgtacgtgatcgtgagatacaccaagatgaagaccgccaccaacatctacatcttcaacctggccctggccgacgccctggccaccagcaccctgcccttccagagcgtgaactacctgatgggcacctggcccttcggcaccatcctgtgcaagatcgtgatcagcatcgactactacaacatgttcaccagcatcttcaccctgtgcaccatgagcgtggacagatacatcgccgtgtgccaccccgtgaaggccctggacttcagaacccccagaaacgccaagatcatcaacgtgtgcaactggatcctgagcagcgccatcggcctgcccgtgatgttcatggccaccaccaagtacagacagggcagcatcgactgcaccctgaccttcagccaccccacctggtactgggagaacctgctgaagatctgcgtgttcatcttcgccttcatcatgcccgtgctgatcatcaccgtgtgctacggcctgatgatcctgagactgaagagcgtgagaatgctgagcggcagcaaggagaaggacagaaacctgagaagaatcaccagaatggtgctggtggtggtggccgtgttcatcgtgtgctggacccccatccacatctacgtgatcatcaaggccctggtgaccatccccgagaccaccttccagaccgtgagctggcacttctgcatcgccctgggctacaccaacagctgcctgaaccccgtgctgtacgccttcctggacgagaacttcaagagatgcttcagagagttctgcatccccaccagcagcaacatcgagcagcagaacagcaccagaatcagacagaacaccagagaccaccccagcaccgccaacaccgtggacagaaccaaccaccaggtggagctgaacctggactgccactgcgagaacgccaagccctggcccctgagctacaacgccggccagagccccttccccttccccggcagagtgtag

SEQ ID NO: 91946 - DNA, 1179 bp, synthetic construct
  misc_feature 1..1179: note = Description of Artificial Sequence: Synthetic coding sequence
  source 1..1179: mol_type = other DNA
atggacagcagcgccgcccccaccaacgccagcaactgcaccgacgccctggcctacagcagctgcagccccgcccccagccccggcagctgggtgaacctgagccacctggacggcaacctgagcgacccctgcggccccaacagaaccgacctgggcggcagagacagcctgtgcccccccaccggcagccccagcatgatcaccgccatcaccatcatggccctgtacagcatcgtgtgcgtggtgggcctgttcggcaacttcctggtgatgtacgtgatcgtgagatacaccaagatgaagaccgccaccaacatctacatcttcaacctggccctggccgacgccctggccaccagcaccctgcccttccagagcgtgaactacctgatgggcacctggcccttcggcaccatcctgtgcaagatcgtgatcagcatcgactactacaacatgttcaccagcatcttcaccctgtgcaccatgagcgtggacagatacatcgccgtgtgccaccccgtgaaggccctggacttcagaacccccagaaacgccaagatcatcaacgtgtgcaactggatcctgagcagcgccatcggcctgcccgtgatgttcatggccaccaccaagtacagacagggcagcatcgactgcaccctgaccttcagccaccccacctggtactgggagaacctgctgaagatctgcgtgttcatcttcgccttcatcatgcccgtgctgatcatcaccgtgtgctacggcctgatgatcctgagactgaagagcgtgagaatgctgagcggcagcaaggagaaggacagaaacctgagaagaatcaccagaatggtgctggtggtggtggccgtgttcatcgtgtgctggacccccatccacatctacgtgatcatcaaggccctggtgaccatccccgagaccaccttccagaccgtgagctggcacttctgcatcgccctgggctacaccaacagctgcctgaaccccgtgctgtacgccttcctggacgagaacttcaagagatgcttcagagagttctgcatccccaccagcagcaacatcgagcagcagaacagcaccagaatcagacagaacaccagagaccaccccagcaccgccaacaccgtggacagaaccaaccaccaggtgagaagcctgtag

SEQ ID NO: 91947 - DNA, 1482 bp, synthetic construct
  misc_feature 1..1482: note = Description of Artificial Sequence: Synthetic coding sequence
  source 1..1482: mol_type = other DNA
atgtgcctgcacagaagagtgcccagcgaggagacctacagcctggacagattcgcccagaacccccccctgttccccccccccagcctgcccgccagcgagagcagaatggcccacgcccccctgctgcagagatgcggcgccgccagaaccggcttctgcaagaagcagcaggagctgtggcagagaagaaaggaggccgccgaggccctgggcaccagaaaggtgagcgtgctgctggccaccagccacagcggcgccagacccgccgtgagcaccatggacagcagcgccgcccccaccaacgccagcaactgcaccgacgccctggcctacagcagctgcagccccgcccccagccccggcagctgggtgaacctgagccacctggacggcaacctgagcgacccctgcggccccaacagaaccgacctgggcggcagagacagcctgtgcccccccaccggcagccccagcatgatcaccgccatcaccatcatggccctgtacagcatcgtgtgcgtggtgggcctgttcggcaacttcctggtgatgtacgtgatcgtgagatacaccaagatgaagaccgccaccaacatctacatcttcaacctggccctggccgacgccctggccaccagcaccctgcccttccagagcgtgaactacctgatgggcacctggcccttcggcaccatcctgtgcaagatcgtgatcagcatcgactactacaacatgttcaccagcatcttcaccctgtgcaccatgagcgtggacagatacatcgccgtgtgccaccccgtgaaggccctggacttcagaacccccagaaacgccaagatcatcaacgtgtgcaactggatcctgagcagcgccatcggcctgcccgtgatgttcatggccaccaccaagtacagacagggcagcatcgactgcaccctgaccttcagccaccccacctggtactgggagaacctgctgaagatctgcgtgttcatcttcgccttcatcatgcccgtgctgatcatcaccgtgtgctacggcctgatgatcctgagactgaagagcgtgagaatgctgagcggcagcaaggagaaggacagaaacctgagaagaatcaccagaatggtgctggtggtggtggccgtgttcatcgtgtgctggacccccatccacatctacgtgatcatcaaggccctggtgaccatccccgagaccaccttccagaccgtgagctggcacttctgcatcgccctgggctacaccaacagctgcctgaaccccgtgctgtacgccttcctggacgagaacttcaagagatgcttcagagagttctgcatccccaccagcagcaacatcgagcagcagaacagcaccagaatcagacagaacaccagagaccaccccagcaccgccaacaccgtggacagaaccaaccaccagctggagaacctggaggccgagaccgcccccctgccctag

SEQ ID NO: 91948 - DNA, 1194 bp, synthetic construct
  misc_feature 1..1194: note = Description of Artificial Sequence: Synthetic coding sequence
  source 1..1194: mol_type = other DNA
atggacagcagcgccgcccccaccaacgccagcaactgcaccgacgccctggcctacagcagctgcagccccgcccccagccccggcagctgggtgaacctgagccacctggacggcaacctgagcgacccctgcggccccaacagaaccgacctgggcggcagagacagcctgtgcccccccaccggcagccccagcatgatcaccgccatcaccatcatggccctgtacagcatcgtgtgcgtggtgggcctgttcggcaacttcctggtgatgtacgtgatcgtgagatacaccaagatgaagaccgccaccaacatctacatcttcaacctggccctggccgacgccctggccaccagcaccctgcccttccagagcgtgaactacctgatgggcacctggcccttcggcaccatcctgtgcaagatcgtgatcagcatcgactactacaacatgttcaccagcatcttcaccctgtgcaccatgagcgtggacagatacatcgccgtgtgccaccccgtgaaggccctggacttcagaacccccagaaacgccaagatcatcaacgtgtgcaactggatcctgagcagcgccatcggcctgcccgtgatgttcatggccaccaccaagtacagacagggcagcatcgactgcaccctgaccttcagccaccccacctggtactgggagaacctgctgaagatctgcgtgttcatcttcgccttcatcatgcccgtgctgatcatcaccgtgtgctacggcctgatgatcctgagactgaagagcgtgagaatgctgagcggcagcaaggagaaggacagaaacctgagaagaatcaccagaatggtgctggtggtggtggccgtgttcatcgtgtgctggacccccatccacatctacgtgatcatcaaggccctggtgaccatccccgagaccaccttccagaccgtgagctggcacttctgcatcgccctgggctacaccaacagctgcctgaaccccgtgctgtacgccttcctggacgagaacttcaagagatgcttcagagagttctgcatccccaccagcagcaacatcgagcagcagaacagcaccagaatcagacagaacaccagagaccaccccagcaccgccaacaccgtggacagaaccaaccaccagagagagagaagacagaagagcgactggtag

SEQ ID NO: 91949 - DNA, 1221 bp, synthetic construct
  misc_feature 1..1221: note = Description of Artificial Sequence: Synthetic coding sequence
  source 1..1221: mol_type = other DNA
atggacagcagcgccgcccccaccaacgccagcaactgcaccgacgccctggcctacagcagctgcagccccgcccccagccccggcagctgggtgaacctgagccacctggacggcaacctgagcgacccctgcggccccaacagaaccgacctgggcggcagagacagcctgtgcccccccaccggcagccccagcatgatcaccgccatcaccatcatggccctgtacagcatcgtgtgcgtggtgggcctgttcggcaacttcctggtgatgtacgtgatcgtgagatacaccaagatgaagaccgccaccaacatctacatcttcaacctggccctggccgacgccctggccaccagcaccctgcccttccagagcgtgaactacctgatgggcacctggcccttcggcaccatcctgtgcaagatcgtgatcagcatcgactactacaacatgttcaccagcatcttcaccctgtgcaccatgagcgtggacagatacatcgccgtgtgccaccccgtgaaggccctggacttcagaacccccagaaacgccaagatcatcaacgtgtgcaactggatcctgagcagcgccatcggcctgcccgtgatgttcatggccaccaccaagtacagacagggcagcatcgactgcaccctgaccttcagccaccccacctggtactgggagaacctgctgaagatctgcgtgttcatcttcgccttcatcatgcccgtgctgatcatcaccgtgtgctacggcctgatgatcctgagactgaagagcgtgagaatgctgagcggcagcaaggagaaggacagaaacctgagaagaatcaccagaatggtgctggtggtggtggccgtgttcatcgtgtgctggacccccatccacatctacgtgatcatcaaggccctggtgaccatccccgagaccaccttccagaccgtgagctggcacttctgcatcgccctgggctacaccaacagctgcctgaaccccgtgctgtacgccttcctggacgagaacttcaagagatgcttcagagagttctgcatccccaccagcagcaacatcgagcagcagaacagcaccagaatcagacagaacaccagagaccaccccagcaccgccaacaccgtggacagaaccaaccaccagaagatcgacctgttccagaagagcagcctgctgaactgcgagcacaccaagggctag

SEQ ID NO: 91950 - DNA, 960 bp, synthetic construct
  misc_feature 1..960: note = Description of Artificial Sequence: Synthetic coding sequence
  source 1..960: mol_type = other DNA
atgatgagagccaagagcatcagcaccaaggccggcaagcccagcagatacaccaagatgaagaccgccaccaacatctacatcttcaacctggccctggccgacgccctggccaccagcaccctgcccttccagagcgtgaactacctgatgggcacctggcccttcggcaccatcctgtgcaagatcgtgatcagcatcgactactacaacatgttcaccagcatcttcaccctgtgcaccatgagcgtggacagatacatcgccgtgtgccaccccgtgaaggccctggacttcagaacccccagaaacgccaagatcatcaacgtgtgcaactggatcctgagcagcgccatcggcctgcccgtgatgttcatggccaccaccaagtacagacagggcagcatcgactgcaccctgaccttcagccaccccacctggtactgggagaacctgctgaagatctgcgtgttcatcttcgccttcatcatgcccgtgctgatcatcaccgtgtgctacggcctgatgatcctgagactgaagagcgtgagaatgctgagcggcagcaaggagaaggacagaaacctgagaagaatcaccagaatggtgctggtggtggtggccgtgttcatcgtgtgctggacccccatccacatctacgtgatcatcaaggccctggtgaccatccccgagaccaccttccagaccgtgagctggcacttctgcatcgccctgggctacaccaacagctgcctgaaccccgtgctgtacgccttcctggacgagaacttcaagagatgcttcagagagttctgcatccccaccagcagcaacatcgagcagcagaacagcaccagaatcagacagaacaccagagaccaccccagcaccgccaacaccgtggacagaaccaaccaccagctggagaacctggaggccgagaccgcccccctgccctag

SEQ ID NO: 91951 - DNA, 1209 bp, synthetic construct; identical to SEQ ID NO: 91943
  misc_feature 1..1209: note = Description of Artificial Sequence: Synthetic coding sequence
  source 1..1209: mol_type = other DNA

SEQ ID NO: 91952 - DNA, 492 bp, synthetic construct
  misc_feature 1..492: note = Description of Artificial Sequence: Synthetic coding sequence
  source 1..492: mol_type = other DNA
atggtgcaggccagaaccggcttctgcaagaagcagcaggagctgtggcagagaagaaaggaggccgccgaggccctgggcaccagaaaggtgagcgtgctgctggccaccagccacagcggcgccagacccgccgtgagcaccatggacagcagcgccgcccccaccaacgccagcaactgcaccgacgccctggcctacagcagctgcagccccgcccccagccccggcagctgggtgaacctgagccacctggacggcaacctgagcgacccctgcggccccaacagaaccgacctgggcggcagagacagcctgtgcccccccaccggcagccccagcatgatcaccgccatcaccatcatggccctgtacagcatcgtgtgcgtggtgggcctgttcggcaacttcctggtgatgtacgtgatcgtgagatacaccaagatgaagaccgccaccaacatctacatcttcaacctggccctggcctag

SEQ ID NO: 91953 - DNA, 903 bp, synthetic construct
  misc_feature 1..903: note = Description of Artificial Sequence: Synthetic coding sequence
  source 1..903: mol_type = other DNA
atgaagaccgccaccaacatctacatcttcaacctggccctggccgacgccctggccaccagcaccctgcccttccagagcgtgaactacctgatgggcacctggcccttcggcaccatcctgtgcaagatcgtgatcagcatcgactactacaacatgttcaccagcatcttcaccctgtgcaccatgagcgtggacagatacatcgccgtgtgccaccccgtgaaggccctggacttcagaacccccagaaacgccaagatcatcaacgtgtgcaactggatcctgagcagcgccatcggcctgcccgtgatgttcatggccaccaccaagtacagacagggcagcatcgactgcaccctgaccttcagccaccccacctggtactgggagaacctgctgaagatctgcgtgttcatcttcgccttcatcatgcccgtgctgatcatcaccgtgtgctacggcctgatgatcctgagactgaagagcgtgagaatgctgagcggcagcaaggagaaggacagaaacctgagaagaatcaccagaatggtgctggtggtggtggccgtgttcatcgtgtgctggacccccatccacatctacgtgatcatcaaggccctggtgaccatccccgagaccaccttccagaccgtgagctggcacttctgcatcgccctgggctacaccaacagctgcctgaaccccgtgctgtacgccttcctggacgagaacttcaagagatgcttcagagagttctgcatccccaccagcagcaacatcgagcagcagaacagcaccagaatcagacagaacaccagagaccaccccagcaccgccaacaccgtggacagaaccaaccaccagctggagaacctggaggccgagaccgcccccctgccctag

SEQ ID NO: 91954 - DNA, 903 bp, synthetic construct; identical to SEQ ID NO: 91953
  misc_feature 1..903: note = Description of Artificial Sequence: Synthetic coding sequence
  source 1..903: mol_type = other DNA

SEQ ID NO: 91955 - DNA, 903 bp, synthetic construct; identical to SEQ ID NO: 91953
  misc_feature 1..903: note = Description of Artificial Sequence: Synthetic coding sequence
  source 1..903: mol_type = other DNA

SEQ ID NO: 91956 - DNA, 1209 bp, synthetic construct; identical to SEQ ID NO: 91943
  misc_feature 1..1209: note = Description of Artificial Sequence: Synthetic coding sequence
  source 1..1209: mol_type = other DNA

SEQ ID NO: 91957 - DNA, 561 bp, synthetic construct
  misc_feature 1..561: note = Description of Artificial Sequence: Synthetic coding sequence
  source 1..561: mol_type = other DNA
atggacagcagcgccgcccccaccaacgccagcaactgcaccgacgccctggcctacagcagctgcagccccgcccccagccccggcagctgggtgaacctgagccacctggacggcaacctgagcgacccctgcggccccaacagaaccgacctgggcggcagagacagcctgtgcccccccaccggcagccccagcatgatcaccgccatcaccatcatggccctgtacagcatcgtgtgcgtggtgggcctgttcggcaacttcctggtgatgtacgtgatcgtgagattccacagactgtacaccaacatcctgagcagcaacctggtgctgggcaagcccgccgaggacctgtgcttccacctgagactgcactacgccagcgcccaccactacagagtgctgtggaccgacgacctggccccccaggagtgcccccacgccctgtggctgcagagaaagggccaggagagcagcaaggaccaccaggacggcgccggcggcggcggctgcgtgcacagactgctggacagccacagccacctgagacaccactag

SEQ ID NO: 91958 - DNA, 1170 bp, synthetic construct
  misc_feature 1..1170: note = Description of Artificial Sequence: Synthetic coding sequence
  source 1..1170: mol_type = other DNA
atggacagcagcgccgcccccaccaacgccagcaactgcaccgacgccctggcctacagcagctgcagccccgcccccagccccggcagctgggtgaacctgagccacctggacggcaacctgagcgacccctgcggccccaacagaaccgacctgggcggcagagacagcctgtgcccccccaccggcagccccagcatgatcaccgccatcaccatcatggccctgtacagcatcgtgtgcgtggtgggcctgttcggcaacttcctggtgatgtacgtgatcgtgagatacaccaagatgaagaccgccaccaacatctacatcttcaacctggccctggccgacgccctggccaccagcaccctgcccttccagagcgtgaactacctgatgggcacctggcccttcggcaccatcctgtgcaagatcgtgatcagcatcgactactacaacatgttcaccagcatcttcaccctgtgcaccatgagcgtggacagatacatcgccgtgtgccaccccgtgaaggccctggacttcagaacccccagaaacgccaagatcatcaacgtgtgcaactggatcctgagcagcgccatcggcctgcccgtgatgttcatggccaccaccaagtacagacagggcagcatcgactgcaccctgaccttcagccaccccacctggtactgggagaacctgctgaagatctgcgtgttcatcttcgccttcatcatgcccgtgctgatcatcaccgtgtgctacggcctgatgatcctgagactgaagagcgtgagaatgctgagcggcagcaaggagaaggacagaaacctgagaagaatcaccagaatggtgctggtggtggtggccgtgttcatcgtgtgctggacccccatccacatctacgtgatcatcaaggccctggtgaccatccccgagaccaccttccagaccgtgagctggcacttctgcatcgccctgggctacaccaacagctgcctgaaccccgtgctgtacgccttcctggacgagaacttcaagagatgcttcagagagttctgcatccccaccagcagcaacatcgagcagcagaacagcaccagaatcagacagaacaccagagaccaccccagcaccgccaacaccgtggacagaaccaaccaccagagctag

SEQ ID NO: 91959 - DNA, 1095 bp, synthetic construct
  misc_feature 1..1095: note = Description of Artificial Sequence: Synthetic coding sequence
  source 1..1095: mol_type = other DNA
atggcccagcagtggagcctgcagagactggccggcagacacccccaggacagctacgaggacagcacccagagcagcatcttcacctacaccaacagcaacagcaccagaggccccttcgagggccccaactaccacatcgcccccagatgggtgtaccacctgaccagcgtgtggatgatcttcgtggtgaccgccagcgtgttcaccaacggcctggtgctggccgccaccatgaagttcaagaagctgagacaccccctgaactggatcctggtgaacctggccgtggccgacctggccgagaccgtgatcgccagcaccatcagcatcgtgaaccaggtgagcggctacttcgtgctgggccaccccatgtgcgtgctggagggctacaccgtgagcctgtgcggcatcaccggcctgtggagcctggccatcatcagctgggagagatggctggtggtgtgcaagcccttcggcaacgtgagattcgacgccaagctggccatcgtgggcatcgccttcagctggatctggagcgccgtgtggaccgccccccccatcttcggctggagcagatactggccccacggcctgaagaccagctgcggccccgacgtgttcagcggcagcagctaccccggcgtgcagagctacatgatcgtgctgatggtgacctgctgcatcatccccctggccatcatcatgctgtgctacctgcaggtgtggctggccatcagagccgtggccaagcagcagaaggagagcgagagcacccagaaggccgagaaggaggtgaccagaatggtggtggtgatgatcttcgcctactgcgtgtgctggggcccctacaccttcttcgcctgcttcgccgccgccaaccccggctacgccttccaccccctgatggccgccctgcccgcctacttcgccaagagcgccaccatctacaaccccgtgatctacgtgttcatgaacagacagttcagaaactgcatcctgcagctgttcggcaagaaggtggacgacggcagcgagctgagcagcgccagcaagaccgaggtgagcagcgtgagcagcgtgagccccgcctag

SEQ ID NO: 91960 - DNA, 1095 bp, synthetic construct
  misc_feature 1..1095: note = Description of Artificial Sequence: Synthetic coding sequence
  source 1..1095: mol_type = other DNA
atggcccagcagtggagcctgcagagactggccggcagacacccccaggacagctacgaggacagcacccagagcagcatcttcacctacaccaacagcaacagcaccagaggccccttcgagggccccaactaccacatcgcccccagatgggtgtaccacctgaccagcgtgtggatgatcttcgtggtgatcgccagcgtgttcaccaacggcctggtgctggccgccaccatgaagttcaagaagctgagacaccccctgaactggatcctggtgaacctggccgtggccgacctggccgagaccgtgatcgccagcaccatcagcgtggtgaaccaggtgtacggctacttcgtgctgggccaccccatgtgcgtgctggagggctacaccgtgagcctgtgcggcatcaccggcctgtggagcctggccatcatcagctgggagagatggatggtggtgtgcaagcccttcggcaacgtgagattcgacgccaagctggccatcgtgggcatcgccttcagctggatctgggccgccgtgtggaccgccccccccatcttcggctggagcagatactggccccacggcctgaagaccagctgcggccccgacgtgttcagcggcagcagctaccccggcgtgcagagctacatgatcgtgctgatggtgacctgctgcatcacccccctgagcatcatcgtgctgtgctacctgcaggtgtggctggccatcagagccgtggccaagcagcagaaggagagcgagagcacccagaaggccgagaaggaggtgaccagaatggtggtggtgatggtgctggccttctgcttctgctggggcccctacgccttcttcgcctgcttcgccgccgccaaccccggctaccccttccaccccctgatggccgccctgcccgccttcttcgccaagagcgccaccatctacaaccccgtgatctacgtgttcatgaacagacagttcagaaactgcatcctgcagctgttcggcaagaaggtggacgacggcagcgagctgagcagcgccagcaagaccgaggtgagcagcgtgagcagcgtgagccccgcctag

SEQ ID NO: 91961 - DNA, 1047 bp, synthetic construct
  misc_feature 1..1047: note = Description of Artificial Sequence: Synthetic coding sequence
  source 1..1047: mol_type = other DNA
atgagaaagatgagcgaggaggagttctacctgttcaagaacatcagcagcgtgggcccctgggacggcccccagtaccacatcgcccccgtgtgggccttctacctgcaggccgccttcatgggcaccgtgttcctgatcggcttccccctgaacgccatggtgctggtggccaccctgagatacaagaagctgagacagcccctgaactacatcctggtgaacgtgagcttcggcggcttcctgctgtgcatcttcagcgtgttccccgtgttcgtggccagctgcaacggctacttcgtgttcggcagacacgtgtgcgccctggagggcttcctgggcaccgtggccggcctggtgaccggctggagcctggccttcctggccttcgagagatacatcgtgatctgcaagcccttcggcaacttcagattcagcagcaagcacgccctgaccgtggtgctggccacctggaccatcggcatcggcgtgagcatcccccccttcttcggctggagcagattcatccccgagggcctgcagtgcagctgcggccccgactggtacaccgtgggcaccaagtacagaagcgagagctacacctggttcctgttcatcttctgcttcatcgtgcccctgagcctgatctgcttcagctacacccagctgctgagagccctgaaggccgtggccgcccagcagcaggagagcgccaccacccagaaggccgagagagaggtgagcagaatggtggtggtgatggtgggcagcttctgcgtgtgctacgtgccctacgccgccttcgccatgtacatggtgaacaacagaaaccacggcctggacctgagactggtgaccatccccagcttcttcagcaagagcgcctgcatctacaaccccatcatctactgcttcatgaacaagcagttccaggcctgcatcatgaagatggtgtgcggcaaggccatgaccgacgagagcgacacctgcagcagccagaagaccgaggtgagcaccgtgagcagcacccaggtgggccccaactag

SEQ ID NO: 91962 - DNA, 972 bp, synthetic construct
  misc_feature 1..972: note = Description of Artificial Sequence: Synthetic coding sequence
  source 1..972: mol_type = other DNA
atgtacagcggcaacagaagcggcggccacggctactgggacggcggcggcgccgccggcgccgagggccccgcccccgccggcaccctgagccccgcccccctgttcagccccggcacctacgagagactggccctgctgctgggcagcatcggcctgctgggcgtgggcaacaacctgctggtgctggtgctgtactacaagttccagagactgagaacccccacccacctgctgctggtgaacatcagcctgagcgacctgctggtgagcctgttcggcgtgaccttcaccttcgtgagctgcctgagaaacggctgggtgtgggacaccgtgggctgcgtgtgggacggcttcagcggcagcctgttcggctggatcagccagctgcaggccgccaccagagaggccagagccagcatgggccccgtgcagcagggcaccatctgcatgcagctgagatgcgtggaggacctgcagaccatccaggtgatcaagatcctgaagtacgagaagaagctggccaagatgtgcttcctgatgatcttcaccttcctggtgtgctggatgccctacatcgtgatctgcttcctggtggtgaacggccacggccacctggtgacccccaccatcagcatcgtgagctacctgttcgccaagagcaacaccgtgtacaaccccgtgatctacgtgttcatgatcagaaagttcagaagaagcctgctgcagctgctgtgcctgagactgctgagatgccagagacccgccaaggacctgcccgccgccggcagcgagatgcagatcagacccatcgtgatgagccagaaggacggcgacagacccaagaagaaggtgaccttcaacagcagcagcatcatcttcatcatcaccagcgacgagagcctgagcgtggacgacagcgacaagaccaacggcagcaaggtggacgtgatccaggtgagacccctgtag

SEQ ID NO: 91963 - DNA, 1209 bp, synthetic construct
  misc_feature 1..1209: note = Description of Artificial Sequence: Synthetic coding sequence
  source 1..1209: mol_type = other DNA
atgtacagcggcaacagaagcggcggccacggctactgggacggcggcggcgccgccggcgccgagggccccgcccccgccggcaccctgagccccgcccccctgttcagccccggcacctacgagagactggccctgctgctgggcagcatcggcctgctgggcgtgggcaacaacctgctggtgctggtgctgtactacaagttccagagactgagaacccccacccacctgctgctggtgaacatcagcctgagcgacctgctggtgagcctgttcggcgtgaccttcaccttcgtgagctgcctgagaaacggctgggtgtgggacaccgtgggctgcgtgtgggacggcttcagcggcagcctgttcggcatcgtgagcatcgccaccctgaccgtgctggcctacgagagatacatcagagtggtgcacgccagagtgatcaacttcagctgggcctggagagccatcacctacatctggctgtacagcctggcctgggccggcgcccccctgctgggctggaacagatacatcctggacgtgcacggcctgggctgcaccgtggactggaagagcaaggacgccaacgacagcagcttcgtgctgttcctgttcctgggctgcctggtggtgcccctgggcgtgatcgcccactgctacggccacatcctgtacagcatcagaatgctgagatgcgtggaggacctgcagaccatccaggtgatcaagatcctgaagtacgagaagaagctggccaagatgtgcttcctgatgatcttcaccttcctggtgtgctggatgccctacatcgtgatctgcttcctggtggtgaacggccacggccacctggtgacccccaccatcagcatcgtgagctacctgttcgccaagagcaacaccgtgtacaaccccgtgatctacgtgttcatgatcagaaagttcagaagaagcctgctgcagctgctgtgcctgagactgctgagatgccagagacccgccaaggacctgcccgccgccggcagcgagatgcagatcagacccatcgtgatgagccagaaggacggcgacagacccaagaagaaggtgaccttcaacagcagcagcatcatcttcatcatcaccagcgacgagagcctgagcgtggacgacagcgacaagaccaacggcagcaaggtggacgtgatccaggtgagacccctgtag

SEQ ID NO: 91964 - DNA, 2886 bp, synthetic construct
  misc_feature 1..2886: note = Description of Artificial Sequence: Synthetic coding sequence
  source 1..2886: mol_type = other DNA
atgtggagactgagaagagccgccgtggcctgcgaggtgtgccagagcctggtgaagcacagcagcggcatcaagggcagcctgcccctgcagaagctgcacctggtgagcagaagcatctaccacagccaccaccccaccctgaagctgcagagaccccagctgagaaccagcttccagcagttcagcagcctgaccaacctgcccctgagaaagctgaagttcagccccatcaagtacggctaccagcccagaagaaacttctggcccgccagactggccaccagactgctgaagctgagatacctgatcctgggcagcgccgtgggcggcggctacaccgccaagaagaccttcgaccagtggaaggacatgatccccgacctgagcgagtacaagtggatcgtgcccgacatcgtgtgggagatcgacgagtacatcgacttcggcagccccgaggagaccgccttcagagccaccgacagaggcagcgagagcgacaagcacttcagaaagggcctgctgggcgagctgatcctgctgcagcagcagatccaggagcacgaggaggaggccagaagagccgccggccagtacagcaccagctacgcccagcagaagagaaaggtgagcgacaaggagaagatcgaccagctgcaggaggagctgctgcacacccagctgaagtaccagagaatcctggagagactggagaaggagaacaaggagctgagaaagctggtgctgcagaaggacgacaagggcatccaccacagaaagctgaagaagagcctgatcgacatgtacagcgaggtgctggacgtgctgagcgactacgacgccagctacaacacccaggaccacctgcccagagtggtggtggtgggcgaccagagcgccggcaagaccagcgtgctggagatgatcgcccaggccagaatcttccccagaggcagcggcgagatgatgaccagaagccccgtgaaggtgaccctgagcgagggcccccaccacgtggccctgttcaaggacagcagcagagagttcgacctgaccaaggaggaggacctggccgccctgagacacgagatcgagctgagaatgagaaagaacgtgaaggagggctgcaccgtgagccccgagaccatcagcctgaacgtgaagggccccggcctgcagagaatggtgctggtggacctgcccggcgtgatcaacaccgtgaccagcggcatggcccccgacaccaaggagaccatcttcagcatcagcaaggcctacatgcagaaccccaacgccatcatcctgtgcatccaggacggcagcgtggacgccgagagaagcatcgtgaccgacctggtgagccagatggacccccacggcagaagaaccatcttcgtgctgaccaaggtggacctggccgagaagaacgtggccagccccagcagaatccagcagatcatcgagggcaagctgttccccatgaaggccctgggctacttcgccgtggtgaccggcaagggcaacagcagcgagagcatcgaggccatcagagagtacgaggaggagttcttccagaacagcaagctgctgaagaccagcatgctgaaggcccaccaggtgaccaccagaaacctgagcctggccgtgagcgactgcttctggaagatggtgagagagagcgtggagcagcaggccgacagcttcaaggccaccagattcaacctggagaccgagtggaagaacaactaccccagactgagagagctggacagaaacgagctgttcgagaaggccaagaacgagatcctggacgaggtgatcagcctgagccaggtgacccccaagcactgggaggagatcctgcagcagagcctgtgggagagagtgagcacccacgtgatcgagaacatctacctgcccgccgcccagaccatgaacagcggcaccttcaacaccaccgtggacatcaagctgaagcagtggaccgacaagcagctgcccaacaaggccgtggaggtggcctgggagaccctgcaggaggagttcagcagattcatgaccgagcccaagggcaaggagcacgacgacatcttcgacaagctgaaggaggccgtgaaggaggagagcatcaagagacacaagtggaacgacttcgccgaggacagcctgagagtgatccagcacaacgccctggaggacagaagcatcagcgacaagcagcagtgggacgccgccatctacttcatggaggaggccctgcaggccagactgaaggacaccgagaacgccatcgagaacatggtgggccccgactggaagaagagatggctgtactggaagaacagaacccaggagcagtgcgtgcacaacgagaccaagaacgagctggagaagatgctgaagtgcaacgaggagcaccccgcctacctggccagcgacgagatcaccaccgtgagaaagaacctggagagcagaggcgtggaggtggaccccagcctgatcaaggacacctggcaccaggtgtacagaagacacttcctgaagaccgccctgaaccactgcaacctgtgcagaagaggcttctactactaccagagacacttcgtggacagcgagctggagtgcaacgacgtggtgctgttctggagaatccagagaatgctggccatcaccgccaacaccctgagacagcagctgaccaacaccgaggtgagaagactggagaagaacgtgaaggaggtgctggaggacttcgccgaggacggcgagaagaagatcaagctgctgaccggcaagagagtgcagctggccgaggacctgaagaaggtgagagagatccaggagaagctggacgccttcatcgaggccctgcaccaggagaagtag

SEQ ID NO: 91965 - DNA, 3048 bp, synthetic construct
  misc_feature 1..3048: note = Description of Artificial Sequence: Synthetic coding sequence
  source 1..3048: mol_type = other DNA
atgtggagactgagaagagccgccgtggcctgcgaggtgtgccagagcctggtgaagcacagcagcggcatcaagggcagcctgcccctgcagaagctgcacctggtgagcagaagcatctaccacagccaccaccccaccctgaagctgcagagaccccagctgagaaccagcttccagcagttcagcagcctgaccaacctgcccctgagaaagctgaagttcagccccatcaagtacggctaccagcccagaagaaacttctggcccgccagactggccaccagactgctgaagctgagatacctgatcctgggcagcgccgtgggcggcggctacaccgccaagaagaccttcgaccagtggaaggacatgatccccgacctgagcgagtacaagtggatcgtgcccgacatcgtgtgggagatcgacgagtacatcgacttcgagaagatcagaaaggccctgcccagcagcgaggacctggtgaagctggcccccgacttcgacaagatcgtggagagcctgagcctgctgaaggacttcttcaccagcggccacaagctggtgagcgaggtgatcggcgccagcgacctgctgctgctgctgggcagccccgaggagaccgccttcagagccaccgacagaggcagcgagagcgacaagcacttcagaaagggcctgctgggcgagctgatcctgctgcagcagcagatccaggagcacgaggaggaggccagaagagccgccggccagtacagcaccagctacgcccagcagaagagaaaggtgagcgacaaggagaagatcgaccagctgcaggaggagctgctgcacacccagctgaagtaccagagaatcctggagagactggagaaggagaacaaggagctgagaaagctggtgctgcagaaggacgacaagggcatccaccacagaaagctgaagaagagcctgatcgacatgtacagcgaggtgctggacgtgctgagcgactacgacgccagctacaacacccaggaccacctgcccagagtggtggtggtgggcgaccagagcgccggcaagaccagcgtgctggagatgatcgcccaggccagaatcttccccagaggcagcggcgagatgatgaccagaagccccgtgaaggtgaccctgagcgagggcccccaccacgtggccctgttcaaggacagcagcagagagttcgacctgaccaaggaggaggacctggccgccctgagacacgagatcgagctgagaatgagaaagaacgtgaaggagggctgcaccgtgagccccgagaccatcagcctgaacgtgaagggccccggcctgcagagaatggtgctggtggacctgcccggcgtgatcaacaccgtgaccagcggcatggcccccgacaccaaggagaccatcttcagcatcagcaaggcctacatgcagaaccccaacgccatcatcctgtgcatccaggacggcagcgtggacgccgagagaagcatcgtgaccgacctggtgagccagatggacccccacggcagaagaaccatcttcgtgctgaccaaggtggacctggccgagaagaacgtggccagccccagcagaatccagcagatcatcgagggcaagctgttccccatgaaggccctgggctacttcgccgtggtgaccggcaagggcaacagcagcgagagcatcgaggccatcagagagtacgaggaggagttcttccagaacagcaagctgctgaagaccagcatgctgaaggcccaccaggtgaccaccagaaacctgagcctggccgtgagcgactgcttctggaagatggtgagagagagcgtggagcagcaggccgacagcttcaaggccaccagattcaacctggagaccgagtggaagaacaactaccccagactgagagagctggacagaaacgagctgttcgagaaggccaagaacgagatcctggacgaggtgatcagcctgagccaggtgacccccaagcactgggaggagatcctgcagcagagcctgtgggagagagtgagcacccacgtgatcgagaacatctacctgcccgccgcccagaccatgaacagcggcaccttcaacaccaccgtggacatcaagctgaagcagtggaccgacaagcagctgcccaacaaggccgtggaggtggcctgggagaccctgcaggaggagttcagcagattcatgaccgagcccaagggcaaggagcacgacgacatcttcgacaagctgaaggaggccgtgaaggaggagagcatcaagagacacaagtggaacgacttcgccgaggacagcctgagagtgatccagcacaacgccctggaggacagaagcatcagcgacaagcagcagtgggacgccgccatctacttcatggaggaggccctgcaggccagactgaaggacaccgagaacgccatcgagaacatggtgggccccgactggaagaagagatggctgtactggaagaacagaacccaggagcagtgcgtgcacaacgagaccaagaacgagctggagaagatgctgaagtgcaacgaggagcaccccgcctacctggccagcgacgagatcaccaccgtgagaaagaacctggagagcagaggcgtggaggtggaccccagcctgatcaaggacacctggcaccaggtgtacagaagacacttcctgaagaccgccctgaaccactgcaacctgtgcagaagaggcttctactactaccagagacacttcgtggacagcgagctggagtgcaacgacgtggtgctgttctggagaatccagagaatgctggccatcaccgccaacaccctgagacagcagctgaccaacaccgaggtgagaagactggagaagaacgtgaaggaggtgctggaggacttcgccgaggacggcgagaagaagatcaagctgctgaccggcaagagagtgcagctggccgaggacctgaagaaggtgagagagatccaggagaagctggacgccttcatcgaggccctgcaccaggagaagtag

SEQ ID NO: 91966 - DNA, 2940 bp, synthetic construct
  misc_feature 1..2940: note = Description of Artificial Sequence: Synthetic coding sequence
  source 1..2940: mol_type = other DNA
atgtggagactgagaagagccgccgtggcctgcgaggtgtgccagagcctggtgaagcacagcagcggcatcaagggcagcctgcccctgcagaagctgcacctggtgagcagaagcatctaccacagccaccaccccaccctgaagctgcagagaccccagctgagaaccagcttccagcagttcagcagcctgaccaacctgcccctgagaaagctgaagttcagccccatcaagtacggctaccagcccagaagaaacttctggcccgccagactggccaccagactgctgaagctgagatacctgatcctgggcagcgccgtgggcggcggctacaccgccaagaagaccttcgaccagtggaaggacatgatccccgacctgagcgagtacaagtggatcgtgcccgacatcgtgtgggagatcgacgagtacatcgacttcggccacaagctggtgagcgaggtgatcggcgccagcgacctgctgctgctgctgggcagccccgaggagaccgccttcagagccaccgacagaggcagcgagagcgacaagcacttcagaaagggcctgctgggcgagctgatcctgctgcagcagcagatccaggagcacgaggaggaggccagaagagccgccggccagtacagcaccagctacgcccagcagaagagaaaggtgagcgacaaggagaagatcgaccagctgcaggaggagctgctgcacacccagctgaagtaccagagaatcctggagagactggagaaggagaacaaggagctgagaaagctggtgctgcagaaggacgacaagggcatccaccacagaaagctgaagaagagcctgatcgacatgtacagcgaggtgctggacgtgctgagcgactacgacgccagctacaacacccaggaccacctgcccagagtggtggtggtgggcgaccagagcgccggcaagaccagcgtgctggagatgatcgcccaggccagaatcttccccagaggcagcggcgagatgatgaccagaagccccgtgaaggtgaccctgagcgagggcccccaccacgtggccctgttcaaggacagcagcagagagttcgacctgaccaaggaggaggacctggccgccctgagacacgagatcgagctgagaatgagaaagaacgtgaaggagggctgcaccgtgagccccgagaccatcagcctgaacgtgaagggccccggcctgcagagaatggtgctggtggacctgcccggcgtgatcaacaccgtgaccagcggcatggcccccgacaccaaggagaccatcttcagcatcagcaaggcctacatgcagaaccccaacgccatcatcctgtgcatccaggacggcagcgtggacgccgagagaagcatcgtgaccgacctggtgagccagatggacccccacggcagaagaaccatcttcgtgctgaccaaggtggacctggccgagaagaacgtggccagccccagcagaatccagcagatcatcgagggcaagctgttccccatgaaggccctgggctacttcgccgtggtgaccggcaagggcaacagcagcgagagcatcgaggccatcagagagtacgaggaggagttcttccagaacagcaagctgctgaagaccagcatgctgaaggcccaccaggtgaccaccagaaacctgagcctggccgtgagcgactgcttctggaagatggtgagagagagcgtggagcagcaggccgacagcttcaaggccaccagattcaacctggagaccgagtggaagaacaactaccccagactgagagagctggacagaaacgagctgttcgagaaggccaagaacgagatcctggacgaggtgatcagcctgagccaggtgacccccaagcactgggaggagatcctgcagcagagcctgtgggagagagtgagcacccacgtgatcgagaacatctacctgcccgccgcccagaccatgaacagcggcaccttcaacaccaccgtggacatcaagctgaagcagtggaccgacaagcagctgcccaacaaggccgtggaggtggcctgggagaccctgcaggaggagttcagcagattcatgaccgagcccaagggcaaggagcacgacgacatcttcgacaagctgaaggaggccgtgaaggaggagagcatcaagagacacaagtggaacgacttcgccgaggacagcctgagagtgatccagcacaacgccctggaggacagaagcatcagcgacaagcagcagtgggacgccgccatctacttcatggaggaggccctgcaggccagactgaaggacaccgagaacgccatcgagaacatggtgggccccgactggaagaagagatggctgtactggaagaacagaacccaggagcagtgcgtgcacaacgagaccaagaacgagctggagaagatgctgaagtgcaacgaggagcaccccgcctacctggccagcgacgagatcaccaccgtgagaaagaacctggagagcagaggcgtggaggtggaccccagcctgatcaaggacacctggcaccaggtgtacagaagacacttcctgaagaccgccctgaaccactgcaacctgtgcagaagaggcttctactactaccagagacacttcgtggacagcgagctggagtgcaacgacgtggtgctgttctggagaatccagagaatgctggccatcaccgccaacaccctgagacagcagctgaccaacaccgaggtgagaagactggagaagaacgtgaaggaggtgctggaggacttcgccgaggacggcgagaagaagatcaagctgctgaccggcaagagagtgcagctggccgaggacctgaagaaggtgagagagatccaggagaagctggacgccttcatcgaggccctgcaccaggagaagtag

SEQ ID NO: 91967 - DNA, 2937 bp, synthetic construct
  misc_feature 1..2937: note = Description of Artificial Sequence: Synthetic coding sequence
  source 1..2937: mol_type = other DNA
atgtggagactgagaagagccgccgtggcctgcgaggtgtgccagagcctggtgaagcacagcagcggcatcaagggcagcctgcccctgcagaagctgcacctggtgagcagaagcatctaccacagccaccaccccaccctgaagctgcagagaccccagctgagaaccagcttccagcagttcagcagcctgaccaacctgcccctgagaaagctgaagttcagccccatcaagtacggctaccagcccagaagaaacttctggcccgccagactggccaccagactgctgaagctgagatacctgatcctgggcagcgccgtgggcggcggctacaccgccaagaagaccttcgaccagtggaaggacatgatccccgacctgagcgagtacaagtggatcgtgcccgacatcgtgtgggagatcgacgagtacatcgacttcgagaagatcagaaaggccctgcccagcagcgaggacctggtgaagctggcccccgacttcgacaagatcgtggagagcctgagcctgctgaaggacttcttcaccagcggccacaagctggtgagcgaggtgatcggcgccagcgacctgctgctgctgctgggcagccccgaggagaccgccttcagagccaccgacagaggcagcgagagcgacaagcacttcagaaaggtgagcgacaaggagaagatcgaccagctgcaggaggagctgctgcacacccagctgaagtaccagagaatcctggagagactggagaaggagaacaaggagctgagaaagctggtgctgcagaaggacgacaagggcatccaccacagaaagctgaagaagagcctgatcgacatgtacagcgaggtgctggacgtgctgagcgactacgacgccagctacaacacccaggaccacctgcccagagtggtggtggtgggcgaccagagcgccggcaagaccagcgtgctggagatgatcgcccaggccagaatcttccccagaggcagcggcgagatgatgaccagaagccccgtgaaggtgaccctgagcgagggcccccaccacgtggccctgttcaaggacagcagcagagagttcgacctgaccaaggaggaggacctggccgccctgagacacgagatcgagctgagaatgagaaagaacgtgaaggagggctgcaccgtgagccccgagaccatcagcctgaacgtgaagggccccggcctgcagagaatggtgctggtggacctgcccggcgtgatcaacaccgtgaccagcggcatggcccccgacaccaaggagaccatcttcagcatcagcaaggcctacatgcagaaccccaacgccatcatcctgtgcatccaggacggcagcgtggacgccgagagaagcatcgtgaccgacctggtgagccagatggacccccacggcagaagaaccatcttcgtgctgaccaaggtggacctggccgagaagaacgtggccagccccagcagaatccagcagatcatcgagggcaagctgttccccatgaaggccctgggctacttcgccgtggtgaccggcaagggcaacagcagcgagagcatcgaggccatcagagagtacgaggaggagttcttccagaacagcaagctgctgaagaccagcatgctgaaggcccaccaggtgaccaccagaaacctgagcctggccgtgagcgactgcttctggaagatggtgagagagagcgtggagcagcaggccgacagcttcaaggccaccagattcaacctggagaccgagtggaagaacaactaccccagactgagagagctggacagaaacgagctgttcgagaaggccaagaacgagatcctggacgaggtgatcagcctgagccaggtgacccccaagcactgggaggagatcctgcagcagagcctgtgggagagagtgagcacccacgtgatcgagaacatctacctgcccgccgcccagaccatgaacagcggcaccttcaacaccaccgtggacatcaagctgaagcagtggaccgacaagcagctgcccaacaaggccgtggaggtggcctgggagaccctgcaggaggagttcagcagattcatgaccgagcccaagggcaaggagcacgacgacatcttcgacaagctgaaggaggccgtgaaggaggagagcatcaagagacacaagtggaacgacttcgccgaggacagcctgagagtgatccagcacaacgccctggaggacagaagcatcagcgacaagcagcagtgggacgccgccatctacttcatggaggaggccctgcaggccagactgaaggacaccgagaacgccatcgagaacatggtgggccccgactggaagaagagatggctgtactggaagaacagaacccaggagcagtgcgtgcacaacgagaccaagaacgagctggagaagatgctgaagtgcaacgaggagcaccccgcctacctggccagcgacgagatcaccaccgtgagaaagaacctggagagcagaggcgtggaggtggaccccagcctgatcaaggacacctggcaccaggtgtacagaagacacttcctgaagaccgccctgaaccactgcaacctgtgcagaagaggcttctactactaccagagacacttcgtggacagcgagctggagtgcaacgacgtggtgctgttctggagaatccagagaatgctggccatcaccgccaacaccctgagacagcagctgaccaacaccgaggtgagaagactggagaagaacgtgaaggaggtgctggaggacttcgccgaggacggcgagaagaagatcaagctgctgaccggcaagagagtgcagctggccgaggacctgaagaaggtgagagagatccaggagaagctggacgccttcatcgaggccctgcaccaggagaagtag

SEQ ID NO: 91968 - DNA, 2994 bp, synthetic construct
  misc_feature 1..2994: note = Description of Artificial Sequence: Synthetic coding sequence
  source 1..2994: mol_type = other DNA
atgtggagactgagaagagccgccgtggcctgcgaggtgtgccagagcctggtgaagcacagcagcggcatcaagggcagcctgcccctgcagaagctgcacctggtgagcagaagcatctaccacagccaccaccccaccctgaagctgcagagaccccagctgagaaccagcttccagcagttcagcagcctgaccaacctgcccctgagaaagctgaagttcagccccatcaagtacggctaccagcccagaagaaacttctggcccgccagactggccaccagactgctgaagctgagatacctgatcctgggcagcgccgtgggcggcggctacaccgccaagaagaccttcgaccagtggaaggacatgatccccgacctgagcgagtacaagtggatcgtgcccgacatcgtgtgggagatcgacgagtacatcgacttcgagaagatcagaaaggccctgcccagcagcgaggacctggtgaagctggcccccgacttcgacaagatcgtggagagcctgagcctgctgaaggacttcttcaccagcggcagccccgaggagaccgccttcagagccaccgacagaggcagcgagagcgacaagcacttcagaaagggcctgctgggcgagctgatcctgctgcagcagcagatccaggagcacgaggaggaggccagaagagccgccggccagtacagcaccagctacgcccagcagaagagaaaggtgagcgacaaggagaagatcgaccagctgcaggaggagctgctgcacacccagctgaagtaccagagaatcctggagagactggagaaggagaacaaggagctgagaaagctggtgctgcagaaggacgacaagggcatccaccacagaaagctgaagaagagcctgatcgacatgtacagcgaggtgctggacgtgctgagcgactacgacgccagctacaacacccaggaccacctgcccagagtggtggtggtgggcgaccagagcgccggcaagaccagcgtgctggagatgatcgcccaggccagaatcttccccagaggcagcggcgagatgatgaccagaagccccgtgaaggtgaccctgagcgagggcccccaccacgtggccctgttcaaggacagcagcagagagttcgacctgaccaaggaggaggacctggccgccctgagacacgagatcgagctgagaatgagaaagaacgtgaaggagggctgcaccgtgagccccgagaccatcagcctgaacgtgaagggccccggcctgcagagaatggtgctggtggacctgcccggcgtgatcaacaccgtgaccagcggcatggcccccgacaccaaggagaccatcttcagcatcagcaaggcctacatgcagaaccccaacgccatcatcctgtgcatccaggacggcagcgtggacgccgagagaagcatcgtgaccgacctggtgagccagatggacccccacggcagaagaaccatcttcgtgctgaccaaggtggacctggccgagaagaacgtggccagccccagcagaatccagcagatcatcgagggcaagctgttccccatgaaggccctgggctacttcgccgtggtgaccggcaagggcaacagcagcgagagcatcgaggccatcagagagtacgaggaggagttcttccagaacagcaagctgctgaagaccagcatgctgaaggcccaccaggtgaccaccagaaacctgagcctggccgtgagcgactgcttctggaagatggtgagagagagcgtggagcagcaggccgacagcttcaaggccaccagattcaacctggagaccgagtggaagaacaactaccccagactgagagagctggacagaaacgagctgttcgagaaggccaagaacgagatcctggacgaggtgatcagcctgagccaggtgacccccaagcactgggaggagatcctgcagcagagcctgtgggagagagtgagcacccacgtgatcgagaacatctacctgcccgccgcccagaccatgaacagcggcaccttcaacaccaccgtggacatcaagctgaagcagtggaccgacaagcagctgcccaacaaggccgtggaggtggcctgggagaccctgcaggaggagttcagcagattcatgaccgagcccaagggcaaggagcacgacgacatcttcgacaagctgaaggaggccgtgaaggaggagagcatcaagagacacaagtggaacgacttcgccgaggacagcctgagagtgatccagcacaacgccctggaggacagaagcatcagcgacaagcagcagtgggacgccgccatctacttcatggaggaggccctgcaggccagactgaaggacaccgagaacgccatcgagaacatggtgggccccgactggaagaagagatggctgtactggaagaacagaacccaggagcagtgcgtgcacaacgagaccaagaacgagctggagaagatgctgaagtgcaacgaggagcaccccgcctacctggccagcgacgagatcaccaccgtgagaaagaacctggagagcagaggcgtggaggtggaccccagcctgatcaaggacacctggcaccaggtgtacagaagacacttcctgaagaccgccctgaaccactgcaacctgtgcagaagaggcttctactactaccagagacacttcgtggacagcgagctggagtgcaacgacgtggtgctgttctggagaatccagagaatgctggccatcaccgccaacaccctgagacagcagctgaccaacaccgaggtgagaagactggagaagaacgtgaaggaggtgctggaggacttcgccgaggacggcgagaagaagatcaagctgctgaccggcaagagagtgcagctggccgaggacctgaagaaggtgagagagatccaggagaagctggacgccttcatcgaggccctgcaccaggagaagtag

SEQ ID NO: 91969 - DNA, 501 bp, synthetic construct
  misc_feature 1..501: note = Description of Artificial Sequence: Synthetic coding sequence
  source 1..501: mol_type = other DNA
atgtggagactgagaagagccgccgtggcctgcgaggtgtgccagagcctggtgaagcacagcagcggcatcaagggcagcctgcccctgcagaagctgcacctggtgagcagaagcatctaccacagccaccaccccaccctgaagctgcagagaccccagctgagaaccagcttccagcagttcagcagcctgaccaacctgcccctgagaaagctgaagttcagccccatcaagtacggctaccagcccagaagaaacttctggcccgccagactggccaccagactgctgaagctgagatacctgatcctgggcagcgccgtgggcggcggctacaccgccaagaagaccttcgaccagtggaaggacatgatccccgacctgagcgagtacaagtggatcgtgcccgacatcgtgtgggagatcgacgagtacatcgacttcggcagccccgaggagaccgccttcagagccaccgacagaggcagcgagagctag

SEQ ID NO: 91970 - DNA, 2883 bp, synthetic construct
  misc_feature 1..2883: note = Description of Artificial Sequence: Synthetic coding sequence
  source 1..2883: mol_type = other DNA
atgtggagactgagaagagccgccgtggcctgcgaggtgtgccagagcctggtgaagcacagcagcggcatcaagggcagcctgcccctgcagaagctgcacctggtgagcagaagcatctaccacagccaccaccccaccctgaagctgcagagaccccagctgagaaccagcttccagcagttcagcagcctgaccaacctgcccctgagaaagctgaagttcagccccatcaagtacggctaccagcccagaagaaacttctggcccgccagactggccaccagactgctgaagctgagatacctgatcctgggcagcgccgtgggcggcggctacaccgccaagaagaccttcgaccagtggaaggacatgatccccgacctgagcgagtacaagtggatcgtgcccgacatcgtgtgggagatcgacgagtacatcgacttcgagaagatcagaaaggccctgcccagcagcgaggacctggtgaagctggcccccgacttcgacaagatcgtggagagcctgagcctgctgaaggacttcttcaccagcggcagccccgaggagaccgccttcagagccaccgacagaggcagcgagagcgacaagcacttcagaaaggtgagcgacaaggagaagatcgaccagctgcaggaggagctgctgcacacccagctgaagtaccagagaatcctggagagactggagaaggagaacaaggagctgagaaagctggtgctgcagaaggacgacaagggcatccaccacagaaagctgaagaagagcctgatcgacatgtacagcgaggtgctggacgtgctgagcgactacgacgccagctacaacacccaggaccacctgcccagagtggtggtggtgggcgaccagagcgccggcaagaccagcgtgctggagatgatcgcccaggccagaatcttccccagaggcagcggcgagatgatgaccagaagccccgtgaaggtgaccctgagcgagggcccccaccacgtggccctgttcaaggacagcagcagagagttcgacctgaccaaggaggaggacctggccgccctgagacacgagatcgagctgagaatgagaaagaacgtgaaggagggctgcaccgtgagccccgagaccatcagcctgaacgtgaagggccccggcctgcagagaatggtgctggtggacctgcccggcgtgatcaacaccgtgaccagcggcatggcccccgacaccaaggagaccatcttcagcatcagcaaggcctacatgcagaaccccaacgccatcatcctgtgcatccaggacggcagcgtggacgccgagagaagcatcgtgaccgacctggtgagccagatggacccccacggcagaagaaccatcttcgtgctgaccaaggtggacctggccgagaagaacgtggccagccccagcagaatccagcagatcatcgagggcaagctgttccccatgaaggccctgggctacttcgccgtggtgaccggcaagggcaacagcagcgagagcatcgaggccatcagagagtacgaggaggagttcttccagaacagcaagctgctgaagaccagcatgctgaaggcccaccaggtgaccaccagaaacctgagcctggccgtgagcgactgcttctggaagatggtgagagagagcgtggagcagcaggccgacagcttcaaggccaccagattcaacctggagaccgagtggaagaacaactaccccagactgagagagctggacagaaacgagctgttcgagaaggccaagaacgagatcctggacgaggtgatcagcctgagccaggtgacccccaagcactgggaggagatcctgcagcagagcctgtgggagagagtgagcacccacgtgatcgagaacatctacctgcccgccgcccagaccatgaacagcggcaccttcaacaccaccgtggacatcaagctgaagcagtggaccgacaagcagctgcccaacaaggccgtggaggtggcctgggagaccctgcaggaggagttcagcagattcatgaccgagcccaagggcaaggagcacgacgacatcttcgacaagctgaaggaggccgtgaaggaggagagcatcaagagacacaagtggaacgacttcgccgaggacagcctgagagtgatccagcacaacgccctggaggacagaagcatcagcgacaagcagcagtgggacgccgccatctacttcatggaggaggccctgcaggccagactgaaggacaccgagaacgccatcgagaacatggtgggccccgactggaagaagagatggctgtactggaagaacagaacccaggagcagtgcgtgcacaacgagaccaagaacgagctggagaagatgctgaagtgcaacgaggagcaccccgcctacctggccagcgacgagatcaccaccgtgagaaagaacctggagagcagaggcgtggaggtggaccccagcctgatcaaggacacctggcaccaggtgtacagaagacacttcctgaagaccgccctgaaccactgcaacctgtgcagaagaggcttctactactaccagagacacttcgtggacagcgagctggagtgcaacgacgtggtgctgttctggagaatccagagaatgctggccatcaccgccaacaccctgagacagcagctgaccaacaccgaggtgagaagactggagaagaacgtgaaggaggtgctggaggacttcgccgaggacggcgagaagaagatcaagctgctgaccggcaagagagtgcagctggccgaggacctgaagaaggtgagagagatccaggagaagctggacgccttcatcgaggccctgcaccaggagaagtag

SEQ ID NO: 91971 - DNA, 558 bp, synthetic construct
  misc_feature 1..558: note = Description of Artificial Sequence: Synthetic coding sequence
  source 1..558: mol_type = other DNA
tgatacctgatcctgggcagcgccgtgggcggcggctacaccgccaagaagaccttcgaccagtggaaggacatgatccccgacctgagcgagtacaagtggatcgtgcccgacatcgtgtgggagatcgacgagtacatcgacttcgagaagatcagaaaggccctgcccagcagcgaggacctggtgaagctggcccccgacttcgacaagatcgtggagagcctgagcctgctgaaggacttcttcaccagcggccacaagctggtgagcgaggtgatcggcgccagcgacctgctgctgctgctgggcagccccgaggagaccgccttcagagccaccgacagaggcagcgagagcgacaagcacttcagaaaggtgagcgacaaggagaagatcgaccagctgcaggaggagctgctgcacacccagctgaagtaccagagaatcctggagagactggagaaggagaacaaggagctgagaaagctggtgctgcagaaggacgacaagggcatccaccacagaaagctgaagaagagcctgatcgacatgtag

SEQ ID NO: 91972 - DNA, 540 bp, synthetic construct
  misc_feature 1..540: note = Description of Artificial Sequence: Synthetic coding sequence
  source 1..540: mol_type = other DNA
atggtggtgggcgccttccccatggccaagctgctgtacctgggcatcagacaggtgagcaagcccctggccaacagaatcaaggaggccgccagaagaagcgagttcttcaagacctacatctgcctgccccccgcccagctgtaccactgggtggagatgagaaccaagatgagaatcatgggcttcagaggcaccgtgatcaagcccctgaacgaggaggccgccgccgagctgggcgccgagctgctgggcgaggccaccatcttcatcgtgggcggcggctgcctggtgctggagtactggagacaccaggcccagcagagacacaaggaggaggagcagagagccgcctggaacgccctgagagacgaggtgggccacctggccctggccctggaggccctgcaggcccaggtgcaggccgcccccccccagggcgccctggaggagctgagaaccgagctgcaggaggtgagagcccagctgtgcaaccccggcagaagcgccagccacgccgtgcccgccagcaagaagtag

SEQ ID NO: 91973 - DNA, 543 bp, synthetic construct
  misc_feature 1..543: note = Description of Artificial Sequence: Synthetic coding sequence
  source 1..543: mol_type = other DNA
atggtggtgggcgccttccccatggccaagctgctgtacctgggcatcagacaggtgagcaagcccctggccaacagaatcaaggaggccgccagaagaagcgagttcttcaagacctacatctgcctgccccccgcccagctgtaccactggctggagatgagaaccaagatgagaatcatgggcttcaacgccgccgccatcaagcccctgaacgagggcgccgccgccgagctgggcgccgagctgctgggcgagggcatcatcttcatcaccgcctgcagctgcctgatgctggagtactggagacaccagctgcagcagagaagaaaggagaaggagagaagagtggccagagaggccctgagaggcgaggtgggccacctgggcctggccctggaggagctgcaggcccaggtgcaggccaccagcacccagctggccctggaggagctgagagcccagctgcaggaggtgagagcccacctgtgcctgagagaccccccccccgccccccccgtggcccccgccagcgagaagtag

SEQ ID NO: 91974 - DNA, 381 bp, synthetic construct
  misc_feature 1..381: note = Description of Artificial Sequence: Synthetic coding sequence
  source 1..381: mol_type = other DNA
atgagaaccaagatgagaatcatgggcttcagaggcaccgtgatcaagcccctgaacgaggaggccgccgccgagctgggcgccgagctgctgggcgaggccaccatcttcatcgtgggcggcggctgcctggtgctggagtactggagacaccaggcccagcagagacacaaggaggaggagcagagagccgcctggaacgccctgagagacgaggtgggccacctggccctggccctggaggccctgcaggcccaggtgcaggccgcccccccccagggcgccctggaggagctgagaaccgagctgcaggaggtgagagcccagctgtgcaaccccggcagaagcgccagccacgccgtgcccgccagcaagaagtag

SEQ ID NO: 91975 - DNA, 1734 bp, synthetic construct
  misc_feature 1..1734: note = Description of Artificial Sequence: Synthetic coding sequence
  source 1..1734: mol_type = other DNA
atgagccaccagcccctgagctgcctgaccgagaaggaggacagccccagcgagagcaccggcaacggccccccccacctggcccaccccaacctggacaccttcacccccgaggagctgctgcagcagatgaaggagctgctgaccgagaaccaccagctgaaggaggccatgaagctgaacaaccaggccatgaagggcagattcgaggagctgagcgcctggaccgagaagcagaaggaggagagacagttcttcgagatccagagcaaggaggccaaggagagactgatggccctgagccacgagaacgagaagctgaaggaggagctgggcaagctgaagggcaagagcgagagaagcagcgaggaccccaccgacgacagcagactgcccagagccgaggccgagcaggagaaggaccagctgagaacccaggtggtgagactgcaggccgagaaggccgacctgctgggcatcgtgagcgagctgcagctgaagctgaacagcagcggcagcagcgaggacagcttcgtggagatcagaatggccgagggcgaggccgagggcagcgtgaaggagatcaagcacagccccggccccaccagaaccgtgagcaccggcaccgccctgagcaagtacagaagcagaagcgccgacggcgccaagaactacttcgagcacgaggagctgaccgtgagccagctgctgctgtgcctgagagagggcaaccagaaggtggagagactggaggtggccctgaaggaggccaaggagagagtgagcgacttcgagaagaagaccagcaacagaagcgagatcgagacccagaccgagggcagcaccgagaaggagaacgacgaggagaagggccccgagaccgtgggcagcgaggtggaggccctgaacctgcaggtgaccagcctgttcaaggagctgcaggaggcccacaccaagctgagcaaggccgagctgatgaagaagagactgcaggagaagtgccaggccctggagagaaagaacagcgccatccccagcgagctgaacgagaagcaggagctggtgtacaccaacaagaagctggagctgcaggtggagagcatgctgagcgagatcaagatggagcaggccaagaccgaggacgagaagagcaagctgaccgtgctgcagatgacccacaacaagctgctgcaggagcacaacaacgccctgaagaccatcgaggagctgaccagaaaggagagcgagaaggtggacagagccgtgctgaaggagctgagcgagaagctggagctggccgagaaggccctggccagcaagcagctgcagatggacgagatgaagcagaccatcgccaagcaggaggaggacctggagaccatgaccatcctgagagcccagatggaggtgtactgcagcgacttccacgccgagagagccgccagagagaagatccacgaggagaaggagcagctggccctgcagctggccgtgctgctgaaggagaacgacgccttcgaggacggcggcagacagagcctgatggagatgcagagcagacacggcgccagaaccagcgacagcgaccagcaggcctacctggtgcagagaggcgccgaggacagagactggagacagcagagaaacatccccatccacagctgccccaagtgcggcgaggtgctgcccgacatcgacaccctgcagatccacgtgatggactgcatcatctag

SEQ ID NO: 91976 - DNA, 1734 bp, synthetic construct; identical to SEQ ID NO: 91975
  misc_feature 1..1734: note = Description of Artificial Sequence: Synthetic coding sequence
  source 1..1734: mol_type = other DNA

SEQ ID NO: 91977 - DNA, 1734 bp, synthetic construct; identical to SEQ ID NO: 91975
  misc_feature 1..1734: note = Description of Artificial Sequence: Synthetic coding sequence
  source 1..1734: mol_type = other DNA

SEQ ID NO: 91978 - DNA, 1716 bp, synthetic construct
  misc_feature 1..1716: note = Description of Artificial Sequence: Synthetic coding sequence
  source 1..1716: mol_type = other DNA
atgagccaccagcccctgagctgcctgaccgagaaggaggacagccccagcgagagcaccggcaacggccccccccacctggcccaccccaacctggacaccttcacccccgaggagctgctgcagcagatgaaggagctgctgaccgagaaccaccagctgaaggaggccatgaagctgaacaaccaggccatgaagggcagattcgaggagctgagcgcctggaccgagaagcagaaggaggagagacagttcttcgagatccagagcaaggaggccaaggagagactgatggccctgagccacgagaacgagaagctgaaggaggagctgggcaagctgaagggcaagagcgagagaagcagcgaggaccccaccgacgacagcagactgcccagagccgaggccgagcaggagaaggaccagctgagaacccaggtggtgagactgcaggccgagaaggccgacctgctgggcatcgtgagcgagctgcagctgaagctgaacagcagcggcagcagcgaggacagcttcgtggagatcagaatggccgagggcgaggccgagggcagcgtgaaggagatcaagcacagccccggccccaccagaaccgtgagcaccggcaccagcagaagcgccgacggcgccaagaactacttcgagcacgaggagctgaccgtgagccagctgctgctgtgcctgagagagggcaaccagaaggtggagagactggaggtggccctgaaggaggccaaggagagagtgagcgacttcgagaagaagaccagcaacagaagcgagatcgagacccagaccgagggcagcaccgagaaggagaacgacgaggagaagggccccgagaccgtgggcagcgaggtggaggccctgaacctgcaggtgaccagcctgttcaaggagctgcaggaggcccacaccaagctgagcaaggccgagctgatgaagaagagactgcaggagaagtgccaggccctggagagaaagaacagcgccatccccagcgagctgaacgagaagcaggagctggtgtacaccaacaagaagctggagctgcaggtggagagcatgctgagcgagatcaagatggagcaggccaagaccgaggacgagaagagcaagctgaccgtgctgcagatgacccacaacaagctgctgcaggagcacaacaacgccctgaagaccatcgaggagctgaccagaaaggagagcgagaaggtggacagagccgtgctgaaggagctgagcgagaagctggagctggccgagaaggccctggccagcaagcagctgcagatggacgagatgaagcagaccatcgccaagcaggaggaggacctggagaccatgaccatcctgagagcccagatggaggtgtactgcagcgacttccacgccgagagagccgccagagagaagatccacgaggagaaggagcagctggccctgcagctggccgtgctgctgaaggagaacgacgccttcgaggacggcggcagacagagcctgatggagatgcagagcagacacggcgccagaaccagcgacagcgaccagcaggcctacctggtgcagagaggcgccgaggacagagactggagacagcagagaaacatccccatccacagctgccccaagtgcggcgaggtgctgcccgacatcgacaccctgcagatccacgtgatggactgcatcatctag

SEQ ID NO: 91979 - DNA, 1734 bp, synthetic construct; identical to SEQ ID NO: 91975
  misc_feature 1..1734: note = Description of Artificial Sequence: Synthetic coding sequence
  source 1..1734: mol_type = other DNA

SEQ ID NO: 91980 - DNA, 1716 bp, synthetic construct; identical to SEQ ID NO: 91978
  misc_feature 1..1716: note = Description of Artificial Sequence: Synthetic coding sequence
  source 1..1716: mol_type = other DNA

SEQ ID NO: 91981 - DNA, 381 bp, synthetic construct
  misc_feature 1..381: note = Description of Artificial Sequence: Synthetic coding sequence
  source 1..381: mol_type = other DNA
tgaggcgaggccgagggcagcgtgaaggagatcaagcacagccccggccccaccagaaccgtgagcaccggcaccgccctgagcaagtacagaagcagaagcgccgacggcgccaagaactacttcgagcacgaggagctgaccgtgagccagctgctgctgtgcctgagagagggcaaccagaaggtggagagactggaggtggccctgaaggaggccaaggagagagtgagcgacttcgagaagaagaccagcaacagaagcgagatcgagacccagaccgagggcagcaccgagaaggagaacgacgaggagaagggccccgagaccaccggcttccaccacgtgggccaggacggcctggacctgctgaccagctag

SEQ ID NO: 91982 - DNA, 444 bp, synthetic construct
  misc_feature 1..444: note = Description of Artificial Sequence: Synthetic coding sequence
  source 1..444: mol_type = other DNA
atgaagctgaacaaccaggccatgaagggcagattcgaggagctgagcgcctggaccgagaagcagaaggaggagagacagttcttcgagatccagagcaaggaggccaaggagagactgatggccctgagccacgagaacgagaagctgaaggaggagctgggcaagctgaagggcaagagcgagagaagcagcgaggaccccaccgacgacagcagactgcccagagccgaggccgagcaggagaaggaccagctgagaacccaggtggtgagactgcaggccgagaaggccgacctgctgggcatcgtgagcgagctgcagctgaagctgaacagcagcggcagcagcgaggacagcttcgtggagatcagaatggccgagggcgaggccgagggcagcgtgaaggagatcaagcacagccccggccccaccagaacctag

SEQ ID NO: 91983 - DNA, 912 bp, synthetic construct
  misc_feature 1..912: note = Description of Artificial Sequence: Synthetic coding sequence
  source 1..912: mol_type = other DNA
atgcaccccgagcccgcccccccccccagcagaagcagccccgagctgccccccagcggcggcagcaccaccagcggcagcagaagaagcagaagaagaagcggcgacggcgagccccccggcgcccccccccccccccccccccccagcgccgtgacctaccccgactggatcggccagagctacagcgaggtgatgagcctgaacgagcacagcatgcaggccctgagctggagaaagctgtacctgagcagagccaagctgaaggccagcagcagaaccagcgccctgctgagcggcttcgccatggtggccatggtggaggtgcagctggacgccgaccacgactacccccccggcctgctgatcgccttcagcgcctgcaccaccgtgctggtggccgtgcacctgttcgccctgatgatcagcacctgcatcctgcccaacatcgaggccgtgagcaacgtgcacaacctgaacagcgtgaaggagagcccccacgagagaatgcacagacacatcgagctggcctgggccttcagcaccgtgatcggcaccctgctgttcctggccgaggtggtgctgctgtgctgggtgaagttcctgcccctgaagaagcagcccggccagcccagacccaccagcaagccccccgccagcggcgccgccgccaacgtgagcaccagcggcatcacccccggccaggccgccgccatcgccagcaccaccatcatggtgcccttcggcctgatcttcatcgtgttcgccgtgcacttctacagaagcctggtgagccacaagaccgacagacagttccaggagctgaacgagctggccgagttcgccagactgcaggaccagctggaccacagaggcgaccaccccctgacccccggcagccactacgcctag

SEQ ID NO: 91984 - DNA, 765 bp, synthetic construct
  misc_feature 1..765: note = Description of Artificial Sequence: Synthetic coding sequence
  source 1..765: mol_type = other DNA
atgagcgccgagctgaacgtgcccatcgaccccagcgcccccgcctgccccgagcccggccacaagggcatggactacagagactgggtgagaagaagctacctggagctggtgaccagcaaccaccacagcgtgcaggccctgagctggagaaagctgtacctgagcagagccaagctgaaggccagcagcagaaccagcgccctgctgagcggcttcgccatggtggccatggtggaggtgcagctggagacccagtaccagtaccccagacccctgctgatcgccttcagcgcctgcaccaccgtgctggtggccgtgcacctgttcgccctgctgatcagcacctgcatcctgcccaacgtggaggccgtgagcaacatccacaacctgaacagcatcagcgagagcccccacgagagaatgcacccctacatcgagctggcctggggcttcagcaccgtgctgggcatcctgctgttcctggccgaggtggtgctgctgtgctggatcaagttcctgcccgtggacgccagaagacagcccggccccccccccggccccggcagccacaccggctggcaggccgccctggtgagcaccatcatcatggtgcccgtgggcctgatcttcgtggtgttcaccatccacttctacagaagcctggtgagacacaagaccgagagacacaacagagagatcgaggagctgcacaagctgaaggtgcagctggacggccacgagagaagcctgcaggtgctgtag

SEQ ID NO: 91985 - DNA, 765 bp, synthetic construct; identical to SEQ ID NO: 91984
  misc_feature 1..765: note = Description of Artificial Sequence: Synthetic coding sequence
  source 1..765: mol_type = other DNA

SEQ ID NO: 91986 - DNA, 639 bp, synthetic construct
  misc_feature 1..639: note = Description of Artificial Sequence: Synthetic coding sequence
  source 1..639: mol_type = other DNA
atgagcgccgagctgaacgtgcccatcgaccccagcgcccccgcctgccccgagcccggccacaagggcatggactacagagactgggtgagaagaagctacctggagctggtgaccagcaaccaccacagcgtgcaggccctgagctggagaaagctgtacctgagcagagccaagctgaaggccagcagcagaaccagcgccctgctgagcggcttcgccatggtggccatggtggaggtgcagctggagacccagtaccagtaccccagacccctgctgatcgccttcagcgcctgcaccaccgtgctggtggccgtgcacctgttcgccctgctgatcagcacctgcatcctgcccaacgtggaggccgtgagcaacatccacaacctgaacagcatcagcgagagcccccacgagagaatgcacccctacatcgagctggcctggggcttcagcaccgtgctgggcatcctgctgttcctggccgaggtggtgctgctgtgctggatcaagttcctgcccgtggacgccagaagacagcccggccccccccccggccccggcagccacaccggctggcaggccgccctggtgagcaccatcatcatggtgcccgtgggcctgatcttcgtgtag

SEQ ID NO: 91987 - DNA, 765 bp, synthetic construct; identical to SEQ ID NO: 91984
  misc_feature 1..765: note = Description of Artificial Sequence: Synthetic coding sequence
  source 1..765: mol_type = other DNA

SEQ ID NO: 91988 - DNA, 765 bp, synthetic construct; identical to SEQ ID NO: 91984
  misc_feature 1..765: note = Description of Artificial Sequence: Synthetic coding sequence
  source 1..765: mol_type = other DNA

SEQ ID NO: 91989 - DNA, 93 bp, synthetic construct
  misc_feature 1..93: note = Description of Artificial Sequence: Synthetic coding sequence
  source 1..93: mol_type = other DNA
atgagcgccgagctgaacgtgcccatcgaccccagcgcccccgcctgccccgagcccggccacaagggcatggactacagagactgggtgtag

SEQ ID NO: 91990 - DNA, 690 bp, synthetic construct
  misc_feature 1..690: note = Description of Artificial Sequence: Synthetic coding sequence
  source 1..690: mol_type = other DNA
atgagcgccgagctgaacgtgcccatcgaccccagcgcccccgcctgccccgagcccggccacaagggcatggactacagagactgggtgagaagaagctacctggagctggtgaccagcaaccaccacagcgtgcaggccctgagctggagaaagctgtacctgagcagagccaagctgaaggccagcagcagaaccagcgccctgctgagcggcttcgccatggtggccatggtggaggtgcagctggagacccagtaccagtaccccagacccctgctgatcgccttcagcgcctgcaccaccgtgctggtggccgtgcacctgttcgccctgctgatcagcacctgcatcctgcccaacgtggaggccgtgagcaacatccacaacctgaacagcatcagcgagagcccccacgagagaatgcacccctacatcgagctggcctggggcttcagcaccgtgctgggcatcctgctgttcctggccgaggtggtgctgctgtgctggatcaagttcctgcccgtggacgccagaagacagcccggccccccccccggccccggcagccacaccggctggcaggccgccctggtgagcaccatcatcatggtgcccgtgggcctgatcttcgtggtgttcaccatccacttctacagaagcctggtgagacacaagaccgagagatag

SEQ ID NO: 91991 - DNA, 294 bp, synthetic construct
  misc_feature 1..294: note = Description of Artificial Sequence: Synthetic coding sequence
  source 1..294: mol_type = other DNA
atgagcgccgagctgaacgtgcccatcgaccccagcgcccccgcctgccccgagcccggccacaagggcatggactacagagactgggtgagaagaagctacctggagctggtgaccagcaaccaccacagcgtgcaggccctgagctggagaaagctgtacctgagcagagccaagctgaaggccagcagcagaaccagcgccctgctgagcggcttcgccatggtggccatggtggaggtgcagctggagacccagtaccagtaccccagacccctgctgatcgccttctag

SEQ ID NO: 91992 - DNA, 888 bp, synthetic construct
  misc_feature 1..888: note = Description of Artificial Sequence: Synthetic coding sequence
  source 1..888: mol_type = other DNA
atgaagggcggcgagggcgacgccggcgagcaggcccccctgaaccccgagggcgagagccccgccggcagcgccacctacagagagttcgtgcacagaggctacctggacctgatgggcgccagccagcacagcctgagagccctgagctggagaagactgtacctgagcagagccaagctgaaggccagcagcagaaccagcgccctgctgagcggcttcgccatggtggccatggtggaggtgcagctggagagcgaccacgagtacccccccggcctgctggtggccttcagcgcctgcaccaccgtgctggtggccgtgcacctgttcgccctgatggtgagcacctgcctgctgccccacatcgaggccgtgagcaacatccacaacctgaacagcgtgcaccagagcccccaccagagactgcacagatacgtggagctggcctggggcttcagcaccgccctgggcaccttcctgttcctggccgaggtggtgctggtgggctgggtgaagttcgtgcccatcggcgcccccctggacacccccacccccatggtgcccaccagcagagtgcccggcaccctggcccccgtggccaccagcctgagccccgccagcaacctgcccagaagcagcgccagcgccgcccccagccaggccgagcccgcctgcccccccagacaggcctgcggcggcggcggcgcccacggccccggctggcaggccgccatggccagcaccgccatcatggtgcccgtgggcctggtgttcgtggccttcgccctgcacttctacagaagcctggtggcccacaagaccgacagatacaagcaggagctggaggagctgaacagactgcagggcgagctgcaggccgtgtag

SEQ ID NO: 91993 - DNA, 822 bp, synthetic construct
  misc_feature 1..822: note = Description of Artificial Sequence: Synthetic coding sequence
  source 1..822: mol_type = other DNA
atgaagggcggcgagggcgacgccggcgagcaggcccccctgaaccccgagggcgagagccccgccggcagcgccacctacagagagttcgtgcacagaggctacctggacctgatgggcgccagccagcacagcctgagagccctgagctggagaagactgtacctgagcagagccaagctgaaggccagcagcagaaccagcgccctgctgagcggcttcgccatggtggccatggtggaggtgcagctggagagcgaccacgagtacccccccggcctgctggtggccttcagcgcctgcaccaccgtgctggtggccgtgcacctgttcgccctgatggtgagcacctgcctgctgccccacatcgaggccgtgagcaacatccacaacctgaacagcgtgcaccagagcccccaccagagactgcacagatacgtggagctggcctggggcttcagcaccgccctgggcaccttcctgttcctggccgaggtggtgctggtgggctgggtgaagttcgtgcccatcggcgcccccctggacacccccacccccatggtgcccaccagcagagtgcccggcaccctggcccccgtggccaccagcctgagccccgccagcaacctgcccagaagcagcgccagcgccgcccccagccaggccgagcccgcctgcccccccagacaggcctgcggcggcggcggcgcccacggccccggctggcaggccgccatggccagcaccttccccggcatcttccccatcagcctgagcctgggcttctgcaagctgctgtgcacctgggccggcctgagctag

SEQ ID NO: 91994 - DNA, 414 bp, synthetic construct
  misc_feature 1..414: note = Description of Artificial Sequence: Synthetic coding sequence
  source 1..414: mol_type = other DNA
atggccggcagccaggacatcttcgacgccatcgtgatggccgacgagagattccacggcgagggctacagagagggctacgaggagggcagcagcctgggcgtgatggagggcagacagcacggcaccctgcacggcgccaagatcggcagcgagatcggctgctaccagggcttcgccttcgcctggaagtgcctgctgcacagctgcaccaccgagaaggacagcagaaagatgaaggtgctggagagcctgatcggcatgatccagaagttcccctacgacgaccccacctacgacaagctgcacgaggacctggacaagatcagaggcaagttcaagcagttctgcagcctgctgaacgtgcagcccgacttcaagatcagcgccgagggcagcggcctgagcttctag

SEQ ID NO: 91995 - DNA, 666 bp, synthetic construct
  misc_feature 1..666: note = Description of Artificial Sequence: Synthetic coding sequence
  source 1..666: mol_type = other DNA
atggccggcagccaggacatcttcgacgccatcgtgatggccgacgagagattccacggcgagggctacagagagggctacgaggagggcagcagcctgggcgtgatggagggcagacagcacggcaccctgcacggcgccaagatcggcagcgagatcggctgctaccagggcttcgccttcgcctggaagtgcctgctgcacagctgcaccaccgagaaggacagcagaaagatgaaggtgctggagagcctgatcggcatgatccagaagttcccctacgacgaccccacctacgacaagctgcacgaggacctggacaagatcagaggcaagttcaagcagaccggcctgagccccagcgccgtgatggtgagaccccccagctacgtggagctgcccgtgacctgctggtgctgggaggcccccagatgcaaccagaagtgcaccgaccccgccgccagaagacccgacccccagacctgcgccagccaggacagactgagatgcgccccctgcacctgccaccagcccctggccagcagatacacccagcaccccggcctggtgcccctgccccaccacgacagacagagcgtgccccagggccccagagtggtgcagaccgacgccgccgccagaatggtggagcagcagaccatgtag

SEQ ID NO: 91996 - DNA, 414 bp, synthetic construct; identical to SEQ ID NO: 91994
  misc_feature 1..414: note = Description of Artificial Sequence: Synthetic coding sequence
  source 1..414: mol_type = other DNA

SEQ ID NO: 91997 - DNA, 237 bp, synthetic construct
  misc_feature 1..237: note = Description of Artificial Sequence: Synthetic coding sequence
  source 1..237: mol_type = other DNA
atggccggcagccaggacatcttcgacgccatcgtgatggccgacgagagcagaaagatgaaggtgctggagagcctgatcggcatgatccagaagttcccctacgacgaccccacctacgacaagctgcacgaggacctggacaagatcagaggcaagttcaagcagttctgcagcctgctgaacgtgcagcccgacttcaagatcagcgccgagggcagcggcctgagcttctag

SEQ ID NO: 91998 - DNA, 3039 bp, synthetic construct
  misc_feature 1..3039: note = Description of Artificial Sequence: Synthetic coding sequence
  source 1..3039: mol_type = other DNA
atgatggcccagagcaacatgttcaccgtggccgacgtgctgagccaggacgagctgagaaagaagctgtaccagaccttcaaggacagaggcatcctggacaccctgaagacccagctgagaaaccagctgatccacgagctgatgcaccccgtgctgagcggcgagctgcagcccagaagcatcagcgtggagggcagcagcctgctgatcggcgccagcaacagcctggtggccgaccacctgcagagatgcggctacgagtacagcctgagcgtgttcttccccgagagcggcctggccaaggagaaggtgttcaccatgcaggacctgctgcagctgatcaagatcaaccccaccagcagcctgtacaagagcctggtgagcggcagcgacaaggagaaccagaagggcttcctgatgcacttcctgaaggagctggccgagtaccaccaggccaaggagagctgcaacatggagacccagaccagcagcaccttcaacagagacagcctggccgagaagctgcagctgatcgacgaccagttcgccgacgcctacccccagagaatcaagttcgagagcctggagatcaagctgaacgagtacaagagagagatcgaggagcagctgagagccgagatgtgccagaagctgaagttcttcaaggacaccgagatcgccaagatcaagatggaggccaagaagaagtacgagaaggagctgaccatgttccagaacgacttcgagaaggcctgccaggccaagagcgaggccctggtgctgagagagaagagcaccctggagagaatccacaagcaccaggagatcgagaccaaggagatctacgcccagagacagctgctgctgaaggacatggacctgctgagaggcagagaggccgagctgaagcagagagtggaggccttcgagctgaaccagaagctgcaggaggagaagcacaagagcatcaccgaggccctgagaagacaggagcagaacatcaagagcttcgaggagacctacgacagaaagctgaagaacgagctgctgaagtaccagctggagctgaaggacgactacatcatcagaaccaacagactgatcgaggacgagagaaagaacaaggagaaggccgtgcacctgcaggaggagctgatcgccatcaacagcaagaaggaggagctgaaccagagcgtgaacagagtgaaggagctggagctggagctggagagcgtgaaggcccagagcctggccatcaccaagcagaaccacatgctgaacgagaaggtgaaggagatgagcgactacagcctgctgaaggaggagaagctggagctgctggcccagaacaagctgctgaagcagcagctggaggagagcagaaacgagaacctgagactgctgaacagactggcccagcccgcccccgagctggccgtgttccagaaggagctgagaaaggccgagaaggccatcgtggtggagcacgaggagttcgagagctgcagacaggccctgcacaagcagctgcaggacgagatcgagcacagcgcccagctgaaggcccagatcctgggctacaaggccagcgtgaagagcctgaccacccaggtggccgacctgaagctgcagctgaagcagacccagaccgccctggagaacgaggtgtactgcaaccccaagcagagcgtgatcgacagaagcgtgaacggcctgatcaacggcaacgtggtgccctgcaacggcgagatcagcggcgacttcctgaacaaccccttcaagcaggagaacgtgctggccagaatggtggccagcagaatcaccaactaccccaccgcctgggtggagggcagcagccccgacagcgacctggagttcgtggccaacaccaaggccagagtgaaggagctgcagcaggaggccgagagactggagaaggccttcagaagctaccacagaagagtgatcaagaacagcgccaagagccccctggccgccaagagcccccccagcctgcacctgctggaggccttcaagaacatcaccagcagcagccccgagagacacatcttcggcgaggacagagtggtgagcgagcagccccaggtgggcaccctggaggagagaaacgacgtggtggaggccctgaccggcagcgccgccagcagactgagaggcggcaccagcagcagaagactgagcagcacccccctgcccaaggccaagagaagcctggagagcgagatgtacctggagggcctgggcagaagccacatcgccagccccagcccctgccccgacagaatgcccctgcccagccccaccgagagcagacacagcctgagcatcccccccgtgagcagcccccccgagcagaaggtgggcctgtacagaagacagaccgagctgcaggacaagagcgagttcagcgacgtggacaagctggccttcaaggacaacgaggagttcgagagcagcttcgagagcgccggcaacatgcccagacagctggagatgggcggcctgagccccgccggcgacatgagccacgtggacgccgccgccgccgccgtgcccctgagctaccagcaccccagcgtggaccagaagcagatcgaggagcagaaggaggaggagaagatcagagagcagcaggtgaaggagagaagacagagagaggagagaagacagagcaacctgcaggaggtgctggagagagagagaagagagctggagaagctgtaccaggagagaaagatgatcgaggagagcctgaagatcaagatcaagaaggagctggagatggagaacgagctggagatgagcaaccaggagatcaaggacaagagcgcccacagcgagaaccccctggagaagtacatgaagatcatccagcaggagcaggaccaggagagcgccgacaagagcagcaagaagatggtgcaggagggcagcctggtggacaccctgcagagcagcgacaaggtggagagcctgaccggcttcagccacgaggagctggacgacagctggtag

SEQ ID NO: 91999 - DNA, 2919 bp, synthetic construct
  misc_feature 1..2919: note = Description of Artificial Sequence: Synthetic coding sequence
  source 1..2919: mol_type = other DNA
atgatggcccagagcaacatgttcaccgtggccgacgtgctgagccaggacgagctgagaaagaagctgtaccagaccttcaaggacagaggcatcctggacaccctgaagacccagctgagaaaccagctgatccacgagctgatgcaccccgtgctgagcggcgagctgcagcccagaagcatcagcgtggagggcagcagcctgctgatcggcgccagcaacagcctggtggccgaccacctgcagagatgcggctacgagtacagcctgagcgtgttcttccccgagagcggcctggccaaggagaaggtgttcaccatgcaggacctgctgcagctgatcaagatcaaccccaccagcagcctgtacaagagcctggtgagcggcagcgacaaggagaaccagaagggcttcctgatgcacttcctgaaggagctggccgagtaccaccaggccaaggagagctgcaacatggagacccagaccagcagcaccttcaacagagacagcctggccgagaagctgcagctgatcgacgaccagttcgccgacgcctacccccagagaatcaagttcgagagcctggagatcaagctgaacgagtacaagagagagatcgaggagcagctgagagccgagatgtgccagaagctgaagttcttcaaggacaccgagatcgccaagatcaagatggaggccaagaagaagtacgagaaggagctgaccatgttccagaacgacttcgagaaggcctgccaggccaagagcgaggccctggtgctgagagagaagagcaccctggagagaatccacaagcaccaggagatcgagaccaaggagatctacgcccagagacagctgctgctgaaggacatggacctgctgagaggcagagaggccgagctgaagcagagagtggaggccttcgagctgtaccagctggagctgaaggacgactacatcatcagaaccaacagactgatcgaggacgagagaaagaacaaggagaaggccgtgcacctgcaggaggagctgatcgccatcaacagcaagaaggaggagctgaaccagagcgtgaacagagtgaaggagctggagctggagctggagagcgtgaaggcccagagcctggccatcaccaagcagaaccacatgctgaacgagaaggtgaaggagatgagcgactacagcctgctgaaggaggagaagctggagctgctggcccagaacaagctgctgaagcagcagctggaggagagcagaaacgagaacctgagactgctgaacagactggcccagcccgcccccgagctggccgtgttccagaaggagctgagaaaggccgagaaggccatcgtggtggagcacgaggagttcgagagctgcagacaggccctgcacaagcagctgcaggacgagatcgagcacagcgcccagctgaaggcccagatcctgggctacaaggccagcgtgaagagcctgaccacccaggtggccgacctgaagctgcagctgaagcagacccagaccgccctggagaacgaggtgtactgcaaccccaagcagagcgtgatcgacagaagcgtgaacggcctgatcaacggcaacgtggtgccctgcaacggcgagatcagcggcgacttcctgaacaaccccttcaagcaggagaacgtgctggccagaatggtggccagcagaatcaccaactaccccaccgcctgggtggagggcagcagccccgacagcgacctggagttcgtggccaacaccaaggccagagtgaaggagctgcagcaggaggccgagagactggagaaggccttcagaagctaccacagaagagtgatcaagaacagcgccaagagccccctggccgccaagagcccccccagcctgcacctgctggaggccttcaagaacatcaccagcagcagccccgagagacacatcttcggcgaggacagagtggtgagcgagcagccccaggtgggcaccctggaggagagaaacgacgtggtggaggccctgaccggcagcgccgccagcagactgagaggcggcaccagcagcagaagactgagcagcacccccctgcccaaggccaagagaagcctggagagcgagatgtacctggagggcctgggcagaagccacatcgccagccccagcccctgccccgacagaatgcccctgcccagccccaccgagagcagacacagcctgagcatcccccccgtgagcagcccccccgagcagaaggtgggcctgtacagaagacagaccgagctgcaggacaagagcgagttcagcgacgtggacaagctggccttcaaggacaacgaggagttcgagagcagcttcgagagcgccggcaacatgcccagacagctggagatgggcggcctgagccccgccggcgacatgagccacgtggacgccgccgccgccgccgtgcccctgagctaccagcaccccagcgtggaccagaagcagatcgaggagcagaaggaggaggagaagatcagagagcagcaggtgaaggagagaagacagagagaggagagaagacagagcaacctgcaggaggtgctggagagagagagaagagagctggagaagctgtaccaggagagaaagatgatcgaggagagcctgaagatcaagatcaagaaggagctggagatggagaacgagctggagatgagcaaccaggagatcaaggacaagagcgcccacagcgagaaccccctggagaagtacatgaagatcatccagcaggagcaggaccaggagagcgccgacaagagcagcaagaagatggtgcaggagggcagcctggtggacaccctgcagagcagcgacaaggtggagagcctgaccggcttcagccacgaggagctggacgacagctggtag

SEQ ID NO: 92000 - DNA, 2619 bp, synthetic construct
  misc_feature 1..2619: note = Description of Artificial Sequence: Synthetic coding sequence
  source 1..2619: mol_type = other DNA
atgcacttcctgaaggagctggccgagtaccaccaggccaaggagagctgcaacatggagacccagaccagcagcaccttcaacagagacagcctggccgagaagctgcagctgatcgacgaccagttcgccgacgcctacccccagagaatcaagttcgagagcctggagatcaagctgaacgagtacaagagagagatcgaggagcagctgagagccgagatgtgccagaagctgaagttcttcaaggacaccgagatcgccaagatcaagatggaggccaagaagaagtacgagaaggagctgaccatgttccagaacgacttcgagaaggcctgccaggccaagagcgaggccctggtgctgagagagaagagcaccctggagagaatccacaagcaccaggagatcgagaccaaggagatctacgcccagagacagctgctgctgaaggacatggacctgctgagaggcagagaggccgagctgaagcagagagtggaggccttcgagctgaaccagaagctgcaggaggagaagcacaagagcatcaccgaggccctgagaagacaggagcagaacatcaagagcttcgaggagacctacgacagaaagctgaagaacgagctgctgaagtaccagctggagctgaaggacgactacatcatcagaaccaacagactgatcgaggacgagagaaagaacaaggagaaggccgtgcacctgcaggaggagctgatcgccatcaacagcaagaaggaggagctgaaccagagcgtgaacagagtgaaggagctggagctggagctggagagcgtgaaggcccagagcctggccatcaccaagcagaaccacatgctgaacgagaaggtgaaggagatgagcgactacagcctgctgaaggaggagaagctggagctgctggcccagaacaagctgctgaagcagcagctggaggagagcagaaacgagaacctgagactgctgaacagactggcccagcccgcccccgagctggccgtgttccagaaggagctgagaaaggccgagaaggccatcgtggtggagcacgaggagttcgagagctgcagacaggccctgcacaagcagctgcaggacgagatcgagcacagcgcccagctgaaggcccagatcctgggctacaaggccagcgtgaagagcctgaccacccaggtggccgacctgaagctgcagctgaagcagacccagaccgccctggagaacgaggtgtactgcaaccccaagcagagcgtgatcgacagaagcgtgaacggcctgatcaacggcaacgtggtgccctgcaacggcgagatcagcggcgacttcctgaacaaccccttcaagcaggagaacgtgctggccagaatggtggccagcagaatcaccaactaccccaccgcctgggtggagggcagcagccccgacagcgacctggagttcgtggccaacaccaaggccagagtgaaggagctgcagcaggaggccgagagactggagaaggccttcagaagctaccacagaagagtgatcaagaacagcgccaagagccccctggccgccaagagcccccccagcctgcacctgctggaggccttcaagaacatcaccagcagcagccccgagagacacatcttcggcgaggacagagtggtgagcgagcagccccaggtgggcaccctggaggagagaaacgacgtggtggaggccctgaccggcagcgccgccagcagactgagaggcggcaccagcagcagaagactgagcagcacccccctgcccaaggccaagagaagcctggagagcgagatgtacctggagggcctgggcagaagccacatcgccagccccagcccctgccccgacagaatgcccctgcccagccccaccgagagcagacacagcctgagcatcccccccgtgagcagcccccccgagcagaaggtgggcctgtacagaagacagaccgagctgcaggacaagagcgagttcagcgacgtggacaagctggccttcaaggacaacgaggagttcgagagcagcttcgagagcgccggcaacatgcccagacagctggagatgggcggcctgagccccgccggcgacatgagccacgtggacgccgccgccgccgccgtgcccctgagctaccagcaccccagcgtggaccagaagcagatcgaggagcagaaggaggaggagaagatcagagagcagcaggtgaaggagagaagacagagagaggagagaagacagagcaacctgcaggaggtgctggagagagagagaagagagctggagaagctgtaccaggagagaaagatgatcgaggagagcctgaagatcaagatcaagaaggagctggagatggagaacgagctggagatgagcaaccaggagatcaaggacaagagcgcccacagcgagaaccccctggagaagtacatgaagatcatccagcaggagcaggaccaggagagcgccgacaagagcagcaagaagatggtgcaggagggcagcctggtggacaccctgcagagcagcgacaaggtggagagcctgaccggcttcagccacgaggagctggacgacagctggtag

SEQ ID NO: 92001 - DNA, 1104 bp, synthetic construct
  misc_feature 1..1104: note = Description of Artificial Sequence: Synthetic coding sequence
  source 1..1104: mol_type = other DNA
atgatggcccagagcaacatgttcaccgtggccgacgtgctgagccaggacgagctgagaaagaagctgtaccagaccttcaaggacagaggcatcctggacaccctgaagacccagctgagaaaccagctgatccacgagctgatgcaccccgtgctgagcggcgagctgcagcccagaagcatcagcgtggagggcagcagcctgctgatcggcgccagcaacagcctggtggccgaccacctgcagagatgcggctacgagtacagcctgagcgtgttcttccccgagagcggcctggccaaggagaaggtgttcaccatgcaggacctgctgcagctgatcaagatcaaccccaccagcagcctgtacaagagcctggtgagcggcagcgacaaggagaaccagaagggcttcctgatgcacttcctgaaggagctggccgagtaccaccaggccaaggagagctgcaacatggagacccagaccagcagcaccttcaacagagacagcctggccgagaagctgcagctgatcgacgaccagttcgccgacgcctacccccagagaatcaagttcgagagcctggagatcaagctgaacgagtacaagagagagatcgaggagcagctgagagccgagatgtgccagaagctgaagttcttcaaggacaccgagatcgccaagatcaagatggaggccaagaagaagtacgagaaggagctgaccatgttccagaacgacttcgagaaggcctgccaggccaagagcgaggccctggtgctgagagagaagagcaccctggagagaatccacaagcaccaggagatcgagaccaaggagatctacgcccagagacagctgctgctgaaggacatggacctgctgagaggcagagaggccgagctgaagcagagagtggaggccttcgagctgaaccagaagctgcaggaggagaagcacaagagcatcaccgaggccctgagaagacaggagcagaacatcaagagcttcgaggagacctacgacagaaagctgaagaacgagctgctgaacttccacagactgcacggcgtgtgcctggccctgggcatcctgatctag

SEQ ID NO: 92002 - DNA, 1017 bp, synthetic construct
  misc_feature 1..1017: note = Description of Artificial Sequence: Synthetic coding sequence
  source 1..1017: mol_type = other DNA
atggtgttcctgtgcatcttcaaggagctggccgagtaccaccaggccaaggagagctgcaacatggagacccagaccagcagcaccttcaacagagacagcctggccgagaagctgcagctgatcgacgaccagttcgccgacgcctacccccagagaatcaagttcgagagcctggagatcaagctgaacgagtacaagagagagatcgaggagcagctgagagccgagatgtgccagaagctgaagttcttcaaggacaccgagatcgccaagatcaagatggaggccaagaagaagtacgagaaggagctgaccatgttccagaacgacttcgagaaggcctgccaggccaagagcgaggccctggtgctgagagagaagagcaccctggagagaatccacaagcaccaggagatcgagaccaaggagatctacgcccagagacagctgctgctgaaggacatggacctgctgagaggcagagaggccgagctgaagcagagagtggaggccttcgagctgtaccagctggagctgaaggacgactacatcatcagaaccaacagactgatcgaggacgagagaaagaacaaggagaaggccgtgcacctgcaggaggagctgatcgccatcaacagcaagaaggaggagctgaaccagagcgtgaacagagtgaaggagctggagctggagctggagagcgtgaaggcccagagcctggccatcaccaagcagaaccacatgctgaacgagaaggtgaaggagatgagcgactacagcctgctgaaggaggagaagctggagctgctggcccagaacaagctgctgaagcagcagctggaggagagcagaaacgagaacctgagactgctgaacagactggcccagcccgcccccgagctggccgtgttccagaaggagctgagaaaggccgagaaggccatcgtggtggagcacgaggagttcgagagctgcagacaggccctgcacaagcagctgcaggacgagccctag

SEQ ID NO: 92003 - DNA, 2586 bp, synthetic construct
  misc_feature 1..2586: note = Description of Artificial Sequence: Synthetic coding sequence
  source 1..2586: mol_type = other DNA
atggcccactaccccaccagactgaagaccagaaagacctacagctgggtgggcagacccctgctggacagaaagctgcactaccagacctacagagagatgtgcgtgaagaccgagggctgcagcaccgagatccacatccagatcggccagttcgtgctgatcgagggcgacgacgacgagaacccctacgtggccaagctgctggagctgttcgaggacgacagcgaccccccccccaagaagagagccagagtgcagtggttcgtgagattctgcgaggtgcccgcctgcaagagacacctgctgggcagaaagcccggcgcccaggagatcttctggtacgactaccccgcctgcgacagcaacatcaacgccgagaccatcatcggcctggtgagagtgatccccctggcccccaaggacgtggtgcccaccaacctgaagaacgagaagaccctgttcgtgaagctgagctggaacgagaagaagttcagacccctgagcagcgagctgttcgccgagctgaacaagccccaggagagcgccgccaagtgccagaagcccgtgagagccaagagcaagagcgccgagagccccagctggacccccgccgagcacgtggccaagagaatcgagagcagacacagcgccagcaagagcagacagacccccacccaccccctgacccccagagccagaaagagactggagctgggcaacctgggcaacccccagatgagccagcagaccagctgcgccagcctggacagccccggcagaatcaagagaaaggtggccttcagcgagatcaccagccccagcaagagaagccagcccgacaagctgcagaccctgagccccgccctgaaggcccccgagaagaccagagagaccggcctgagctacaccgaggacgacaagaaggccagccccgagcacagaatcatcctgagaaccagaatcgccgccagcaagaccatcgacatcagagaggagagaaccctgacccccatcagcggcggccagagaagcagcgtggtgcccagcgtgatcctgaagcccgagaacatcaagaagagagacgccaaggaggccaaggcccagaacgaggccaccagcaccccccacagaatcagaagaaagagcagcgtgctgaccatgaacagaatcagacagcagctgagattcctgggcaacagcaagagcgaccaggaggagaaggagatcctgcccgccgccgagatcagcgacagcagcagcgacgaggaggaggccagcaccccccccctgcccagaagagcccccagaaccgtgagcagaaacctgagaagcagcctgaagagcagcctgcacaccctgaccaaggtgcccaagaagagcctgaagcccagaacccccagatgcgccgccccccagatcagaagcagaagcctggccgcccaggagcccgccagcgtgctggaggaggccagactgagactgcacgtgagcgccgtgcccgagagcctgccctgcagagagcaggagttccaggacatctacaacttcgtggagagcaagctgctggaccacaccggcggctgcatgtacatcagcggcgtgcccggcaccggcaagaccgccaccgtgcacgaggtgatcagatgcctgcagcaggccgcccaggccaacgacgtgccccccttccagtacatcgaggtgaacggcatgaagctgaccgagccccaccaggtgtacgtgcagatcctgcagaagctgaccggccagaaggccaccgccaaccacgccgccgagctgctggccaagcagttctgcaccagaggcagcccccaggagaccaccgtgctgctggtggacgagctggacctgctgtggacccacaagcaggacatcatgtacaacctgttcgactggcccacccacaaggaggccagactggtggtgctggccatcgccaacaccatggacctgcccgagagaatcatgatgaacagagtgagcagcagactgggcctgaccagaatgtgcttccagccctacacctacagccagctgcagcagatcctgagaagcagactgaagcacctgaaggccttcgaggacgacgccatccagctggtggccagaaaggtggccgccctgagcggcgacgccagaagatgcctggacatctgcagaagagccaccgagatctgcgagttcagccagcagaagcccgacagccccggcctggtgaccatcgcccacagcatggaggccgtggacgagatgttcagcagcagctacatcaccgccatcaagaacagcagcgtgctggagcagagcttcctgagagccatcctggccgagttcagaagaagcggcctggaggaggccaccttccagcagatctacagccagcacgtggccctgtgcagaatggagggcctgccctaccccaccatgagcgagaccatggccgtgtgcagccacctgggcagctgcagactgctgctggtggagcccagcagaaacgacctgctgctgagagtgagactgaacgtgagccaggacgacgtgctgtacgccctgaaggacgagtag

SEQ ID NO: 92004 - DNA, 2586 bp, synthetic construct; identical to SEQ ID NO: 92003
  misc_feature 1..2586: note = Description of Artificial Sequence: Synthetic coding sequence
  source 1..2586: mol_type = other DNA

SEQ ID NO: 92005 - DNA, 1599 bp, synthetic construct
  misc_feature 1..1599: note = Description of Artificial Sequence: Synthetic coding sequence
  source 1..1599: mol_type = other DNA
atggagaagagcaacgagaccaacggctacctggacagcgcccaggccggccccgccgccggccccggcgcccccggcaccgccgccggcagagccagaagatgcgccggcttcctgagaagacaggccctggtgctgctgaccgtgagcggcgtgctggccggcgccggcctgggcgccgccctgagaggcctgagcctgagcagaacccaggtgacctacctggccttccccggcgagatgctgctgagaatgctgagaatgatcatcctgcccctggtggtgtgcagcctggtgagcggcgccgccagcctggacgccagctgcctgggcagactgggcggcatcgccgtggcctacttcggcctgaccaccctgagcgccagcgccctggccgtggccctggccttcatcatcaagcccggcagcggcgcccagaccctgcagagcagcgacctgggcctggaggacagcggccccccccccgtgcccaaggagaccgtggacagcttcctggacctggccagaaacctgttccccagcaacctggtggtggccgccttcagaacctacgccaccgactacaaggtggtgacccagaacagcagcagcggcaacgtgacccacgagaagatccccatcggcaccgagatcgagggcatgaacatcctgggcctggtgctgttcgccctggtgctgggcgtggccctgaagaagctgggcagcgagggcgaggacctgatcagattcttcaacagcctgaacgaggccaccatggtgctggtgagctggatcatgtggtacgtgcccgtgggcatcatgttcctggtgggcagcaagatcgtggagatgaaggacatcatcgtgctggtgaccagcctgggcaagtacatcttcgccagcatcctgggccacgtgatccacggcggcatcgtgctgcccctgatctacttcgtgttcaccagaaagaaccccttcagattcctgctgggcctgctggcccccttcgccaccgccttcgccacctgcagcagcagcgccaccctgcccagcatgatgaagtgcatcgaggagaacaacggcgtggacaagagaatcagcagattcatcctgcccatcggcgccaccgtgaacatggacggcgccgccatcttccagtgcgtggccgccgtgttcatcgcccagctgaacaacgtggagctgaacgccggccagatcttcaccatcctggtgaccgccaccgccagcagcgtgggcgccgccggcgtgcccgccggcggcgtgctgaccatcgccatcatcctggaggccatcggcctgcccacccacgacctgcccctgatcctggccgtggactggatcgtggacagaaccaccaccgtggtgaacgtggagggcgacgccctgggcgccggcatcctgcaccacctgaaccagaaggccaccaagaagggcgagcaggagctggccgaggtgaaggtggaggccatccccaactgcaagagcgaggaggagaccagccccctggtgacccaccagaaccccgccggccccgtggccagcgcccccgagctggagagcaaggagagcgtgctgtag

SEQ ID NO: 92006 - DNA, 330 bp, synthetic construct
  misc_feature 1..330: note = Description of Artificial Sequence: Synthetic coding sequence
  source 1..330: mol_type = other DNA
atgagcaagcccgagctgaaggaggacaagatgctggaggtgcacttcgtgggcgacgacgacgtgctgaaccacatcctggacagagagggcggcgccaagctgaagaaggagagagcccagctgctggtgaaccccaagaagatcatcaagaagcccgagtacgacctggaggaggacgaccaggaggtgctgaaggaccagaactacgtggagatcatgggcagagacgtgcaggagagcctgaagaacggcagcgccaccggcggcggcaacaaggtgtacagcttccagaacagaaagcacagcgagaagatggccaagctgtag

SEQ ID NO: 92007 - DNA, 219 bp, synthetic construct
  misc_feature 1..219: note = Description of Artificial Sequence: Synthetic coding sequence
  source 1..219: mol_type = other DNA
atgagcaagcccgagctgaaggaggacaagatgctggaggtgcacttcgtgggcgacgacgacgtgctgaaccacatcctggacagagagggcggcgccaagctgaagaaggagagagcccagctgctggtgaaccccaagaagatcatcaagaagcccgagtacgacctggaggaggacgaccaggaggtgctgaaggaccagaactacgtggagtag

SEQ ID NO: 92008 - DNA, 2139 bp, synthetic construct
  misc_feature 1..2139: note = Description of Artificial Sequence: Synthetic coding sequence
  source 1..2139: mol_type = other DNA
atggccaccagcagcatgagcaagggctgcttcgtgttcaagcccaacagcaagaagagaaagatcagcctgcccatcgaggactacttcaacaagggcaagaacgagcccgaggacagcaagctgagattcgagacctaccagctgatctggcagcagatgaagagcgagaacgagagactgcaggaggagctgaacaagaacctgttcgacaacctgatcgagttcctgcagaagagccacagcggcttccagaagaacagcagagacctgggcggccagatcaagctgagagagatccccaccgccgccctggtgctgggcgtgaacgtgaccgaccacgacctgaccttcggcagcctgaccgaggccctgcagaacaacgtgaccccctacgtggtgagcctgcaggccaaggactgccccgacatgaagcacttcctgcagaagctgatcagccagctgatggactgctgcgtggacatcaagagcaaggaggaggagagcgtgcacgtgacccagagaaagacccactacagcatggacagcctgagcagctggtacatgaccgtgacccagaagaccgaccccaagatgctgagcaagaagagaaccaccagcagccagtggcagagcccccccgtggtggtgatcctgaaggacatggagagcttcgccaccaaggtgctgcaggacttcatcatcatcagcagccagcacctgcacgagttccccctgatcctgatcttcggcatcgccaccagccccatcatcatccacagactgctgccccacgccgtgagcagcctgctgtgcatcgagctgttccagagcctgagctgcaaggagcacctgaccaccgtgctggacaagctgctgctgaccacccagttccccttcaagatcaacgagaaggtgctgcaggtgctgaccaacatcttcctgtaccacgacttcagcgtgcagaacttcatcaagggcctgcagctgagcctgctggagcacttctacagccagcccctgagcgtgctgtgctgcaacctgcccgaggccaagagaagaatcaacttcctgagcaacaaccagtgcgagaacatcagaagactgcccagcttcagaagatacgtggagaagcaggccagcgagaagcaggtggccctgctgaccaacgagagatacctgaaggaggagacccagctgctgctggagaacctgcacgtgtaccacatgaactacttcctggtgctgagatgcctgcacaagttcaccagcagcctgcccaagtaccccctgggcagacagatcagagagctgtactgcacctgcctggagaagaacatctgggacagcgaggagtacgccagcgtgctgcagctgctgagaatgctggccaaggacgagctgatgaccatcctggagaagtgcttcaaggtgttcaagagctactgcgagaaccacctgggcagcaccgccaagagaatcgaggagttcctggcccagttccagagcctggacgccgagaccaaggaggaggaggacgccagcggcagccagcccaagggcctgcagaagaccgacctgtaccacctgcagaagagcctgctggagatgaaggagctgagaagaagcaagaagcagaccaagttcgaggtgctgagagagaacgtggtgaacttcatcgactgcctggtgagagagtacctgctgccccccgagacccagcccctgcacgaggtggtgtacttcagcgccgcccacgccctgagagagcacctgaacgccgcccccagaatcgccctgcacaccgccctgaacaacccctactactacctgaagaacgaggccctgaagagcgaggagggctgcatccccaacatcgcccccgacatctgcatcgcctacaagctgcacctggagtgcagcagactgatcaacctggtggactggagcgaggccttcgccaccgtggtgaccgccgccgagaagatggacgccaacagcgccaccagcgaggagatgaacgagatcatccacgccagattcatcagagccgtgagcgagctggagctgctgggcttcatcaagcccaccaagcagaagaccgaccacgtggccagactgacctggggcggctgctag

SEQ ID NO: 92009 - DNA, 2136 bp, synthetic construct
  misc_feature 1..2136: note = Description of Artificial Sequence: Synthetic coding sequence
  source 1..2136: mol_type = other DNA
atggccaccagcagcatgagcaagggctgcttcgtgttcaagcccaacagcaagaagagaaagatcagcctgcccatcgaggactacttcaacaagggcaagaacgagcccgaggacagcaagctgagattcgagacctaccagctgatctggcagcagatgaagagcgagaacgagagactgcaggaggagctgaacaagaacctgttcgacaacctgatcgagttcctgcagaagagccacagcggcttccagaagaacagcagagacctgggcggccagatcaagctgagagagatccccaccgccgccctggtgctgggcgtgaacgtgaccgaccacgacctgaccttcggcagcctgaccgaggccctgcagaacaacgtgaccccctacgtggtgagcctgcaggccaaggactgccccgacatgaagcacttcctgcagaagctgatcagccagctgatggactgctgcgtggacatcaagagcaaggaggaggagagcgtgcacgtgacccagagaaagacccactacagcatggacagcctgagcagctggtacatgaccgtgacccagaagaccgaccccaagatgctgagcaagaagagaaccaccagcagccagtggcagagcccccccgtggtggtgatcctgaaggacatggagagcttcgccaccaaggtgctgcaggacttcatcatcatcagcagccagcacctgcacgagttccccctgatcctgatcttcggcatcgccaccagccccatcatcatccacagactgctgccccacgccgtgagcagcctgctgtgcatcgagctgttccagagcctgagctgcaaggagcacctgaccaccgtgctggacaagctgctgctgaccacccagttccccttcaagatcaacgagaaggtgctgcaggtgctgaccaacatcttcctgtaccacgacttcagcgtgcagaacttcatcaagggcctgcagctgagcctgctggagcacttctacagccagcccctgagcgtgctgtgctgcaacctgcccgaggccaagagaagaatcaacttcctgagcaacaaccagtgcgagaacatcagaagactgcccagcttcagaagatacgtggagaagcaggccagcgagaagcaggtggccctgctgaccaacgagagatacctgaaggaggagacccagctgctgctggagaacctgcacgtgtaccacatgaactacttcctggtgctgagatgcctgcacaagttcaccagcagcctgcccaagtaccccctgggcagacagatcagagagctgtactgcacctgcctggagaagaacatctgggacagcgaggagtacgccagcgtgctgcagctgctgagaatgctggccaaggacgagctgatgaccatcctggagaagtgcttcaaggtgttcaagagctactgcgagaaccacctgggcagcaccgccaagagaatcgaggagttcctggcccagttccagagcctggacgagaccaaggaggaggaggacgccagcggcagccagcccaagggcctgcagaagaccgacctgtaccacctgcagaagagcctgctggagatgaaggagctgagaagaagcaagaagcagaccaagttcgaggtgctgagagagaacgtggtgaacttcatcgactgcctggtgagagagtacctgctgccccccgagacccagcccctgcacgaggtggtgtacttcagcgccgcccacgccctgagagagcacctgaacgccgcccccagaatcgccctgcacaccgccctgaacaacccctactactacctgaagaacgaggccctgaagagcgaggagggctgcatccccaacatcgcccccgacatctgcatcgcctacaagctgcacctggagtgcagcagactgatcaacctggtggactggagcgaggccttcgccaccgtggtgaccgccgccgagaagatggacgccaacagcgccaccagcgaggagatgaacgagatcatccacgccagattcatcagagccgtgagcgagctggagctgctgggcttcatcaagcccaccaagcagaagaccgaccacgtggccagactgacctggggcggctgctag

SEQ ID NO: 92010 - DNA, 1335 bp, synthetic construct
  misc_feature 1..1335: note = Description of Artificial Sequence: Synthetic coding sequence
  source 1..1335: mol_type = other DNA
atgaagagcgagaacgagagactgcaggaggagctgaacaagaacctgttcgacaacctgatcgagttcctgcagaagagccacagcggcttccagaagaacagcagagacctgggcggccagatcaagctgagagagatccccaccgccgccctggtgctgggcgtgaacgtgaccgaccacgacctgaccttcggcagcctgaccgaggccctgcagaacaacgtgaccccctacgtggtgagcctgcaggccaaggactgccccgacatgaagcacttcctgcagaagctgatcagccagctgatggactgctgcgtggacatcaagagcaaggaggaggagagcgtgcacgtgacccagagaaagacccactacagcatggacagcctgagcagctggtacatgaccgtgacccagaagaccgaccccaagatgctgagcaagaagagaaccaccagcagccagtggcagagcccccccgtggtggtgatcctgaaggacatggagagcttcgccaccaaggtgctgcaggacttcatcatcatcagcagccagcacctgcacgagttccccctgatcctgatcttcggcatcgccaccagccccatcatcatccacagactgctgccccacgccgtgagcagcctgctgtgcatcgagctgttccagagcctgagctgcaaggagcacctgaccaccgtgctggacaagctgctgctgaccacccagttccccttcaagatcaacgagaaggtgctgcaggtgctgaccaacatcttcctgtaccacgacttcagcgtgcagaacttcatcaagggcctgcagctgagcctgctggagcacttctacagccagcccctgagcgtgctgtgctgcaacctgcccgaggccaagagaagaatcaacttcctgagcaacaaccagtgcgagaacatcagaagactgcccagcttcagaagatacgtggagaagcaggccagcgagaagcaggtggccctgctgaccaacgagagatacctgaaggaggagacccagctgctgctggagaacctgcacgtgtaccacatgaactacttcctggtgctgagatgcctgcacaagttcaccagcagcctgcccaagtaccccctgggcagacagatcagagagctgtactgcacctgcctggagaagaacatctgggacagcgaggagtacgccagcgtgctgcagctgctgagactgggcctggccttcctggacatccagctgttcggcgcccagagcggccaggagctgctgctgcccctgagctgggaggccaaccccagccacgccgccaacctgggctag

SEQ ID NO: 92011 - DNA, 1707 bp, synthetic construct
  misc_feature 1..1707: note = Description of Artificial Sequence: Synthetic coding sequence
  source 1..1707: mol_type = other DNA
atgaagcacttcctgcagaagctgatcagccagctgatggactgctgcgtggacatcaagagcaaggaggaggagagcgtgcacgtgacccagagaaagacccactacagcatggacagcctgagcagctggtacatgaccgtgacccagaagaccgaccccaagatgctgagcaagaagagaaccaccagcagccagtggcagagcccccccgtggtggtgatcctgaaggacatggagagcttcgccaccaaggtgctgcaggacttcatcatcatcagcagccagcacctgcacgagttccccctgatcctgatcttcggcatcgccaccagccccatcatcatccacagactgctgccccacgccgtgagcagcctgctgtgcatcgagctgttccagagcctgagctgcaaggagcacctgaccaccgtgctggacaagctgctgctgaccacccagttccccttcaagatcaacgagaaggtgctgcaggtgctgaccaacatcttcctgtaccacgacttcagcgtgcagaacttcatcaagggcctgcagctgagcctgctggagcacttctacagccagcccctgagcgtgctgtgctgcaacctgcccgaggccaagagaagaatcaacttcctgagcaacaaccagtgcgagaacatcagaagactgcccagcttcagaagatacgtggagaagcaggccagcgagaagcaggtggccctgctgaccaacgagagatacctgaaggaggagacccagctgctgctggagaacctgcacgtgtaccacatgaactacttcctggtgctgagatgcctgcacaagttcaccagcagcctgcccaagtaccccctgggcagacagatcagagagctgtactgcacctgcctggagaagaacatctgggacagcgaggagtacgccagcgtgctgcagctgctgagaatgctggccaaggacgagctgatgaccatcctggagaagtgcttcaaggtgttcaagagctactgcgagaaccacctgggcagcaccgccaagagaatcgaggagttcctggcccagttccagagcctggacgagaccaaggaggaggaggacgccagcggcagccagcccaagggcctgcagaagaccgacctgtaccacctgcagaagagcctgctggagatgaaggagctgagaagaagcaagaagcagaccaagttcgaggtgctgagagagaacgtggtgaacttcatcgactgcctggtgagagagtacctgctgccccccgagacccagcccctgcacgaggtggtgtacttcagcgccgcccacgccctgagagagcacctgaacgccgcccccagaatcgccctgcacaccgccctgaacaacccctactactacctgaagaacgaggccctgaagagcgaggagggctgcatccccaacatcgcccccgacatctgcatcgcctacaagctgcacctggagtgcagcagactgatcaacctggtggactggagcgaggccttcgccaccgtggtgaccgccgccgagaagatggacgccaacagcgccaccagcgaggagatgaacgagatcatccacgccagattcatcagagccgtgagcgagctggagctgctgggcttcatcaagcccaccaagcagaagaccgaccacgtggccagactgacctggggcggctgctag

SEQ ID NO: 92012 - DNA, 1311 bp, synthetic construct
  misc_feature 1..1311: note = Description of Artificial Sequence: Synthetic coding sequence
  source 1..1311: mol_type = other DNA
atgagcagcagaaagagcaagagcaacagcctgatccacaccgagtgcctgagccaggtgcagagaatcctgagagagagattctgcagacagagcccccacagcaacctgttcggcgtgcaggtgcagtacaagcacctgagcgagctgctgaagagaaccgccctgcacggcgagagcaacagcgtgctgatcatcggccccagaggcagcggcaagaccatgctgatcaaccacgccctgaaggagctgatggagatcgaggaggtgagcgagaacgtgctgcaggtgcacctgaacggcctgctgcagatcaacgacaagatcgccctgaaggagatcaccagacagctgaacctggagaacgtggtgggcgacaaggtgttcggcagcttcgccgagaacctgagcttcctgctggaggccctgaagaagggcgacagaaccagcagctgccccgtgatcttcatcctggacgagttcgacctgttcgcccaccacaagaaccagaccctgctgtacaacctgttcgacatcagccagagcgcccagacccccatcgccgtgatcggcctgacctgcagactggacatcctggagctgctggagaagagagtgaagagcagattcagccacagacagatccacctgatgaacagcttcggcttcccccagtacgtgaagatcttcaaggagcagctgagcctgcccgccgagttccccgacaaggtgttcgccgagaagtggaacgagaacgtgcagtacctgagcgaggacagaagcgtgcaggaggtgctgcagaagcacttcaacatcagcaagaacctgagaagcctgcacatgctgctgatgctggccctgaacagagtgaccgccagccaccccttcatgaccgccgtggacctgatggaggccagccagctgtgcagcatggacagcaaggccaacatcgtgcacggcctgagcgtgctggagatctgcctgatcatcgccatgaagcacctgaacgacatctacgaggaggagcccttcaacttccagatggtgtacaacgagttccagaagttcgtgcagagaaaggcccacagcgtgtacaacttcgagaagcccgtggtgatgaaggccttcgagcacctgcagcagctggagctgatcaagcccatggagagaaccagcggcaacagccagagagagtaccagctgatgaagctgctgctggacaacacccagatcatgaacgccctgcagaagtaccccaactgccccaccgacgtgagacagtgggccaccagcagcctgagctggctgtag

SEQ ID NO: 92013 - DNA, 1311 bp, synthetic construct; identical to SEQ ID NO: 92012
  misc_feature 1..1311: note = Description of Artificial Sequence: Synthetic coding sequence
  source 1..1311: mol_type = other DNA

SEQ ID NO: 92014 - DNA, 1311 bp, synthetic construct; identical to SEQ ID NO: 92012
  misc_feature 1..1311: note = Description of Artificial Sequence: Synthetic coding sequence
  source 1..1311: mol_type = other DNA

SEQ ID NO: 92015 - DNA, 438 bp, synthetic construct
  misc_feature 1..438: note = Description of Artificial Sequence: Synthetic coding sequence
  source 1..438: mol_type = other DNA
atgagcagcagaaagagcaagagcaacagcctgatccacaccgagtgcctgagccaggtgcagagaatcctgagagagagattctgcagacagagcccccacagcaacctgttcggcgtgcaggtgcagtacaagcacctgagcgagctgctgaagagaaccgccctgcacggcgagagcaacagcgtgctgatcatcggccccagaggcagcggcaagaccatgctgatcaaccacgccctgaaggagctgatggagatcgaggaggtgagcgagaacgtgctgcaggtgcacctgaacggcctgctgcagatcaacgacaagatcgccctgaaggagatcaccagacagctgaacctggagaacgtggtgggcgacaaggtgttcggcagcttcgccgagaacctgagcttcctgctggaggccctgaagaagtag

SEQ ID NO: 92016 - DNA, 384 bp, synthetic construct
  misc_feature 1..384: note = Description of Artificial Sequence: Synthetic coding sequence
  source 1..384: mol_type = other DNA
atgagcagcagaaagagcaagagcaacagcctgatccacaccgagtgcctgagccaggtgcagagaatcctgagagagagattctgcagacagagcccccacagcaacctgttcggcgtgcaggtgcagtacaagcacctgagcgagctgctgaagagaaccgccctgcacggcgagagcaacagcgtgctgatcatcggccccagaggcagcggcaagaccatgctgatcaaccacgccctgaaggagctgatggagatcgaggaggtgagcgagaacgtgctgcaggtgcacctgaacggcctgctgcagatcaacgacaagatcgccctgaaggagatcaccagacagctgaacctggagaacgtggtgggcgacaagtag

SEQ ID NO: 92017 - DNA, 387 bp, synthetic construct
  misc_feature 1..387: note = Description of Artificial Sequence: Synthetic coding sequence
  source 1..387: mol_type = other DNA
atgagcagcagaaagagcaagagcaacagcctgatccacaccgagtgcctgagccaggtgcagagaatcctgagagagagattctgcagacagagcccccacagcaacctgttcggcgtgcaggtgcagtacaagcacctgagcgagctgctgaagagaaccgccctgcacggcgagagcaacagcgtgctgatcatcggccccagaggcagcggcaagaccatgctgatcaaccacgccctgaaggagctgatggagatcgaggaggtgagcgagaacgtgctgcaggtgcacctgaacggcctgctgcagatcaacgacaagatcgccctgaaggagatcaccagacagctgaacctggagaacgtggtgggcgacaaggtgtag

SEQ ID NO: 92018 - DNA, 1311 bp, synthetic construct; identical to SEQ ID NO: 92012
  misc_feature 1..1311: note = Description of Artificial Sequence: Synthetic coding sequence
  source 1..1311: mol_type = other DNA

SEQ ID NO: 92019 - DNA, 1059 bp, synthetic construct
  misc_feature 1..1059: note = Description of Artificial Sequence: Synthetic coding sequence
  source 1..1059: mol_type = other DNA
atggagatcgaggaggtgagcgagaacgtgctgcaggtgcacctgaacggcctgctgcagatcaacgacaagatcgccctgaaggagatcaccagacagctgaacctggagaacgtggtgggcgacaaggtgttcggcagcttcgccgagaacctgagcttcctgctggaggccctgaagaagggcgacagaaccagcagctgccccgtgatcttcatcctggacgagttcgacctgttcgcccaccacaagaaccagaccctgctgtacaacctgttcgacatcagccagagcgcccagacccccatcgccgtgatcggcctgacctgcagactggacatcctggagctgctggagaagagagtgaagagcagattcagccacagacagatccacctgatgaacagcttcggcttcccccagtacgtgaagatcttcaaggagcagctgagcctgcccgccgagttccccgacaaggtgttcgccgagaagtggaacgagaacgtgcagtacctgagcgaggacagaagcgtgcaggaggtgctgcagaagcacttcaacatcagcaagaacctgagaagcctgcacatgctgctgatgctggccctgaacagagtgaccgccagccaccccttcatgaccgccgtggacctgatggaggccagccagctgtgcagcatggacagcaaggccaacatcgtgcacggcctgagcgtgctggagatctgcctgatcatcgccatgaagcacctgaacgacatctacgaggaggagcccttcaacttccagatggtgtacaacgagttccagaagttcgtgcagagaaaggcccacagcgtgtacaacttcgagaagcccgtggtgatgaaggccttcgagcacctgcagcagctggagctgatcaagcccatggagagaaccagcggcaacagccagagagagtaccagctgatgaagctgctgctggacaacacccagatcatgaacgccctgcagaagtaccccaactgccccaccgacgtgagacagtgggccaccagcagcctgagctggctgtag

SEQ ID NO: 92020 - DNA, 1089 bp, synthetic construct
  misc_feature 1..1089: note = Description of Artificial Sequence: Synthetic coding sequence
  source 1..1089: mol_type = other DNA
atgctgatcaaccacgccctgaaggagctgatggagatcgaggaggtgagcgagaacgtgctgcaggtgcacctgaacggcctgctgcagatcaacgacaagatcgccctgaaggagatcaccagacagctgaacctggagaacgtggtgggcgacaaggtgttcggcagcttcgccgagaacctgagcttcctgctggaggccctgaagaagggcgacagaaccagcagctgccccgtgatcttcatcctggacgagttcgacctgttcgcccaccacaagaaccagaccctgctgtacaacctgttcgacatcagccagagcgcccagacccccatcgccgtgatcggcctgacctgcagactggacatcctggagctgctggagaagagagtgaagagcagattcagccacagacagatccacctgatgaacagcttcggcttcccccagtacgtgaagatcttcaaggagcagctgagcctgcccgccgagttccccgacaaggtgttcgccgagaagtggaacgagaacgtgcagtacctgagcgaggacagaagcgtgcaggaggtgctgcagaagcacttcaacatcagcaagaacctgagaagcctgcacatgctgctgatgctggccctgaacagagtgaccgccagccaccccttcatgaccgccgtggacctgatggaggccagccagctgtgcagcatggacagcaaggccaacatcgtgcacggcctgagcgtgctggagatctgcctgatcatcgccatgaagcacctgaacgacatctacgaggaggagcccttcaacttccagatggtgtacaacgagttccagaagttcgtgcagagaaaggcccacagcgtgtacaacttcgagaagcccgtggtgatgaaggccttcgagcacctgcagcagctggagctgatcaagcccatggagagaaccagcggcaacagccagagagagtaccagctgatgaagctgctgctggacaacacccagatcatgaacgccctgcagaagtaccccaactgccccaccgacgtgagacagtgggccaccagcagcctgagctggctgtag

SEQ ID NO: 92021 - DNA, 660 bp, synthetic construct
  misc_feature 1..660: note = Description of Artificial Sequence: Synthetic coding sequence
  source 1..660: mol_type = other DNA
atgaacagcttcggcttcccccagtacgtgaagatcttcaaggagcagctgagcctgcccgccgagttccccgacaaggtgttcgccgagaagtggaacgagaacgtgcagtacctgagcgaggacagaagcgtgcaggaggtgctgcagaagcacttcaacatcagcaagaacctgagaagcctgcacatgctgctgatgctggccctgaacagagtgaccgccagccaccccttcatgaccgccgtggacctgatggaggccagccagctgtgcagcatggacagcaaggccaacatcgtgcacggcctgagcgtgctggagatctgcctgatcatcgccatgaagcacctgaacgacatctacgaggaggagcccttcaacttccagatggtgtacaacgagttccagaagttcgtgcagagaaaggcccacagcgtgtacaacttcgagaagcccgtggtgatgaaggccttcgagcacctgcagcagctggagctgatcaagcccatggagagaaccagcggcaacagccagagagagtaccagctgatgaagctgctgctggacaacacccagatcatgaacgccctgcagaagtaccccaactgccccaccgacgtgagacagtgggccaccagcagcctgagctggctgtag

SEQ ID NO: 92022 - DNA, 1308 bp, synthetic construct
  misc_feature 1..1308: note = Description of Artificial Sequence: Synthetic coding sequence
  source 1..1308: mol_type = other DNA
atgccccacctggagaacgtggtgctgtgcagagagagccaggtgagcatcctgcagagcctgttcggcgagagacaccacttcagcttccccagcatcttcatctacggccacaccgccagcggcaagacctacgtgacccagaccctgctgaagaccctggagctgccccacgtgttcgtgaactgcgtggagtgcttcaccctgagactgctgctggagcagatcctgaacaagctgaaccacctgagcagcagcgaggacggctgcagcaccgagatcacctgcgagaccttcaacgacttcgtgagactgttcaagcaggtgaccaccgccgagaacctgaaggaccagaccgtgtacatcgtgctggacaaggccgagtacctgagagacatggaggccaacctgctgcccggcttcctgagactgcaggagctggccgacagaaacgtgaccgtgctgttcctgagcgagatcgtgtgggagaagttcagacccaacaccggctgcttcgagcccttcgtgctgtacttccccgactacagcatcggcaacctgcagaagatcctgagccacgaccacccccccgagtacagcgccgacttctacgccgcctacatcaacatcctgctgggcgtgttctacaccgtgtgcagagacctgaaggagctgagacacctggccgtgctgaacttccccaagtactgcgagcccgtggtgaagggcgaggccagcgagagagacaccagaaagctgtggagaaacatcgagccccacctgaagaaggccatgcagaccgtgtacctgagagagatcagcagcagccagtgggagaagctgcagaaggacgacaccgaccccggccagctgaagggcctgagcgcccacacccacgtggagctgccctactacagcaagttcatcctgatcgccgcctacctggccagctacaaccccgccagaaccgacaagagattcttcctgaagcaccacggcaagatcaagaagaccaacttcctgaagaagcacgagaagaccagcaaccacctgctgggccccaagcccttccccctggacagactgctggccatcctgtacagcatcgtggacagcagagtggcccccaccgccaacatcttcagccagatcaccagcctggtgaccctgcagctgctgaccctggtgggccacgacgaccagctggacggccccaagtacaagtgcaccgtgagcctggacttcatcagagccatcgccagaaccgtgaacttcgacatcatcaagtacctgtacgacttcctgtag

SEQ ID NO: 92023 - DNA, 975 bp, synthetic construct
  misc_feature 1..975: note = Description of Artificial Sequence: Synthetic coding sequence
  source 1..975: mol_type = other DNA
atgccccacctggagaacgtggtgctgtgcagagagagccaggtgagcatcctgcagagcctgttcggcgagagacaccacttcagcttccccagcatcttcatctacggccacaccgccagcggcaagacctacgtgacccagaccctgctgaagaccctggagctgccccacgtgttcgtgaactgcgtggagtgcttcaccctgagactgctgctggagcagatcctgaacaagctgaaccacctgagcagcagcgaggacggctgcagcaccgagatcacctgcgagaccttcaacgacttcgtgagactgttcaagcaggtgaccaccgccgagaacctgaaggaccagaccgtgtacatcgtgctggacaaggccgagtacctgagagacatggaggccaacctgctgcccggcttcctgagactgcaggagctggccgacagaaacgtgaccgtgctgttcctgagcgagatcgtgtgggagaagttcagacccaacaccggctgcttcgagcccttcgtgctgtacttccccgactacagcatcggcaacctgcagaagatcctgagccacgaccacccccccgagtacagcgccgacttctacgccgcctacatcaacatcctgctgggcgtgttctacaccgtgtgcagagacctgaaggagctgagacacctggccgtgctgaacttccccaagtactgcgagcccgtggtgaagggcgaggccagcgagagagacaccagaaagctgtggagaaacatcgagccccacctgaagaaggccatgcagaccgtgtacctgagagagatcagcagcagccagtgggagaagctgcagaaggacgacaccgaccccggccagctgaagggcatcagaggcagcatcgagaccgtgaccggcgacaccagcagcgccaactaccaggacaccaaggtgaacaccaaggagcacagcgtgagaaagtag

SEQ ID NO: 92024 - DNA, 912 bp, synthetic construct
  misc_feature 1..912: note = Description of Artificial Sequence: Synthetic coding sequence
  source 1..912: mol_type = other DNA
atggaggccaacctgctgcccggcttcctgagactgcaggagctggccgacagaaacgtgaccgtgctgttcctgagcgagatcgtgtgggagaagttcagacccaacaccggctgcttcgagcccttcgtgctgtacttccccgactacagcatcggcaacctgcagaagatcctgagccacgaccacccccccgagtacagcgccgacttctacgccgcctacatcaacatcctgctgggcgtgttctacaccgtgtgcagagacctgaaggagctgagacacctggccgtgctgaacttccccaagtactgcgagcccgtggtgaagggcgaggccagcgagagagacaccagaaagctgtggagaaacatcgagccccacctgaagaaggccatgcagaccgtgtacctgagagagatcagcagcagccagtgggagaagctgcagaaggacgacaccgaccccggccagctgaagggcctgagcgcccacacccacgtggagctgccctactacagcaagttcatcctgatcgccgcctacctggccagctacaaccccgccagaaccgacaagagattcttcctgaagcaccacggcaagatcaagaagaccaacttcctgaagaagcacgagaagaccagcaaccacctgctgggccccaagcccttccccctggacagactgctggccatcctgtacagcatcgtggacagcagagtggcccccaccgccaacatcttcagccagatcaccagcctggtgaccctgcagctgctgaccctggtgggccacgacgaccagctggacggccccaagtacaagtgcaccgtgagcctggacttcatcagagccatcgccagaaccgtgaacttcgacatcatcaagtacctgtacgacttcctgtag

SEQ ID NO: 92025 - DNA, 1665 bp, synthetic construct
  misc_feature 1..1665: note = Description of Artificial Sequence: Synthetic coding sequence
  source 1..1665: mol_type = other DNA
atgagcgccgacggcggcggcatccaggacacccaggacaaggagaccccccccgaggtgcccgacagaggccacccccaccaggagatgcccagcaagctgggcgaggccgtgcccagcggcgacacccaggagagcctgcacatcaagatggagcccgaggagccccacagcgagggcgccagccaggaggacggcgcccagggcgcctggggctgggcccccctgagccacggcagcaaggagaaggccctgttcctgcccggcggcgccctgcccagccccagaatccccgtgctgagcagagagggcagaaccagagacagacagatggccgccgccctgctgaccgcctggagccagatgcccgtgaccttcgaggacgtggccctgtacctgagcagagaggagtggggcagactggaccacacccagcagaacttctacagagacgtgctgcagaagaagaacggcctgagcctgggcttccccttcagcagacccttctgggccccccaggcccacggcaagggcgaggccagcggcagcagcagacaggccggcgacgagaaggagtggagaggcgcctgcaccggcgccgtggaggtgggccagagagtgcagaccagcagcgtggccgccctgggcaacgtgaagcccttcagaaccagagccggcagagtgcagtggggcgtgccccagtgcgcccaggaggccgcctgcggcagaagcagcggccccgccaaggacagcggccagcccgccgagcccgacagaacccccgacgccgccccccccgaccccagccccaccgagccccaggagtacagagtgcccgagaagcccaacgaggaggagaagggcgcccccgagagcggcgaggagggcctggcccccgacagcgaggtgggcagaaagagctacagatgcgagcagtgcggcaagggcttcagctggcacagccacctggtgacccacagaagaacccacaccggcgagaagccctacgcctgcaccgactgcggcaagagattcggcagaagcagccacctgatccagcaccagatcatccacaccggcgagaagccctacacctgccccgcctgcagaaagagcttcagccaccacagcaccctgatccagcaccagagaatccacaccggcgagaagccctacgtgtgcgacagatgcgccaagagattcaccagaagaagcgacctggtgacccaccagggcacccacaccggcgccaagccccacaagtgccccatctgcgccaagtgcttcacccagagcagcgccctggtgacccaccagagaacccacaccggcgtgaagccctacccctgccccgagtgcggcaagtgcttcagccagagaagcaacctgatcgcccacaacagaacccacaccggcgagaagccctaccactgcctggactgcggcaagagcttcagccacagcagccacctgaccgcccaccagagaacccacagaggcgtgagaccctacgcctgccccctgtgcggcaagagcttcagcagaagaagcaacctgcacagacacgagaagatccacaccaccggccccaaggccctggccatgctgatgctgggcgccgccgccgccggcgccctggccacccccccccccgcccccacctag

SEQ ID NO: 92026 - DNA, 462 bp, synthetic construct
  misc_feature 1..462: note = Description of Artificial Sequence: Synthetic coding sequence
  source 1..462: mol_type = other DNA
atgaacgtgggcgtggcccacagcgaggtgaaccccaacaccagagtgatgaacagcagaggcatgtggctgacctacgccctgggcgtgggcctgctgcacatcgtgctgctgagcatccccttcttcagcgtgcccgtggcctggaccctgaccaacatcatccacaacctgggcatgtacgtgttcctgcacgccgtgaagggcacccccttcgagacccccgaccagggcaaggccagactgctgacccactgggagcagctggactacggcgtgcagttcaccagcagcagaaagttcttcaccatcagccccatcatcctgtacttcctggccagcttctacaccaagtacgaccccacccacttcatcctgaacaccgccagcctgctgagcgtgctgatccccaagatgccccagctgcacggcgtgagaatcttcggcatcaacaagtactag

SEQ ID NO: 92027 - DNA, 462 bp, synthetic construct; identical to SEQ ID NO: 92026
  misc_feature 1..462: note = Description of Artificial Sequence: Synthetic coding sequence
  source 1..462: mol_type = other DNA

SEQ ID NO: 92028 - DNA, 462 bp, synthetic construct; identical to SEQ ID NO: 92026
  misc_feature 1..462: note = Description of Artificial Sequence: Synthetic coding sequence
  source 1..462: mol_type = other DNA

SEQ ID NO: 92029 - DNA, 330 bp, synthetic construct
  misc_feature 1..330: note = Description of Artificial Sequence: Synthetic coding sequence
  source 1..330: mol_type = other DNA
atgaacgtgggcgtggcccacagcgaggtgaaccccaacaccagagtgatgaacagcagaggcatgtggctgacctacgccctgggcgtgggcctgctgcacatcgtgctgctgagcatccccttcttcagcgtgcccgtggcctggaccctgaccaacatcatccacaacctgggcatgtacgtgttcctgcacgccgtgaagggcacccccttcgagacccccgaccagggcaaggccagactgctgacccactgggagcagctggactacggcgtgcagttcaccagcagcagaaagttcttcaccatcagccccatcatcctgtag

SEQ ID NO: 92030 - DNA, 330 bp, synthetic construct; identical to SEQ ID NO: 92029
  misc_feature 1..330: note = Description of Artificial Sequence: Synthetic coding sequence
  source 1..330: mol_type = other DNA

SEQ ID NO: 92031 - DNA, 462 bp, synthetic construct
  misc_feature 1..462: note = Description of Artificial Sequence: Synthetic coding sequence
  source 1..462: mol_type = other DNA
atgaacgtgggcgtggcccacagcgaggtgaaccccaacaccagagtgatgaacagcagaggcatctggctggcctacatcatcctggtgggcctgctgcacatggtgctgctgagcatccccttcttcagcatccccgtggtgtggaccctgaccaacgtgatccacaacctggccacctacgtgttcctgcacaccgtgaagggcacccccttcgagacccccgaccagggcaaggccagactgctgacccactgggagcagatggactacggcctgcagttcaccagcagcagaaagttcctgagcatcagccccatcgtgctgtacctgctggccagcttctacaccaagtacgacgccgcccacttcctgatcaacaccgccagcctgctgagcgtgctgctgcccaagctgccccagttccacggcgtgagagtgttcggcatcaacaagtactag

SEQ ID NO: 92032 - DNA, 462 bp, synthetic construct; identical to SEQ ID NO: 92031
  misc_feature 1..462: note = Description of Artificial Sequence: Synthetic coding sequence
  source 1..462: mol_type = other DNA

SEQ ID NO: 92033 - DNA, 462 bp, synthetic construct
  misc_feature 1..462: note = Description of Artificial Sequence: Synthetic coding sequence
  source 1..462: mol_type = other DNA
atgaacgtgggcaccgcccacagcgaggtgaaccccaacaccagagtgatgaacagcagaggcatctggctgagctacgtgctggccatcggcctgctgcacatcgtgctgctgagcatccccttcgtgagcgtgcccgtggtgtggaccctgaccaacctgatccacaacatgggcatgtacatcttcctgcacaccgtgaagggcacccccttcgagacccccgaccagggcaaggccagactgctgacccactgggagcagatggactacggcgtgcagttcaccgccagcagaaagttcctgaccatcacccccatcgtgctgtacttcctgaccagcttctacaccaagtacgaccagatccacttcgtgctgaacaccgtgagcctgatgagcgtgctgatccccaagctgccccagctgcacggcgtgagaatcttcggcatcaacaagtactag

SEQ ID NO: 92034 - DNA, 462 bp, synthetic construct; identical to SEQ ID NO: 92033
  misc_feature 1..462: note = Description of Artificial Sequence: Synthetic coding sequence
  source 1..462: mol_type = other DNA

SEQ ID NO: 92035 - DNA, 1320 bp, synthetic construct
  misc_feature 1..1320: note = Description of Artificial Sequence: Synthetic coding sequence
  source 1..1320: mol_type = other DNA
atgttcagcaagctggcccacctgcagagattcgccgtgctgagcagaggcgtgcacagcagcgtggccagcgccaccagcgtggccaccaagaagaccgtgcagggcccccccaccagcgacgacatcttcgagagagagtacaagtacggcgcccacaactaccaccccctgcccgtggccctggagagaggcaagggcatctacctgtgggacgtggagggcagaaagtacttcgacttcctgagcagctacagcgccgtgaaccagggccactgccaccccaagatcgtgaacgccctgaagagccaggtggacaagctgaccctgaccagcagagccttctacaacaacgtgctgggcgagtacgaggagtacatcaccaagctgttcaactaccacaaggtgctgcccatgaacaccggcgtggaggccggcgagaccgcctgcaagctggccagaaagtggggctacaccgtgaagggcatccagaagtacaaggccaagatcgtgttcgccgccggcaacttctggggcagaaccctgagcgccatcagcagcagcaccgaccccaccagctacgacggcttcggccccttcatgcccggcttcgacatcatcccctacaacgacctgcccgccctggagagagccctgcaggaccccaacgtggccgccttcatggtggagcccatccagggcgaggccggcgtggtggtgcccgaccccggctacctgatgggcgtgagagagctgtgcaccagacaccaggtgctgttcatcgccgacgagatccagaccggcctggccagaaccggcagatggctggccgtggactacgagaacgtgagacccgacatcgtgctgctgggcaaggccctgagcggcggcctgtaccccgtgagcgccgtgctgtgcgacgacgacatcatgctgaccatcaagcccggcgagcacggcagcacctacggcggcaaccccctgggctgcagagtggccatcgccgccctggaggtgctggaggaggagaacctggccgagaacgccgacaagctgggcatcatcctgagaaacgagctgatgaagctgcccagcgacgtggtgaccgccgtgagaggcaagggcctgctgaacgccatcgtgatcaaggagaccaaggactgggacgcctggaaggtgtgcctgagactgagagacaacggcctgctggccaagcccacccacggcgacatcatcagattcgccccccccctggtgatcaaggaggacgagctgagagagagcatcgagatcatcaacaagaccatcctgagcttctag

SEQ ID NO: 92036 - DNA, 906 bp, synthetic construct
  misc_feature 1..906: note = Description of Artificial Sequence: Synthetic coding sequence
  source 1..906: mol_type = other DNA
atgaacaccggcgtggaggccggcgagaccgcctgcaagctggccagaaagtggggctacaccgtgaagggcatccagaagtacaaggccaagatcgtgttcgccgccggcaacttctggggcagaaccctgagcgccatcagcagcagcaccgaccccaccagctacgacggcttcggccccttcatgcccggcttcgacatcatcccctacaacgacctgcccgccctggagagagccctgcaggaccccaacgtggccgccttcatggtggagcccatccagggcgaggccggcgtggtggtgcccgaccccggctacctgatgggcgtgagagagctgtgcaccagacaccaggtgctgttcatcgccgacgagatccagaccggcctggccagaaccggcagatggctggccgtggactacgagaacgtgagacccgacatcgtgctgctgggcaaggccctgagcggcggcctgtaccccgtgagcgccgtgctgtgcgacgacgacatcatgctgaccatcaagcccggcgagcacggcagcacctacggcggcaaccccctgggctgcagagtggccatcgccgccctggaggtgctggaggaggagaacctggccgagaacgccgacaagctgggcatcatcctgagaaacgagctgatgaagctgcccagcgacgtggtgaccgccgtgagaggcaagggcctgctgaacgccatcgtgatcaaggagaccaaggactgggacgcctggaaggtgtgcctgagactgagagacaacggcctgctggccaagcccacccacggcgacatcatcagattcgccccccccctggtgatcaaggaggacgagctgagagagagcatcgagatcatcaacaagaccatcctgagcttctag

SEQ ID NO: 92037 - DNA, 405 bp, synthetic construct; identical to SEQ ID NO: 85151
  misc_feature 1..405: note = Description of Artificial Sequence: Synthetic coding sequence
  source 1..405: mol_type = other DNA

SEQ ID NO: 92038 - DNA, 1386 bp, synthetic construct
  misc_feature 1..1386: note = Description of Artificial Sequence: Synthetic coding sequence
  source 1..1386: mol_type = other DNA
atgaacaacttcggcaacgaggagttcgactgccacttcctggacgagggcttcaccgccaaggacatcctggaccagaagatcaacgaggtgagcagcagcgacgacaaggacgccttctacgtggccgacctgggcgacatcctgaagaagcacctgagatggctgaaggccctgcccagagtgacccccttctacgccgtgaagtgcaacgacagcaaggccatcgtgaagaccctggccgccaccggcaccggcttcgactgcgccagcaagaccgagatccagctggtgcagagcctgggcgtgccccccgagagaatcatctacgccaacccctgcaagcaggtgagccagatcaagtacgccgccaacaacggcgtgcagatgatgaccttcgacagcgaggtggagctgatgaaggtggccagagcccaccccaaggccaagctggtgctgagaatcgccaccgacgacagcaaggccgtgtgcagactgagcgtgaagttcggcgccaccctgagaaccagcagactgctgctggagagagccaaggagctgaacatcgacgtggtgggcgtgagcttccacgtgggcagcggctgcaccgaccccgagaccttcgtgcaggccatcagcgacgccagatgcgtgttcgacatgggcgccgaggtgggcttcagcatgtacctgctggacatcggcggcggcttccccggcagcgaggacgtgaagctgaagttcgaggagatcaccggcgtgatcaaccccgccctggacaagtacttccccagcgacagcggcgtgagaatcatcgccgagcccggcagatactacgtggccagcgccttcaccctggccgtgaacatcatcgccaagaagatcgtgctgaaggagcagaccggcagcgacgacgaggacgagagcagcgagcagaccttcatgtactacgtgaacgacggcgtgtacggcagcttcaactgcatcctgtacgaccacgcccacgtgaagcccctgctgcagaagagacccaagcccgacgagaagtactacagcagcagcatctggggccccacctgcgacggcctggacagaatcgtggagagatgcgacctgcccgagatgcacgtgggcgactggatgctgttcgagaacatgggcgcctacaccgtggccgccgccagcaccttcaacggcttccagagacccaccatctactacgtgatgagcggccccgcctggcagctgatgcagcagttccagaaccccgacttcccccccgaggtggaggagcaggacgccagcaccctgcccgtgagctgcgcctgggagagcggcatgaagagacacagagccgcctgcgccagcgccagcatcaacgtgtag

SEQ ID NO: 92039 - DNA, 207 bp, synthetic construct
  misc_feature 1..207: note = Description of Artificial Sequence: Synthetic coding sequence
  source 1..207: mol_type = other DNA
atgaacaacttcggcaacgaggagttcgactgccacttcctggacgagggcttcaccgccaaggacatcctggaccagaagatcaacgaggtgagcagcagcgacgacaaggacgccttctacgtggccgacctgggcgacatcctgaagaagcacctgagatggctgaaggccctgcccagagtgacccccttctacgccgtgtag

SEQ ID NO: 92040 - DNA, 927 bp, synthetic construct
  misc_feature 1..927: note = Description of Artificial Sequence: Synthetic coding sequence
  source 1..927: mol_type = other DNA
atgatgaccttcgacagcgaggtggagctgatgaaggtggccagagcccaccccaaggccaagctggtgctgagaatcgccaccgacgacagcaaggccgtgtgcagactgagcgtgaagttcggcgccaccctgagaaccagcagactgctgctggagagagccaaggagctgaacatcgacgtggtgggcgtgagcttccacgtgggcagcggctgcaccgaccccgagaccttcgtgcaggccatcagcgacgccagatgcgtgttcgacatgggcgccgaggtgggcttcagcatgtacctgctggacatcggcggcggcttccccggcagcgaggacgtgaagctgaagttcgaggagatcaccggcgtgatcaaccccgccctggacaagtacttccccagcgacagcggcgtgagaatcatcgccgagcccggcagatactacgtggccagcgccttcaccctggccgtgaacatcatcgccaagaagatcgtgctgaaggagcagaccggcagcgacgacgaggacgagagcagcgagcagaccttcatgtactacgtgaacgacggcgtgtacggcagcttcaactgcatcctgtacgaccacgcccacgtgaagcccctgctgcagaagagacccaagcccgacgagaagtactacagcagcagcatctggggccccacctgcgacggcctggacagaatcgtggagagatgcgacctgcccgagatgcacgtgggcgactggatgctgttcgagaacatgggcgcctacaccgtggccgccgccagcaccttcaacggcttccagagacccaccatctactacgtgatgagcggccccgcctggcagctgatgcagcagttccagaaccccgacttccccccctgcctgtgcctggtgcccggcagagtgggctag

SEQ ID NO: 92041 - DNA, 684 bp, synthetic construct
  misc_feature 1..684: note = Description of Artificial Sequence: Synthetic coding sequence
  source 1..684: mol_type = other DNA
atggtgaagagcagcctgcagagaatcctgaacagccactgcttcgccagagagaaggagggcgacaagcccagcgccaccatccacgccagcagaaccatgcccctgctgagcctgcacagcagaggcggcagcagcagcgagagcagcagagtgagcctgcactgctgcagcaaccccggccccggccccagatggtgcgacgccccccacccccccctgaagatccccggcggcagaggcaacagccagagagaccacaacctgagcgccaacctgttctacagcgacgacagactgaacgtgaccgaggagctgaccagcaacgacaagaccagaatcctgaacgtgcagagcagactgaccgacgccaagagaatcaactggagaaccgtgctgagcggcggcagcctgtacatcgagatccccggcggcgccctgcccgagggcagcaaggacagcttcgccgtgctgctggagttcgccgaggagcagctgagagccgaccacgtgttcatctgcttccacaagaacagagaggacagagccgccctgctgagaaccttcagcttcctgggcttcgagatcgtgagacccggccaccccctggtgcccaagagacccgacgcctgcttcatggcctacaccttcgagagagagagcagcggcgaggaggaggagtag

SEQ ID NO: 92042 - DNA, 831 bp, synthetic construct
  misc_feature 1..831: note = Description of Artificial Sequence: Synthetic coding sequence
  source 1..831: mol_type = other DNA
atgtggatcaccagcctgatcaccatgaaggacgaggacatcttcgacctggccggcgacccccaggacagcctgatccccggccccagccccacccccaagcagaaccccgtgtgcaacgaggccttcttcggccaccagaccttcagcctgagagagaccggcctgaagagcgtgcactgccagggccaggaggccgagaacatggagagagagaagttccagcagaaggccctgaagcagaccaagcagaagaagagcaagagcgccgagttcctgatggtgaaggaggacagagaggccaccgagggcaccggcaaccccgccttcaacatgagcagccccgacctgagcgcctgccagaccgccgagaagaaggtgatcagacacgacatgcccgacagaaccctggccgcccaccagcagaagttcagactgcccgccagcgccgagcccaagggcaacgagtacggcagaaactacttcgaccccctgatggacgaggagatcaaccccagacagtgcgccaccgaggtgagcagagaggacgagagcggcagagaggagaccctgaacagcgaggcccccggcagcagcaacaagagccacgagatccacaaggaggccagcgaggccaccaccgcccacctggaggagttccagagaagccagaagaccatcatcctgctgggcagcagccccctggagcaggagatcagaagcaccagcctgcactgcatggaggacgagatgagccacccctggatcctgctgctgaaggtgaccgccgtgatcagaagcagaagatactacagagagcagagattctag

SEQ ID NO: 92043 - DNA, 1443 bp, synthetic construct
  misc_feature 1..1443: note = Description of Artificial Sequence: Synthetic coding sequence
  source 1..1443: mol_type = other DNA
atggagagagagaagttccagcagaaggccctgaagcagaccaagcagaagaagagcaagagcgccgagttcctgatggtgaaggaggacagagaggccaccgagggcaccggcaaccccgccttcaacatgagcagccccgacctgagcgcctgccagaccgccgagaagaaggtgatcagacacgacatgcccgacagaaccctggccgcccaccagcagaagttcagactgcccgccagcgccgagcccaagggcaacgagtacggcagaaactacttcgaccccctgatggacgaggagatcaaccccagacagtgcgccaccgaggtgagcagagaggtgtgcctgatggccaagggcgagaaggccgagagcggcgtggacaacaccgccggcctgagcgagaaggagacccagaagaaccccagagcccccatggacgaggccgacgtgaagagcgccgcccacagcagccagggcagcatccccaagaagatcggcccctgcagcatggactacgaccccaacctgctggaggaggacgacgagctgcacagccagggcgacagcctgaccgaccacagcgtgaagggcaagagcaccgtgtggagaatcggcgaggccgaggactacagccaggacatcagctacctggaggagctggaggagcacagattcagcgtgtgctgcagcagcgtggccgacagcagatacggcgacttcttcaagcacctgcacttcgtgctggtgagcgccagcagcgagctgcagctgagccagtggcagagccagggcttctggtacatcatcctgctgatgttcttcctgtggttcctgagactgtacctgcactacctgggccagtggctgttcctgcaggccatcagcacccccgtgaccaagttccacttcagcctgcacatcgtggagctgtgctaccccaccagcagcctgcacatcggcgaggagctgcccgtggtggtgatgggccccctgatgctgaacgccatcctgctgctgctggtgctgatcagatggggctgccagctgctgttcgccagctgccccgacgtgctgagcaagctgatcatcaccatgggcctgtggaccatcctggaccccctggccgtgttcatcctggacaccctgctgggcagactgaccgacaacgaggagacccccgtggccgacgccgccaagctgtactggatgttcgtgagaaccgtgcagcccggcatcctgggcgtggtgatcaccgtgctgctgtacatcctgctgttcgtgatcagcagcctgatcctgtacctgtactgcctgagactgcacaacgacagctggatcctggacgccttccagagaatccacagcgaggagaccaagttcttcatcccctacgacctggagatcagcaaccaggagctgagctacatcgtgaagtag

SEQ ID NO: 92044 - DNA, 606 bp, synthetic construct
  misc_feature 1..606: note = Description of Artificial Sequence: Synthetic coding sequence
  source 1..606: mol_type = other DNA
atggccctgagctgggtgctgaccgtgctgagcctgctgcccctgctggaggcccagatccccctgtgcgccaacctggtgcccgtgcccatcaccaacgccaccctggacagaatcaccggcaagtggttctacatcgccagcgccttcagaaacgaggagtacaacaagagcgtgcaggagatccaggccaccttcttctacttcacccccaacaagaccgaggacaccatcttcctgagagagtaccagaccagacaggaccagtgcatctacaacaccacctacctgaacgtgcagagagagaacggcaccatcagcagatacgtgggcggccaggagcacttcgcccacctgctgatcctgagagacaccaagacctacatgctggccttcgacgtgaacgacgagaagaactggggcctgagcgtgtacgccgacaagcccgagaccaccaaggagcagctgggcgagttctacgaggccctggactgcctgagaatccccaagagcgacgtggtgtacaccgactggaagaaggacaagtgcgagcccctggagaagcagcacgagaaggagagaaagcaggaggagggcgagagctag

SEQ ID NO: 92045 - DNA, 585 bp, synthetic construct
  misc_feature 1..585: note = Description of Artificial Sequence: Synthetic coding sequence
  source 1..585: mol_type = other DNA
atggccctgagctgggtgctgaccgtgctgagcctgctgcccctgctggaggcccagatccccctgtgcgccaacctggtgcccgtgcccatcaccaacgccaccctggacagagtgagcgcctgggccagccccgtgctgagcacctgggccgccgccagcctgctgtgggccagcctgagcctgctggccgtggtgggcccccccctgcccgccctgcccttcagcctgctgggcccccagggcgagatcctgaccagccccggcgacagcggcggcaccccctgcctgcagacccagaagccccactgcagagtgctgcacggcggcagattctgcgccggccccggcggcgccgcctggggcgccatgaccgacccccagggcgagctgctgcacgcccactgcccccccggcgccagcagcccccacctgcagaaccagggcgagatctgcctgagcctgctgcccgccgacagccagagattcagcatcaagccccccagccccgcccccaccttcagccccgaccactggcaggtggtgctgtacagaatcggcctgagcaagagaggcgtgcagtag

SEQ ID NO: 92046 - DNA, 585 bp, synthetic construct
  misc_feature 1..585: note = Description of Artificial Sequence: Synthetic coding sequence
  source 1..585: mol_type = other DNA
atggccctgagctgggtgctgaccgtgctgagcctgctgcccctgctggaggcccagatccccctgtgcgccaacctggtgcccgtgcccatcaccaacgccaccctggacagagtgagcgcctgggccagccccgtgctgagcacctgggccgccgccagcctgctgtgggccagcctgtacctgctggccgtggtggccccccccctgcccgccctgcccttcagcctgctgggcccccagggcgagatcctgaccagccccggcgacagcggcggcaccccctgcctgcagacccagaagccccactgcagagtgctgcacggcggcagattctgcgccggccccggcggcgccgcctggggcgccatgaccgacccccagggcgagctgctgcacgcccactgcccccccggcgccagcagcccccacctgcagaaccagggcgagatctgcctgagcctgctgcccgccgacagccagagattcagcatcaagccccccagccccgccccccccttcagccccgaccactggcaggtggtgctgtacagaatcggcctgagcaagagaggcgtgcagtag

SEQ ID NO: 92047 - DNA, 606 bp, synthetic construct
  misc_feature 1..606: note = Description of Artificial Sequence: Synthetic coding sequence
  source 1..606: mol_type = other DNA
atggccctgagctgggtgctgaccgtgctgagcctgctgcccctgctggaggcccagatccccctgtgcgccaacctggtgcccgtgcccatcaccaacgccaccctggacagaatcaccggcaagtggttctacatcgccagcgccttcagaaacgaggagtacaacaagagcgtgcaggagatccaggccaccttcttctacttcacccccaacaagaccgaggacaccatcttcctgagagagtaccagaccagacagaaccagtgcttctacaacagcagctacctgaacgtgcagagagagaacggcaccgtgagcagatacgagggcggcagagagcacgtggcccacctgctgttcctgagagacaccaagaccctgatgttcggcagctacctggacgacgagaagaactggggcctgagcttctacgccgacaagcccgagaccaccaaggagcagctgggcgagttctacgaggccctggactgcctgtgcatccccagaagcgacgtgatgtacaccgactggaagaaggacaagtgcgagcccctggagaagcagcacgagaaggagagaaagcaggaggagggcgagagctag

SEQ ID NO: 92048 - DNA, 1065 bp, synthetic construct
  misc_feature 1..1065: note = Description of Artificial Sequence: Synthetic coding sequence
  source 1..1065: mol_type = other DNA
atgatgagctacctgaagcagcccccctacggcatgaacggcctgggcctggccggccccgccatggacctgctgcaccccagcgtgggctaccccgccacccccagaaagcagagaagagagagaaccaccttcaccagaagccagctggacgtgctggaggccctgttcgccaagaccagataccccgacatcttcatgagagaggaggtggccctgaagatcaacctgcccgagagcagagtgcaggtgtggttcaagaacagaagagccaagtgcagacagcagcagcagagcggcagcggcaccaagagcagacccgccaagaagaagagcagccccgtgagagagagcagcggcagcgagagcagcggccagttcaccccccccgccgtgagcagcagcgccagcagcagcagcagcgccagcagcagcagcgccaaccccgccgccgccgccgccgccggcctgggcggcaaccccgtggccgccgccagcagcctgagcacccccgccgccagcagcatctggagccccgccagcatcagccccggcagcgcccccgccagcgtgagcgtgcccgagcccctggccgcccccagcaacaccagctgcatgcagagaagcgtggccgccggcgccgccaccgccgccgccagctaccccatgagctacggccagggcggcagctacggccagggctaccccacccccagcagcagctacttcggcggcgtggactgcagcagctacctggcccccatgcacagccaccaccacccccaccagctgagccccatggcccccagcagcatggccggccaccaccaccaccacccccacgcccaccaccccctgagccagagcagcggccaccaccaccaccaccaccaccaccaccaccagggctacggcggcagcggcctggccttcaacagcgccgactgcctggactacaaggagcccggcgccgccgccgccagcagcgcctggaagctgaacttcaacagccccgactgcctggactacaaggaccaggccagctggagattccaggtgctgtag

SEQ ID NO: 92049 - DNA, 1065 bp, synthetic construct; identical to SEQ ID NO: 92048
  misc_feature 1..1065: note = Description of Artificial Sequence: Synthetic coding sequence
  source 1..1065: mol_type = other DNA

SEQ ID NO: 92050 - DNA, 894 bp, synthetic construct
  misc_feature 1..894: note = Description of Artificial Sequence: Synthetic coding sequence
  source 1..894: mol_type = other DNA
atgatgagctacctgaagcagcccccctacgccgtgaacggcctgagcctgaccaccagcggcatggacctgctgcaccccagcgtgggctaccccggcccctgggccagctgccccgccgccacccccagaaagcagagaagagagagaaccaccttcaccagagcccagctggacgtgctggaggccctgttcgccaagaccagataccccgacatcttcatgagagaggaggtggccctgaagatcaacctgcccgagagcagagtgcaggtgtggttcaagaacagaagagccaagtgcagacagcagcagcagcagcagcagaacggcggccagaacaaggtgagacccgccaagaagaagaccagccccgccagagaggtgagcagcgagagcggcaccagcggccagttcaccccccccagcagcaccagcgtgcccaccatcgccagcagcagcgcccccgtgagcatctggagccccgccagcatcagccccctgagcgaccccctgagcaccagcagcagctgcatgcagagaagctaccccatgacctacacccaggccagcggctacagccagggctacgccggcagcaccagctacttcggcggcatggactgcggcagctacctgacccccatgcaccaccagctgcccggccccggcgccaccctgagccccatgggcaccaacgccgtgaccagccacctgaaccagagccccgccagcctgagcacccagggctacggcgccagcagcctgggcttcaacagcaccaccgactgcctggactacaaggaccagaccgccagctggaagctgaacttcaacgccgactgcctggactacaaggaccagaccagcagctggaagttccaggtgctgtag

SEQ ID NO: 92051 - DNA, 870 bp, synthetic construct
  misc_feature 1..870: note = Description of Artificial Sequence: Synthetic coding sequence
  source 1..870: mol_type = other DNA
atgatgagctacctgaagcagcccccctacgccgtgaacggcctgagcctgaccaccagcggcatggacctgctgcaccccagcgtgggctaccccgccacccccagaaagcagagaagagagagaaccaccttcaccagagcccagctggacgtgctggaggccctgttcgccaagaccagataccccgacatcttcatgagagaggaggtggccctgaagatcaacctgcccgagagcagagtgcaggtgtggttcaagaacagaagagccaagtgcagacagcagcagcagcagcagcagaacggcggccagaacaaggtgagacccgccaagaagaagaccagccccgccagagaggtgagcagcgagagcggcaccagcggccagttcaccccccccagcagcaccagcgtgcccaccatcgccagcagcagcgcccccgtgagcatctggagccccgccagcatcagccccctgagcgaccccctgagcaccagcagcagctgcatgcagagaagctaccccatgacctacacccaggccagcggctacagccagggctacgccggcagcaccagctacttcggcggcatggactgcggcagctacctgacccccatgcaccaccagctgcccggccccggcgccaccctgagccccatgggcaccaacgccgtgaccagccacctgaaccagagccccgccagcctgagcacccagggctacggcgccagcagcctgggcttcaacagcaccaccgactgcctggactacaaggaccagaccgccagctggaagctgaacttcaacgccgactgcctggactacaaggaccagaccagcagctggaagttccaggtgctgtag

SEQ ID NO: 92052 - DNA, 720 bp, synthetic construct
  misc_feature 1..720: note = Description of Artificial Sequence: Synthetic coding sequence
  source 1..720: mol_type = other DNA
atgatgagctacctgaagcagcccccctacgccgtgaacggcctgagcctgaccaccagcggcatggacctgctgcaccccagcgtgggctaccccggcccctgggccagctgccccgccgccacccccagaaagcagagaagagagagaaccaccttcaccagagcccagctggacgtgctggaggccctgttcgccaagaccagataccccgacatcttcatgagagaggaggtggccctgaagatcaacctgcccgagagcagagtgcaggtgtggttcaagaacagaagagccaagtgcagacagcagcagcagcagcagcagaacggcggccagaacaaggtgagacccgccaagaagaagaccagccccgccagagaggtgagcagcgagagcggcaccagcggccagttcaccccccccagcagcaccagcgtgcccaccatcgccagcagcagcgcccccgtgagcatctggagccccgccagcatcagccccctgagcgaccccctgagcaccagcagcagctgcatgcagagaagctaccccatgacctacacccaggccagcggctacagccagggctacgccggcagcaccagctacttcggcggcatggactgcggcagctacctgacccccatgcaccaccagctgcccggccccggcgccaccctgagccccatgggcaccaacgccgtgaccagccacctgtag

SEQ ID NO: 92053 - DNA, 870 bp, synthetic construct; identical to SEQ ID NO: 92051
  misc_feature 1..870: note = Description of Artificial Sequence: Synthetic coding sequence
  source 1..870: mol_type = other DNA

SEQ ID NO: 92054 - DNA, 492 bp, synthetic construct
  misc_feature 1..492: note = Description of Artificial Sequence: Synthetic coding sequence
  source 1..492: mol_type = other DNA
atgatgagctacctgaagcagcccccctacgccgtgaacggcctgagcctgaccaccagcggcatggacctgctgcaccccagcgtgggctaccccgccacccccagaaagcagagaagagagagaaccaccttcaccagagcccagctggacgtgctggaggccctgttcgccaagaccagataccccgacatcttcatgagagaggaggtggccctgaagatcaacctgcccgagagcagagtgcaggtgtggttcaagaacagaagagccaagtgcagacagcagcagcagcagcagcagaacggcggccagaacaaggtgagacccgccaagaagaagaccagccccgccagagaggtgagcagcgagagcggcaccagcggccagttcaccccccccagcagcaccagcgtgcccaccatcgccagcagcagcgcccccgtgagcatctggagccccgccagcatcagccccctgagcgacccctag

SEQ ID NO: 92055 - DNA, 978 bp, synthetic construct
  misc_feature 1..978: note = Description of Artificial Sequence: Synthetic coding sequence
  source 1..978: mol_type = other DNA
atgctgagccacgccgacctgctggacgccagactgggcatgaaggacgccgccgagctgctgggccacagagaggccgtgaagtgcagactgggcgtgggcggcagcgaccccggcggccaccccggcgacctggcccccaacagcgaccccgtggagggcgccaccctgctgcccggcgaggacatcaccaccgtgggcagcacccccgccagcctggccgtgagcgccaaggaccccgacaagcagcccggcccccagggcggccccaaccccagccaggccggccagcagcagggccagcagaagcagaagagacacagaaccagattcacccccgcccagctgaacgagctggagagaagcttcgccaagacccactaccccgacatcttcatgagagaggagctggccctgagaatcggcctgaccgagagcagagtgcaggtgtggttccagaacagaagagccaagtggaagaagagaaagaagaccaccaacgtgttcagagcccccggcaccctgctgcccacccccggcctgccccagttccccagcgccgccgccgccgccgccgccgccatgggcgacagcctgtgcagcttccacgccaacgacaccagatgggccgccgccgccatgcccggcgtgagccagctgcccctgccccccgccctgggcagacagcaggccatggcccagagcctgagccagtgcagcctggccgccggccccccccccaacagcatgggcctgagcaacagcctggccggcagcaacggcgccggcctgcagagccacctgtaccagcccgccttccccggcatggtgcccgccagcctgcccggccccagcaacgtgagcggcagcccccagctgtgcagcagccccgacagcagcgacgtgtggagaggcaccagcatcgccagcctgagaagaaaggccctggagcacaccgtgagcatgagcttcacctag

SEQ ID NO: 92056 - DNA, 912 bp, synthetic construct
  misc_feature 1..912: note = Description of Artificial Sequence: Synthetic coding sequence
  source 1..912: mol_type = other DNA
atgggcatcgtgcagatctgcaagggcgagtacttctggctggagcccaagaacgccttcgagaacttccaggagcccgacatcggcctggtggccctggccttcctgcagggcagcttcgcctacggcggctggaacttcctgaactacgtgaccgaggagctggtggacccctacaagaacctgcccagagccatcttcatcagcatccccctggtgaccttcgtgtacgtgttcgccaacgtggcctacgtgaccgccatgagcccccaggagctgctggccagcaacgccgtggccgtgaccttcggcgagaagctgctgggcgtgatggcctggatcatgcccatcagcgtggccctgagcaccttcggcggcgtgaacggcagcctgttcaccagcagcagactgttcttcgccggcgccagagagggccacctgcccagcgtgctggccatgatccacgtgaagagatgcacccccatccccgccctgctgttcacctgcatcagcaccctgctgatgctggtgaccagcgacatgtacaccctgatcaactacgtgggcttcatcaactacctgttctacggcgtgaccgtggccggccagatcgtgctgagatggaagaagcccgacatccccagacccatcaagatcaacctgctgttccccatcatctacctgctgttctgggccttcctgctggtgttcagcctgtggagcgagcccgtggtgtgcggcatcggcctggccatcatgctgaccggcgtgcccgtgtacttcctgggcgtgtactggcagcacaagcccaagtgcttcagcgacttcatcgagctgctgaccctggtgagccagaagatgtgcgtggtggtgtaccccgaggtggagggcctgagagacagaggcggctag

SEQ ID NO: 92057 - DNA, 861 bp, synthetic construct
  misc_feature 1..861: note = Description of Artificial Sequence: Synthetic coding sequence
  source 1..861: mol_type = other DNA
atggccctggtgctgatcctgcagctgctgaccctgtggcccctgtgccacaccgacatcacccccagcgtggccatcatcgtgccccccgccagctaccaccccaagccctggctgggcgcccagcccgccaccgtggtgacccccggcgtgaacgtgaccctgagatgcagagccccccagcccgcctggagattcggcctgttcaagcccggcgagatcgcccccctgctgttcagagacgtgagcagcgagctggccgagttcttcctggaggaggtgacccccgcccagggcggcatctacagatgctgctacagaagacccgactggggccccggcgtgtggagccagcccagcgacgtgctggagctgctggtgaccgaggagctgcccagacccagcctggtggccctgcccggccccgtggtgggccccggcgccaacgtgagcctgagatgcgccggcagactgagaaacatgagcttcgtgctgtacagagagggcgtggccgcccccctgcagtacagacacagcgcccagccctgggccgacttcaccctgctgggcgccagagcccccggcacctacagctgctactaccacacccccagcgccccctacgtgctgagccagagaagcgaggtgctggtgatcagctgggagggcgagggccccgaggccagacccgccagcagcgcccccggcatgcaggcccccggccccccccccagcgaccccggcgcccaggcccccagcctgagcagcttcagacccagaggcctggtgctgcagcccctgctgccccagacccaggacagctgggaccccgcccccccccccagcgaccccggcgtgtag

SEQ ID NO: 92058 - DNA, 849 bp, synthetic construct
  misc_feature 1..849: note = Description of Artificial Sequence: Synthetic coding sequence
  source 1..849: mol_type = other DNA
atggccctggtgctgatcctgcagctgctgaccctgtggcccctgtgccacaccgacatcacccccagcgtgccccccgccagctaccaccccaagccctggctgggcgcccagcccgccaccgtggtgacccccggcgtgaacgtgaccctgagatgcagagccccccagcccgcctggagattcggcctgttcaagcccggcgagatcgcccccctgctgttcagagacgtgagcagcgagctggccgagttcttcctggaggaggtgacccccgcccagggcggcatctacagatgctgctacagaagacccgactggggccccggcgtgtggagccagcccagcgacgtgctggagctgctggtgaccgaggagctgcccagacccagcctggtggccctgcccggccccgtggtgggccccggcgccaacgtgagcctgagatgcgccggcagactgagaaacatgagcttcgtgctgtacagagagggcgtggccgcccccctgcagtacagacacagcgcccagccctgggccgacttcaccctgctgggcgccagagcccccggcacctacagctgctactaccacacccccagcgccccctacgtgctgagccagagaagcgaggtgctggtgatcagctgggagggcgagggccccgaggccagacccgccagcagcgcccccggcatgcaggcccccggccccccccccagcgaccccggcgcccaggcccccagcctgagcagcttcagacccagaggcctggtgctgcagcccctgctgccccagacccaggacagctgggaccccgcccccccccccagcgaccccggcgtgtag

SEQ ID NO: 92059 - DNA, 759 bp, synthetic construct
  misc_feature 1..759: note = Description of Artificial Sequence: Synthetic coding sequence
  source 1..759: mol_type = other DNA
atggccctggtgctgatcctgcagctgctgaccctgttcccccccgccagctaccaccccaagccctggctgggcgcccagcccgccaccgtggtgacccccggcgtgaacgtgaccctgagatgcagagccccccagcccgcctggagattcggcctgttcaagcccggcgagatcgcccccctgctgttcagagacgtgagcagcgagctggccgagttcttcctggaggaggtgacccccgcccagggcggcatctacagatgctgctacagaagacccgactggggccccggcgtgtggagccagcccagcgacgtgctggagctgctggtgaccgaggagctgcccagacccagcctggtggccctgcccggccccgtggtgggccccggcgccaacgtgagcctgagatgcgccggcagactgagaaacatgagcttcgtgctgtacagagagggcgtggccgcccccctgcagtacagacacagcgcccagccctgggccgacttcaccctgctgggcgccagagcccccggcacctacagctgctactaccacacccccagcgccccctacgtgctgagccagagaagcgaggtgctggtgatcagctgggaggacagcggcagcagcgactacaccagaggcaacctggtgagactgggcctggccggcctggtgctgatcagcctgggcgccctggtgaccttcgactggagaagccagaacagagcccccgccggcatcagaccctag

SEQ ID NO: 92060 - DNA, 804 bp, synthetic construct
  misc_feature 1..804: note = Description of Artificial Sequence: Synthetic coding sequence
  source 1..804: mol_type = other DNA
atggccctggtgctgatcctgcagctgctgaccctgtggcccctgtgccacaccgacatcacccccagcgtggccatcatcgtgccccccgccagctaccaccccaagccctggctgggcgcccagcccgccaccgtggtgacccccggcgtgaacgtgaccctgagatgcagagccccccagcccgcctggagattcggcctgttcaagcccggcgagatcgcccccctgctgttcagagacgtgagcagcgagctggccgagttcttcctggaggaggtgacccccgcccagggcggcatctacagatgctgctacagaagacccgactggggccccggcgtgtggagccagcccagcgacgtgctggagctgctggtgaccgaggagctgcccagacccagcctggtggccctgcccggccccgtggtgggccccggcgccaacgtgagcctgagatgcgccggcagactgagaaacatgagcttcgtgctgtacagagagggcgtggccgcccccctgcagtacagacacagcgcccagccctgggccgacttcaccctgctgggcgccagagcccccggcacctacagctgctactaccacacccccagcgccccctacgtgctgagccagagaagcgaggtgctggtgatcagctgggaggacagcggcagcagcgactacaccagaggcaacctggtgagactgggcctggccggcctggtgctgatcagcctgggcgccctggtgaccttcgactggagaagccagaacagagcccccgccggcatcagaccctag

SEQ ID NO: 92061 - DNA, 792 bp, synthetic construct
  misc_feature 1..792: note = Description of Artificial Sequence: Synthetic coding sequence
  source 1..792: mol_type = other DNA
atggccctggtgctgatcctgcagctgctgaccctgtggcccctgtgccacaccgacatcacccccagcgtgccccccgccagctaccaccccaagccctggctgggcgcccagcccgccaccgtggtgacccccggcgtgaacgtgaccctgagatgcagagccccccagcccgcctggagattcggcctgttcaagcccggcgagatcgcccccctgctgttcagagacgtgagcagcgagctggccgagttcttcctggaggaggtgacccccgcccagggcggcatctacagatgctgctacagaagacccgactggggccccggcgtgtggagccagcccagcgacgtgctggagctgctggtgaccgaggagctgcccagacccagcctggtggccctgcccggccccgtggtgggccccggcgccaacgtgagcctgagatgcgccggcagactgagaaacatgagcttcgtgctgtacagagagggcgtggccgcccccctgcagtacagacacagcgcccagccctgggccgacttcaccctgctgggcgccagagcccccggcacctacagctgctactaccacacccccagcgccccctacgtgctgagccagagaagcgaggtgctggtgatcagctgggaggacagcggcagcagcgactacaccagaggcaacctggtgagactgggcctggccggcctggtgctgatcagcctgggcgccctggtgaccttcgactggagaagccagaacagagcccccgccggcatcagaccctag

SEQ ID NO: 92062 - DNA, 645 bp, synthetic construct
  misc_feature 1..645: note = Description of Artificial Sequence: Synthetic coding sequence
  source 1..645: mol_type = other DNA
atgagcaagcccccccccaagcccgtgaagcccggccaggtgaaggtgttcagagccctgtacaccttcgagcccagaacccccgacgagctgtacttcgaggagggcgacatcatctacatcaccgacatgagcgacaccaactggtggaagggcaccagcaagggcagaaccggcctgatccccagcaactacgtggccgagcaggccgagagcatcgacaaccccctgcacgaggccgccaagagaggcaacctgagctggctgagagagtgcctggacaacagagtgggcgtgaacggcctggacaaggccggcagcaccgccctgtactgggcctgccacggcggccacaaggacatcgtggagatgctgttcacccagcccaacatcgagctgaaccagcagaacaagctgggcgacaccgccctgcacgccgccgcctggaagggctacgccgacatcgtgcagctgctgctggccaagggcgccagaaccgacctgagaaacatcgagaagaagctggccttcgacatggccaccaacgccgcctgcgccagcctgctgaagaagaagcagggcaccgacgccgtgagaaccctgagcaacgccgaggactacctggacgacgaggacagcgactag

SEQ ID NO: 92063 - DNA, 897 bp, synthetic construct
  misc_feature 1..897: note = Description of Artificial Sequence: Synthetic coding sequence
  source 1..897: mol_type = other DNA
atgaagaccctgcagagcaccctgctgctgctgctgctggtgcccctgatcaagcccgccccccccacccagcaggacagcagaatcatctacgactacggcaccgacaacttcgaggagagcatcttcagccaggactacgaggacaagtacctggacggcaagaacatcaaggagaaggagaccgtgatcatccccaacgagaagagcctgcagctgcagaaggacgaggccatcacccccctgccccccaagaaggagaacgacgagatgcccacctgcctgctgtgcgtgtgcctgagcggcagcgtgtactgcgaggaggtggacatcgacgccgtgccccccctgcccaaggagagcgcctacctgtacgccagattcaacaagatcaagaagctgaccgccaaggacttcgccgacatccccaacctgagaagactggacttcaccggcaacctgatcgaggacatcgaggacggcaccttcagcaagctgagcctgctggaggagctgagcctggccgagaaccagctgctgaagctgcccgtgctgccccccaagctgaccctgttcaacgccaagtacaacaagatcaagagcagaggcatcaaggccaacgccttcaagaagctgaacaacctgaccttcctgtacctggaccacaacgccctggagagcgtgcccctgaacctgcccgagagcctgagagtgatccacctgcagttcaacaacatcgccagcatcaccgacgacaccttctgcaaggccaacgacaccagctacatcagagacagaatcgaggagatcagactggagggcaaccccatcgtgctgggcaagcaccccaacagcttcatctgcctgaagagactgcccatcggcagctacttctag

SEQ ID NO: 92064 - DNA, 897 bp, synthetic construct; identical to SEQ ID NO: 92063
  misc_feature 1..897: note = Description of Artificial Sequence: Synthetic coding sequence
  source 1..897: mol_type = other DNA

SEQ ID NO: 92065 - DNA, 807 bp, synthetic construct
  misc_feature 1..807: note = Description of Artificial Sequence: Synthetic coding sequence
  source 1..807: mol_type = other DNA
atgctggccaagatcagcaccacctggaagctgttcctgaagctgctgggccccgagatcctgctgagcagcctgaagagcagacacagcttcagccacagccccagccacctgggcctgatgcacagacacgagcacctgctgagaaagaccaccaagaacttcaagaccgccaccaccaccctgcagagcaccctgctgctgctgctgctggtgcccctgatcaagcccgccccccccacccagcaggacagcagaatcatctacgactacggcaccgacaacttcgaggagagcatcttcagccaggactacgaggacaagtacctggacggcaagaacatcaaggagaaggagaccgtgatcatccccaacgagaagagcctgcagctgcagaaggacgaggccatcacccccctgccccccaagaaggagaacgacgagatgcccacctgcctgctgtgcgtgtgcctgagcggcagcgtgtactgcgaggaggtggacatcgacgccgtgccccccctgcccaaggagagcgcctacctgtacgccagattcaacaagatcaagaagctgaccgccaaggacttcgccgacatccccaacctgagaagactggacttcaccggcaacctgatcgaggacatcgaggacggcaccttcagcaagctgagcctgctggaggagctgagcctggccgagaaccagctgctgaagctgcccgtgctgccccccaagctgaccctgttcaacgccaagtacaacaagatcaagagcagaggcatcaaggccaacgccttcaagtag

SEQ ID NO: 92066 - DNA, 1842 bp, synthetic construct
  misc_feature 1..1842: note = Description of Artificial Sequence: Synthetic coding sequence
  source 1..1842: mol_type = other DNA
atggccgccgagaccctgctgagcagcctgctgggcctgctgctgctgggcctgctgctgcccgccagcctgaccggcggcgtgggcagcctgaacctggaggagctgagcgagatgagatacggcatcgagatcctgcccctgcccgtgatgggcggccagagccagagcagcgacgtggtgatcgtgagcagcaagtacaagcagagatacgagtgcagactgcccgccggcgccatccacttccagagagagagagaggaggagacccccgcctaccagggccccggcatccccgagctgctgagccccatgagagacgccccctgcctgctgaagaccaaggactggtggacctacgagttctgctacggcagacacatccagcagtaccacatggaggacagcgagatcaagggcgaggtgctgtacctgggctactaccagagcgccttcgactgggacgacgagaccgccaaggccagcaagcagcacagactgaagagataccacagccagacctacggcaacggcagcaagtgcgacctgaacggcagacccagagaggccgaggtgagattcctgtgcgacgagggcgccggcatcagcggcgactacatcgacagagtggacgagcccctgagctgcagctacgtgctgaccatcagaacccccagactgtgcccccaccccctgctgagacccccccccagcgccgccccccaggccatcctgtgccaccccagcctgcagcccgaggagtacatggcctacgtgcagagacaggccgtggacagcaagcagtacggcgacaagatcatcgaggagctgcaggacctgggcccccaggtgtggagcgagaccaagagcggcgtggccccccagaagatggccggcgccagccccaccaaggacgacagcaaggacagcgacttctggaagatgctgaacgagcccgaggaccaggcccccggcggcgaggaggtgcccgccgaggagcaggaccccagccccgaggccgccgacagcgccagcggcgcccccaacgacttccagaacaacgtgcaggtgaaggtgatcagaagccccgccgacctgatcagattcatcgaggagctgaagggcggcaccaagaagggcaagcccaacatcggccaggagcagcccgtggacgacgccgccgaggtgccccagagagagcccgagaaggagagaggcgaccccgagagacagagagagatggaggaggaggaggacgaggacgaggacgaggacgaggacgaggacgagagacagctgctgggcgagttcgagaaggagctggagggcatcctgctgcccagcgacagagacagactgagaagcgaggtgaaggccggcatggagagagagctggagaacatcatccaggagaccgagaaggagctggaccccgacggcctgaagaaggagagcgagagagacagagccatgctggccctgaccagcaccctgaacaagctgatcaagagactggaggagaagcagagccccgagctggtgaagaagcacaagaagaagagagtggtgcccaagaagcccccccccagcccccagcccaccggcaagatcgagatcaagatcgtgagaccctgggccgagggcaccgaggagggcgccagatggctgaccgacgaggacaccagaaacctgaaggagatcttcttcaacatcctggtgcccggcgccgaggaggcccagaaggagagacagagacagaaggagctggagagcaactacagaagagtgtggggcagccccggcggcgagggcaccggcgacctggacgagttcgacttctag

SEQ ID NO: 92067 - DNA, 1959 bp, synthetic construct
  misc_feature 1..1959: note = Description of Artificial Sequence: Synthetic coding sequence
  source 1..1959: mol_type = other DNA
atggccgccgagaccctgctgagcagcctgctgggcctgctgctgctgggcctgctgctgcccgccagcctgaccggcggcgtgggcagcctgaacctggaggagctgagcgagatgagatacggcatcgagatcctgcccctgcccgtgatgggcggccagagccagagcagcgacgtggtgatcgtgagcagcaagtacaagcagagatacgagtgcagactgcccgccggcgccatccacttccagagagagagagaggaggagacccccgcctaccagggccccggcatccccgagctgctgagccccatgagagacgccccctgcctgctgaagaccaaggactggtggacctacgagttctgctacggcagacacatccagcagtaccacatggaggacagcgagatcaagggcgaggtgctgtacctgggctactaccagagcgccttcgactgggacgacgagaccgccaaggccagcaagcagcacagactgaagagataccacagccagacctacggcaacggcagcaagtgcgacctgaacggcagacccagagaggccgaggtgagattcctgtgcgacgagggcgccggcatcagcggcgactacatcgacagagtggacgagcccctgagctgcagctacgtgctgaccatcagaacccccagactgtgcccccaccccctgctgagacccccccccagcgccgccccccaggccatcctgtgccaccccagcctgcagcccgaggagtacatggcctacgtgcagagacaggccgacagcaagcagtacggcgacaagatcatcgaggagctgcaggacctgggcccccaggtgtggagcgagaccaagagcggcgtggccccccagaagatggccggcgccagccccaccaaggacgacagcaaggacagcgacttctggaagatgctgaacgagcccgaggaccaggcccccggcggcgaggaggtgcccgccgaggagcaggaccccagccccgaggccgccgacagcgccagcggcgcccccaacgacttccagaacaacgtgcaggtgaaggtgatcagaagccccgccgacctgatcagattcatcgaggagctgaagggcggcaccaagaagggcaagcccaacatcggccaggagcagcccgtggacgacgccgccgaggtgccccagagagagcccgagaaggagagaggcgaccccgagagacagagagagatggaggaggaggaggacgaggacgaggacgaggacgaggacgaggacgagagacagctgctgggcgagttcgagaaggagctggagggcatcctgctgcccagcgacagagacagactgagaagcgagaccgagaaggagctggaccccgacggcctgaagaaggagagcgagagagacagagccatgctggccctgaccagcaccctgaacaagctgatcaagagactggaggagaagcagagccccgagctggtgaagaagcacaagaagaagagagtggtgcccaagaagcccccccccagcccccagcccaccgaggaggaccccgagcacagagtgagagtgagagtgaccaagctgagactgggcggccccaaccaggacctgaccgtgctggagatgaagagagagaacccccagctgaagcagatcgagggcctggtgaaggagctgctggagagagagggcctgaccgccgccggcaagatcgagatcaagatcgtgagaccctgggccgagggcaccgaggagggcgccagatggctgaccgacgaggacaccagaaacctgaaggagatcttcttcaacatcctggtgcccggcgccgaggaggcccagaaggagagacagagacagaaggagctggagagcaactacagaagagtgtggggcagccccggcggcgagggcaccggcgacctggacgagttcgacttctag

SEQ ID NO: 92068 - DNA, 1683 bp, synthetic construct
  misc_feature 1..1683: note = Description of Artificial Sequence: Synthetic coding sequence
  source 1..1683: mol_type = other DNA
atggccgccgagaccctgctgagcagcctgctgggcctgctgctgctgggcctgctgctgcccgccagcctgaccggcggcgtgggcagcctgaacctggaggagctgagcgagatgagatacggcatcgagatcctgcccctgcccgtgatgggcggccagagccagagcagcgacgtggtgatcgtgagcagcaagtacaagcagagatacgagtgcagactgcccgccggcgccatccacttccagagagagagagaggaggagacccccgcctaccagggccccggcatccccgagctgctgagccccatgagagacgccccctgcctgctgaagaccaaggactggtggacctacgagttctgctacggcagacacatccagcagtaccacatggaggacagcgagatcaagggcgagttcctgtgcgacgagggcgccggcatcagcggcgactacatcgacagagtggacgagcccctgagctgcagctacgtgctgaccatcagaacccccagactgtgcccccaccccctgctgagacccccccccagcgccgccccccaggccatcctgtgccaccccagcctgcagcccgaggagtacatggcctacgtgcagagacaggccgacagcaagcagtacggcgacaagatcatcgaggagctgcaggacctgggcccccaggtgtggagcgagaccaagagcggcgtggccccccagaagatggccggcgccagccccaccaaggacgacagcaaggacagcgacttctggaagatgctgaacgagcccgaggaccaggcccccggcggcgaggaggtgcccgccgaggagcaggaccccagccccgaggccgccgacagcgccagcggcgcccccaacgacttccagaacaacgtgcaggtgaaggtgatcagaagccccgccgacctgatcagattcatcgaggagctgaagggcggcaccaagaagggcaagcccaacatcggccaggagcagcccgtggacgacgccgccgaggtgccccagagagagcccgagaaggagagaggcgaccccgagagacagagagagatggaggaggaggaggacgaggacgaggacgaggacgaggacgaggacgagagacagctgctgggcgagttcgagaaggagctggagggcatcctgctgcccagcgacagagacagactgagaagcgaggtgaaggccggcatggagagagagctggagaacatcatccaggagaccgagaaggagctggaccccgacggcctgaagaaggagagcgagagagacagagccatgctggccctgaccagcaccctgaacaagctgatcaagagactggaggagaagcagagccccgagctggtgaagaagcacaagaagaagagagtggtgcccaagaagcccccccccagcccccagcccaccggcaagatcgagatcaagatcgtgagaccctgggccgagggcaccgaggagggcgccagatggctgaccgacgaggacaccagaaacctgaaggagatcttcttcaacatcctggtgcccggcgccgaggaggcccagaaggagagacagagacagaaggagctggagagcaactacagaagagtgtggggcagccccggcggcgagggcaccggcgacctggacgagttcgacttctag

SEQ ID NO: 92069 - DNA, 1743 bp, synthetic construct
  misc_feature 1..1743: note = Description of Artificial Sequence: Synthetic coding sequence
  source 1..1743: mol_type = other DNA
atggccgccgagaccctgctgagcagcctgctgggcctgctgctgctgggcctgctgctgcccgccagcctgaccggcggcgtgggcagcctgaacctggaggagctgagcgagatgagatacggcatcgagatcctgcccctgcccgtgatgggcggccagagccagagcagcgacgtggtgatcgtgagcagcaagtacaagcagagatacgagtgcagactgcccgccggcgccatccacttccagagagagagagaggaggagacccccgcctaccagggccccggcatccccgagctgctgagccccatgagagacgccccctgcctgctgaagaccaaggactggtggacctacgagttctgctacggcagacacatccagcagtaccacatggaggacagcgagatcaagggcgaggtgctgtacctgggctactaccagagcgccttcgactgggacgacgagaccgccaagttcctgtgcgacgagggcgccggcatcagcggcgactacatcgacagagtggacgagcccctgagctgcagctacgtgctgaccatcagaacccccagactgtgcccccaccccctgctgagacccccccccagcgccgccccccaggccatcctgtgccaccccagcctgcagcccgaggagtacatggcctacgtgcagagacaggccgtggacagcaagcagtacggcgacaagatcatcgaggagctgcaggacctgggcccccaggtgtggagcgagaccaagagcggcgtggccccccagaagatggccggcgccagccccaccaaggacgacagcaaggacagcgacttctggaagatgctgaacgagcccgaggaccaggcccccggcggcgaggaggtgcccgccgaggagcaggaccccagccccgaggccgccgacagcgccagcggcgcccccaacgacttccagaacaacgtgcaggtgaaggtgatcagaagccccgccgacctgatcagattcatcgaggagctgaagggcggcaccaagaagggcaagcccaacatcggccaggagcagcccgtggacgacgccgccgaggtgccccagagagagcccgagaaggagagaggcgaccccgagagacagagagagatggaggaggaggaggacgaggacgaggacgaggacgaggacgaggacgagagacagctgctgggcgagttcgagaaggagctggagggcatcctgctgcccagcgacagagacagactgagaagcgaggtgaaggccggcatggagagagagctggagaacatcatccaggagaccgagaaggagctggaccccgacggcctgaagaaggagagcgagagagacagagccatgctggccctgaccagcaccctgaacaagctgatcaagagactggaggagaagcagagccccgagctggtgaagaagcacaagaagaagagagtggtgcccaagaagcccccccccagcccccagcccaccggcaagatcgagatcaagatcgtgagaccctgggccgagggcaccgaggagggcgccagatggctgaccgacgaggacaccagaaacctgaaggagatcttcttcaacatcctggtgcccggcgccgaggaggcccagaaggagagacagagacagaaggagctggagagcaactacagaagagtgtggggcagccccggcggcgagggcaccggcgacctggacgagttcgacttctag

SEQ ID NO: 92070 - DNA, 2004 bp, synthetic construct
  misc_feature 1..2004: note = Description of Artificial Sequence: Synthetic coding sequence
  source 1..2004: mol_type = other DNA
atggccgccgagaccctgctgagcagcctgctgggcctgctgctgctgggcctgctgctgcccgccagcctgaccggcggcgtgggcagcctgaacctggaggagctgagcgagatgagatacggcatcgagatcctgcccctgcccgtgatgggcggccagagccagagcagcgacgtggtgatcgtgagcagcaagtacaagcagagatacgagtgcagactgcccgccggcgccatccacttccagagagagagagaggaggagacccccgcctaccagggccccggcatccccgagctgctgagccccatgagagacgccccctgcctgctgaagaccaaggactggtggacctacgagttctgctacggcagacacatccagcagtaccacatggaggacagcgagatcaagggcgaggtgctgtacctgggctactaccagagcgccttcgactgggacgacgagaccgccaaggccagcaagcagcacagactgaagagataccacagccagacctacggcaacggcagcaagtgcgacctgaacggcagacccagagaggccgaggtgagattcctgtgcgacgagggcgccggcatcagcggcgactacatcgacagagtggacgagcccctgagctgcagctacgtgctgaccatcagaacccccagactgtgcccccaccccctgctgagacccccccccagcgccgccccccaggccatcctgtgccaccccagcctgcagcccgaggagtacatggcctacgtgcagagacaggccgacagcaagcagtacggcgacaagatcatcgaggagctgcaggacctgggcccccaggtgtggagcgagaccaagagcggcgtggccccccagaagatggccggcgccagccccaccaaggacgacagcaaggacagcgacttctggaagatgctgaacgagcccgaggaccaggcccccggcggcgaggaggtgcccgccgaggagcaggaccccagccccgaggccgccgacagcgccagcggcgcccccaacgacttccagaacaacgtgcaggtgaaggtgatcagaagccccgccgacctgatcagattcatcgaggagctgaagggcggcaccaagaagggcaagcccaacatcggccaggagcagcccgtggacgacgccgccgaggtgccccagagagagcccgagaaggagagaggcgaccccgagagacagagagagatggaggaggaggaggacgaggacgaggacgaggacgaggacgaggacgagagacagctgctgggcgagttcgagaaggagctggagggcatcctgctgcccagcgacagagacagactgagaagcgaggtgaaggccggcatggagagagagctggagaacatcatccaggagaccgagaaggagctggaccccgacggcctgaagaaggagagcgagagagacagagccatgctggccctgaccagcaccctgaacaagctgatcaagagactggaggagaagcagagccccgagctggtgaagaagcacaagaagaagagagtggtgcccaagaagcccccccccagcccccagcccaccgaggaggaccccgagcacagagtgagagtgagagtgaccaagctgagactgggcggccccaaccaggacctgaccgtgctggagatgaagagagagaacccccagctgaagcagatcgagggcctggtgaaggagctgctggagagagagggcctgaccgccgccggcaagatcgagatcaagatcgtgagaccctgggccgagggcaccgaggagggcgccagatggctgaccgacgaggacaccagaaacctgaaggagatcttcttcaacatcctggtgcccggcgccgaggaggcccagaaggagagacagagacagaaggagctggagagcaactacagaagagtgtggggcagccccggcggcgagggcaccggcgacctggacgagttcgacttctag

SEQ ID NO: 92071 - DNA, 1794 bp, synthetic construct
  misc_feature 1..1794: note = Description of Artificial Sequence: Synthetic coding sequence
  source 1..1794: mol_type = other DNA
atggccgccgagaccctgctgagcagcctgctgggcctgctgctgctgggcctgctgctgcccgccagcctgaccggcggcgtgggcagcctgaacctggaggagctgagcgagatgagatacggcatcgagatcctgcccctgcccgtgatgggcggccagagccagagcagcgacgtggtgatcgtgagcagcaagtacaagcagagatacgagtgcagactgcccgccggcgccatccacttccagagagagagagaggaggagacccccgcctaccagggccccggcatccccgagctgctgagccccatgagagacgccccctgcctgctgaagaccaaggactggtggacctacgagttctgctacggcagacacatccagcagtaccacatggaggacagcgagatcaagggcgaggtgctgtacctgggctactaccagagcgccttcgactgggacgacgagaccgccaaggccagcaagcagcacagactgaagagataccacagccagacctacggcaacggcagcaagtgcgacctgaacggcagacccagagaggccgaggtgagattcctgtgcgacgagggcgccggcatcagcggcgactacatcgacagagtggacgagcccctgagctgcagctacgtgctgaccatcagaacccccagactgtgcccccaccccctgctgagacccccccccagcgccgccccccaggccatcctgtgccaccccagcctgcagcccgaggagtacatggcctacgtgcagagacaggccgacagcaagcagtacggcgacaagatcatcgaggagctgcaggacctgggcccccaggtgtggagcgagaccaagagcggcgtggccccccagaagatggccggcgccagccccaccaaggacgacagcaaggacagcgacttctggaagatgctgaacgagcccgaggaccaggcccccggcggcgaggaggtgcccgccgaggagcaggaccccagccccgaggccgccgacagcgccagcggcgcccccaacgacttccagaacaacgtgcaggtgaaggtgatcagaagccccgccgacctgatcagattcatcgaggagctgaagggcggcaccaagaagggcaagcccaacatcggccaggagcagcccgtggacgacgccgccgaggtgccccagagagagcccgagaaggagagaggcgaccccgagagacagagagagatggaggaggaggaggacgaggacgaggacgaggacgaggacgaggacgagagacagctgctgggcgagttcgagaaggagctggagggcatcctgctgcccagcgacagagacagactgagaagcgagaccgagaaggagctggaccccgacggcctgaagaaggagagcgagagagacagagccatgctggccctgaccagcaccctgaacaagctgatcaagagactggaggagaagcagagccccgagctggtgaagaagcacaagaagaagagagtggtgcccaagaagcccccccccagcccccagcccaccggcaagatcgagatcaagatcgtgagaccctgggccgagggcaccgaggagggcgccagatggctgaccgacgaggacaccagaaacctgaaggagatcttcttcaacatcctggtgcccggcgccgaggaggcccagaaggagagacagagacagaaggagctggagagcaactacagaagagtgtggggcagccccggcggcgagggcaccggcgacctggacgagttcgacttctag

SEQ ID NO: 92072 - DNA, 1839 bp, synthetic construct
  misc_feature 1..1839: note = Description of Artificial Sequence: Synthetic coding sequence
  source 1..1839: mol_type = other DNA
atggccgccgagaccctgctgagcagcctgctgggcctgctgctgctgggcctgctgctgcccgccagcctgaccggcggcgtgggcagcctgaacctggaggagctgagcgagatgagatacggcatcgagatcctgcccctgcccgtgatgggcggccagagccagagcagcgacgtggtgatcgtgagcagcaagtacaagcagagatacgagtgcagactgcccgccggcgccatccacttccagagagagagagaggaggagacccccgcctaccagggccccggcatccccgagctgctgagccccatgagagacgccccctgcctgctgaagaccaaggactggtggacctacgagttctgctacggcagacacatccagcagtaccacatggaggacagcgagatcaagggcgaggtgctgtacctgggctactaccagagcgccttcgactgggacgacgagaccgccaaggccagcaagcagcacagactgaagagataccacagccagacctacggcaacggcagcaagtgcgacctgaacggcagacccagagaggccgaggtgagattcctgtgcgacgagggcgccggcatcagcggcgactacatcgacagagtggacgagcccctgagctgcagctacgtgctgaccatcagaacccccagactgtgcccccaccccctgctgagacccccccccagcgccgccccccaggccatcctgtgccaccccagcctgcagcccgaggagtacatggcctacgtgcagagacaggccgacagcaagcagtacggcgacaagatcatcgaggagctgcaggacctgggcccccaggtgtggagcgagaccaagagcggcgtggccccccagaagatggccggcgccagccccaccaaggacgacagcaaggacagcgacttctggaagatgctgaacgagcccgaggaccaggcccccggcggcgaggaggtgcccgccgaggagcaggaccccagccccgaggccgccgacagcgccagcggcgcccccaacgacttccagaacaacgtgcaggtgaaggtgatcagaagccccgccgacctgatcagattcatcgaggagctgaagggcggcaccaagaagggcaagcccaacatcggccaggagcagcccgtggacgacgccgccgaggtgccccagagagagcccgagaaggagagaggcgaccccgagagacagagagagatggaggaggaggaggacgaggacgaggacgaggacgaggacgaggacgagagacagctgctgggcgagttcgagaaggagctggagggcatcctgctgcccagcgacagagacagactgagaagcgaggtgaaggccggcatggagagagagctggagaacatcatccaggagaccgagaaggagctggaccccgacggcctgaagaaggagagcgagagagacagagccatgctggccctgaccagcaccctgaacaagctgatcaagagactggaggagaagcagagccccgagctggtgaagaagcacaagaagaagagagtggtgcccaagaagcccccccccagcccccagcccaccggcaagatcgagatcaagatcgtgagaccctgggccgagggcaccgaggagggcgccagatggctgaccgacgaggacaccagaaacctgaaggagatcttcttcaacatcctggtgcccggcgccgaggaggcccagaaggagagacagagacagaaggagctggagagcaactacagaagagtgtggggcagccccggcggcgagggcaccggcgacctggacgagttcgacttctag

SEQ ID NO: 92073 - DNA, 3462 bp, synthetic construct
  misc_feature 1..3462: note = Description of Artificial Sequence: Synthetic coding sequence
  source 1..3462: mol_type = other DNA
atgagccaggagcccaccacctacagcctgttcctgttcctgttcctgagccacggcgtgagcagctacaccgtgcccaacagcagacaggacctgcaccccctgctgcagaacatggccgaggagatcatcgacggcagctacctgaacgccctgctggacctgatccagttccagagcagccacgtgtggaccgacgacctgagccacagagtgctggcctacctgaacagcagaaacgtggccttcaccatccccagcctgcaggccgccgtggagaaccacctggagcagagactgcaccagccccagaagctgctggaggacctgagaaagaccgacgcccagcagttcagaaccgccatgaagtgcctgctggaggacaagaaggacggcctggacctgaaggacatcatcatcgacctgggcgagatcagagagagagccctgcagagccccggcgtgaacagaagcctgttcctgatcaccctggagagatgcttccagatgctgaacagcctggagtgcgtggagatcctgggcaaggtgctgagaggcagcagcggcagcttcctgcagcccgacatcaccgagagactgcccagagacctgagagaggacgccttcaagaacctgagcgccgtgttcaaggacctgtacgacaagaccagcgcccacagccagagagccctgtacagctggatgaccggcatcctgcagaccagcagcaacgccaccgacgacagcgccagctgggtgagcgccgagcacctgtgggtgctgggcagatacatggtgcacctgagcttcgaggagatcaccaagatcagccccatcgagatcggcctgttcatcagctacgacaacgccaccaagcagctggacatggtgtacgacatcacccccgagctggcccaggccttcctggagagaatcagcagcagcaacttcaacatgagaaacaccagcaccatccacagacaggcccacgagctgtgggccctggagcccttccccaagatgctgggcctgctggtgtgcttctacaacgacctggagctgctggacgccaccgtggcccaggtgctgctgtaccagatgatcaagtgcagccacctgagaggcttccaggccggcgtgcagaagctgaaggccgagctgctggacatcgccatggagaaccagaccctgaacgagaccctgggcagcctgagcgacgccgtggtgggcctgacctacagccagctggagagcctgagccccgaggccgtgcacggcgccatcagcaccctgaaccaggtgagcggctgggccaagagccaggtgatcatcctgagcgccaagtacctggcccacgagaaggtgctgagcttctacaacgtgagccagatgggcgccctgctggccggcgtgagcacccaggccttctgcagcatgaagagaaaggacatcagccaggtgctgagaagcgccgtgagccagtacgtgagcgacctgagccccgcccagcagcagggcatcctgagcaagatggtgcaggccgaggacaccgcccccggcatcgtggagatccagggcgccttcttcaaggaggtgagcctgttcgacctgagaagacagcccggcttcaacagcaccgtgctgaaggacaaggagctgggcagaagccaggccctgttcctgtacgagctgctgctgaagaccaccagaagacccgaggagctgctgagcgccggccagctggtgaagggcgtgacctgcagccacatcgacgccatgagcaccgacttcttcctggcccacttccaggacttccagaacaacttcgccctgctgagcccctaccaggtgaactgcctggcctggaagtactgggaggtgagcagactgagcatgccccccttcctgctggccgccctgcccgccagatacctggccagcgtgcccgccagccagtgcgtgcccttcctgatcagcctgggcaagagctggctggacagcctggtgctggacagccacaagaagaccagcgtgctgagaaaggtgcagcagtgcctggacgacagcatcgccgacgagtacaccgtggacatcatgggcaacctgctgtgccacctgcccgccgccatcatcgacagaggcatcagccccagagcctgggccaccgccctgcacggcctgagagactgccccgacctgaaccccgagcagaaggccgccgtgagactgaagctgctgggccagtacggcctgccccagcactggaccgccgagaccaccaaggacctgggccccttcctggtgctgttcagcggcgacgagctgagcagcatcgccaccaagttccccgagatcctgctgcaggccgccagcaagatggccagaaccctgcccaccaaggagttcctgtgggccgtgttccagagcgtgagaaacagcagcgacaagatccccagctacgaccccatgcccggctgccacggcgtggtggcccccagcagcgacgacatcttcaagctggccgaggccaacgcctgctgggccctggaggacctgagatgcatggaggaggacaccttcatcagaaccgtggagctgctgggcgccgtgcagggcttcagcagaccccagctgatgaccctgaaggagaaggccatccaggtgtgggacatgcccagctactggagagagcaccacatcgtgagcctgggcagaatcgccctggccctgaacgagagcgagctggagcagctggacctgagcagcatcgacaccgtggccagcctgagctggcagaccgagtggacccccggccaggccgagagcatcctgcagggctacctggacgacagcggctacagcatccaggacctgaagagcttccacctggtgggcctgggcgccaccctgtgcgccatcaacatcaccgagatccccctgatcaagatcagcgagttcagagtggtggtggccagaatcggcaccctgctgtgcagcacccacgtgctggccgagttcaagagaaaggccgaggtggtgttcggcgaccccaccgagtggaccagcagcgtgctgcaggagctgggcaccatcgccgccggcctgaccaaggccgagctgagaatgctggacaaggacctgatgccctacttccagcccagcgccatcaagtgcctgcccgacgagatcttcaaggagctgagcgccgagcagatcgccagcctgggccccgagaacgccgccgccgtgacccacgcccagagaagaagactgagccccctgcagctgcagagcctgcagcaggccctggacggcgccaagacccacagctggcaggacgcccccgccagcgccggccccaccagaaccagcagcagcagaagccccgccggcgccctgcagagctggggcctgtggctgggctgccccctgctggtgctgatggccaagctgctgtggtag

SEQ ID NO: 92074 - DNA, 1647 bp, synthetic construct
  misc_feature 1..1647: note = Description of Artificial Sequence: Synthetic coding sequence
  source 1..1647: mol_type = other DNA
cccagagccgtgtgggtggaggccagaggcggcgcccagcaccccaccatgagaagaaccgcccccctgcacagaggcacctggagcaagatgagcatcatcctgagagccagatacctggccagcgtgcccgccagccagtgcgtgcccttcctgatcagcctgggcaagagctggctggacagcctggtgctggacagccacaagaagaccagcgtgctgagaaaggtgcagcagtgcctggacgacagcatcgccgacgagtacaccgtggacatcatgggcaacctgctgtgccacctgcccgccgccatcatcgacagaggcatcagccccagagcctgggccaccgccctgcacggcctgagagactgccccgacctgaaccccgagcagaaggccgccgtgagactgaagctgctgggccagtacggcctgccccagcactggaccgccgagaccaccaaggacctgggccccttcctggtgctgttcagcggcgacgagctgagcagcatcgccaccaagttccccgagatcctgctgcaggccgccagcaagatggccagaaccctgcccaccaaggagttcctgtgggccgtgttccagagcgtgagaaacagcagcgacaagatccccagctacgaccccatgcccggctgccacggcgtggtggcccccagcagcgacgacatcttcaagctggccgaggccaacgcctgctgggccctggaggacctgagatgcatggaggaggacaccttcatcagaaccgtggagctgctgggcgccgtgcagggcttcagcagaccccagctgatgaccctgaaggagaaggccatccaggtgtgggacatgcccagctactggagagagcaccacatcgtgagcctgggcagaatcgccctggccctgaacgagagcgagctggagcagctggacctgagcagcatcgacaccgtggccagcctgagctggcagaccgagtggacccccggccaggccgagagcatcctgcagggctacctggacgacagcggctacagcatccaggacctgaagagcttccacctggtgggcctgggcgccaccctgtgcgccatcaacatcaccgagatccccctgatcaagatcagcgagttcagagtggtggtggccagaatcggcaccctgctgtgcagcacccacgtgctggccgagttcaagagaaaggccgaggtggtgttcggcgaccccaccgagtggaccagcagcgtgctgcaggagctgggcaccatcgccgccggcctgaccaaggccgagctgagaatgctggacaaggacctgatgccctacttccagcccagcgccatcaagtgcctgcccgacgagatcttcaaggagctgagcgccgagcagatcgccagcctgggccccgagaacgccgccgccgtgacccacgcccagagaagaagactgagccccctgcagctgcagagcctgcagcaggccctggacggcgccaagacccacagctggcaggacgcccccgccagcgccggccccaccagaaccagcagcagcagaagccccgccggcgccctgcagagctggggcctgtggctgggctgccccctgctggtgctgatggccaagctgctgtggtag

SEQ ID NO: 92075 - DNA, 3183 bp, synthetic construct
  misc_feature 1..3183: note = Description of Artificial Sequence: Synthetic coding sequence
  source 1..3183: mol_type = other DNA
atgggcaacagcatcacctacagagaccaggccgccgtggagaaccacctggagcagagactgcaccagccccagaagctgctggaggacctgagaaagaccgacgcccagcagttcagaaccgccatgaagtgcctgctggaggacaagaaggacggcctggacctgaaggacatcatcatcgacctgggcgagatcagagagagagccctgcagagccccggcgtgaacagaagcctgttcctgatcaccctggagagatgcttccagatgctgaacagcctggagtgcgtggagatcctgggcaaggtgctgagaggcagcagcggcagcttcctgcagcccgacatcaccgagagactgcccagagacctgagagaggacgccttcaagaacctgagcgccgtgttcaaggacctgtacgacaagaccagcgcccacagccagagagccctgtacagctggatgaccggcatcctgcagaccagcagcaacgccaccgacgacagcgccagctgggtgagcgccgagcacctgtgggtgctgggcagatacatggtgcacctgagcttcgaggagatcaccaagatcagccccatcgagatcggcctgttcatcagctacgacaacgccaccaagcagctggacatggtgtacgacatcacccccgagctggcccaggccttcctggagagaatcagcagcagcaacttcaacatgagaaacaccagcaccatccacagactgggcctgctggtgtgcttctacaacgacctggagctgctggacgccaccgtggcccaggtgctgctgtaccagatgatcaagtgcagccacctgagaggcttccaggccggcgtgcagaagctgaaggccgagctgctggacatcgccatggagaaccagaccctgaacgagaccctgggcagcctgagcgacgccgtggtgggcctgacctacagccagctggagagcctgagccccgaggccgtgcacggcgccatcagcaccctgaaccaggtgagcggctgggccaagagccaggtgatcatcctgagcgccaagtacctggcccacgagaaggtgctgagcttctacaacgtgagccagatgggcgccctgctggccggcgtgagcacccaggccttctgcagcatgaagagaaaggacatcagccaggtgctgagaagcgccgtgagccagtacgtgagcgacctgagccccgcccagcagcagggcatcctgagcaagatggtgcaggccgaggacaccgcccccggcatcgtggagatccagggcgccttcttcaaggaggtgagcctgttcgacctgagaagacagcccggcttcaacagcaccgtgctgaaggacaaggagctgggcagaagccaggccctgttcctgtacgagctgctgctgaagaccaccagaagacccgaggagctgctgagcgccggccagctggtgaagggcgtgacctgcagccacatcgacgccatgagcaccgacttcttcctggcccacttccaggacttccagaacaacttcgccctgctgagcccctaccaggtgaactgcctggcctggaagtactgggaggtgagcagactgagcatgccccccttcctgctggccgccctgcccgccagatacctggccagcgtgcccgccagccagtgcgtgcccttcctgatcagcctgggcaagagctggctggacagcctggtgctggacagccacaagaagaccagcgtgctgagaaaggtgcagcagtgcctggacgacagcatcgccgacgagtacaccgtggacatcatgggcaacctgctgtgccacctgcccgccgccatcatcgacagaggcatcagccccagagcctgggccaccgccctgcacggcctgagagactgccccgacctgaaccccgagcagaaggccgccgtgagactgaagctgctgggccagtacggcctgccccagcactggaccgccgagaccaccaaggacctgggccccttcctggtgctgttcagcggcgacgagctgagcagcatcgccaccaagttccccgagatcctgctgcaggccgccagcaagatggccagaaccctgcccaccaaggagttcctgtgggccgtgttccagagcgtgagaaacagcagcgacaagatccccagctacgaccccatgcccggctgccacggcgtggtggcccccagcagcgacgacatcttcaagctggccgaggccaacgcctgctgggccctggaggacctgagatgcatggaggaggacaccttcatcagaaccgtggagctgctgggcgccgtgcagggcttcagcagaccccagctgatgaccctgaaggagaaggccatccaggtgtgggacatgcccagctactggagagagcaccacatcgtgagcctgggcagaatcgccctggccctgaacgagagcgagctggagcagctggacctgagcagcatcgacaccgtggccagcctgagctggcagaccgagtggacccccggccaggccgagagcatcctgcagggctacctggacgacagcggctacagcatccaggacctgaagagcttccacctggtgggcctgggcgccaccctgtgcgccatcaacatcaccgagatccccctgatcaagatcagcgagttcagagtggtggtggccagaatcggcaccctgctgtgcagcacccacgtgctggccgagttcaagagaaaggccgaggtggtgttcggcgaccccaccgagtggaccagcagcgtgctgcaggagctgggcaccatcgccgccggcctgaccaaggccgagctgagaatgctggacaaggacctgatgccctacttccagcccagcgccatcaagtgcctgcccgacgagatcttcaaggagctgagcgccgagcagatcgccagcctgggccccgagaacgccgccgccgtgacccacgcccagagaagaagactgagccccctgcagctgcagagcctgcagcaggccctggacggcgccaagacccacagctggcaggacgcccccgccagcgccggccccaccagaaccagcagcagcagaagccccgccggcgccctgcagagctggggcctgtggctgggctgccccctgctggtgctgatggccaagctgctgtggtag

SEQ ID NO: 92076 - DNA, 2448 bp, synthetic construct
  misc_feature 1..2448: note = Description of Artificial Sequence: Synthetic coding sequence
  source 1..2448: mol_type = other DNA
atgttcagactgggcctgctggtgtgcttctacaacgacctggagctgctggacgccaccgtggcccaggtgctgctgtaccagatgatcaagtgcagccacctgagaggcttccaggccggcgtgcagaagctgaaggccgagctgctggacatcgccatggagaaccagaccctgaacgagaccctgggcagcctgagcgacgccgtggtgggcctgacctacagccagctggagagcctgagccccgaggccgtgcacggcgccatcagcaccctgaaccaggtgagcggctgggccaagagccaggtgatcatcctgagcgccaagtacctggcccacgagaaggtgctgagcttctacaacgtgagccagatgggcgccctgctggccggcgtgagcacccaggccttctgcagcatgaagagaaaggacatcagccaggtgctgagaagcgccgtgagccagtacgtgagcgacctgagccccgcccagcagcagggcatcctgagcaagatggtgcaggccgaggacaccgcccccggcatcgtggagatccagggcgccttcttcaaggaggtgagcctgttcgacctgagaagacagcccggcttcaacagcaccgtgctgaaggacaaggagctgggcagaagccaggccctgttcctgtacgagctgctgctgaagaccaccagaagacccgaggagctgctgagcgccggccagctggtgaagggcgtgacctgcagccacatcgacgccatgagcaccgacttcttcctggcccacttccaggacttccagaacaacttcgccctgctgagcccctaccaggtgaactgcctggcctggaagtactgggaggtgagcagactgagcatgccccccttcctgctggccgccctgcccgccagatacctggccagcgtgcccgccagccagtgcgtgcccttcctgatcagcctgggcaagagctggctggacagcctggtgctggacagccacaagaagaccagcgtgctgagaaaggtgcagcagtgcctggacgacagcatcgccgacgagtacaccgtggacatcatgggcaacctgctgtgccacctgcccgccgccatcatcgacagaggcatcagccccagagcctgggccaccgccctgcacggcctgagagactgccccgacctgaaccccgagcagaaggccgccgtgagactgaagctgctgggccagtacggcctgccccagcactggaccgccgagaccaccaaggacctgggccccttcctggtgctgttcagcggcgacgagctgagcagcatcgccaccaagttccccgagatcctgctgcaggccgccagcaagatggccagaaccctgcccaccaaggagttcctgtgggccgtgttccagagcgtgagaaacagcagcgacaagatccccagctacgaccccatgcccggctgccacggcgtggtggcccccagcagcgacgacatcttcaagctggccgaggccaacgcctgctgggccctggaggacctgagatgcatggaggaggacaccttcatcagaaccgtggagctgctgggcgccgtgcagggcttcagcagaccccagctgatgaccctgaaggagaaggccatccaggtgtgggacatgcccagctactggagagagcaccacatcgtgagcctgggcagaatcgccctggccctgaacgagagcgagctggagcagctggacctgagcagcatcgacaccgtggccagcctgagctggcagaccgagtggacccccggccaggccgagagcatcctgcagggctacctggacgacagcggctacagcatccaggacctgaagagcttccacctggtgggcctgggcgccaccctgtgcgccatcaacatcaccgagatccccctgatcaagatcagcgagttcagagtggtggtggccagaatcggcaccctgctgtgcagcacccacgtgctggccgagttcaagagaaaggccgaggtggtgttcggcgaccccaccgagtggaccagcagcgtgctgcaggagctgggcaccatcgccgccggcctgaccaaggccgagctgagaatgctggacaaggacctgatgccctacttccagcccagcgccatcaagtgcctgcccgacgagatcttcaaggagctgagcgccgagcagatcgccagcctgggccccgagaacgccgccgccgtgacccacgcccagagaagaagactgagccccctgcagctgcagagcctgcagcaggccctggacggcgccaagacccacagctggcaggacgcccccgccagcgccggccccaccagaaccagcagcagcagaagccccgccggcgccctgcagagctggggcctgtggctgggctgccccctgctggtgctgatggccaagctgctgtggtag

SEQ ID NO: 92077 - DNA, 3420 bp, synthetic construct
  misc_feature 1..3420: note = Description of Artificial Sequence: Synthetic coding sequence
  source 1..3420: mol_type = other DNA
atgagccaggagcccaccacctacagcctgttcctgttcctgttcctgagccacggcgtgagcagctacaccgtgcccaacagcagacaggacctgcaccccctgctgcagaacatggccgaggagatcatcgacggcagctacctgaacgccctgctggacctgatccagttccagagcagccacgtgtggaccgacgacctgagccacagagtgctggcctacctgaacagcagaaacgtggccttcaccatccccagcctgcaggccgccgtggagaaccacctggagcagagactgcaccagccccagaagctgctggaggacctgagaaagaccgacgcccagcagttcagaaccgccatgaagtgcctgctggaggacaagaaggacggcctggacctgaaggacatcatcatcgacctgggcgagatcagagagagagccctgcagagccccggcgtgaacagaagcctgttcctgatcaccctggagagatgcttccagatgctgaacagcctggagtgcgtggagatcctgggcaaggtgctgagaggcagcagcggcagcttcctgcagcccgacatcaccgagagactgcccagagacctgagagaggacgccttcaagaacctgagcgccgtgttcaaggacctgtacgacaagaccagcgcccacagccagagagccctgtacagctggatgaccggcatcctgcagaccagcagcaacgccaccgacgacagcgccagctgggtgagcgccgagcacctgtgggtgctgggcagatacatggtgcacctgagcttcgaggagatcaccaagatcagccccatcgagatcggcctgttcatcagctacgacaacgccaccaagcagctggacatggtgtacgacatcacccccgagctggcccaggccttcctggagagaatcagcagcagcaacttcaacatgagaaacaccagcaccatccacagactgggcctgctggtgtgcttctacaacgacctggagctgctggacgccaccgtggcccaggtgctgctgtaccagatgatcaagtgcagccacctgagaggcttccaggccggcgtgcagaagctgaaggccgagctgctggacatcgccatggagaaccagaccctgaacgagaccctgggcagcctgagcgacgccgtggtgggcctgacctacagccagctggagagcctgagccccgaggccgtgcacggcgccatcagcaccctgaaccaggtgagcggctgggccaagagccaggtgatcatcctgagcgccaagtacctggcccacgagaaggtgctgagcttctacaacgtgagccagatgggcgccctgctggccggcgtgagcacccaggccttctgcagcatgaagagaaaggacatcagccaggtgctgagaagcgccgtgagccagtacgtgagcgacctgagccccgcccagcagcagggcatcctgagcaagatggtgcaggccgaggacaccgcccccggcatcgtggagatccagggcgccttcttcaaggaggtgagcctgttcgacctgagaagacagcccggcttcaacagcaccgtgctgaaggacaaggagctgggcagaagccaggccctgttcctgtacgagctgctgctgaagaccaccagaagacccgaggagctgctgagcgccggccagctggtgaagggcgtgacctgcagccacatcgacgccatgagcaccgacttcttcctggcccacttccaggacttccagaacaacttcgccctgctgagcccctaccaggtgaactgcctggcctggaagtactgggaggtgagcagactgagcatgccccccttcctgctggccgccctgcccgccagatacctggccagcgtgcccgccagccagtgcgtgcccttcctgatcagcctgggcaagagctggctggacagcctggtgctggacagccacaagaagaccagcgtgctgagaaaggtgcagcagtgcctggacgacagcatcgccgacgagtacaccgtggacatcatgggcaacctgctgtgccacctgcccgccgccatcatcgacagaggcatcagccccagagcctgggccaccgccctgcacggcctgagagactgccccgacctgaaccccgagcagaaggccgccgtgagactgaagctgctgggccagtacggcctgccccagcactggaccgccgagaccaccaaggacctgggccccttcctggtgctgttcagcggcgacgagctgagcagcatcgccaccaagttccccgagatcctgctgcaggccgccagcaagatggccagaaccctgcccaccaaggagttcctgtgggccgtgttccagagcgtgagaaacagcagcgacaagatccccagctacgaccccatgcccggctgccacggcgtggtggcccccagcagcgacgacatcttcaagctggccgaggccaacgcctgctgggccctggaggacctgagatgcatggaggaggacaccttcatcagaaccgtggagctgctgggcgccgtgcagggcttcagcagaccccagctgatgaccctgaaggagaaggccatccaggtgtgggacatgcccagctactggagagagcaccacatcgtgagcctgggcagaatcgccctggccctgaacgagagcgagctggagcagctggacctgagcagcatcgacaccgtggccagcctgagctggcagaccgagtggacccccggccaggccgagagcatcctgcagggctacctggacgacagcggctacagcatccaggacctgaagagcttccacctggtgggcctgggcgccaccctgtgcgccatcaacatcaccgagatccccctgatcaagatcagcgagttcagagtggtggtggccagaatcggcaccctgctgtgcagcacccacgtgctggccgagttcaagagaaaggccgaggtggtgttcggcgaccccaccgagtggaccagcagcgtgctgcaggagctgggcaccatcgccgccggcctgaccaaggccgagctgagaatgctggacaaggacctgatgccctacttccagcccagcgccatcaagtgcctgcccgacgagatcttcaaggagctgagcgccgagcagatcgccagcctgggccccgagaacgccgccgccgtgacccacgcccagagaagaagactgagccccctgcagctgcagagcctgcagcaggccctggacggcgccaagacccacagctggcaggacgcccccgccagcgccggccccaccagaaccagcagcagcagaagccccgccggcgccctgcagagctggggcctgtggctgggctgccccctgctggtgctgatggccaagctgctgtggtag

SEQ ID NO: 92078 - DNA, 1434 bp, synthetic construct
  misc_feature 1..1434: note = Description of Artificial Sequence: Synthetic coding sequence
  source 1..1434: mol_type = other DNA
atgatcgccttcctgctgaccagcgtgctgatgatcccccacgccggcggccaccccctggacaccccccacctgccccaggagctgccccccggcctgcccaacaacatcaacatcaccttcttcagcggcatgttcaagaacgtggagagcgtggccgagatcttcgactgcctgggcccccacttcacctggctgcaggccgtgttcaccaacttccccgtgctgatccagttcgtgaacggcatgaagtgcgtggccggcctgtgccccagagacttcgaggactacggctgcacctgcagattcgagatggagggcctgcccgtggacgagagcgacagctgctgcttccagcacagaagatgctacgaggaggccgccgagatggactgcctgcaggaccccgccaagctgagcaccgaggtgaactgcgtgagcaagaagatcatctgcgagagcaaggacaactgcgagcacctgctgtgcacctgcgacaaggccgccatcgagtgcctggccagaagcagcctgaacagcagcctgaacctgctggacaccagcttctgcctggcccagacccccgagaccaccatcaaggaggacctgaccaccctgctgcccagagtggtgcccgtggagcccaccgacaccagcctgaccgccctgagcggcgaggaggccggccacgaccaggagggcgtgggcgccgccagagccaccagcccccccggcagcgccgagatcgtggccaccagagtgaccgccaagatcgtgaccctggtgcccgccggcatcaagagcctgggcctggccgtgagcagcgtggagaacgaccccgaggagaccaccgagaaggcctgcgacagattcaccttcctgcacctgggcagcggcgacaacatgcaggtgatgccccagctgggcgagatgctgttctgcctgaccagcagatgccccgaggagttcgagagctacggctgctactgcggccaggagggcagaggcgagcccagagacgacctggacagatgctgcctgagccaccactgctgcctggagcaggtgagaagactgggctgcctgctggagagactgccctggagccccgtggtgtgcgtggaccacacccccaagtgcggcggccagagcctgtgcgagaagctgctgtgcgcctgcgaccagaccgccgccgagtgcatgaccagcgccagcttcaaccagagcctgaagagccccagcagactgggctgccccggccagcccgccgcctgcgaggacagcctgcaccccgtgcccgccgcccccaccctgggcagcagcagcgaggaggacagcgaggaggaccccccccaggaggacctgggcagagccaagagattcctgagaaagagcctgggccccctgggcatcggccccctgcacggcagatag

SEQ ID NO: 92079 - DNA, 1482 bp, synthetic construct
  misc_feature 1..1482: note = Description of Artificial Sequence: Synthetic coding sequence
  source 1..1482: mol_type = other DNA
atgatcgccttcctgctgaccagcgtgctgatgatcccccacgccggcggccaccccctggacaccccccacctgccccaggagctgccccccggcctgcccaacaacatcaacatcaccttcttcagcggcatgttcaagaacgtggagagcgtggccgagatcttcgactgcctgggcccccacttcacctggctgcaggccgtgttcaccaacttccccgtgctgatccagttcgtgaacggcatgaagtgcgtggccggcctgtgccccagagacttcgaggactacggctgcacctgcagattcgagatggagggcctgcccgtggacgagagcgacagctgctgcttccagcacagaagatgctacgaggaggccgccgagatggactgcctgcaggaccccgccaagctgagcaccgaggtgaactgcgtgagcaagaagatcatctgcgagagcaaggacaactgcgagcacctgctgtgcacctgcgacaaggccgccatcgagtgcctggccagaagcagcctgaacagcagcctgaacctgctggacaccagcttctgcctggcccagacccccgagaccaccatcaaggaggacctgaccaccctgctgcccagagtggtgcccgtggagcccaccgacaccagcctgaccgccctgagcggcgaggtggccgccgagaccgaggccgacagactgatcaccctgagcaagaagaaggccggccacgaccaggagggcgtgggcgccgccagagccaccagcccccccggcagcgccgagatcgtggccaccagagtgaccgccaagatcgtgaccctggtgcccgccggcatcaagagcctgggcctggccgtgagcagcgtggagaacgaccccgaggagaccaccgagaaggcctgcgacagattcaccttcctgcacctgggcagcggcgacaacatgcaggtgatgccccagctgggcgagatgctgttctgcctgaccagcagatgccccgaggagttcgagagctacggctgctactgcggccaggagggcagaggcgagcccagagacgacctggacagatgctgcctgagccaccactgctgcctggagcaggtgagaagactgggctgcctgctggagagactgccctggagccccgtggtgtgcgtggaccacacccccaagtgcggcggccagagcctgtgcgagaagctgctgtgcgcctgcgaccagaccgccgccgagtgcatgaccagcgccagcttcaaccagagcctgaagagccccagcagactgggctgccccggccagcccgccgcctgcgaggacagcctgcaccccgtgcccgccgcccccaccctgggcagcagcagcgaggaggacagcgaggaggaccccccccaggaggacctgggcagagccaagagattcctgagaaagagcctgggccccctgggcatcggccccctgcacggcagatag

SEQ ID NO: 92080 - DNA, 5994 bp, synthetic construct
  misc_feature 1..5994: note = Description of Artificial Sequence: Synthetic coding sequence
  source 1..5994: mol_type = other DNA
atggccctgctgatccacctgaagaccgtgagcgagctgagaggcagaggcgacagaatcgccaaggtgaccttcagaggccagagcttctacagcagagtgctggagaactgcgaggacgtggccgacttcgacgagaccttcagatggcccgtggccagcagcatcgacagaaacgagatgctggagatccaggtgttcaactacagcaaggtgttcagcaacaagctgatcggcaccttcagaatggtgctgcagaaggtggtggaggagagccacgtggaggtgaccgacaccctgatcgacgacaacaacgccatcatcaagaccagcctgtgcgtggaggtgagataccaggccaccgacggcaccgtgggcagctgggacgacggcgacttcctgggcgacgagagcctgcaggaggaggagaaggacagccaggagaccgacggcctgctgcccggcagcagacccagcagcagaccccccggcgagaagagcttcagaagagccggcagaagcgtgttcagcgccatgaagctgggcaagaacagaagccacaaggaggagccccagagacccgacgagcccgccgtgctggagatggaggacctggaccacctggccatcagactgggcgacggcctggaccccgacagcgtgagcctggccagcgtgaccgccctgaccaccaacgtgagcaacaagagaagcaagcccgacatcaagatggagcccagcgccggcagacccatggactaccaggtgagcatcaccgtgatcgaggccagacagctggtgggcctgaacatggaccccgtggtgtgcgtggaggtgggcgacgacaagaagtacaccagcatgaaggagagcaccaactgcccctactacaacgagtacttcgtgttcgacttccacgtgagccccgacgtgatgttcgacaagatcatcaagatcagcgtgatccacagcaagaacctgctgagaagcggcaccctggtgggcagcttcaagatggacgtgggcaccgtgtacagccagcccgagcaccagttccaccacaagtgggccatcctgagcgaccccgacgacatcagcagcggcctgaagggctacgtgaagtgcgacgtggccgtggtgggcaagggcgacaacatcaagaccccccacaaggccaacgagaccgacgaggacgacatcgagggcaacctgctgctgcccgagggcgtgccccccgagagacagtgggccagattctacgtgaagatctacagagccgagggcctgcccagaatgaacaccagcctgatggccaacgtgaagaaggccttcatcggcgagaacaaggacctggtggacccctacgtgcaggtgttcttcgccggccagaagggcaagaccagcgtgcagaagagcagctacgagcccctgtggaacgagcaggtggtgttcaccgacctgttcccccccctgtgcaagagaatgaaggtgcagatcagagacagcgacaaggtgaacgacgtggccatcggcacccacttcatcgacctgagaaagatcagcaacgacggcgacaagggcttcctgcccaccctgggccccgcctgggtgaacatgtacggcagcaccagaaactacaccctgctggacgagcaccaggacctgaacgagggcctgggcgagggcgtgagcttcagagccagactgctgctgggcctggccgtggagatcgtggacaccagcaaccccgagctgaccagcagcaccgaggtgcaggtggagcaggccacccccatcagcgagagctgcgccggcaagatggaggagttcttcctgttcggcgccttcctggaggccagcatgatcgacagaagaaacggcgacaagcccatcaccttcgaggtgaccatcggcaactacggcaacgaggtggacggcctgagcagaccccagagacccagacccagaaaggagcccggcgacgaggaggaggtggacctgatccagaacgccagcgacgacgaggccggcgacgccggcgacctggccagcgtgagcagcaccccccccatgagaccccaggtgaccgacagaaactacttccacctgccctacctggagagaaagccctgcatctacatcaagagctggtggcccgaccagagaagaagactgtacaacgccaacatcatggaccacatcgccgacaagctggaggagggcctgaacgacatccaggagatgatcaagaccgagaagagctaccccgagagaagactgagaggcgtgctggaggagctgagctgcggctgctgcagattcctgagcctggccgacaaggaccagggccacagcagcagaaccagactggacagagagagactgaagagctgcatgagagagctggagaacatgggccagcaggccagaatgctgagagcccaggtgaagagacacaccgtgagagacaagctgagactgtgccagaacttcctgcagaagctgagattcctggccgacgagccccagcacagcatccccgacatcttcatctggatgatgagcaacaacaagagagtggcctacgccagagtgcccagcaaggacctgctgttcagcatcgtggaggaggagaccggcaaggactgcgccaaggtgaagaccctgttcctgaagctgcccggcaagagaggcttcggcagcgccggctggaccgtgcaggccaaggtggagctgtacctgtggctgggcctgagcaagcagagaaaggagttcctgtgcggcctgccctgcggcttccaggaggtgaaggccgcccagggcctgggcctgcacgccttcccccccgtgagcctggtgtacaccaagaagcaggccttccagctgagagcccacatgtaccaggccagaagcctgttcgccgccgacagcagcggcctgagcgaccccttcgccagagtgttcttcatcaaccagagccagtgcaccgaggtgctgaacgagaccctgtgccccacctgggaccagatgctggtgttcgacaacctggagctgtacggcgaggcccacgagctgagagacgacccccccatcatcgtgatcgagatctacgaccaggacagcatgggcaaggccgacttcatgggcagaaccttcgccaagcccctggtgaagatggccgacgaggcctactgcccccccagattccccccccagctggagtactaccagatctacagaggcaacgccaccgccggcgacctgctggccgccttcgagctgctgcagatcggccccgccggcaaggccgacctgccccccatcaacggccccgtggacgtggacagaggccccatcatgcccgtgcccatgggcatcagacccgtgctgagcaagtacagagtggaggtgctgttctggggcctgagagacctgaagagagtgaacctggcccaggtggacagacccagagtggacatcgagtgcgccggcaagggcgtgcagagcagcctgatccacaactacaagaagaaccccaacttcaacaccctggtgaagtggttcgaggtggacctgcccgagaacgagctgctgcacccccccctgaacatcagagtggtggactgcagagccttcggcagatacaccctggtgggcagccacgccgtgagcagcctgagaagattcatctacagaccccccgacagaagcgcccccagctggaacaccaccgtgagactgctgagaagatgcagagtgctgtgcaacggcggcagcagcagccacagcaccggcgaggtggtggtgaccatggagcccgaggtgcccatcaagaagctggagaccatggtgaagctggacgccaccagcgaggccgtggtgaaggtggacgtggccgaggaggagaaggagaagaagaagaagaagaagggcaccgccgaggagcccgaggaggaggagcccgacgagagcatgctggactggtggagcaagtacttcgccagcatcgacaccatgaaggagcagctgagacagcaggagcccagcggcatcgacctggaggagaaggaggaggtggacaacaccgagggcctgaagggcagcatgaagggcaaggagaaggccagagccgccaaggaggagaagaagaagaagacccagagcagcggcagcggccagggcagcgaggcccccgagaagaagaagcccaagatcgacgagctgaaggtgtaccccaaggagctggagagcgagttcgacaacttcgaggactggctgcacaccttcaacctgctgagaggcaagaccggcgacgacgaggacggcagcaccgaggaggagagaatcgtgggcagattcaagggcagcctgtgcgtgtacaaggtgcccctgcccgaggacgtgagcagagaggccggctacgacagcacctacggcatgttccagggcatccccagcaacgaccccatcaacgtgctggtgagagtgtacgtggtgagagccaccgacctgcaccccgccgacatcaacggcaaggccgacccctacatcgccatcagactgggcaagaccgacatcagagacaaggagaactacatcagcaagcagctgaaccccgtgttcggcaagagcttcgacatcgaggccagcttccccatggagagcatgctgaccgtggccgtgtacgactgggacctggtgggcaccgacgacctgatcggcgagaccaagatcgacctggagaacagattctacagcaagcacagagccacctgcggcatcgcccagacctacagcacccacggctacaacatctggagagaccccatgaagcccagccagatcctgaccagactgtgcaaggacggcaaggtggacggcccccacttcggcccccccggcagagtgaaggtggccaacagagtgttcaccggccccagcgagatcgaggacgagaacggccagagaaagcccaccgacgagcacgtggccctgctggccctgagacactgggaggacatccccagagccggctgcagactggtgcccgagcacgtggagaccagacccctgctgaaccccgacaagcccggcatcgagcagggcagactggagctgtgggtggacatgttccccatggacatgcccgcccccggcacccccctggacatcagccccagaaagcccaagaagtacgagctgagagtgatcatctggaacaccgacgaggtggtgctggaggacgacgacttcttcaccggcgagaagagcagcgacatcttcgtgagaggctggctgaagggccagcaggaggacaagcaggacaccgacgtgcactaccacagcctgaccggcgagggcaacttcaactggagatacctgttccccttcgactacctggccgccgaggagaagatcgtgatcagcaagaaggagagcatgttcagctgggacgagaccgagtacaagatccccgccagactgaccctgcagatctgggacgccgaccacttcagcgccgacgacttcctgggcgccatcgagctggacctgaacagattccccagaggcgccaagaccgccaagcagtgcaccatggagatggccaccggcgaggtggacgtgcccctggtgagcatcttcaagcagaagagagtgaagggctggtggcccctgctggccagaaacgagaacgacgagttcgagctgaccggcaaggtggaggccgagctgcacctgctgaccgccgaggaggccgagaagaaccccgtgggcctggccagaaacgagcccgaccccctggagaagcccaacagacccgacaccagcttcatctggttcctgaaccccctgaagagcgccagatacttcctgtggcacacctacagatggctgctgctgaagctgctgctgctgctgctgctgctgctgctgctggccctgttcctgtacagcgtgcccggctacctggtgaagaagatcctgggcgcctag

SEQ ID NO: 92081 - DNA, 3693 bp, synthetic construct
  misc_feature 1..3693: note = Description of Artificial Sequence: Synthetic coding sequence
  source 1..3693: mol_type = other DNA
atgatcaagaccgagaagagctaccccgagagaagactgagaggcgtgctggaggagctgagctgcggctgctgcagattcctgagcctggccgacaaggaccagggccacagcagcagaaccagactggacagagagagactgaagagctgcatgagagagctggagaacatgggccagcaggccagaatgctgagagcccaggtgaagagacacaccgtgagagacaagctgagactgtgccagaacttcctgcagaagctgagattcctggccgacgagccccagcacagcatccccgacatcttcatctggatgatgagcaacaacaagagagtggcctacgccagagtgcccagcaaggacctgctgttcagcatcgtggaggaggagaccggcaaggactgcgccaaggtgaagaccctgttcctgaagctgcccggcaagagaggcttcggcagcgccggctggaccgtgcaggccaaggtggagctgtacctgtggctgggcctgagcaagcagagaaaggagttcctgtgcggcctgccctgcggcttccaggaggtgaaggccgcccagggcctgggcctgcacgccttcccccccgtgagcctggtgtacaccaagaagcaggccttccagctgagagcccacatgtaccaggccagaagcctgttcgccgccgacagcagcggcctgagcgaccccttcgccagagtgttcttcatcaaccagagccagtgcaccgaggtgctgaacgagaccctgtgccccacctgggaccagatgctggtgttcgacaacctggagctgtacggcgaggcccacgagctgagagacgacccccccatcatcgtgatcgagatctacgaccaggacagcatgggcaaggccgacttcatgggcagaaccttcgccaagcccctggtgaagatggccgacgaggcctactgcccccccagattccccccccagctggagtactaccagatctacagaggcaacgccaccgccggcgacctgctggccgccttcgagctgctgcagatcggccccgccggcaaggccgacctgccccccatcaacggccccgtggacgtggacagaggccccatcatgcccgtgcccatgggcatcagacccgtgctgagcaagtacagagtggaggtgctgttctggggcctgagagacctgaagagagtgaacctggcccaggtggacagacccagagtggacatcgagtgcgccggcaagggcgtgcagagcagcctgatccacaactacaagaagaaccccaacttcaacaccctggtgaagtggttcgaggtggacctgcccgagaacgagctgctgcacccccccctgaacatcagagtggtggactgcagagccttcggcagatacaccctggtgggcagccacgccgtgagcagcctgagaagattcatctacagaccccccgacagaagcgcccccagctggaacaccaccggcgaggtggtggtgaccatggagcccgaggtgcccatcaagaagctggagaccatggtgaagctggacgccaccagcgaggccgtggtgaaggtggacgtggccgaggaggagaaggagaagaagaagaagaagaagggcaccgccgaggagcccgaggaggaggagcccgacgagagcatgctggactggtggagcaagtacttcgccagcatcgacaccatgaaggagcagctgagacagcaggagcccagcggcatcgacctggaggagaaggaggaggtggacaacaccgagggcctgaagggcagcatgaagggcaaggagaaggccagagccgccaaggaggagaagaagaagaagacccagagcagcggcagcggccagggcagcgaggcccccgagaagaagaagcccaagatcgacgagctgaaggtgtaccccaaggagctggagagcgagttcgacaacttcgaggactggctgcacaccttcaacctgctgagaggcaagaccggcgacgacgaggacggcagcaccgaggaggagagaatcgtgggcagattcaagggcagcctgtgcgtgtacaaggtgcccctgcccgaggacgtgagcagagaggccggctacgacagcacctacggcatgttccagggcatccccagcaacgaccccatcaacgtgctggtgagagtgtacgtggtgagagccaccgacctgcaccccgccgacatcaacggcaaggccgacccctacatcgccatcagactgggcaagaccgacatcagagacaaggagaactacatcagcaagcagctgaaccccgtgttcggcaagagcttcgacatcgaggccagcttccccatggagagcatgctgaccgtggccgtgtacgactgggacctggtgggcaccgacgacctgatcggcgagaccaagatcgacctggagaacagattctacagcaagcacagagccacctgcggcatcgcccagacctacagcacccacggctacaacatctggagagaccccatgaagcccagccagatcctgaccagactgtgcaaggacggcaaggtggacggcccccacttcggcccccccggcagagtgaaggtggccaacagagtgttcaccggccccagcgagatcgaggacgagaacggccagagaaagcccaccgacgagcacgtggccctgctggccctgagacactgggaggacatccccagagccggctgcagactggtgcccgagcacgtggagaccagacccctgctgaaccccgacaagcccggcatcgagcagggcagactggagctgtgggtggacatgttccccatggacatgcccgcccccggcacccccctggacatcagccccagaaagcccaagaagtacgagctgagagtgatcatctggaacaccgacgaggtggtgctggaggacgacgacttcttcaccggcgagaagagcagcgacatcttcgtgagaggctggctgaagggccagcaggaggacaagcaggacaccgacgtgcactaccacagcctgaccggcgagggcaacttcaactggagatacctgttccccttcgactacctggccgccgaggagaagatcgtgatcagcaagaaggagagcatgttcagctgggacgagaccgagtacaagatccccgccagactgaccctgcagatctgggacgccgaccacttcagcgccgacgacttcctgggcgccatcgagctggacctgaacagattccccagaggcgccaagaccgccaagcagtgcaccatggagatggccaccggcgaggtggacgtgcccctggtgagcatcttcaagcagaagagagtgaagggctggtggcccctgctggccagaaacgagaacgacgagttcgagctgaccggcaaggtggaggccgagctgcacctgctgaccgccgaggaggccgagaagaaccccgtgggcctggccagaaacgagcccgaccccctggagaagcccaacagacccgacaccagcttcatctggttcctgaaccccctgaagagcgccagatacttcctgtggcacacctacagatggctgctgctgaagctgctgctgctgctgctgctgctgctgctgctggccctgttcctgtacagcgtgcccggctacctggtgaagaagatcctgggcgcctag

SEQ ID NO: 92082 - DNA, 3693 bp, synthetic construct
  misc_feature 1..3693: note = Description of Artificial Sequence: Synthetic coding sequence
  source 1..3693: mol_type = other DNA
atgatcaagaccgagaagagctaccccgagagaagactgagaggcgtgctggaggagctgagctgcggctgctgcagattcctgagcctggccgacaaggaccagggccacagcagcagaaccagactggacagagagagactgaagagctgcatgagagagctggagaacatgggccagcaggccagaatgctgagagcccaggtgaagagacacaccgtgagagacaagctgagactgtgccagaacttcctgcagaagctgagattcctggccgacgagccccagcacagcatccccgacatcttcatctggatgatgagcaacaacaagagagtggcctacgccagagtgcccagcaaggacctgctgttcagcatcgtggaggaggagaccggcaaggactgcgccaaggtgaagaccctgttcctgaagctgcccggcaagagaggcttcggcagcgccggctggaccgtgcaggccaaggtggagctgtacctgtggctgggcctgagcaagcagagaaaggagttcctgtgcggcctgccctgcggcttccaggaggtgaaggccgcccagggcctgggcctgcacgccttcccccccgtgagcctggtgtacaccaagaagcaggccttccagctgagagcccacatgtaccaggccagaagcctgttcgccgccgacagcagcggcctgagcgaccccttcgccagagtgttcttcatcaaccagagccagtgcaccgaggtgctgaacgagaccctgtgccccacctgggaccagatgctggtgttcgacaacctggagctgtacggcgaggcccacgagctgagagacgacccccccatcatcgtgatcgagatctacgaccaggacagcatgggcaaggccgacttcatgggcagaaccttcgccaagcccctggtgaagatggccgacgaggcctactgcccccccagattccccccccagctggagtactaccagatctacagaggcaacgccaccgccggcgacctgctggccgccttcgagctgctgcagatcggccccgccggcaaggccgacctgccccccatcaacggccccgtggacgtggacagaggccccatcatgcccgtgcccatgggcatcagacccgtgctgagcaagtacagagtggaggtgctgttctggggcctgagagacctgaagagagtgaacctggcccaggtggacagacccagagtggacatcgagtgcgccggcaagggcgtgcagagcagcctgatccacaactacaagaagaaccccaacttcaacaccctggtgaagtggttcgaggtggacctgcccgagaacgagctgctgcacccccccctgaacatcagagtggtggactgcagagccttcggcagatacaccctggtgggcagccacgccgtgagcagcctgagaagattcatctacagaccccccgacagaagcgcccccagctggaacaccaccggcgaggtggtggtgaccatggagcccgaggtgcccatcaagaagctggagaccatggtgaagctggacgccaccagcgaggccgtggtgaaggtggacgtggccgaggaggagaaggagaagaagaagaagaagaagggcaccgccgaggagcccgaggaggaggagcccgacgagagcatgctggactggtggagcaagtacttcgccagcatcgacaccatgaaggagcagctgagacagcaggagcccagcggcatcgacctggaggagaaggaggaggtggacaacaccgagggcctgaagggcagcatgaagggcaaggagaaggccagagccgccaaggaggagaagaagaagaagacccagagcagcggcagcggccagggcagcgaggcccccgagaagaagaagcccaagatcgacgagctgaaggtgtaccccaaggagctggagagcgagttcgacaacttcgaggactggctgcacaccttcaacctgctgagaggcaagaccggcgacgacgaggacggcagcaccgaggaggagagaatcgtgggcagattcaagggcagcctgtgcgtgtacaaggtgcccctgcccgaggacgtgagcagagaggccggctacgacagcacctacggcatgttccagggcatccccagcaacgaccccatcaacgtgctggtgagagtgtacgtggtgagagccaccgacctgcaccccgccgacatcaacggcaaggccgacccctacatcgccatcagactgggcaagaccgacatcagagacaaggagaactacatcagcaagcagctgaaccccgtgttcggcaagagcttcgacatcgaggccagcttccccatggagagcatgctgaccgtggccgtgtacgactgggacctggtgggcaccgacgacctgatcggcgagaccaagatcgacctggagaacagattctacagcaagcacagagccacctgcggcatcgcccagacctacagcacccacggctacaacatctggagagaccccatgaagcccagccagatcctgaccagactgtgcaaggacggcaaggtggacggcccccacttcggcccccccggcagagtgaaggtggccaacagagtgttcaccggccccagcgagatcgaggacgagaacggccagagaaagcccaccgacgagcacgtggccctgctggccctgagacactgggaggacatccccagagccggctgcagactggtgcccgagcacgtggagaccagacccctgctgaaccccgacaagcccggcatcgagcagggcagactggagctgtgggtggacatgttccccatggacatgcccgcccccggcacccccctggacatcagccccagaaagcccaagaagtacgagctgagagtgatcatctggaacaccgacgaggtggtgctggaggacgacgacttcttcaccggcgagaagagcagcgacatcttcgtgagaggctggctgaagggccagcaggaggacaagcaggacaccgacgtgcactaccacagcctgaccggcgagggcaacttcaactggagatacctgttccccttcgactacctggccgccgaggagaagatcgtgatcagcaagaaggagagcatgttcagctgggacgagaccgagtacaagatccccgccagactgaccctgcagatctgggacgccgaccacttcagcgccgacgacttcctgggcgccatcgagctggacctgaacagattccccagaggcgccaagaccgccaagcagtgcaccatggagatggccaccggcgaggtggacgtgcccctggtgagcatcttcaagcagaagagagtgaagggctggtggcccctgctggccagaaacgagaacgacgagttcgagctgaccggcaaggtggaggccgagctgcacctgctgaccgccgaggaggccgagaagaaccccgtgggcctggccagaaacgagcccgaccccctggagaagcccaacagacccgacaccgccttcgtgtggttcctgaaccccctgaagagcatcaagtacctgatctgcaccagatacaagtggctgatcatcaagatcgtgctggccctgctgggcctgctgatgctgggcctgttcctgtacagcctgcccggctacatggtgaagaagctgctgggcgcctag

SEQ ID NO: 92083 - DNA, 234 bp, synthetic construct
  misc_feature 1..234: note = Description of Artificial Sequence: Synthetic coding sequence
  source 1..234: mol_type = other DNA
gaggccgagaagaaccccgtgggcctggccagaaacgagcccgaccccctggagaagcccaacagacccgacaccgccttcgtgtggttcctgaaccccctgaagagcatcaagtacctgatctgcaccagatacaagtggctgatcatcaagatcgtgctggccctgggctgcagctgctggggccccctgcagcccccctggctgcacggccagaaggccccctggggctag

SEQ ID NO: 92084 - DNA, 342 bp, synthetic construct
  misc_feature 1..342: note = Description of Artificial Sequence: Synthetic coding sequence
  source 1..342: mol_type = other DNA
gacttcctgggcgacgagagcctgcaggaggaggagaaggacagccaggagaccgacggcctgctgcccggcagcagacccagcagcagaccccccggcgagaagagcttcagaagcaagggcagagagaagaccaagggcggcagagacgacgagcacaaggccggcagaagcgtgttcagcgccatgaagctgggcaagaacagaagccacaaggaggagccccagagacccgacgagcccgccgtgctggagatggaggacctggaccacctggccatcagactgggcgacggcctggaccccgacagcgtgagcctggccagcgtgaccgccctgtag

SEQ ID NO: 92085 - DNA, 3924 bp, synthetic construct
  misc_feature 1..3924: note = Description of Artificial Sequence: Synthetic coding sequence
  source 1..3924: mol_type = other DNA
atgatgaccgacacccaggacggccccagcgagagcagccagatcatgagaagcctgacccccctgatcaacagagaggaggccttcggcgaggccggcgaggccggcctgtggcccagcatcacccacacccccgacagccaggaggagggcctgaacgacatccaggagatgatcaagaccgagaagagctaccccgagagaagactgagaggcgtgctggaggagctgagctgcggctgctgcagattcctgagcctggccgacaaggaccagggccacagcagcagaaccagactggacagagagagactgaagagctgcatgagagagctggagaacatgggccagcaggccagaatgctgagagcccaggtgaagagacacaccgtgagagacaagctgagactgtgccagaacttcctgcagaagctgagattcctggccgacgagccccagcacagcatccccgacatcttcatctggatgatgagcaacaacaagagagtggcctacgccagagtgcccagcaaggacctgctgttcagcatcgtggaggaggagaccggcaaggactgcgccaaggtgaagaccctgttcctgaagctgcccggcaagagaggcttcggcagcgccggctggaccgtgcaggccaaggtggagctgtacctgtggctgggcctgagcaagcagagaaaggagttcctgtgcggcctgccctgcggcttccaggaggtgaaggccgcccagggcctgggcctgcacgccttcccccccgtgagcctggtgtacaccaagaagcaggccttccagctgagagcccacatgtaccaggccagaagcctgttcgccgccgacagcagcggcctgagcgaccccttcgccagagtgttcttcatcaaccagagccagtgcaccgaggtgctgaacgagaccctgtgccccacctgggaccagatgctggtgttcgacaacctggagctgtacggcgaggcccacgagctgagagacgacccccccatcatcgtgatcgagatctacgaccaggacagcatgggcaaggccgacttcatgggcagaaccttcgccaagcccctggtgaagatggccgacgaggcctactgcccccccagattccccccccagctggagtactaccagatctacagaggcaacgccaccgccggcgacctgctggccgccttcgagctgctgcagatcggccccgccggcaaggccgacctgccccccatcaacggccccgtggacgtggacagaggccccatcatgcccgtgcccatgggcatcagacccgtgctgagcaagtacagagtggaggtgctgttctggggcctgagagacctgaagagagtgaacctggcccaggtggacagacccagagtggacatcgagtgcgccggcaagggcgtgcagagcagcctgatccacaactacaagaagaaccccaacttcaacaccctggtgaagtggttcgaggtggacctgcccgagaacgagctgctgcacccccccctgaacatcagagtggtggactgcagagccttcggcagatacaccctggtgggcagccacgccgtgagcagcctgagaagattcatctacagaccccccgacagaagcgcccccagctggaacaccaccgtgagactgctgagaagatgcagagtgctgtgcaacggcggcagcagcagccacagcaccggcgaggtggtggtgaccatggagcccgaggtgcccatcaagaagctggagaccatggtgaagctggacgccaccagcgaggccgtggtgaaggtggacgtggccgaggaggagaaggagaagaagaagaagaagaagggcaccgccgaggagcccgaggaggaggagcccgacgagagcatgctggactggtggagcaagtacttcgccagcatcgacaccatgaaggagcagctgagacagcaggagcccagcggcatcgacctggaggagaaggaggaggtggacaacaccgagggcctgaagggcagcatgaagggcaaggagaaggccagagccgccaaggaggagaagaagaagaagacccagagcagcggcagcggccagggcagcgaggcccccgagaagaagaagcccaagatcgacgagctgaaggtgtaccccaaggagctggagagcgagttcgacaacttcgaggactggctgcacaccttcaacctgctgagaggcaagaccggcgacgacgaggacggcagcaccgaggaggagagaatcgtgggcagattcaagggcagcctgtgcgtgtacaaggtgcccctgcccgaggacgtgagcagagaggccggctacgacagcacctacggcatgttccagggcatccccagcaacgaccccatcaacgtgctggtgagagtgtacgtggtgagagccaccgacctgcaccccgccgacatcaacggcaaggccgacccctacatcgccatcagactgggcaagaccgacatcagagacaaggagaactacatcagcaagcagctgaaccccgtgttcggcaagagcttcgacatcgaggccagcttccccatggagagcatgctgaccgtggccgtgtacgactgggacctggtgggcaccgacgacctgatcggcgagaccaagatcgacctggagaacagattctacagcaagcacagagccacctgcggcatcgcccagacctacagcacccacggctacaacatctggagagaccccatgaagcccagccagatcctgaccagactgtgcaaggacggcaaggtggacggcccccacttcggcccccccggcagagtgaaggtggccaacagagtgttcaccggccccagcgagatcgaggacgagaacggccagagaaagcccaccgacgagcacgtggccctgctggccctgagacactgggaggacatccccagagccggctgcagactggtgcccgagcacgtggagaccagacccctgctgaaccccgacaagcccggcatcgagcagggcagactggagctgtgggtggacatgttccccatggacatgcccgcccccggcacccccctggacatcagccccagaaagcccaagaagtacgagctgagagtgatcatctggaacaccgacgaggtggtgctggaggacgacgacttcttcaccggcgagaagagcagcgacatcttcgtgagaggctggctgaagggccagcaggaggacaagcaggacaccgacgtgcactaccacagcctgaccggcgagggcaacttcaactggagatacctgttccccttcgactacctggccgccgaggagaagatcgtgatcagcaagaaggagagcatgttcagctgggacgagaccgagtacaagatccccgccagactgaccctgcagatctgggacgccgaccacttcagcgccgacgacttcctgggcgccatcgagctggacctgaacagattccccagaggcgccaagaccgccaagcagtgcaccatggagatggccaccggcgaggtggacgtgcccctggtgagcatcttcaagcagaagagagtgaagggctggtggcccctgctggccagaaacgagaacgacgagttcgagctgaccggcaaggtggaggccgagctgcacctgctgaccgccgaggaggccgagaagaaccccgtgggcctggccagaaacgagcccgaccccctggagaagcccaacagacccgacaccagcttcatctggttcctgaaccccctgaagagcgccagatacttcctgtggcacacctacagatggctgctgctgaagctgctgctgctgctgctgctgctgctgctgctggccctgttcctgtacagcgtgcccggctacctggtgaagaagatcctgggcgcctag

SEQ ID NO: 92086 - DNA, 4527 bp, synthetic construct
  misc_feature 1..4527: note = Description of Artificial Sequence: Synthetic coding sequence
  source 1..4527: mol_type = other DNA
atgttccccgccagaggcgtgcccctgcacctggagggcgagggcgtgttcccctggggccccggcgacgtgagcctgccctacctgagcaccagcgacgtgagcttcagcgtgatcgtggagaacgtgaactgctacagcagcggcatgatctgcagaaagttcatcagcatcaacgtgggcaacagcctgatcgtgttcgacgacgacagcggcaaccccagccccgagagcttcctggacgacaagcaggaggtgcacacctggagagtgggcttcttcaccctggtgcacttcccccaggagcacatcaccctgctgtgggaccagagaaccaccgtgcacgtgcaggccggcccccagtggcagggccagctggccggcctgtgcggcaacttcgacctgaagaccatcaacgagatgagaacccccgagaacctggagctgaccaacccccaggagttcggcagcagctgggccgccgtggagtgccccgacaccctggaccccagagacatgtgcgtgctgaaccccctgagagagcccttcgccaagaaggagtgcagcatcctgctgagcgaggtgttcgagatctgccaccccgtggtggacgtgacctggttctacagcaactgcctgaccgacacctgcggctgcagccagggcggcgactgcgagtgcttctgcgccagcgtgagcgcctacgcccaccagtgctgccagcacggcgtggccgtggactggagaacccccagactgtgcctgctgggcaagggcccctaccagctgagcagcctggccgccggcggcgccctggtgggcatgaaggccgtgggcgacgacatcgtgctggtgagaaccgaggacgtggcccccgccgacatcgtgagcttcctgctgaccgccgccctgtacaaggccaaggcccacgaccccgacgtggtgagcctggaggccgccgacagacccaacttcttcctgcacgtgaccgccaacggcagcctggagctggccaagtggcagggcagagacaccttccagcagcacgccagcttcctgctgcacagaggcaccagacaggccggcctggtggccctggagagcctggccaagcccagcagcttcctgtacgtgagcggcgccgtgctggccctgagactgtacgagcacaccgaggtgttcagaagaggcaccctgttcagactgctggacgccaagcccagcggcgccgcctaccccatctgcgagtggagatacgacgcctgcgccagcccctgcttccagacctgcagagaccccagagccgccagctgcagagacgtgcccagagtggagggctgcgtgcccgtgtgccccaccccccaggtgctggacgaggtgacccagagatgcgtgtacctggaggactgcgtggagcccgccgtgtgggtgcccaccgaggccctgggcaacgagaccctgccccccagccagggcctgcccacccccagcgacgaggagccccagctgagccaggagagccccagaacccccacccacagacccgccctgacccccgccgcccccctgaccaccgccctgaacccccccgtgaccgccaccgaggagcccgtggtgagccccggccccacccagaccaccctgcagcagcccctggagctgaccgccagccagctgcccgccggccccaccgagagccccgccagcaagggcgtgaccgccagcctgctggccatcccccacacccccgagagcagcagcctgcccgtggccctgcagacccccacccccggcatggtgagcggcgccatggagaccaccagagtgaccgtgatcttcgccggcagccccaacatcaccgtgagcagcagaagcccccccgcccccagattccccctgatgaccaaggccgtgaccgtgagaggccacggcagcctgcccgtgagaaccacccccccccagcccagcctgaccgccagccccagcagcagacccgtggccagccccggcgccatcagcagaagccccaccagcagcggcagccacaaggccgtgctgacccccgccgtgaccaaggtgatcagcagaaccggcgtgccccagcccacccaggcccagagcgccagcagccccagcacccccctgaccgtggccggcaccgccgccgagcaggtgcccgtgagccccctggccaccagaagcctggagatcgtgctgagcaccgagaagggcgaggccggccacagccagcccatgggcagccccgccagcccccagccccaccccctgcccagcgccccccccagacccgcccagcacaccaccatggccaccagaagccccgccctgccccccgagacccccgccgccgccagcctgagcaccgccaccgacggcctggccgccacccccttcatgagcctggagagcaccagacccagccagctgctgagcggcctgccccccgacaccagcctgcccctggccaaggtgggcaccagcgcccccgtggccacccccggccccaaggccagcgtgatcaccacccccctgcagccccaggccaccaccctgcccgcccagaccctgagccccgtgctgcccttcacccccgccgccatgacccaggcccacccccccacccacatcgccccccccgccgccggcaccgcccccggcctgctgctgggcgccaccctgcccaccagcggcgtgctgcccgtggccgagggcaccgccagcatggtgagcgtggtgcccagaaagagcaccaccggcaaggtggccatcctgagcaagcaggtgagcctgcccaccagcatgtacggcagcgccgagggcggccccaccgagctgacccccgccaccagccaccccctgacccccctggtggccgagcccgagggcgcccaggccggcaccgccctgcccgtgcccaccagctacgccctgagcagagtgagcgccagaaccgccccccaggacagcatgctggtgctgctgccccagctggccgaggcccacggcaccagcgccggcccccacctggccgccgagcccgtggacgaggccaccaccgagcccagcggcagaagcgcccccgccctgagcatcgtggagggcctggccgaggccctggccaccaccaccgaggccaacaccagcaccacctgcgtgcccatcgccgagcaggactgcgtgagacacatctgcctggagggccagctgatcagagtgaaccagagccagcactgcccccagggcgccgccccccccagatgcggcatcctgggcctggccgtgagagtgggcggcgacagatgctgccccctgtgggagtgcgcctgcagatgcagcatcttccccgacctgagcttcgtgaccttcgacggcagccacgtggccctgttcaaggaggccatctacatcctgagccagagccccgacgagatgctgaccgtgcacgtgctggactgcaagagcgccaacctgggccacctgaactggccccccttctgcctggtgatgctgaacatgacccacctggcccaccaggtgaccatcgacagattcaacagaaaggtgaccgtggacctgcagcccgtgtggccccccgtgagcagatacggcttcagaatcgaggacaccggccacatgtacatgatcctgacccccagcgacatccagatccagtggctgcacagcagcggcctgatgatcgtggaggccagcaagaccagcaaggcccagggccacggcctgtgcggcatctgcgacggcgacgccgccaacgacctgaccctgaaggacggcagcgtggtgggcggcgccgaggaccccgcccccttcctggacagctggcaggtgcccagcagcctgaccagcgtgggccagaccagattcagacccgacagctgcgccaccaccgactgcagcccctgcctgagaatggtgagcaacagaaccttcagcgcctgccacagattcgtgccccccgagagcttctgcgagctgtggatcagagacaccaagtacgtgcagcagccctgcgtggccctgaccgtgtacgtggccatgtgccacaagttccacgtgtgcatcgagtggagaagaagcgactactgccccttcctgtgcagcagcgacagcacctaccaggcctgcgtgaccgcctgcgagccccccaagacctgccaggacggcatcctgggccccctggaccccgagcactgccaggtgctgggcgagggctgcgtgtgcagcgagggcaccatcctgcacagaagacacagcgccctgtgcatccccgaggccaagtgcgcctgcggcgactgccccgacagcatccccgagtgccaggagggcgaggccctgaccgtgcacagaaacaccaccgagctgtgctgccccctgtaccagtgcgtgtgcgagaacttcagatgcccccaggtgcagtgcggcctgggcaccgccctggtggaggtgtggagccccgacagatgctgcccctacaagagctgcggctag

SEQ ID NO: 92087 - DNA, 8778 bp, synthetic construct
  misc_feature 1..8778: note = Description of Artificial Sequence: Synthetic coding sequence
  source 1..8778: mol_type = other DNA
atgggcgtgctggccagcgccctgtgctggctgctgtgcgtgtggctgccctggggcgagcaggccgccgagagcctgagagtgcagagactgggcgagagagtggtggacagcggcagaagcggcgccagaggcatgagaaacgtgaagggcatgagaaacggccccgcccagaccagagtgagcagcagcagcagccaccaggaggccaccctggccatgggcgacaaggccaccgtggtgggcggccagcaggccgaggcccccgacagcgtggccatgagcagctgggagagaagactgcacagagccaagtgcgcccccagctacctgttcagctgcttcaacggcggcgagtgcgtgcaccccgccttctgcgactgcagaagattcaacgccaccggccccagatgccagatggtgtacaacgccggccccgagagagacagcatctgcagagcctggggccagcaccacgtggagaccttcgacggcctgtactactacctgagcggcaagggcagctacaccctggtgggcagacacgagcccgagggccagagcttcagcatccaggtgcacaacgacccccagtgcggcagcagcccctacacctgcagcagagccgtgagcctgttcttcgtgggcgagcaggagatccacctggccaaggaggtgacccacggcggcatgagagtgcagctgccccacgtgatgggcagcgccagactgcagcagctggccggctacgtgatcgtgagacaccagagcgccttcaccctggcctgggacggcgccagcgccgtgtacatcaagatgagccccgagctgctgggctggacccacggcctgtgcggcaacaacaacgccgaccccaaggacgacctggtgaccagcagcggcaagctgaccgacgacgtggtggagttcgtgcacagctggcaggagcaggcccccaaccagccccccggccccaccaccagcagcctgcccagacccccctgcctgcagcagaaccccggcaccatgcagggcgtgtacgagcagtgcgaggccctgctgagaccccccttcgacgcctgccacgcctacgtgagccccctgcccttcaccgccagctgcaccagcgacctgtgccagagcatgggcgacgtggccacctggtgcagagccctggccgagtacgccagagcctgcgcccaggccggcagacccctgcagggctggagaacccagctgagacagtgcaccgtgcactgcaaggagaaggccttcacctacaacgagtgcatcgcctgctgccccgccagctgccaccccagagccagctgcgtggacagcgagatcgcctgcgtggacggctgctactgccccaacggcctgatcttcgaggacggcggctgcgtggcccccgccgagtgcccctgcgagttccacggcaccctgtacccccccggcagcgtggtgaaggaggactgcaacacctgcacctgcaccagcggcaagtgggagtgcagcaccgccgtgtgccccgccgagtgcagcgtgaccggcgacatccacttcaccaccttcgacggcagaagatacaccttccccgccacctgccagtacatcctggccaagagcagaagcagcggcaccttcaccgtgaccctgcagaacgccccctgcggcctgaaccaggacggcgcctgcgtgcagagcgtgagcgtgatcctgcaccaggaccccagaagacaggtgaccctgacccaggccggcgacgtgctgctgttcgaccagtacaagatcatccccccctacaccgacgacgccttcgagatcagaagactgagcagcgtgttcctgagagtgagaaccaacgtgggcgtgagagtgctgtacgacagagagggcctgagactgtacctgcaggtggaccagagatgggtggaggacaccgtgggcctgtgcggcaccttcaacggcaacacccaggacgacttcctgagccccgtgggcgtgcccgagagcaccccccagctgttcggcaacagctggaagaccctgagcgcctgcagccccctggtgagcggcagccccctggacccctgcgacgtgcacctgcaggccgccagctacagcgtgcaggcctgcagcgtgctgaccggcgagatgttcgccccctgcagcgccttcctgagccccgtgccctacttcgagcagtgcagaagagacgcctgcagatgcggccagccctgcctgtgcgccaccctggcccactacgcccacctgtgcagaagacacggcctgcccgtggacttcagagccagactgcccgcctgcgccctgagctgcgaggccagcaaggagtacagcccctgcgtggccccctgcggcagaacctgccaggacctggccagccccgaggcctgcggcgtggacggcggcgacgacctgagcagagacgagtgcgtggagggctgcgcctgcccccccgacacctacctggacacccaggccgacctgtgcgtgcccagaaaccagtgcagctgccacttccagggcgtggactacccccccggcgacagcgacatccccagcctgggccactgccactgcaaggacggcgtgatgagctgcgacagcagagcccccgccgccgcctgccccgccggccaggtgttcgtgaactgcagcgacctgcacaccgacctggagctgagcagagagagaacctgcgagcagcagctgctgaacctgagcgtgagcgccagaggcccctgcctgagcggctgcgcctgcccccagggcctgctgagacacggcgacgcctgcttcctgcccgaggagtgcccctgcacctggaagggcaaggagtacttccccggcgaccaggtgatgagcccctgccacacctgcgtgtgccagagaggcagcttccagtgcaccctgcacccctgcgccagcacctgcaccgcctacggcgacagacactacagaaccttcgacggcctgcccttcgacttcgtgggcgcctgcaaggtgcacctggtgaagagcaccagcgacgtgagcttcagcgtgatcgtggagaacgtgaactgctacagcagcggcatgatctgcagaaagttcatcagcatcaacgtgggcaacagcctgatcgtgttcgacgacgacagcggcaaccccagccccgagagcttcctggacgacaagcaggaggtgcacacctggagagtgggcttcttcaccctggtgcacttcccccaggagcacatcaccctgctgtgggaccagagaaccaccgtgcacgtgcaggccggcccccagtggcagggccagctggccggcctgtgcggcaacttcgacctgaagaccatcaacgagatgagaacccccgagaacctggagctgaccaacccccaggagttcggcagcagctgggccgccgtggagtgccccgacaccctggaccccagagacatgtgcgtgctgaaccccctgagagagcccttcgccaagaaggagtgcagcatcctgctgagcgaggtgttcgagatctgccaccccgtggtggacgtgacctggttctacagcaactgcctgaccgacacctgcggctgcagccagggcggcgactgcgagtgcttctgcgccagcgtgagcgcctacgcccaccagtgctgccagcacggcgtggccgtggactggagaacccccagactgtgcccctacgactgcgacttcttcaacaaggtgctgggcaagggcccctaccagctgagcagcctggccgccggcggcgccctggtgggcatgaaggccgtgggcgacgacatcgtgctggtgagaaccgaggacgtggcccccgccgacatcgtgagcttcctgctgaccgccgccctgtacaaggccaaggcccacgaccccgacgtggtgagcctggaggccgccgacagacccaacttcttcctgcacgtgaccgccaacggcagcctggagctggccaagtggcagggcagagacaccttccagcagcacgccagcttcctgctgcacagaggcaccagacaggccggcctggtggccctggagagcctggccaagcccagcagcttcctgtacgtgagcggcgccgtgctggccctgagactgtacgagcacaccgaggtgttcagaagaggcaccctgttcagactgctggacgccaagcccagcggcgccgcctaccccatctgcgagtggagatacgacgcctgcgccagcccctgcttccagacctgcagagaccccagagccgccagctgcagagacgtgcccagagtggagggctgcgtgcccgtgtgccccaccccccaggtgctggacgaggtgacccagagatgcgtgtacctggaggactgcgtggagcccgccgtgtgggtgcccaccgaggccctgggcaacgagaccctgccccccagccagggcctgcccacccccagcgacgaggagccccagctgagccaggagagccccagaacccccacccacagacccgccctgacccccgccgcccccctgaccaccgccctgaacccccccgtgaccgccaccgaggagcccgtggtgagccccggccccacccagaccaccctgcagcagcccctggagctgaccgccagccagctgcccgccggccccaccgagagccccgccagcaagggcgtgaccgccagcctgctggccatcccccacacccccgagagcagcagcctgcccgtggccctgcagacccccacccccggcatggtgagcggcgccatggagaccaccagagtgaccgtgatcttcgccggcagccccaacatcaccgtgagcagcagaagcccccccgcccccagattccccctgatgaccaaggccgtgaccgtgagaggccacggcagcctgcccgtgagaaccacccccccccagcccagcctgaccgccagccccagcagcagacccgtggccagccccggcgccatcagcagaagccccaccagcagcggcagccacaaggccgtgctgacccccgccgtgaccaaggtgatcagcagaaccggcgtgccccagcccacccaggcccagagcgccagcagccccagcacccccctgaccgtggccggcaccgccgccgagcaggtgcccgtgagccccctggccaccagaagcctggagatcgtgctgagcaccgagaagggcgaggccggccacagccagcccatgggcagccccgccagcccccagccccaccccctgcccagcgccccccccagacccgcccagcacaccaccatggccaccagaagccccgccctgccccccgagacccccgccgccgccagcctgagcaccgccaccgacggcctggccgccacccccttcatgagcctggagagcaccagacccagccagctgctgagcggcctgccccccgacaccagcctgcccctggccaaggtgggcaccagcgcccccgtggccacccccggccccaaggccagcgtgatcaccacccccctgcagccccaggccaccaccctgcccgcccagaccctgagccccgtgctgcccttcacccccgccgccatgacccaggcccacccccccacccacatcgccccccccgccgccggcaccgcccccggcctgctgctgggcgccaccctgcccaccagcggcgtgctgcccgtggccgagggcaccgccagcatggtgagcgtggtgcccagaaagagcaccaccggcaaggtggccatcctgagcaagcaggtgagcctgcccaccagcatgtacggcagcgccgagggcggccccaccgagctgacccccgccaccagccaccccctgacccccctggtggccgagcccgagggcgcccaggccggcaccgccctgcccgtgcccaccagctacgccctgagcagagtgagcgccagaaccgccccccaggacagcatgctggtgctgctgccccagctggccgaggcccacggcaccagcgccggcccccacctggccgccgagcccgtggacgaggccaccaccgagcccagcggcagaagcgcccccgccctgagcatcgtggagggcctggccgaggccctggccaccaccaccgaggccaacaccagcaccacctgcgtgcccatcgccgagcaggactgcgtgagacacatctgcctggagggccagctgatcagagtgaaccagagccagcactgcccccagggcgccgccccccccagatgcggcatcctgggcctggccgtgagagtgggcggcgacagatgctgccccctgtgggagtgcgcctgcagatgcagcatcttccccgacctgagcttcgtgaccttcgacggcagccacgtggccctgttcaaggaggccatctacatcctgagccagagccccgacgagatgctgaccgtgcacgtgctggactgcaagagcgccaacctgggccacctgaactggccccccttctgcctggtgatgctgaacatgacccacctggcccaccaggtgaccatcgacagattcaacagaaaggtgaccgtggacctgcagcccgtgtggccccccgtgagcagatacggcttcagaatcgaggacaccggccacatgtacatgatcctgacccccagcgacatccagatccagtggctgcacagcagcggcctgatgatcgtggaggccagcaagaccagcaaggcccagggccacggcctgtgcggcatctgcgacggcgacgccgccaacgacctgaccctgaaggacggcagcgtggtgggcggcgccgaggaccccgcccccttcctggacagctggcaggtgcccagcagcctgaccagcgtgggccagaccagattcagacccgacagctgcgccaccaccgactgcagcccctgcctgagaatggtgagcaacagaaccttcagcgcctgccacagattcgtgccccccgagagcttctgcgagctgtggatcagagacaccaagtacgtgcagcagccctgcgtggccctgaccgtgtacgtggccatgtgccacaagttccacgtgtgcatcgagtggagaagaagcgactactgccccttcctgtgcagcagcgacagcacctaccaggcctgcgtgaccgcctgcgagccccccaagacctgccaggacggcatcctgggccccctggaccccgagcactgccaggtgctgggcgagggctgcgtgtgcagcgagggcaccatcctgcacagaagacacagcgccctgtgcatccccgaggccaagtgcgcctgcaccgacagcatgggcgtgcccagagccctgggcgagacctggaacagcagcctgagcggctgctgccagcaccagtgccaggcccccgacaccatcgtgcccgtggacctgggctgccccagccccagacccgagagctgcctgagattcggcgaggtggccctgctgctgcccaccaaggacccctgctgcctgggcaccgtgtgcgtgtgcaaccagaccctgtgcgagggcctggcccccacctgcagacccggccacagactgctgacccacttccaggaggacagctgctgccccagctacagctgcgagtgcgaccccgacctgtgcgaggccgagctggtgcccagctgcagacaggaccagatcctgatcaccggcagactgggcgacagctgctgcaccagctacttctgcgcctgcggcgactgccccgacagcatccccgagtgccaggagggcgaggccctgaccgtgcacagaaacaccaccgagctgtgctgccccctgtaccagtgcgtgtgcgagaacttcagatgcccccaggtgcagtgcggcctgggcaccgccctggtggaggtgtggagccccgacagatgctgcccctacaagagctgcgagtgcgactgcgacaccatccccgtgcccagatgccacctgtgggagaagagccagctggacgaggagttcatgcacagcgtggagaacgtgtgcggctgcgccaagtacgagtgcgtgaaggcccccgtgtgcctgagcagagagctgggcgtgatgcagcccggccagaccgtggtggagctgagcgccgacggcgtgtgccacaccagcagatgcaccaccgtgctggaccccctgaccaacttctaccagatcaacaccaccagcgtgctgtgcgacatccactgcgaggccaaccaggagtacgagcaccccagagacctggccgcctgctgcggcagctgcagaaacgtgagctgcctgttcaccttccccaacggcaccaccagcctgttcctgcccggcgccagctggatcgccgactgcgccagacaccactgcagcagcacccccctgggcgccgtgctggtgagaagccccatcagctgcccccccctgaacgagaccgagtgcgccaaggtgggcggcagcgtggtgcccagcctggagggctgctgcagaacctgcaaggaggacggcagaagctgcaagaaggtgaccatcagaatgaccatcagaaagaacgagtgcagaagcagcacccccgtgaacctggtgagctgcgacggcagatgccccagcgccagcatctacaactacaacatcaacacctacgccagattctgcaagtgctgcagagaggtgggcctgcagagaagaagcgtgcagctgttctgcgccaccaacgccacctgggtgccctacaccgtgcaggagcccaccgactgcgcctgccagtggagctag

SEQ ID NO: 92088 - DNA, 387 bp, synthetic construct
  misc_feature 1..387: note = Description of Artificial Sequence: Synthetic coding sequence
  source 1..387: mol_type = other DNA
atggccagaatcctgctgctgttcctgcccggcctggtggccgtgtgcgccgtgcacggcatcttcatggacagactggccagcaagaagctgtgcgccgacgacgagtgcgtgtacaccatcagcctggccagcgcccaggaggactacaacgcccccgactgcagattcatcaacgtgaagaagggccagcagatctacgtgtacagcaagctggtgaaggagaacggcgccggcgagttctgggccggcagcgtgtacggcgacggccaggacgagatgggcgtggtgggctacttccccagaaacctggtgaaggagcagagagtgtaccaggaggccaccaaggaggtgcccaccaccgacatcgacttcttctgcgagtag

SEQ ID NO: 92089 - DNA, 1446 bp, synthetic construct
  misc_feature 1..1446: note = Description of Artificial Sequence: Synthetic coding sequence
  source 1..1446: mol_type = other DNA
atgcagctgtacagcagcgtgtgcacccactaccccgccggcgcccccggccccaccgccgccgcccccgccccccccgccgccgccacccccttcaaggtgagcctgcagccccccggcgccgccggcgccgcccccgagcccgagaccggcgagtgccagcccgccgccgccgccgagcacagagaggccgccgccgtgcccgccgccaagatgcccgccttcagcagctgcttcgaggtggtgagcggcgccgccgcccccgccagcgccgccgccggcccccccggcgccagctgcaagccccccctgcccccccactacaccagcaccgcccagatcaccgtgagagccctgggcgccgacagactgctgctgcacggccccgaccccgtgcccggcgccgccggcagcgccgccgcccccagaggcagatgcctgctgctggcccccgcccccgccgcccccgtgccccccagaagaggcagcagcgcctggctgctggaggagctgctgagacccgactgccccgagcccgccggcctggacgccaccagagagggccccgacagaaacttcagactgagcgagcacagacaggccctggccgccgccaagcacagaggccccgccgccacccccggcagccccgaccccggccccggcccctggggcgaggagcacctggccgagagaggccccagaggctgggagagaggcggcgacagatgcgacgcccccggcggcgacgccgccagaagacccgaccccgaggccgaggccccccccgccggcagcatcgaggccgcccccagcagcgccgccgagcccgtgatcgtgagcagaagcgaccccagagacgagaagctggccctgtacctggccgaggtggagaagcaggacaagtacctgagacagagaaacaagtacagattccacatcatccccgacggcaactgcctgtacagagccgtgagcaagaccgtgtacggcgaccagagcctgcacagagagctgagagagcagaccgtgcactacatcgccgaccacctggaccacttcagccccctgatcgagggcgacgtgggcgagttcatcatcgccgccgcccaggacggcgcctgggccggctaccccgagctgctggccatgggccagatgctgaacgtgaacatccacctgaccaccggcggcagactggagagccccaccgtgagcaccatgatccactacctgggccccgaggacagcctgagacccagcatctggctgagctggctgagcaacggccactacgacgccgtgttcgaccacagctaccccaaccccgagtacgacaactggtgcaagcagacccaggtgcagagaaagagagacgaggagctggccaagagcatggccatcagcctgagcaagatgtacatcgagcagaacgcctgcagctag

SEQ ID NO: 92090 - DNA, 1197 bp, synthetic construct
  misc_feature 1..1197: note = Description of Artificial Sequence: Synthetic coding sequence
  source 1..1197: mol_type = other DNA
atgagcagaaagcaggccgccaagagcagacccggcagcggcagcagaaaggccgaggccgagagaaagagagacgagagagccgccagaagagccctggccaaggagagaagaaacagacccgagagcggcggcggcggcggctgcgaggaggagttcgtgagcttcgccaaccagctgcaggccctgggcctgaagctgagagaggtgcccggcgacggcaactgcctgttcagagccctgggcgaccagctggagggccacagcagaaaccacctgaagcacagacaggagaccgtggactacatgatcaagcagagagaggacttcgagcccttcgtggaggacgacatccccttcgagaagcacgtggccagcctggccaagcccggcaccttcgccggcaacgacgccatcgtggccttcgccagaaaccaccagctgaacgtggtgatccaccagctgaacgcccccctgtggcagatcagaggcaccgagaagagcagcgtgagagagctgcacatcgcctacagatacggcgagcactacgacagcgtgagaagaatcaacgacaacagcgaggcccccgcccacctgcagaccgacttccagatgctgcaccaggacgagagcaacaagagagagaagatcaagaccaagggcatggacagcgaggacgacctgagagacgaggtggaggacgccgtgcagaaggtgtgcaacgccaccggctgcagcgacttcaacctgatcgtgcagaacctggaggccgagaactacaacatcgagagcgccatcatcgccgtgctgagaatgaaccagggcaagagaaacaacgccgaggagaacctggagcccagcggcagagtgctgaagcagtgcggccccctgtgggaggagggcggcagcggcgccagaatcttcggcaaccagggcctgaacgagggcagaaccgagaacaacaaggcccaggccagccccagcgaggagaacaaggccaacaagaaccagctggccaaggtgaccaacaagcagagaagagagcagcagtggatggagaagaagaagagacaggaggagagacacagacacaaggccctggagagcagaggcagccacagagacaacaacagaagcgaggccgaggccaacacccaggtgaccctggtgaagaccttcgccgccctgaacatctag

SEQ ID NO: 92091 - DNA, 438 bp, synthetic construct
  misc_feature 1..438: note = Description of Artificial Sequence: Synthetic coding sequence
  source 1..438: mol_type = other DNA
atggcctgcatccactacctgagagagaacagagagaagttcgaggccttcatcgagggcagcttcgaggagtacctgaagagactggagaacccccaggagtgggtgggccaggtggagatcagcgccctgagcctgatgtacagaaaggacttcatcatctacagagagcccaacgtgagccccagccaggtgaccgagaacaacttccccgagaaggtgctgctgtgcttcagcaacggcaaccactacgacatcgtgtaccccatcaagtacaaggagagcagcgccatgtgccagagcctgctgtacgagctgctgtacgagaaggtgttcaagaccgacgtgagcaagatcgtgatggagctggacaccctggaggtggccgacgaggacaacagcgagatcagcgacagcgaggacgacagctgcaagtag

SEQ ID NO: 92092 - DNA, 3345 bp, synthetic construct
  misc_feature 1..3345: note = Description of Artificial Sequence: Synthetic coding sequence
  source 1..3345: mol_type = other DNA
atggaggccgccgtgggcgtgcccgacggcggcgaccagggcggcgccggccccagagaggacgccacccccatggacgcctacctgagaaagctgggcctgtacagaaagctggtggccaaggacggcagctgcctgttcagagccgtggccgagcaggtgctgcacagccagagcagacacgtggaggtgagaatggcctgcatccactacctgagagagaacagagagaagttcgaggccttcatcgagggcagcttcgaggagtacctgaagagactggagaacccccaggagtgggtgggccaggtggagatcagcgccctgagcctgatgtacagaaaggacttcatcatctacagagagcccaacgtgagccccagccaggtgaccgagaacaacttccccgagaaggtgctgctgtgcttcagcaacggcaaccactacgacatcgtgtaccccatcaagtacaaggagagcagcgccatgtgccagagcctgctgtacgagctgctgtacgagaaggtgttcaagaccgacgtgagcaagatcgtgatggagctggacaccctggaggtggccgacgaggacaacagcgagatcagcgacagcgaggacgacagctgcaagagcaagaccgccgccgccgccgccgacgtgaacggcttcaagcccctgagcggcaacgagcagctgaagaacaacggcaacagcaccagcctgcccctgagcagaaaggtgctgaagagcctgaaccccgccgtgtacagaaacgtggagtacgagatctggctgaagagcaagcaggcccagcagaagagagactacagcatcgccgccggcctgcagtacgaggtgggcgacaagtgccaggtgagactggaccacaacggcaagttcctgaacgccgacgtgcagggcatccacagcgagaacggccccgtgctggtggaggagctgggcaagaagcacaccagcaagaacctgaaggcccccccccccgagagctggaacaccgtgagcggcaagaagatgaagaagcccagcaccagcggccagaacttccacagcgacgtggactacagaggccccaagaaccccagcaagcccatcaaggcccccagcgccctgccccccagactgcagcaccccagcggcgtgagacagcacgccttcagcagccacagcagcggcagccagagccagaagttcagcagcgagcacaagaacctgagcagaacccccagccagatcatcagaaagcccgacagagagagagtggaggacttcgaccacaccagcagagagagcaactacttcggcctgagccccgaggagagaagagagaagcaggccatcgaggagagcagactgctgtacgagatccagaacagagacgagcaggccttccccgccctgagcagcagcagcgtgaaccagagcgccagccagagcagcaacccctgcgtgcagagaaagagcagccacgtgggcgacagaaagggcagcagaagaagaatggacaccgaggagagaaaggacaaggacagcatccacggccacagccagctggacaagagacccgagcccagcaccctggagaacatcaccgacgacaagtacgccaccgtgagcagccccagcaagagcaagaagctggagtgccccagccccgccgagcagaagcccgccgagcacgtgagcctgagcaaccccgcccccctgctggtgagccccgaggtgcacctgacccccgccgtgcccagcctgcccgccaccgtgcccgcctggcccagcgagcccaccaccttcggccccaccggcgtgcccgcccccatccccgtgctgagcgtgacccagaccctgaccaccggccccgacagcgccgtgagccaggcccacctgacccccagccccgtgcccgtgagcatccaggccgtgaaccagcccctgatgcccctgccccagaccctgagcctgtaccaggaccccctgtaccccggcttcccctgcaacgagaagggcgacagagccatcgtgcccccctacagcctgtgccagaccggcgaggacctgcccaaggacaagaacatcctgagattcttcttcaacctgggcgtgaaggcctacagctgccccatgtgggccccccacagctacctgtaccccctgcaccaggcctacctggccgcctgcagaatgtaccccaaggtgcccgtgcccgtgtacccccacaacccctggttccaggaggcccccgccgcccagaacgagagcgactgcacctgcaccgacgcccacttccccatgcagaccgaggccagcgtgaacggccagatgccccagcccgagatcggcccccccaccttcagcagccccctggtgatcccccccagccaggtgagcgagagccacggccagctgagctaccaggccgacctggagagcgagacccccggccagctgctgcacgccgactacgaggagagcctgagcggcaagaacatgttcccccagcccagcttcggccccaaccccttcctgggccccgtgcccatcgccccccccttcttcccccacgtgtggtacggctaccccttccagggcttcatcgagaaccccgtgatgagacagaacatcgtgctgcccagcgacgagaagggcgagctggacctgagcctggagaacctggacctgagcaaggactgcggcagcgtgagcaccgtggacgagttccccgaggccagaggcgagcacgtgcacagcctgcccgaggccagcgtgagcagcaagcccgacgagggcagaaccgagcagagcagccagaccagaaaggccgacaccgccctggccagcatcccccccgtggccgagggcaaggcccacccccccacccagatcctgaacagagagagagagaccgtgcccgtggagctggagcccaagagaaccatccagagcctgaaggagaagaccgagaaggtgaaggaccccaagaccgccgccgacgtggtgagccccggcgccaacagcgtggacagcagagtgcagagacccaaggaggagagcagcgaggacgagaacgaggtgagcaacatcctgagaagcggcagaagcaagcagttctacaaccagacctacggcagcagaaagtacaagagcgactggggctacagcggcagaggcggctaccagcacgtgagaagcgaggagagctggaagggccagcccagcagaagcagagacgagggctaccagtaccacagaaacgtgagaggcagacccttcagaggcgacagaagaagaagcggcatgggcgacggccacagaggccagcacacctag

SEQ ID NO: 92093 - DNA, 3150 bp, synthetic construct
  misc_feature 1..3150: note = Description of Artificial Sequence: Synthetic coding sequence
  source 1..3150: mol_type = other DNA
atggcctgcatccactacctgagagagaacagagagaagttcgaggccttcatcgagggcagcttcgaggagtacctgaagagactggagaacccccaggagtgggtgggccaggtggagatcagcgccctgagcctgatgtacagaaaggacttcatcatctacagagagcccaacgtgagccccagccaggtgaccgagaacaacttccccgagaaggtgctgctgtgcttcagcaacggcaaccactacgacatcgtgtaccccatcaagtacaaggagagcagcgccatgtgccagagcctgctgtacgagctgctgtacgagaaggtgttcaagaccgacgtgagcaagatcgtgatggagctggacaccctggaggtggccgacgaggacaacagcgagatcagcgacagcgaggacgacagctgcaagagcaagaccgccgccgccgccgccgacgtgaacggcttcaagcccctgagcggcaacgagcagctgaagaacaacggcaacagcaccagcctgcccctgagcagaaaggtgctgaagagcctgaaccccgccgtgtacagaaacgtggagtacgagatctggctgaagagcaagcaggcccagcagaagagagactacagcatcgccgccggcctgcagtacgaggtgggcgacaagtgccaggtgagactggaccacaacggcaagttcctgaacgccgacgtgcagggcatccacagcgagaacggccccgtgctggtggaggagctgggcaagaagcacaccagcaagaacctgaaggcccccccccccgagagctggaacaccgtgagcggcaagaagatgaagaagcccagcaccagcggccagaacttccacagcgacgtggactacagaggccccaagaaccccagcaagcccatcaaggcccccagcgccctgccccccagactgcagcaccccagcggcgtgagacagcacgccttcagcagccacagcagcggcagccagagccagaagttcagcagcgagcacaagaacctgagcagaacccccagccagatcatcagaaagcccgacagagagagagtggaggacttcgaccacaccagcagagagagcaactacttcggcctgagccccgaggagagaagagagaagcaggccatcgaggagagcagactgctgtacgagatccagaacagagacgagcaggccttccccgccctgagcagcagcagcgtgaaccagagcgccagccagagcagcaacccctgcgtgcagagaaagagcagccacgtgggcgacagaaagggcagcagaagaagaatggacaccgaggagagaaaggacaaggacagcatccacggccacagccagctggacaagagacccgagcccagcaccctggagaacatcaccgacgacaagtacgccaccgtgagcagccccagcaagagcaagaagctggagtgccccagccccgccgagcagaagcccgccgagcacgtgagcctgagcaaccccgcccccctgctggtgagccccgaggtgcacctgacccccgccgtgcccagcctgcccgccaccgtgcccgcctggcccagcgagcccaccaccttcggccccaccggcgtgcccgcccccatccccgtgctgagcgtgacccagaccctgaccaccggccccgacagcgccgtgagccaggcccacctgacccccagccccgtgcccgtgagcatccaggccgtgaaccagcccctgatgcccctgccccagaccctgagcctgtaccaggaccccctgtaccccggcttcccctgcaacgagaagggcgacagagccatcgtgcccccctacagcctgtgccagaccggcgaggacctgcccaaggacaagaacatcctgagattcttcttcaacctgggcgtgaaggcctacagctgccccatgtgggccccccacagctacctgtaccccctgcaccaggcctacctggccgcctgcagaatgtaccccaaggtgcccgtgcccgtgtacccccacaacccctggttccaggaggcccccgccgcccagaacgagagcgactgcacctgcaccgacgcccacttccccatgcagaccgaggccagcgtgaacggccagatgccccagcccgagatcggcccccccaccttcagcagccccctggtgatcccccccagccaggtgagcgagagccacggccagctgagctaccaggccgacctggagagcgagacccccggccagctgctgcacgccgactacgaggagagcctgagcggcaagaacatgttcccccagcccagcttcggccccaaccccttcctgggccccgtgcccatcgccccccccttcttcccccacgtgtggtacggctaccccttccagggcttcatcgagaaccccgtgatgagacagaacatcgtgctgcccagcgacgagaagggcgagctggacctgagcctggagaacctggacctgagcaaggactgcggcagcgtgagcaccgtggacgagttccccgaggccagaggcgagcacgtgcacagcctgcccgaggccagcgtgagcagcaagcccgacgagggcagaaccgagcagagcagccagaccagaaaggccgacaccgccctggccagcatcccccccgtggccgagggcaaggcccacccccccacccagatcctgaacagagagagagagaccgtgcccgtggagctggagcccaagagaaccatccagagcctgaaggagaagaccgagaaggtgaaggaccccaagaccgccgccgacgtggtgagccccggcgccaacagcgtggacagcagagtgcagagacccaaggaggagagcagcgaggacgagaacgaggtgagcaacatcctgagaagcggcagaagcaagcagttctacaaccagacctacggcagcagaaagtacaagagcgactggggctacagcggcagaggcggctaccagcacgtgagaagcgaggagagctggaagggccagcccagcagaagcagagacgagggctaccagtaccacagaaacgtgagaggcagacccttcagaggcgacagaagaagaagcggcatgggcgacggccacagaggccagcacacctag

SEQ ID NO: 92094 - DNA, 420 bp, synthetic construct
  misc_feature 1..420: note = Description of Artificial Sequence: Synthetic coding sequence
  source 1..420: mol_type = other DNA
atggcctgcatccactacctgagagagaacagagagaagttcgaggccttcatcgagggcagcttcgaggagtacctgaagagactggagaacccccaggagtgggtgggccaggtggagatcagcgccctgagcctgatgtacagaaaggacttcatcatctacagagagcccaacgtgagccccagccaggtgaccgagaacaacttccccgagaaggtgctgctgtgcttcagcaacggcaaccactacgacatcgtgtaccccatcaagtacaaggagagcagcgccatgtgccagagcctgctgtacgagctgctgtacgagaaggtgttcaagaccgacgtgagcaagatcgtgatggagctggacaccctggaggtggccgacgaggacaacagcgagatcagcgacagctag

SEQ ID NO: 92095 - DNA, 438 bp, synthetic construct; identical to SEQ ID NO: 92091
  misc_feature 1..438: note = Description of Artificial Sequence: Synthetic coding sequence
  source 1..438: mol_type = other DNA

SEQ ID NO: 92096 - DNA, 1716 bp, synthetic construct
  misc_feature 1..1716: note = Description of Artificial Sequence: Synthetic coding sequence
  source 1..1716: mol_type = other DNA
atgaccatcctgcccaagaagaagccccccccccccgacgccgaccccgccaacgagccccccccccccggccccatgccccccgcccccagaagaggcggcggcgtgggcgtgggcggcggcggcaccggcgtgggcggcggcgacagagacagagacagcggcgtggtgggcgccagacccagagccagcccccccccccagggccccctgcccggcccccccggcgccctgcacagatgggccctggccgtgccccccggcgccgtggccggccccagaccccagcaggccagcccccccccctgcggcggccccggcggccccggcggcggccccggcgacgccctgggcgccgccgccgccggcgtgggcgccgccggcgtggtggtgggcgtgggcggcgccgtgggcgtgggcggctgctgcagcggccccggccacagcaagagaagaagacaggcccccggcgtgggcgccgtgggcggcggcagccccgagagagaggaggtgggcgccggctacaacagcgaggacgagtacgaggccgccgccgccagaatcgaggccatggaccccgccaccgtggagcagcaggagcactggttcgagaaggccctgagagacaagaagggcttcatcatcaagcagatgaaggaggacggcgcctgcctgttcagagccgtggccgaccaggtgtacggcgaccaggacatgcacgaggtggtgagaaagcactgcatggactacctgatgaagaacgccgactacttcagcaactacgtgaccgaggacttcaccacctacatcaacagaaagagaaagaacaactgccacggcaaccacatcgagatgcaggccatggccgagatgtacaacagacccgtggaggtgtaccagtacagcaccggcaccagcgccgtggagcccatcaacaccttccacggcatccaccagaacgaggacgagcccatcagagtgagctaccacagaaacatccactacaacagcgtggtgaaccccaacaaggccaccatcggcgtgggcctgggcctgcccagcttcaagcccggcttcgccgagcagagcctgatgaagaacgccatcaagaccagcgaggagagctggatcgagcagcagatgctggaggacaagaagagagccaccgactgggaggccaccaacgaggccatcgaggagcaggtggccagagagagctacctgcagtggctgagagaccaggagaagcaggccagacaggtgagaggccccagccagcccagaaaggccagcgccacctgcagcagcgccaccgccgccgccagcagcggcctggaggagtggaccagcagaagccccagacagagaagcagcgccagcagccccgagcaccccgagctgcacgccgagctgggcatgaagccccccagccccggcaccgtgctggccctggccaagccccccagcccctgcgcccccggcaccagcagccagttcagcgccggcgccgacagagccaccagccccctggtgagcctgtaccccgccctggagtgcagagccctgatccagcagatgagccccagcgccttcggcctgaacgactgggacgacgacgagatcctggccagcgtgctggccgtgagccagcaggagtacctggacagcatgaagaagaacaaggtgcacagagaccccccccccgacaagagctag

SEQ ID NO: 92097 - DNA, 1701 bp, synthetic construct
  misc_feature 1..1701: note = Description of Artificial Sequence: Synthetic coding sequence
  source 1..1701: mol_type = other DNA
atgaccatcctgcccaagaagaagccccccccccccgacgccgaccccgccaacgagccccccccccccggccccatgccccccgcccccagaagaggcggcggcgtgggcgtgggcggcggcggcaccggcgtgggcggcggcgacagagacagagacagcggcgtggtgggcgccagacccagagccagcccccccccccagggccccctgcccggcccccccggcgccctgcacagatgggccctggccgtgccccccggcgccgtggccggccccagaccccagcaggccagcccccccccctgcggcggccccggcggccccggcggcggccccggcgacgccctgggcgccgccgccgccggcgtgggcgccgccggcgtggtggtgggcgtgggcggcgccgtgggcgtgggcggctgctgcagcggccccggccacagcaagagaagaagacaggcccccggcgtgggcgccgtgggcggcggcagccccgagagagaggaggtgggcgccggctacaacagcgaggacgagtacgaggccgccgccgccagaatcgaggccatggaccccgccaccgtggagcagcaggagcactggttcgagaaggccctgagagacaagaagggcttcatcatcaagcagatgaaggaggacggcgcctgcctgttcagagccgtggccgaccaggtgtacggcgaccaggacatgcacgaggtggtgagaaagcactgcatggactacctgatgaagaacgccgactacttcagcaactacgtgaccgaggacttcaccacctacatcaacagaaagagaaagaacaactgccacggcaaccacatcgagatgcaggccatggccgagatgtacaacagacccgtggaggtgtaccagtacagcaccgagcccatcaacaccttccacggcatccaccagaacgaggacgagcccatcagagtgagctaccacagaaacatccactacaacagcgtggtgaaccccaacaaggccaccatcggcgtgggcctgggcctgcccagcttcaagcccggcttcgccgagcagagcctgatgaagaacgccatcaagaccagcgaggagagctggatcgagcagcagatgctggaggacaagaagagagccaccgactgggaggccaccaacgaggccatcgaggagcaggtggccagagagagctacctgcagtggctgagagaccaggagaagcaggccagacaggtgagaggccccagccagcccagaaaggccagcgccacctgcagcagcgccaccgccgccgccagcagcggcctggaggagtggaccagcagaagccccagacagagaagcagcgccagcagccccgagcaccccgagctgcacgccgagctgggcatgaagccccccagccccggcaccgtgctggccctggccaagccccccagcccctgcgcccccggcaccagcagccagttcagcgccggcgccgacagagccaccagccccctggtgagcctgtaccccgccctggagtgcagagccctgatccagcagatgagccccagcgccttcggcctgaacgactgggacgacgacgagatcctggccagcgtgctggccgtgagccagcaggagtacctggacagcatgaagaagaacaaggtgcacagagaccccccccccgacaagagctag

SEQ ID NO: 92098 - DNA, 1701 bp, synthetic construct; identical to SEQ ID NO: 92097
  misc_feature 1..1701: note = Description of Artificial Sequence: Synthetic coding sequence
  source 1..1701: mol_type = other DNA

SEQ ID NO: 92099 - DNA, 1050 bp, synthetic construct
  misc_feature 1..1050: note = Description of Artificial Sequence: Synthetic coding sequence
  source 1..1050: mol_type = other DNA
atgaaggaggacggcgcctgcctgttcagagccgtggccgaccaggtgtacggcgaccaggacatgcacgaggtggtgagaaagcactgcatggactacctgatgaagaacgccgactacttcagcaactacgtgaccgaggacttcaccacctacatcaacagaaagagaaagaacaactgccacggcaaccacatcgagatgcaggccatggccgagatgtacaacagacccgtggaggtgtaccagtacagcaccgagcccatcaacaccttccacggcatccaccagaacgaggacgagcccatcagagtgagctaccacagaaacatccactacaacagcgtggtgaaccccaacaaggccaccatcggcgtgggcctgggcctgcccagcttcaagcccggcttcgccgagcagagcctgatgaagaacgccatcaagaccagcgaggagagctggatcgagcagcagatgctggaggacaagaagagagccaccgactgggaggccaccaacgaggccatcgaggagcaggtggccagagagagctacctgcagtggctgagagaccaggagaagcaggccagacaggtgagaggccccagccagcccagaaaggccagcgccacctgcagcagcgccaccgccgccgccagcagcggcctggaggagtggaccagcagaagccccagacagagaagcagcgccagcagccccgagcaccccgagctgcacgccgagctgggcatgaagccccccagccccggcaccgtgctggccctggccaagccccccagcccctgcgcccccggcaccagcagccagttcagcgccggcgccgacagagccaccagccccctggtgagcctgtaccccgccctggagtgcagagccctgatccagcagatgagccccagcgccttcggcctgaacgactgggacgacgacgagatcctggccagcgtgctggccgtgagccagcaggagtacctggacagcatgaagaagaacaaggtgcacagagaccccccccccgacaagagctag

SEQ ID NO: 92100 - DNA, 1629 bp, synthetic construct
  misc_feature 1..1629: note = Description of Artificial Sequence: Synthetic coding sequence
  source 1..1629: mol_type = other DNA
atgaccatcctgcccaagaagaagccccccccccccgacgccgaccccggcggcaccggcgtgggcggcggcgacagagacagagacagcggcgtggtgggcgccagacccagagccagcccccccccccagggccccctgcccggcccccccggcgccctgcacagatgggccctggccgtgccccccggcgccgtggccggccccagaccccagcaggccagcccccccccctgcggcggccccggcggccccggcggcggccccggcgacgccctgggcgccgccgccgccggcgtgggcgccgccggcgtggtggtgggcgtgggcggcgccgtgggcgtgggcggctgctgcagcggccccggccacagcaagagaagaagacaggcccccggcgtgggcgccgtgggcggcggcagccccgagagagaggaggtgggcgccggctacaacagcgaggacgagtacgaggccgccgccgccagaatcgaggccatggaccccgccaccgtggagcagcaggagcactggttcgagaaggccctgagagacaagaagggcttcatcatcaagcagatgaaggaggacggcgcctgcctgttcagagccgtggccgaccaggtgtacggcgaccaggacatgcacgaggtggtgagaaagcactgcatggactacctgatgaagaacgccgactacttcagcaactacgtgaccgaggacttcaccacctacatcaacagaaagagaaagaacaactgccacggcaaccacatcgagatgcaggccatggccgagatgtacaacagacccgtggaggtgtaccagtacagcaccgagcccatcaacaccttccacggcatccaccagaacgaggacgagcccatcagagtgagctaccacagaaacatccactacaacagcgtggtgaaccccaacaaggccaccatcggcgtgggcctgggcctgcccagcttcaagcccggcttcgccgagcagagcctgatgaagaacgccatcaagaccagcgaggagagctggatcgagcagcagatgctggaggacaagaagagagccaccgactgggaggccaccaacgaggccatcgaggagcaggtggccagagagagctacctgcagtggctgagagaccaggagaagcaggccagacaggtgagaggccccagccagcccagaaaggccagcgccacctgcagcagcgccaccgccgccgccagcagcggcctggaggagtggaccagcagaagccccagacagagaagcagcgccagcagccccgagcaccccgagctgcacgccgagctgggcatgaagccccccagccccggcaccgtgctggccctggccaagccccccagcccctgcgcccccggcaccagcagccagttcagcgccggcgccgacagagccaccagccccctggtgagcctgtaccccgccctggagtgcagagccctgatccagcagatgagccccagcgccttcggcctgaacgactgggacgacgacgagatcctggccagcgtgctggccgtgagccagcaggagtacctggacagcatgaagaagaacaaggtgcacagagaccccccccccgacaagagctag

SEQ ID NO: 92101 - DNA, 1335 bp, synthetic construct
  misc_feature 1..1335: note = Description of Artificial Sequence: Synthetic coding sequence
  source 1..1335: mol_type = other DNA
ggcgtggtggtgggcgtgggcggcgccgtgggcgtgggcggctgctgcagcggccccggccacagcaagagaagaagacaggcccccggcgtgggcgccgtgggcggcggcagccccgagagagaggaggtgggcgccggctacaacagcgaggacgagtacgaggccgccgccgccagaatcgaggccatggaccccgccaccgtggagcagcaggagcactggttcgagaaggccctgagagacaagaagggcttcatcatcaagcagatgaaggaggacggcgcctgcctgttcagagccgtggccgaccaggtgtacggcgaccaggacatgcacgaggtggtgagaaagcactgcatggactacctgatgaagaacgccgactacttcagcaactacgtgaccgaggacttcaccacctacatcaacagaaagagaaagaacaactgccacggcaaccacatcgagatgcaggccatggccgagatgtacaacagacccgtggaggtgtaccagtacagcaccggcaccagcgccgtggagcccatcaacaccttccacggcatccaccagaacgaggacgagcccatcagagtgagctaccacagaaacatccactacaacagcgtggtgaaccccaacaaggccaccatcggcgtgggcctgggcctgcccagcttcaagcccggcttcgccgagcagagcctgatgaagaacgccatcaagaccagcgaggagagctggatcgagcagcagatgctggaggacaagaagagagccaccgactgggaggccaccaacgaggccatcgaggagcaggtggccagagagagctacctgcagtggctgagagaccaggagaagcaggccagacaggtgagaggccccagccagcccagaaaggccagcgccacctgcagcagcgccaccgccgccgccagcagcggcctggaggagtggaccagcagaagccccagacagagaagcagcgccagcagccccgagcaccccgagctgcacgccgagctgggcatgaagccccccagccccggcaccgtgctggccctggccaagccccccagcccctgcgcccccggcaccagcagccagttcagcgccggcgccgacagagccaccagccccctggtgagcctgtaccccgccctggagtgcagagccctgatccagcagatgagccccagcgccttcggcctgaacgactgggacgacgacgagatcctggccagcgtgctggccgtgagccagcaggagtacctggacagcatgaagaagaacaaggtgcacagagaccccccccccgacaagagctag

SEQ ID NO: 92102 - DNA, 867 bp, synthetic construct
  misc_feature 1..867: note = Description of Artificial Sequence: Synthetic coding sequence
  source 1..867: mol_type = other DNA
atggacgaccccaagagcgagcagcagagaatcctgagaagacaccagagagagagacaggagctgcaggcccagatcagaagcctgaagaacagcgtgcccaagaccgacaagaccaagagaaagcagctgctgcaggacgtggccagaatggaggccgagatggcccagaagcacagacaggagctggagaagttccaggacgacagcagcatcgagagcgtggtggaggacctggccaagatgaacctggagaacagaccccccagaagcagcaaggcccacagaaagagagagagaatggagagcgaggagagagagagacaggagagcatcttccaggccgagatgagcgagcacctggccggcttcaagagagaggaggaggagaagctggccgccatcctgggcgccagaggcctggagatgaaggccatccccgccgacggccactgcatgtacagagccatccaggaccagctggtgttcagcgtgagcgtggagatgctgagatgcagaaccgccagctacatgaagaagcacgtggacgagttcctgcccttcttcagcaaccccgagaccagcgacagcttcggctacgacgacttcatgatctactgcgacaacatcgtgagaaccaccgcctggggcggccagctggagctgagagccctgagccacgtgctgaagacccccatcgaggtgatccaggccgacagccccaccctgatcatcggcgaggagtacgtgaagaagcccatcatcctggtgtacctgagatacgcctacagcctgggcgagcactacaacagcgtgacccccctggaggccggcgccgccggcggcgtgctgcccagactgctgtag

SEQ ID NO: 92103 - DNA, 972 bp, synthetic construct
  misc_feature 1..972: note = Description of Artificial Sequence: Synthetic coding sequence
  source 1..972: mol_type = other DNA
atggagcccagagtgagagtggagggctggaaggtgcccaccagcagatgcagattcctgctggccagagtgctgggctacctggtggtgatggaggccgtgctgaccgaggagctggacgaggaggagcagctgctgagaagacacagaaaggagaagaaggagctgcaggccaagatccagggcatgaagaacgccgtgcccaagaacgacaagaagagaagaaagcagctgaccgaggacgtggccaagctggagaaggagatggagcagaagcacagagaggagctggagcagctgaagctgaccaccaaggagaacaagatcgacagcgtggccgtgaacatcagcaacctggtgctggagaaccagccccccagaatcagcaaggcccagaagagaagagagaagaaggccgccctggagaaggagagagaggagagaatcgccgaggccgagatcgagaacctgaccggcgccagacacatggagagcgagaagctggcccagatcctggccgccagacagctggagatcaagcagatccccagcgacggccactgcatgtacaaggccatcgaggaccagctgaaggagaaggactgcgccctgaccgtggtggccctgagaagccagaccgccgagtacatgcagagccacgtggaggacttcctgcccttcctgaccaaccccaacaccggcgacatgtacacccccgaggagttccagaagtactgcgaggacatcgtgaacaccgccgcctggggcggccagctggagctgagagccctgagccacatcctgcagacccccatcgagatcatccaggccgacagcccccccatcatcgtgggcgaggagtacagcaagaagcccctgatcctggtgtacatgagacacgcctacggcctgggcgagcactacaacagcgtgaccagactggtgaacatcgtgaccgagaactgcagctag

SEQ ID NO: 92104 - DNA, 579 bp, synthetic construct
  misc_feature 1..579: note = Description of Artificial Sequence: Synthetic coding sequence
  source 1..579: mol_type = other DNA
atgatcagcaaggagaagaaggccgccctggagaaggagagagaggagagaatcgccgaggccgagatcgagaacctgaccggcgccagacacatggagagcgagaagctggcccagatcctggccgccagacagctggagatcaagcagatccccagcgacggccactgcatgtacaaggccatcgaggaccagctgaaggagaaggactgcgccctgaccgtggtggccctgagaagccagaccgccgagtacatgcagagccacgtggaggacttcctgcccttcctgaccaaccccaacaccggcgacatgtacacccccgaggagttccagaagtactgcgaggacatcgtgaacaccgccgcctggggcggccagctggagctgagagccctgagccacatcctgcagacccccatcgagatcatccaggccgacagcccccccatcatcgtgggcgaggagtacagcaagaagcccctgatcctggtgtacatgagacacgcctacggcctgggcgagcactacaacagcgtgaccagactggtgaacatcgtgaccgagaactgcagctag

SEQ ID NO: 92105 - DNA, 2781 bp, synthetic construct
  misc_feature 1..2781: note = Description of Artificial Sequence: Synthetic coding sequence
  source 1..2781: mol_type = other DNA
atggtgagcagcgtgctgcccaaccccaccagcgccgagtgctgggccgccctgctgcacgaccccatgaccctggacatggacgccgtgctgagcgacttcgtgagaagcaccggcgccgagcccggcctggccagagacctgctggagggcaagaactgggacctgaccgccgccctgagcgactacgagcagctgagacaggtgcacaccgccaacctgccccacgtgttcaacgagggcagaggccccaagcagcccgagagagagccccagcccggccacaaggtggagagaccctgcctgcagagacaggacgacatcgcccaggagaagagactgagcagaggcatcagccacgccagcagcgccatcgtgagcctggccagaagccacgtggccagcgagtgcaacaacgagcagttccccctggagatgcccatctacaccttccagctgcccgacctgagcgtgtacagcgaggacttcagaagcttcatcgagagagacctgatcgagcaggccaccatggtggccctggagcaggccggcagactgaactggtggagcaccgtgtgcaccagctgcaagagactgctgcccctggccaccaccggcgacggcaactgcctgctgcacgccgccagcctgggcatgtggggcttccacgacagagacctggtgctgagaaaggccctgtacaccatgatgagaaccggcgccgagagagaggccctgaagagaagatggagatggcagcagacccagcagaacaaggaggaggagtgggagagagagtggaccgagctgctgaagctggccagcagcgagcccagaacccacttcagcaagaacggcggcaccggcggcggcgtggacaacagcgaggaccccgtgtacgagagcctggaggagttccacgtgttcgtgctggcccacatcctgagaagacccatcgtggtggtggccgacaccatgctgagagacagcggcggcgaggccttcgcccccatccccttcggcggcatctacctgcccctggaggtgccccccaacagatgccactgcagccccctggtgctggcctacgaccaggcccacttcagcgccctggtgagcatggagcagagagaccagcagagagagcaggccgtgatccccctgaccgacagcgagcacaagctgctgcccctgcacttcgccgtggaccccggcaaggactgggagtggggcaaggacgacaacgacaacgccagactggcccacctgatcctgagcctggaggccaagctgaacctgctgcacagctacatgaacgtgacctggatcagaatccccagcgagaccagagcccccctggcccagcccgagagccccaccgccagcgccggcgaggacgtgcagagcctggccgacagcctggacagcgacagagacagcgtgtgcagcaacagcaacagcaacaacggcaagaacggcaaggacaaggagaaggagaagcagagaaaggagaaggacaagaccagagccgacagcgtggccaacaagctgggcagcttcagcaagaccctgggcatcaagctgaagaagaacatgggcggcctgggcggcctggtgcacggcaagatgggcagagccaacagcgccaacggcaagaacggcgacagcgccgagagaggcaaggagaagaaggccaagagcagaaagggcagcaaggaggagagcggcgccagcgccagcaccagccccagcgagaagaccacccccagccccaccgacaaggccgccggcgccagccccgccgagaagggcggcggccccagaggcgacgcctggaagtacagcaccgacgtgaagctgagcctgaacatcctgagagccgccatgcagggcgagagaaagttcatcttcgccggcctgctgctgaccagccacagacaccagttccacgaggagatgatcggctactacctgaccagcgcccaggagagattcagcgccgagcaggagcagagaagaagagacgccgccaccgccgccgccgccgccgccgccgccgccgccgccaccgccaagagaccccccagaagacccgagaccgagggcgtgcccgtgcccgagagagccagccccggcccccccacccagctggtgctgaagctgaaggagagacccagccccggccccgccgccggcagagccgccagagccgccgccggcggcaccgccagccccggcggcggcgccagaagagccagcgccagcggccccgtgcccggcagaagcccccccgcccccgccagacagagcgtgatccacgtgcaggccagcggcgccagagacgaggcctgcgcccccgccgtgggcgccctgagaccctgcgccacctacccccagcagaacagaagcctgagcagccagagctacagccccgccagagccgccgccctgagaaccgtgaacaccgtggagagcctggccagagccgtgcccggcgccctgcccggcgccgccggcaccgccggcgccgccgagcacaagagccagacctacaccaacggcttcggcgccctgagagacggcctggagttcgccgacgccgacgcccccaccgccagaagcaacggcgagtgcggcagaggcggccccggccccgtgcagagaagatgccagagagagaactgcgccttctacggcagagccgagaccgagcactactgcagctactgctacagagaggagctgagaagaagaagagaggccagaggcgccagaccctag

SEQ ID NO: 92106 - DNA, 2802 bp, synthetic construct
  misc_feature 1..2802: note = Description of Artificial Sequence: Synthetic coding sequence
  source 1..2802: mol_type = other DNA
atggtgagcagcgtgctgcccaaccccaccagcgccgagtgctgggccgccctgctgcacgaccccatgaccctggacatggacgccgtgctgagcgacttcgtgagaagcaccggcgccgagcccggcctggccagagacctgctggagggcaagaactgggacctgaccgccgccctgagcgactacgagcagctgagacaggtgcacaccgccaacctgccccacgtgttcaacgagggcagaggccccaagcagcccgagagagagccccagcccggccacaaggtggagagaccctgcctgcagagacaggacgacatcgcccaggagaagagactgagcagaggcatcagccacgccagcagcgccatcgtgagcctggccagaagccacgtggccagcgagtgcaacaacgagcagttccccctggagatgcccatctacaccttccagctgcccgacctgagcgtgtacagcgaggacttcagaagcttcatcgagagagacctgatcgagcaggccaccatggtggccctggagcaggccggcagactgaactggtggagcaccgtgtgcaccagctgcaagagactgctgcccctggccaccaccggcgacggcaactgcctgctgcacgccgccagcctgggcatgtggggcttccacgacagagacctggtgctgagaaaggccctgtacaccatgatgagaaccggcgccgagagagaggccctgaagagaagatggagatggcagcagacccagcagaacaaggagagcggcctggtgtacaccgaggaggagtgggagagagagtggaccgagctgctgaagctggccagcagcgagcccagaacccacttcagcaagaacggcggcaccggcggcggcgtggacaacagcgaggaccccgtgtacgagagcctggaggagttccacgtgttcgtgctggcccacatcctgagaagacccatcgtggtggtggccgacaccatgctgagagacagcggcggcgaggccttcgcccccatccccttcggcggcatctacctgcccctggaggtgccccccaacagatgccactgcagccccctggtgctggcctacgaccaggcccacttcagcgccctggtgagcatggagcagagagaccagcagagagagcaggccgtgatccccctgaccgacagcgagcacaagctgctgcccctgcacttcgccgtggaccccggcaaggactgggagtggggcaaggacgacaacgacaacgccagactggcccacctgatcctgagcctggaggccaagctgaacctgctgcacagctacatgaacgtgacctggatcagaatccccagcgagaccagagcccccctggcccagcccgagagccccaccgccagcgccggcgaggacgtgcagagcctggccgacagcctggacagcgacagagacagcgtgtgcagcaacagcaacagcaacaacggcaagaacggcaaggacaaggagaaggagaagcagagaaaggagaaggacaagaccagagccgacagcgtggccaacaagctgggcagcttcagcaagaccctgggcatcaagctgaagaagaacatgggcggcctgggcggcctggtgcacggcaagatgggcagagccaacagcgccaacggcaagaacggcgacagcgccgagagaggcaaggagaagaaggccaagagcagaaagggcagcaaggaggagagcggcgccagcgccagcaccagccccagcgagaagaccacccccagccccaccgacaaggccgccggcgccagccccgccgagaagggcggcggccccagaggcgacgcctggaagtacagcaccgacgtgaagctgagcctgaacatcctgagagccgccatgcagggcgagagaaagttcatcttcgccggcctgctgctgaccagccacagacaccagttccacgaggagatgatcggctactacctgaccagcgcccaggagagattcagcgccgagcaggagcagagaagaagagacgccgccaccgccgccgccgccgccgccgccgccgccgccgccaccgccaagagaccccccagaagacccgagaccgagggcgtgcccgtgcccgagagagccagccccggcccccccacccagctggtgctgaagctgaaggagagacccagccccggccccgccgccggcagagccgccagagccgccgccggcggcaccgccagccccggcggcggcgccagaagagccagcgccagcggccccgtgcccggcagaagcccccccgcccccgccagacagagcgtgatccacgtgcaggccagcggcgccagagacgaggcctgcgcccccgccgtgggcgccctgagaccctgcgccacctacccccagcagaacagaagcctgagcagccagagctacagccccgccagagccgccgccctgagaaccgtgaacaccgtggagagcctggccagagccgtgcccggcgccctgcccggcgccgccggcaccgccggcgccgccgagcacaagagccagacctacaccaacggcttcggcgccctgagagacggcctggagttcgccgacgccgacgcccccaccgccagaagcaacggcgagtgcggcagaggcggccccggccccgtgcagagaagatgccagagagagaactgcgccttctacggcagagccgagaccgagcactactgcagctactgctacagagaggagctgagaagaagaagagaggccagaggcgccagaccctag

SEQ ID NO: 92107 - DNA, 333 bp, synthetic construct
  misc_feature 1..333: note = Description of Artificial Sequence: Synthetic coding sequence
  source 1..333: mol_type = other DNA
atggtgagcagcgtgctgcccaaccccaccagcgccgagtgctgggccgccctgctgcacgaccccatgaccctggacatggacgccgtgctgagcgacttcgtgagaagcaccggcgccgagcccggcctggccagagacctgctggagggcaagaactgggacctgaccgccgccctgagcgactacgagcagctgagacaggtgcacaccgccaacctgccccacgtgttcaacgagggcagaggccccaagcagcccgagagagagccccagcccggccacaaggtggagagaccctgcctgcagagacaggacgacatcgcccagtag

SEQ ID NO: 92108 - DNA, 2532 bp, synthetic construct
  misc_feature 1..2532: note = Description of Artificial Sequence: Synthetic coding sequence
  source 1..2532: mol_type = other DNA
atgaccctggacatggacgccgtgctgagcgacttcgtgagaagcaccggcgccgagcccggcctggccagagacctgctggagggcaagaactgggacgtgaacgccgccctgagcgacttcgagcagctgagacaggtgcacgccggcaacctgccccccagcttcagcgagggcagcggcggcagcagaacccccgagaagggcttcagcgacagagagcccaccagaccccccagacccatcctgcagagacaggacgacatcgtgcaggagaagagactgagcagaggcatcagccacgccagcagcagcatcgtgagcctggccagaagccacgtgagcagcaacggcggcggcggcggcagcaacgagcaccccctggagatgcccatctgcgccttccagctgcccgacctgaccgtgtacaacgaggacttcagaagcttcatcgagagagacctgatcgagcagagcatgctggtggccctggagcaggccggcagactgaactggtgggtgagcgtggaccccaccagccagagactgctgcccctggccaccaccggcgacggcaactgcctgctgcacgccgccagcctgggcatgtggggcttccacgacagagacctgatgctgagaaaggccctgtacgccctgatggagaagggcgtggagaaggaggccctgaagagaagatggagatggcagcagacccagcagaacaaggagagcggcctggtgtacaccgaggacgagtggcagaaggagtggaacgagctgatcaagctggccagcagcgagcccagaatgcacctgggcaccaacggcgccaactgcggcggcgtggagagcagcgaggagcccgtgtacgagagcctggaggagttccacgtgttcgtgctggcccacgtgctgagaagacccatcgtggtggtggccgacaccatgctgagagacagcggcggcgaggccttcgcccccatccccttcggcggcatctacctgcccctggaggtgcccgccagccagtgccacagaagccccctggtgctggcctacgaccaggcccacttcagcgccctggtgagcatggagcagaaggagaacaccaaggagcaggccgtgatccccctgaccgacagcgagtacaagctgctgcccctgcacttcgccgtggaccccggcaagggctgggagtggggcaaggacgacagcgacaacgtgagactggccagcgtgatcctgagcctggaggtgaagctgcacctgctgcacagctacatgaacgtgaagtggatccccctgagcagcgacgcccaggcccccctggcccagcccgagagccccaccgccagcgccggcgacgagcccagaagcacccccgagagcggcgacagcgacaaggagagcgtgggcagcagcagcaccagcaacgagggcggcagaagaaaggagaagagcaagagagacagagagaaggacaagaagagagccgacagcgtggccaacaagctgggcagcttcggcaagaccctgggcagcaagctgaagaagaacatgggcggcctgatgcacagcaagggcagcaagcccggcggcgtgggcaccggcctgggcggcagcagcggcaccgagaccctggagaagaagaagaagaacagcctgaagagctggaagggcggcaaggaggaggccgccggcgacggccccgtgagcgagaagccccccgccgagagcgtgggcaacggcggcagcaagtacagccaggaggtgatgcagagcctgagcatcctgagaaccgccatgcagggcgagggcaagttcatcttcgtgggcaccctgaagatgggccacagacaccagtaccaggaggagatgatccagagatacctgagcgacgccgaggagagattcctggccgagcagaagcagaaggaggccgagagaaagatcatgaacggcggcatcggcggcggccccccccccgccaagaagcccgagcccgacgccagagaggagcagcccaccggcccccccgccgagagcagagccatggccttcagcaccggctaccccggcgacttcaccatccccagacccagcggcggcggcgtgcactgccaggagcccagaagacagctggccggcggcccctgcgtgggcggcctgcccccctacgccaccttccccagacagtgcccccccggcagaccctacccccaccaggacagcatccccagcctggagcccggcagccacagcaaggacggcctgcacagaggcgccctgctgccccccccctacagagtggccgacagctacagcaacggctacagagagccccccgagcccgacggctgggccggcggcctgagaggcctgccccccacccagaccaagtgcaagcagcccaactgcagcttctacggccaccccgagaccaacaacttctgcagctgctgctacagagaggagctgagaagaagagagagagagcccgacggcgagctgctggtgcacagattctag

SEQ ID NO: 92109 - DNA, 1284 bp, synthetic construct
  misc_feature 1..1284: note = Description of Artificial Sequence: Synthetic coding sequence
  source 1..1284: mol_type = other DNA
atgaccctggacatggacgccgtgctgagcgacttcgtgagaagcaccggcgccgagcccggcctggccagagacctgctggagggcaagaactgggacgtgaacgccgccctgagcgacttcgagcagctgagacaggtgcacgccggcaacctgccccccagcttcagcgagggcagcggcggcagcagaacccccgagaagggcttcagcgacagagagcccaccagaccccccagacccatcctgcagagacaggacgacatcgtgcaggagaagagactgagcagaggcatcagccacgccagcagcagcatcgtgagcctggccagaagccacgtgagcagcaacggcggcggcggcggcagcaacgagcaccccctggagatgcccatctgcgccttccagctgcccgacctgaccgtgtacaacgaggacttcagaagcttcatcgagagagacctgatcgagcagagcatgctggtggccctggagcaggccggcagactgaactggtgggtgagcgtggaccccaccagccagagactgctgcccctggccaccaccggcgacggcaactgcctgctgcacgccgccagcctgggcatgtggggcttccacgacagagacctgatgctgagaaaggccctgtacgccctgatggagaagggcgtggagaaggaggccctgaagagaagatggagatggcagcagacccagcagaacaaggagagcggcctggtgtacaccgaggacgagtggcagaaggagtggaacgagctgatcaagctggccagcagcgagcccagaatgcacctgggcaccaacggcgccaactgcggcggcgtggagagcagcgaggagcccgtgtacgagagcctggaggagttccacgtgttcgtgctggcccacgtgctgagaagacccatcgtggtggtggccgacaccatgctgagagacagcggcggcgaggccttcgcccccatccccttcggcggcatctacctgcccctggaggtgcccgccagccagtgccacagaagccccctggtgctggcctacgaccaggcccacttcagcgccctggtgagcatggagcagaaggagaacaccaaggagcaggccgtgatccccctgaccgacagcgagtacaagctgctgcccctgcacttcgccgtggaccccggcaagggctgggagtggggcaaggacgacagcgacaacgtgagactggccagcgtgatcctgagcctggaggtgaagctgcacctgctgcacagctag

SEQ ID NO: 92110 - DNA, 2445 bp, synthetic construct
  misc_feature 1..2445: note = Description of Artificial Sequence: Synthetic coding sequence
  source 1..2445: mol_type = other DNA
atgaccctggacatggacgccgtgctgagcgacttcgtgagaagcaccggcgccgagcccggcctggccagagacctgctggagggcaagaactgggacgtgaacgccgccctgagcgacttcgagcagctgagacaggtgcacgccggcaacctgccccccagcttcagcgagggcagcggcggcagcagaacccccgagaagggcttcagcgacagagagcccaccagaccccccagacccatcctgcagagacaggacgacatcgtgcaggagaagagactgagcagaggcatcagccacgccagcagcagcatcgtgagcctggccagaagccacgtgagcagcaacggcggcggcggcggcagcaacgagcaccccctggagatgcccatctgcgccttccagctgcccgacctgaccgtgtacaacgaggacttcagaagcttcatcgagagagacctgatcgagcagagcatgctggtggccctggagcaggccggcagactgaactggtgggtgagcgtggaccccaccagccagagactgctgcccctggccaccaccggcgacggcaactgcctgctgcacgccgccagcctgggcatgtggggcttccacgacagagacctgatgctgagaaaggccctgtacgccctgatggagaagggcgtggagaaggaggccctgaagagaagatggagatggcagcagacccagcagaacaaggagagcggcctggtgtacaccgaggacgagtggcagaaggagtggaacgagctgatcaagctggccagcagcgagcccagaatgcacctgggcaccaacggcgccaactgcggcggcgtggagagcagcgaggagcccgtgtacgagagcctggaggagttccacgtgttcgtgctggcccacgtgctgagaagacccatcgtggtggtggccgacaccatgctgagagacagcggcggcgaggccttcgcccccatccccttcggcggcatctacctgcccctggaggtgcccgccagccagtgccacagaagccccctggtgctggcctacgaccaggcccacttcagcgccctggtgagcatggagcagaaggagaacaccaaggagcaggccgtgatccccctgaccgacagcgagtacaagctgctgcccctgcacttcgccgtggaccccggcaagggctgggagtggggcaaggacgacagcgacaacgtgagactggccagcgtgatcctgagcctggaggtgaagctgcacctgctgcacagctacatgaacgtgaagtggatccccctgagcagcgacgcccaggcccccctggcccagcccgagagccccaccgccagcgccggcgacgagcccagaagcacccccgagagcggcgacagcgacaaggagagcgtgggcagcagcagcaccagcaacgagggcggcagaagaaaggagaagagcaagagagacagagagaaggacaagaagagagccgacagcgtggccaacaagctgggcagcttcggcaagaccctgggcagcaagctgaagaagaacatgggcggcctgatgcacagcaagggcagcaagcccggcggcgtgggcaccggcctgggcggcagcagcggcaccgagaccctggagaagaagaagaagaacagcctgaagagctggaagggcggcaaggaggaggccgccggcgacggccccgtgagcgagaagccccccgccgagagcgtgggcaacggcggcagcaagtacagccaggaggtgatgcagagcctgagcatcctgagaaccgccatgcagggcgagggcaagttcatcttcgtgggcaccctgaagatgggccacagacaccagtaccaggaggagatgatccagagatacctgagcgacgccgaggagagattcctggccgagcagaagcagaaggaggccgagagaaagatcatgaacggcggcatcggcggcggccccccccccgccaagaagcccgagcccgacgccagagaggagcagcccaccggcccccccgccgagagcagagccatggccttcagcaccggctaccccggcgacttcaccatccccagacccagcggcggcggcgtgcactgccaggagcccagaagacagctggccggcggcccctgcgtgggcggcctgcccccctacgccaccttccccagacagtgcccccccggcagaccctacccccaccaggacagcatccccagcctggagcccggcagccacagcaaggacggcctgcacagaggcgccctgctgccccccccctacagagtggccgacagctacagcaacggctacagagagccccccgagcccgacggctgggccggcggcctgagaggcctgccccccacccagaccaagtgcaagcagcccgacggcgagctgctggtgcacagattctag

SEQ ID NO: 92111 - DNA, 927 bp, synthetic construct
  misc_feature 1..927: note = Description of Artificial Sequence: Synthetic coding sequence
  source 1..927: mol_type = other DNA
atgtgcggcgtggagggctgctgccagggcggcgccaccagaagaggcagcctgcccggcggcagacagctggccaccagaaagagaagcgtggtgagaagatgcctgaagatggccgccgaggagccccagcagcagaagcaggagcccctgggcagcgacagcgagggcgtgaactgcctggcctacgacgaggccatcatggcccagcaggacagaatccagcaggagatcgccgtgcagaaccccctggtgagcgagagactggagctgagcgtgctgtacaaggagtacgccgaggacgacaacatctaccagcagaagatcaaggacctgcacaagaagtacagctacatcagaaagaccagacccgacggcaactgcttctacagagccttcggcttcagccacctggaggccctgctggacgacagcaaggagctgcagagattcaaggccgtgagcgccaagagcaaggaggacctggtgagccagggcttcaccgagttcaccatcgaggacttccacaacaccttcatggacctgatcgagcaggtggagaagcagaccagcgtggccgacctgctggccagcttcaacgaccagagcaccagcgactacctggtggtgtacctgagactgctgaccagcggctacctgcagagagagagcaagttcttcgagcacttcatcgagggcggcagaaccgtgaaggagttctgccagcaggaggtggagcccatgtgcaaggagagcgaccacatccacatcatcgccctggcccaggccctgagcgtgagcatccaggtggagtacatggacagaggcgagggcggcaccaccaacccccacatcttccccgagggcagcgagcccaaggtgtacctgctgtacagacccggccactacgacatcctgtacaagtag

SEQ ID NO: 92112 - DNA, 816 bp, synthetic construct
  misc_feature 1..816: note = Description of Artificial Sequence: Synthetic coding sequence
  source 1..816: mol_type = other DNA
atggccgccgaggagccccagcagcagaagcaggagcccctgggcagcgacagcgagggcgtgaactgcctggcctacgacgaggccatcatggcccagcaggacagaatccagcaggagatcgccgtgcagaaccccctggtgagcgagagactggagctgagcgtgctgtacaaggagtacgccgaggacgacaacatctaccagcagaagatcaaggacctgcacaagaagtacagctacatcagaaagaccagacccgacggcaactgcttctacagagccttcggcttcagccacctggaggccctgctggacgacagcaaggagctgcagagattcaaggccgtgagcgccaagagcaaggaggacctggtgagccagggcttcaccgagttcaccatcgaggacttccacaacaccttcatggacctgatcgagcaggtggagaagcagaccagcgtggccgacctgctggccagcttcaacgaccagagcaccagcgactacctggtggtgtacctgagactgctgaccagcggctacctgcagagagagagcaagttcttcgagcacttcatcgagggcggcagaaccgtgaaggagttctgccagcaggaggtggagcccatgtgcaaggagagcgaccacatccacatcatcgccctggcccaggccctgagcgtgagcatccaggtggagtacatggacagaggcgagggcggcaccaccaacccccacatcttccccgagggcagcgagcccaaggtgtacctgctgtacagacccggccactacgacatcctgtacaagtag

SEQ ID NO: 92113 - DNA, 816 bp, synthetic construct; identical to SEQ ID NO: 92112
  misc_feature 1..816: note = Description of Artificial Sequence: Synthetic coding sequence
  source 1..816: mol_type = other DNA

SEQ ID NO: 92114 - DNA, 843 bp, synthetic construct
  misc_feature 1..843: note = Description of Artificial Sequence: Synthetic coding sequence
  source 1..843: mol_type = other DNA
atggccgccgaggagccccagcagcagaagcaggagcccctgggcagcgacagcgagggcgtgaactgcctggcctacgacgaggccatcatggcccagcaggacagaatccagcaggaggacatgaccgacccctgcctgctgcagatcgccgtgcagaaccccctggtgagcgagagactggagctgagcgtgctgtacaaggagtacgccgaggacgacaacatctaccagcagaagatcaaggacctgcacaagaagtacagctacatcagaaagaccagacccgacggcaactgcttctacagagccttcggcttcagccacctggaggccctgctggacgacagcaaggagctgcagagattcaaggccgtgagcgccaagagcaaggaggacctggtgagccagggcttcaccgagttcaccatcgaggacttccacaacaccttcatggacctgatcgagcaggtggagaagcagaccagcgtggccgacctgctggccagcttcaacgaccagagcaccagcgactacctggtggtgtacctgagactgctgaccagcggctacctgcagagagagagcaagttcttcgagcacttcatcgagggcggcagaaccgtgaaggagttctgccagcaggaggtggagcccatgtgcaaggagagcgaccacatccacatcatcgccctggcccaggccctgagcgtgagcatccaggtggagtacatggacagaggcgagggcggcaccaccaacccccacatcttccccgagggcagcgagcccaaggtgtacctgctgtacagacccggccactacgacatcctgtacaagtag

SEQ ID NO: 92115 - DNA, 705 bp, synthetic construct
  misc_feature 1..705: note = Description of Artificial Sequence: Synthetic coding sequence
  source 1..705: mol_type = other DNA
atgagcgagaccagcttcaacctgatcagcgagaagtgcgacatcctgagcatcctgagagaccaccccgagaacagaatctacagaagaaagatcgaggagctgagcaagagattcaccgccatcagaaagaccaagggcgacggcaactgcttctacagagccctgggctacagctacctggagagcctgctgggcaagagcagagagatcttcaagttcaaggagagagtgctgcagacccccaacgacctgctggccgccggcttcgaggagcacaagttcagaaacttcttcaacgccttctacagcgtggtggagctggtggagaaggacggcagcgtgagcagcctgctgaaggtgttcaacgaccagagcgccagcgaccacatcgtgcagttcctgagactgctgaccagcgccttcatcagaaacagagccgacttcttcagacacttcatcgacgaggagatggacatcaaggacttctgcacccacgaggtggagcccatggccaccgagtgcgaccacatccagatcaccgccctgagccaggccctgagcatcgccctgcaggtggagtacgtggacgagatggacaccgccctgaaccaccacgtgttccccgaggccgccacccccagcgtgtacctgctgtacaagaccagccactacaacatcctgtacgccgccgacaagcactag

SEQ ID NO: 92116 - DNA, 222 bp, synthetic construct
  misc_feature 1..222: note = Description of Artificial Sequence: Synthetic coding sequence
  source 1..222: mol_type = other DNA
atgagcgagaccagcttcaacctgatcagcgagaagtgcgacatcctgagcatcctgagagaccaccccgagaacagaatctacagaagaaagatcgaggagctgagcaagagattcaccgccatcagaaagaccaagggcgacggcaactgcttctacagagccctgggctacagctacctggagagcctgctgggcaagagcagagagatcttcaagtag

SEQ ID NO: 92117 - DNA, 753 bp, synthetic construct
  misc_feature 1..753: note = Description of Artificial Sequence: Synthetic coding sequence
  source 1..753: mol_type = other DNA
atggccgccctgagctgcctgctggacagcgtgagaagagacatcaagaaggtggacagagagctgagacagctgagatgcatcgacgagttcagcaccagatgcctgtgcgacctgtacatgcacccctactgctgctgcgacctgcacccctacccctactgcctgtgctacagcaagagaagcagaagctgcggcctgtgcgacctgtacccctgctgcctgtgcgactacaagctgtactgcctgagacccagcctgagaagcctggagagaaaggccatcagagccatcgaggacgagaagagagagctggccaagctgagaagaaccaccaacagaatcctggccagcagctgctgcagcagcaacatcctgggcagcgtgaacgtgtgcggcttcgagcccgaccaggtgaaggtgagagtgaaggacggcaaggtgtgcgtgagcgccgagagagagaacagatacgactgcctgggcagcaagaagtacagctacatgaacatctgcaaggagttcagcctgcccccctgcgtggacgagaaggacgtgacctacagctacggcctgggcagctgcgtgaagatcgagagcccctgctacccctgcaccagcccctgcagcccctgcagcccctgcagcccctgcaacccctgcagcccctgcaacccctgcagcccctacgacccctgcaacccctgctacccctgcggcagcagattcagctgcagaaagatgatcctgtag

SEQ ID NO: 92118 - DNA, 2418 bp, synthetic construct
  misc_feature 1..2418: note = Description of Artificial Sequence: Synthetic coding sequence
  source 1..2418: mol_type = other DNA
atgaaggacagaagcagcaccccccccctgcacgtgcacgtggacgagaacacccccgtgcacgtgcacatcaagaagctgcccaagcccagcgccaccagcagccagaagagccacaagagaggcatgaagggcgacaccgtgaacgtgagaagaagcgtgagagtgaagaccaagaaccccccccactgcctggagatcaccccccccagcagcgagaagctggtgagcgtgatgagactgagcgacctgagcaccgaggacgacgacagcggccactgcaagatgaacagatacgacaagaagatcgacagcctgatgaacgccgtgggctgcctgaagagcgaggtgaagatgcagaagggcgagagacagatggccaagagattcctggaggagagaaaggaggagctggaggaggtggcccacgagctggccgagaccgagcacgagaacaccgtgctgagacacaacatcgagagaatgaaggaggagaaggacttcaccatcctgcagaagaagcacctgcagcaggagaaggagtgcctgatgagcaagctggtggaggccgagatggacggcgccgccgccgccaagcaggtgatggccctgaaggacaccatcggcaagctgaagaccgagaagcagatgacctgcaccgacatcaacaccctgaccagacagaaggagctgctgctgcagaagctgagcaccttcgaggagaccaacagaaccctgagagacctgctgagagagcagcactgcaaggaggacagcgagagactgatggagcagcagggcgccctgctgaagagactggccgaggccgacagcgagaaggccagactgctgctgctgctgcaggacaaggacaaggaggtggaggagctgctgcaggagatccagtgcgagaaggcccaggccaagaccgccagcgagctgagcaagagcatggagagcatgagaggccacctgcaggcccagctgagaagcaaggaggccgagaacagcagactgtgcatgcagatcaagaacctggagagaagcggcaaccagcacaaggccgaggtggaggccatcatggagcagctgaaggagctgaagcagaagggcgacagagacaaggagagcctgaagaaggccatcagagcccagaaggagagagccgagaagagcgaggagtacgccgagcagctgcacgtgcagctggccgacaaggacctgtacgtggccgaggccctgagcaccctggagagctggagaagcagatacaaccaggtggtgaaggagaagggcgacctggagctggagatcatcgtgctgaacgacagagtgaccgacctggtgaaccagcagcagaccctggaggagaagatgagagaggacagagacagcctggtggagagactgcacagacagaccgccgagtacagcgccttcaagctggagaacgagagactgaaggccagcttcgcccccatggaggacaagctgaaccaggcccacctggaggtgcagcagctgaaggccagcgtgaagaactacgagggcatgatcgacaactacaagagccaggtgatgaagaccagactggaggccgacgaggtggccgcccagctggagagatgcgacaaggagaacaagatcctgaaggacgagatgaacaaggagatcgaggccgccagaagacagttccagagccagctggccgacctgcagcagctgcccgacatcctgaagatcaccgaggccaagctggccgagtgccaggaccagctgcagggctacgagagaaagaacatcgacctgaccgccatcatcagcgacctgagaagcagaatcgagcaccagggcgacaagctggagatggccagagagaagcaccaggccagccagaaggagaacaagcagctgagcctgaaggtggacgagctggagagaaagctggaggccaccagcgcccagaacatcgagttcctgcaggtgatcgccaagagagaggaggccatccaccagagccagctgagactggaggagaagaccagagagtgcggcaccctggccagacagctggagagcgccatcgaggacgccagaagacaggtggagcagaccaaggagcacgccctgagcaaggagagagccgcccagaacaagatcctggacctggagacccagctgagcagaaccaagaccgagctgagccagctgagaagaagcagagacgacgccgacagaagataccagagcagactgcaggacctgaaggacagactggagcagagcgagagcaccaacagaagcatgcagaactacgtgcagttcctgaagagcagctacgccaacgtgttcggcgacggcccctacagcaccttcctgaccagcagccccatcagaagcagaagcccccccgcctag

SEQ ID NO: 92119 - DNA, 2475 bp, synthetic construct
  misc_feature 1..2475: note = Description of Artificial Sequence: Synthetic coding sequence
  source 1..2475: mol_type = other DNA
atgaaggacagaagcagcaccccccccctgcacgtgcacgtggacgagaacacccccgtgcacgtgcacatcaagaagctgcccaagcccagcgccaccagcagccagaagagccacaagagaggcatgaagggcgacaccgtgaacgtgagaagaagcgtgagagtgaagaccaaggtgccctggatgccccccggcaagagcagcgccagacccgtgggctgcaagtgggagaaccccccccactgcctggagatcaccccccccagcagcgagaagctggtgagcgtgatgagactgagcgacctgagcaccgaggacgacgacagcggccactgcaagatgaacagatacgacaagaagatcgacagcctgatgaacgccgtgggctgcctgaagagcgaggtgaagatgcagaagggcgagagacagatggccaagagattcctggaggagagaaaggaggagctggaggaggtggcccacgagctggccgagaccgagcacgagaacaccgtgctgagacacaacatcgagagaatgaaggaggagaaggacttcaccatcctgcagaagaagcacctgcagcaggagaaggagtgcctgatgagcaagctggtggaggccgagatggacggcgccgccgccgccaagcaggtgatggccctgaaggacaccatcggcaagctgaagaccgagaagcagatgacctgcaccgacatcaacaccctgaccagacagaaggagctgctgctgcagaagctgagcaccttcgaggagaccaacagaaccctgagagacctgctgagagagcagcactgcaaggaggacagcgagagactgatggagcagcagggcgccctgctgaagagactggccgaggccgacagcgagaaggccagactgctgctgctgctgcaggacaaggacaaggaggtggaggagctgctgcaggagatccagtgcgagaaggcccaggccaagaccgccagcgagctgagcaagagcatggagagcatgagaggccacctgcaggcccagctgagaagcaaggaggccgagaacagcagactgtgcatgcagatcaagaacctggagagaagcggcaaccagcacaaggccgaggtggaggccatcatggagcagctgaaggagctgaagcagaagggcgacagagacaaggagagcctgaagaaggccatcagagcccagaaggagagagccgagaagagcgaggagtacgccgagcagctgcacgtgcagctggccgacaaggacctgtacgtggccgaggccctgagcaccctggagagctggagaagcagatacaaccaggtggtgaaggagaagggcgacctggagctggagatcatcgtgctgaacgacagagtgaccgacctggtgaaccagcagcagaccctggaggagaagatgagagaggacagagacagcctggtggagagactgcacagacagaccgccgagtacagcgccttcaagctggagaacgagagactgaaggccagcttcgcccccatggaggacaagctgaaccaggcccacctggaggtgcagcagctgaaggccagcgtgaagaactacgagggcatgatcgacaactacaagagccaggtgatgaagaccagactggaggccgacgaggtggccgcccagctggagagatgcgacaaggagaacaagatcctgaaggacgagatgaacaaggagatcgaggccgccagaagacagttccagagccagctggccgacctgcagcagctgcccgacatcctgaagatcaccgaggccaagctggccgagtgccaggaccagctgcagggctacgagagaaagaacatcgacctgaccgccatcatcagcgacctgagaagcagaatcgagcaccagggcgacaagctggagatggccagagagaagcaccaggccagccagaaggagaacaagcagctgagcctgaaggtggacgagctggagagaaagctggaggccaccagcgcccagaacatcgagttcctgcaggtgatcgccaagagagaggaggccatccaccagagccagctgagactggaggagaagaccagagagtgcggcaccctggccagacagctggagagcgccatcgaggacgccagaagacaggtggagcagaccaaggagcacgccctgagcaaggagagagccgcccagaacaagatcctggacctggagacccagctgagcagaaccaagaccgagctgagccagctgagaagaagcagagacgacgccgacagaagataccagagcagactgcaggacctgaaggacagactggagcagagcgagagcaccaacagaagcatgcagaactacgtgcagttcctgaagagcagctacgccaacgtgttcggcgacggcccctacagcaccttcctgaccagcagccccatcagaagcagaagcccccccgcctag

SEQ ID NO: 92120 - DNA, 1917 bp, synthetic construct
  misc_feature 1..1917: note = Description of Artificial Sequence: Synthetic coding sequence
  source 1..1917: mol_type = other DNA
atgagcgccagcagcagcggcggcagccccagattccccagctgcggcaagaacggcgtgaccagcctgacccagaagaaggtgctgagagccccctgcggcgcccccagcgtgaccgtgaccaagagccacaagagaggcatgaagggcgacaccgtgaacgtgagaagaagcgtgagagtgaagaccaagaaccccccccactgcctggagatcaccccccccagcagcgagaagctggtgagcgtgatgagactgagcgacctgagcaccgaggacgacgacagcggccactgcaagatgaacagatacgacaagaagatcgacagcctgatgaacgccgtgggctgcctgaagagcgaggtgaagatgcagaagggcgagagacagatggccaagagattcctggaggagagaaaggaggagctggaggaggtggcccacgagctggccgagaccgagcacgagaacaccgtgctgagacacaacatcgagagaatgaaggaggagaaggacttcaccatcctgcagaagaagcacctgcagcaggagaaggagtgcctgatgagcaagctggtggaggccgagatggacggcgccgccgccgccaagcaggtgatggccctgaaggacaccatcggcaagctgaagaccgagaagcagatgacctgcaccgacatcaacaccctgaccagacagaaggagctgctgctgcagaagctgagcaccttcgaggagaccaacagaaccctgagagacctgctgagagagcagcactgcaaggaggacagcgagagactgatggagcagcagggcgccctgctgaagagactggccgaggccgacagcgagaaggccagactgctgctgctgctgcaggacaaggacaaggaggtggaggagctgctgcaggagatccagtgcgagaaggcccaggccaagaccgccagcgagctgagcaagagcatggagagcatgagaggccacctgcaggcccagctgagaagcaaggaggccgagaacagcagactgtgcatgcagatcaagaacctggagagaagcggcaaccagcacaaggccgaggtggaggccatcatggagcagctgaaggagctgaagcagaagggcgacagagacaaggagagcctgaagaaggccatcagagcccagaaggagagagccgagaagagcgaggagtacgccgagcagctgcacgtgcagctggccgacaaggacctgtacgtggccgaggccctgagcaccctggagagctggagaagcagatacaaccaggtggtgaaggagaagggcgacctggagctggagatcatcgtgctgaacgacagagtgaccgacctggtgaaccagcagcagaccctggaggagaagatgagagaggacagagacagcctggtggagagactgcacagacagaccgccgagtacagcgccttcaagctggagaacgagagactgaaggccagcttcgcccccatggaggacaagctgaaccaggcccacctggaggtgcagcagctgaaggccagcgtgaagaactacgagggcatgatcgacaactacaagagccaggtgatgaagaccagactggaggccgacgaggtggccgcccagctggagagatgcgacaaggagaacaagatcctgaaggacgagatgaacaaggagatcgaggccgccagaagacagttccagagccagctggccgacctgcagcagctgcccgacatcctgaagatcaccgaggccaagctggccgagtgccaggaccagctgcagggctacgagagaaagaacatcgacctgaccgccatcatcagcgacctgagaagcagagtgagagactggcagaagggcagccacgagctgaccagagccggcgccagaatccccagatag

SEQ ID NO: 92121 - DNA, 2490 bp, synthetic construct
  misc_feature 1..2490: note = Description of Artificial Sequence: Synthetic coding sequence
  source 1..2490: mol_type = other DNA
atgagcgccagcagcagcggcggcagccccagattccccagctgcggcaagaacggcgtgaccagcctgacccagaagaaggtgctgagagccccctgcggcgcccccagcgtgaccgtgaccaagagccacaagagaggcatgaagggcgacaccgtgaacgtgagaagaagcgtgagagtgaagaccaaggtgccctggatgccccccggcaagagcagcgccagacccgtgggctgcaagtgggagaaccccccccactgcctggagatcaccccccccagcagcgagaagctggtgagcgtgatgagactgagcgacctgagcaccgaggacgacgacagcggccactgcaagatgaacagatacgacaagaagatcgacagcctgatgaacgccgtgggctgcctgaagagcgaggtgaagatgcagaagggcgagagacagatggccaagagattcctggaggagagaaaggaggagctggaggaggtggcccacgagctggccgagaccgagcacgagaacaccgtgctgagacacaacatcgagagaatgaaggaggagaaggacttcaccatcctgcagaagaagcacctgcagcaggagaaggagtgcctgatgagcaagctggtggaggccgagatggacggcgccgccgccgccaagcaggtgatggccctgaaggacaccatcggcaagctgaagaccgagaagcagatgacctgcaccgacatcaacaccctgaccagacagaaggagctgctgctgcagaagctgagcaccttcgaggagaccaacagaaccctgagagacctgctgagagagcagcactgcaaggaggacagcgagagactgatggagcagcagggcgccctgctgaagagactggccgaggccgacagcgagaaggccagactgctgctgctgctgcaggacaaggacaaggaggtggaggagctgctgcaggagatccagtgcgagaaggcccaggccaagaccgccagcgagctgagcaagagcatggagagcatgagaggccacctgcaggcccagctgagaagcaaggaggccgagaacagcagactgtgcatgcagatcaagaacctggagagaagcggcaaccagcacaaggccgaggtggaggccatcatggagcagctgaaggagctgaagcagaagggcgacagagacaaggagagcctgaagaaggccatcagagcccagaaggagagagccgagaagagcgaggagtacgccgagcagctgcacgtgcagctggccgacaaggacctgtacgtggccgaggccctgagcaccctggagagctggagaagcagatacaaccaggtggtgaaggagaagggcgacctggagctggagatcatcgtgctgaacgacagagtgaccgacctggtgaaccagcagcagaccctggaggagaagatgagagaggacagagacagcctggtggagagactgcacagacagaccgccgagtacagcgccttcaagctggagaacgagagactgaaggccagcttcgcccccatggaggacaagctgaaccaggcccacctggaggtgcagcagctgaaggccagcgtgaagaactacgagggcatgatcgacaactacaagagccaggtgatgaagaccagactggaggccgacgaggtggccgcccagctggagagatgcgacaaggagaacaagatcctgaaggacgagatgaacaaggagatcgaggccgccagaagacagttccagagccagctggccgacctgcagcagctgcccgacatcctgaagatcaccgaggccaagctggccgagtgccaggaccagctgcagggctacgagagaaagaacatcgacctgaccgccatcatcagcgacctgagaagcagaatcgagcaccagggcgacaagctggagatggccagagagaagcaccaggccagccagaaggagaacaagcagctgagcctgaaggtggacgagctggagagaaagctggaggccaccagcgcccagaacatcgagttcctgcaggtgatcgccaagagagaggaggccatccaccagagccagctgagactggaggagaagaccagagagtgcggcaccctggccagacagctggagagcgccatcgaggacgccagaagacaggtggagcagaccaaggagcacgccctgagcaaggagagagccgcccagaacaagatcctggacctggagacccagctgagcagaaccaagaccgagctgagccagctgagaagaagcagagacgacgccgacagaagataccagagcagactgcaggacctgaaggacagactggagcagagcgagagcaccaacagaagcatgcagaactacgtgcagttcctgaagagcagctacgccaacgtgttcggcgacggcccctacagcaccttcctgaccagcagccccatcagaagcagaagcccccccgcctag

SEQ ID NO: 92122 - DNA, 2106 bp, synthetic construct
  misc_feature 1..2106: note = Description of Artificial Sequence: Synthetic coding sequence
  source 1..2106: mol_type = other DNA
atgggcgagctgcccaccggctgcagaaagagaagaagaaagagaggcggcgccgccgccagagccagactgcacccccccagaagactgcacggcaccaccctggccagcgacttcaacgacttcatcagaagaagattctgggcccagccctgcagaagctggttccccagctgcggcaagaacggcgtgaccagcctgacccagaagaaggtgctgagagccccctgcggcgcccccagcgtgaccgtgaccaagagccacaagagaggcatgaagggcgacaccgtgaacgtgagaagaagcgtgagagtgaagaccaaggtgccctggatgccccccggcaagagcagcgccagacccgtgggctgcaagtgggagaaccccccccactgcctggagatcaccccccccagcagcgagaagctggtgagcgtgatgagactgagcgacctgagcaccgaggacgacgacagcggccactgcaagatgaacagatacgacaagaagatcgacagcctgatgaacgccgtgggctgcctgaagagcgaggtgaagatgcagaagggcgagagacagatggccaagagattcctggaggagagaaaggaggagctggaggaggtggcccacgagctggccgagaccgagcacgagaacaccgtgctgagacacaacatcgagagaatgaaggaggagaaggacttcaccatcctgcagaagaagcacctgcagcaggagaaggagtgcctgatgagcaagctggtggaggccgagatggacggcgccgccgccgccaagcaggtgatggccctgaaggacaccatcggcaagctgaagaccgagaagcagatgacctgcaccgacatcaacaccctgaccagacagaaggagctgctgctgcagaagctgagcaccttcgaggagaccaacagaaccctgagagacctgctgagagagcagcactgcaaggaggacagcgagagactgatggagcagcagggcgccctgctgaagagactggccgaggccgacagcgagaaggccagactgctgctgctgctgcaggacaaggacaaggaggtggaggagctgctgcaggagatccagtgcgagaaggcccaggccaagaccgccagcgagctgagcaagagcatggagagcatgagaggccacctgcaggcccagctgagaagcaaggaggccgagaacagcagactgtgcatgcagatcaagaacctggagagaagcggcaaccagcacaaggccgaggtggaggccatcatggagcagctgaaggagctgaagcagaagggcgacagagacaaggagagcctgaagaaggccatcagagcccagaaggagagagccgagaagagcgaggagtacgccgagcagctgcacgtgcagctggccgacaaggacctgtacgtggccgaggccctgagcaccctggagagctggagaagcagatacaaccaggtggtgaaggagaagggcgacctggagctggagatcatcgtgctgaacgacagagtgaccgacctggtgaaccagcagcagaccctggaggagaagatgagagaggacagagacagcctggtggagagactgcacagacagaccgccgagtacagcgccttcaagctggagaacgagagactgaaggccagcttcgcccccatggaggacaagctgaaccaggcccacctggaggtgcagcagctgaaggccagcgtgaagaactacgagggcatgatcgacaactacaagagccaggtgatgaagaccagactggaggccgacgaggtggccgcccagctggagagatgcgacaaggagaacaagatcctgaaggacgagatgaacaaggagatcgaggccgccagaagacagttccagagccagctggccgacctgcagcagctgcccgacatcctgaagatcaccgaggccaagctggccgagtgccaggaccagctgcagggctacgagagaaagaacatcgacctgaccgccatcatcagcgacctgagaagcagagtgagagactggcagaagggcagccacgagctgaccagagccggcgccagaatccccagatag

SEQ ID NO: 92123 - DNA, 1974 bp, synthetic construct
  misc_feature 1..1974: note = Description of Artificial Sequence: Synthetic coding sequence
  source 1..1974: mol_type = other DNA
atggccgaccagcagggcccccaccagaacagattccccagctgcggcaagaacggcgtgaccagcctgacccagaagaaggtgctgagagccccctgcggcgcccccagcgtgaccgtgaccaagagccacaagagaggcatgaagggcgacaccgtgaacgtgagaagaagcgtgagagtgaagaccaaggtgccctggatgccccccggcaagagcagcgccagacccgtgggctgcaagtgggagaaccccccccactgcctggagatcaccccccccagcagcgagaagctggtgagcgtgatgagactgagcgacctgagcaccgaggacgacgacagcggccactgcaagatgaacagatacgacaagaagatcgacagcctgatgaacgccgtgggctgcctgaagagcgaggtgaagatgcagaagggcgagagacagatggccaagagattcctggaggagagaaaggaggagctggaggaggtggcccacgagctggccgagaccgagcacgagaacaccgtgctgagacacaacatcgagagaatgaaggaggagaaggacttcaccatcctgcagaagaagcacctgcagcaggagaaggagtgcctgatgagcaagctggtggaggccgagatggacggcgccgccgccgccaagcaggtgatggccctgaaggacaccatcggcaagctgaagaccgagaagcagatgacctgcaccgacatcaacaccctgaccagacagaaggagctgctgctgcagaagctgagcaccttcgaggagaccaacagaaccctgagagacctgctgagagagcagcactgcaaggaggacagcgagagactgatggagcagcagggcgccctgctgaagagactggccgaggccgacagcgagaaggccagactgctgctgctgctgcaggacaaggacaaggaggtggaggagctgctgcaggagatccagtgcgagaaggcccaggccaagaccgccagcgagctgagcaagagcatggagagcatgagaggccacctgcaggcccagctgagaagcaaggaggccgagaacagcagactgtgcatgcagatcaagaacctggagagaagcggcaaccagcacaaggccgaggtggaggccatcatggagcagctgaaggagctgaagcagaagggcgacagagacaaggagagcctgaagaaggccatcagagcccagaaggagagagccgagaagagcgaggagtacgccgagcagctgcacgtgcagctggccgacaaggacctgtacgtggccgaggccctgagcaccctggagagctggagaagcagatacaaccaggtggtgaaggagaagggcgacctggagctggagatcatcgtgctgaacgacagagtgaccgacctggtgaaccagcagcagaccctggaggagaagatgagagaggacagagacagcctggtggagagactgcacagacagaccgccgagtacagcgccttcaagctggagaacgagagactgaaggccagcttcgcccccatggaggacaagctgaaccaggcccacctggaggtgcagcagctgaaggccagcgtgaagaactacgagggcatgatcgacaactacaagagccaggtgatgaagaccagactggaggccgacgaggtggccgcccagctggagagatgcgacaaggagaacaagatcctgaaggacgagatgaacaaggagatcgaggccgccagaagacagttccagagccagctggccgacctgcagcagctgcccgacatcctgaagatcaccgaggccaagctggccgagtgccaggaccagctgcagggctacgagagaaagaacatcgacctgaccgccatcatcagcgacctgagaagcagagtgagagactggcagaagggcagccacgagctgaccagagccggcgccagaatccccagatag

SEQ ID NO: 92124 - DNA, 570 bp, synthetic construct
  misc_feature 1..570: note = Description of Artificial Sequence: Synthetic coding sequence
  source 1..570: mol_type = other DNA
atgaaggacagaagcagcaccccccccctgcacgtgcacgtggacgagaacacccccgtgcacgtgcacatcaagaagctgcccaagcccagcgccaccagcagccagaagagccacaagagaggcatgaagggcgacaccgtgaacgtgagaagaagcgtgagagtgaagaccaaggtgaagatgcagaagggcgagagacagatggccaagagattcctggaggagagaaaggaggagctggaggaggtggcccacgagctggccgagaccgagcacgagaacaccgtgctgagacacaacatcgagagaatgaaggaggagaaggacttcaccatcctgcagaagaagcacctgcagcaggagaaggagtgcctgatgagcaagctggtggaggccgagatggacggcgccgccgccgccaagcaggtgatggccctgaaggacaccatcggcaagctgaagaccgagaagcagatgacctgcaccgacatcaacaccctgaccagacagaaggagctgctgctgcagaagctgagcaccttcgaggagaccaacagaaccctgtag

SEQ ID NO: 92125 - DNA, 618 bp, synthetic construct
  misc_feature 1..618: note = Description of Artificial Sequence: Synthetic coding sequence
  source 1..618: mol_type = other DNA
atgagcgccagcagcagcggcggcagccccagattccccagctgcggcaagaacggcgtgaccagcctgacccagaagaaggtgctgagagccccctgcggcgcccccagcgtgaccgtgaccaagagccacaagagaggcatgaagggcgacaccgtgaacgtgagaagaagcgtgagagtgaagaccaaggtgaagatgcagaagggcgagagacagatggccaagagattcctggaggagagaaaggaggagctggaggaggtggcccacgagctggccgagaccgagcacgagaacaccgtgctgagacacaacatcgagagaatgaaggaggagaaggacttcaccatcctgcagaagaagcacctgcagcaggagaaggagtgcctgatgagcaagctggtggaggccgagatggacggcgccgccgccgccaagcaggtgatggccctgaaggacaccatcggcaagctgaagaccgagaagcagatgacctgcaccgacatcaacaccctgaccagacagaaggagctgctgctgcagaagctgagcaccttcgaggagaccaacagaaccctgagagacctgctgagagagcagcactgcaaggagtag

SEQ ID NO: 92126 - DNA, 543 bp, synthetic construct
  misc_feature 1..543: note = Description of Artificial Sequence: Synthetic coding sequence
  source 1..543: mol_type = other DNA
atgagcgccagcagcagcggcggcagccccagattccccagctgcggcaagaacggcgtgaccagcctgacccagaagaaggtgctgagagccccctgcggcgcccccagcgtgaccgtgaccaagagccacaagagaggcatgaagggcgacaccgtgaacgtgagaagaagcgtgagagtgaagaccaaggtgccctggatgccccccggcaagagcagcgccagacccgtgggctgcaagtgggagaaccccccccactgcctggagatcaccccccccagcagcgagaagctggtgagcgtgatgagactgagcgacctgagcaccgaggacgacgacagcggccactgcaagatgaacagatacgacaagaagatcgacagcctgatgaacgccgtgggctgcctgaagagcgaggtgaagatgcagaagggcgagagacagatggccaagagattcctggaggagagaaaggaggagctggaggaggtggcccacgagctggccgagaccgagcacgagaacaccgtgctgagatag

SEQ ID NO: 92127 - DNA, 648 bp, synthetic construct
  misc_feature 1..648: note = Description of Artificial Sequence: Synthetic coding sequence
  source 1..648: mol_type = other DNA
atgaaggacagaagcagcaccccccccctgcacgtgcacgtggacgagaacacccccgtgcacgtgcacatcaagaagctgcccaagcccagcgccaccagcagccagaagagccacaagagaggcatgaagggcgacaccgtgaacgtgagaagaagcgtgagagtgaagaccaagaaccccccccactgcctggagatcaccccccccagcagcgagaagctggtgagcgtgatgagactgagcgacctgagcaccgaggacgacgacagcggccactgcaagatgaacagatacgacaagaagatcgacagcctgatgaacgccgtgggctgcctgaagagcgaggtgaagatgcagaagggcgagagacagatggccaagagattcctggaggagagaaaggaggagctggaggaggtggcccacgagctggccgagaccgagcacgagaacaccgtgctgagacacaacatcgagagaatgaaggaggagaaggacttcaccatcctgcagaagaagcacctgcagcaggagaaggagtgcctgatgagcaagctggtggaggccgagatggacggcgccgccgccgccaagcaggtgatggccctgaaggacaccatcggcaagctgaagaccgtgggctag

SEQ ID NO: 92128 - DNA, 471 bp, synthetic construct
  misc_feature 1..471: note = Description of Artificial Sequence: Synthetic coding sequence
  source 1..471: mol_type = other DNA
atgagcgccagcagcagcggcggcagccccagattccccagctgcggcaagaacggcgtgaccagcctgacccagaagaaggtgctgagagccccctgcggcgcccccagcgtgaccgtgaccaagagccacaagagaggcatgaagggcgacaccgtgaacgtgagaagaagcgtgagagtgaagaccaagaaccccccccactgcctggagatcaccccccccagcagcgagaagctggtgagcgtgatgagactgagcgacctgagcaccgaggacgacgacagcggccactgcaagatgaacagatacgacaagaagatcgacagcctgatgaacgccgtgggctgcctgaagagcgaggtgaagatgcagaagggcgagagacagatggccaagagattcctggaggagagaaaggaggagctggaggaggtggcccacgagctggccgagaccgagcacgagtag

SEQ ID NO: 92129 - DNA, 1731 bp, synthetic construct
  misc_feature 1..1731: note = Description of Artificial Sequence: Synthetic coding sequence
  source 1..1731: mol_type = other DNA
atgaaggacagaagcagcaccccccccctgcacgtgcacgtggacgagaacacccccgtgcacgtgcacatcaagaagctgcccaagcccagcgccaccagcagccagaagagccacaagagaggcatgaagggcgacaccgtgaacgtgagaagaagcgtgagagtgaagaccaaggtgaagatgcagaagggcgagagacagatggccaagagattcctggaggagagaaaggaggagctggaggaggtggcccacgagctggccgagaccgagcacgagaacaccgtgctgagacacaacatcgagagaatgaaggaggagaaggacttcaccatcctgcagaagaagcacctgcagcaggagaaggagtgcctgatgagcaagctggtggaggccgagatggacggcgccgccgccgccaagcaggtgatggccctgaaggacaccatcggcaagctgaagaccgagaagcagatgacctgcaccgacatcaacaccctgaccagacagaaggagctgctgctgcagaagctgagcaccttcgaggagaccaacagaaccctgagagacctgctgagagagcagcactgcaaggaggacagcgagagactgatggagcagcagggcgccctgctgaagagactggccgaggccgacagcgagaaggccagactgctgctgctgctgcaggacaaggacaaggaggtggaggagctgctgcaggagatccagtgcgagaaggcccaggccaagaccgccagcgagctgagcaagagcatggagagcatgagaggccacctgcaggcccagctgagaagcaaggaggccgagaacagcagactgtgcatgcagatcaagaacctggagagaagcggcaaccagcacaaggccgaggtggaggccatcatggagcagctgaaggagctgaagcagaagggcgacagagacaaggagagcctgaagaaggccatcagagcccagaaggagagagccgagaagagcgaggagtacgccgagcagctgcacgtgcagctggccgacaaggacctgtacgtggccgaggccctgagcaccctggagagctggagaagcagatacaaccaggtggtgaaggagaagggcgacctggagctggagatcatcgtgctgaacgacagagtgaccgacctggtgaaccagcagcagaccctggaggagaagatgagagaggacagagacagcctggtggagagactgcacagacagaccgccgagtacagcgccttcaagctggagaacgagagactgaaggccagcttcgcccccatggaggacaagctgaaccaggcccacctggaggtgcagcagctgaaggccagcgtgaagaactacgagggcatgatcgacaactacaagagccaggtgatgaagaccagactggaggccgacgaggtggccgcccagctggagagatgcgacaaggagaacaagatcctgaaggacgagatgaacaaggagatcgaggccgccagaagacagttccagagccagctggccgacctgcagcagctgcccgacatcctgaagatcaccgaggccaagctggccgagtgccaggaccagctgcagggctacgagagaaagaacatcgacctgaccgccatcatcagcgacctgagaagcagagtgagagactggcagaagggcagccacgagctgaccagagccggcgccagaatccccagatag

SEQ ID NO: 92130 - DNA, 444 bp, synthetic construct
  misc_feature 1..444: note = Description of Artificial Sequence: Synthetic coding sequence
  source 1..444: mol_type = other DNA
atgaaggacagaagcagcaccccccccctgcacgtgcacgtggacgagaacacccccgtgcacgtgcacatcaagaagctgcccaagcccagcgccaccagcagccagaagagccacaagagaggcatgaagggcgacaccgtgaacgtgagaagaagcgtgagagtgaagaccaaggtgccctggatgccccccggcaagagcagcgccagacccgtgggctgcaagtgggagaccagcgaggagacccccaccaccggcgagggcgtgccccacgtgcaggccggcggcggcggcaacggctggggctgcggctgccaggccggccacggcctggagggctaccacagagaggccgagaacagagagaccaacgacctgcacggccaccagcaccccgacaaggccgagggcaccagccccgccgaggccgagcacatctag

SEQ ID NO: 92131 - DNA, 1917 bp, synthetic construct
  misc_feature 1..1917: note = Description of Artificial Sequence: Synthetic coding sequence
  source 1..1917: mol_type = other DNA
atgggcagaaacagatacccccccgcctgctggttccccagctgcggcaagaacggcgtgaccagcctgacccagaagaaggtgctgagagccccctgcggcgcccccagcgtgaccgtgaccaagagccacaagagaggcatgaagggcgacaccgtgaacgtgagaagaagcgtgagagtgaagaccaagaaccccccccactgcctggagatcaccccccccagcagcgagaagctggtgagcgtgatgagactgagcgacctgagcaccgaggacgacgacagcggccactgcaagatgaacagatacgacaagaagatcgacagcctgatgaacgccgtgggctgcctgaagagcgaggtgaagatgcagaagggcgagagacagatggccaagagattcctggaggagagaaaggaggagctggaggaggtggcccacgagctggccgagaccgagcacgagaacaccgtgctgagacacaacatcgagagaatgaaggaggagaaggacttcaccatcctgcagaagaagcacctgcagcaggagaaggagtgcctgatgagcaagctggtggaggccgagatggacggcgccgccgccgccaagcaggtgatggccctgaaggacaccatcggcaagctgaagaccgagaagcagatgacctgcaccgacatcaacaccctgaccagacagaaggagctgctgctgcagaagctgagcaccttcgaggagaccaacagaaccctgagagacctgctgagagagcagcactgcaaggaggacagcgagagactgatggagcagcagggcgccctgctgaagagactggccgaggccgacagcgagaaggccagactgctgctgctgctgcaggacaaggacaaggaggtggaggagctgctgcaggagatccagtgcgagaaggcccaggccaagaccgccagcgagctgagcaagagcatggagagcatgagaggccacctgcaggcccagctgagaagcaaggaggccgagaacagcagactgtgcatgcagatcaagaacctggagagaagcggcaaccagcacaaggccgaggtggaggccatcatggagcagctgaaggagctgaagcagaagggcgacagagacaaggagagcctgaagaaggccatcagagcccagaaggagagagccgagaagagcgaggagtacgccgagcagctgcacgtgcagctggccgacaaggacctgtacgtggccgaggccctgagcaccctggagagctggagaagcagatacaaccaggtggtgaaggagaagggcgacctggagctggagatcatcgtgctgaacgacagagtgaccgacctggtgaaccagcagcagaccctggaggagaagatgagagaggacagagacagcctggtggagagactgcacagacagaccgccgagtacagcgccttcaagctggagaacgagagactgaaggccagcttcgcccccatggaggacaagctgaaccaggcccacctggaggtgcagcagctgaaggccagcgtgaagaactacgagggcatgatcgacaactacaagagccaggtgatgaagaccagactggaggccgacgaggtggccgcccagctggagagatgcgacaaggagaacaagatcctgaaggacgagatgaacaaggagatcgaggccgccagaagacagttccagagccagctggccgacctgcagcagctgcccgacatcctgaagatcaccgaggccaagctggccgagtgccaggaccagctgcagggctacgagagaaagaacatcgacctgaccgccatcatcagcgacctgagaagcagagtgagagactggcagaagggcagccacgagctgaccagagccggcgccagaatccccagatag

SEQ ID NO: 92132 - DNA, 765 bp, synthetic construct
  misc_feature 1..765: note = Description of Artificial Sequence: Synthetic coding sequence
  source 1..765: mol_type = other DNA
atgaccgaggaggtgtggatgggcacctggagaccccacagacccagaggccccatcatggccctgtacagcagccccggccccaagtacctgatcccccccaccaccggcttcatgaagcacacccccaccaagctgagagcccccgcctacagcttcagaggcgcccccatgctgctggccgagaactgcagccccggccccagatacaacgtgaaccccaagatcctgagaaccggcaaggacctgggccccgcctacagcatcctgggcagataccagaccaagaccatgctgacccccggccccggcgactacttccccgagaagagcaccaagtacgtgttcgacagcgcccccagccacagcatcagcgccagaaccaaggccttcagagtggacagcacccccggccccgccgcctacatgctgcccatggtgatgggccccaacaccgtgggcaaggccagccagcccagcttcagcatcaagggcagaagcaagctgggcggcttcagcgacgacctgcacaagacccccggccccgccgcctacagacagaccgacgtgagagtgaccaagttcaaggccccccagtacaccatggccgccagagtggagccccccggcgacaagaccctgaagcccggccccggcgcccacagccccgagaaggtgaccctgaccaagccctgcgcccccgtggtgaccttcggcatcaagcacagcgactacatgacccccctgctggtggacgtggagtag

SEQ ID NO: 92133 - DNA, 417 bp, synthetic construct
  misc_feature 1..417: note = Description of Artificial Sequence: Synthetic coding sequence
  source 1..417: mol_type = other DNA
atgaccgaggaggtgtggatgggcacctggagaccccacagacccagaggccccatcatggccctgtacagcagccccggccccaagtacctgatcccccccaccaccggcttcatgaagcacacccccaccaagctgagagcccccgcctacagcttcagaggcgcccccatgctgctggccgagaactgcagccccggccccagatacaacgtgaaccccaagatcctgagaaccggcaaggacctgggccccgcctacagcatcctgggcagataccagaccaagaccatgctgacccccggccccgccctgaagagcgccttccccagctggaccccccccgaccccacctggagcccccccgtgctggagcccagaggccccacccccagaatgctgggcagccccccctag

SEQ ID NO: 92134 - DNA, 375 bp, synthetic construct
  misc_feature 1..375: note = Description of Artificial Sequence: Synthetic coding sequence
  source 1..375: mol_type = other DNA
atgaccgaggaggtgtggatgggcacctggagaccccacagacccagaggccccatcatggccctgtacagcagccccggccccaagtacctgatcccccccaccaccggcttcatgaagcacacccccaccaagctgagagcccccgcctacagcttcagaggcgcccccatgctgctggccgagaactgcagcccccccaacaccgtgggcaaggccagccagcccagcttcagcatcaagggcagaagcaagctgggcggcttcagcgacgacctgcacaaggtgaccctgaccaagccctgcgcccccgtggtgaccttcggcatcaagcacagcgactacatgacccccctgctggtggacgtggagtag

SEQ ID NO: 92135 - DNA, 774 bp, synthetic construct
  misc_feature 1..774: note = Description of Artificial Sequence: Synthetic coding sequence
  source 1..774: mol_type = other DNA
atggacgccgagtacagcggcaacgagttccccagaagcgagggcgagagagaccagcaccagagacccggcaaggagagaaagagcggcgaggccggctggggcaccggcgagctgggccaggacggcagactgctgagcagcaccctgagcctgagcagcaacagaagcctgggccagagacagaacagccccctgcccttccagtggagaatcacccacagcttcagatggatggcccaggtgctggccagcgagctgagcctggtggccttcatcctgctgctggtggtggccttcagcaagaagtggctggacctgagcagaagcctgttctaccagagatggcccgtggacgtgagcaacagaatccacaccagcgcccacgtgatgagcatgggcctgctgcacttctacaagagcagaagctgcagcgacctggagaacggcaaggtgaccttcatcttcagcaccctgatgctgttccccatcaacatctggatcttcgagctggagagaaacgtgagcatccccatcggctggagctacttcatcggctggctggtgctgatcctgtacttcacctgcgccatcctgtgctacttcaaccacaagagcttctggagcctgatcctgagccaccccagcggcgccgtgagctgcagcagcagcttcggcagcgtggaggagagccccagagcccagaccatcaccgacacccccatcacccaggagggcgtgctggaccccgagcagaaggacacccacgtgtag

SEQ ID NO: 92136 - DNA, 1488 bp, synthetic construct
  misc_feature 1..1488: note = Description of Artificial Sequence: Synthetic coding sequence
  source 1..1488: mol_type = other DNA
atggtgacctggctgtacagattcctgcccaccagcaacatggccgccaagctgagaagcctgctgccccccgacctgagactgcagttctggctgcacgccagactgcagaagtgcttcctgagcagaggctgcggcagctactgcgccggcgccaaggccagccccctgcccggcaagatggccatgggcctgatgtgcggcagaagagagctgctgagactgctgcagagcggcagaagagtgcacagcgtggccggccccagccagtggctgggcaagcccctgaccaccagactgctgttccccgccgccccctgctgctgcagaccccactacctgttcctggccgccagcggccccagaagcctgagcaccagcgccatcagcttcgccgaggtgcaggtgcaggccccccccgtggtggccgccacccccagccccaccgccgtgcccgaggtggccagcggcgagaccgccgacgtggtgcagaccgccgccgagcagagcttcgccgagctgggcctgggcagctacacccccgtgggcctgatccagaacctgctggagttcatgcacgtggacctgggcctgccctggtggggcgccatcgccgcctgcaccgtgttcgccagatgcctgatcttccccctgatcgtgaccggccagagagaggccgccagaatccacaaccacctgcccgagatccagaagttcagcagcagaatcagagaggccaagctggccggcgaccacatcgagtactacaaggccagcagcgagatggccctgtaccagaagaagcacggcatcaagctgtacaagcccctgatcctgcccgtgacccaggcccccatcttcatcagcttcttcatcgccctgagagagatggccaacctgcccgtgcccagcctgcagaccggcggcctgtggtggttccaggacctgaccgtgagcgaccccatctacatcctgcccctggccgtgaccgccaccatgtgggccgtgctggagctgggcgccgagaccggcgtgcagagcagcgacctgcagtggatgagaaacgtgatcagaatgatgcccctgatcaccctgcccatcaccatgcacttccccaccgccgtgttcatgtactggctgagcagcaacctgttcagcctggtgcaggtgagctgcctgagaatccccgccgtgagaaccgtgctgaagatcccccagagagtggtgcacgacctggacaagctgccccccagagagggcttcctggagagcttcaagaagggctggaagaacgccgagatgaccagacagctgagagagagagagcagagaatgagaaaccagctggagctggccgccagaggccccctgagacagaccttcacccacaaccccctgctgcagcccggcaaggacaacccccccaacatccccagcagcagcagcaagcccaagagcaagtacccctggcacgacaccctgggctag

SEQ ID NO: 92137 - DNA, 1260 bp, synthetic construct
  misc_feature 1..1260: note = Description of Artificial Sequence: Synthetic coding sequence
  source 1..1260: mol_type = other DNA
atgagaggcacccaggtgcacagcgtggccggccccagccagtggctgggcaagcccctgaccaccagactgctgttccccgccgccccctgctgctgcagaccccactacctgttcctggccgccagcggccccagaagcctgagcaccagcgccatcagcttcgccgaggtgcaggtgcaggccccccccgtggtggccgccacccccagccccaccgccgtgcccgaggtggccagcggcgagaccgccgacgtggtgcagaccgccgccgagcagagcttcgccgagctgggcctgggcagctacacccccgtgggcctgatccagaacctgctggagttcatgcacgtggacctgggcctgccctggtggggcgccatcgccgcctgcaccgtgttcgccagatgcctgatcttccccctgatcgtgaccggccagagagaggccgccagaatccacaaccacctgcccgagatccagaagttcagcagcagaatcagagaggccaagctggccggcgaccacatcgagtactacaaggccagcagcgagatggccctgtaccagaagaagcacggcatcaagctgtacaagcccctgatcctgcccgtgacccaggcccccatcttcatcagcttcttcatcgccctgagagagatggccaacctgcccgtgcccagcctgcagaccggcggcctgtggtggttccaggacctgaccgtgagcgaccccatctacatcctgcccctggccgtgaccgccaccatgtgggccgtgctggagctgggcgccgagaccggcgtgcagagcagcgacctgcagtggatgagaaacgtgatcagaatgatgcccctgatcaccctgcccatcaccatgcacttccccaccgccgtgttcatgtactggctgagcagcaacctgttcagcctggtgcaggtgagctgcctgagaatccccgccgtgagaaccgtgctgaagatcccccagagagtggtgcacgacctggacaagctgccccccagagagggcttcctggagagcttcaagaagggctggaagaacgccgagatgaccagacagctgagagagagagagcagagaatgagaaaccagctggagctggccgccagaggccccctgagacagaccttcacccacaaccccctgctgcagcccggcaaggacaacccccccaacatccccagcagcagcagcaagcccaagagcaagtacccctggcacgacaccctgggctag

SEQ ID NO: 92138 - DNA, 732 bp, synthetic construct
  misc_feature 1..732: note = Description of Artificial Sequence: Synthetic coding sequence
  source 1..732: mol_type = other DNA
atgagcagactgtggtacggcaagaagggcagaagacaccagcccatcaaccacaagtacaccctggtggtgagcgtggccgagtaccacagaagaatcgacgccctgaacaccgaggagctgagaaccctgtgcagaagactgcagatcaccaccagagaggacatcaacagcaagcaggtggccaccgtgaaggccgacctggagagcgagagcttcagacccaacctgagcgaccccagcgagctgctgctgcccgaccagatcgagaagctgaccaagcacctgccccccagaaccatcggctacccctggaccctggtgtacggcaccggcaagcacggcaccagcctgaagaccctgtacagaaccatgaccggcctggacacccccgtgctgatggtgatcaaggacagcgacggccaggtgttcggcgccctggccagcgagcccctgaaggtgagcgacggcttctacggcaccggcgagaccttcgtgttcaccttctgccccgagttcgaggtgttcaagtggaccggcgacaacatgttcttcatcaagggcgacatggacagcctggccttcggcggcggcggcggcgagttcgccctgtggctggacggcgacctgtaccacggcagaagccacagctgcaagaccttcggcaacagaaccctgagcaagaaggaggacttcttcatccaggacatcgagatctgggccttcgagtag

SEQ ID NO: 92139 - DNA, 2520 bp, synthetic construct
  misc_feature 1..2520: note = Description of Artificial Sequence: Synthetic coding sequence
  source 1..2520: mol_type = other DNA
atggactacctgaccaccttcaccgagaagagcggcagactgctgagaggcaccgccaacagactgctgggcttcggcggcggcggcgaggccagacaggtgagattcgaggactacctgagagagcccgcccagggcgacctgggctgcggcagccccccccacagaccccccgcccccagcagccccgagggccccgacaccggccagaagaagaccctggacaagaaggacggcagaagaatgagcttccagaagcccaagggcaccatcgagtacaccgtggagagcagagacagcctgaacagcatcgccctgaagttcgacaccacccccaacgagctggtgcagctgaacaagctgttcagcagagccgtggtgaccggccaggtgctgtacgtgcccgaccccgagtacgtgagcagcgtggagagcagccccagcctgagccccgtgagccccctgagccccaccagcagcgaggccgagttcgacaagaccaccaaccccgacgtgcaccccaccgaggccacccccagcagcaccttcaccggcatcagacccgccagagtggtgagcagcaccagcgaggaggaggaggccttcaccgagaagttcctgaagatcaactgcaagtacatcaccagcggcaagggcaccgtgagcggcgtgctgctggtgacccccaacaacatcatgttcgacccccacaagaacgaccccctggtgcaggagaacggctgcgaggagtacggcatcatgtgccccatggaggaggtgatgagcgccgccatgtacaaggagatcctggacagcaagatcaaggagagcctgcccatcgacatcgaccagctgagcggcagagacttctgccacagcaagaagatgaccggcagcaacaccgaggagatcgacagcagaatcagagacgccggcaacgacagcgccagcaccgcccccagaagcaccgaggagagcctgagcgaggacgtgttcaccgagagcgagctgagccccatcagagaggagctggtgagcagcgacgagctgagacaggacaagagcagcggcgccagcagcgagagcgtgcagaccgtgaaccaggccgaggtggagagcctgaccgtgaagagcgagagcaccggcacccccggccacctgagaagcgacaccgagcacagcaccaacgaggtgggcaccctgtgccacaagaccgacctgaacaacctggagatggccatcaaggaggaccagatcgccgacaacttccagggcatcagcggccccaaggaggacagcaccagcatcaagggcaacagcgaccaggacagcttcctgcacgagaacagcctgcaccaggaggagagccagaaggagaacatgccctgcggcgagaccgccgagttcaagcagaagcagagcgtgaacaagggcaagcagggcaaggagcagaaccaggacagccagaccgaggccgaggagctgagaaagctgtggaagacccacaccatgcagcagaccaagcagcagagagagaacatccagcaggtgagccagaaggaggccaagcacaagatcaccagcgccgacggccacatcgagagcagcgccctgctgaaggagaagcagagacacagactgcacaagttcctgtgcctgagagtgggcaagcccatgagaaagaccttcgtgagccaggccagcgccaccatgcagcagtacgcccagagagacaagaagcacgagtactggttcgccgtgccccaggagagaaccgaccacctgtacgccttcttcatccagtggagccccgagatctacgccgaggacaccggcgagtacaccagagagcccggcttcatcgtggtgaagaagatcgaggagagcgagaccatcgaggacagcagcaaccaggccgccgccagagagtgggagatcaccaccagagaggacatcaacagcaagcaggtggccaccgtgaaggccgacctggagagcgagagcttcagacccaacctgagcgaccccagcgagctgctgctgcccgaccagatcgagaagctgaccaagcacctgccccccagaaccatcggctacccctggaccctggtgtacggcaccggcaagcacggcaccagcctgaagaccctgtacagaaccatgaccggcctggacacccccgtgctgatggtgatcaaggacagcgacggccaggtgttcggcgccctggccagcgagcccctgaaggtgagcgacggcttctacggcaccggcgagaccttcgtgttcaccttctgccccgagttcgaggtgttcaagtggaccggcgacaacatgttcttcatcaagggcgacatggacagcctggccttcggcggcggcggcggcgagttcgccctgtggctggacggcgacctgtaccacggcagaagccacagctgcaagaccttcggcaacagaaccctgagcaagaaggaggacttcttcatccaggacatcgagatctgggccttcgagtag

SEQ ID NO: 92140 - DNA, 2625 bp, synthetic construct
  misc_feature 1..2625: note = Description of Artificial Sequence: Synthetic coding sequence
  source 1..2625: mol_type = other DNA
atgaccaaggacaagaacagccccggcctgaagaagaagagccagagcgtggacatcaacgcccccggcttcaaccccctggccggcgccggcaagcagaccccccaggccagcaagccccccgcccccaagacccccatcatcgaggaggagcagaacaacgccgccaacacccagaagcaccccagcagaagaagcgagctgaagagattctacaccatcgacaccggccagaagaagaccctggacaagaaggacggcagaagaatgagcttccagaagcccaagggcaccatcgagtacaccgtggagagcagagacagcctgaacagcatcgccctgaagttcgacaccacccccaacgagctggtgcagctgaacaagctgttcagcagagccgtggtgaccggccaggtgctgtacgtgcccgaccccgagtacgtgagcagcgtggagagcagccccagcctgagccccgtgagccccctgagccccaccagcagcgaggccgagttcgacaagaccaccaaccccgacgtgcaccccaccgaggccacccccagcagcaccttcaccggcatcagacccgccagagtggtgagcagcaccagcgaggaggaggaggccttcaccgagaagttcctgaagatcaactgcaagtacatcaccagcggcaagggcaccgtgagcggcgtgctgctggtgacccccaacaacatcatgttcgacccccacaagaacgaccccctggtgcaggagaacggctgcgaggagtacggcatcatgtgccccatggaggaggtgatgagcgccgccatgtacaaggagatcctggacagcaagatcaaggagagcctgcccatcgacatcgaccagctgagcggcagagacttctgccacagcaagaagatgaccggcagcaacaccgaggagatcgacagcagaatcagagacgccggcaacgacagcgccagcaccgcccccagaagcaccgaggagagcctgagcgaggacgtgttcaccgagagcgagctgagccccatcagagaggagctggtgagcagcgacgagctgagacaggacaagagcagcggcgccagcagcgagagcgtgcagaccgtgaaccaggccgaggtggagagcctgaccgtgaagagcgagagcaccggcacccccggccacctgagaagcgacaccgagcacagcaccaacgaggtgggcaccctgtgccacaagaccgacctgaacaacctggagatggccatcaaggaggaccagatcgccgacaacttccagggcatcagcggccccaaggaggacagcaccagcatcaagggcaacagcgaccaggacagcttcctgcacgagaacagcctgcaccaggaggagagccagaaggagaacatgccctgcggcgagaccgccgagttcaagcagaagcagagcgtgaacaagggcaagcagggcaaggagcagaaccaggacagccagaccgaggccgaggagctgagaaagctgtggaagacccacaccatgcagcagaccaagcagcagagagagaacatccagcaggtgagccagaaggaggccaagcacaagatcaccagcgccgacggccacatcgagagcagcgccctgctgaaggagaagcagagacacagactgcacaagttcctgtgcctgagagtgggcaagcccatgagaaagaccttcgtgagccaggccagcgccaccatgcagcagtacgcccagagagacaagaagcacgagtactggttcgccgtgccccaggagagaaccgaccacctgtacgccttcttcatccagtggagccccgagatctacgccgaggacaccggcgagtacaccagagagcccggcttcatcgtggtgaagaagatcgaggagagcgagaccatcgaggacagcagcaaccaggccgccgccagagagtgggaggtggtgagcgtggccgagtaccacagaagaatcgacgccctgaacaccgaggagctgagaaccctgtgcagaagactgcagatcaccaccagagaggacatcaacagcaagcaggtggccaccgtgaaggccgacctggagagcgagagcttcagacccaacctgagcgaccccagcgagctgctgctgcccgaccagatcgagaagctgaccaagcacctgccccccagaaccatcggctacccctggaccctggtgtacggcaccggcaagcacggcaccagcctgaagaccctgtacagaaccatgaccggcctggacacccccgtgctgatggtgatcaaggacagcgacggccaggtgttcggcgccctggccagcgagcccctgaaggtgagcgacggcttctacggcaccggcgagaccttcgtgttcaccttctgccccgagttcgaggtgttcaagtggaccggcgacaacatgttcttcatcaagggcgacatggacagcctggccttcggcggcggcggcggcgagttcgccctgtggctggacggcgacctgtaccacggcagaagccacagctgcaagaccttcggcaacagaaccctgagcaagaaggaggacttcttcatccaggacatcgagatctgggccttcgagtag

SEQ ID NO: 92141 - DNA, 2541 bp, synthetic construct
  misc_feature 1..2541: note = Description of Artificial Sequence: Synthetic coding sequence
  source 1..2541: mol_type = other DNA
atgagcgtgagcaacctgagctggctgaagaagaagagccagagcgtggacatcaacgcccccggcttcaaccccctggccggcgccggcaagcagaccccccaggccagcaagccccccgcccccaagacccccatcatcgaggaggagcagaacaacgccgccaacacccagaagcaccccagcagaagaagcgagctgaagagattctacaccatcgacaccggccagaagaagaccctggacaagaaggacggcagaagaatgagcttccagaagcccaagggcaccatcgagtacaccgtggagagcagagacagcctgaacagcatcgccctgaagttcgacaccacccccaacgagctggtgcagctgaacaagctgttcagcagagccgtggtgaccggccaggtgctgtacgtgcccgaccccgagtacgtgagcagcgtggagagcagccccagcctgagccccgtgagccccctgagccccaccagcagcgaggccgagttcgacaagaccaccaaccccgacgtgcaccccaccgaggccacccccagcagcaccttcaccggcatcagacccgccagagtggtgagcagcaccagcgaggaggaggaggccttcaccgagaagttcctgaagatcaactgcaagtacatcaccagcggcaagggcaccgtgagcggcgtgctgctggtgacccccaacaacatcatgttcgacccccacaagaacgaccccctggtgcaggagaacggctgcgaggagtacggcatcatgtgccccatggaggaggtgatgagcgccgccatgtacaaggagatcctggacagcaagatcaaggagagcctgcccatcgacatcgaccagctgagcggcagagacttctgccacagcaagaagatgaccggcagcaacaccgaggagatcgacagcagaatcagagacgccggcaacgacagcgccagcaccgcccccagaagcaccgaggagagcctgagcgaggacgtgttcaccgagagcgagctgagccccatcagagaggagctggtgagcagcgacgagctgagacaggacaagagcagcggcgccagcagcgagagcgtgcagaccgtgaaccaggccgaggtggagagcctgaccgtgaagagcgagagcaccggcacccccggccacctgagaagcgacaccgagcacagcaccaacgaggtgggcaccctgtgccacaagaccgacctgaacaacctggagatggccatcaaggaggaccagatcgccgacaacttccagggcatcagcggccccaaggaggacagcaccagcatcaagggcaacagcgaccaggacagcttcctgcacgagaacagcctgcaccaggaggagagccagaaggagaacatgccctgcggcgagaccgccgagttcaagcagaagcagagcgtgaacaagggcaagcagggcaaggagcagaaccaggacagccagaccgaggccgaggagctgagaaagctgtggaagacccacaccatgcagcagaccaagcagcagagagagaacatccagcaggtgagccagaaggaggccaagcacaagatcaccagcgccgacggccacatcgagagcagcgccctgctgaaggagaagcagagacacagactgcacaagttcctgtgcctgagagtgggcaagcccatgagaaagaccttcgtgagccaggccagcgccaccatgcagcagtacgcccagagagacaagaagcacgagtactggttcgccgtgccccaggagagaaccgaccacctgtacgccttcttcatccagtggagccccgagatctacgccgaggacaccggcgagtacaccagagagcccggcttcatcgtggtgaagaagatcgaggagagcgagaccatcgaggacagcagcaaccaggccgccgccagagagtgggagatcaccaccagagaggacatcaacagcaagcaggtggccaccgtgaaggccgacctggagagcgagagcttcagacccaacctgagcgaccccagcgagctgctgctgcccgaccagatcgagaagctgaccaagcacctgccccccagaaccatcggctacccctggaccctggtgtacggcaccggcaagcacggcaccagcctgaagaccctgtacagaaccatgaccggcctggacacccccgtgctgatggtgatcaaggacagcgacggccaggtgttcggcgccctggccagcgagcccctgaaggtgagcgacggcttctacggcaccggcgagaccttcgtgttcaccttctgccccgagttcgaggtgttcaagtggaccggcgacaacatgttcttcatcaagggcgacatggacagcctggccttcggcggcggcggcggcgagttcgccctgtggctggacggcgacctgtaccacggcagaagccacagctgcaagaccttcggcaacagaaccctgagcaagaaggaggacttcttcatccaggacatcgagatctgggccttcgagtag

SEQ ID NO: 92142 - DNA, 651 bp, synthetic construct
  misc_feature 1..651: note = Description of Artificial Sequence: Synthetic coding sequence
  source 1..651: mol_type = other DNA
atgagcagactgtggtacggcaagaagggcagaagacaccagcccatcaaccacaagtacaccctgatcaccaccagagaggacatcaacagcaagcaggtggccaccgtgaaggccgacctggagagcgagagcttcagacccaacctgagcgaccccagcgagctgctgctgcccgaccagatcgagaagctgaccaagcacctgccccccagaaccatcggctacccctggaccctggtgtacggcaccggcaagcacggcaccagcctgaagaccctgtacagaaccatgaccggcctggacacccccgtgctgatggtgatcaaggacagcgacggccaggtgttcggcgccctggccagcgagcccctgaaggtgagcgacggcttctacggcaccggcgagaccttcgtgttcaccttctgccccgagttcgaggtgttcaagtggaccggcgacaacatgttcttcatcaagggcgacatggacagcctggccttcggcggcggcggcggcgagttcgccctgtggctggacggcgacctgtaccacggcagaagccacagctgcaagaccttcggcaacagaaccctgagcaagaaggaggacttcttcatccaggacatcgagatctgggccttcgagtag

SEQ ID NO: 92143 - DNA, 885 bp, synthetic construct
  misc_feature 1..885: note = Description of Artificial Sequence: Synthetic coding sequence
  source 1..885: mol_type = other DNA
atgcagcagaccaagcagcagagagagaacatccagcaggtgagccagaaggaggccaagcacaagatcaccagcgccgacggccacatcgagagcagcgccctgctgaaggagaagcagagacacagactgcacaagttcctgtgcctgagagtgggcaagcccatgagaaagaccttcgtgagccaggccagcgccaccatgcagcagtacgcccagagagacaagaagcacgagtactggttcgccgtgccccaggagagaaccgaccacctgtacgccttcttcatccagtggagccccgagatctacgccgaggacaccggcgagtacaccagagagcccggcttcatcgtggtgaagaagatcgaggagagcgagaccatcgaggacagcagcaaccaggccgccgccagagagtgggagctgaccaagcacctgccccccagaaccatcggctacccctggaccctggtgtacggcaccggcaagcacggcaccagcctgaagaccctgtacagaaccatgaccggcctggacacccccgtgctgatggtgatcaaggacagcgacggccaggtgttcggcgccctggccagcgagcccctgaaggtgagcgacggcttctacggcaccggcgagaccttcgtgttcaccttctgccccgagttcgaggtgttcaagtggaccggcgacaacatgttcttcatcaagggcgacatggacagcctggccttcggcggcggcggcggcgagttcgccctgtggctggacggcgacctgtaccacggcagaagccacagctgcaagaccttcggcaacagaaccctgagcaagaaggaggacttcttcatccaggacatcgagatctgggccttcgagtag

SEQ ID NO: 92144 - DNA, 1512 bp, synthetic construct
  misc_feature 1..1512: note = Description of Artificial Sequence: Synthetic coding sequence
  source 1..1512: mol_type = other DNA
atgttctgccagagaaaggacaccggccagaagaagaccctggacaagaaggacggcagaagaatgagcttccagaagcccaagggcaccatcgagtacaccgtggagagcagagacagcctgaacagcatcgccctgaagttcgacaccacccccaacgagctggtgcagctgaacaagctgttcagcagagccgtggtgaccggccaggtgctgtacgtgcccgaccccgagtacgtgagcagcgtggagagcagccccagcctgagccccgtgagccccctgagccccaccagcagcgaggccgagttcgacaagaccaccaaccccgacgtgcaccccaccgaggccacccccagcagcaccttcaccggcatcagacccgccagagtggtgagcagcaccagcgaggaggaggaggccttcaccgagaagttcctgaagatcaactgcaagtacatcaccagcggcaagggcaccgtgagcggcgtgctgctggtgacccccaacaacatcatgttcgacccccacaagaacgaccccctggtgcaggagaacggctgcgaggagtacggcatcatgtgccccatggaggaggtgatgagcgccgccatgtacaaggagatcctggacagcaagatcaaggagagcctgcccatcgacatcgaccagctgagcggcagagacttctgccacagcaagaagatgaccggcagcaacaccgaggagatcgacagcagaatcagagacgccggcaacgacagcgccagcaccgcccccagaagcaccgaggagagcctgagcgaggacgtgttcaccgagagcgagctgagccccatcagagaggagctggtgagcagcgacgagctgagacaggacaagagcagcggcgccagcagcgagagcgtgcagaccgtgaaccaggccgaggtggagagcctgaccgtgaagagcgagagcaccggcacccccggccacctgagaagcgacaccgagcacagcaccaacgaggtgggcaccctgtgccacaagaccgacctgaacaacctggagatggccatcaaggaggaccagatcgccgacaacttccagggcatcagcggccccaaggaggacagcaccagcatcaagggcaacagcgaccaggacagcttcctgcacgagaacagcctgcaccaggaggagagccagaaggagaacatgccctgcggcgagaccgccgagttcaagcagaagcagagcgtgaacaagggcaagcagggcaaggagcagaaccaggacagccagaccgaggccgaggagctgagaaagctgtggaagacccacaccatgcagcagaccaagcagcagagagagaacatccagcaggtgagccagaaggaggccaagcacaagatcaccagcgccgacggccacatcgagagcaagtgctacagagtgaacgaggtgagcagcagcaactgcatggtgagccccagcttcctgaccgacagcaaggccgccgtgccctag

SEQ ID NO: 92145 - DNA, 2622 bp, synthetic construct
  misc_feature 1..2622: note = Description of Artificial Sequence: Synthetic coding sequence
  source 1..2622: mol_type = other DNA
atgagcgtgagcaacctgagctggctgaagaagaagagccagagcgtggacatcaacgcccccggcttcaaccccctggccggcgccggcaagcagaccccccaggccagcaagccccccgcccccaagacccccatcatcgaggaggagcagaacaacgccgccaacacccagaagcaccccagcagaagaagcgagctgaagagattctacaccatcgacaccggccagaagaagaccctggacaagaaggacggcagaagaatgagcttccagaagcccaagggcaccatcgagtacaccgtggagagcagagacagcctgaacagcatcgccctgaagttcgacaccacccccaacgagctggtgcagctgaacaagctgttcagcagagccgtggtgaccggccaggtgctgtacgtgcccgaccccgagtacgtgagcagcgtggagagcagccccagcctgagccccgtgagccccctgagccccaccagcagcgaggccgagttcgacaagaccaccaaccccgacgtgcaccccaccgaggccacccccagcagcaccttcaccggcatcagacccgccagagtggtgagcagcaccagcgaggaggaggaggccttcaccgagaagttcctgaagatcaactgcaagtacatcaccagcggcaagggcaccgtgagcggcgtgctgctggtgacccccaacaacatcatgttcgacccccacaagaacgaccccctggtgcaggagaacggctgcgaggagtacggcatcatgtgccccatggaggaggtgatgagcgccgccatgtacaaggagatcctggacagcaagatcaaggagagcctgcccatcgacatcgaccagctgagcggcagagacttctgccacagcaagaagatgaccggcagcaacaccgaggagatcgacagcagaatcagagacgccggcaacgacagcgccagcaccgcccccagaagcaccgaggagagcctgagcgaggacgtgttcaccgagagcgagctgagccccatcagagaggagctggtgagcagcgacgagctgagacaggacaagagcagcggcgccagcagcgagagcgtgcagaccgtgaaccaggccgaggtggagagcctgaccgtgaagagcgagagcaccggcacccccggccacctgagaagcgacaccgagcacagcaccaacgaggtgggcaccctgtgccacaagaccgacctgaacaacctggagatggccatcaaggaggaccagatcgccgacaacttccagggcatcagcggccccaaggaggacagcaccagcatcaagggcaacagcgaccaggacagcttcctgcacgagaacagcctgcaccaggaggagagccagaaggagaacatgccctgcggcgagaccgccgagttcaagcagaagcagagcgtgaacaagggcaagcagggcaaggagcagaaccaggacagccagaccgaggccgaggagctgagaaagctgtggaagacccacaccatgcagcagaccaagcagcagagagagaacatccagcaggtgagccagaaggaggccaagcacaagatcaccagcgccgacggccacatcgagagcagcgccctgctgaaggagaagcagagacacagactgcacaagttcctgtgcctgagagtgggcaagcccatgagaaagaccttcgtgagccaggccagcgccaccatgcagcagtacgcccagagagacaagaagcacgagtactggttcgccgtgccccaggagagaaccgaccacctgtacgccttcttcatccagtggagccccgagatctacgccgaggacaccggcgagtacaccagagagcccggcttcatcgtggtgaagaagatcgaggagagcgagaccatcgaggacagcagcaaccaggccgccgccagagagtgggaggtggtgagcgtggccgagtaccacagaagaatcgacgccctgaacaccgaggagctgagaaccctgtgcagaagactgcagatcaccaccagagaggacatcaacagcaagcaggtggccaccgtgaaggccgacctggagagcgagagcttcagacccaacctgagcgaccccagcgagctgctgctgcccgaccagatcgagaagctgaccaagcacctgccccccagaaccatcggctacccctggaccctggtgtacggcaccggcaagcacggcaccagcctgaagaccctgtacagaaccatgaccggcctggacacccccgtgctgatggtgatcaaggacagcgacggccaggtgttcggcgccctggccagcgagcccctgaaggtgagcgacggcttctacggcaccggcgagaccttcgtgttcaccttctgccccgagttcgaggtgttcaagtggaccggcgacaacatgttcttcatcaagggcgacatggacagcctggccttcggcggcggcggcggcgagttcgccctgtggctggacggcgacctgtaccacggcagaagccacagctgcaagaccttcggcaacagaaccctgagcaagaaggaggacttcttcatccaggacatcgagatctgggccttcgagtag

SEQ ID NO: 92146 - DNA, 2541 bp, synthetic construct; identical to SEQ ID NO: 92141
  misc_feature 1..2541: note = Description of Artificial Sequence: Synthetic coding sequence
  source 1..2541: mol_type = other DNA

SEQ ID NO: 92147 - DNA, 822 bp, synthetic construct
  misc_feature 1..822: note = Description of Artificial Sequence: Synthetic coding sequence
  source 1..822: mol_type = other DNA
atgaccttcgacgacctgaagatccagaccgtgaaggaccagcccgacgagaagagcaacggcaagaaggccaagggcctgcagttcctgtacagcccctggtggtgcctggccgccgccaccctgggcgtgctgtgcctgggcctggtggtgaccatcatggtgctgggcatgcagctgagccaggtgagcgacctgctgacccaggagcaggccaacctgacccaccagaagaagaagctggagggccagatcagcgccagacagcaggccgaggaggccagccaggagagcgagaacgagctgaaggagatgatcgagaccctggccagaaagctgaacgagaagagcaaggagcagatggagctgcaccaccagaacctgaacctgcaggagaccctgaagagagtggccaactgcagcgccccctgcccccaggactggatctggcacggcgagaactgctacctgttcagcagcggcagcttcaactgggagaagagccaggagaagtgcctgagcctggacgccaagctgctgaagatcaacagcaccgccgacctggacttcatccagcaggccatcagctacagcagcttccccttctggatgggcctgagcagaagaaaccccagctacccctggctgtgggaggacggcagccccctgatgccccacctgttcagagtgagaggcgccgtgagccagacctaccccagcggcacctgcgcctacatccagagaggcgccgtgtacgccgagaactgcatcctggccgccttcagcatctgccagaagaaggccaacctgagagcccagtag

SEQ ID NO: 92148 - DNA, 546 bp, synthetic construct
  misc_feature 1..546: note = Description of Artificial Sequence: Synthetic coding sequence
  source 1..546: mol_type = other DNA
atgaccttcgacgacctgaagatccagaccgtgaaggaccagcccgacgagaagagcaacggcaagaaggccaagggcctgcagttcctgtacagcccctggtggtgcctggccgccgccaccctgggcgtgctgtgcctgggcctggtggtgaccatcatggtgctgggcatgcagctgagccaggtgagcgacctgctgacccaggagcaggccaacctgacccaccagaagaagaagctggagggccagatcagcgccagacagcaggccgaggaggccagccaggagagcgagaacgagctgaaggagatgatcgagaccctggccagaaagctgaacgagaagagcaaggagcagatggagctgcaccaccagaacctgaacctgcaggagaccctgaagagagtggccaactgcagcggcctgcaccccgccagcaacttcctgttccagttcagcatcctggacggcgccgtgagcgaggagccccagctgcccatggccctgggcggcagattcagcttcgacgcccccctgatctag

SEQ ID NO: 92149 - DNA, 570 bp, synthetic construct
  misc_feature 1..570: note = Description of Artificial Sequence: Synthetic coding sequence
  source 1..570: mol_type = other DNA
atgaccttcgacgacctgaagatccagaccgtgaaggaccagcccgacgagaagagcaacggcaagaaggccaagggcctgcagttcctgtacagcccctggtggtgcctggccgccgccaccctgggcgtgctgtgcctgggcctggtggtgaccatcatggtgctgggcatgcagctgagccaggtgagcgacctgctgacccaggagcaggccaacctgacccaccagaagaagaagctggagggccagatcagcgccagacagcaggccgaggaggccagccaggagagcgagaacgagctgaaggagatgatcgagaccctggccagaaagctgaacgagaagagcaaggagcagatggagctgcaccaccagaacctgaacctgcaggagaccctgaagagagtggccaactgcagcgccccctgcccccaggactggatctggcacggcgagaactgctacctgttcagcagcggcagcttcaactgggagaagagccaggagaagtgcctgagcctggacgccaagctgctgaagatcaacagcaccgccgacctgatctag

SEQ ID NO: 92150 - DNA, 1623 bp, synthetic construct; identical to SEQ ID NO: 88576
  misc_feature 1..1623: note = Description of Artificial Sequence: Synthetic coding sequence
  source 1..1623: mol_type = other DNA

SEQ ID NO: 92151 - DNA, 636 bp, synthetic construct
  misc_feature 1..636: note = Description of Artificial Sequence: Synthetic coding sequence
  source 1..636: mol_type = other DNA
atgttccacctgagaacctgcgccgccaagctgagacccctgaccgccagccagaccgtgaagaccttcagccagaacagacccgccgccgccagaaccttccagcagatcagatgctacagcgcccccgtggccgccgagcccttcctgagcggcaccagcagcaactacgtggaggagatgtactgcgcctggctggagaaccccaagagcgtgcacaagagctgggacatcttcttcagaaacaccaacgccggcgccccccccggcaccgcctaccagagccccctgcccctgagcagaggcagcctggccgccgtggcccacgcccagagcctggtggaggcccagcccaacgtggacaagctggtggaggaccacctggccgtgcagagcctgatcagagcctaccagatcagaggccaccacgtggcccagctggaccccctgggcatcctggacgccgacctggacagcagcgtgcccgccgacatcatcagcagcaccgacaagctgggcttctacggcctggacgagagcgacctggacaaggtgttccacctgcccaccaccaccttcatcggcggccaggagagcgccctgcccctgagagagatcatcagaagactggagtag

SEQ ID NO: 92152 - DNA, 1284 bp, synthetic construct
  misc_feature 1..1284: note = Description of Artificial Sequence: Synthetic coding sequence
  source 1..1284: mol_type = other DNA
atgttccacctgagaacctgcgccgccaagctgagacccctgaccgccagccagaccgtgaagaccttcagccagaacagacccgccgccgccagaaccttccagcagatcagatgctacagcgcccccgtggccgccgagcccttcctgagcggcaccagcagcaactacgtggaggagatgtactgcgcctggctggagaaccccaagagcgtgcacaagagctgggacatcttcttcagaaacaccaacgccggcgccccccccggcaccgcctaccagagccccctgcccctgagcagaggcagcctggccgccgtggcccacgcccagagcctggtggaggcccagcccaacgtggacaagctggtggaggaccacctggccgtgcagagcctgatcagagcctaccagatcagaggccaccacgtggcccagctggaccccctgggcatcctggacgccgacctggacagcagcgtgcccgccgacatcatcagcagcaccgacaagctgggcttctacggcctggacgagagcgacctggacaaggtgttccacctgcccaccaccaccttcatcggcggccaggagagcgccctgcccctgagagagatcatcagaagactggagatggcctactgccagcacatcggcgtggagttcatgttcatcaacgacctggagcagtgccagtggatcagacagaagttcgagacccccggcatcatgcagttcaccaacgaggagaagagaaccctgctggccagactggtgagaagcaccagattcgaggagttcctgcagagaaagtggagcagcgagaagagattcggcctggagggctgcgaggtgctgatccccgccctgaagaccatcatcgacaagagcagcgagaacggcgtggactacgtgatcatgggcatgccccacagaggcagactgaacgtgctggccaacgtgatcagaaaggagctggagcagatcttctgccagttcgacagcaagctggaggccgccgacgagggcagcggcgacgtgaagtaccacctgggcatgtaccacagaagaatcaacagagtgaccgacagaaacatcaccctgagcctggtggccaaccccagccacctggaggccgccgaccccgtggtgatgggcaagaccaaggccgagcagttctactgcggcgacaccgagggcaagaaggtgagacccagagagagaagagccagacagatcgtgaaggccccctgcagcagcatggagttcagaagccccacctag

SEQ ID NO: 92153 - DNA, 2925 bp, synthetic construct
  misc_feature 1..2925: note = Description of Artificial Sequence: Synthetic coding sequence
  source 1..2925: mol_type = other DNA
atgtactgcgcctggctggagaaccccaagagcgtgcacaagagctgggacatcttcttcagaaacaccaacgccggcgccccccccggcaccgcctaccagagccccctgcccctgagcagaggcagcctggccgccgtggcccacgcccagagcctggtggaggcccagcccaacgtggacaagctggtggaggaccacctggccgtgcagagcctgatcagagcctaccaggtgagaggccaccacatcgccaagctggaccccctgggcatcagctgcgtgaacttcgacgacgcccccgtgaccgtgagcagcaacgtggacctggccgtgttcaaggagagactgagaatgctgaccgtgggcggcttctacggcctggacgagagcgacctggacaaggtgttccacctgcccaccaccaccttcatcggcggccaggagagcgccctgcccctgagagagatcatcagaagactggagatggcctactgccagcacatcggcgtggagttcatgttcatcaacgacctggagcagtgccagtggatcagacagaagttcgagacccccggcatcatgcagttcaccaacgaggagaagagaaccctgctggccagactggtgagaagcaccagattcgaggagttcctgcagagaaagtggagcagcgagaagagattcggcctggagggctgcgaggtgctgatccccgccctgaagaccatcatcgacaagagcagcgagaacggcgtggactacgtgatcatgggcatgccccacagaggcagactgaacgtgctggccaacgtgatcagaaaggagctggagcagatcttctgccagttcgacagcaagctggaggccgccgacgagggcagcggcgacgtgaagtaccacctgggcatgtaccacagaagaatcaacagagtgaccgacagaaacatcaccctgagcctggtggccaaccccagccacctggaggccgccgaccccgtggtgatgggcaagaccaaggccgagcagttctactgcggcgacaccgagggcaagaaggtgatgagcatcctgctgcacggcgacgccgccttcgccggccagggcatcgtgtacgagaccttccacctgagcgacctgcccagctacaccacccacggcaccgtgcacgtggtggtgaacaaccagatcggcttcaccaccgaccccagaatggccagaagcagcccctaccccaccgacgtggccagagtggtgaacgcccccatcttccacgtgaacagcgacgaccccgaggccgtgatgtacgtgtgcaaggtggccgccgagtggagaagcaccttccacaaggacgtggtggtggacctggtgtgctacagaagaaacggccacaacgagatggacgagcccatgttcacccagcccctgatgtacaagcagatcagaaagcagaagcccgtgctgcagaagtacgccgagctgctggtgagccagggcgtggtgaaccagcccgagtacgaggaggagatcagcaagtacgacaagatctgcgaggaggccttcgccagaagcaaggacgagaagatcctgcacatcaagcactggctggacagcccctggcccggcttcttcaccctggacggccagcccagaagcatgagctgccccagcaccggcctgaccgaggacatcctgacccacatcggcaacgtggccagcagcgtgcccgtggagaacttcaccatccacggcggcctgagcagaatcctgaagaccagaggcgagatggtgaagaacagaaccgtggactgggccctggccgagtacatggccttcggcagcctgctgaaggagggcatccacatcagactgagcggccaggacgtggagagaggcaccttcagccacagacaccacgtgctgcacgaccagaacgtggacaagagaacctgcatccccatgaaccacctgtggcccaaccaggccccctacaccgtgtgcaacagcagcctgagcgagtacggcgtgctgggcttcgagctgggcttcgccatggccagccccaacgccctggtgctgtgggaggcccagttcggcgacttccacaacaccgcccagtgcatcatcgaccagttcatctgccccggccaggccaagtgggtgagacagaacggcatcgtgctgctgctgccccacggcatggagggcatgggccccgagcacagcagcgccagacccgagagattcctgcagatgtgcaacgacgaccccgacgtgctgcccgacctgaaggaggccaacttcgacatcaaccagctgtacgactgcaactgggtggtggtgaactgcagcacccccggcaacttcttccacgtgctgagaagacagatcctgctgcccttcagaaagcccctgatcatcttcacccccaagagcctgctgagacaccccgaggccagaagcagcttcgacgagatgctgcccggcacccacttccagagagtgatccccgaggacggccccgccgcccagaaccccgagaacgtgaagagactgctgttctgcaccggcaaggtgtactacgacctgaccagagagagaaaggccagagacatggtgggccaggtggccatcaccagaatcgagcagctgagccccttccccttcgacctgctgctgaaggaggtgcagaagtaccccaacgccgagctggcctggtgccaggaggagcacaagaaccagggctactacgactacgtgaagcccagactgagaaccaccatcagcagagccaagcccgtgtggtacgccggcagagaccccgccgccgcccccgccaccggcaacaagaagacccacctgaccgagctgcagagactgctggacaccgccttcgacctggacgtgttcaagaacttcagctag

SEQ ID NO: 92154 - DNA, 3060 bp, synthetic construct
  misc_feature 1..3060: note = Description of Artificial Sequence: Synthetic coding sequence
  source 1..3060: mol_type = other DNA
atgttccacctgagaacctgcgccgccaagctgagacccctgaccgccagccagaccgtgaagaccttcagccagaacagacccgccgccgccagaaccttccagcagatcagatgctacagcgcccccgtggccgccgagcccttcctgagcggcaccagcagcaactacgtggaggagatgtactgcgcctggctggagaaccccaagagcgtgcacaagagctgggacatcttcttcagaaacaccaacgccggcgccccccccggcaccgcctaccagagccccctgcccctgagcagaggcagcctggccgccgtggcccacgcccagagcctggtggaggcccagcccaacgtggacaagctggtggaggaccacctggccgtgcagagcctgatcagagcctaccaggtgagaggccaccacatcgccaagctggaccccctgggcatcagctgcgtgaacttcgacgacgcccccgtgaccgtgagcagcaacgtgggcttctacggcctggacgagagcgacctggacaaggtgttccacctgcccaccaccaccttcatcggcggccaggagagcgccctgcccctgagagagatcatcagaagactggagatggcctactgccagcacatcggcgtggagttcatgttcatcaacgacctggagcagtgccagtggatcagacagaagttcgagacccccggcatcatgcagttcaccaacgaggagaagagaaccctgctggccagactggtgagaagcaccagattcgaggagttcctgcagagaaagtggagcagcgagaagagattcggcctggagggctgcgaggtgctgatccccgccctgaagaccatcatcgacaagagcagcgagaacggcgtggactacgtgatcatgggcatgccccacagaggcagactgaacgtgctggccaacgtgatcagaaaggagctggagcagatcttctgccagttcgacagcaagctggaggccgccgacgagggcagcggcgacgtgaagtaccacctgggcatgtaccacagaagaatcaacagagtgaccgacagaaacatcaccctgagcctggtggccaaccccagccacctggaggccgccgaccccgtggtgatgggcaagaccaaggccgagcagttctactgcggcgacaccgagggcaagaaggtgatgagcatcctgctgcacggcgacgccgccttcgccggccagggcatcgtgtacgagaccttccacctgagcgacctgcccagctacaccacccacggcaccgtgcacgtggtggtgaacaaccagatcggcttcaccaccgaccccagaatggccagaagcagcccctaccccaccgacgtggccagagtggtgaacgcccccatcttccacgtgaacagcgacgaccccgaggccgtgatgtacgtgtgcaaggtggccgccgagtggagaagcaccttccacaaggacgtggtggtggacctggtgtgctacagaagaaacggccacaacgagatggacgagcccatgttcacccagcccctgatgtacaagcagatcagaaagcagaagcccgtgctgcagaagtacgccgagctgctggtgagccagggcgtggtgaaccagcccgagtacgaggaggagatcagcaagtacgacaagatctgcgaggaggccttcgccagaagcaaggacgagaagatcctgcacatcaagcactggctggacagcccctggcccggcttcttcaccctggacggccagcccagaagcatgagctgccccagcaccggcctgaccgaggacatcctgacccacatcggcaacgtggccagcagcgtgcccgtggagaacttcaccatccacggcggcctgagcagaatcctgaagaccagaggcgagatggtgaagaacagaaccgtggactgggccctggccgagtacatggccttcggcagcctgctgaaggagggcatccacatcagactgagcggccaggacgtggagagaggcaccttcagccacagacaccacgtgctgcacgaccagaacgtggacaagagaacctgcatccccatgaaccacctgtggcccaaccaggccccctacaccgtgtgcaacagcagcctgagcgagtacggcgtgctgggcttcgagctgggcttcgccatggccagccccaacgccctggtgctgtgggaggcccagttcggcgacttccacaacaccgcccagtgcatcatcgaccagttcatctgccccggccaggccaagtgggtgagacagaacggcatcgtgctgctgctgccccacggcatggagggcatgggccccgagcacagcagcgccagacccgagagattcctgcagatgtgcaacgacgaccccgacgtgctgcccgacctgaaggaggccaacttcgacatcaaccagctgtacgactgcaactgggtggtggtgaactgcagcacccccggcaacttcttccacgtgctgagaagacagatcctgctgcccttcagaaagcccctgatcatcttcacccccaagagcctgctgagacaccccgaggccagaagcagcttcgacgagatgctgcccggcacccacttccagagagtgatccccgaggacggccccgccgcccagaaccccgagaacgtgaagagactgctgttctgcaccggcaaggtgtactacgacctgaccagagagagaaaggccagagacatggtgggccaggtggccatcaccagaatcgagcagctgagccccttccccttcgacctgctgctgaaggaggtgcagaagtaccccaacgccgagctggcctggtgccaggaggagcacaagaaccagggctactacgactacgtgaagcccagactgagaaccaccatcagcagagccaagcccgtgtggtacgccggcagagaccccgccgccgcccccgccaccggcaacaagaagacccacctgaccgagctgcagagactgctggacaccgccttcgacctggacgtgttcaagaacttcagctag

SEQ ID NO: 92155 - DNA, 2424 bp, synthetic construct
  misc_feature 1..2424: note = Description of Artificial Sequence: Synthetic coding sequence
  source 1..2424: mol_type = other DNA
atggccgccaccgagctgagaggcgtggtgggccccggccccgccgccatcgccgccctgggcggcggcggcgccggcccccccgtggtgggcggcggcggcggcagaggcgacgccggccccggcagcggcgccgccagcggcaccgtggtggccgccgccgccggcggccccggccccggcgccggcggcgtggccgccgccggccccgcccccgccccccccaccggcggcagcggcggcagcggcgccggcggcagcggcagcgccagagagggctggctgttcaagtggaccaactacatcaagggctaccagagaagatggttcgtgctgagcaacggcctgctgagctactacagaagcaaggccgagatgagacacacctgcagaggcaccatcaacctggccaccgccaacatcaccgtggaggacagctgcaacttcatcatcagcaacggcggcgcccagacctaccacctgaaggccagcagcgaggtggagagacagagatgggtgaccgccctggagctggccaaggccaaggccgtgaagatgctggccgagagcgacgagagcggcgacgaggagagcgtgagccagaccgacaagaccgagctgcagaacaccctgagaaccctgagcagcaaggtggaggacctgagcacctgcaacgacctgatcgccaagcacggcaccgccctgcagagaagcctgagcgagctggagagcctgaagctgcccgccgagagcaacgagaagatcaagcaggtgaacgagagagccaccctgttcagaatcaccagcaacgccatgatcaacgcctgcagagacttcctgatgctggcccagacccacagcaagaagtggcagaagagcctgcagtacgagagagaccagagaatcagactggaggagaccctggagcagctggccaagcagcacaaccacctggagagagccttcagaggcgccaccgtgctgcccgccaacacccccggcaacgtgggcagcggcaaggaccagtgctgcagcggcaagggcgacatgagcgacgaggacgacgagaacgagttcttcgacgcccccgagatcatcaccatgcccgagaacctgggccacaagagaaccggcagcaacatcagcggcgccagcagcgacatcagcctggacgagcagtacaagcaccagctggaggagaccaagaaggagaagagaaccagaatcccctacaagcccaactacagcctgaacctgtggagcatcatgaagaactgcatcggcaaggagctgagcaagatccccatgcccgtgaacttcaacgagcccctgagcatgctgcagagactgaccgaggacctggagtaccacgagctgctggacagagccgccaagtgcgagaacagcctggagcagctgtgctacgtggccgccttcaccgtgagcagctacagcaccaccgtgttcagaaccagcaagcccttcaaccccctgctgggcgagaccttcgagctggacagactggaggagaacggctacagaagcctgtgcgagcaggtgagccaccacccccccgccgccgcccaccacgccgagagcaagaacggctggaccctgagacaggagatcaagatcaccagcaagttcagaggcaagtacctgagcatcatgcccctgggcaccatccactgcatcttccacgccaccggccaccactacacctggaagaaggtgaccaccaccgtgcacaacatcatcgtgggcaagctgtggatcgaccagagcggcgagatcgacatcgtgaaccacaagaccggcgacaagtgcaacctgaagttcgtgccctacagctacttcagcagagacgtggccagaaaggtgaccggcgaggtgaccgaccccagcggcaaggtgcacttcgccctgctgggcacctgggacgagaagatggagtgcttcaaggtgcagcccgtgatcggcgagaacggcggcgacgccagacagagaggccacgaggccgaggagagcagagtgatgctgtggaagagaaaccccctgcccaagaacgccgagaacatgtactacttcagcgagctggccctgaccctgaacgcctgggagagcggcaccgcccccaccgacagcagactgagacccgaccagagactgatggagaacggcagatgggacgaggccaacgccgagaagcagagactggaggagaagcagagactgagcagaaagaagagagaggccgaggccatgaaggccaccgaggacggcaccccctacgacccctacaaggccctgtggttcgagagaaagaaggaccccgtgaccaaggagctgacccacatctacagaggcgagtactgggagtgcaaggagaagcaggactggagcagctgccccgacatcttctag

SEQ ID NO: 92156 - DNA, 1224 bp, synthetic construct
  misc_feature 1..1224: note = Description of Artificial Sequence: Synthetic coding sequence
  source 1..1224: mol_type = other DNA
atggccgccaccgagctgagaggcgtggtgggccccggccccgccgccatcgccgccctgggcggcggcggcgccggcccccccgtggtgggcggcggcggcggcagaggcgacgccggccccggcagcggcgccgccctgcagagactgaccgaggacctggagtaccacgagctgctggacagagccgccaagtgcgagaacagcctggagcagctgtgctacgtggccgccttcaccgtgagcagctacagcaccaccgtgttcagaaccagcaagcccttcaaccccctgctgggcgagaccttcgagctggacagactggaggagaacggctacagaagcctgtgcgagcaggtgagccaccacccccccgccgccgcccaccacgccgagagcaagaacggctggaccctgagacaggagatcaagatcaccagcaagttcagaggcaagtacctgagcatcatgcccctgggcaccatccactgcatcttccacgccaccggccaccactacacctggaagaaggtgaccaccaccgtgcacaacatcatcgtgggcaagctgtggatcgaccagagcggcgagatcgacatcgtgaaccacaagaccggcgacaagtgcaacctgaagttcgtgccctacagctacttcagcagagacgtggccagaaaggtgaccggcgaggtgaccgaccccagcggcaaggtgcacttcgccctgctgggcacctgggacgagaagatggagtgcttcaaggtgcagcccgtgatcggcgagaacggcggcgacgccagacagagaggccacgaggccgaggagagcagagtgatgctgtggaagagaaaccccctgcccaagaacgccgagaacatgtactacttcagcgagctggccctgaccctgaacgcctgggagagcggcaccgcccccaccgacagcagactgagacccgaccagagactgatggagaacggcagatgggacgaggccaacgccgagaagcagagactggaggagaagcagagactgagcagaaagaagagagaggccgaggccatgaaggccaccgaggacggcaccccctacgacccctacaaggccctgtggttcgagagaaagaaggaccccgtgaccaaggagctgacccacatctacagaggcgagtactgggagtgcaaggagaagcaggactggagcagctgccccgacatcttctag

SEQ ID NO: 92157 - DNA, 2751 bp, synthetic construct
  misc_feature 1..2751: note = Description of Artificial Sequence: Synthetic coding sequence
  source 1..2751: mol_type = other DNA
atgggcaaggccgccgcccccagcagaggcggcggctgcggcggcagaagcagaggcctgagcagcctgttcaccgtggtgccctgcctgagctgccacaccgccgcccccggcatgagcgccagcaccagcggcagcggccccgagcccaagccccagccccagcccgtgcccgagcccgagagaggccccctgagcgagcaggtgagcgaggccgtgagcgaggccgtgcccagaagcgagcccgtgagcgagaccaccagcgagcccgagcccggcgccggccagcccagcgagctgctgcagggcagcagacccggcagcgagagcagcagcggcgtgggcgccggccccttcaccaaggccgccagcgagcccctgagcagagccgtgggcagcgccaccttcctgagacccgagagcggcagcctgcccgccctgaagcccctgcccctgctgagacccggccaggccaagacccccctgggcgtgcccatgagcggcaccggcaccaccagcagcgcccccctggccctgctgcccctggacagcttcgagggctggctgctgaagtggaccaactacctgaagggctaccagagaagatggttcgtgctgggcaacggcctgctgagctactacagaaaccagggcgagatggcccacacctgcagaggcaccatcaacctgagcaccgcccacatcgacaccgaggacagctgcggcatcctgctgaccagcggcgccagaagctaccacctgaaggccagcagcgaggtggacagacagcagtggatcaccgccctggagctggccaaggccaaggccgtgagagtgatgaacacccacagcgacgacagcggcgacgacgacgaggccaccacccccgccgacaagagcgagctgcaccacaccctgaagaacctgagcctgaagctggacgacctgagcacctgcaacgacctgatcgccaagcacggcgccgccctgcagagaagcctgaccgagctggacggcctgaagatccccagcgagagcggcgagaagctgaaggtggtgaacgagagagccaccctgttcagaatcaccagcaacgccatgatcaacgcctgcagagacttcctggagctggccgagatccacagcagaaagtggcagagagccctgcagtacgagcaggagcagagagtgcacctggaggagaccatcgagcagctggccaagcagcacaacagcctggagagagccttccacagcgcccccggcagacccgccaaccccagcaagagcttcatcgagggcagcctgctgacccccaagggcgaggacagcgaggaggacgaggacaccgagtacttcgacgccatggaggacagcaccagcttcatcaccgtgatcaccgaggccaaggaggacagcagaaaggccgagggcagcaccggcaccagcagcgtggactggagcagcgccgacaacgtgctggacggcgccagcctggtgcccaagggcagcagcaaggtgaagagaagagtgagaatccccaacaagcccaactacagcctgaacctgtggagcatcatgaagaactgcatcggcagagagctgagcagaatccccatgcccgtgaacttcaacgagcccctgagcatgctgcagagactgaccgaggacctggagtaccaccacctgctggacaaggccgtgcactgcaccagcagcgtggagcagatgtgcctggtggccgccttcagcgtgagcagctacagcaccaccgtgcacagaatcgccaagcccttcaaccccatgctgggcgagaccttcgagctggacagactggacgacatgggcctgagaagcctgtgcgagcaggtgagccaccacccccccagcgccgcccactacgtgttcagcaagcacggctggagcctgtggcaggagatcaccatcagcagcaagttcagaggcaagtacatcagcatcatgcccctgggcgccatccacctggagttccaggccagcggcaaccactacgtgtggagaaagagcaccagcaccgtgcacaacatcatcgtgggcaagctgtggatcgaccagagcggcgacatcgagatcgtgaaccacaagaccaacgacagatgccagctgaagttcctgccctacagctacttcagcaaggaggccgccagaaaggtgaccggcgtggtgagcgacagccagggcaaggcccactacgtgctgagcggcagctgggacgagcagatggagtgcagcaaggtgatgcacagcagccccagcagccccagcagcgacggcaagcagaagaccgtgtaccagaccctgagcgccaagctgctgtggaagaagtaccccctgcccgagaacgccgagaacatgtactacttcagcgagctggccctgaccctgaacgagcacgaggagggcgtggcccccaccgacagcagactgagacccgaccagagactgatggagaagggcagatgggacgaggccaacaccgagaagcagagactggaggagaagcagagactgagcagaagaagaagactggaggcctgcggccccggcagcagctgcagcagcgaggaggagaaggaggccgacgcctacacccccctgtggttcgagaagagactggaccccctgaccggcgagatggcctgcgtgtacaagggcggctactgggaggccaaggagaagcaggactggcacatgtgccccaacatcttctag

SEQ ID NO: 92158 - DNA, 2625 bp, synthetic construct
  misc_feature 1..2625: note = Description of Artificial Sequence: Synthetic coding sequence
  source 1..2625: mol_type = other DNA
atgggcaaggccgccgcccccagcagaggcggcggctgcggcggcagaagcagaggcctgagcagcctgttcaccgtggtgccctgcctgagctgccacaccgccgcccccggcatgagcgccagcaccagcggcagcggccccgagcccaagccccagccccagcccgtgcccgagcccgagagaggccccctgagcgagcaggtgagcgaggccgtgagcgaggccgtgcccagaagcgagcccgtgagcgagaccaccagcgagcccgagcccggcgccggccagcccagcgagctgctgcagggcagcagacccggcagcgagagcagcagcggcgtgggcgccggccccttcaccaaggccgccagcgagcccctgagcagagccgtgggcagcgccaccttcctgagacccgagagcggcagcctgcccgccctgaagcccctgcccctgctgagacccggccaggccaagacccccctgggcgtgcccatgagcggcaccggcaccaccagcagcgcccccctggccctgctgcccctggacagcttcgagggctggctgctgaagtggaccaactacctgaagggctaccagagaagatggttcgtgctgggcaacggcctgctgagctactacagaaaccagggcgagatggcccacacctgcagaggcaccatcaacctgagcaccgcccacatcgacaccgaggacagctgcggcatcctgctgaccagcggcgccagaagctaccacctgaaggccagcagcgaggtggacagacagcagtggatcaccgccctggagctggccaaggccaaggccgtgagagtgatgaacacccacagcgacgacagcggcgacgacgacgaggccaccacccccgccgacaagagcgagctgcaccacaccctgaagaacctgagcctgaagctggacgacctgagcacctgcaacgacctgatcgccaagcacggcgccgccctgcagagaagcctgaccgagctggacggcctgaagatccccagcgagagcggcgagaagctgaaggtggtgaacgagagagccaccctgttcagaatcaccagcaacgccatgatcaacgcctgcagagacttcctggagctggccgagatccacagcagaaagtggcagagagccctgcagtacgagcaggagcagagagtgcacctggaggagaccatcgagcagctggccaagcagcacaacagcctggagagagccttccacagcgcccccggcagacccgccaaccccagcaagagcttcatcgagggcagcctgctgacccccaagggcgaggacagcgaggaggacgaggacaccgagtacttcgacgccatggaggacagcaccagcttcatcaccgtgatcaccgaggccaaggaggacagcagaaaggccgagggcagcaccggcaccagcagcgtggactggagcagcgccgacaacgtgaacttcaacgagcccctgagcatgctgcagagactgaccgaggacctggagtaccaccacctgctggacaaggccgtgcactgcaccagcagcgtggagcagatgtgcctggtggccgccttcagcgtgagcagctacagcaccaccgtgcacagaatcgccaagcccttcaaccccatgctgggcgagaccttcgagctggacagactggacgacatgggcctgagaagcctgtgcgagcaggtgagccaccacccccccagcgccgcccactacgtgttcagcaagcacggctggagcctgtggcaggagatcaccatcagcagcaagttcagaggcaagtacatcagcatcatgcccctgggcgccatccacctggagttccaggccagcggcaaccactacgtgtggagaaagagcaccagcaccgtgcacaacatcatcgtgggcaagctgtggatcgaccagagcggcgacatcgagatcgtgaaccacaagaccaacgacagatgccagctgaagttcctgccctacagctacttcagcaaggaggccgccagaaaggtgaccggcgtggtgagcgacagccagggcaaggcccactacgtgctgagcggcagctgggacgagcagatggagtgcagcaaggtgatgcacagcagccccagcagccccagcagcgacggcaagcagaagaccgtgtaccagaccctgagcgccaagctgctgtggaagaagtaccccctgcccgagaacgccgagaacatgtactacttcagcgagctggccctgaccctgaacgagcacgaggagggcgtggcccccaccgacagcagactgagacccgaccagagactgatggagaagggcagatgggacgaggccaacaccgagaagcagagactggaggagaagcagagactgagcagaagaagaagactggaggcctgcggccccggcagcagctgcagcagcgaggagggcgaggccggcagagagggcagacccggcggcgaggagagaggcgccagagtgggcgtgccccagggcagaatccccggcgagcaggccaccagcccccccaccagccccctgtgcctgcccagcagagagggcggcggctgcctgcacgccaccgtggtgtag

SEQ ID NO: 92159 - DNA, 2253 bp, synthetic construct
  misc_feature 1..2253: note = Description of Artificial Sequence: Synthetic coding sequence
  source 1..2253: mol_type = other DNA
atgcacagacagagaaccagaaccatgagcagcctggccgccaagagactgggcatgaacagaagacccgccggcagcggcggcggcggcggcgaggccgccacctggggccacagattctggagaccccaggagagacccaccgacagaaaccagggcgagatggcccacacctgcagaggcaccatcaacctgagcaccgcccacatcgacaccgaggacagctgcggcatcctgctgaccagcggcgccagaagctaccacctgaaggccagcagcgaggtggacagacagcagtggatcaccgccctggagctggccaaggccaaggccgtgagagtgatgaacacccacagcgacgacagcggcgacgacgacgaggccaccacccccgccgacaagagcgagctgcaccacaccctgaagaacctgagcctgaagctggacgacctgagcacctgcaacgacctgatcgccaagcacggcgccgccctgcagagaagcctgaccgagctggacggcctgaagatccccagcgagagcggcgagaagctgaaggtggtgaacgagagagccaccctgttcagaatcaccagcaacgccatgatcaacgcctgcagagacttcctggagctggccgagatccacagcagaaagtggcagagagccctgcagtacgagcaggagcagagagtgcacctggaggagaccatcgagcagctggccaagcagcacaacagcctggagagagccttccacagcgcccccggcagacccgccaaccccagcaagagcttcatcgagggcagcctgctgacccccaagggcgaggacagcgaggaggacgaggacaccgagtacttcgacgccatggaggacagcaccagcttcatcaccgtgatcaccgaggccaaggaggacagaaaggccgagggcagcaccggcaccagcagcgtggactggagcagcgccgacaacgtgctggacggcgccagcctggtgcccaagggcagcagcaaggtgaagagaagagtgagaatccccaacaagcccaactacagcctgaacctgtggagcatcatgaagaactgcatcggcagagagctgagcagaatccccatgcccgtgaacttcaacgagcccctgagcatgctgcagagactgaccgaggacctggagtaccaccacctgctggacaaggccgtgcactgcaccagcagcgtggagcagatgtgcctggtggccgccttcagcgtgagcagctacagcaccaccgtgcacagaatcgccaagcccttcaaccccatgctgggcgagaccttcgagctggacagactggacgacatgggcctgagaagcctgtgcgagcaggtgagccaccacccccccagcgccgcccactacgtgttcagcaagcacggctggagcctgtggcaggagatcaccatcagcagcaagttcagaggcaagtacatcagcatcatgcccctgggcgccatccacctggagttccaggccagcggcaaccactacgtgtggagaaagagcaccagcaccgtgcacaacatcatcgtgggcaagctgtggatcgaccagagcggcgacatcgagatcgtgaaccacaagaccaacgacagatgccagctgaagttcctgccctacagctacttcagcaaggaggccgccagaaaggtgaccggcgtggtgagcgacagccagggcaaggcccactacgtgctgagcggcagctgggacgagcagatggagtgcagcaaggtgatgcacagcagccccagcagccccagcagcgacggcaagcagaagaccgtgtaccagaccctgagcgccaagctgctgtggaagaagtaccccctgcccgagaacgccgagaacatgtactacttcagcgagctggccctgaccctgaacgagcacgaggagggcgtggcccccaccgacagcagactgagacccgaccagagactgatggagaagggcagatgggacgaggccaacaccgagaagcagagactggaggagaagcagagactgagcagaagaagaagactggaggcctgcggccccggcagcagctgcagcagcgaggaggagaaggaggccgacgcctacacccccctgtggttcgagaagagactggaccccctgaccggcgagatggcctgcgtgtacaagggcggctactgggaggccaaggagaagcaggactggcacatgtgccccaacatcttctag

SEQ ID NO: 92160 - DNA, 1980 bp, synthetic construct
  misc_feature 1..1980: note = Description of Artificial Sequence: Synthetic coding sequence
  source 1..1980: mol_type = other DNA
atgaagggcagaggctgctgggacaccgccagcgtgagaagcttctgcagcagcggctgcctgaacaagttcaagaaggacgacagcggcgacgacgacgaggccaccacccccgccgacaagagcgagctgcaccacaccctgaagaacctgagcctgaagctggacgacctgagcacctgcaacgacctgatcgccaagcacggcgccgccctgcagagaagcctgaccgagctggacggcctgaagatccccagcgagagcggcgagaagctgaaggtggtgaacgagagagccaccctgttcagaatcaccagcaacgccatgatcaacgcctgcagagacttcctggagctggccgagatccacagcagaaagtggcagagagccctgcagtacgagcaggagcagagagtgcacctggaggagaccatcgagcagctggccaagcagcacaacagcctggagagagccttccacagcgcccccggcagacccgccaaccccagcaagagcttcatcgagggcagcctgctgacccccaagggcgaggacagcgaggaggacgaggacaccgagtacttcgacgccatggaggacagcaccagcttcatcaccgtgatcaccgaggccaaggaggacagcagaaaggccgagggcagcaccggcaccagcagcgtggactggagcagcgccgacaacgtgctggacggcgccagcctggtgcccaagggcagcagcaaggtgaagagaagagtgagaatccccaacaagcccaactacagcctgaacctgtggagcatcatgaagaactgcatcggcagagagctgagcagaatccccatgcccgtgaacttcaacgagcccctgagcatgctgcagagactgaccgaggacctggagtaccaccacctgctggacaaggccgtgcactgcaccagcagcgtggagcagatgtgcctggtggccgccttcagcgtgagcagctacagcaccaccgtgcacagaatcgccaagcccttcaaccccatgctgggcgagaccttcgagctggacagactggacgacatgggcctgagaagcctgtgcgagcaggtgagccaccacccccccagcgccgcccactacgtgttcagcaagcacggctggagcctgtggcaggagatcaccatcagcagcaagttcagaggcaagtacatcagcatcatgcccctgggcgccatccacctggagttccaggccagcggcaaccactacgtgtggagaaagagcaccagcaccgtgcacaacatcatcgtgggcaagctgtggatcgaccagagcggcgacatcgagatcgtgaaccacaagaccaacgacagatgccagctgaagttcctgccctacagctacttcagcaaggaggccgccagaaaggtgaccggcgtggtgagcgacagccagggcaaggcccactacgtgctgagcggcagctgggacgagcagatggagtgcagcaaggtgatgcacagcagccccagcagccccagcagcgacggcaagcagaagaccgtgtaccagaccctgagcgccaagctgctgtggaagaagtaccccctgcccgagaacgccgagaacatgtactacttcagcgagctggccctgaccctgaacgagcacgaggagggcgtggcccccaccgacagcagactgagacccgaccagagactgatggagaagggcagatgggacgaggccaacaccgagaagcagagactggaggagaagcagagactgagcagaagaagaagactggaggcctgcggccccggcagcagctgcagcagcgaggaggccgagaaggaggccgacgcctacacccccctgtggttcgagaagagactggaccccctgaccggcgagatggcctgcgtgtacaagggcggctactgggaggccaaggagaagcaggactggcacatgtgccccaacatcttctag

SEQ ID NO: 92161 - DNA, 1383 bp, synthetic construct
  misc_feature 1..1383: note = Description of Artificial Sequence: Synthetic coding sequence
  source 1..1383: mol_type = other DNA
atggaggacagcaccagcttcatcaccgtgatcaccgaggccaaggaggacagaaaggccgagggcagcaccggcaccagcagcgtggactggagcagcgccgacaacgtgctggacggcgccagcctggtgcccaagggcagcagcaaggtgaagagaagagtgagaatccccaacaagcccaactacagcctgaacctgtggagcatcatgaagaactgcatcggcagagagctgagcagaatccccatgcccgtgaacttcaacgagcccctgagcatgctgcagagactgaccgaggacctggagtaccaccacctgctggacaaggccgtgcactgcaccagcagcgtggagcagatgtgcctggtggccgccttcagcgtgagcagctacagcaccaccgtgcacagaatcgccaagcccttcaaccccatgctgggcgagaccttcgagctggacagactggacgacatgggcctgagaagcctgtgcgagcaggtgagccaccacccccccagcgccgcccactacgtgttcagcaagcacggctggagcctgtggcaggagatcaccatcagcagcaagttcagaggcaagtacatcagcatcatgcccctgggcgccatccacctggagttccaggccagcggcaaccactacgtgtggagaaagagcaccagcaccgtgcacaacatcatcgtgggcaagctgtggatcgaccagagcggcgacatcgagatcgtgaaccacaagaccaacgacagatgccagctgaagttcctgccctacagctacttcagcaaggaggccgccagaaaggtgaccggcgtggtgagcgacagccagggcaaggcccactacgtgctgagcggcagctgggacgagcagatggagtgcagcaaggtgatgcacagcagccccagcagccccagcagcgacggcaagcagaagaccgtgtaccagaccctgagcgccaagctgctgtggaagaagtaccccctgcccgagaacgccgagaacatgtactacttcagcgagctggccctgaccctgaacgagcacgaggagggcgtggcccccaccgacagcagactgagacccgaccagagactgatggagaagggcagatgggacgaggccaacaccgagaagcagagactggaggagaagcagagactgagcagaagaagaagactggaggcctgcggccccggcagcagctgcagcagcgaggaggagaaggaggccgacgcctacacccccctgtggttcgagaagagactggaccccctgaccggcgagatggcctgcgtgtacaagggcggctactgggaggccaaggagaagcaggactggcacatgtgccccaacatcttctag

SEQ ID NO: 92162 - DNA, 2295 bp, synthetic construct
  misc_feature 1..2295: note = Description of Artificial Sequence: Synthetic coding sequence
  source 1..2295: mol_type = other DNA
atggagagagccgtgcagggcaccgacggcggcggcggcagcaacagcagcagcagaagcagcagcagagccaccagcgccggcagcagccccagctgcagcctggccggcagaggcgtgagcagcagaagcgccgccgccggcctgggcggcggcggcagcagaagcagccccggcagcgtggccgccagccccagcggcggcggcggcagaagaagagagcccgccctggagggcgtgctgagcaagtacaccaacctgctgcagggctggcagaacagatacttcgtgctggacttcgaggccggcatcctgcagtacttcgtgaacgagcagagcaagcaccagaagcccagaggcgtgctgagcctgagcggcgccatcgtgagcctgagcgacgaggccccccacatgctggtggtgtacagcgccaacggcgagatgttcaagctgagagccgccgacgccaaggagaagcagttctgggtgacccagctgagagcctgcgccaagtaccacatggagatgaacagcaagagcgcccccagcagcagaagcagaagcctgaccctgctgccccacggcacccccaacagcgccagcccctgcagccagagacacctgagcgtgggcgcccccggcgtggtgaccatcacccaccacaagagccccgccgccgccagaagagccaagagccagtacagcggccagctgcacgaggtgagagagatgatgaaccaggtggagggccagcagaagaacctggtgcacgccatcgagagcctgcccggcagcggccccctgaccgccctggaccaggacctgctgctgctgaaggccaccagcgccgccaccctgagctgcctgggcgagtgcctgaacctgctgcagcagagcgtgcaccaggccggccagcccagccagaagcccggcgccagcgagaacatcctgggctggcacggcagcaagagccacagcaccgagcagctgaagaacggcaccctgggcagcctgcccagcgccagcgccaacatcacctgggccatcctgcccaacagcgccgaggacgagcagaccagccagcccgagcccgagcccaacagcggcagcgagctggtgctgagcgaggacgagaagagcgacaacgaggacaaggaggagaccgagctgggcgtgatggaggaccagagaagcatcatcctgcacctgatcagccagctgaagctgggcatggacctgaccaaggtggtgctgcccaccttcatcctggagaagagaagcctgctggagatgtacgccgacttcatggcccaccccgacctgctgctggccatcaccgccggcgccacccccgaggagagagtgatctgcttcgtggagtactacctgaccgccttccacgagggcagaaagggcgccctggccaagaagccctacaaccccatcatcggcgagaccttccactgcagctgggaggtgcccaaggacagagtgaagcccaagagaaccgccagcagaagccccgccagctgccacgagcaccccatggccgacgaccccagcaagagctacaagctgagattcgtggccgagcaggtgagccaccacccccccatcagctgcttctactgcgagtgcgaggagaagagactgtgcgtgaacacccacgtgtggaccaagagcaagttcatgggcatgagcgtgggcgtgagcatgatcggcgagggcgtgctgagactgctggagcacggcgaggagtacgtgttcaccctgcccagcgcctacgccagaagcatcctgaccatcccctgggtggagctgggcggcaaggtgagcatcaactgcgccaagaccggctacagcgccaccgtgatcttccacaccaagcccttctacggcggcaaggtgcacagagtgaccgccgaggtgaagcacaaccccaccaacaccatcgtgtgcaaggcccacggcgagtggaacggcaccctggagttcacctacaacaacggcgagaccaaggtgatcgacaccaccaccctgcccgtgtaccccaagaagatcagacccctggagaagcagggccccatggagagcagaaacctgtggagagaggtgaccagatacctgagactgggcgacatcgacgccgccaccgagcagaagagacacctggaggagaagcagagagtggaggagagaaagagagagaacctgagaaccccctggaagcccaagtacttcatccaggagggcgacggctgggtgtacttcaaccccctgtggaaggcccactag

SEQ ID NO: 92163 - DNA, 2103 bp, synthetic construct
  misc_feature 1..2103: note = Description of Artificial Sequence: Synthetic coding sequence
  source 1..2103: mol_type = other DNA
atggagagagccgtgcagggcaccgacggcggcggcggcagcaacagcagcagcagaagcagcagcagagccaccagcgccggcagcagccccagctgcagcctggccggcagaggcgtgagcagcagaagcgccgccgccggcctgggcggcggcggcagcagaagcagccccggcagcgtggccgccagccccagcggcggcggcggcagaagaagagagcccgccctggagggcgtgctgagcaagtacaccaacctgctgcagggctggcagaacagatacttcgtgctggacttcgaggccggcatcctgcagtacttcgtgaacgagcagagcaagcaccagaagcccagaggcgtgctgagcctgagcggcgccatcgtgagcctgagcgacgaggccccccacatgctggtggtgtacagcgccaacggcgagatgttcaagctgagagccgccgacgccaaggagaagcagttctgggtgacccagctgagagcctgcgccaagtaccacatggagatgaacagcaagatgatgaaccaggtggagggccagcagaagaacctggtgcacgccatcgagagcctgcccggcagcggccccctgaccgccctggaccaggacctgctgctgctgaaggccaccagcgccgccaccctgagctgcctgggcgagtgcctgaacctgctgcagcagagcgtgcaccaggccggccagcccagccagaagcccggcgccagcgagaacatcctgggctggcacggcagcaagagccacagcaccgagcagctgaagaacggcaccctgggcagcctgcccagcgccagcgccaacatcacctgggccatcctgcccaacagcgccgaggacgagcagaccagccagcccgagcccgagcccaacagcggcagcgagctggtgctgagcgaggacgagaagagcgacaacgaggacaaggaggagaccgagctgggcgtgatggaggaccagagaagcatcatcctgcacctgatcagccagctgaagctgggcatggacctgaccaaggtggtgctgcccaccttcatcctggagaagagaagcctgctggagatgtacgccgacttcatggcccaccccgacctgctgctggccatcaccgccggcgccacccccgaggagagagtgatctgcttcgtggagtactacctgaccgccttccacgagggcagaaagggcgccctggccaagaagccctacaaccccatcatcggcgagaccttccactgcagctgggaggtgcccaaggacagagtgaagcccaagagaaccgccagcagaagccccgccagctgccacgagcaccccatggccgacgaccccagcaagagctacaagctgagattcgtggccgagcaggtgagccaccacccccccatcagctgcttctactgcgagtgcgaggagaagagactgtgcgtgaacacccacgtgtggaccaagagcaagttcatgggcatgagcgtgggcgtgagcatgatcggcgagggcgtgctgagactgctggagcacggcgaggagtacgtgttcaccctgcccagcgcctacgccagaagcatcctgaccatcccctgggtggagctgggcggcaaggtgagcatcaactgcgccaagaccggctacagcgccaccgtgatcttccacaccaagcccttctacggcggcaaggtgcacagagtgaccgccgaggtgaagcacaaccccaccaacaccatcgtgtgcaaggcccacggcgagtggaacggcaccctggagttcacctacaacaacggcgagaccaaggtgatcgacaccaccaccctgcccgtgtaccccaagaagatcagacccctggagaagcagggccccatggagagcagaaacctgtggagagaggtgaccagatacctgagactgggcgacatcgacgccgccaccgagcagaagagacacctggaggagaagcagagagtggaggagagaaagagagagaacctgagaaccccctggaagcccaagtacttcatccaggagggcgacggctgggtgtacttcaaccccctgtggaaggcccactag

SEQ ID NO: 92164 - DNA, 2244 bp, synthetic construct
  misc_feature 1..2244: note = Description of Artificial Sequence: Synthetic coding sequence
  source 1..2244: mol_type = other DNA
atgcagggcggcgagcccgtgagcaccatgaaggtgagcgagagcgagggcaagctggagggccaggccaccgccgtgacccccaacaagaacagcagctgcggcggcggcatcagcagcagcagcagcagcagaggcggcagcgccaagggctggcagtacagcgaccacatggagaacgtgtacggctacctgatgaagtacaccaacctggtgaccggctggcagtacagattcttcgtgctgaacaacgaggccggcctgctggagtacttcgtgaacgagcagagcagaaaccagaagcccagaggcaccctgcagctggccggcgccgtgatcagccccagcgacgaggacagccacaccttcaccgtgaacgccgccagcggcgagcagtacaagctgagagccaccgacgccaaggagagacagcactgggtgagcagactgcagatctgcacccagcaccacaccgaggccatcggcaagaacaacccccccctgaagagcagaagcttcagcctggccagcagcagcaacagccccatcagccagagaagacccagccagaacgccatcagcttcttcaacgtgggccacagcaagctgcagagcctgagcaagagaaccaacctgccccccgaccacctggtggaggtgagagagatgatgagccacgccgagggccagcagagagacctgatcagaagaatcgagtgcctgcccaccagcggccacctgagcagcctggaccaggacctgctgatgctgaaggccaccagcatggccaccatgaactgcctgaacgactgcttccacatcctgcagctgcagcacgccagccaccagaagggcagcctgcccagcggcaccaccatcgagtggctggagcccaagatcagcctgagcaaccactacaagaacggcgccgaccagcccttcgccaccgaccagagcaagcccgtggccgtgcccgaggagcagcccgtggccgagagcggcctgctggccagagagcccgaggagatcaacgccgacgacgagatcgaggacacctgcgaccacaaggaggacgacctgggcgccgtggaggagcagagaagcgtgatcctgcacctgctgagccagctgaagctgggcatggacctgaccagagtggtgctgcccaccttcatcctggagaagagaagcctgctggagatgtacgccgacttcatgagccaccccgacctgttcatcgccatcaccaacggcgccaccgccgaggacagaatgatcagattcgtggagtactacctgaccagcttccacgagggcagaaagggcgccatcgccaagaagccctacaaccccatcatcggcgagaccttccactgcagctggaagatgcccaagagcgaggtggccagcagcgtgttcagcagcagcagcacccagggcgtgaccaaccacgcccccctgagcggcgagagcctgacccaggtgggcagcgactgctacaccgtgagattcgtggccgagcaggtgagccaccacccccccgtgagcggcttctacgccgagtgcaccgagagaaagatgtgcgtgaacgcccacgtgtggaccaagagcaagttcctgggcatgagcatcggcgtgaccatggtgggcgagggcatcctgagcctgctggagcacggcgaggagtacaccttcagcctgccctgcgcctacgccagaagcatcctgaccgtgccctgggtggagctgggcggcaaggtgagcgtgaactgcgccaagaccggctacagcgccagcatcaccttccacaccaagcccttctacggcggcaagctgcacagagtgaccgccgaggtgaagcacaacatcaccaacaccgtggtgtgcagagtgcagggcgagtggaacagcgtgctggagttcacctacagcaacggcgagaccaagtacgtggacctgaccaagctggccgtgaccaagaagagagtgagacccctggagaagcaggaccccttcgagagcagaagactgtggaagaacgtgaccgacagcctgagagagagcgagatcgacaaggccaccgagcacaagcacaccctggaggagagacagagaaccgaggagagacacagaaccgagaccggcaccccctggaagaccaagtacttcatcaaggagggcgacggctgggtgtaccacaagcccctgtggaagatcatccccaccacccagcccgccgagtag

SEQ ID NO: 92165 - DNA, 2853 bp, synthetic construct
  misc_feature 1..2853: note = Description of Artificial Sequence: Synthetic coding sequence
  source 1..2853: mol_type = other DNA
atgaacaccgaggccgagcagcagctgctgcaccacgccagaaacggcaacgccgaggaggtgagacagctgctggagaccatggccagaaacgaggtgatcgccgacatcaactgcaagggcagaagcaagagcaacctgggctggacccccctgcacctggcctgctacttcggccacagacaggtggtgcaggacctgctgaaggccggcgccgaggtgaacgtgctgaacgacatgggcgacacccccctgcacagagccgccttcaccggcagaaaggagctggtgatgctgctgctggagtacaacgccgacaccaccatcgtgaacggcagcggccagaccgccaaggaggtgacccacgccgaggagatcagaagcatgctggaggccgtggagagaacccagcagagaaagctggaggagctgctgctggccgccgccagagagggcaagaccaccgagctgaccgccctgctgaacagacccaacccccccgacgtgaactgcagcgaccagctgggcaacacccccctgcactgcgccgcctacagagcccacaagcagtgcgccctgaagctgctgagaagcggcgccgaccccaacctgaagaacaagaacgaccagaagcccctggacctggcccagggcgccgagatgaagcacatcctggtgggcaacaaggtgatctacaaggccctgaagagatacgagggccccctgtggaagagcagcagattcttcggctggagactgttctgggtggtgctggagcacggcgtgctgagctggtacagaaagcagcccgacgccgtgcacaacatctacagacagggctgcaagcacctgacccaggccgtgtgcaccgtgaagagcaccgacagctgcctgttcttcatcaagtgcttcgacgacaccatccacggcttcagagtgcccaagaacagcctgcagcagagcagagaggactggctggaggccatcgaggagcacagcgcctacagcacccactactgcagccaggaccagctgaccgacgaggaggaggaggacaccgtgagcgccgccgacctgaagaagagcctggagaaggcccagagctgccagcagagactggacagagagatcagcaacttcctgaagatgatcaaggagtgcgacatggccaaggagatgctgcccagcttcctgcagaaggtggaggtggtgagcgaggccagcagagagacctgcgtggccctgaccgactgcctgaacctgttcaccaagcaggagggcgtgagaaacttcaagctggagcaggagcaggagaagaacaagatcctgagcgaggccctggagaccctggccaccgagcaccacgagctggagcagagcctggtgaagggcagcccccccgccagcatcctgagcgaggacgagttctacgacgccctgagcgacagcgagagcgagagaagcctgagcagactggaggccgtgaccgccagaagcttcgaggaggagggcgagcacctgggcagcagaaagcacagaatgagcgaggagaaggactgcggcggcggcgacgccctgagcaacggcatcaagaagcacagaaccagcctgcccagccccatgttcagcagaaacgacttcagcatctggagcatcctgagaaagtgcatcggcatggagctgagcaagatcaccatgcccgtgatcttcaacgagcccctgagcttcctgcagagactgaccgagtacatggagcacacctacctgatccacaaggccagcagcctgagcgaccccgtggagagaatgcagtgcgtggccgccttcgccgtgagcgccgtggccagccagtgggagagaaccggcaagcccttcaaccccctgctgggcgagacctacgagctggtgagagacgacctgggcttcagactgatcagcgagcaggtgagccaccacccccccatcagcgccttccacgccgagggcctgaacaacgacttcatcttccacggcagcatctaccccaagctgaagttctggggcaagagcgtggaggccgagcccaagggcaccatcaccctggagctgctggagcacaacgaggcctacacctggaccaaccccacctgctgcgtgcacaacatcatcgtgggcaagctgtggatcgagcagtacggcaacgtggagatcatcaaccacaagaccggcgacaagtgcgtgctgaacttcaagccctgcggcctgttcggcaaggagctgcacaaggtggagggctacatccaggacaagagcaagaagaagctgtgcgccctgtacggcaagtggaccgagtgcctgtacagcgtggaccccgccaccttcgacgcctacaagaagaacgacaagaagaacaccgaggagaagaagaacagcaagcagatgagcaccagcgaggagctggacgagatgcccgtgcccgacagcgagagcgtgttcatcatccccggcagcgtgctgctgtggagaatcgcccccagaccccccaacagcgcccagatgtacaacttcaccagcttcgccatggtgctgaacgaggtggacaaggacatggagagcgtgatccccaagaccgactgcagactgagacccgacatcagagccatggagaacggcgagatcgaccaggccagcgaggagaagaagagactggaggagaagcagagagccgccagaaagaacagaagcaagagcgaggaggactggaagaccagatggttccaccagggccccaacccctacaacggcgcccaggactggatctacagcggcagctactgggacagaaactacttcaacctgcccgacatctactag

SEQ ID NO: 92166 - DNA, 1707 bp, synthetic construct
  misc_feature 1..1707: note = Description of Artificial Sequence: Synthetic coding sequence
  source 1..1707: mol_type = other DNA
atgatcaaggagtgcgacatggccaaggagatgctgcccagcttcctgcagaaggtggaggtggtgagcgaggccagcagagagacctgcgtggccctgaccgactgcctgaacctgttcaccaagcaggagggcgtgagaaacttcaagctggagcaggagcaggagaagaacaagatcctgagcgaggccctggagaccctggccaccgagcaccacgagctggagcagagcctggtgaagggcagcccccccgccagcatcctgagcgaggacgagttctacgacgccctgagcgacagcgagagcgagagaagcctgagcagactggaggccgtgaccgccagaagcttcgaggaggagggcgagcacctgggcagcagaaagcacagaatgagcgaggagaaggactgcggcggcggcgacgccctgagcaacggcatcaagaagcacagaaccagcctgcccagccccatgttcagcagaaacgacttcagcatctggagcatcctgagaaagtgcatcggcatggagctgagcaagatcaccatgcccgtgatcttcaacgagcccctgagcttcctgcagagactgaccgagtacatggagcacacctacctgatccacaaggccagcagcctgagcgaccccgtggagagaatgcagtgcgtggccgccttcgccgtgagcgccgtggccagccagtgggagagaaccggcaagcccttcaaccccctgctgggcgagacctacgagctggtgagagacgacctgggcttcagactgatcagcgagcaggtgagccaccacccccccatcagcgccttccacgccgagggcctgaacaacgacttcatcttccacggcagcatctaccccaagctgaagttctggggcaagagcgtggaggccgagcccaagggcaccatcaccctggagctgctggagcacaacgaggcctacacctggaccaaccccacctgctgcgtgcacaacatcatcgtgggcaagctgtggatcgagcagtacggcaacgtggagatcatcaaccacaagaccggcgacaagtgcgtgctgaacttcaagccctgcggcctgttcggcaaggagctgcacaaggtggagggctacatccaggacaagagcaagaagaagctgtgcgccctgtacggcaagtggaccgagtgcctgtacagcgtggaccccgccaccttcgacgcctacaagaagaacgacaagaagaacaccgaggagaagaagaacagcaagcagatgagcaccagcgaggagctggacgagatgcccgtgcccgacagcgagagcgtgttcatcatccccggcagcgtgctgctgtggagaatcgcccccagaccccccaacagcgcccagatgtacaacttcaccagcttcgccatggtgctgaacgaggtggacaaggacatggagagcgtgatccccaagaccgactgcagactgagacccgacatcagagccatggagaacggcgagatcgaccaggccagcgaggagaagaagagactggaggagaagcagagagccgccagaaagaacagaagcaagagcgaggaggactggaagaccagatggttccaccagggccccaacccctacaacggcgcccaggactggatctacagcggcagctactgggacagaaactacttcaacctgcccgacatctactag

SEQ ID NO: 92167 - DNA, 303 bp, synthetic construct
  misc_feature 1..303: note = Description of Artificial Sequence: Synthetic coding sequence
  source 1..303: mol_type = other DNA
atgaacaccgaggccgagcagcagctgctgcaccacgccagaaacggcaacgccgaggaggtgagacagctgctggagaccatggccagaaacgaggtgatcgccgacatcaactgcaagggcagaagcaagagcaacctgggctggacccccctgcacctggcctgctacttcggccacagacaggtggtgcaggacctgctgaaggccggcgccgaggtgaacgtgctgaacgacatgggcgacacccccctgcacagagccgccttcaccggcagaaagatctgcagccagggcagctag

SEQ ID NO: 92168 - DNA, 1314 bp, synthetic construct
  misc_feature 1..1314: note = Description of Artificial Sequence: Synthetic coding sequence
  source 1..1314: mol_type = other DNA
atgagcgaggagaaggactgcggcggcggcgacgccctgagcaacggcatcaagaagcacagaaccagcctgcccagccccatgttcagcagaaacgacttcagcatctggagcatcctgagaaagtgcatcggcatggagctgagcaagatcaccatgcccgtgatcttcaacgagcccctgagcttcctgcagagactgaccgagtacatggagcacacctacctgatccacaaggccagcagcctgagcgaccccgtggagagaatgcagtgcgtggccgccttcgccgtgagcgccgtggccagccagtgggagagaaccggcaagcccttcaaccccctgctgggcgagacctacgagctggtgagagacgacctgggcttcagactgatcagcgagcaggtgagccaccacccccccatcagcgccttccacgccgagggcctgaacaacgacttcatcttccacggcagcatctaccccaagctgaagttctggggcaagagcgtggaggccgagcccaagggcaccatcaccctggagctgctggagcacaacgaggcctacacctggaccaaccccacctgctgcgtgcacaacatcatcgtgggcaagctgtggatcgagcagtacggcaacgtggagatcatcaaccacaagaccggcgacaagtgcgtgctgaacttcaagccctgcggcctgttcggcaaggagctgcacaaggtggagggctacatccaggacaagagcaagaagaagctgtgcgccctgtacggcaagtggaccgagtgcctgtacagcgtggaccccgccaccttcgacgcctacaagaagaacgacaagaagaacaccgaggagaagaagaacagcaagcagatgagcaccagcgaggagctggacgagatgcccgtgcccgacagcgagagcgtgttcatcatccccggcagcgtgctgctgtggagaatcgcccccagaccccccaacagcgcccagatgtacaacttcaccagcttcgccatggtgctgaacgaggtggacaaggacatggagagcgtgatccccaagaccgactgcagactgagacccgacatcagagccatggagaacggcgagatcgaccaggccagcgaggagaagaagagactggaggagaagcagagagccgccagaaagaacagaagcaagagcgaggaggactggaagaccagatggttccaccagggccccaacccctacaacggcgcccaggactggatctacagcggcagctactgggacagaaactacttcaacctgcccgacatctactag

SEQ ID NO: 92169 - DNA, 345 bp, synthetic construct
  misc_feature 1..345: note = Description of Artificial Sequence: Synthetic coding sequence
  source 1..345: mol_type = other DNA
atgcagagcgtggccgccttcgccgtgagcgccgtggccagccagtgggagagaaccggcaagcccttcaaccccctgctgggcgagacctacgagctgatcagagaggacctgggcttcagattcatcagcgagcaggtgagccaccacccccccatcagcgccttccacagcgagggcctgaaccacgacttcctgttccacggcagcatctaccccaagctgaagttctggggcaagagcgtggaggccgagcccagaggcaccatcaccctggagctgctgaacgtgaaccagagacacctgagagccaagcacaagagccccaccaacgccggcagatag

SEQ ID NO: 92170 - DNA, 1443 bp, synthetic construct
  misc_feature 1..1443: note = Description of Artificial Sequence: Synthetic coding sequence
  source 1..1443: mol_type = other DNA
atgaacggcgaggaggagttcttcgacgccgtgaccggcttcgacagcgacaacagcagcggcgagttcagcgaggccaaccagaaggtgaccggcatgatcgacctggacaccagcaagaacaacagaatcggcaagaccggcgagagacccagccaggagaacggcatccagaagcacagaaccagcctgcccgcccccatgttcagcagaagcgacttcagcgtgtggaccatcctgaagaagtgcgtgggcctggagctgagcaagatcaccatgcccatcgccttcaacgagcccctgagcttcctgcagagaatcaccgagtacatggagcacgtgtacctgatccacagagccagctgccagccccagcccctggagagaatgcagagcgtggccgccttcgccgtgagcgccgtggccagccagtgggagagaaccggcaagcccttcaaccccctgctgggcgagacctacgagctgatcagagaggacctgggcttcagattcatcagcgagcaggtgagccaccacccccccatcagcgccttccacagcgagggcctgaaccacgacttcctgttccacggcagcatctaccccaagctgaagttctggggcaagagcgtggaggccgagcccagaggcaccatcaccctggagctgctgaagcacaacgaggcctacacctggaccaaccccacctgctgcgtgcacaacgtgatcatcggcaagctgtggatcgagcagtacggcaccgtggagatcctgaaccacagaaccggccacaagtgcgtgctgcacttcaagccctgcggcctgttcggcaaggagctgcacaaggtggagggccacatccaggacaagaacaagaagaagctgttcatgatctacggcaagtggaccgagtgcctgtggggcatcgaccccgtgagctacgagagcttcaagaagcaggagagaagaggcgaccacctgagaaaggccaagctggacgaggacagcggcaaggccgacagcgacgtggccgacgacgtgcccgtggcccaggagaccgtgcaggtgatccccggcagcaagctgctgtggagaatcaacaccagaccccccaacagcgcccagatgtacaacttcaccagcttcaccgtgagcctgaacgagctggagaccggcatggagaagaccctgccccccaccgactgcagactgagacccgacatcagaggcatggagaacggcaacatggacctggccagccaggagaaggagagactggaggagaagcagagagaggccagaagagagagagccaaggaggaggccgagtggcagaccagatggttctaccccggcaacaacccctacaccggcacccccgactggctgtacgccggcgactacttcgagagaaacttcagcgactgccccgacatctactag

SEQ ID NO: 92171 - DNA, 1407 bp, synthetic construct
  misc_feature 1..1407: note = Description of Artificial Sequence: Synthetic coding sequence
  source 1..1407: mol_type = other DNA
atgaacggcgaggaggagttcttcgacgccgtgaccgaggccaaccagaaggtgaccggcatgatcgacctggacaccagcaagaacaacagaatcggcaagaccggcgagagacccagccaggagaacggcatccagaagcacagaaccagcctgcccgcccccatgttcagcagaagcgacttcagcgtgtggaccatcctgaagaagtgcgtgggcctggagctgagcaagatcaccatgcccatcgccttcaacgagcccctgagcttcctgcagagaatcaccgagtacatggagcacgtgtacctgatccacagagccagctgccagccccagcccctggagagaatgcagagcgtggccgccttcgccgtgagcgccgtggccagccagtgggagagaaccggcaagcccttcaaccccctgctgggcgagacctacgagctgatcagagaggacctgggcttcagattcatcagcgagcaggtgagccaccacccccccatcagcgccttccacagcgagggcctgaaccacgacttcctgttccacggcagcatctaccccaagctgaagttctggggcaagagcgtggaggccgagcccagaggcaccatcaccctggagctgctgaagcacaacgaggcctacacctggaccaaccccacctgctgcgtgcacaacgtgatcatcggcaagctgtggatcgagcagtacggcaccgtggagatcctgaaccacagaaccggccacaagtgcgtgctgcacttcaagccctgcggcctgttcggcaaggagctgcacaaggtggagggccacatccaggacaagaacaagaagaagctgttcatgatctacggcaagtggaccgagtgcctgtggggcatcgaccccgtgagctacgagagcttcaagaagcaggagagaagaggcgaccacctgagaaaggccaagctggacgaggacagcggcaaggccgacagcgacgtggccgacgacgtgcccgtggcccaggagaccgtgcaggtgatccccggcagcaagctgctgtggagaatcaacaccagaccccccaacagcgcccagatgtacaacttcaccagcttcaccgtgagcctgaacgagctggagaccggcatggagaagaccctgccccccaccgactgcagactgagacccgacatcagaggcatggagaacggcaacatggacctggccagccaggagaaggagagactggaggagaagcagagagaggccagaagagagagagccaaggaggaggccgagtggcagaccagatggttctaccccggcaacaacccctacaccggcacccccgactggctgtacgccggcgactacttcgagagaaacttcagcgactgccccgacatctactag

SEQ ID NO: 92172 - DNA, 1113 bp, synthetic construct
  misc_feature 1..1113: note = Description of Artificial Sequence: Synthetic coding sequence
  source 1..1113: mol_type = other DNA
atgcccatcgccttcaacgagcccctgagcttcctgcagagaatcaccgagtacatggagcacgtgtacctgatccacagagccagctgccagccccagcccctggagagaatgcagagcgtggccgccttcgccgtgagcgccgtggccagccagtgggagagaaccggcaagcccttcaaccccctgctgggcgagacctacgagctgatcagagaggacctgggcttcagattcatcagcgagcaggtgagccaccacccccccatcagcgccttccacagcgagggcctgaaccacgacttcctgttccacggcagcatctaccccaagctgaagttctggggcaagagcgtggaggccgagcccagaggcaccatcaccctggagctgctgaagcacaacgaggcctacacctggaccaaccccacctgctgcgtgcacaacgtgatcatcggcaagctgtggatcgagcagtacggcaccgtggagatcctgaaccacagaaccggccacaagtgcgtgctgcacttcaagccctgcggcctgttcggcaaggagctgcacaaggtggagggccacatccaggacaagaacaagaagaagctgttcatgatctacggcaagtggaccgagtgcctgtggggcatcgaccccgtgagctacgagagcttcaagaagcaggagagaagaggcgaccacctgagaaaggccaagctggacgaggacagcggcaaggccgacagcgacgtggccgacgacgtgcccgtggcccaggagaccgtgcaggtgatccccggcagcaagctgctgtggagaatcaacaccagaccccccaacagcgcccagatctggcccgccagaagaagaagcggctggagaagaagcagagagaagcacggcggcagcggccccagaagaagacagagcggcagaagaggcggcagcacccaggccatcacccccaccctgggcccccccaccggctgcatgcagggcatcaccctgagcggcatcagccccaccgcccagatcagcaccgagggcctggagggccccggcgccagagacagaagactgaccagactggacttcctggagtggcccctgtag

SEQ ID NO: 92173 - DNA, 339 bp, synthetic construct
  misc_feature 1..339: note = Description of Artificial Sequence: Synthetic coding sequence
  source 1..339: mol_type = other DNA
agcgtggccgccttcgccgtgagcgccgtggccagccagtgggagagaaccggcaagcccttcaaccccctgctgggcgagacctacgagctgatcagagaggacctgggcttcagattcatcagcgagcaggtgagccaccacccccccatcagcgccttccacagcgagggcctgaaccacgacttcctgttccacggcagcatctaccccaagctgaagttctggggcaagagcgtggaggccgagcccagaggcaccatcaccctggagctgctgaacgtgaaccagagacacctgagagccaagcacaagagccccaccaacgccggcagatag

SEQ ID NO: 92174 - DNA, 2664 bp, synthetic construct
  misc_feature 1..2664: note = Description of Artificial Sequence: Synthetic coding sequence
  source 1..2664: mol_type = other DNA
atgatgagcgacgagaagaacctgggcgtgagccagaagctggtgagccccagcagaagcaccagcagctgcagcagcaagcagggcagcagacaggacagctgggaggtggtggagggcctgagaggcgagatgaactacacccaggagccccccgtgcagaagggcttcctgctgaagaagagaaagtggcccctgaagggctggcacaagagattcttctacctggacaagggcatcctgaagtacgccaagagccagaccgacatcgagagagagaagctgcacggctgcatcgacgtgggcctgagcgtgatgagcgtgaagaagagcagcaagtgcatcgacctggacaccgaggagcacatctaccacctgaaggtgaagagcgaggaggtgttcgacgagtgggtgagcaagctgagacaccacagaatgtacagacagaacgagatcgccatgttcccccacgaggtgaaccacttcttcagcggcagcaccatcaccgacagcagcagcggcgtgttcgacagcatcagcagcagaaagagaagcagcatcagcaagcagaacctgttccagaccggcagcaacgtgagcttcagctgcggcggcgagaccagagtgcccctgtggctgcagagcagcgaggacatggagaagtgcagcaaggacctggcccactgccacgcctacctggtggagatgagccagctgctgcagagcatggacgtgctgcacagaacctacagcgcccccgccatcaacgccatccagggcggcagcttcgagagccccaagaaggagaagagaagccacagaagatggagaagcagagccatcggcaaggacgccaagggcaccctgcaggtgcccaagcccttcagcggccccgtgagactgcacagcagcaaccccaacctgagcaccctggacttcggcgaggagaagaactacagcgacggcagcgagaccagcagcgagttcagcaagatgcaggaggacctgtgccacatcgcccacaaggtgtacttcaccctgagaagcgccttcaacatcatgagcgccgagagagagaagctgaagcagctgatggagcaggacgccagcagcagccccagcgcccaggtgatcggcctgaagaacgccctgagcagcgccctggcccagaacaccgacctgaaggagagactgagaagaatccacgccgagagcctgctgctggacagccccgccgtggccaagagcggcgacaacctggccgaggagaacagcagagacgagaacagagccctggtgcaccagctgagcaacgagagcagactgagcatcaccgacagcctgagcgagttcttcgacgcccaggaggtgctgctgagccccagcagcagcgagaacgagatcagcgacgacgacagctacgtgagcgacatcagcgacaacctgagcctggacaacctgagcaacgacctggacaacgagagacagaccctgggccccgtgctggacagcggcagagaggccaagagcagaagaagaacctgcctgcccgccccctgccccagcagcagcaacatcagcctgtggaacatcctgagaaacaacatcggcaaggacctgagcaaggtggccatgcccgtggagctgaacgagcccctgaacaccctgcagagactgtgcgaggagctggagtacagcgagctgctggacaaggccgcccagatccccagccccctggagagaatggtgtacgtggccgccttcgccatcagcgcctacgccagcagctactacagagccggcagcaagcccttcaaccccgtgctgggcgagacctacgagtgcatcagagaggacaagggcttccagttcttcagcgagcaggtgagccaccacccccccatcagcgcctgccacgccgagagcagaaacttcgtgttctggcaggacgtgagatggaagaacaagttctggggcaagagcatggagatcgtgcccatcggcaccacccacgtgaccctgcccgtgttcggcgaccacttcgagtggaacaaggtgaccagctgcatccacaacatcctgagcggccagagatggatcgagcactacggcgagatcgtgatcaagaacctgcacgacgacagctgctactgcaaggtgaacttcatcaaggccaagtactggagcaccaacgcccacgagatcgagggcaccgtgttcgacagaagcggcaaggccgtgcacagactgttcggcaagtggcacgagagcatctactgcggcggcggcagcagcagcgcctgcgtgtggagagccaaccccatgcccaagggctacgagcagtactacagcttcacccagttcgccctggagctgaacgagatggaccccagcagcaagagcctgctgccccccaccgacaccagattcagacccgaccagagattcctggaggagggcaacctggaggaggccgagatccagaagcagagaatcgagcagctgcagagagagagaagaagagtgctggaggagaaccacgtggagcaccagcccagattcttcagaaagagcgacgacgacagctgggtgagcaacggcacctacctggagctgagaaaggacctgggcttcagcaagctggaccaccccgtgctgtggtag

SEQ ID NO: 92175 - DNA, 2571 bp, synthetic construct
  misc_feature 1..2571: note = Description of Artificial Sequence: Synthetic coding sequence
  source 1..2571: mol_type = other DNA
atgatgagcgacgagaagaacctgggcgtgagccagaagctggtgagccccagcagaagcaccagcagctgcagcagcaagcagggcagcagacaggacagctgggaggtggtggagggcctgagaggcgagatgaactacacccaggagccccccgtgcagaagggcttcctgctgaagaagagaaagtggcccctgaagggctggcacaagagattcttctacctggacaagggcatcctgaagtacgccaagagccagaccgacatcgagagagagaagctgcacggctgcatcgacgtgggcctgagcgtgatgagcgtgaagaagagcagcaagtgcatcgacctggacaccgaggagcacatctaccacctgaaggtgaagagcgaggaggtgttcgacgagtgggtgagcaagctgagacaccacagaatgtacagacagaacgagatcgccatgttcccccacgaggtgaaccacttcttcagcggcagcaccatcaccgacagcagcagcggcgtgttcgacagcatcagcagcagaaagagaagcagcatcagcaagcagaacctgttccagaccggcagcaacgtgagcttcagctgcggcggcgagaccagagtgcccctgtggctgcagagcagcgaggacatggagaagtgcagcaaggacctggcccactgccacgcctacctggtggagatgagccagctgctgcagagcatggacgtgctgcacagaacctacagcgcccccgccatcaacgccatccaggtgcccaagcccttcagcggccccgtgagactgcacagcagcaaccccaacctgagcaccctggacttcggcgaggagaagaactacagcgacggcagcgagaccagcagcgagttcagcaagatgcaggaggacctgtgccacatcgcccacaaggtgtacttcaccctgagaagcgccttcaacatcatgagcgccgagagagagaagctgaagcagctgatggagcaggacgccagcagcagccccagcgcccaggtgatcggcctgaagaacgccctgagcagcgccctggcccagaacaccgacctgaaggagagactgagaagaatccacgccgagagcctgctgctggacagccccgccgtggccaagagcggcgacaacctggccgaggagaacagcagagacgagaacagagccctggtgcaccagctgagcaacgagagcagactgagcatcaccgacagcctgagcgagttcttcgacgcccaggaggtgctgctgagccccagcagcagcgagaacgagatcagcgacgacgacagctacgtgagcgacatcagcgacaacctgagcctggacaacctgagcaacgacctggacaacgagagacagaccctgggccccgtgctggacagcggcagagaggccaagagcagaagaagaacctgcctgcccgccccctgccccagcagcagcaacatcagcctgtggaacatcctgagaaacaacatcggcaaggacctgagcaaggtggccatgcccgtggagctgaacgagcccctgaacaccctgcagagactgtgcgaggagctggagtacagcgagctgctggacaaggccgcccagatccccagccccctggagagaatggtgtacgtggccgccttcgccatcagcgcctacgccagcagctactacagagccggcagcaagcccttcaaccccgtgctgggcgagacctacgagtgcatcagagaggacaagggcttccagttcttcagcgagcaggtgagccaccacccccccatcagcgcctgccacgccgagagcagaaacttcgtgttctggcaggacgtgagatggaagaacaagttctggggcaagagcatggagatcgtgcccatcggcaccacccacgtgaccctgcccgtgttcggcgaccacttcgagtggaacaaggtgaccagctgcatccacaacatcctgagcggccagagatggatcgagcactacggcgagatcgtgatcaagaacctgcacgacgacagctgctactgcaaggtgaacttcatcaaggccaagtactggagcaccaacgcccacgagatcgagggcaccgtgttcgacagaagcggcaaggccgtgcacagactgttcggcaagtggcacgagagcatctactgcggcggcggcagcagcagcgcctgcgtgtggagagccaaccccatgcccaagggctacgagcagtactacagcttcacccagttcgccctggagctgaacgagatggaccccagcagcaagagcctgctgccccccaccgacaccagattcagacccgaccagagattcctggaggagggcaacctggaggaggccgagatccagaagcagagaatcgagcagctgcagagagagagaagaagagtgctggaggagaaccacgtggagcaccagcccagattcttcagaaagagcgacgacgacagctgggtgagcaacggcacctacctggagctgagaaaggacctgggcttcagcaagctggaccaccccgtgctgtggtag

SEQ ID NO: 92176 - DNA, 2556 bp, synthetic construct
  misc_feature 1..2556: note = Description of Artificial Sequence: Synthetic coding sequence
  source 1..2556: mol_type = other DNA
atgatgagcgacgagaagaacctgggcgtgagccagaagctggtgagccccagcagaagcaccagcagctgcagcagcaagcagggcagcagacaggacagctgggaggtggtggagggcctgagaggcgagatgaactacacccaggagccccccgtgcagaagggcttcctgctgaagaagagaaagtggcccctgaagggctggcacaagagattcttctacctggacaagggcatcctgaagtacgccaagagccagaccgacatcgagagagagaagctgcacggctgcatcgacgtgggcctgagcgtgatgagcgtgaagaagagcagcaagtgcatcgacctggacaccgaggagcacatctaccacctgaaggtgaagagcgaggaggtgttcgacgagtgggtgagcaagctgagacaccacagaatgtacagacagaacgagatcgccatgttcccccacgaggtgaaccacttcttcagcggcagcaccatcaccgacagcagcagcggcgtgttcgacagcatcagcagcagaaagagaagcagcatcagcaagcagaacctgttccagaccggcagcaacgtgagcttcagctgcggcggcgagaccagagtgcccctgtggctgcagagcagcgaggacatggagaagtgcagcaaggacctggcccactgccacgcctacctggtggagatgagccagctgctgcagagcatggacgtgctgcacagaacctacagcgcccccgccatcaacgccatccagggcggcagcttcgagagccccaagaaggagaagagaagccacagaagatggagaagcagagccatcggcaaggacgccaagggcaccctgcaggtgcccaagcccttcagcggccccgtgagactgcacagcagcaaccccaacctgagcaccctggacttcggcgaggagaagaactacagcgacggcagcgagaccagcagcgagttcagcaagatgcaggaggacctgtgccacatcgcccacaaggtgtacttcaccctgagaagcgccttcaacatcatgagcgccgagagagagaagctgaagcagctgatggagcaggacgccagcagcagccccagcgcccaggtgatcggcctgaagaacgccctgagcagcgagaacagcagagacgagaacagagccctggtgcaccagctgagcaacgagagcagactgagcatcaccgacagcctgagcgagttcttcgacgcccaggaggtgctgctgagccccagcagcagcgagaacgagatcagcgacgacgacagctacgtgagcgacatcagcgacaacctgagcctggacaacctgagcaacgacctggacaacgagagacagaccctgggccccgtgctggacagcggcagagaggccaagagcagaagaagaacctgcctgcccgccccctgccccagcagcagcaacatcagcctgtggaacatcctgagaaacaacatcggcaaggacctgagcaaggtggccatgcccgtggagctgaacgagcccctgaacaccctgcagagactgtgcgaggagctggagtacagcgagctgctggacaaggccgcccagatccccagccccctggagagaatggtgtacgtggccgccttcgccatcagcgcctacgccagcagctactacagagccggcagcaagcccttcaaccccgtgctgggcgagacctacgagtgcatcagagaggacaagggcttccagttcttcagcgagcaggtgagccaccacccccccatcagcgcctgccacgccgagagcagaaacttcgtgttctggcaggacgtgagatggaagaacaagttctggggcaagagcatggagatcgtgcccatcggcaccacccacgtgaccctgcccgtgttcggcgaccacttcgagtggaacaaggtgaccagctgcatccacaacatcctgagcggccagagatggatcgagcactacggcgagatcgtgatcaagaacctgcacgacgacagctgctactgcaaggtgaacttcatcaaggccaagtactggagcaccaacgcccacgagatcgagggcaccgtgttcgacagaagcggcaaggccgtgcacagactgttcggcaagtggcacgagagcatctactgcggcggcggcagcagcagcgcctgcgtgtggagagccaaccccatgcccaagggctacgagcagtactacagcttcacccagttcgccctggagctgaacgagatggaccccagcagcaagagcctgctgccccccaccgacaccagattcagacccgaccagagattcctggaggagggcaacctggaggaggccgagatccagaagcagagaatcgagcagctgcagagagagagaagaagagtgctggaggagaaccacgtggagcaccagcccagattcttcagaaagagcgacgacgacagctgggtgagcaacggcacctacctggagctgagaaaggacctgggcttcagcaagctggaccaccccgtgctgtggtag

SEQ ID NO: 92177 - DNA, 2556 bp, synthetic construct; identical to SEQ ID NO: 92176
  misc_feature 1..2556: note = Description of Artificial Sequence: Synthetic coding sequence
  source 1..2556: mol_type = other DNA

SEQ ID NO: 92178 - DNA, 2571 bp, synthetic construct; identical to SEQ ID NO: 92175
  misc_feature 1..2571: note = Description of Artificial Sequence: Synthetic coding sequence
  source 1..2571: mol_type = other DNA

SEQ ID NO: 92179 - DNA, 2463 bp, synthetic construct
  misc_feature 1..2463: note = Description of Artificial Sequence: Synthetic coding sequence
  source 1..2463: mol_type = other DNA
atgatgagcgacgagaagaacctgggcgtgagccagaagctggtgagccccagcagaagcaccagcagctgcagcagcaagcagggcagcagacaggacagctgggaggtggtggagggcctgagaggcgagatgaactacacccaggagccccccgtgcagaagggcttcctgctgaagaagagaaagtggcccctgaagggctggcacaagagattcttctacctggacaagggcatcctgaagtacgccaagagccagaccgacatcgagagagagaagctgcacggctgcatcgacgtgggcctgagcgtgatgagcgtgaagaagagcagcaagtgcatcgacctggacaccgaggagcacatctaccacctgaaggtgaagagcgaggaggtgttcgacgagtgggtgagcaagctgagacaccacagaatgtacagacagaacgagatcgccatgttcccccacgaggtgaaccacttcttcagcggcagcaccatcaccgacagcagcagcggcgtgttcgacagcatcagcagcagaaagagaagcagcatcagcaagcagaacctgttccagaccggcagcaacgtgagcttcagctgcggcggcgagaccagagtgcccctgtggctgcagagcagcgaggacatggagaagtgcagcaaggacctggcccactgccacgcctacctggtggagatgagccagctgctgcagagcatggacgtgctgcacagaacctacagcgcccccgccatcaacgccatccaggtgcccaagcccttcagcggccccgtgagactgcacagcagcaaccccaacctgagcaccctggacttcggcgaggagaagaactacagcgacggcagcgagaccagcagcgagttcagcaagatgcaggaggacctgtgccacatcgcccacaaggtgtacttcaccctgagaagcgccttcaacatcatgagcgccgagagagagaagctgaagcagctgatggagcaggacgccagcagcagccccagcgcccaggtgatcggcctgaagaacgccctgagcagcgagaacagcagagacgagaacagagccctggtgcaccagctgagcaacgagagcagactgagcatcaccgacagcctgagcgagttcttcgacgcccaggaggtgctgctgagccccagcagcagcgagaacgagatcagcgacgacgacagctacgtgagcgacatcagcgacaacctgagcctggacaacctgagcaacgacctggacaacgagagacagaccctgggccccgtgctggacagcggcagagaggccaagagcagaagaagaacctgcctgcccgccccctgccccagcagcagcaacatcagcctgtggaacatcctgagaaacaacatcggcaaggacctgagcaaggtggccatgcccgtggagctgaacgagcccctgaacaccctgcagagactgtgcgaggagctggagtacagcgagctgctggacaaggccgcccagatccccagccccctggagagaatggtgtacgtggccgccttcgccatcagcgcctacgccagcagctactacagagccggcagcaagcccttcaaccccgtgctgggcgagacctacgagtgcatcagagaggacaagggcttccagttcttcagcgagcaggtgagccaccacccccccatcagcgcctgccacgccgagagcagaaacttcgtgttctggcaggacgtgagatggaagaacaagttctggggcaagagcatggagatcgtgcccatcggcaccacccacgtgaccctgcccgtgttcggcgaccacttcgagtggaacaaggtgaccagctgcatccacaacatcctgagcggccagagatggatcgagcactacggcgagatcgtgatcaagaacctgcacgacgacagctgctactgcaaggtgaacttcatcaaggccaagtactggagcaccaacgcccacgagatcgagggcaccgtgttcgacagaagcggcaaggccgtgcacagactgttcggcaagtggcacgagagcatctactgcggcggcggcagcagcagcgcctgcgtgtggagagccaaccccatgcccaagggctacgagcagtactacagcttcacccagttcgccctggagctgaacgagatggaccccagcagcaagagcctgctgccccccaccgacaccagattcagacccgaccagagattcctggaggagggcaacctggaggaggccgagatccagaagcagagaatcgagcagctgcagagagagagaagaagagtgctggaggagaaccacgtggagcaccagcccagattcttcagaaagagcgacgacgacagctgggtgagcaacggcacctacctggagctgagaaaggacctgggcttcagcaagctggaccaccccgtgctgtggtag

SEQ ID NO: 92180 - DNA, 339 bp, synthetic construct
  misc_feature 1..339: note = Description of Artificial Sequence: Synthetic coding sequence
  source 1..339: mol_type = other DNA
atgatgagcgacgagaagaacctgggcgtgagccagaagctggtgagccccagcagaagcaccagcagctgcagcagcaagcagggcagcagacaggacagctgggaggtggtggagggcctgagaggcgagatgaactacacccaggagccccccgtgcagaagggcttcctgctgaagaagagaaagtggcccctgaagggctggcacaagagattcttctacctggacaagggcatcctgaagtacgccaagagccagaccgacatcgagagagagaagctgcacggctgcatcgacgtgggcctgagcgtgatgagcgtgaagaagagcagctag

SEQ ID NO: 92181 - DNA, 186 bp, synthetic construct
  misc_feature 1..186: note = Description of Artificial Sequence: Synthetic coding sequence
  source 1..186: mol_type = other DNA
atgatgagcgacgagaagaacctgggcgtgagccagaagctggtgagccccagcagaagcaccagcagctgcagcagcaagcagggcagcagacaggacagctgggaggtggtggagggcctgagaggcgagatgaactacacccaggagccccccgtgcagaagggcttcctgctgaagaagtag

SEQ ID NO: 92182 - DNA, 2463 bp, synthetic construct; identical to SEQ ID NO: 92179
  misc_feature 1..2463: note = Description of Artificial Sequence: Synthetic coding sequence
  source 1..2463: mol_type = other DNA

SEQ ID NO: 92183 - DNA, 270 bp, synthetic construct
  misc_feature 1..270: note = Description of Artificial Sequence: Synthetic coding sequence
  source 1..270: mol_type = other DNA
atgatgagcgacgagaagaacctgggcgtgagccagaagctggtgagccccagcagaagcaccagcagctgcagcagcaagcagggcagcagacaggacagctgggaggtggtggagggcctgagaggcgagatgaactacacccaggagccccccgtgcagaagggcttcctgctgaagaagagaaagtggcccctgaagggctggcacaagagattcttctacctggacaagggcatcctgaagtacgccaagagccagaccgactag

SEQ ID NO: 92184 - DNA, 2640 bp, synthetic construct
  misc_feature 1..2640: note = Description of Artificial Sequence: Synthetic coding sequence
  source 1..2640: mol_type = other DNA
atgaaggaggaggccttcctgagaagaagattcagcctgtgcccccccagcagcaccccccagaaggtggaccccagaaagctgaccagaaacctgctgctgagcggcgacaacgagctgtaccccctgagccccggcaaggacatggagcccaacggccccagcctgcccagagacgagggcccccccacccccagcagcgccaccaaggtgccccccgccgagtacagactgtgcaacggcagcgacaaggagtgcgtgagccccaccgccagagtgaccaagaaggagaccctgaaggcccagaaggagaactacagacaggagaagaagagagccaccagacagctgctgagcgccctgaccgaccccagcgtggtgatcatggccgacagcctgaagatcagaggcaccctgaagagctggaccaagctgtggtgcgtgctgaagcccggcgtgctgctgatctacaagacccccaaggtgggccagtgggtgggcaccgtgctgctgcactgctgcgagctgatcgagagacccagcaagaaggacggcttctgcttcaagctgttccaccccctggaccagagcgtgtgggccgtgaagggccccaagggcgagagcgtgggcagcatcacccagcccctgcccagcagctacctgatcttcagagccgccagcgagagcgacggcagatgctggctggacgccctggagctggccctgagatgcagcagcctgctgagactgggcacctgcaagcccggcagagacggcgagcccggcaccagccccgacgccagccccagcagcctgtgcggcctgcccgccagcgccaccgtgcaccccgaccaggacctgttccccctgaacggcagcagcctggagaacgacgccttcagcgacaagagcgagagagagaaccccgaggagagcgacaccgagacccaggaccacagcagaaagaccgagagcggcagcgaccagagcgagacccccggcgcccccgtgagaagaggcaccacctacgtggagcaggtgcaggaggagctgggcgagctgggcgaggccagccaggtggagaccgtgagcgaggagaacaagagcctgatgtggaccctgctgaagcagctgagacccggcatggacctgagcagagtggtgctgcccaccttcgtgctggagcccagaagcttcctgaacaagctgagcgactactactaccacgccgacctgctgagcagagccgccgtggaggaggacgcctacagcagaatgaagctggtgctgagatggtacctgagcggcttctacaagaagcccaagggcatcaagaagccctacaaccccatcctgggcgagaccttcagatgctgctggttccacccccagaccgacagcagaaccttctacatcgccgagcaggtgagccaccacccccccgtgagcgccttccacgtgagcaacagaaaggacggcttctgcatcagcggcagcatcaccgccaagagcagattctacggcaacagcctgagcgccctgctggacggcaaggccaccctgaccttcctgaacagagccgaggactacaccctgaccatgccctacgcccactgcaagggcatcctgtacggcaccatgaccctggagctgggcggcaaggtgaccatcgagtgcgccaagaacaacttccaggcccagctggagttcaagctgaagcccttcttcggcggcagcaccagcatcaaccagatcagcggcaagatcaccagcggcgaggaggtgctggccagcctgagcggccactgggacagagacgtgttcatcaaggaggagggcagcggcagcagcgccctgttctggacccccagcggcgaggtgagaagacagagactgagacagcacaccgtgcccctggaggagcagaccgagctggagagcgagagactgtggcagcacgtgaccagagccatcagcaagggcgaccagcacagagccacccaggagaagttcgccctggaggaggcccagagacagagagccagagagagacaggagagcctgatgccctggaagccccagctgttccacctggaccccatcacccaggagtggcactacagatacgaggaccacagcccctgggaccccctgaaggacatcgcccagttcgagcaggacggcatcctgagaaccctgcagcaggaggccgtggccagacagaccaccttcctgggcagccccggccccagacacgagagaagcggccccgaccagagactgagaaaggccagcgaccagcccagcggccacagccaggccaccgagagcagcggcagcacccccgagagctgccccgagctgagcgacgaggagcaggacggcgacttcgtgcccggcggcgagagcccctgccccagatgcagaaaggaggccagaagactgcaggccctgcacgaggccatcctgagcatcagagaggcccagcaggagctgcacagacacctgagcgccatgctgagcagcaccgccagagccgcccaggcccccacccccggcctgctgcagagccccagaagctggttcctgctgtgcgtgttcctggcctgccagctgttcatcaaccacatcctgaagtag

SEQ ID NO: 92185 - DNA, 2436 bp, synthetic construct
  misc_feature 1..2436: note = Description of Artificial Sequence: Synthetic coding sequence
  source 1..2436: mol_type = other DNA
atgaaggaggaggccttcctgagaagaagattcagcctgtgcccccccagcagcaccccccagaaggtggaccccagaaagctgaccagaaacctgctgctgagcggcgacaacgagctgtaccccctgagccccggcaaggacatggagcccaacggccccagcctgcccagagacgagggcccccccacccccagcagcgccaccaaggtgccccccgccgagtacagactgtgcaacggcagcgacaaggagtgcgtgagccccaccgccagagtgaccaagaaggagaccctgaaggcccagaaggagaactacagacaggagaagaagagagccaccagacagctgctgagcgccctgaccgaccccagcgtggtgatcatggccgacagcctgaagggccccaagggcgagagcgtgggcagcatcacccagcccctgcccagcagctacctgatcttcagagccgccagcgagagcgacggcagatgctggctggacgccctggagctggccctgagatgcagcagcctgctgagactgggcacctgcaagcccggcagagacggcgagcccggcaccagccccgacgccagccccagcagcctgtgcggcctgcccgccagcgccaccgtgcaccccgaccaggacctgttccccctgaacggcagcagcctggagaacgacgccttcagcgacaagagcgagagagagaaccccgaggagagcgacaccgagacccaggaccacagcagaaagaccgagagcggcagcgaccagagcgagacccccggcgcccccgtgagaagaggcaccacctacgtggagcaggtgcaggaggagctgggcgagctgggcgaggccagccaggtggagaccgtgagcgaggagaacaagagcctgatgtggaccctgctgaagcagctgagacccggcatggacctgagcagagtggtgctgcccaccttcgtgctggagcccagaagcttcctgaacaagctgagcgactactactaccacgccgacctgctgagcagagccgccgtggaggaggacgcctacagcagaatgaagctggtgctgagatggtacctgagcggcttctacaagaagcccaagggcatcaagaagccctacaaccccatcctgggcgagaccttcagatgctgctggttccacccccagaccgacagcagaaccttctacatcgccgagcaggtgagccaccacccccccgtgagcgccttccacgtgagcaacagaaaggacggcttctgcatcagcggcagcatcaccgccaagagcagattctacggcaacagcctgagcgccctgctggacggcaaggccaccctgaccttcctgaacagagccgaggactacaccctgaccatgccctacgcccactgcaagggcatcctgtacggcaccatgaccctggagctgggcggcaaggtgaccatcgagtgcgccaagaacaacttccaggcccagctggagttcaagctgaagcccttcttcggcggcagcaccagcatcaaccagatcagcggcaagatcaccagcggcgaggaggtgctggccagcctgagcggccactgggacagagacgtgttcatcaaggaggagggcagcggcagcagcgccctgttctggacccccagcggcgaggtgagaagacagagactgagacagcacaccgtgcccctggaggagcagaccgagctggagagcgagagactgtggcagcacgtgaccagagccatcagcaagggcgaccagcacagagccacccaggagaagttcgccctggaggaggcccagagacagagagccagagagagacaggagagcctgatgccctggaagccccagctgttccacctggaccccatcacccaggagtggcactacagatacgaggaccacagcccctgggaccccctgaaggacatcgcccagttcgagcaggacggcatcctgagaaccctgcagcaggaggccgtggccagacagaccaccttcctgggcagccccggccccagacacgagagaagcggccccgaccagagactgagaaaggccagcgaccagcccagcggccacagccaggccaccgagagcagcggcagcacccccgagagctgccccgagctgagcgacgaggagcaggacggcgacttcgtgcccggcggcgagagcccctgccccagatgcagaaaggaggccagaagactgcaggccctgcacgaggccatcctgagcatcagagaggcccagcaggagctgcacagacacctgagcgccatgctgagcagcaccgccagagccgcccaggcccccacccccggcctgctgcagagccccagaagctggttcctgctgtgcgtgttcctggcctgccagctgttcatcaaccacatcctgaagtag

SEQ ID NO: 92186 - DNA, 1320 bp, synthetic construct
  misc_feature 1..1320: note = Description of Artificial Sequence: Synthetic coding sequence
  source 1..1320: mol_type = other DNA
atggacctgagcagagtggtgctgcccaccttcgtgctggagcccagaagcttcctgaacaagctgagcgactactactaccacgccgacctgctgagcagagccgccgtggaggaggacgcctacagcagaatgaagctggtgctgagatggtacctgagcggcttctacaagaagcccaagggcatcaagaagccctacaaccccatcctgggcgagaccttcagatgctgctggttccacccccagaccgacagcagaaccttctacatcgccgagcaggtgagccaccacccccccgtgagcgccttccacgtgagcaacagaaaggacggcttctgcatcagcggcagcatcaccgccaagagcagattctacggcaacagcctgagcgccctgctggacggcaaggccaccctgaccttcctgaacagagccgaggactacaccctgaccatgccctacgcccactgcaagggcatcctgtacggcaccatgaccctggagctgggcggcaaggtgaccatcgagtgcgccaagaacaacttccaggcccagctggagttcaagctgaagcccttcttcggcggcagcaccagcatcaaccagatcagcggcaagatcaccagcggcgaggaggtgctggccagcctgagcggccactgggacagagacgtgttcatcaaggaggagggcagcggcagcagcgccctgttctggacccccagcggcgaggtgagaagacagagactgagacagcacaccgtgcccctggaggagcagaccgagctggagagcgagagactgtggcagcacgtgaccagagccatcagcaagggcgaccagcacagagccacccaggagaagttcgccctggaggaggcccagagacagagagccagagagagacaggagagcctgatgccctggaagccccagctgttccacctggaccccatcacccaggagtggcactacagatacgaggaccacagcccctgggaccccctgaaggacatcgcccagttcgagcaggacggcatcctgagaaccctgcagcaggaggccgtggccagacagaccaccttcctgggcagccccggccccagacacgagagaagcggccccgaccagagactgagaaaggccagcgaccagcccagcggccacagccaggccaccgagagcagcggcagcacccccgagagctgccccgagctgcacggcaccggcagcaccggcaccgaccccagaccccccgccgagccccccatcctggtgcccgccctgagagtgcccggcgtgagcgccgtgcactag

SEQ ID NO: 92187 - DNA, 2436 bp, synthetic construct; identical to SEQ ID NO: 92185
  misc_feature 1..2436: note = Description of Artificial Sequence: Synthetic coding sequence
  source 1..2436: mol_type = other DNA

SEQ ID NO: 92188 - DNA, 375 bp, synthetic construct
  misc_feature 1..375: note = Description of Artificial Sequence: Synthetic coding sequence
  source 1..375: mol_type = other DNA
atgaaggaggaggccttcctgagaagaagattcagcctgtgcccccccagcagcaccccccagaaggtggaccccagaaagctgaccagaaacctgctgctgagcggcgacaacgagctgtaccccctgagccccggcaaggacatggagcccaacggccccagcctgcccagagacgagggcccccccacccccagcagcgccaccaaggtgccccccgccgagtacagactgtgcaacggcagcgacaaggagtgcgtgagccccaccgccagagtgaccaagaaggagaccctgaaggcccagaaggagaactacagacaggagaagaagagagccaccagacagctgctgagcgccctgaccgacccctag

SEQ ID NO: 92189 - DNA, 297 bp, synthetic construct
  misc_feature 1..297: note = Description of Artificial Sequence: Synthetic coding sequence
  source 1..297: mol_type = other DNA
atgaaggaggaggccttcctgagaagaagattcagcctgtgcccccccagcagcaccccccagaaggtggaccccagaaagctgaccagaaacctgctgctgagcggcgacaacgagctgtaccccctgagccccggcaaggacatggagcccaacggccccagcctgcccagagacgagggcccccccacccccagcagcgccaccaaggtgccccccgccgagtacagactgtgcaacggcagcgacaaggagtgcgtgagccccaccgccagagtgaccaagaaggagacctag

SEQ ID NO: 92190 - DNA, 420 bp, synthetic construct
  misc_feature 1..420: note = Description of Artificial Sequence: Synthetic coding sequence
  source 1..420: mol_type = other DNA
atgaaggaggaggccttcctgagaagaagattcagcctgtgcccccccagcagcaccccccagaaggtggaccccagaaagctgaccagaaacctgctgctgagcggcgacaacgagctgtaccccctgagccccggcaaggacatggagcccaacggccccagcctgcccagagacgagggcccccccacccccagcagcgccaccaaggtgccccccgccgagtacagactgtgcaacggcagcgacaaggagtgcgtgagccccaccgccagagtgaccaagaaggagaccctgaaggcccagaaggagaactacagacaggagaagaagagagccaccagacagctgctgagcgccctgaccgaccccagcgtggtgatcatggccgacagcctgaagatcagaggcaccctgtag

SEQ ID NO: 92191 - DNA, 273 bp, synthetic construct
  misc_feature 1..273: note = Description of Artificial Sequence: Synthetic coding sequence
  source 1..273: mol_type = other DNA
atgaaggaggaggccttcctgagaagaagattcagcctgtgcccccccagcagcaccccccagaaggtggaccccagaaagctgaccagaaacctgctgctgagcggcgacaacgagctgtaccccctgagccccggcaaggacatggagcccaacggccccagcctgcccagagacgagggcccccccacccccagcagcgccaccaaggtgccccccgccgagtacagactgtgcaacggcagcgacaaggagtgcgtgagccccacctag

SEQ ID NO: 92192 - DNA, 210 bp, synthetic construct
  misc_feature 1..210: note = Description of Artificial Sequence: Synthetic coding sequence
  source 1..210: mol_type = other DNA
atgaaggaggaggccttcctgagaagaagattcagcctgtgcccccccagcagcaccccccagaaggtggaccccagaaagctgaccagaaacctgctgctgagcggcgacaacgagctgtaccccctgagccccggcaaggacatggagcccaacggccccagcctgcccagagacgagggcccccccacccccagcagcgccacctag

SEQ ID NO: 92193 - DNA, 1299 bp, synthetic construct
  misc_feature 1..1299: note = Description of Artificial Sequence: Synthetic coding sequence
  source 1..1299: mol_type = other DNA
tacaaccccatcctgggcgagaccttcagatgctgctggttccacccccagaccgacagcagaaccttctacatcgccgagcaggtgagccaccacccccccgtgagcgccttccacgtgagcaacagaaaggacggcttctgcatcagcggcagcatcaccgccaagagcagattctacggcaacagcctgagcgccctgctggacggcaaggccaccctgaccttcctgaacagagccgaggactacaccctgaccatgccctacgcccactgcaagggcatcctgtacggcaccatgaccctggagctgggcggcaaggtgaccatcgagtgcgccaagaacaacttccaggcccagctggagttcaagctgaagcccttcttcggcggcagcaccagcatcaaccagatcagcggcaagatcaccagcggcgaggaggtgctggccagcctgagcggccactgggacagagacgtgttcatcaaggaggagggcagcggcagcagcgccctgttctggacccccagcggcgaggtgagaagacagagactgagacagcacaccgtgcccctggaggagcagaccgagctggagagcgagagactgtggcagcacgtgaccagagccatcagcaagggcgaccagcacagagccacccaggagaagttcgccctggaggaggcccagagacagagagccagagagagacaggagagcctgatgccctggaagccccagctgttccacctggaccccatcacccaggagtggcactacagatacgaggaccacagcccctgggaccccctgaaggacatcgcccagttcgagcaggacggcatcctgagaaccctgcagcaggaggccgtggccagacagaccaccttcctgggcagccccggccccagacacgagagaagcggccccgaccagagactgagaaaggccagcgaccagcccagcggccacagccaggccaccgagagcagcggcagcacccccgagagctgccccgagctgagcgacgaggagcaggacggcgacttcgtgcccggcggcgagagcccctgccccagatgcagaaaggaggccagaagactgcaggccctgcacgaggccatcctgagcatcagagaggcccagcaggagctgcacagacacctgagcgccatgctgagcagcaccgccagagccgcccaggcccccacccccggcctgctgcagagccccagaagctggttcctgctgtgcgtgttcctggcctgccagctgttcatcaaccacatcctgaagtag

SEQ ID NO: 92194 - DNA, 1533 bp, synthetic construct
  misc_feature 1..1533: note = Description of Artificial Sequence: Synthetic coding sequence
  source 1..1533: mol_type = other DNA
atgtgcgtgccccacagacagggccaccaggagggcgacagccagggcgccgagggcgagctgcccgccggcgaggagcccagaagcttcctgaacaagctgagcgactactactaccacgccgacctgctgagcagagccgccgtggaggaggacgcctacagcagaatgaagctggtgctgagatggtacctgagcggcttctacaagaagcccaagggcatcaagaagccctacaaccccatcctgggcgagaccttcagatgctgctggttccacccccagaccgacagcagaaccttctacatcgccgagcaggtgagccaccacccccccgtgagcgccttccacgtgagcaacagaaaggacggcttctgcatcagcggcagcatcaccgccaagagcagattctacggcaacagcctgagcgccctgctggacggcaaggccaccctgaccttcctgaacagagccgaggactacaccctgaccatgccctacgcccactgcaagggcatcctgtacggcaccatgaccctggagctgggcggcaaggtgaccatcgagtgcgccaagaacaacttccaggcccagctggagttcaagctgaagcccttcttcggcggcagcaccagcatcaaccagatcagcggcaagatcaccagcggcgaggaggtgctggccagcctgagcggccactgggacagagacgtgttcatcaaggaggagggcagcggcagcagcgccctgttctggacccccagcggcgaggtgagaagacagagactgagacagcacaccgtgcccctggaggagcagaccgagctggagagcgagagactgtggcagcacgtgaccagagccatcagcaagggcgaccagcacagagccacccaggagaagttcgccctggaggaggcccagagacagagagccagagagagacaggagagcctgatgccctggaagccccagctgttccacctggaccccatcacccaggagtggcactacagatacgaggaccacagcccctgggaccccctgaaggacatcgcccagttcgagcaggacggcatcctgagaaccctgcagcaggaggccgtggccagacagaccaccttcctgggcagccccggccccagacacgagagaagcggccccgaccagagactgagaaaggccagcgaccagcccagcggccacagccaggccaccgagagcagcggcagcacccccgagagctgccccgagctgagcgacgaggagcaggacggcgacttcgtgcccggcggcgagagcccctgccccagatgcagaaaggaggccagaagactgcaggccctgcacgaggccatcctgagcatcagagaggcccagcaggagctgcacagacacctgagcgccatgctgagcagcaccgccagagccgcccaggcccccacccccggcctgctgcagagccccagaagctggttcctgctgtgcgtgttcctggcctgccagctgttcatcaaccacatcctgaagtag

SEQ ID NO: 92195 - DNA, 2805 bp, synthetic construct
  misc_feature 1..2805: note = Description of Artificial Sequence: Synthetic coding sequence
  source 1..2805: mol_type = other DNA
atgagcagcgacgagaagggcatcagccccgcccacaagaccagcacccccacccacagaagcgccagcagcagcaccagcagccagagagacagcagacagagcatccacatcctggagagaaccgccagcagcagcaccgagcccagcgtgagcagacagctgctggagcccgagcccgtgcccctgagcaaggaggccgacagctgggagatcatcgagggcctgaagatcggccagaccaacgtgcagaagcccgacaagcacgagggcttcatgctgaagaagagaaagtggcccctgaagggctggcacaagagattcttcgtgctggacaacggcatgctgaagtacagcaaggcccccctggacatccagaagggcaaggtgcacggcagcatcgacgtgggcctgagcgtgatgagcatcaagaagaaggccagaagaatcgacctggacaccgaggagcacatctaccacctgaaggtgaagagccaggactggttcgacgcctgggtgagcaagctgagacaccacagactgtacagacagaacgagatcgtgagaagccccagagacgccagcttccacatcttccccagcaccagcaccgccgagagcagccccgccgccaacgtgagcgtgatggacggcaagatgcagcccaacagcttcccctggcagagccccctgccctgcagcaacagcctgcccgccacctgcaccaccggccagagcaaggtggccgcctggctgcaggacagcgaggagatggacagatgcgccgaggacctggcccactgccagagcaacctggtggagctgagcaagctgctgcagaacctggagatcctgcagagaacccagagcgcccccaacttcaccgacatgcaggccaactgcgtggacatcagcaagaaggacaagagagtgaccagaagatggagaaccaagagcgtgagcaaggacaccaagatccagctgcaggtgcccttcagcgccaccatgagccccgtgagactgcacagcagcaaccccaacctgtgcgccgacatcgagttccagaccccccccagccacctgaccgaccccctggagagcagcaccgactacaccaagctgcaggaggagttctgcctgatcgcccagaaggtgcacagcctgctgaagagcgccttcaacagcatcgccatcgagaaggagaagctgaagcagatggtgagcgagcaggaccacagcaagggccacagcacccagatggccagactgagacagagcctgagccaggccctgaaccagaacgccgagctgagaagcagactgaacagaatccacagcgagagcatcatctgcgaccaggtggtgagcgtgaacatcatccccagccccgacgaggccggcgagcagatccacgtgagcctgcccctgagccagcaggtggccaacgagagcagactgagcatgagcgagagcgtgagcgagttcttcgacgcccaggaggtgctgctgagcgccagcagcagcgagaacgaggccagcgacgacgagagctacatcagcgacgtgagcgacaacatcagcgaggacaacaccagcgtggccgacaacatcagcagacagatcctgaacggcgagctgaccggcggcgccttcagaaacggcagaagagcctgcctgcccgccccctgccccgacaccagcaacatcaacctgtggaacatcctgagaaacaacatcggcaaggacctgagcaaggtgagcatgcccgtggagctgaacgagcccctgaacaccctgcagcacctgtgcgaggagatggagtacagcgagctgctggacaaggccagcgagaccgacgacccctacgagagaatggtgctggtggccgccttcgccgtgagcggctactgcagcacctacttcagagccggcagcaagcccttcaaccccgtgctgggcgagacctacgagtgcatcagagaggacaagggcttcagattcttcagcgagcaggtgagccaccacccccccatcagcgcctgccactgcgagagcaagaacttcgtgttctggcaggacatcagatggaagaacaagttctggggcaagagcatggagatcctgcccgtgggcaccctgaacgtgatgctgcccaagtacggcgactactacgtgtggaacaaggtgaccacctgcatccacaacatcctgagcggcagaagatggatcgagcactacggcgaggtgaccatcagaaacaccaagagcagcgtgtgcatctgcaagctgaccttcgtgaaggtgaactactggaacagcaacatgaacgaggtgcagggcgtggtgatcgaccaggagggcaaggccgtgtacagactgttcggcaagtggcacgagggcctgtactgcggcgtggcccccagcgccaagtgcatctggagacccggcagcatgcccaccaactacgagctgtactacggcttcaccagattcgccatcgagctgaacgagctggaccccgtgctgaaggacctgctgccccccaccgacgccagattcagacccgaccagagattcctggaggagggcaacctggaggccgccgccagcgagaagcagagagtggaggagctgcagagaagcagaagaagatacatggaggagaacaacctggagcacatccccaagttcttcaagaaggtgatcgacgccaaccagagagaggcctgggtgagcaacgacacctactgggagctgagaaaggaccccggcttcagcaaggtggacagccccgtgctgtggtag

SEQ ID NO: 92196 - DNA, 2817 bp, synthetic construct
  misc_feature 1..2817: note = Description of Artificial Sequence: Synthetic coding sequence
  source 1..2817: mol_type = other DNA
atgcaccagctgagcctgatcagaggcaacagaggcagaagcatccacatcctggagagaaccgccagcagcagcaccgagcccagcgtgagcagacagctgctggagcccgagcccgtgcccctgagcaaggaggccgacagctgggagatcatcgagggcctgaagatcggccagaccaacgtgcagaagcccgacaagcacgagggcttcatgctgaagaagagaaagtggcccctgaagggctggcacaagagattcttcgtgctggacaacggcatgctgaagtacagcaaggcccccctggacatccagaagggcaaggtgcacggcagcatcgacgtgggcctgagcgtgatgagcatcaagaagaaggccagaagaatcgacctggacaccgaggagcacatctaccacctgaaggtgaagagccaggactggttcgacgcctgggtgagcaagctgagacaccacagactgtacagacagaacgagatcgtgagaagccccagagacgccagcttccacatcttccccagcaccagcaccgccgagagcagccccgccgccaacgtgagcgtgatggacggcaagatgcagcccaacagcttcccctggcagagccccctgccctgcagcaacagcctgcccgccacctgcaccaccggccagagcaaggtggccgcctggctgcaggacagcgaggagatggacagatgcgccgaggacctggcccactgccagagcaacctggtggagctgagcaagctgctgcagaacctggagatcctgcagagaacccagagcgcccccaacttcaccgacatgcaggccaactgcgtggacatcagcaagaaggacaagagagtgaccagaagatggagaaccaagagcgtgagcaaggacaccaagatccagctgcaggagggcccccccgccaagggccagttcagcaccaccagaagaagacagagactggccgccgccgtggccaccaccgtgcccttcagcgccaccatgagccccgtgagactgcacagcagcaaccccaacctgtgcgccgacatcgagttccagaccccccccagccacctgaccgaccccctggagagcagcaccgactacaccaagctgcaggaggagttctgcctgatcgcccagaaggtgcacagcctgctgaagagcgccttcaacagcatcgccatcgagaaggagaagctgaagcagatggtgagcgagcaggaccacagcaagggccacagcacccagatggccagactgagacagagcctgagccaggccctgaaccagaacgccgagctgagaagcagactgaacagaatccacagcgagagcatcatctgcgaccaggtggtgagcgtgaacatcatccccagccccgacgaggccggcgagcagatccacgtgagcctgcccctgagccagcaggtggccaacgagagcagactgagcatgagcgagagcgtgagcgagttcttcgacgcccaggaggtgctgctgagcgccagcagcagcgagaacgaggccagcgacgacgagagctacatcagcgacgtgagcgacaacatcagcgaggacaacaccagcgtggccgacaacatcagcagacagatcctgaacggcgagctgaccggcggcgccttcagaaacggcagaagagcctgcctgcccgccccctgccccgacaccagcaacatcaacctgtggaacatcctgagaaacaacatcggcaaggacctgagcaaggtgagcatgcccgtggagctgaacgagcccctgaacaccctgcagcacctgtgcgaggagatggagtacagcgagctgctggacaaggccagcgagaccgacgacccctacgagagaatggtgctggtggccgccttcgccgtgagcggctactgcagcacctacttcagagccggcagcaagcccttcaaccccgtgctgggcgagacctacgagtgcatcagagaggacaagggcttcagattcttcagcgagcaggtgagccaccacccccccatcagcgcctgccactgcgagagcaagaacttcgtgttctggcaggacatcagatggaagaacaagttctggggcaagagcatggagatcctgcccgtgggcaccctgaacgtgatgctgcccaagtacggcgactactacgtgtggaacaaggtgaccacctgcatccacaacatcctgagcggcagaagatggatcgagcactacggcgaggtgaccatcagaaacaccaagagcagcgtgtgcatctgcaagctgaccttcgtgaaggtgaactactggaacagcaacatgaacgaggtgcagggcgtggtgatcgaccaggagggcaaggccgtgtacagactgttcggcaagtggcacgagggcctgtactgcggcgtggcccccagcgccaagtgcatctggagacccggcagcatgcccaccaactacgagctgtactacggcttcaccagattcgccatcgagctgaacgagctggaccccgtgctgaaggacctgctgccccccaccgacgccagattcagacccgaccagagattcctggaggagggcaacctggaggccgccgccagcgagaagcagagagtggaggagctgcagagaagcagaagaagatacatggaggagaacaacctggagcacatccccaagttcttcaagaaggtgatcgacgccaaccagagagaggcctgggtgagcaacgacacctactgggagctgagaaaggaccccggcttcagcaaggtggacagccccgtgctgtggtag

SEQ ID NO: 92197 - DNA, 2697 bp, synthetic construct
  misc_feature 1..2697: note = Description of Artificial Sequence: Synthetic coding sequence
  source 1..2697: mol_type = other DNA
atgagcagcgacgagaagggcatcagccccgcccacaagaccagcacccccacccacagaagcgccagcagcagcaccagcagccagagagacagcagacagagcatccacatcctggagagaaccgccagcagcagcaccgagcccagcgtgagcagacagctgctggagcccgagcccgtgcccctgagcaaggaggccgacagctgggagatcatcgagggcctgaagatcggccagaccaacgtgcagaagcccgacaagcacgagggcttcatgctgaagaagagaaagtggcccctgaagggctggcacaagagattcttcgtgctggacaacggcatgctgaagtacagcaaggcccccctggacatccagaagggcaaggtgcacggcagcatcgacgtgggcctgagcgtgatgagcatcaagaagaaggccagaagaatcgacctggacaccgaggagcacatctaccacctgaaggtgaagagccaggactggttcgacgcctgggtgagcaagctgagacaccacagactgtacagacagaacgagatcgtgagaagccccagagacgccagcttccacatcttccccagcaccagcaccgccgagagcagccccgccgccaacgtgagcgtgatggacggcaagatgcagcccaacagcttcccctggcagagccccctgccctgcagcaacagcctgcccgccacctgcaccaccggccagagcaaggtggccgcctggctgcaggacagcgaggagatggacagatgcgccgaggacctggcccactgccagagcaacctggtggagctgagcaagctgctgcagaacctggagatcctgcagagaacccagagcgcccccaacttcaccgacatgcaggccaactgcgtggacatcagcaagaaggacaagagagtgaccagaagatggagaaccaagagcgtgagcaaggacaccaagatccagctgcaggtgcccttcagcgccaccatgagccccgtgagactgcacagcagcaaccccaacctgtgcgccgacatcgagttccagaccccccccagccacctgaccgaccccctggagagcagcaccgactacaccaagctgcaggaggagttctgcctgatcgcccagaaggtgcacagcctgctgaagagcgccttcaacagcatcgccatcgagaaggagaagctgaagcagatggtgagcgagcaggaccacagcaagggccacagcacccagatggccagactgagacagagcctgagccaggccggcgagcagatccacgtgagcctgcccctgagccagcaggtggccaacgagagcagactgagcatgagcgagagcgtgagcgagttcttcgacgcccaggaggtgctgctgagcgccagcagcagcgagaacgaggccagcgacgacgagagctacatcagcgacgtgagcgacaacatcagcgaggacaacaccagcgtggccgacaacatcagcagacagatcctgaacggcgagctgaccggcggcgccttcagaaacggcagaagagcctgcctgcccgccccctgccccgacaccagcaacatcaacctgtggaacatcctgagaaacaacatcggcaaggacctgagcaaggtgagcatgcccgtggagctgaacgagcccctgaacaccctgcagcacctgtgcgaggagatggagtacagcgagctgctggacaaggccagcgagaccgacgacccctacgagagaatggtgctggtggccgccttcgccgtgagcggctactgcagcacctacttcagagccggcagcaagcccttcaaccccgtgctgggcgagacctacgagtgcatcagagaggacaagggcttcagattcttcagcgagcaggtgagccaccacccccccatcagcgcctgccactgcgagagcaagaacttcgtgttctggcaggacatcagatggaagaacaagttctggggcaagagcatggagatcctgcccgtgggcaccctgaacgtgatgctgcccaagtacggcgactactacgtgtggaacaaggtgaccacctgcatccacaacatcctgagcggcagaagatggatcgagcactacggcgaggtgaccatcagaaacaccaagagcagcgtgtgcatctgcaagctgaccttcgtgaaggtgaactactggaacagcaacatgaacgaggtgcagggcgtggtgatcgaccaggagggcaaggccgtgtacagactgttcggcaagtggcacgagggcctgtactgcggcgtggcccccagcgccaagtgcatctggagacccggcagcatgcccaccaactacgagctgtactacggcttcaccagattcgccatcgagctgaacgagctggaccccgtgctgaaggacctgctgccccccaccgacgccagattcagacccgaccagagattcctggaggagggcaacctggaggccgccgccagcgagaagcagagagtggaggagctgcagagaagcagaagaagatacatggaggagaacaacctggagcacatccccaagttcttcaagaaggtgatcgacgccaaccagagagaggcctgggtgagcaacgacacctactgggagctgagaaaggaccccggcttcagcaaggtggacagccccgtgctgtggtag

SEQ ID NO: 92198 - DNA, 573 bp, synthetic construct
  misc_feature 1..573: note = Description of Artificial Sequence: Synthetic coding sequence
  source 1..573: mol_type = other DNA
atggacggcaagatgcagcccaacagcttcccctggcagagccccctgccctgcagcaacagcctgcccgccacctgcaccaccggccagagcaaggtggccgcctggctgcaggacagcgaggagatggacagatgcgccgaggacctggcccactgccagagcaacctggtggagctgagcaagctgctgcagaacctggagatcctgcagagaacccagagcgcccccaacttcaccgacatgcaggccaactgcgtggacatcagcaagaaggacaagagagtgaccagaagatggagaaccaagagcgtgagcaaggacaccaagatccagctgcaggtgcccttcagcgccaccatgagccccgtgagactgcacagcagcaaccccaacctgtgcgccgacatcgagttccagacccccccccccaaccacttcggcatcctgagcgtgctgctgcagccctacagcctgaagaagaagaagaagaagaagaagaagagcacccccagcctggagagcagaatcaagggcgccgagtacaagatccagagcctgaccagcctgtag

SEQ ID NO: 92199 - DNA, 2880 bp, synthetic construct
  misc_feature 1..2880: note = Description of Artificial Sequence: Synthetic coding sequence
  source 1..2880: mol_type = other DNA
atgagcagcgacgagaagggcatcagccccgcccacaagaccagcacccccacccacagaagcgccagcagcagcaccagcagccagagagacagcagacagagcatccacatcctggagagaaccgccagcagcagcaccgagcccagcgtgagcagacagctgctggagcccgagcccgtgcccctgagcaaggaggccgacagctgggagatcatcgagggcctgaagatcggccagaccaacgtgcagaagcccgacaagcacgagggcttcatgctgaagaagagaaagtggcccctgaagggctggcacaagagattcttcgtgctggacaacggcatgctgaagtacagcaaggcccccctggacatccagaagggcaaggtgcacggcagcatcgacgtgggcctgagcgtgatgagcatcaagaagaaggccagaagaatcgacctggacaccgaggagcacatctaccacctgaaggtgaagagccaggactggttcgacgcctgggtgagcaagctgagacaccacagactgtacagacagaacgagatcgtgagaagccccagagacgccagcttccacatcttccccagcaccagcaccgccgagagcagccccgccgccaacgtgagcgtgatggacggcaagatgcagcccaacagcttcccctggcagagccccctgccctgcagcaacagcctgcccgccacctgcaccaccggccagagcaaggtggccgcctggctgcaggacagcgaggagatggacagatgcgccgaggacctggcccactgccagagcaacctggtggagctgagcaagctgctgcagaacctggagatcctgcagagaacccagagcgcccccaacttcaccgacatgcaggccaactgcgtggacatcagcaagaaggacaagagagtgaccagaagatggagaaccaagagcgtgagcaaggacaccaagatccagctgcaggagggcccccccgccaagggccagttcagcaccaccagaagaagacagagactggccgccgccgtggccaccaccgtgcccttcagcgccaccatgagccccgtgagactgcacagcagcaaccccaacctgtgcgccgacatcgagttccagaccccccccagccacctgaccgaccccctggagagcagcaccgactacaccaagctgcaggaggagttctgcctgatcgcccagaaggtgcacagcctgctgaagagcgccttcaacagcatcgccatcgagaaggagaagctgaagcagatggtgagcgagcaggaccacagcaagggccacagcacccagatggccagactgagacagagcctgagccaggccctgaaccagaacgccgagctgagaagcagactgaacagaatccacagcgagagcatcatctgcgaccaggtggtgagcgtgaacatcatccccagccccgacgaggccggcgagcagatccacgtgagcctgcccctgagccagcaggtggccaacgagagcagactgagcatgagcgagagcgtgagcgagttcttcgacgcccaggaggtgctgctgagcgccagcagcagcgagaacgaggccagcgacgacgagagctacatcagcgacgtgagcgacaacatcagcgaggacaacaccagcgtggccgacaacatcagcagacagatcctgaacggcgagctgaccggcggcgccttcagaaacggcagaagagcctgcctgcccgccccctgccccgacaccagcaacatcaacctgtggaacatcctgagaaacaacatcggcaaggacctgagcaaggtgagcatgcccgtggagctgaacgagcccctgaacaccctgcagcacctgtgcgaggagatggagtacagcgagctgctggacaaggccagcgagaccgacgacccctacgagagaatggtgctggtggccgccttcgccgtgagcggctactgcagcacctacttcagagccggcagcaagcccttcaaccccgtgctgggcgagacctacgagtgcatcagagaggacaagggcttcagattcttcagcgagcaggtgagccaccacccccccatcagcgcctgccactgcgagagcaagaacttcgtgttctggcaggacatcagatggaagaacaagttctggggcaagagcatggagatcctgcccgtgggcaccctgaacgtgatgctgcccaagtacggcgactactacgtgtggaacaaggtgaccacctgcatccacaacatcctgagcggcagaagatggatcgagcactacggcgaggtgaccatcagaaacaccaagagcagcgtgtgcatctgcaagctgaccttcgtgaaggtgaactactggaacagcaacatgaacgaggtgcagggcgtggtgatcgaccaggagggcaaggccgtgtacagactgttcggcaagtggcacgagggcctgtactgcggcgtggcccccagcgccaagtgcatctggagacccggcagcatgcccaccaactacgagctgtactacggcttcaccagattcgccatcgagctgaacgagctggaccccgtgctgaaggacctgctgccccccaccgacgccagattcagacccgaccagagattcctggaggagggcaacctggaggccgccgccagcgagaagcagagagtggaggagctgcagagaagcagaagaagatacatggaggagaacaacctggagcacatccccaagttcttcaagaaggtgatcgacgccaaccagagagaggcctgggtgagcaacgacacctactgggagctgagaaaggaccccggcttcagcaaggtggacagccccgtgctgtggtag

SEQ ID NO: 92200 - DNA, 2712 bp, synthetic construct
  misc_feature 1..2712: note = Description of Artificial Sequence: Synthetic coding sequence
  source 1..2712: mol_type = other DNA
atgagcagcgacgagaagggcatcagccccgcccacaagaccagcacccccacccacagaagcgccagcagcagcaccagcagccagagagacagcagacagagcatccacatcctggagagaaccgccagcagcagcaccgagcccagcgtgagcagacagctgctggagcccgagcccgtgcccctgagcaaggaggccgacagctgggagatcatcgagggcctgaagatcggccagaccaacgtgcagaagcccgacaagcacgagggcttcatgctgaagaagagaaagtggcccctgaagggctggcacaagagattcttcgtgctggacaacggcatgctgaagtacagcaaggcccccctggacatccagaagggcaaggtgcacggcagcatcgacgtgggcctgagcgtgatgagcatcaagaagaaggccagaagaatcgacctggacaccgaggagcacatctaccacctgaaggtgaagagccaggactggttcgacgcctgggtgagcaagctgagacaccacagactgtacagacagaacgagatcgtgagaagccccagagacgccagcttccacatcttccccagcaccagcaccgccgagagcagccccgccgccaacgtgagcgtgatggacggcaagatgcagcccaacagcttcccctggcagagccccctgccctgcagcaacagcctgcccgccacctgcaccaccggccagagcaaggtggccgcctggctgcaggacagcgaggagatggacagatgcgccgaggacctggcccactgccagagcaacctggtggagctgagcaagctgctgcagaacctggagatcctgcagagaacccagagcgcccccaacttcaccgacatgcaggtgcccttcagcgccaccatgagccccgtgagactgcacagcagcaaccccaacctgtgcgccgacatcgagttccagaccccccccagccacctgaccgaccccctggagagcagcaccgactacaccaagctgcaggaggagttctgcctgatcgcccagaaggtgcacagcctgctgaagagcgccttcaacagcatcgccatcgagaaggagaagctgaagcagatggtgagcgagcaggaccacagcaagggccacagcacccagatggccagactgagacagagcctgagccaggccctgaaccagaacgccgagctgagaagcagactgaacagaatccacagcgagagcatcatctgcgaccaggtggtgagcgtgaacatcatccccagccccgacgaggccggcgagcagatccacgtgagcctgcccctgagccagcaggtggccaacgagagcagactgagcatgagcgagagcgtgagcgagttcttcgacgcccaggaggtgctgctgagcgccagcagcagcgagaacgaggccagcgacgacgagagctacatcagcgacgtgagcgacaacatcagcgaggacaacaccagcgtggccgacaacatcagcagacagatcctgaacggcgagctgaccggcggcgccttcagaaacggcagaagagcctgcctgcccgccccctgccccgacaccagcaacatcaacctgtggaacatcctgagaaacaacatcggcaaggacctgagcaaggtgagcatgcccgtggagctgaacgagcccctgaacaccctgcagcacctgtgcgaggagatggagtacagcgagctgctggacaaggccagcgagaccgacgacccctacgagagaatggtgctggtggccgccttcgccgtgagcggctactgcagcacctacttcagagccggcagcaagcccttcaaccccgtgctgggcgagacctacgagtgcatcagagaggacaagggcttcagattcttcagcgagcaggtgagccaccacccccccatcagcgcctgccactgcgagagcaagaacttcgtgttctggcaggacatcagatggaagaacaagttctggggcaagagcatggagatcctgcccgtgggcaccctgaacgtgatgctgcccaagtacggcgactactacgtgtggaacaaggtgaccacctgcatccacaacatcctgagcggcagaagatggatcgagcactacggcgaggtgaccatcagaaacaccaagagcagcgtgtgcatctgcaagctgaccttcgtgaaggtgaactactggaacagcaacatgaacgaggtgcagggcgtggtgatcgaccaggagggcaaggccgtgtacagactgttcggcaagtggcacgagggcctgtactgcggcgtggcccccagcgccaagtgcatctggagacccggcagcatgcccaccaactacgagctgtactacggcttcaccagattcgccatcgagctgaacgagctggaccccgtgctgaaggacctgctgccccccaccgacgccagattcagacccgaccagagattcctggaggagggcaacctggaggccgccgccagcgagaagcagagagtggaggagctgcagagaagcagaagaagatacatggaggagaacaacctggagcacatccccaagttcttcaagaaggtgatcgacgccaaccagagagaggcctgggtgagcaacgacacctactgggagctgagaaaggaccccggcttcagcaaggtggacagccccgtgctgtggtag

SEQ ID NO: 92201 - DNA, 2529 bp, synthetic construct
  misc_feature 1..2529: note = Description of Artificial Sequence: Synthetic coding sequence
  source 1..2529: mol_type = other DNA
atggacttccaggagagagacccccccttcctgcccgagagcgcccagagcagcaagcccagcagcgcccagcaggccagcgagctgtgggaggtggtggaggagcccagagtgagactgggcaccgagggcgtgatgcccgagagacaggagggccacctgctgaagaagagaaagtggcccctgaagggctggcacaagagatacttcgtgctggaggacggcatcctgcactacgccaccaccagacaggacatcaccaagggcaagctgcacggcagcatcgacgtgagactgagcgtgatgagcatcaacaagaaggcccagagaatcgacctggacaccgaggacaacatctaccacctgaagatcaagagccaggacctgttccagagctgggtggcccagctgagagcccacagactggcccacagactggacatgcccagaggcagcctgcccagcaccgcccacagaaaggtgcccggcgcccagctgcccaccgccgccaccgccagcgccctgcccggcctgggccccagagagaaggtgagcagctggctgagagacagcgacggcctggacagatgcagccacgagctgagcgagtgccagggcaagctgcaggagctgcacagactgctgcagagcctggagagcctgcacagaatccccagcgcccccgtgatccccacccaccaggccagcgtgaccaccgagagacccaagaagggcaagagaaccagcagaatgtggtgcacccagagcttcgccaaggacgacaccatcggcagagtgggcagactgcacggcagcgtgcccaacctgagcagatacctggagagcagagacagcagcggcaccagaggcctgccccccaccgactacgcccacctgcagagaagcttctgggccctggcccagaaggtgcacagcagcctgagcagcgtgctggccgccctgaccatggagagagaccagctgagagacatgcaccagggcagcgagctgagcagaatgggcgtgagcgaggccagcaccggccagagaagactgcacagcctgagcaccagcagcgacaccaccgccgacagcttcagcagcctgaaccccgaggagcaggaggccctgtacatgaagggcagagagctgaccccccagctgagccagaccagcatcctgagcctggccgacagccacaccgagttcttcgacgcctgcgaggtgctgctgagcgccagcagcagcgagaacgagggcagcgaggaggaggagagctgcaccagcgagatcaccaccagcctgagcgaggagatgctggacctgagaggcgccgagagatgccagaagggcggctgcgtgcccggcagacccatgggcccccccagaagaagatgcctgcccgccgccagcggccccggcgccgacgtgagcctgtggaacatcctgagaaacaacatcggcaaggacctgagcaaggtgagcatgcccgtgcagctgaacgagcccctgaacaccctgcagagactgtgcgaggagctggagtacagcagcctgctggaccaggccagcagaatcgccgacccctgcgagagaatggtgtacatcgccgccttcgccgtgagcgcctacagcagcacctaccacagagccggctgcaagcccttcaaccccgtgctgggcgagacctacgagtgcgagagacccgacagaggcttcagattcatcagcgagcaggtgagccaccacccccccatcagcgcctgccacgccgagagcgagaacttcgccttctggcaggacatgaagtggaagaacaagttctggggcaagagcctggagatcgtgcccgtgggcaccgtgaacgtgagcctgcccagattcggcgaccacttcgagtggaacaaggtgaccagctgcatccacaacgtgctgagcggccagagatggatcgagcactacggcgaggtgctgatcagaaacacccaggacagcagctgccactgcaagatcaccttctgcaaggccaagtactggagcagcaacgtgcacgaggtgcagggcgccgtgctgagcagaagcggcagagtgctgcacagactgttcggcaagtggcacgagggcctgtacagaggccccacccccggcggccagtgcatctggaagcccaacagcatgccccccgaccacgagagaaacttcggcttcacccagttcgccctggagctgaacgagctgaccgccgagctgaagagaagcctgcccagcaccgacaccagactgagacccgaccagagatacctggaggagggcaacatccaggccgccgaggcccagaagagaagaatcgagcagctgcagagagacagaagaaaggtgatggaggagaacaacatcgtgcaccaggccagattcttcagaagacagaccgacagcagcggcaaggagtggtgggtgaccaacaacacctactggagactgagagccgagcccggctacggcaacatggacggcgccgtgctgtggtag

SEQ ID NO: 92202 - DNA, 2529 bp, synthetic construct; identical to SEQ ID NO: 92201
  misc_feature 1..2529: note = Description of Artificial Sequence: Synthetic coding sequence
  source 1..2529: mol_type = other DNA

SEQ ID NO: 92203 - DNA, 2670 bp, synthetic construct
  misc_feature 1..2670: note = Description of Artificial Sequence: Synthetic coding sequence
  source 1..2670: mol_type = other DNA
atggagggcggcctggccgacggcgagcccgacagaaccagcctgctgggcgacagcaaggacgtgctgggccccagcaccgtggtggccaacagcgacgagagccagctgctgacccccggcaagatgagccagagacagggcaaggaggcctaccccacccccaccaaggacctgcaccagcccagcctgagccccgccagcccccacagccagggcttcgagagaggcaaggaggacatcagccagaacaaggacgagagcagcctgagcatgagcaagagcaagagcgagagcaagctgtacaacggcagcgagaaggacagcagcaccagcagcaagctgaccaagaaggagagcctgaaggtgcagaagaagaactacagagaggagaagaagagagccaccaaggagctgctgagcaccatcaccgaccccagcgtgatcgtgatggccgactggctgaagatcagaggcaccctgaagagctggaccaagctgtggtgcgtgctgaagcccggcgtgctgctgatctacaagacccagaagaacggccagtgggtgggcaccgtgctgctgaacgcctgcgagatcatcgagagacccagcaagaaggacggcttctgcttcaagctgttccaccccctggagcagagcatctgggccgtgaagggccccaagggcgaggccgtgggcagcatcacccagcccctgcccagcagctacctgatcatcagagccaccagcgagagcgacggcagatgctggatggacgccctggagctggccctgaagtgcagcagcctgctgaagagaaccatgatcagagagggcaaggagcacgacctgagcgtgagcagcgacagcacccacgtgaccttctacggcctgctgagagccaacaacctgcacagcggcgacaacttccagctgaacgacagcgagatcgagagacagcacttcaaggaccaggacatgtacagcgacaagagcgacaaggagaacgaccaggagcacgacgagagcgacaacgaggtgatgggcaagagcgaggagagcgacaccgacaccagcgagagacaggacgacagctacatcgagcccgagcccgtggagcccctgaaggagaccacctacaccgagcagagccacgaggagctgggcgaggccggcgaggccagccagaccgagaccgtgagcgaggagaacaagagcctgatctggaccctgctgaagcaggtgagacccggcatggacctgagcaaggtggtgctgcccaccttcatcctggagcccagaagcttcctggacaagctgagcgactactactaccacgccgacttcctgagcgaggccgccctggaggagaacccctacttcagactgaagaaggtggtgaagtggtacctgagcggcttctacaagaagcccaagggcctgaagaagccctacaaccccatcctgggcgagaccttcagatgcctgtggatccaccccagaaccaacagcaagaccttctacatcgccgagcaggtgagccaccacccccccatcagcgccttctacgtgagcaacagaaaggacggcttctgcctgagcggcagcatcctggccaagagcaagttctacggcaacagcctgagcgccatcctggagggcgaggccagactgaccttcctgaacagaggcgaggactacgtgatgaccatgccctacgcccactgcaagggcatcctgtacggcaccatgaccctggagctgggcggcaccgtgaacatcacctgccagaagaccggctacagcgccatcctggagttcaagctgaagcccttcctgggcagcagcgactgcgtgaaccagatcagcggcaagctgaagctgggcaaggaggtgctggccaccctggagggccactgggacagcgaggtgttcatcaccgacaagaagaccgacaacagcgaggtgttctggaaccccacccccgacatcaagcagtggagactgatcagacacaccgtgaagttcgaggagcagggcgacttcgagagcgagaagctgtggcagagagtgaccagagccatcaacgccaaggaccagaccgaggccacccaggagaagtacgtgctggaggaggcccagagacaggccgccagagacagaaagaccaagaacgaggagtggagctgcaagctgttcgagctggaccccctgaccggcgagtggcactacaagttcgccgacaccagaccctgggaccccctgaacgacatgatccagttcgagaaggacggcgtgatccagaccaaggtgaagcacagaacccccatggtgagcgtgcccaagatgaagcacaagcccaccagacagcagaagaaggtggccaagggctacagcagccccgagcccgacatccaggacagcagcggcagcgaggcccagagcgtgaagcccagcaccagaagaaagaagggcatcgagctgggcgacatccagagcagcatcgagagcatcaagcagacccaggaggagatcaagagaaacatcatggccctgagaaaccacctggtgagcagcacccccgccaccgactacttcctgcagcagaaggactacttcatcatcttcctgctgatcctgctgcaggtgatcatcaacttcatgttcaagtag

SEQ ID NO: 92204 - DNA, 2544 bp, synthetic construct
  misc_feature 1..2544: note = Description of Artificial Sequence: Synthetic coding sequence
  source 1..2544: mol_type = other DNA
atgagccagagacagggcaaggaggcctaccccacccccaccaaggacctgcaccagcccagcctgagccccgccagcccccacagccagggcttcgagagaggcaaggaggacatcagccagaacaaggacgagagcagcctgagcatgagcaagagcaagagcgagagcaagctgtacaacggcagcgagaaggacagcagcaccagcagcaagctgaccaagaaggagagcctgaaggtgcagaagaagaactacagagaggagaagaagagagccaccaaggagctgctgagcaccatcaccgaccccagcgtgatcgtgatggccgactggctgaagatcagaggcaccctgaagagctggaccaagctgtggtgcgtgctgaagcccggcgtgctgctgatctacaagacccagaagaacggccagtgggtgggcaccgtgctgctgaacgcctgcgagatcatcgagagacccagcaagaaggacggcttctgcttcaagctgttccaccccctggagcagagcatctgggccgtgaagggccccaagggcgaggccgtgggcagcatcacccagcccctgcccagcagctacctgatcatcagagccaccagcgagagcgacggcagatgctggatggacgccctggagctggccctgaagtgcagcagcctgctgaagagaaccatgatcagagagggcaaggagcacgacctgagcgtgagcagcgacagcacccacgtgaccttctacggcctgctgagagccaacaacctgcacagcggcgacaacttccagctgaacgacagcgagatcgagagacagcacttcaaggaccaggacatgtacagcgacaagagcgacaaggagaacgaccaggagcacgacgagagcgacaacgaggtgatgggcaagagcgaggagagcgacaccgacaccagcgagagacaggacgacagctacatcgagcccgagcccgtggagcccctgaaggagaccacctacaccgagcagagccacgaggagctgggcgaggccggcgaggccagccagaccgagaccgtgagcgaggagaacaagagcctgatctggaccctgctgaagcaggtgagacccggcatggacctgagcaaggtggtgctgcccaccttcatcctggagcccagaagcttcctggacaagctgagcgactactactaccacgccgacttcctgagcgaggccgccctggaggagaacccctacttcagactgaagaaggtggtgaagtggtacctgagcggcttctacaagaagcccaagggcctgaagaagccctacaaccccatcctgggcgagaccttcagatgcctgtggatccaccccagaaccaacagcaagaccttctacatcgccgagcaggtgagccaccacccccccatcagcgccttctacgtgagcaacagaaaggacggcttctgcctgagcggcagcatcctggccaagagcaagttctacggcaacagcctgagcgccatcctggagggcgaggccagactgaccttcctgaacagaggcgaggactacgtgatgaccatgccctacgcccactgcaagggcatcctgtacggcaccatgaccctggagctgggcggcaccgtgaacatcacctgccagaagaccggctacagcgccatcctggagttcaagctgaagcccttcctgggcagcagcgactgcgtgaaccagatcagcggcaagctgaagctgggcaaggaggtgctggccaccctggagggccactgggacagcgaggtgttcatcaccgacaagaagaccgacaacagcgaggtgttctggaaccccacccccgacatcaagcagtggagactgatcagacacaccgtgaagttcgaggagcagggcgacttcgagagcgagaagctgtggcagagagtgaccagagccatcaacgccaaggaccagaccgaggccacccaggagaagtacgtgctggaggaggcccagagacaggccgccagagacagaaagaccaagaacgaggagtggagctgcaagctgttcgagctggaccccctgaccggcgagtggcactacaagttcgccgacaccagaccctgggaccccctgaacgacatgatccagttcgagaaggacggcgtgatccagaccaaggtgaagcacagaacccccatggtgagcgtgcccaagatgaagcacaagcccaccagacagcagaagaaggtggccaagggctacagcagccccgagcccgacatccaggacagcagcggcagcgaggcccagagcgtgaagcccagcaccagaagaaagaagggcatcgagctgggcgacatccagagcagcatcgagagcatcaagcagacccaggaggagatcaagagaaacatcatggccctgagaaaccacctggtgagcagcacccccgccaccgactacttcctgcagcagaaggactacttcatcatcttcctgctgatcctgctgcaggtgatcatcaacttcatgttcaagtag

SEQ ID NO: 92205 - DNA, 2544 bp, synthetic construct; identical to SEQ ID NO: 92204
  misc_feature 1..2544: note = Description of Artificial Sequence: Synthetic coding sequence
  source 1..2544: mol_type = other DNA

SEQ ID NO: 92206 - DNA, 2187 bp, synthetic construct
  misc_feature 1..2187: note = Description of Artificial Sequence: Synthetic coding sequence
  source 1..2187: mol_type = other DNA
atggagggcggcctggccgacggcgagcccgacagaaccagcctgctgggcgacagcaaggacgtgctgggccccagcaccgtggtggccaacagcgacgagagccagctgctgacccccggcaagatgagccagagacagggcaaggaggcctaccccacccccaccaaggacctgcaccagcccagcctgagccccgccagcccccacagccagggcttcgagagaggcaaggaggacatcagccagaacaaggacgagagcagcctgagcatgagcaagagcaagagcgagagcaagctgtacaacggcagcgagaaggacagcagcaccagcagcaagctgaccaagaaggagagcctgaaggtgcagaagaagaactacagagaggagaagaagagagccaccaaggagctgctgagcaccatcaccgaccccagcgtgatcgtgatggccgactggctgaagatcagaggcaccctgaagagctggaccaagctgtggtgcgtgctgaagcccggcgtgctgctgatctacaagacccagaagaacggccagtgggtgggcaccgtgctgctgaacgcctgcgagatcatcgagagacccagcaagaaggacggcttctgcttcaagctgttccaccccctggagcagagcatctgggccgtgaagggccccaagggcgaggccgtgggcagcatcacccagcccctgcccagcagctacctgatcatcagagccaccagcgagagcgacggcagatgctggatggacgccctggagctggccctgaagtgcagcagcctgctgaagagaaccatgatcagagagggcaaggagcacgacctgagcgtgagcagcgacagcacccacgtgaccttctacggcctgctgagagccaacaacctgcacagcggcgacaacttccagctgaacgacagcgagatcgagagacagcacttcaaggaccaggacatgtacagcgacaagagcgacaaggagaacgaccaggagcacgacgagagcgacaacgaggtgatgggcaagagcgaggagagcgacaccgacaccagcgagagacaggacgacagctacatcgagcccgagcccgtggagcccctgaaggagaccacctacaccgagcagagccacgaggagctgggcgaggccggcgaggccagccagaccgagaccgtgagcgaggagaacaagagcctgatctggaccctgctgaagcaggtgagacccggcatggacctgagcaaggtggtgctgcccaccttcatcctggagcccagaagcttcctggacaagctgagcgactactactaccacgccgacttcctgagcgaggccgccctggaggagaacccctacttcagactgaagaaggtggtgaagtggtacctgagcggcttctacaagaagcccaagggcctgaagaagccctacaaccccatcctgggcgagaccttcagatgcctgtggatccaccccagaaccaacagcaagaccttctacatcgccgagcaggtgagccaccacccccccatcagcgccttctacgtgagcaacagaaaggacggcttctgcctgagcggcagcatcctggccaagagcaagttctacggcaacagcctgagcgccatcctggagggcgaggccagactgaccttcctgaacagaggcgaggactacgtgatgaccatgccctacgcccactgcaagggcatcctgtacggcaccatgaccctggagctgggcggcaccgtgaacatcacctgccagaagaccggctacagcgccatcctggagttcaagctgaagcccttcctgggcagcagcgactgcgtgaaccagatcagcggcaagctgaagctgggcaaggaggtgctggccaccctggagggccactgggacagcgaggtgttcatcaccgacaagaagaccgacaacagcgaggtgttctggaaccccacccccgacatcaagcagtggagactgatcagacacaccgtgaagttcgaggagcagggcgacttcgagagcgagaagctgtggcagagagtgaccagagccatcaacgccaaggaccagaccgaggccacccaggagaagtacgtgctggaggaggcccagagacaggccgccagagacagaaagaccaagaacgagaagaagaagtag

SEQ ID NO: 92207 - DNA, 2625 bp, synthetic construct
  misc_feature 1..2625: note = Description of Artificial Sequence: Synthetic coding sequence
  source 1..2625: mol_type = other DNA
atggagggcggcctggccgacggcgagcccgacagaaccagcgccaacagcgacgagagccagctgctgacccccggcaagatgagccagagacagggcaaggaggcctaccccacccccaccaaggacctgcaccagcccagcctgagccccgccagcccccacagccagggcttcgagagaggcaaggaggacatcagccagaacaaggacgagagcagcctgagcatgagcaagagcaagagcgagagcaagctgtacaacggcagcgagaaggacagcagcaccagcagcaagctgaccaagaaggagagcctgaaggtgcagaagaagaactacagagaggagaagaagagagccaccaaggagctgctgagcaccatcaccgaccccagcgtgatcgtgatggccgactggctgaagatcagaggcaccctgaagagctggaccaagctgtggtgcgtgctgaagcccggcgtgctgctgatctacaagacccagaagaacggccagtgggtgggcaccgtgctgctgaacgcctgcgagatcatcgagagacccagcaagaaggacggcttctgcttcaagctgttccaccccctggagcagagcatctgggccgtgaagggccccaagggcgaggccgtgggcagcatcacccagcccctgcccagcagctacctgatcatcagagccaccagcgagagcgacggcagatgctggatggacgccctggagctggccctgaagtgcagcagcctgctgaagagaaccatgatcagagagggcaaggagcacgacctgagcgtgagcagcgacagcacccacgtgaccttctacggcctgctgagagccaacaacctgcacagcggcgacaacttccagctgaacgacagcgagatcgagagacagcacttcaaggaccaggacatgtacagcgacaagagcgacaaggagaacgaccaggagcacgacgagagcgacaacgaggtgatgggcaagagcgaggagagcgacaccgacaccagcgagagacaggacgacagctacatcgagcccgagcccgtggagcccctgaaggagaccacctacaccgagcagagccacgaggagctgggcgaggccggcgaggccagccagaccgagaccgtgagcgaggagaacaagagcctgatctggaccctgctgaagcaggtgagacccggcatggacctgagcaaggtggtgctgcccaccttcatcctggagcccagaagcttcctggacaagctgagcgactactactaccacgccgacttcctgagcgaggccgccctggaggagaacccctacttcagactgaagaaggtggtgaagtggtacctgagcggcttctacaagaagcccaagggcctgaagaagccctacaaccccatcctgggcgagaccttcagatgcctgtggatccaccccagaaccaacagcaagaccttctacatcgccgagcaggtgagccaccacccccccatcagcgccttctacgtgagcaacagaaaggacggcttctgcctgagcggcagcatcctggccaagagcaagttctacggcaacagcctgagcgccatcctggagggcgaggccagactgaccttcctgaacagaggcgaggactacgtgatgaccatgccctacgcccactgcaagggcatcctgtacggcaccatgaccctggagctgggcggcaccgtgaacatcacctgccagaagaccggctacagcgccatcctggagttcaagctgaagcccttcctgggcagcagcgactgcgtgaaccagatcagcggcaagctgaagctgggcaaggaggtgctggccaccctggagggccactgggacagcgaggtgttcatcaccgacaagaagaccgacaacagcgaggtgttctggaaccccacccccgacatcaagcagtggagactgatcagacacaccgtgaagttcgaggagcagggcgacttcgagagcgagaagctgtggcagagagtgaccagagccatcaacgccaaggaccagaccgaggccacccaggagaagtacgtgctggaggaggcccagagacaggccgccagagacagaaagaccaagaacgaggagtggagctgcaagctgttcgagctggaccccctgaccggcgagtggcactacaagttcgccgacaccagaccctgggaccccctgaacgacatgatccagttcgagaaggacggcgtgatccagaccaaggtgaagcacagaacccccatggtgagcgtgcccaagatgaagcacaagcccaccagacagcagaagaaggtggccaagggctacagcagccccgagcccgacatccaggacagcagcggcagcgaggcccagagcgtgaagcccagcaccagaagaaagaagggcatcgagctgggcgacatccagagcagcatcgagagcatcaagcagacccaggaggagatcaagagaaacatcatggccctgagaaaccacctggtgagcagcacccccgccaccgactacttcctgcagcagaaggactacttcatcatcttcctgctgatcctgctgcaggtgatcatcaacttcatgttcaagtag

SEQ ID NO: 92208 - DNA, 162 bp, synthetic construct
  misc_feature 1..162: note = Description of Artificial Sequence: Synthetic coding sequence
  source 1..162: mol_type = other DNA
atggagggcggcctggccgacggcgagcccgacagaaccagcctgctgggcgacagcaaggacgtgctgggccccagcaccaacagcgacgagagccagctgctgacccccggcaagatgagccagagacagggcaaggaggcctaccccacccccacctag

SEQ ID NO: 92209 - DNA, 231 bp, synthetic construct
  misc_feature 1..231: note = Description of Artificial Sequence: Synthetic coding sequence
  source 1..231: mol_type = other DNA
atgagccagagacagggcaaggaggcctaccccacccccaccaaggacctgcaccagcccagcctgagccccgccagcccccacagccagggcttcgagagaggcaaggaggacatcagccagaacaaggacgagagcagcctgagcatgagcaagagcaagagcgagagcaagctgtacaacggcagcgagaaggacagcagcaccagcagcaagctgaccaagaagtag

SEQ ID NO: 92210 - DNA, 177 bp, synthetic construct
  misc_feature 1..177: note = Description of Artificial Sequence: Synthetic coding sequence
  source 1..177: mol_type = other DNA
atggagggcggcctggccgacggcgagcccgacagaaccagcctgctgggcgacagcaaggacgtgctgggccccagcaccgtggtggccaacagcgacgagagccagctgctgacccccggcaagatgagccagagacagggcaaggaggcctaccccacccccaccaaggactag

SEQ ID NO: 92211 - DNA, 336 bp, synthetic construct
  misc_feature 1..336: note = Description of Artificial Sequence: Synthetic coding sequence
  source 1..336: mol_type = other DNA
atgagccagagacagggcaaggaggcctaccccacccccaccaaggacctgcaccagcccagcctgagccccgccagcccccacagccagggcttcgagagaggcaaggaggacatcagccagaacaaggacgagagcagcctgagcatgagcaagagcaagagcgagagcaagctgtacaacggcagcgagaaggacagcagcaccagcagcaagctgaccaagaaggagagcctgaaggtgcagaagaagaactacagagaggagaagaagagagccaccaaggagctgctgagcaccatcaccgaccccagcgtgatcgtgatggccgactag

SEQ ID NO: 92212 - DNA, 2226 bp, synthetic construct
  misc_feature 1..2226: note = Description of Artificial Sequence: Synthetic coding sequence
  source 1..2226: mol_type = other DNA
atgccctacagaagagtgaccagcggcagactgctgagcctggccgcccccaagatggccagcatcatggagggccccctgagcaagtggaccaacgtgatgaagggctggcagtacagatggttcgtgctggactacaacgccggcctgctgagctactacaccagcaaggacaagatgatgagaggcagcagaagaggctgcgtgagactgagaggcgccgtgatcggcatcgacgacgaggacgacagcaccttcaccatcaccgtggaccagaagaccttccacttccaggccagagacgccgacgagagagagaagtggatccacgccctggaggagaccatcctgagacacaccctgcagctgcagggcctggacagcggcttcgtgcccagcgtgcaggacttcgacaagaagctgaccgaggccgacgcctacctgcagatcctgatcgagcagctgaagctgttcgacgacaagctgcagaactgcaaggaggacgagcagagaaagaagatcgagaccctgaaggagaccaccaacagcatggtggagagcatcaagcactgcatcgtgctgctgcagatcgccaagagcaccatcaaccccgtggacgccatctaccagcccagccccctggagcccgtgatcagcaccatgcccagccagaccgtgctgccccccgagcccgtgcagctgtgcaagagcgagcagagacccagcagcctgcccgtgggccccgtgctggccaccctgggccaccaccagacccccacccccaacagcaccggcagcggccacagcccccccagcagcagcctgaccagccccagccacgtgaacctgagccccaacaccgtgcccgagttcagctacagcagcagcgaggacgagttctacgacgccgacgagttccaccagagcggcagcagccccaagagactgatcgacagcagcggcagcgccagcgtgctgacccacagcagcagcggcaacagcctgaagagacccgacaccaccgagagcctgaacagcagcctgagcaacggcaccagcgacgccgacctgttcgacagccacgacgacagagacgacgacgccgaggccggcagcgtggaggagcacaagagcgtgatcatgcacctgctgagccaggtgagactgggcatggacctgaccaaggtggtgctgcccaccttcatcctggagagaagaagcctgctggagatgtacgccgacttcttcgcccaccccgacctgttcgtgagcatcagcgaccagaaggaccccaaggacagaatggtgcaggtggtgaagtggtacctgagcgccttccacgccggcagaaagggcagcgtggccaagaagccctacaaccccatcctgggcgagatcttccagtgccactggaccctgcccaacgacaccgaggagaacaccgagctggtgagcgagggccccgtgccctgggtgagcaagaacagcgtgaccttcgtggccgagcaggtgagccaccacccccccatcagcgccttctacgccgagtgcttcaacaagaagatccagttcaacgcccacatctggaccaagagcaagttcctgggcatgagcatcggcgtgcacaacatcggccagggctgcgtgagctgcctggactacgacgagcactacatcctgaccttccccaacggctacggcagaagcatcctgaccgtgccctgggtggagctgggcggcgagtgcaacatcaactgcagcaagaccggctacagcgccaacatcatcttccacaccaagcccttctacggcggcaagaagcacagaatcaccgccgagatcttcagccccaacgacaagaagagcttctgcagcatcgagggcgagtggaacggcgtgatgtacgccaagtacgccaccggcgagaacaccgtgttcgtggacaccaagaagctgcccatcatcaagaagaaggtgagaaagctggaggaccagaacgagtacgagagcagaagcctgtggaaggacgtgaccttcaacctgaagatcagagacatcgacgccgccaccgaggccaagcacagactggaggagagacagagagccgaggccagagagagaaaggagaaggagatccagtgggagaccagactgttccacgaggacggcgagtgctgggtgtacgacgagcccctgctgaagagactgggcgccgccaagcactag

SEQ ID NO: 92213 - DNA, 1881 bp, synthetic construct
  misc_feature 1..1881: note = Description of Artificial Sequence: Synthetic coding sequence
  source 1..1881: mol_type = other DNA
atggccttcctgctggccacctgcggcggcctggacagcggcttcgtgcccagcgtgcaggacttcgacaagaagctgaccgaggccgacgcctacctgcagatcctgatcgagcagctgaagctgttcgacgacaagctgcagaactgcaaggaggacgagcagagaaagaagatcgagaccctgaaggagaccaccaacagcatggtggagagcatcaagcactgcatcgtgctgctgcagatcgccaagagcaccatcaaccccgtggacgccatctaccagcccagccccctggagcccgtgatcagcaccatgcccagccagaccgtgctgccccccgagcccgtgcagctgtgcaagagcgagcagagacccagcagcctgcccgtgggccccgtgctggccaccctgggccaccaccagacccccacccccaacagcaccggcagcggccacagcccccccagcagcagcctgaccagccccagccacgtgaacctgagccccaacaccgtgcccgagttcagctacagcagcagcgaggacgagttctacgacgccgacgagttccaccagagcggcagcagccccaagagactgatcgacagcagcggcagcgccagcgtgctgacccacagcagcagcggcaacagcctgaagagacccgacaccaccgagagcctgaacagcagcctgagcaacggcaccagcgacgccgacctgttcgacagccacgacgacagagacgacgacgccgaggccggcagcgtggaggagcacaagagcgtgatcatgcacctgctgagccaggtgagactgggcatggacctgaccaaggtggtgctgcccaccttcatcctggagagaagaagcctgctggagatgtacgccgacttcttcgcccaccccgacctgttcgtgagcatcagcgaccagaaggaccccaaggacagaatggtgcaggtggtgaagtggtacctgagcgccttccacgccggcagaaagggcagcgtggccaagaagccctacaaccccatcctgggcgagatcttccagtgccactggaccctgcccaacgacaccgaggagaacaccgagctggtgagcgagggccccgtgccctgggtgagcaagaacagcgtgaccttcgtggccgagcaggtgagccaccacccccccatcagcgccttctacgccgagtgcttcaacaagaagatccagttcaacgcccacatctggaccaagagcaagttcctgggcatgagcatcggcgtgcacaacatcggccagggctgcgtgagctgcctggactacgacgagcactacatcctgaccttccccaacggctacggcagaagcatcctgaccgtgccctgggtggagctgggcggcgagtgcaacatcaactgcagcaagaccggctacagcgccaacatcatcttccacaccaagcccttctacggcggcaagaagcacagaatcaccgccgagatcttcagccccaacgacaagaagagcttctgcagcatcgagggcgagtggaacggcgtgatgtacgccaagtacgccaccggcgagaacaccgtgttcgtggacaccaagaagctgcccatcatcaagaagaaggtgagaaagctggaggaccagaacgagtacgagagcagaagcctgtggaaggacgtgaccttcaacctgaagatcagagacatcgacgccgccaccgaggccaagcacagactggaggagagacagagagccgaggccagagagagaaaggagaaggagatccagtgggagaccagactgttccacgaggacggcgagtgctgggtgtacgacgagcccctgctgaagagactgggcgccgccaagcactag

SEQ ID NO: 92214 - DNA, 2265 bp, synthetic construct
  misc_feature 1..2265: note = Description of Artificial Sequence: Synthetic coding sequence
  source 1..2265: mol_type = other DNA
atgccctacagaagagtgaccagcggcagactgctgagcctggccgcccccaagatggccagcatcatggagggccccctgagcaagtggaccaacgtgatgaagggctggcagtacagatggttcgtgctggactacaacgccggcctgctgagctactacaccagcaaggacaagatgatgagaggcagcagaagaggctgcgtgagactgagaggcgccgtgatcggcatcgacgacgaggacgacagcaccttcaccatcaccgtggaccagaagaccttccacttccaggccagagacgccgacgagagagagaagtggatccacgccctggaggagaccatcctgagacacaccctgcagctgcagggcctggacagcggcttcgtgcccagcgtgcaggacttcgacaagaagctgaccgaggccgacgcctacctgcagatcctgatcgagcagctgaagctgttcgacgacaagctgcagaactgcaaggaggacgagcagagaaagaagatcgagaccctgaaggagaccaccaacagcatggtggagagcatcaagcactgcatcgtgctgctgcagatcgccaaggaccagagcaacgccgagaagcacgccgacggcatgatcagcaccatcaaccccgtggacgccatctaccagcccagccccctggagcccgtgatcagcaccatgcccagccagaccgtgctgccccccgagcccgtgcagctgtgcaagagcgagcagagacccagcagcctgcccgtgggccccgtgctggccaccctgggccaccaccagacccccacccccaacagcaccggcagcggccacagcccccccagcagcagcctgaccagccccagccacgtgaacctgagccccaacaccgtgcccgagttcagctacagcagcagcgaggacgagttctacgacgccgacgagttccaccagagcggcagcagccccaagagactgatcgacagcagcggcagcgccagcgtgctgacccacagcagcagcggcaacagcctgaagagacccgacaccaccgagagcctgaacagcagcctgagcaacggcaccagcgacgccgacctgttcgacagccacgacgacagagacgacgacgccgaggccggcagcgtggaggagcacaagagcgtgatcatgcacctgctgagccaggtgagactgggcatggacctgaccaaggtggtgctgcccaccttcatcctggagagaagaagcctgctggagatgtacgccgacttcttcgcccaccccgacctgttcgtgagcatcagcgaccagaaggaccccaaggacagaatggtgcaggtggtgaagtggtacctgagcgccttccacgccggcagaaagggcagcgtggccaagaagccctacaaccccatcctgggcgagatcttccagtgccactggaccctgcccaacgacaccgaggagaacaccgagctggtgagcgagggccccgtgccctgggtgagcaagaacagcgtgaccttcgtggccgagcaggtgagccaccacccccccatcagcgccttctacgccgagtgcttcaacaagaagatccagttcaacgcccacatctggaccaagagcaagttcctgggcatgagcatcggcgtgcacaacatcggccagggctgcgtgagctgcctggactacgacgagcactacatcctgaccttccccaacggctacggcagaagcatcctgaccgtgccctgggtggagctgggcggcgagtgcaacatcaactgcagcaagaccggctacagcgccaacatcatcttccacaccaagcccttctacggcggcaagaagcacagaatcaccgccgagatcttcagccccaacgacaagaagagcttctgcagcatcgagggcgagtggaacggcgtgatgtacgccaagtacgccaccggcgagaacaccgtgttcgtggacaccaagaagctgcccatcatcaagaagaaggtgagaaagctggaggaccagaacgagtacgagagcagaagcctgtggaaggacgtgaccttcaacctgaagatcagagacatcgacgccgccaccgaggccaagcacagactggaggagagacagagagccgaggccagagagagaaaggagaaggagatccagtgggagaccagactgttccacgaggacggcgagtgctgggtgtacgacgagcccctgctgaagagactgggcgccgccaagcactag

SEQ ID NO: 92215 - DNA, 2172 bp, synthetic construct
  misc_feature 1..2172: note = Description of Artificial Sequence: Synthetic coding sequence
  source 1..2172: mol_type = other DNA
atggccagcatcatggagggccccctgagcaagtggaccaacgtgatgaagggctggcagtacagatggttcgtgctggactacaacgccggcctgctgagctactacaccagcaaggacaagatgatgagaggcagcagaagaggctgcgtgagactgagaggcgccgtgatcggcatcgacgacgaggacgacagcaccttcaccatcaccgtggaccagaagaccttccacttccaggccagagacgccgacgagagagagaagtggatccacgccctggaggagaccatcctgagacacaccctgcagctgcagggcctggacagcggcttcgtgcccagcgtgcaggacttcgacaagaagctgaccgaggccgacgcctacctgcagatcctgatcgagcagctgaagctgttcgacgacaagctgcagaactgcaaggaggacgagcagagaaagaagatcgagaccctgaaggagaccaccaacagcatggtggagagcatcaagcactgcatcgtgctgctgcagatcgccaagagcaccatcaaccccgtggacgccatctaccagcccagccccctggagcccgtgatcagcaccatgcccagccagaccgtgctgccccccgagcccgtgcagctgtgcaagagcgagcagagacccagcagcctgcccgtgggccccgtgctggccaccctgggccaccaccagacccccacccccaacagcaccggcagcggccacagcccccccagcagcagcctgaccagccccagccacgtgaacctgagccccaacaccgtgcccgagttcagctacagcagcagcgaggacgagttctacgacgccgacgagttccaccagagcggcagcagccccaagagactgatcgacagcagcggcagcgccagcgtgctgacccacagcagcagcggcaacagcctgaagagacccgacaccaccgagagcctgaacagcagcctgagcaacggcaccagcgacgccgacctgttcgacagccacgacgacagagacgacgacgccgaggccggcagcgtggaggagcacaagagcgtgatcatgcacctgctgagccaggtgagactgggcatggacctgaccaaggtggtgctgcccaccttcatcctggagagaagaagcctgctggagatgtacgccgacttcttcgcccaccccgacctgttcgtgagcatcagcgaccagaaggaccccaaggacagaatggtgcaggtggtgaagtggtacctgagcgccttccacgccggcagaaagggcagcgtggccaagaagccctacaaccccatcctgggcgagatcttccagtgccactggaccctgcccaacgacaccgaggagaacaccgagctggtgagcgagggccccgtgccctgggtgagcaagaacagcgtgaccttcgtggccgagcaggtgagccaccacccccccatcagcgccttctacgccgagtgcttcaacaagaagatccagttcaacgcccacatctggaccaagagcaagttcctgggcatgagcatcggcgtgcacaacatcggccagggctgcgtgagctgcctggactacgacgagcactacatcctgaccttccccaacggctacggcagaagcatcctgaccgtgccctgggtggagctgggcggcgagtgcaacatcaactgcagcaagaccggctacagcgccaacatcatcttccacaccaagcccttctacggcggcaagaagcacagaatcaccgccgagatcttcagccccaacgacaagaagagcttctgcagcatcgagggcgagtggaacggcgtgatgtacgccaagtacgccaccggcgagaacaccgtgttcgtggacaccaagaagctgcccatcatcaagaagaaggtgagaaagctggaggaccagaacgagtacgagagcagaagcctgtggaaggacgtgaccttcaacctgaagatcagagacatcgacgccgccaccgaggccaagcacagactggaggagagacagagagccgaggccagagagagaaaggagaaggagatccagtgggagaccagactgttccacgaggacggcgagtgctgggtgtacgacgagcccctgctgaagagactgggcgccgccaagcactag

SEQ ID NO: 92216 - DNA, 2211 bp, synthetic construct
  misc_feature 1..2211: note = Description of Artificial Sequence: Synthetic coding sequence
  source 1..2211: mol_type = other DNA
atggccagcatcatggagggccccctgagcaagtggaccaacgtgatgaagggctggcagtacagatggttcgtgctggactacaacgccggcctgctgagctactacaccagcaaggacaagatgatgagaggcagcagaagaggctgcgtgagactgagaggcgccgtgatcggcatcgacgacgaggacgacagcaccttcaccatcaccgtggaccagaagaccttccacttccaggccagagacgccgacgagagagagaagtggatccacgccctggaggagaccatcctgagacacaccctgcagctgcagggcctggacagcggcttcgtgcccagcgtgcaggacttcgacaagaagctgaccgaggccgacgcctacctgcagatcctgatcgagcagctgaagctgttcgacgacaagctgcagaactgcaaggaggacgagcagagaaagaagatcgagaccctgaaggagaccaccaacagcatggtggagagcatcaagcactgcatcgtgctgctgcagatcgccaaggaccagagcaacgccgagaagcacgccgacggcatgatcagcaccatcaaccccgtggacgccatctaccagcccagccccctggagcccgtgatcagcaccatgcccagccagaccgtgctgccccccgagcccgtgcagctgtgcaagagcgagcagagacccagcagcctgcccgtgggccccgtgctggccaccctgggccaccaccagacccccacccccaacagcaccggcagcggccacagcccccccagcagcagcctgaccagccccagccacgtgaacctgagccccaacaccgtgcccgagttcagctacagcagcagcgaggacgagttctacgacgccgacgagttccaccagagcggcagcagccccaagagactgatcgacagcagcggcagcgccagcgtgctgacccacagcagcagcggcaacagcctgaagagacccgacaccaccgagagcctgaacagcagcctgagcaacggcaccagcgacgccgacctgttcgacagccacgacgacagagacgacgacgccgaggccggcagcgtggaggagcacaagagcgtgatcatgcacctgctgagccaggtgagactgggcatggacctgaccaaggtggtgctgcccaccttcatcctggagagaagaagcctgctggagatgtacgccgacttcttcgcccaccccgacctgttcgtgagcatcagcgaccagaaggaccccaaggacagaatggtgcaggtggtgaagtggtacctgagcgccttccacgccggcagaaagggcagcgtggccaagaagccctacaaccccatcctgggcgagatcttccagtgccactggaccctgcccaacgacaccgaggagaacaccgagctggtgagcgagggccccgtgccctgggtgagcaagaacagcgtgaccttcgtggccgagcaggtgagccaccacccccccatcagcgccttctacgccgagtgcttcaacaagaagatccagttcaacgcccacatctggaccaagagcaagttcctgggcatgagcatcggcgtgcacaacatcggccagggctgcgtgagctgcctggactacgacgagcactacatcctgaccttccccaacggctacggcagaagcatcctgaccgtgccctgggtggagctgggcggcgagtgcaacatcaactgcagcaagaccggctacagcgccaacatcatcttccacaccaagcccttctacggcggcaagaagcacagaatcaccgccgagatcttcagccccaacgacaagaagagcttctgcagcatcgagggcgagtggaacggcgtgatgtacgccaagtacgccaccggcgagaacaccgtgttcgtggacaccaagaagctgcccatcatcaagaagaaggtgagaaagctggaggaccagaacgagtacgagagcagaagcctgtggaaggacgtgaccttcaacctgaagatcagagacatcgacgccgccaccgaggccaagcacagactggaggagagacagagagccgaggccagagagagaaaggagaaggagatccagtgggagaccagactgttccacgaggacggcgagtgctgggtgtacgacgagcccctgctgaagagactgggcgccgccaagcactag

SEQ ID NO: 92217 - DNA, 1716 bp, synthetic construct
  misc_feature 1..1716: note = Description of Artificial Sequence: Synthetic coding sequence
  source 1..1716: mol_type = other DNA
atggtggagagcatcaagcactgcatcgtgctgctgcagatcgccaaggaccagagcaacgccgagaagcacgccgacggcatgatcagcaccatcaaccccgtggacgccatctaccagcccagccccctggagcccgtgatcagcaccatgcccagccagaccgtgctgccccccgagcccgtgcagctgtgcaagagcgagcagagacccagcagcctgcccgtgggccccgtgctggccaccctgggccaccaccagacccccacccccaacagcaccggcagcggccacagcccccccagcagcagcctgaccagccccagccacgtgaacctgagccccaacaccgtgcccgagttcagctacagcagcagcgaggacgagttctacgacgccgacgagttccaccagagcggcagcagccccaagagactgatcgacagcagcggcagcgccagcgtgctgacccacagcagcagcggcaacagcctgaagagacccgacaccaccgagagcctgaacagcagcctgagcaacggcaccagcgacgccgacctgttcgacagccacgacgacagagacgacgacgccgaggccggcagcgtggaggagcacaagagcgtgatcatgcacctgctgagccaggtgagactgggcatggacctgaccaaggtggtgctgcccaccttcatcctggagagaagaagcctgctggagatgtacgccgacttcttcgcccaccccgacctgttcgtgagcatcagcgaccagaaggaccccaaggacagaatggtgcaggtggtgaagtggtacctgagcgccttccacgccggcagaaagggcagcgtggccaagaagccctacaaccccatcctgggcgagatcttccagtgccactggaccctgcccaacgacaccgaggagaacaccgagctggtgagcgagggccccgtgccctgggtgagcaagaacagcgtgaccttcgtggccgagcaggtgagccaccacccccccatcagcgccttctacgccgagtgcttcaacaagaagatccagttcaacgcccacatctggaccaagagcaagttcctgggcatgagcatcggcgtgcacaacatcggccagggctgcgtgagctgcctggactacgacgagcactacatcctgaccttccccaacggctacggcagaagcatcctgaccgtgccctgggtggagctgggcggcgagtgcaacatcaactgcagcaagaccggctacagcgccaacatcatcttccacaccaagcccttctacggcggcaagaagcacagaatcaccgccgagatcttcagccccaacgacaagaagagcttctgcagcatcgagggcgagtggaacggcgtgatgtacgccaagtacgccaccggcgagaacaccgtgttcgtggacaccaagaagctgcccatcatcaagaagaaggtgagaaagctggaggaccagaacgagtacgagagcagaagcctgtggaaggacgtgaccttcaacctgaagatcagagacatcgacgccgccaccgaggccaagcacagactggaggagagacagagagccgaggccagagagagaaaggagaaggagatccagtgggagaccagactgttccacgaggacggcgagtgctgggtgtacgacgagcccctgctgaagagactgggcgccgccaagcactag

SEQ ID NO: 92218 - DNA, 2241 bp, synthetic construct
  misc_feature 1..2241: note = Description of Artificial Sequence: Synthetic coding sequence
  source 1..2241: mol_type = other DNA
atggccagcatcatggagggccccctgagcaagtggaccaacgtgatgaagggctggcagtacagatggttcgtgctggactacaacgccggcctgctgagctactacaccagcaaggacaagatgatgagaggcagcagaagaggctgcgtgagactgagaggcgccgtgatcggcatcgacgacgaggacgacagcaccttcaccatcaccgtggaccagaagaccttccacttccaggccagagacgccgacgagagagagaagtggatccacgccctggaggagaccatcctgagacacaccctgcagctgcagatcagcaccaccctggccttcttccagagcagcggcatcagccccgtgctggagttcagcaagatcatcggcctggacagcggcttcgtgcccagcgtgcaggacttcgacaagaagctgaccgaggccgacgcctacctgcagatcctgatcgagcagctgaagctgttcgacgacaagctgcagaactgcaaggaggacgagcagagaaagaagatcgagaccctgaaggagaccaccaacagcatggtggagagcatcaagcactgcatcgtgctgctgcagatcgccaagagcaccatcaaccccgtggacgccatctaccagcccagccccctggagcccgtgatcagcaccatgcccagccagaccgtgctgccccccgagcccgtgcagctgtgcaagagcgagcagagacccagcagcctgcccgtgggccccgtgctggccaccctgggccaccaccagacccccacccccaacagcaccggcagcggccacagcccccccagcagcagcctgaccagccccagccacgtgaacctgagccccaacaccgtgcccgagttcagctacagcagcagcgaggacgagttctacgacgccgacgagttccaccagagcggcagcagccccaagagactgatcgacagcagcggcagcgccagcgtgctgacccacagcagcagcggcaacagcctgaagagacccgacaccaccgagagcctgaacagcagcctgagcaacggcaccagcgacgccgacctgttcgacagccacgacgacagagacgacgacgccgaggccggcagcgtggaggagcacaagagcgtgatcatgcacctgctgagccaggtgagactgggcatggacctgaccaaggtggtgctgcccaccttcatcctggagagaagaagcctgctggagatgtacgccgacttcttcgcccaccccgacctgttcgtgagcatcagcgaccagaaggaccccaaggacagaatggtgcaggtggtgaagtggtacctgagcgccttccacgccggcagaaagggcagcgtggccaagaagccctacaaccccatcctgggcgagatcttccagtgccactggaccctgcccaacgacaccgaggagaacaccgagctggtgagcgagggccccgtgccctgggtgagcaagaacagcgtgaccttcgtggccgagcaggtgagccaccacccccccatcagcgccttctacgccgagtgcttcaacaagaagatccagttcaacgcccacatctggaccaagagcaagttcctgggcatgagcatcggcgtgcacaacatcggccagggctgcgtgagctgcctggactacgacgagcactacatcctgaccttccccaacggctacggcagaagcatcctgaccgtgccctgggtggagctgggcggcgagtgcaacatcaactgcagcaagaccggctacagcgccaacatcatcttccacaccaagcccttctacggcggcaagaagcacagaatcaccgccgagatcttcagccccaacgacaagaagagcttctgcagcatcgagggcgagtggaacggcgtgatgtacgccaagtacgccaccggcgagaacaccgtgttcgtggacaccaagaagctgcccatcatcaagaagaaggtgagaaagctggaggaccagaacgagtacgagagcagaagcctgtggaaggacgtgaccttcaacctgaagatcagagacatcgacgccgccaccgaggccaagcacagactggaggagagacagagagccgaggccagagagagaaaggagaaggagatccagtgggagaccagactgttccacgaggacggcgagtgctgggtgtacgacgagcccctgctgaagagactgggcgccgccaagcactag

SEQ ID NO: 92219 - DNA, 2160 bp, synthetic construct
  misc_feature 1..2160: note = Description of Artificial Sequence: Synthetic coding sequence
  source 1..2160: mol_type = other DNA
atggccagcatcatggagggccccctgagcaagtggaccaacgtgatgaagggctggcagtacagatggttcgtgctggactacaacgccggcctgctgagctactacaccggcgccgtgatcggcatcgacgacgaggacgacagcaccttcaccatcaccgtggaccagaagaccttccacttccaggccagagacgccgacgagagagagaagtggatccacgccctggaggagaccatcctgagacacaccctgcagctgcagggcctggacagcggcttcgtgcccagcgtgcaggacttcgacaagaagctgaccgaggccgacgcctacctgcagatcctgatcgagcagctgaagctgttcgacgacaagctgcagaactgcaaggaggacgagcagagaaagaagatcgagaccctgaaggagaccaccaacagcatggtggagagcatcaagcactgcatcgtgctgctgcagatcgccaaggaccagagcaacgccgagaagcacgccgacggcatgatcagcaccatcaaccccgtggacgccatctaccagcccagccccctggagcccgtgatcagcaccatgcccagccagaccgtgctgccccccgagcccgtgcagctgtgcaagagcgagcagagacccagcagcctgcccgtgggccccgtgctggccaccctgggccaccaccagacccccacccccaacagcaccggcagcggccacagcccccccagcagcagcctgaccagccccagccacgtgaacctgagccccaacaccgtgcccgagttcagctacagcagcagcgaggacgagttctacgacgccgacgagttccaccagagcggcagcagccccaagagactgatcgacagcagcggcagcgccagcgtgctgacccacagcagcagcggcaacagcctgaagagacccgacaccaccgagagcctgaacagcagcctgagcaacggcaccagcgacgccgacctgttcgacagccacgacgacagagacgacgacgccgaggccggcagcgtggaggagcacaagagcgtgatcatgcacctgctgagccaggtgagactgggcatggacctgaccaaggtggtgctgcccaccttcatcctggagagaagaagcctgctggagatgtacgccgacttcttcgcccaccccgacctgttcgtgagcatcagcgaccagaaggaccccaaggacagaatggtgcaggtggtgaagtggtacctgagcgccttccacgccggcagaaagggcagcgtggccaagaagccctacaaccccatcctgggcgagatcttccagtgccactggaccctgcccaacgacaccgaggagaacaccgagctggtgagcgagggccccgtgccctgggtgagcaagaacagcgtgaccttcgtggccgagcaggtgagccaccacccccccatcagcgccttctacgccgagtgcttcaacaagaagatccagttcaacgcccacatctggaccaagagcaagttcctgggcatgagcatcggcgtgcacaacatcggccagggctgcgtgagctgcctggactacgacgagcactacatcctgaccttccccaacggctacggcagaagcatcctgaccgtgccctgggtggagctgggcggcgagtgcaacatcaactgcagcaagaccggctacagcgccaacatcatcttccacaccaagcccttctacggcggcaagaagcacagaatcaccgccgagatcttcagccccaacgacaagaagagcttctgcagcatcgagggcgagtggaacggcgtgatgtacgccaagtacgccaccggcgagaacaccgtgttcgtggacaccaagaagctgcccatcatcaagaagaaggtgagaaagctggaggaccagaacgagtacgagagcagaagcctgtggaaggacgtgaccttcaacctgaagatcagagacatcgacgccgccaccgaggccaagcacagactggaggagagacagagagccgaggccagagagagaaaggagaaggagatccagtgggagaccagactgttccacgaggacggcgagtgctgggtgtacgacgagcccctgctgaagagactgggcgccgccaagcactag

SEQ ID NO: 92220 - DNA, 1677 bp, synthetic construct
  misc_feature 1..1677: note = Description of Artificial Sequence: Synthetic coding sequence
  source 1..1677: mol_type = other DNA
atggtggagagcatcaagcactgcatcgtgctgctgcagatcgccaagagcaccatcaaccccgtggacgccatctaccagcccagccccctggagcccgtgatcagcaccatgcccagccagaccgtgctgccccccgagcccgtgcagctgtgcaagagcgagcagagacccagcagcctgcccgtgggccccgtgctggccaccctgggccaccaccagacccccacccccaacagcaccggcagcggccacagcccccccagcagcagcctgaccagccccagccacgtgaacctgagccccaacaccgtgcccgagttcagctacagcagcagcgaggacgagttctacgacgccgacgagttccaccagagcggcagcagccccaagagactgatcgacagcagcggcagcgccagcgtgctgacccacagcagcagcggcaacagcctgaagagacccgacaccaccgagagcctgaacagcagcctgagcaacggcaccagcgacgccgacctgttcgacagccacgacgacagagacgacgacgccgaggccggcagcgtggaggagcacaagagcgtgatcatgcacctgctgagccaggtgagactgggcatggacctgaccaaggtggtgctgcccaccttcatcctggagagaagaagcctgctggagatgtacgccgacttcttcgcccaccccgacctgttcgtgagcatcagcgaccagaaggaccccaaggacagaatggtgcaggtggtgaagtggtacctgagcgccttccacgccggcagaaagggcagcgtggccaagaagccctacaaccccatcctgggcgagatcttccagtgccactggaccctgcccaacgacaccgaggagaacaccgagctggtgagcgagggccccgtgccctgggtgagcaagaacagcgtgaccttcgtggccgagcaggtgagccaccacccccccatcagcgccttctacgccgagtgcttcaacaagaagatccagttcaacgcccacatctggaccaagagcaagttcctgggcatgagcatcggcgtgcacaacatcggccagggctgcgtgagctgcctggactacgacgagcactacatcctgaccttccccaacggctacggcagaagcatcctgaccgtgccctgggtggagctgggcggcgagtgcaacatcaactgcagcaagaccggctacagcgccaacatcatcttccacaccaagcccttctacggcggcaagaagcacagaatcaccgccgagatcttcagccccaacgacaagaagagcttctgcagcatcgagggcgagtggaacggcgtgatgtacgccaagtacgccaccggcgagaacaccgtgttcgtggacaccaagaagctgcccatcatcaagaagaaggtgagaaagctggaggaccagaacgagtacgagagcagaagcctgtggaaggacgtgaccttcaacctgaagatcagagacatcgacgccgccaccgaggccaagcacagactggaggagagacagagagccgaggccagagagagaaaggagaaggagatccagtgggagaccagactgttccacgaggacggcgagtgctgggtgtacgacgagcccctgctgaagagactgggcgccgccaagcactag

SEQ ID NO: 92221 - DNA, 99 bp, synthetic construct
  misc_feature 1..99: note = Description of Artificial Sequence: Synthetic coding sequence
  source 1..99: mol_type = other DNA
atggtggagagcatcaagcactgcatcgtgctgctgcagatcgccaaggaccagagcaacgccgagaagcacgccgacggcatgatcgtgagcctgtag

SEQ ID NO: 92222 - DNA, 1677 bp, synthetic construct; identical to SEQ ID NO: 92220
  misc_feature 1..1677: note = Description of Artificial Sequence: Synthetic coding sequence
  source 1..1677: mol_type = other DNA

SEQ ID NO: 92223 - DNA, 1968 bp, synthetic construct
  misc_feature 1..1968: note = Description of Artificial Sequence: Synthetic coding sequence
  source 1..1968: mol_type = other DNA
atgggctgctgctgctgctggctggtgttcaccgaggccagagacgccgacgagagagagaagtggatccacgccctggaggagaccatcctgagacacaccctgcagctgcagggcctggacagcggcttcgtgcccagcgtgcaggacttcgacaagaagctgaccgaggccgacgcctacctgcagatcctgatcgagcagctgaagctgttcgacgacaagctgcagaactgcaaggaggacgagcagagaaagaagatcgagaccctgaaggagaccaccaacagcatggtggagagcatcaagcactgcatcgtgctgctgcagatcgccaagagcaccatcaaccccgtggacgccatctaccagcccagccccctggagcccgtgatcagcaccatgcccagccagaccgtgctgccccccgagcccgtgcagctgtgcaagagcgagcagagacccagcagcctgcccgtgggccccgtgctggccaccctgggccaccaccagacccccacccccaacagcaccggcagcggccacagcccccccagcagcagcctgaccagccccagccacgtgaacctgagccccaacaccgtgcccgagttcagctacagcagcagcgaggacgagttctacgacgccgacgagttccaccagagcggcagcagccccaagagactgatcgacagcagcggcagcgccagcgtgctgacccacagcagcagcggcaacagcctgaagagacccgacaccaccgagagcctgaacagcagcctgagcaacggcaccagcgacgccgacctgttcgacagccacgacgacagagacgacgacgccgaggccggcagcgtggaggagcacaagagcgtgatcatgcacctgctgagccaggtgagactgggcatggacctgaccaaggtggtgctgcccaccttcatcctggagagaagaagcctgctggagatgtacgccgacttcttcgcccaccccgacctgttcgtgagcatcagcgaccagaaggaccccaaggacagaatggtgcaggtggtgaagtggtacctgagcgccttccacgccggcagaaagggcagcgtggccaagaagccctacaaccccatcctgggcgagatcttccagtgccactggaccctgcccaacgacaccgaggagaacaccgagctggtgagcgagggccccgtgccctgggtgagcaagaacagcgtgaccttcgtggccgagcaggtgagccaccacccccccatcagcgccttctacgccgagtgcttcaacaagaagatccagttcaacgcccacatctggaccaagagcaagttcctgggcatgagcatcggcgtgcacaacatcggccagggctgcgtgagctgcctggactacgacgagcactacatcctgaccttccccaacggctacggcagaagcatcctgaccgtgccctgggtggagctgggcggcgagtgcaacatcaactgcagcaagaccggctacagcgccaacatcatcttccacaccaagcccttctacggcggcaagaagcacagaatcaccgccgagatcttcagccccaacgacaagaagagcttctgcagcatcgagggcgagtggaacggcgtgatgtacgccaagtacgccaccggcgagaacaccgtgttcgtggacaccaagaagctgcccatcatcaagaagaaggtgagaaagctggaggaccagaacgagtacgagagcagaagcctgtggaaggacgtgaccttcaacctgaagatcagagacatcgacgccgccaccgaggccaagcacagactggaggagagacagagagccgaggccagagagagaaaggagaaggagatccagtgggagaccagactgttccacgaggacggcgagtgctgggtgtacgacgagcccctgctgaagagactgggcgccgccaagcactag

SEQ ID NO: 92224 - DNA, 330 bp, synthetic construct
  misc_feature 1..330: note = Description of Artificial Sequence: Synthetic coding sequence
  source 1..330: mol_type = other DNA
atggtggagagcatcaagcactgcatcgtgctgctgcagatcgccaagagcaccatcaaccccgtggacgccatctaccagcccagccccctggagcccgtgatcagcaccatgcccagccagaccgtgctgccccccgagcccgtgcagctgtgcaagagcgagcagagacccagcagcctgcccgtgggccccgtgctggccaccctgggccaccaccagacccccacccccaacagcaccggcagcggccacagcccccccagcagcagcctgaccagccccagccacgtgaacctgagccccaacaccgtgcccgagttcagctag

SEQ ID NO: 92225 - DNA, 1170 bp, synthetic construct
  misc_feature 1..1170: note = Description of Artificial Sequence: Synthetic coding sequence
  source 1..1170: mol_type = other DNA
atggagggcgccctggccgccaactggagcgccgaggccgccaacgccagcgccgccccccccggcgccgagggcaacagaaccgccggcccccccagaagaaacgaggccctggccagagtggaggtggccgtgctgtgcctgatcctgctgctggccctgagcggcaacgcctgcgtgctgctggccctgagaaccaccagacagaagcacagcagactgttcttcttcatgaagcacctgagcatcgccgacctggtggtggccgtgttccaggtgctgccccagctgctgtgggacatcaccttcagattctacggccccgacctgctgtgcagactggtgaagtacctgcaggtggtgggcatgttcgccagcacctacctgctgctgctgatgagcctggacagatgcctggccatctgccagcccctgagaagcctgagaagaagaaccgacagactggccgtgctggccacctggctgggctgcctggtggccagcgccccccaggtgcacatcttcagcctgagagaggtggccgacggcgtgttcgactgctgggccgtgttcatccagccctggggccccaaggcctacatcacctggatcaccctggccgtgtacatcgtgcccgtgatcgtgctggccgcctgctacggcctgatcagcttcaagatctggcagaacctgagactgaagaccgccgccgccgccgccgccgaggcccccgagggcgccgccgccggcgacggcggcagagtggccctggccagagtgagcagcgtgaagctgatcagcaaggccaagatcagaaccgtgaagatgaccttcatcatcgtgctggccttcatcgtgtgctggacccccttcttcttcgtgcagatgtggagcgtgtgggacgccaacgcccccaaggaggccagcgccttcatcatcgtgatgctgctggccagcctgaacagctgctgcaacccctggatctacatgctgttcaccggccacctgttccacgagctggtgcagagattcctgtgctgcagcgccagctacctgaagggcagaagactgggcgagaccagcgccagcaagaagagcaacagcagcagcttcgtgctgagccacagaagcagcagccagagaagctgcagccagcccagcaccgcctag

SEQ ID NO: 92226 - DNA, 132 bp, synthetic construct
  misc_feature 1..132: note = Description of Artificial Sequence: Synthetic coding sequence
  source 1..132: mol_type = other DNA
atggagggcgccctggccgccaactggagcgccgaggccgccaacgccagcgccgccccccccggcgccgagggcaacagaaccgccggcccccccagaagaaacgaggccctggccagagtggaggtgtag

SEQ ID NO: 92227 - DNA, 279 bp, synthetic construct
  misc_feature 1..279: note = Description of Artificial Sequence: Synthetic coding sequence
  source 1..279: mol_type = other DNA
atggagggcgccctggccgccaactggagcgccgaggccgccaacgccagcgccgccccccccggcgccgagggcaacagaaccgccggcccccccagaagaaacgaggccctggccagagtggaggtggccgtgctgtgcctgatcctgctgctggccctgagcggcaacgcctgcgtgctgctggccctgagaaccaccagacagaagcacagcagactgttcttcttcatgaagcacctgagcatcgccgacctggtggtggccgtgttccagtag

SEQ ID NO: 92228 - DNA, 1518 bp, synthetic construct
  misc_feature 1..1518: note = Description of Artificial Sequence: Synthetic coding sequence
  source 1..1518: mol_type = other DNA
atggccagcggcagaagagcccccagaaccggcctgctggagctgagagccggcgccggcagcggcgccggcggcgagagatggcagagagtgctgctgagcctggccgaggacgtgctgaccgtgagccccgccgacggcgaccccggccccgagcccggcgcccccagagagcaggagcccgcccagctgaacggcgccgccgagcccggcgccggccccccccagctgcccgaggccctgctgctgcagagaagaagagtgaccgtgagaaaggccgacgccggcggcctgggcatcagcatcaagggcggcagagagaacaagatgcccatcctgatcagcaagatcttcaagggcctggccgccgaccagaccgaggccctgttcgtgggcgacgccatcctgagcgtgaacggcgaggacctgagcagcgccacccacgacgaggccgtgcaggtgctgaagaagaccggcaaggaggtggtgctggaggtgaagtacatgaaggacgtgagcccctacttcaagaacagcaccggcggcaccagcgtgggctgggacagcccccccgccagccccctgcagagacagcccagcagccccggccccacccccagaaacttcagcgaggccaagcacatgagcctgaagatggcctacgtgagcaagagatgcacccccaacgaccccgagcccagatacctggagatctgcagcgccgacggccaggacaccctgttcctgagagccaaggacgaggccagcgccagaagctgggccaccgccatccaggcccaggtgaacaccctgacccccagagtgaaggacgagctgcaggccctgctggccgccaccagcaccgccggcagccaggacatcaagcagatcggctggctgaccgagcagctgcccagcggcggcaccgcccccaccctggccctgctgaccgagaaggagctgctgctgtacctgagcctgcccgagaccagagaggccctgagcagacccgccagaaccgcccccctgatcgccaccagactggtgcacagcggccccagcaagggcagcgtgccctacgacgccgagctgagcttcgccctgagaaccggcaccagacacggcgtggacacccacctgttcagcgtggagagcccccaggagctggccgcctggaccagacagctggtggacggctgccacagagccgccgagggcgtgcaggaggtgagcaccgcctgcacctggaacggcagaccctgcagcctgagcgtgcacatcgacaagggcttcaccctgtgggccgccgagcccggcgccgccagagccgtgctgctgagacagcccttcgagaagctgcagatgagcagcgacgacggcgccagcctgctgttcctggacttcggcggcgccgagggcgagatccagctggacctgcacagctgccccaagaccatcgtgttcatcatccacagcttcctgagcgccaaggtgaccagactgggcctgctggcctag

SEQ ID NO: 92229 - DNA, 441 bp, synthetic construct
  misc_feature 1..441: note = Description of Artificial Sequence: Synthetic coding sequence
  source 1..441: mol_type = other DNA
atgggcttcctgagaagactgatctacagaagaagacccatgatctacgtggagagcagcgaggagagcagcgacgagcagcccgacgaggtggagagccccacccagagccaggacagcacccccgccgaggagagagaggacgagggcgccagcgccgcccagggccaggagcccgaggccgacagccaggagctggtgcagcccaagaccggctgcgagctgggcgacggccccgacaccaagagagtgtgcctgagaaacgaggagcagatgaagctgcccgccgagggccccgagcccgaggccgacagccaggagcaggtgcaccccaagaccggctgcgagagaggcgacggccccgacgtgcaggagctgggcctgcccaaccccgaggaggtgaagacccccgaggaggacgagggccagagccagccctag

SEQ ID NO: 92230 - DNA, 336 bp, synthetic construct
  misc_feature 1..336: note = Description of Artificial Sequence: Synthetic coding sequence
  source 1..336: mol_type = other DNA
atgagcgagctgctgagagccagaagccagagcagcgagagaggcaacgaccaggagagcagccagcccgtgggcagcgtgatcgtgcaggagcccaccgaggagaagagacaggaggaggagccccccaccgacaaccagggcatcgcccccagcggcgagatcgagaaccaggccgtgcccgccttccagggccccgacatggaggccttccagcaggagctggccctgctgaagatcgaggacgagcccggcgacggccccgacgtgagagagggcatcatgcccaccttcgacctgaccaaggtgctggaggccggcgacgcccagccctag

SEQ ID NO: 92231 - DNA, 195 bp, synthetic construct
  misc_feature 1..195: note = Description of Artificial Sequence: Synthetic coding sequence
  source 1..195: mol_type = other DNA
atgagcgagctgctgagagccagaagccagagcagcgagagaggcaacgaccaggagagcagccagcccgtgggcagcgtgatcgtgcaggagcccaccgaggagaagagacaggaggaggagccccccaccgacaaccagggcatcgcccccagcggcgagatcgagaaccaggccgtgcccgccttccagtag

SEQ ID NO: 92232 - DNA, 342 bp, synthetic construct
  misc_feature 1..342: note = Description of Artificial Sequence: Synthetic coding sequence
  source 1..342: mol_type = other DNA
atgagcggccaccagagaaccagaagcagaagcagagagagaagagacgaccaggacagcaaccaccccgtgggcgccgtggtggcccaggagctgcccagcaacgaccagctgcagcaggaggagccccccatcgagagccaggactacacccccggccaggagagagacgagggcgccctggacttccaggtgctgggcctggccgcctacctgtgggagctgaccagaagcaagaccggcggcgagagaggcgacggccccaacgtgaagggcgagttcctgcccaacctggagcccgtgaagatccccgaggccggcgagggccagcccagcgtgtag

SEQ ID NO: 92233 - DNA, 342 bp, synthetic construct; identical to SEQ ID NO: 92232
  misc_feature 1..342: note = Description of Artificial Sequence: Synthetic coding sequence
  source 1..342: mol_type = other DNA

SEQ ID NO: 92234 - DNA, 1458 bp, synthetic construct
  misc_feature 1..1458: note = Description of Artificial Sequence: Synthetic coding sequence
  source 1..1458: mol_type = other DNA
atggccgccgtgtggcagcaggtgctggccgtggacgccagatacaacgcctacagaacccccaccttcccccagttcagaacccagtacatcagaagaagaagccagctgctgagagagaacgccaaggccggccacccccccgccctgagaagacagtacctgagactgagaggccagctgctgggccagagatacggccccctgagcgagcccggcagcgccagagcctacagcaacagcatcgtgagaagcagcagaaccaccctggacagaatggaggacttcgaggacgaccccagagccctgggcgccagaggccacagaagaagcgtgagcagaggcagctaccagctgcaggcccagatgaacagagccgtgtacgaggacagaccccccggcagcgtggtgcccaccagcgccgccgaggccagcagagccatggccggcgacaccagcctgagcgagaactacgccttcgccggcatgtaccacgtgttcgaccagcacgtggacgaggccgtgcccagagtgagattcgccaacgacgacagacacagactggcctgctgcagcctggacggcagcatcagcctgtgccagctggtgcccgccccccccaccgtgctgagagtgctgagaggccacaccagaggcgtgagcgacttcgcctggagcctgagcaacgacatcctggtgagcaccagcctggacgccaccatgagaatctgggccagcgaggacggcagatgcatcagagagatccccgaccccgacagcgccgagctgctgtgctgcaccttccagcccgtgaacaacaacctgaccgtggtgggcaacgccaagcacaacgtgcacgtgatgaacatcagcaccggcaagaaggtgaagggcggcagcagcaagctgaccggcagagtgctggccctgagcttcgacgcccccggcagactgctgtgggccggcgacgaccacggcagcgtgttcagcttcctgttcgacatggccaccggcaagctgaccaaggccaagagactggtggtgcacgagggcagccccgtgaccagcatcagcgccagaagctgggtgagcagagaggccagagaccccagcctgctgatcaacgcctgcctgaacaagctgctgctgtacagagtggtggacaacgagggcaccctgcagctgaagagaagcttccccatcgagcagagcagccaccccgtgagaagcatcttctgccccctgatgagcttcagacagggcgcctgcgtggtgaccggcagcgaggacatgtgcgtgcacttcttcgacgtggagagagccgccaaggccgccgtgaacaagctgcagggccacagcgcccccgtgctggacgtgagcttcaactgcgacgagagcctgctggccagcagcgacgccagcggcatggtgatcgtgtggagaagagagcagaagtag

SEQ ID NO: 92235 - DNA, 309 bp, synthetic construct; identical to SEQ ID NO: 83394
  misc_feature 1..309: note = Description of Artificial Sequence: Synthetic coding sequence
  source 1..309: mol_type = other DNA

SEQ ID NO: 92236 - DNA, 1575 bp, synthetic construct
  misc_feature 1..1575: note = Description of Artificial Sequence: Synthetic coding sequence
  source 1..1575: mol_type = other DNA
atgagcgacaacggcgagctggaggacaagccccccgccccccccgtgagaatgagcagcaccatcttcagcaccggcggcaaggaccccctgagcgccaaccacagcctgaagcccctgcccagcgtgcccgaggagaagaagcccagacacaagatcatcagcatcttcagcggcaccgagaagggcagcaagaagaaggagaaggagagacccgagatcagcccccccagcgacttcgagcacaccatccacgtgggcttcgacgccgtgaccggcgagttcaccggcatgcccgagcagtgggccagactgctgcagaccagcaacatcaccaagctggagcagaagaagaacccccaggccgtgctggacgtgctgaagttctacgacagcaacaccgtgaagcagaagtacctgagcttcaccccccccgagaaggacggcttccccagcggcacccccgccctgaacgccaagggcaccgaggcccccgccgtggtgaccgaggaggaggacgacgacgaggagaccgccccccccgtgatcgcccccagacccgaccacaccaagagcatctacaccagaagcgtgatcgaccccgtgcccgcccccgtgggcgacagccacgtggacggcgccgccaagagcctggacaagcagaagaagaagaccaagatgaccgacgaggagatcatggagaagctgagaaccatcgtgagcatcggcgaccccaagaagaagtacaccagatacgagaagatcggccagggcgccagcggcaccgtgttcaccgccaccgacgtggccctgggccaggaggtggccatcaagcagatcaacctgcagaagcagcccaagaaggagctgatcatcaacgagatcctggtgatgaaggagctgaagaaccccaacatcgtgaacttcctggacagctacctggtgggcgacgagctgttcgtggtgatggagtacctggccggcggcagcctgaccgacgtggtgaccgagacctgcatggacgaggcccagatcgccgccgtgtgcagagagtgcctgcaggccctggagttcctgcacgccaaccaggtgatccacagagacatcaagagcgacaacgtgctgctgggcatggagggcagcgtgaagctgaccgacttcggcttctgcgcccagatcacccccgagcagagcaagagaagcaccatggtgggcaccccctactggatggcccccgaggtggtgaccagaaaggcctacggccccaaggtggacatctggagcctgggcatcatggccatcgagatggtggagggcgagcccccctacctgaacgagaaccccctgagagccctgtacctgatcgccaccaacggcacccccgagctgcagaaccccgagaagctgagccccatcttcagagacttcctgaacagatgcctggagatggacgtggagaagagaggcagcgccaaggagctgctgcagcaccccttcctgaagctggccaagcccctgagcagcctgacccccctgatcatggccgccaaggaggccatgaagagcaacagatag

SEQ ID NO: 92237 - DNA, 1680 bp, synthetic construct
  misc_feature 1..1680: note = Description of Artificial Sequence: Synthetic coding sequence
  source 1..1680: mol_type = other DNA
atgagcgacggcctggacaacgaggagaagccccccgccccccccctgagaatgaacagcaacaacagagacagcagcgccctgaaccacagcagcaagcccctgcccatggcccccgaggagaagaacaagaaggccagactgagaagcatcttccccggcggcggcgacaagaccaacaagaagaaggagaaggagagacccgagatcagcctgcccagcgacttcgagcacaccatccacgtgggcttcgacgccgtgaccggcgagttcacccccgacctgtacggcagccagatgtgccccggcaagctgcccgagggcatccccgagcagtgggccagactgctgcagaccagcaacatcaccaagctggagcagaagaagaacccccaggccgtgctggacgtgctgaagttctacgacagcaaggagaccgtgaacaaccagaagtacatgagcttcaccagcggcgacaagagcgcccacggctacatcgccgcccaccccagcagcaccaagaccgccagcgagccccccctggccccccccgtgagcgaggaggaggacgaggaggaggaggaggaggaggacgagaacgagcccccccccgtgatcgcccccagacccgagcacaccaagagcatctacaccagaagcgtggtggagagcatcgccagccccgccgtgcccaacaaggaggtgaccccccccagcgccgagaacgccaacagcagcaccctgtacagaaacaccgacagacagagaaagaagagcaagatgaccgacgaggagatcctggagaagctgagaagcatcgtgagcgtgggcgaccccaagaagaagtacaccagattcgagaagatcggccagggcgccagcggcaccgtgtacaccgccctggacatcgccaccggccaggaggtggccatcaagcagatgaacctgcagcagcagcccaagaaggagctgatcatcaacgagatcctggtgatgagagagaacaagaaccccaacatcgtgaactacctggacagctacctggtgggcgacgagctgtgggtggtgatggagtacctggccggcggcagcctgaccgacgtggtgaccgagacctgcatggacgagggccagatcgccgccgtgtgcagagagtgcctgcaggccctggacttcctgcacagcaaccaggtgatccacagagacatcaagagcgacaacatcctgctgggcatggacggcagcgtgaagctgaccgacttcggcttctgcgcccagatcacccccgagcagagcaagagaagcaccatggtgggcaccccctactggatggcccccgaggtggtgaccagaaaggcctacggccccaaggtggacatctggagcctgggcatcatggccatcgagatggtggagggcgagcccccctacctgaacgagaaccccctgagagccctgtacctgatcgccaccaacggcacccccgagctgcagaaccccgagagactgagcgccgtgttcagagacttcctgaacagatgcctggagatggacgtggacagaagaggcagcgccaaggagctgctgcagcaccccttcctgaagctggccaagcccctgagcagcctgacccccctgatcatcgccgccaaggaggccatcaagaacagcagcagatag

SEQ ID NO: 92238 - DNA, 1743 bp, synthetic construct
  misc_feature 1..1743: note = Description of Artificial Sequence: Synthetic coding sequence
  source 1..1743: mol_type = other DNA
atgagcgacggcctggacaacgaggagaagccccccgccccccccctgagaatgaacagcaacaacagagacagcagcgccctgaaccacagcagcaagcccctgcccatggcccccgaggagaagaacaagaaggccagactgagaagcatcttccccggcggcggcgacaagaccaacaagaagaaggagaaggagagacccgagatcagcctgcccagcgacttcgagcacaccatccacgtgggcttcgacgccgtgaccggcgagttcaccaacagccccttccagaccagcagacccgtgaccgtggccagcagccagagcgagggcaagatgcccgacctgtacggcagccagatgtgccccggcaagctgcccgagggcatccccgagcagtgggccagactgctgcagaccagcaacatcaccaagctggagcagaagaagaacccccaggccgtgctggacgtgctgaagttctacgacagcaaggagaccgtgaacaaccagaagtacatgagcttcaccagcggcgacaagagcgcccacggctacatcgccgcccaccccagcagcaccaagaccgccagcgagccccccctggccccccccgtgagcgaggaggaggacgaggaggaggaggaggaggaggacgagaacgagcccccccccgtgatcgcccccagacccgagcacaccaagagcatctacaccagaagcgtggtggagagcatcgccagccccgccgtgcccaacaaggaggtgaccccccccagcgccgagaacgccaacagcagcaccctgtacagaaacaccgacagacagagaaagaagagcaagatgaccgacgaggagatcctggagaagctgagaagcatcgtgagcgtgggcgaccccaagaagaagtacaccagattcgagaagatcggccagggcgccagcggcaccgtgtacaccgccctggacatcgccaccggccaggaggtggccatcaagcagatgaacctgcagcagcagcccaagaaggagctgatcatcaacgagatcctggtgatgagagagaacaagaaccccaacatcgtgaactacctggacagctacctggtgggcgacgagctgtgggtggtgatggagtacctggccggcggcagcctgaccgacgtggtgaccgagacctgcatggacgagggccagatcgccgccgtgtgcagagagtgcctgcaggccctggacttcctgcacagcaaccaggtgatccacagagacatcaagagcgacaacatcctgctgggcatggacggcagcgtgaagctgaccgacttcggcttctgcgcccagatcacccccgagcagagcaagagaagcaccatggtgggcaccccctactggatggcccccgaggtggtgaccagaaaggcctacggccccaaggtggacatctggagcctgggcatcatggccatcgagatggtggagggcgagcccccctacctgaacgagaaccccctgagagccctgtacctgatcgccaccaacggcacccccgagctgcagaaccccgagagactgagcgccgtgttcagagacttcctgaacagatgcctggagatggacgtggacagaagaggcagcgccaaggagctgctgcagcaccccttcctgaagctggccaagcccctgagcagcctgacccccctgatcatcgccgccaaggaggccatcaagaacagcagcagatag

SEQ ID NO: 92239 - DNA, 1635 bp, synthetic construct
  misc_feature 1..1635: note = Description of Artificial Sequence: Synthetic coding sequence
  source 1..1635: mol_type = other DNA
atgagcgacggcctggacaacgaggagaagccccccgccccccccctgagaatgaacagcaacaacagagacagcagcgccctgaaccacagcagcaagcccctgcccatggcccccgaggagaagaacaagaaggccagactgagaagcatcttccccggcggcggcgacaagaccaacaagaagaaggagaaggagagacccgagatcagcctgcccagcgacttcgagcacaccatccacgtgggcttcgacgccgtgaccggcgagttcaccggcatccccgagcagtgggccagactgctgcagaccagcaacatcaccaagctggagcagaagaagaacccccaggccgtgctggacgtgctgaagttctacgacagcaaggagaccgtgaacaaccagaagtacatgagcttcaccagcggcgacaagagcgcccacggctacatcgccgcccaccccagcagcaccaagaccgccagcgagccccccctggccccccccgtgagcgaggaggaggacgaggaggaggaggaggaggaggacgagaacgagcccccccccgtgatcgcccccagacccgagcacaccaagagcatctacaccagaagcgtggtggagagcatcgccagccccgccgtgcccaacaaggaggtgaccccccccagcgccgagaacgccaacagcagcaccctgtacagaaacaccgacagacagagaaagaagagcaagatgaccgacgaggagatcctggagaagctgagaagcatcgtgagcgtgggcgaccccaagaagaagtacaccagattcgagaagatcggccagggcgccagcggcaccgtgtacaccgccctggacatcgccaccggccaggaggtggccatcaagcagatgaacctgcagcagcagcccaagaaggagctgatcatcaacgagatcctggtgatgagagagaacaagaaccccaacatcgtgaactacctggacagctacctggtgggcgacgagctgtgggtggtgatggagtacctggccggcggcagcctgaccgacgtggtgaccgagacctgcatggacgagggccagatcgccgccgtgtgcagagagtgcctgcaggccctggacttcctgcacagcaaccaggtgatccacagagacatcaagagcgacaacatcctgctgggcatggacggcagcgtgaagctgaccgacttcggcttctgcgcccagatcacccccgagcagagcaagagaagcaccatggtgggcaccccctactggatggcccccgaggtggtgaccagaaaggcctacggccccaaggtggacatctggagcctgggcatcatggccatcgagatggtggagggcgagcccccctacctgaacgagaaccccctgagagccctgtacctgatcgccaccaacggcacccccgagctgcagaaccccgagagactgagcgccgtgttcagagacttcctgaacagatgcctggagatggacgtggacagaagaggcagcgccaaggagctgctgcagcaccccttcctgaagctggccaagcccctgagcagcctgacccccctgatcatcgccgccaaggaggccatcaagaacagcagcagatag

SEQ ID NO: 92240 - DNA, 1680 bp, synthetic construct; identical to SEQ ID NO: 92237
  misc_feature 1..1680: note = Description of Artificial Sequence: Synthetic coding sequence
  source 1..1680: mol_type = other DNA

SEQ ID NO: 92241 - DNA, 1698 bp, synthetic construct
  misc_feature 1..1698: note = Description of Artificial Sequence: Synthetic coding sequence
  source 1..1698: mol_type = other DNA
atgagcgacggcctggacaacgaggagaagccccccgccccccccctgagaatgaacagcaacaacagagacagcagcgccctgaaccacagcagcaagcccctgcccatggcccccgaggagaagaacaagaaggccagactgagaagcatcttccccggcggcggcgacaagaccaacaagaagaaggagaaggagagacccgagatcagcctgcccagcgacttcgagcacaccatccacgtgggcttcgacgccgtgaccggcgagttcaccaacagccccttccagaccagcagacccgtgaccgtggccagcagccagagcgagggcaagatgggcatccccgagcagtgggccagactgctgcagaccagcaacatcaccaagctggagcagaagaagaacccccaggccgtgctggacgtgctgaagttctacgacagcaaggagaccgtgaacaaccagaagtacatgagcttcaccagcggcgacaagagcgcccacggctacatcgccgcccaccccagcagcaccaagaccgccagcgagccccccctggccccccccgtgagcgaggaggaggacgaggaggaggaggaggaggaggacgagaacgagcccccccccgtgatcgcccccagacccgagcacaccaagagcatctacaccagaagcgtggtggagagcatcgccagccccgccgtgcccaacaaggaggtgaccccccccagcgccgagaacgccaacagcagcaccctgtacagaaacaccgacagacagagaaagaagagcaagatgaccgacgaggagatcctggagaagctgagaagcatcgtgagcgtgggcgaccccaagaagaagtacaccagattcgagaagatcggccagggcgccagcggcaccgtgtacaccgccctggacatcgccaccggccaggaggtggccatcaagcagatgaacctgcagcagcagcccaagaaggagctgatcatcaacgagatcctggtgatgagagagaacaagaaccccaacatcgtgaactacctggacagctacctggtgggcgacgagctgtgggtggtgatggagtacctggccggcggcagcctgaccgacgtggtgaccgagacctgcatggacgagggccagatcgccgccgtgtgcagagagtgcctgcaggccctggacttcctgcacagcaaccaggtgatccacagagacatcaagagcgacaacatcctgctgggcatggacggcagcgtgaagctgaccgacttcggcttctgcgcccagatcacccccgagcagagcaagagaagcaccatggtgggcaccccctactggatggcccccgaggtggtgaccagaaaggcctacggccccaaggtggacatctggagcctgggcatcatggccatcgagatggtggagggcgagcccccctacctgaacgagaaccccctgagagccctgtacctgatcgccaccaacggcacccccgagctgcagaaccccgagagactgagcgccgtgttcagagacttcctgaacagatgcctggagatggacgtggacagaagaggcagcgccaaggagctgctgcagcaccccttcctgaagctggccaagcccctgagcagcctgacccccctgatcatcgccgccaaggaggccatcaagaacagcagcagatag

SEQ ID NO: 92242 - DNA, 1635 bp, synthetic construct; identical to SEQ ID NO: 92239
  misc_feature 1..1635: note = Description of Artificial Sequence: Synthetic coding sequence
  source 1..1635: mol_type = other DNA

SEQ ID NO: 92243 - DNA, 546 bp, synthetic construct
  misc_feature 1..546: note = Description of Artificial Sequence: Synthetic coding sequence
  source 1..546: mol_type = other DNA
atgagcgacggcctggacaacgaggagaagccccccgccccccccctgagaatgaacagcaacaacagagacagcagcgccctgaaccacagcagcaagcccctgcccatggcccccgaggagaagaacaagaaggccagactgagaagcatcttccccggcggcggcgacaagaccaacaagaagaaggagaaggagagacccgagatcagcctgcccagcgacttcgagcacaccatccacgtgggcttcgacgccgtgaccggcgagttcaccaacagccccttccagaccagcagacccgtgaccgtggccagcagccagagcgagggcaagatgcccgacctgtacggcagccagatgtgccccggcaagctgcccgagggcatccccgagcagtgggccagactgctgcagaccagcaacatcaccaagctggagcagaagaagaacccccaggccgtgctggacgtgctgaagttctacgacagcaaggagaccgtgaacaaccagaagtacatgagcttcaccagcggcgacaagtag

SEQ ID NO: 92244 - DNA, 1635 bp, synthetic construct; identical to SEQ ID NO: 92239
  misc_feature 1..1635: note = Description of Artificial Sequence: Synthetic coding sequence
  source 1..1635: mol_type = other DNA

SEQ ID NO: 92245 - DNA, 1743 bp, synthetic construct; identical to SEQ ID NO: 92238
  misc_feature 1..1743: note = Description of Artificial Sequence: Synthetic coding sequence
  source 1..1743: mol_type = other DNA

SEQ ID NO: 92246 - DNA, 1698 bp, synthetic construct; identical to SEQ ID NO: 92241
  misc_feature 1..1698: note = Description of Artificial Sequence: Synthetic coding sequence
  source 1..1698: mol_type = other DNA

SEQ ID NO: 92247 - DNA, 2046 bp, synthetic construct
  misc_feature 1..2046: note = Description of Artificial Sequence: Synthetic coding sequence
  source 1..2046: mol_type = other DNA
atgttcagaaagaagaagaagaagagacccgagatcagcgccccccagaacttccagcacagagtgcacaccagcttcgaccccaaggagggcaagttcgtgggcctgcccccccagtggcagaacatcctggacaccctgagaagacccaagcccgtggtggaccccagcagaatcaccagagtgcagctgcagcccatgaagaccgtggtgagaggcagcgccatgcccgtggacggctacatcagcggcctgctgaacgacatccagaagctgagcgtgatcagcagcaacaccctgagaggcagaagccccaccagcagaagaagagcccagagcctgggcctgctgggcgacgagcactgggccaccgaccccgacatgtacctgcagagcccccagagcgagagaaccgacccccacggcctgtacctgagctgcaacggcggcacccccgccggccacaagcagatgccctggcccgagccccagagccccagagtgctgcccaacggcctggccgccaaggcccagagcctgggccccgccgagttccagggcgccagccagagatgcctgcagctgggcgcctgcctgcagagcagcccccccggcgccagcccccccaccggcaccaacagacacggcatgaaggccgccaagcacggcagcgaggaggccagaccccagagctgcctggtgggcagcgccaccggcagacccggcggcgagggcagccccagccccaagaccagagagagcagcctgaagagaagactgttcagaagcatgttcctgagcaccgccgccaccgccccccccagcagcagcaagcccggcccccccccccagagcaagcccaacagcagcttcagacccccccagaaggacaacccccccagcctggtggccaaggcccagagcctgcccagcgaccagcccgtgggcaccttcagccccctgaccaccagcgacaccagcagcccccagaagagcctgagaaccgcccccgccaccggccagctgcccggcagaagcagccccgccggcagccccagaacctggcacgcccagatcagcaccagcaacctgtacctgccccaggaccccaccgtggccaagggcgccctggccggcgaggacaccggcgtggtgacccacgagcagttcaaggccgccctgagaatggtggtggaccagggcgaccccagactgctgctggacagctacgtgaagatcggcgagggcagcaccggcatcgtgtgcctggccagagagaagcacagcggcagacaggtggccgtgaagatgatggacctgagaaagcagcagagaagagagctgctgttcaacgaggtggtgatcatgagagactaccagcacttcaacgtggtggagatgtacaagagctacctggtgggcgaggagctgtgggtgctgatggagttcctgcagggcggcgccctgaccgacatcgtgagccaggtgagactgaacgaggagcagatcgccaccgtgtgcgaggccgtgctgcaggccctggcctacctgcacgcccagggcgtgatccacagagacatcaagagcgacagcatcctgctgaccctggacggcagagtgaagctgagcgacttcggcttctgcgcccagatcagcaaggacgtgcccaagagaaagagcctggtgggcaccccctactggatggcccccgaggtgatcagcagaagcctgtacgccaccgaggtggacatctggagcctgggcatcatggtgatcgagatggtggacggcgagcccccctacttcagcgacagccccgtgcaggccatgaagagactgagagacagccccccccccaagctgaagaacagccacaaggtgagccccgtgctgagagacttcctggagagaatgctggtgagagacccccaggagagagccaccgcccaggagctgctggaccaccccttcctgctgcagaccggcctgcccgagtgcctggtgcccctgatccagctgtacagaaagcagaccagcacctgctag

SEQ ID NO: 92248 - DNA, 2046 bp, synthetic construct; identical to SEQ ID NO: 92247
  misc_feature 1..2046: note = Description of Artificial Sequence: Synthetic coding sequence
  source 1..2046: mol_type = other DNA

SEQ ID NO: 92249 - DNA, 2046 bp, synthetic construct; identical to SEQ ID NO: 92247
  misc_feature 1..2046: note = Description of Artificial Sequence: Synthetic coding sequence
  source 1..2046: mol_type = other DNA

SEQ ID NO: 92250 - DNA, 369 bp, synthetic construct
  misc_feature 1..369: note = Description of Artificial Sequence: Synthetic coding sequence
  source 1..369: mol_type = other DNA
atgttcagaaagaagaagaagaagagacccgagatcagcgccccccagaacttccagcacagagtgcacaccagcttcgaccccaaggagggcaagttcgtgggcctgcccccccagtggcagaacatcctggacaccctgagaagacccaagcccgtggtggaccccagcagaatcaccagagtgcagctgcagcccatgaagaccgtggtgagaggcagcgccatgcccgtggacggctacatcagcggcctgctgaacgacatccagaagctgagcgtgatcagcagcaacaccctgagaggcagaagccccaccagcagaagaagagcccagagcctgggcctgctgggcgacgagcactggtag

SEQ ID NO: 92251 - DNA, 372 bp, synthetic construct
  misc_feature 1..372: note = Description of Artificial Sequence: Synthetic coding sequence
  source 1..372: mol_type = other DNA
atgttcagaaagaagaagaagaagagacccgagatcagcgccccccagaacttccagcacagagtgcacaccagcttcgaccccaaggagggcaagttcgtgggcctgcccccccagtggcagaacatcctggacaccctgagaagacccaagcccgtggtggaccccagcagaatcaccagagtgcagctgcagcccatgaagaccgtggtgagaggcagcgccatgcccgtggacggctacatcagcggcctgctgaacgacatccagaagctgagcgtgatcagcagcaacaccctgagaggcagaagccccaccagcagaagaagagcccagagcctgggcctgctgggcgacgagcactgggcctag

SEQ ID NO: 92252 - DNA, 330 bp, synthetic construct
  misc_feature 1..330: note = Description of Artificial Sequence: Synthetic coding sequence
  source 1..330: mol_type = other DNA
atgttcagaaagaagaagaagaagagacccgagatcagcgccccccagaacttccagcacagagtgcacaccagcttcgaccccaaggagggcaagttcgtgggcctgcccccccagtggcagaacatcctggacaccctgagaagacccaagcccgtggtggaccccagcagaatcaccagagtgcagctgcagcccatgaagaccgtggtgagaggcagcgccatgcccgtggacggctacatcagcggcctgctgaacgacatccagaagctgagcgtgatcagcagcaacaccctgagaggcagaagccccaccagcagaagatag

SEQ ID NO: 92253 - DNA, 339 bp, synthetic construct
  misc_feature 1..339: note = Description of Artificial Sequence: Synthetic coding sequence
  source 1..339: mol_type = other DNA
atgttcagaaagaagaagaagaagagacccgagatcagcgccccccagaacttccagcacagagtgcacaccagcttcgaccccaaggagggcaagttcgtgggcctgcccccccagtggcagaacatcctggacaccctgagaagacccaagcccgtggtggaccccagcagaatcaccagagtgcagctgcagcccatgaagaccgtggtgagaggcagcgccatgcccgtggacggctacatcagcggcctgctgaacgacatccagaagctgagcgtgatcagcagcaacaccctgagaggcagaagccccaccagcagaagaagagcccagtag

SEQ ID NO: 92254 - DNA, 2046 bp, synthetic construct; identical to SEQ ID NO: 92247
  misc_feature 1..2046: note = Description of Artificial Sequence: Synthetic coding sequence
  source 1..2046: mol_type = other DNA

SEQ ID NO: 92255 - DNA, 855 bp, synthetic construct
  misc_feature 1..855: note = Description of Artificial Sequence: Synthetic coding sequence
  source 1..855: mol_type = other DNA
atgttcagaaagaagaagaagaagagacccgagatcagcgccccccagaacttccagcacagagtgcacaccagcttcgaccccaaggagggcaagttcgtgggcctgcccccccagtggcagaacatcctggacaccctgagaagacccaagcccgtggtggaccccagcagaatcaccagagtgcagctgcagcccatgaagaccgtggtgagaggcagcgccatgcccgtggacggctacatcagcggcctgctgaacgacatccagaagctgagcgtgatcagcagcaacaccctgagaggcagaagccccaccagcagaagaagagcccagagcctgggcctgctgggcgacgagcactgggccaccgaccccgacatgtacctgcagagcccccagagcgagagaaccgacccccacggcctgtacctgagctgcaacggcggcacccccgccggccacaagcagatgccctggcccgagccccagagccccagagtgctgcccaacggcctggccgccaaggcccagagcctgggccccgccgagttccagggcgccagccagagatgcctgcagctgggcgcctgcctgcagagcagcccccccggcgccagcccccccaccggcaccaacagacacggcatgaaggccgccaagcacggcagcgaggaggccagaccccagagctgcctggtgggcagcgccaccggcagacccggcggcgagggcagccccagccccaagaccagagagagcagcctgaagagaagactgttcagaagcatgttcctgagcaccgccgccaccgccccccccagcagcagcaagcccggcccccccccccagtag

SEQ ID NO: 92256 - DNA, 318 bp, synthetic construct
  misc_feature 1..318: note = Description of Artificial Sequence: Synthetic coding sequence
  source 1..318: mol_type = other DNA
atgttcagaaagaagaagaagaagagacccgagatcagcgccccccagaacttccagcacagagtgcacaccagcttcgaccccaaggagggcaagttcgtgggcctgcccccccagtggcagaacatcctggacaccctgagaagacccaagcccgtggtggaccccagcagaatcaccagagtgcagctgcagcccatgaagaccgtggtgagaggcagcgccatgcccgtggacggctacatcagcggcctgctgaacgacatccagaagctgagcgtgatcagcagcaacaccctgagaggcagaagcccctag

SEQ ID NO: 92257 - DNA, 441 bp, synthetic construct
  misc_feature 1..441: note = Description of Artificial Sequence: Synthetic coding sequence
  source 1..441: mol_type = other DNA
atgatcaacatgggcgacagccacgtggacaccagcagcaccgtgagcgaggccgtggccgaggaggtgagcctgttcagcatgaccgacatgatcctgttcagcctgatcgtgggcctgctgacctactggttcctgttcagaaagaagaaggaggaggtgcccgagttcaccaagatccagaccctgaccagcagcgtgagagagagcagcttcgtggagaagatgaagaagaccggcagaaacatcatcgtgttctacggcagccagaccggcaccgccgaggagttcgccaacagactgagcaaggacgcccacagatacggcatgagaggcatgagcgccgaccccgaggagtacgacctggccgacctgagcagcctgcccgagatcgacaacgccctggtggtgttctgcatggccacctacggcgagggctag

SEQ ID NO: 92258 - DNA, 519 bp, synthetic construct
  misc_feature 1..519: note = Description of Artificial Sequence: Synthetic coding sequence
  source 1..519: mol_type = other DNA
atgatcaacatgggcgacagccacgtggacaccagcagcaccgtgagcgaggccgtggccgaggaggtgagcctgttcagcatgaccgacatgatcctgttcagcctgatcgtgggcctgctgacctactggttcctgttcagaaagaagaaggaggaggtgcccgagttcaccaagatccagaccctgaccagcagcgtgagagagagcagcttcgtggagaagatgaagaagaccggcagaaacatcatcgtgttctacggcagccagaccggcaccgccgaggagttcgccaacagactgagcaaggacgcccacagatacggcatgagaggcatgagcgccgaccccgaggagtacgacctggccgacctgagcagcctgcccgagatcgacaacgccctggtggtgttctgcatggccacctacggcgagggcgaccccaccgacaacgcccaggacttctacgactggctgcaggagaccgacgtggacctgagcggcgtgaagttcgcctag

SEQ ID NO: 92259 - DNA, 189 bp, synthetic construct
  misc_feature 1..189: note = Description of Artificial Sequence: Synthetic coding sequence
  source 1..189: mol_type = other DNA
atgatcaacatgggcgacagccacgtggacaccagcagcaccgtgagcgaggccgtggccgaggaggtgagcctgttcagcatgaccgacatgatcctgttcagcctgatcgtgggcctgctgacctactggttcctgttcagaaagaagaaggaggaggtgcccgagttcaccaagatccagacctag

SEQ ID NO: 92260 - DNA, 1107 bp, synthetic construct
  misc_feature 1..1107: note = Description of Artificial Sequence: Synthetic coding sequence
  source 1..1107: mol_type = other DNA
atgggcaagtacgtggacaagagactggagcagctgggcgcccagagaatcttcgagctgggcctgggcgacgacgacggcaacctggaggaggacttcatcacctggagagagcagttctggcccgccgtgtgcgagcacttcggcgtggaggccaccggcgaggagagcagcatcagacagtacgagctggtggtgcacaccgacatcgacgccgccaaggtgtacatgggcgagatgggcagactgaagagctacgagaaccagaagccccccttcgacgccaagaaccccttcctggccgccgtgaccaccaacagaaagctgaaccagggcaccgagagacacctgatgcacctggagctggacatcagcgacagcaagatcagatacgagagcggcgaccacgtggccgtgtaccccgccaacgacagcgccctggtgaaccagctgggcaagatcctgggcgccgacctggacgtggtgatgagcctgaacaacctggacgaggagagcaacaagaagcaccccttcccctgccccaccagctacagaaccgccctgacctactacctggacatcaccaacccccccagaaccaacgtgctgtacgagctggcccagtacgccagcgagcccagcgagcaggagctgctgagaaagatggccagcagcagcggcgagggcaaggagctgtacctgagctgggtggtggaggccagaagacacatcctggccatcctgcaggactgccccagcctgagaccccccatcgaccacctgtgcgagctgctgcccagactgcaggccagatactacagcatcgccagcagcagcaaggtgcaccccaacagcgtgcacatctgcgccgtggtggtggagtacgagaccaaggccggcagaatcaacaagggcgtggccaccaactggctgagagccaaggagcccgccggcgagaacggcggcagagccctggccgtgcccaccagcaccagcgtgggcatgcacggcacctggcccggcatgtgcagaacccccagcaccaccagctggctgagcagcggcccctggagcaccagaagaagatggaccaccagcagaaactag

SEQ ID NO: 92261 - DNA, 120 bp, synthetic construct
  misc_feature 1..120: note = Description of Artificial Sequence: Synthetic coding sequence
  source 1..120: mol_type = other DNA
atgatcaacatgggcgacagccacgtggacaccagcagcaccgtgagcgaggccgtggccgaggaggtgagcctgttcagcatgaccgacatgatcctgttcagcctgatcgtgggctag

SEQ ID NO: 92262 - DNA, 501 bp, synthetic construct
  misc_feature 1..501: note = Description of Artificial Sequence: Synthetic coding sequence
  source 1..501: mol_type = other DNA
atgatcaacatgggcgacagccacgtggacaccagcagcaccgtgagcgaggccgtggccgaggaggtgagcctgttcagcatgaccgacatgatcctgttcagcctgatcgtgggcctgctgacctactggttcctgttcagaaagaagaaggaggaggtgcccgagttcaccaagatccagaccctgaccagcagcgtgagagagagcagcttcgtggagaagatgaagaagaccggcagaaacatcatcgtgttctacggcagccagaccggcaccgccgaggagttcgccaacagactgagcaaggacgcccacagatacggcatgagaggcatgagcgccgaccccgaggagtacgacctggccgacctgagcagcctgcccgagatcgacaacgccctggtggtgttctgcatggccacctacggcgagggcgaccccaccgacaacgcccaggacttctacgactggctgcaggagaccgacgtggacctgtag

SEQ ID NO: 92263 - DNA, 567 bp, synthetic construct
  misc_feature 1..567: note = Description of Artificial Sequence: Synthetic coding sequence
  source 1..567: mol_type = other DNA
atgatcaacatgggcgacagccacgtggacaccagcagcaccgtgagcgaggccgtggccgaggaggtgagcctgttcagcatgaccgacatgatcctgttcagcctgatcgtgggcctgctgacctactggttcctgttcagaaagaagaaggaggaggtgcccgagttcaccaagatccagaccctgaccagcagcgtgagagagagcagcttcgtggagaagatgaagaagaccggcagaaacatcatcgtgttctacggcagccagaccggcaccgccgaggagttcgccaacagactgagcaaggacgcccacagatacggcatgagaggcatgagcgccgaccccgaggagtacgacctggccgacctgagcagcctgcccgagatcgacaacgccctggtggtgttctgcatggccacctacggcgagggcgaccccaccgacaacgcccaggacttctacgactggctgcaggagaccgacgtggacctgagcggcgtgaagttcgccgtgttcggcctgggcaacaagacctacgagcacttcaacgccatgggctag

SEQ ID NO: 92264 - DNA, 189 bp, synthetic construct; identical to SEQ ID NO: 92259
  misc_feature 1..189: note = Description of Artificial Sequence: Synthetic coding sequence
  source 1..189: mol_type = other DNA

SEQ ID NO: 92265 - DNA, 1722 bp, synthetic construct
  misc_feature 1..1722: note = Description of Artificial Sequence: Synthetic coding sequence
  source 1..1722: mol_type = other DNA
atgggcagcagatggcccgccgtgcccccctggggcctgcagatccacgtgagcgagagacagcccagcagaccccccccctgcccccagcagcccggccaggccacctgcgagaccctgagcagcgcccccgaccccagcaccaccagaatgagccccccctgcccccagccccagagcgcccccggcggcatcggctgctggagactgaaggtgttcggcctgggcaacaagacctacgagcacttcaacgccatgggcaagtacgtggacaagagactggagcagctgggcgcccagagaatcttcgagctgggcctgggcgacgacgacggcaacctggaggaggacttcatcacctggagagagcagttctggcccgccgtgtgcgagcacttcggcgtggaggccaccggcgaggagagcagcatcagacagtacgagctggtggtgcacaccgacatcgacgccgccaaggtgtacatgggcgagatgggcagactgaagagctacgagaaccagaagccccccttcgacgccaagaaccccttcctggccgccgtgaccaccaacagaaagctgaaccagggcaccgagagacacctgatgcacctggagctggacatcagcgacagcaagatcagatacgagagcggcgaccacgtggccgtgtaccccgccaacgacagcgccctggtgaaccagctgggcaagatcctgggcgccgacctggacgtggtgatgagcctgaacaacctggacgaggagagcaacaagaagcaccccttcccctgccccaccagctacagaaccgccctgacctactacctggacatcaccaacccccccagaaccaacgtgctgtacgagctggcccagtacgccagcgagcccagcgagcaggagctgctgagaaagatggccagcagcagcggcgagggcaaggagctgtacctgagctgggtggtggaggccagaagacacatcctggccatcctgcaggactgccccagcctgagaccccccatcgaccacctgtgcgagctgctgcccagactgcaggccagatactacagcatcgccagcagcagcaaggtgcaccccaacagcgtgcacatctgcgccgtggtggtggagtacgagaccaaggccggcagaatcaacaagggcgtggccaccaactggctgagagccaaggagcccgccggcgagaacggcggcagagccctggtgcccatgttcgtgagaaagagccagttcagactgcccttcaaggccaccacccccgtgatcatggtgggccccggcaccggcgtggcccccttcatcggcttcatccaggagagagcctggctgagacagcagggcaaggaggtgggcgagaccctgctgtactacggctgcagaagaagcgacgaggactacctgtacagagaggagctggcccagttccacagagacggcgccctgacccagctgaacgtggccttcagcagagagcagagccacaaggtgtacgtgcagcacctgctgaagcaggacagagagcacctgtggaagctgatcgagggcggcgcccacatctacgtgtgcggcacccccagcagctgccccggcatgcacggcacctggcccggcatgtgcagaacccccagcaccaccagctggctgagcagcggcccctggagcaccagaagaagatggaccaccagcagaaactag

SEQ ID NO: 92266 - DNA, 423 bp, synthetic construct
  misc_feature 1..423: note = Description of Artificial Sequence: Synthetic coding sequence
  source 1..423: mol_type = other DNA
atgatcaacatgggcgacagccacgtggacaccagcagcaccgtgagcgaggccgtggccgaggaggtgagcctgttcagcatgaccgacatgatcctgttcagcctgatcgtgggcctgctgacctactggttcctgttcagaaagaagaaggaggaggtgcccgagttcaccaagatccagaccctgaccagcagcgtgagagagagcagcttcgtggagaagatgaagaagaccggcagaaacatcatcgtgttctacggcagccagaccggcaccgccgaggagttcgccaacagactgagcaaggacgcccacagatacggcatgagaggcatgagcgccgaccccgaggagtacgacctggccgacctgagcagcctgcccgagatcgacaacgccctggtggtgttctgcatgtag

SEQ ID NO: 92267 - DNA, 2043 bp, synthetic construct
  misc_feature 1..2043: note = Description of Artificial Sequence: Synthetic coding sequence
  source 1..2043: mol_type = other DNA
atgatcaacatgggcgacagccacgtggacaccagcagcaccgtgagcgaggccgtggccgaggaggtgagcctgttcagcatgaccgacatgatcctgttcagcctgatcgtgggcctgctgacctactggttcctgttcagaaagaagaaggaggaggtgcccgagttcaccaagatccagaccctgaccagcagcgtgagagagagcagcttcgtggagaagatgaagaagaccggcagaaacatcatcgtgttctacggcagccagaccggcaccgccgaggagttcgccaacagactgagcaaggacgcccacagatacggcatgagaggcatgagcgccgaccccgaggagtacgacctggccgacctgagcagcctgcccgagatcgacaacgccctggtggtgttctgcatggccacctacggcgagggcgaccccaccgacaacgcccaggacttctacgactggctgcaggagaccgacgtggacctgagcggcgtgaagttcgccgtgttcggcctgggcaacaagacctacgagcacttcaacgccatgggcaagtacgtggacaagagactggagcagctgggcgcccagagaatcttcgagctgggcctgggcgacgacgacggcaacctggaggaggacttcatcacctggagagagcagttctggcccgccgtgtgcgagcacttcggcgtggaggccaccggcgaggagagcagcatcagacagtacgagctggtggtgcacaccgacatcgacgccgccaaggtgtacatgggcgagatgggcagactgaagagctacgagaaccagaagccccccttcgacgccaagaaccccttcctggccgccgtgaccaccaacagaaagctgaaccagggcaccgagagacacctgatgcacctggagctggacatcagcgacagcaagatcagatacgagagcggcgaccacgtggccgtgtaccccgccaacgacagcgccctggtgaaccagctgggcaagatcctgggcgccgacctggacgtggtgatgagcctgaacaacctggacgaggagagcaacaagaagcaccccttcccctgccccaccagctacagaaccgccctgacctactacctggacatcaccaacccccccagaaccaacgtgctgtacgagctggcccagtacgccagcgagcccagcgagcaggagctgctgagaaagatggccagcagcagcggcgagggcaaggagctgtacctgagctgggtggtggaggccagaagacacatcctggccatcctgcaggactgccccagcctgagaccccccatcgaccacctgtgcgagctgctgcccagactgcaggccagatactacagcatcgccagcagcagcaaggtgcaccccaacagcgtgcacatctgcgccgtggtggtggagtacgagaccaaggccggcagaatcaacaagggcgtggccaccaactggctgagagccaaggagcccgccggcgagaacggcggcagagccctggtgcccatgttcgtgagaaagagccagttcagactgcccttcaaggccaccacccccgtgatcatggtgggccccggcaccggcgtggcccccttcatcggcttcatccaggagagagcctggctgagacagcagggcaaggaggtgggcgagaccctgctgtactacggctgcagaagaagcgacgaggactacctgtacagagaggagctggcccagttccacagagacggcgccctgacccagctgaacgtggccttcagcagagagcagagccacaaggtgtacgtgcagcacctgctgaagcaggacagagagcacctgtggaagctgatcgagggcggcgcccacatctacgtgtgcggcgacgccagaaacatggccagagacgtgcagaacaccttctacgacatcgtggccgagctgggcgccatggagcacgcccaggccgtggactacatcaagaagctgatgaccaagggcagatacagcctggacgtgtggagctag

SEQ ID NO: 92268 - DNA, 1467 bp, synthetic construct
  misc_feature 1..1467: note = Description of Artificial Sequence: Synthetic coding sequence
  source 1..1467: mol_type = other DNA
atgcccagaaccagcaccaccggctgcagaagacagacctggatcagcctgggcagcagcagcagactggaggaggacttcatcacctggagagagcagttctggcccgccgtgtgcgagcacttcggcgtggaggccaccggcgaggagagcagcatcagacagtacgagctggtggtgcacaccgacatcgacgccgccaaggtgtacatgggcgagatgggcagactgaagagctacgagaaccagaagccccccttcgacgccaagaaccccttcctggccgccgtgaccaccaacagaaagctgaaccagggcaccgagagacacctgatgcacctggagctggacatcagcgacagcaagatcagatacgagagcggcgaccacgtggccgtgtaccccgccaacgacagcgccctggtgaaccagctgggcaagatcctgggcgccgacctggacgtggtgatgagcctgaacaacctggacgaggagagcaacaagaagcaccccttcccctgccccaccagctacagaaccgccctgacctactacctggacatcaccaacccccccagaaccaacgtgctgtacgagctggcccagtacgccagcgagcccagcgagcaggagctgctgagaaagatggccagcagcagcggcgagggcaaggagctgtacctgagctgggtggtggaggccagaagacacatcctggccatcctgcaggactgccccagcctgagaccccccatcgaccacctgtgcgagctgctgcccagactgcaggccagatactacagcatcgccagcagcagcaaggtgcaccccaacagcgtgcacatctgcgccgtggtggtggagtacgagaccaaggccggcagaatcaacaagggcgtggccaccaactggctgagagccaaggagcccgccggcgagaacggcggcagagccctggtgcccatgttcgtgagaaagagccagttcagactgcccttcaaggccaccacccccgtgatcatggtgggccccggcaccggcgtggcccccttcatcggcttcatccaggagagagcctggctgagacagcagggcaaggaggtgggcgagaccctgctgtactacggctgcagaagaagcgacgaggactacctgtacagagaggagctggcccagttccacagagacggcgccctgacccagctgaacgtggccttcagcagagagcagagccacaaggtgtacgtgcagcacctgctgaagcaggacagagagcacctgtggaagctgatcgagggcggcgcccacatctacgtgtgcggcgacgccagaaacatggccagagacgtgcagaacaccttctacgacatcgtggccgagctgggcgccatggagcacgcccaggccgtggactacatcaagaagctgatgaccaagggcagatacagcctggacgtgtggagctag

SEQ ID NO: 92269 - DNA, 402 bp, synthetic construct
  misc_feature 1..402: note = Description of Artificial Sequence: Synthetic coding sequence
  source 1..402: mol_type = other DNA
atgctgagccccgaggccgagagagtgctgagatacctggtggaggtggaggagctggccgaggaggtgctggccgacaagagacagatcgtggacctggacaccaagagaaaccagaacagagagggcctgagagccctgcagaaggacctgagcctgagcgaggacgtgatggtgtgcttcggcaacatgttcatcaagatgccccaccccgagaccaaggagatgatcgagaaggaccaggaccacctggacaaggagatcgagaagctgagaaagcagctgaaggtgaaggtgaacagactgttcgaggcccagggcaagcccgagctgaagggcttcaacctgaaccccctgaaccaggacgagctgaaggccctgaaggtgatcctgaagggctag

SEQ ID NO: 92270 - DNA, 1605 bp, synthetic construct
  misc_feature 1..1605: note = Description of Artificial Sequence: Synthetic coding sequence
  source 1..1605: mol_type = other DNA
atgaagttcaccctgggcctgggcagcagagcctggagagtgagctgggagggcgccgccgccgccgccgccggccccggcgccggcggcagcgccctgagatgcagagcccagagagtgagcagccccagactgggcagaagaggcagcagactgagcggcgccctgcccctgtgcctgagcagaggcggcggcggcgcccaggccctgcccgactgcgccggccccagccccggccaccccggccaccccggcgccagacagctggccggccccctggccatggagcagacctacggcgaggtgaaccagctgggcggcgtgttcgtgaacggcagacccctgcccaacgccatcagactgagaatcgtggagctggcccagctgggcatcagaccctgcgacatcagcagacagctgagagtgagccacggctgcgtgagcaagatcctggccagatacaacgagaccggcagcatcctgcccggcgccatcggcggcagcaagcccagagtgaccacccccaacgtggtgaagcacatcagagactacaagcagggcgaccccggcatcttcgcctgggagatcagagacagactgctggccgacggcgtgtgcgacaagtacaacgtgcccagcgtgagcagcatcagcagaatcctgagaaacaagatcggcagcctggcccagcccggcccctacgaggccagcaagcagccccccagccagcccaccctgccctacaaccacatctaccagtacccctaccccagccccgtgagccccaccggcgccaagatgggcagccaccccggcgtgcccggcaccgccggccacgtgagcatccccagaagctggcccagcgcccacagcgtgagcaacatcctgggcatcagaaccttcatggagcagaccggcgccctggccggcagcgagggcaccgcctacagccccaagatggaggactgggccggcgtgaacagaaccgccttccccgccacccccgccgtgaacggcctggagaagcccgccctggaggccgacatcaagtacacccagagcgccagcaccctgagcgccgtgggcggcttcctgcccgcctgcgcctaccccgccagcaaccagcacggcgtgtacagcgcccccggcggcggctacctggcccccggccccccctggccccccgcccagggcccccccctggccccccccggcgccggcgtggccgtgcacggcggcgagctggccgccgccatgaccttcaagcaccccagcagagagggcagcctgcccgcccccgccgccagacccagaacccccagcgtggcctacaccgactgccccagcagacccagaccccccagaggcagcagccccagaaccagagccagaagagagagacaggccgaccccggcgcccaggtgtgcgccgccgcccccgccatcggcaccggcagaatcggcggcctggccgaggaggaggccagcgccggccccagaggcgccagacccgccagcccccaggcccagccctgcctgtggcccgaccccccccacttcctgtactggagcggcttcctgggcttcagcgagctgggcttctag

SEQ ID NO: 92271 - DNA, 1185 bp, synthetic construct
  misc_feature 1..1185: note = Description of Artificial Sequence: Synthetic coding sequence
  source 1..1185: mol_type = other DNA
atggacatgcactgcaaggccgaccccttcagcgccatgcaccccggccacggcggcgtgaaccagctgggcggcgtgttcgtgaacggcagacccctgcccgacgtggtgagacagagaatcgtggagctggcccaccagggcgtgagaccctgcgacatcagcagacagctgagagtgagccacggctgcgtgagcaagatcctgggcagatactacgagaccggcagcatcaagcccggcgtgatcggcggcagcaagcccaaggtggccacccccaaggtggtggacaagatcgccgagtacaagagacagaaccccaccatgttcgcctgggagatcagagacagactgctggccgagggcatctgcgacaacgacaccgtgcccagcgtgagcagcatcaacagaatcatcagaaccaaggtgcagcagcccttccaccccacccccgacggcgccggcaccggcgtgaccgcccccggccacaccatcgtgcccagcaccgccagcccccccgtgagcagcgccagcaacgaccccgtgggcagctacagcatcaacggcatcctgggcatccccagaagcaacggcgagaagagaaagagagacgaggacgtgagcgagggcagcgtgcccaacggcgacagccagagcggcgtggacagcctgagaaagcacctgagagccgacaccttcacccagcagcagctggaggccctggacagagtgttcgagagacccagctaccccgacgtgttccaggccagcgagcacatcaagagcgagcagggcaacgagtacagcctgcccgccctgacccccggcctggacgaggtgaagagcagcctgagcgccagcaccaaccccgagctgggcagcaacgtgagcggcacccagacctaccccgtggtgaccggcagagacatggccagcaccaccctgcccggctaccccccccacgtgccccccaccggccagggcagctaccccaccagcaccctggccggcatggtgcccggcagcgagttcagcggcaacccctacagccacccccagtacaccgcctacaacgaggcctggagattcagcaaccccgccctgctgagcagcccctactactacagcgccgcccccagaggcagcgcccccgccgccgccgccgccgcctacgacagacactag

SEQ ID NO: 92272 - DNA, 1191 bp, synthetic construct
  misc_feature 1..1191: note = Description of Artificial Sequence: Synthetic coding sequence
  source 1..1191: mol_type = other DNA
atggacatgcactgcaaggccgaccccttcagcgccatgcaccccggccacggcggcgtgaaccagctgggcggcgtgttcgtgaacggcagacccctgcccgacgtggtgagacagagaatcgtggagctggcccaccagggcgtgagaccctgcgacatcagcagacagctgagagtgagccacggctgcgtgagcaagatcctgggcagatactacgagaccggcagcatcaagcccggcgtgatcggcggcagcaagcccaaggtggccacccccaaggtggtggacaagatcgccgagtacaagagacagaaccccaccatgttcgcctgggagatcagagacagactgctggccgagggcatctgcgacaacgacaccgtgcccagcgtgagcagcatcaacagaatcatcagaaccaaggtgcagcagcccttccaccccacccccgacggcgccggcaccggcgtgaccgcccccggccacaccatcgtgcccagcaccgccagcccccccgtgagcagcgccagcaacgaccccgtgggcagctacagcatcaacggcatcctgggcatccccagaagcaacggcgagaagagaaagagagacgaggacgtgagcgagggcagcgtgcccaacggcgacagccagagcggcgtggacagcctgagaaagcacctgagagccgacaccttcacccagcagcagctggaggccctggacagagtgttcgagagacccagctaccccgacgtgttccaggccagcgagcacatcaagagcgagcagggcaacgagtacagcctgcccgccctgacccccggcctggacgaggtgaagagcagcctgagcgccagcaccaaccccgagctgggcagcaacgtgagcggcacccagacctaccccgtggtgaccggcagagacatggccagcaccaccctgcccggctaccccccccacgtgccccccaccggccagggcagctaccccaccagcaccctggccggcatggtgcccgaggccgccgtgggccccagcagcagcctgatgagcaagcccggcagaaagctggccgaggtgcccccctgcgtgcagcccaccggcgccagcagccccgccaccagaaccgccacccccagcaccagacccaccaccagactgggcgacagcgccacccccccctactag

SEQ ID NO: 92273 - DNA, 990 bp, synthetic construct
  misc_feature 1..990: note = Description of Artificial Sequence: Synthetic coding sequence
  source 1..990: mol_type = other DNA
atgttcgcctgggagatcagagacagactgctggccgagggcatctgcgacaacgacaccgtgcccagcgtgagcagcatcaacagaatcatcagaaccaaggtgcagcagcccttccaccccacccccgacggcgccggcaccggcgtgaccgcccccggccacaccatcgtgcccagcaccgccagcccccccgtgagcagcgccagcaacgaccccgtgggcagctacagcatcaacggcatcctgggcatccccagaagcaacggcgagaagagaaagagagacgaggtggaggtgtacaccgaccccgcccacatcagaggcggcggcggcctgcacctggtgtggaccctgagagacgtgagcgagggcagcgtgcccaacggcgacagccagagcggcgtggacagcctgagaaagcacctgagagccgacaccttcacccagcagcagctggaggccctggacagagtgttcgagagacccagctaccccgacgtgttccaggccagcgagcacatcaagagcgagcagggcaacgagtacagcctgcccgccctgacccccggcctggacgaggtgaagagcagcctgagcgccagcaccaaccccgagctgggcagcaacgtgagcggcacccagacctaccccgtggtgaccggcagagacatggccagcaccaccctgcccggctaccccccccacgtgccccccaccggccagggcagctaccccaccagcaccctggccggcatggtgcccggcagcgagttcagcggcaacccctacagccacccccagtacaccgcctacaacgaggcctggagattcagcaaccccgccctgctgagcagcccctactactacagcgccgcccccagaggcagcctgcccctgctgcccctgcccatgaccgccaccagctacagaggcgaccacatcaagctgcaggccgacagcttcggcctgcacatcgtgcccgtgtag

SEQ ID NO: 92274 - DNA, 1260 bp, synthetic construct
  misc_feature 1..1260: note = Description of Artificial Sequence: Synthetic coding sequence
  source 1..1260: mol_type = other DNA
atggacatgcactgcaaggccgaccccttcagcgccatgcaccccggccacggcggcgtgaaccagctgggcggcgtgttcgtgaacggcagacccctgcccgacgtggtgagacagagaatcgtggagctggcccaccagggcgtgagaccctgcgacatcagcagacagctgagagtgagccacggctgcgtgagcaagatcctgggcagatactacgagaccggcagcatcaagcccggcgtgatcggcggcagcaagcccaaggtggccacccccaaggtggtggacaagatcgccgagtacaagagacagaaccccaccatgttcgcctgggagatcagagacagactgctggccgagggcatctgcgacaacgacaccgtgcccagcgtgagcagcatcaacagaatcatcagaaccaaggtgcagcagcccttccaccccacccccgacggcgccggcaccggcgtgaccgcccccggccacaccatcgtgcccagcaccgccagcccccccgtgagcagcgccagcaacgaccccgtgggcagctacagcatcaacggcatcctgggcatccccagaagcaacggcgagaagagaaagagagacgaggtggaggtgtacaccgaccccgcccacatcagaggcggcggcggcctgcacctggtgtggaccctgagagacgtgagcgagggcagcgtgcccaacggcgacagccagagcggcgtggacagcctgagaaagcacctgagagccgacaccttcacccagcagcagctggaggccctggacagagtgttcgagagacccagctaccccgacgtgttccaggccagcgagcacatcaagagcgagcagggcaacgagtacagcctgcccgccctgacccccggcctggacgaggtgaagagcagcctgagcgccagcaccaaccccgagctgggcagcaacgtgagcggcacccagacctaccccgtggtgaccggcagagacatggccagcaccaccctgcccggctaccccccccacgtgccccccaccggccagggcagctaccccaccagcaccctggccggcatggtgcccgaggccgccgtgggccccagcagcagcctgatgagcaagcccggcagaaagctggccgaggtgcccccctgcgtgcagcccaccggcgccagcagccccgccaccagaaccgccacccccagcaccagacccaccaccagactgggcgacagcgccacccccccctactag

SEQ ID NO: 92275 - DNA, 645 bp, synthetic construct
  misc_feature 1..645: note = Description of Artificial Sequence: Synthetic coding sequence
  source 1..645: mol_type = other DNA
atggacatgcactgcaaggccgaccccttcagcgccatgcaccccggccacggcggcgtgaaccagctgggcggcgtgttcgtgaacggcagacccctgcccgacgtggtgagacagagaatcgtggagctggcccaccagggcgtgagaccctgcgacatcagcagacagctgagagtgagccacggctgcgtgagcaagatcctgggcagatactacgagaccggcagcatcaagcccggcgtgatcggcggcagcaagcccaaggtggccacccccaaggtggtggacaagatcgccgagtacaagagacagaaccccaccatgttcgcctgggagatcagagacagactgctggccgagggcatctgcgacaacgacaccgtgcccagcgtgagcagcatcaacagaatcatcagaaccaaggtgcagcagcccttccaccccacccccgacggcgccggcaccggcgtgaccgcccccggccacaccatcgtgcccagcaccgccagcccccccgtgagcagcgccagcaacgaccccgtgggcagctacagcatcaacggcatcctgggcatccccagaagcaacggcgagaagagaaagagagacgaggtggaggtgtacaccgaccccgcccactag

SEQ ID NO: 92276 - DNA, 1254 bp, synthetic construct
  misc_feature 1..1254: note = Description of Artificial Sequence: Synthetic coding sequence
  source 1..1254: mol_type = other DNA
atggacatgcactgcaaggccgaccccttcagcgccatgcaccccggccacggcggcgtgaaccagctgggcggcgtgttcgtgaacggcagacccctgcccgacgtggtgagacagagaatcgtggagctggcccaccagggcgtgagaccctgcgacatcagcagacagctgagagtgagccacggctgcgtgagcaagatcctgggcagatactacgagaccggcagcatcaagcccggcgtgatcggcggcagcaagcccaaggtggccacccccaaggtggtggacaagatcgccgagtacaagagacagaaccccaccatgttcgcctgggagatcagagacagactgctggccgagggcatctgcgacaacgacaccgtgcccagcgtgagcagcatcaacagaatcatcagaaccaaggtgcagcagcccttccaccccacccccgacggcgccggcaccggcgtgaccgcccccggccacaccatcgtgcccagcaccgccagcccccccgtgagcagcgccagcaacgaccccgtgggcagctacagcatcaacggcatcctgggcatccccagaagcaacggcgagaagagaaagagagacgaggtggaggtgtacaccgaccccgcccacatcagaggcggcggcggcctgcacctggtgtggaccctgagagacgtgagcgagggcagcgtgcccaacggcgacagccagagcggcgtggacagcctgagaaagcacctgagagccgacaccttcacccagcagcagctggaggccctggacagagtgttcgagagacccagctaccccgacgtgttccaggccagcgagcacatcaagagcgagcagggcaacgagtacagcctgcccgccctgacccccggcctggacgaggtgaagagcagcctgagcgccagcaccaaccccgagctgggcagcaacgtgagcggcacccagacctaccccgtggtgaccggcagagacatggccagcaccaccctgcccggctaccccccccacgtgccccccaccggccagggcagctaccccaccagcaccctggccggcatggtgcccggcagcgagttcagcggcaacccctacagccacccccagtacaccgcctacaacgaggcctggagattcagcaaccccgccctgctgagcagcccctactactacagcgccgcccccagaggcagcgcccccgccgccgccgccgccgcctacgacagacactag

SEQ ID NO: 92277 - DNA, 621 bp, synthetic construct
  misc_feature 1..621: note = Description of Artificial Sequence: Synthetic coding sequence
  source 1..621: mol_type = other DNA
atgaccaccctggccggcgccgtgcccagaatgatgagacccggccccggccagaactaccccagaagcggcttccccctggaggtgagcacccccctgggccagggcagagtgaaccagctgggcggcgtgttcatcaacggcagacccctgcccaaccacatcagacacaagatcgtggagatggcccaccacggcatcagaccctgcgtgatcagcagacagctgagagtgagccacggctgcgtgagcaagatcctgtgcagataccaggagaccggcagcatcagacccggcgccatcggcggcagcaagcccaagcaggtgaccacccccgacgtggagaagaagatcgaggagtacaagagagagaaccccggcatgttcagctgggagatcagagacaagctgctgaaggacgccgtgtgcgacagaaacaccgtgcccagcgtgagcagcatcagcagaatcctgagaagcaagttcggcaagggcgaggaggaggaggccgacctggagagaaaggaggccgaggagagcgagaagaaggccaagcacagcatcgacggcatcctgagcgagagaggcaaggccctggtgagcggcgtgagcagccactag

SEQ ID NO: 92278 - DNA, 1224 bp, synthetic construct
  misc_feature 1..1224: note = Description of Artificial Sequence: Synthetic coding sequence
  source 1..1224: mol_type = other DNA
atgaccaccctggccggcgccgtgcccagaatgatgagacccggccccggccagaactaccccagaagcggcttccccctggaggtgagcacccccctgggccagggcagagtgaaccagctgggcggcgtgttcatcaacggcagacccctgcccaaccacatcagacacaagatcgtggagatggcccaccacggcatcagaccctgcgtgatcagcagacagctgagagtgagccacggctgcgtgagcaagatcctgtgcagataccaggagaccggcagcatcagacccggcgccatcggcggcagcaagcccaagcaggtgaccacccccgacgtggagaagaagatcgaggagtacaagagagagaaccccggcatgttcagctgggagatcagagacaagctgctgaaggacgccgtgtgcgacagaaacaccgtgcccagcgtgagcagcatcagcagaatcctgagaagcaagttcggcaagggcgaggaggaggaggccgacctggagagaaaggaggccgaggagagcgagaagaaggccaagcacagcatcgacggcatcctgagcgagagagccagcgccccccagagcgacgagggcagcgacatcgacagcgagcccgacctgcccctgaagagaaagcagagaagaagcagaaccaccttcaccgccgagcagctggaggagctggagagagccttcgagagaacccactaccccgacatctacaccagagaggagctggcccagagagccaagctgaccgaggccagagtgcaggtgtggttcagcaacagaagagccagatggagaaagcaggccggcgccaaccagctgatggccttcaaccacctgatccccggcggcttcccccccaccgccatgcccaccctgcccacctaccagctgagcgagaccagctaccagcccaccagcatcccccaggccgtgagcgaccccagcagcaccgtgcacagaccccagcccctgccccccagcaccgtgcaccagagcaccatccccagcaaccccgacagcagcagcgcctactgcctgcccagcaccagacacggcttcagcagctacaccgacagcttcgtgccccccagcggccccagcaaccccatgaaccccaccatcggcaacggcctgagcccccaggtgcccttcatcatcagcagccagatcagcctgggcttcaagagcttctag

SEQ ID NO: 92279 - DNA, 1212 bp, synthetic construct
  misc_feature 1..1212: note = Description of Artificial Sequence: Synthetic coding sequence
  source 1..1212: mol_type = other DNA
atgaccaccctggccggcgccgtgcccagaatgatgagacccggccccggccagaactaccccagaagcggcttccccctggaggtgagcacccccctgggccagggcagagtgaaccagctgggcggcgtgttcatcaacggcagacccctgcccaaccacatcagacacaagatcgtggagatggcccaccacggcatcagaccctgcgtgatcagcagacagctgagagtgagccacggctgcgtgagcaagatcctgtgcagataccaggagaccggcagcatcagacccggcgccatcggcggcagcaagcccaagcaggtgaccacccccgacgtggagaagaagatcgaggagtacaagagagagaaccccggcatgttcagctgggagatcagagacaagctgctgaaggacgccgtgtgcgacagaaacaccgtgcccagcgtgagcagcatcagcagaatcctgagaagcaagttcggcaagggcgaggaggaggaggccgacctggagagaaaggaggccgaggagagcgagaagaaggccaagcacagcatcgacggcatcctgagcgagagagccagcgccccccagagcgacgagggcagcgacatcgacagcgagcccgacctgcccctgaagagaaagcagagaagaagcagaaccaccttcaccgccgagcagctggaggagctggagagagccttcgagagaacccactaccccgacatctacaccagagaggagctggcccagagagccaagctgaccgaggccagagtgcaggtgtggttcagcaacagaagagccagatggagaaagcaggccggcgccaaccagctgatggccttcaaccacctgatccccggcggcttcccccccaccgccatgcccaccctgcccacctaccagctgagcgagaccagctaccagcccaccagcatcccccaggccgtgagcgaccccagcagcaccgtgcacagaccccagcccctgccccccagcaccgtgcaccagagcaccatccccagcaaccccgacagcagcagcgcctactgcctgcccagcaccagacacggcttcagcagctacaccgacagcttcgtgccccccagcggccccagcaaccccatgaaccccaccatcggcaacggcctgagcccccaggtgcccttcatcatcagcagccagatcagcagaaagtag

SEQ ID NO: 92280 - DNA, 1440 bp, synthetic construct
  misc_feature 1..1440: note = Description of Artificial Sequence: Synthetic coding sequence
  source 1..1440: mol_type = other DNA
atgaccaccctggccggcgccgtgcccagaatgatgagacccggccccggccagaactaccccagaagcggcttccccctggaggtgagcacccccctgggccagggcagagtgaaccagctgggcggcgtgttcatcaacggcagacccctgcccaaccacatcagacacaagatcgtggagatggcccaccacggcatcagaccctgcgtgatcagcagacagctgagagtgagccacggctgcgtgagcaagatcctgtgcagataccaggagaccggcagcatcagacccggcgccatcggcggcagcaagcccaagcaggtgaccacccccgacgtggagaagaagatcgaggagtacaagagagagaaccccggcatgttcagctgggagatcagagacaagctgctgaaggacgccgtgtgcgacagaaacaccgtgcccagcgtgagcagcatcagcagaatcctgagaagcaagttcggcaagggcgaggaggaggaggccgacctggagagaaaggaggccgaggagagcgagaagaaggccaagcacagcatcgacggcatcctgagcgagagagccagcgccccccagagcgacgagggcagcgacatcgacagcgagcccgacctgcccctgaagagaaagcagagaagaagcagaaccaccttcaccgccgagcagctggaggagctggagagagccttcgagagaacccactaccccgacatctacaccagagaggagctggcccagagagccaagctgaccgaggccagagtgcaggtgtggttcagcaacagaagagccagatggagaaagcaggccggcgccaaccagctgatggccttcaaccacctgatccccggcggcttcccccccaccgccatgcccaccctgcccacctaccagctgagcgagaccagctaccagcccaccagcatcccccaggccgtgagcgaccccagcagcaccgtgcacagaccccagcccctgccccccagcaccgtgcaccagagcaccatccccagcaaccccgacagcagcagcgcctactgcctgcccagcaccagacacggcttcagcagctacaccgacagcttcgtgccccccagcggccccagcaaccccatgaaccccaccatcggcaacggcctgagcccccaggtgatgggcctgctgaccaaccacggcggcgtgccccaccagccccagaccgactacgccctgagccccctgaccggcggcctggagcccaccaccaccgtgagcgccagctgcagccagagactggaccacatgaagagcctggacagcctgcccaccagccagagctactgcccccccacctacagcaccaccggctacagcatggaccccgtgaccggctaccagtacggccagtacggccagagcaagccctggaccttctag

SEQ ID NO: 92281 - DNA, 1518 bp, synthetic construct
  misc_feature 1..1518: note = Description of Artificial Sequence: Synthetic coding sequence
  source 1..1518: mol_type = other DNA
atgaccaccctggccggcgccgtgcccagaatgatgagacccggccccggccagaactaccccagaagcggcttccccctggaggtgagcacccccctgggccagggcagagtgaaccagctgggcggcgtgttcatcaacggcagacccctgcccaaccacatcagacacaagatcgtggagatggcccaccacggcatcagaccctgcgtgatcagcagacagctgagagtgagccacggctgcgtgagcaagatcctgtgcagataccaggagaccggcagcatcagacccggcgccatcggcggcagcaagcccaagcaggtgaccacccccgacgtggagaagaagatcgaggagtacaagagagagaaccccggcatgttcagctgggagatcagagacaagctgctgaaggacgccgtgtgcgacagaaacaccgtgcccagcgtgagcagcatcagcagaatcctgagaagcaagttcggcaagggcgaggaggaggaggccgacctggagagaaaggaggccgaggagagcgagaagaaggccaagcacagcatcgacggcatcctgagcgagagagccagcgccccccagagcgacgagggcagcgacatcgacagcgagcccgacctgcccctgaagagaaagcagagaagaagcagaaccaccttcaccgccgagcagctggaggagctggagagagccttcgagagaacccactaccccgacatctacaccagagaggagctggcccagagagccaagctgaccgaggccagagtgcaggtgtggttcagcaacagaagagccagatggagaaagcaggccggcgccaaccagctgatggccttcaaccacctgatccccggcggcttcccccccaccgccatgcccaccctgcccacctaccagctgagcgagaccagctaccagcccaccagcatcccccaggccgtgagcgaccccagcagcaccgtgcacagaccccagcccctgccccccagcaccgtgcaccagagcaccatccccagcaaccccgacagcagcagcgcctactgcctgcccagcaccagacacggcttcagcagctacaccgacagcttcgtgccccccagcggccccagcaaccccatgaaccccaccatcggcaacggcctgagcccccaggtgatgggcctgctgaccaaccacggcggcgtgccccaccagccccagaccgactacgccctgagccccctgaccggcggcctggagcccaccaccaccgtgagcgccagctgcagccagagactggaccacatgaagagcctggacagcctgcccaccagccagagctactgcccccccacctacagcaccaccggctacagcatggaccccgtgaccggctaccagtacggccagtacggccagagcgccttccactacctgaagcccgacatcgcctggttccagatcctgctgaacaccttcgacaagagcagcggcgaggaggaggacctggagcagtag

SEQ ID NO: 92282 - DNA, 1455 bp, synthetic construct
  misc_feature 1..1455: note = Description of Artificial Sequence: Synthetic coding sequence
  source 1..1455: mol_type = other DNA
atgaccaccctggccggcgccgtgcccagaatgatgagacccggccccggccagaactaccccagaagcggcttccccctggaggtgagcacccccctgggccagggcagagtgaaccagctgggcggcgtgttcatcaacggcagacccctgcccaaccacatcagacacaagatcgtggagatggcccaccacggcatcagaccctgcgtgatcagcagacagctgagagtgagccacggctgcgtgagcaagatcctgtgcagataccaggagaccggcagcatcagacccggcgccatcggcggcagcaagcccaagcaggtgaccacccccgacgtggagaagaagatcgaggagtacaagagagagaaccccggcatgttcagctgggagatcagagacaagctgctgaaggacgccgtgtgcgacagaaacaccgtgcccagcgtgagcagcatcagcagaatcctgagaagcaagttcggcaagggcgaggaggaggaggccgacctggagagaaaggaggccgaggagagcgagaagaaggccaagcacagcatcgacggcatcctgagcgagagagccagcgccccccagagcgacgagggcagcgacatcgacagcgagcccgacctgcccctgaagagaaagcagagaagaagcagaaccaccttcaccgccgagcagctggaggagctggagagagccttcgagagaacccactaccccgacatctacaccagagaggagctggcccagagagccaagctgaccgaggccagagtgcaggtgtggttcagcaacagaagagccagatggagaaagcaggccggcgccaaccagctgatggccttcaaccacctgatccccggcggcttcccccccaccgccatgcccaccctgcccacctaccagctgagcgagaccagctaccagcccaccagcatcccccaggccgtgagcgaccccagcagcaccgtgcacagaccccagcccctgccccccagcaccgtgcaccagagcaccatccccagcaaccccgacagcagcagcgcctactgcctgcccagcaccagacacggcttcagcagctacaccgacagcttcgtgccccccagcggccccagcaaccccatgaaccccaccatcggcaacggcctgagcccccaggtgatgggcctgctgaccaaccacggcggcgtgccccaccagccccagaccgactacgccctgagccccctgaccggcggcctggagcccaccaccaccgtgagcgccagctgcagccagagactggaccacatgaagagcctggacagcctgcccaccagccagagctactgcccccccacctacagcaccaccggctacagcatggaccccgtgaccggctaccagtacggccagtacggccagagcgccttccactacctgaagcccgacatcgcctag

SEQ ID NO: 92283 - DNA, 1452 bp, synthetic construct
  misc_feature 1..1452: note = Description of Artificial Sequence: Synthetic coding sequence
  source 1..1452: mol_type = other DNA
atgaccaccctggccggcgccgtgcccagaatgatgagacccggccccggccagaactaccccagaagcggcttccccctggaggtgagcacccccctgggccagggcagagtgaaccagctgggcggcgtgttcatcaacggcagacccctgcccaaccacatcagacacaagatcgtggagatggcccaccacggcatcagaccctgcgtgatcagcagacagctgagagtgagccacggctgcgtgagcaagatcctgtgcagataccaggagaccggcagcatcagacccggcgccatcggcggcagcaagcccaaggtgaccacccccgacgtggagaagaagatcgaggagtacaagagagagaaccccggcatgttcagctgggagatcagagacaagctgctgaaggacgccgtgtgcgacagaaacaccgtgcccagcgtgagcagcatcagcagaatcctgagaagcaagttcggcaagggcgaggaggaggaggccgacctggagagaaaggaggccgaggagagcgagaagaaggccaagcacagcatcgacggcatcctgagcgagagagccagcgccccccagagcgacgagggcagcgacatcgacagcgagcccgacctgcccctgaagagaaagcagagaagaagcagaaccaccttcaccgccgagcagctggaggagctggagagagccttcgagagaacccactaccccgacatctacaccagagaggagctggcccagagagccaagctgaccgaggccagagtgcaggtgtggttcagcaacagaagagccagatggagaaagcaggccggcgccaaccagctgatggccttcaaccacctgatccccggcggcttcccccccaccgccatgcccaccctgcccacctaccagctgagcgagaccagctaccagcccaccagcatcccccaggccgtgagcgaccccagcagcaccgtgcacagaccccagcccctgccccccagcaccgtgcaccagagcaccatccccagcaaccccgacagcagcagcgcctactgcctgcccagcaccagacacggcttcagcagctacaccgacagcttcgtgccccccagcggccccagcaaccccatgaaccccaccatcggcaacggcctgagcccccaggtgatgggcctgctgaccaaccacggcggcgtgccccaccagccccagaccgactacgccctgagccccctgaccggcggcctggagcccaccaccaccgtgagcgccagctgcagccagagactggaccacatgaagagcctggacagcctgcccaccagccagagctactgcccccccacctacagcaccaccggctacagcatggaccccgtgaccggctaccagtacggccagtacggccagagcgccttccactacctgaagcccgacatcgcctag

SEQ ID NO: 92284 - DNA, 648 bp, synthetic construct
  misc_feature 1..648: note = Description of Artificial Sequence: Synthetic coding sequence
  source 1..648: mol_type = other DNA
atgaccaccctggccggcgccgtgcccagaatgatgagacccggccccggccagaactaccccagaagcggcttccccctggaggtgagcacccccctgggccagggcagagtgaaccagctgggcggcgtgttcatcaacggcagacccctgcccaaccacatcagacacaagatcgtggagatggcccaccacggcatcagaccctgcgtgatcagcagacagctgagagtgagccacggctgcgtgagcaagatcctgtgcagataccaggagaccggcagcatcagacccggcgccatcggcggcagcaagcccaagcaggtgaccacccccgacgtggagaagaagatcgaggagtacaagagagagaaccccggcatgttcagctgggagatcagagacaagctgctgaaggacgccgtgtgcgacagaaacaccgtgcccagcgtgagcagcatcagcagaatcctgagaagcaagttcggcaagggcgaggaggaggaggccgacctggagagaaaggaggccgaggagagcgagaagaaggccaagcacagcatcgacggcatcctgagcgagagaggcaagagatggagactgggcagaagaacctgctgggtgacctggagagccagcgccagctag

SEQ ID NO: 92285 - DNA, 822 bp, synthetic construct
  misc_feature 1..822: note = Description of Artificial Sequence: Synthetic coding sequence
  source 1..822: mol_type = other DNA
atgcaccaggacggcatcagcagcatgaaccagctgggcggcctgttcgtgaacggcagacccctgcccctggacaccagacagcagatcgtgagactggccgtgagcggcatgagaccctgcgacatcagcagaatcctgaaggtgagcaacggctgcgtgagcaagatcctgggcagatactacagaaccggcgtgctggagcccaagggcatcggcggcagcaagcccagactggccaccccccccgtggtggccagaatcgcccagctgaagggcgagtgccccgccctgttcgcctgggagatccagagacagctgtgcgccgagggcctgtgcacccaggacaagacccccagcgtgagcagcatcaacagagtgctgagagccctgcaggaggaccagggcctgccctgcaccagactgagaagccccgccgtgctggcccccgccgtgctgaccccccacagcggcagcgagacccccagaggcacccaccccggcaccggccacagaaacagaaccatcttcagccccagccaggccgaggccctggagaaggagttccagagaggccagtaccccgacagcgtggccagaggcaagctggccaccgccaccagcctgcccgaggacaccgtgagagtgtggttcagcaacagaagagccaagtggagaagacaggagaagctgaagtgggagatgcagctgcccgccgtgccctggcagtgcgcccacagcagccccgcctgccccggcaccaccggcagcctgctgctgagcgccgtgctgggcaacagcaccagaaaggtgagcgagtag

SEQ ID NO: 92286 - DNA, 1032 bp, synthetic construct
  misc_feature 1..1032: note = Description of Artificial Sequence: Synthetic coding sequence
  source 1..1032: mol_type = other DNA
atgaaccagctgggcggcctgttcgtgaacggcagacccctgcccctggacaccagacagcagatcgtgagactggccgtgagcggcatgagaccctgcgacatcagcagaatcctgaaggtgagcaacggctgcgtgagcaagatcctgggcagatactacagaaccggcgtgctggagcccaagggcatcggcggcagcaagcccagactggccaccccccccgtggtggccagaatcgcccagctgaagggcgagtgccccgccctgttcgcctgggagatccagagacagctgtgcgccgagggcctgtgcacccaggacaagacccccagcgtgagcagcatcaacagagtgctgagagccctgcaggaggaccagggcctgccctgcaccagactgagaagccccgccgtgctggcccccgccgtgctgaccccccacagcggcagcgagacccccagaggcacccaccccggcaccggccacagaaacagaaccatcttcagccccagccaggccgaggccctggagaaggagttccagagaggccagtaccccgacagcgtggccagaggcaagctggccaccgccaccagcctgcccgaggacaccgtgagagtgtggttcagcaacagaagagccaagtggagaagacaggagaagctgaagtgggagatgcagctgcccggcgccagccagggcctgaccgtgcccagagtggcccccggcatcatcagcgcccagcagagccccggcagcgtgcccaccgccgccctgcccgccctggagcccctgggccccagctgctaccagctgtgctgggccaccgcccccgagagatgcctgagcgacaccccccccaaggcctgcctgaagccctgctggggccacctgcccccccagcccaacagcctggacagcggcctgctgtgcctgccctgccccagcagccactgccacctggccagcctgagcggcagccaggccctgctgtggcccggctgccccctgctgtacggcctggagtag

SEQ ID NO: 92287 - DNA, 1047 bp, synthetic construct
  misc_feature 1..1047: note = Description of Artificial Sequence: Synthetic coding sequence
  source 1..1047: mol_type = other DNA
atgcaccaggacggcatcagcagcatgaaccagctgggcggcctgttcgtgaacggcagacccctgcccctggacaccagacagcagatcgtgagactggccgtgagcggcatgagaccctgcgacatcagcagaatcctgaaggtgagcaacggctgcgtgagcaagatcctgggcagatactacagaaccggcgtgctggagcccaagggcatcggcggcagcaagcccagactggccaccccccccgtggtggccagaatcgcccagctgaagggcgagtgccccgccctgttcgcctgggagatccagagacagctgtgcgccgagggcctgtgcacccaggacaagacccccagcgtgagcagcatcaacagagtgctgagagccctgcaggaggaccagggcctgccctgcaccagactgagaagccccgccgtgctggcccccgccgtgctgaccccccacagcggcagcgagacccccagaggcacccaccccggcaccggccacagaaacagaaccatcttcagccccagccaggccgaggccctggagaaggagttccagagaggccagtaccccgacagcgtggccagaggcaagctggccaccgccaccagcctgcccgaggacaccgtgagagtgtggttcagcaacagaagagccaagtggagaagacaggagaagctgaagtgggagatgcagctgcccggcgccagccagggcctgaccgtgcccagagtggcccccggcatcatcagcgcccagcagagccccggcagcgtgcccaccgccgccctgcccgccctggagcccctgggccccagctgctaccagctgtgctgggccaccgcccccgagagatgcctgagcgacaccccccccaaggcctgcctgaagccctgctgggactgcggcagcttcctgctgcccgtgatcgcccccagctgcgtggacgtggcctggccctgcctggacgccagcctggcccaccacctgatcggcggcgccggcaaggccacccccacccacttcagccactag

SEQ ID NO: 92288 - DNA, 1563 bp, synthetic construct
  misc_feature 1..1563: note = Description of Artificial Sequence: Synthetic coding sequence
  source 1..1563: mol_type = other DNA
atggccgccctgcccggcaccgtgcccagaatgatgagacccgcccccggccagaactaccccagaaccggcttccccctggaggtgagcacccccctgggccagggcagagtgaaccagctgggcggcgtgttcatcaacggcagacccctgcccaaccacatcagacacaagatcgtggagatggcccaccacggcatcagaccctgcgtgatcagcagacagctgagagtgagccacggctgcgtgagcaagatcctgtgcagataccaggagaccggcagcatcagacccggcgccatcggcggcagcaagcccagacaggtggccacccccgacgtggagaagaagatcgaggagtacaagagagagaaccccggcatgttcagctgggagatcagagacagactgctgaaggacggccactgcgacagaagcaccgtgcccagcggcctggtgagcagcatcagcagagtgctgagaatcaagttcggcaagaaggaggaggaggacgaggccgacaagaaggaggacgacggcgagaagaaggccaagcacagcatcgacggcatcctgggcgacaagggcaacagactggacgagggcagcgacgtggagagcgagcccgacctgcccctgaagagaaagcagagaagaagcagaaccaccttcaccgccgagcagctggaggagctggagaaggccttcgagagaacccactaccccgacatctacaccagagaggagctggcccagagaaccaagctgaccgaggccagagtgcaggtgtggttcagcaacagaagagccagatggagaaagcaggccggcgccaaccagctggccgccttcaaccacctgctgcccggcggcttcccccccaccggcatgcccaccctgcccccctaccagctgcccgacagcacctaccccaccaccaccatcagccaggacggcggcagcaccgtgcacagaccccagcccctgccccccagcaccatgcaccagggcggcctggccgccgccgccgccgccgccgacaccagcagcgcctacggcgccagacacagcttcagcagctacagcgacagcttcatgaaccccgccgcccccagcaaccacatgaaccccgtgagcaacggcctgagcccccaggtgatgagcatcctgggcaaccccagcgccgtgcccccccagccccaggccgacttcagcatcagccccctgcacggcggcctggacagcgccaccagcatcagcgccagctgcagccagagagccgacagcatcaagcccggcgacagcctgcccaccagccaggcctactgcccccccacctacagcaccaccggctacagcgtggaccccgtggccggctaccagtacggccagtacggccagagcgagtgcctggtgccctgggccagccccgtgcccatccccagccccacccccagagccagctgcctgttcatggagagctacaaggtggtgagcggctggggcatgagcatcagccagatggagaagctgaagagcagccagatggagcagttcacctag

SEQ ID NO: 92289 - DNA, 1557 bp, synthetic construct
  misc_feature 1..1557: note = Description of Artificial Sequence: Synthetic coding sequence
  source 1..1557: mol_type = other DNA
atggccgccctgcccggcaccgtgcccagaatgatgagacccgcccccggccagaactaccccagaaccggcttccccctggaggtgagcacccccctgggccagggcagagtgaaccagctgggcggcgtgttcatcaacggcagacccctgcccaaccacatcagacacaagatcgtggagatggcccaccacggcatcagaccctgcgtgatcagcagacagctgagagtgagccacggctgcgtgagcaagatcctgtgcagataccaggagaccggcagcatcagacccggcgccatcggcggcagcaagcccagacaggtggccacccccgacgtggagaagaagatcgaggagtacaagagagagaaccccggcatgttcagctgggagatcagagacagactgctgaaggacggccactgcgacagaagcaccgtgcccagcgtgagcagcatcagcagagtgctgagaatcaagttcggcaagaaggaggaggaggacgaggccgacaagaaggaggacgacggcgagaagaaggccaagcacagcatcgacggcatcctgggcgacaagggcaacagactggacgagggcagcgacgtggagagcgagcccgacctgcccctgaagagaaagcagagaagaagcagaaccaccttcaccgccgagcagctggaggagctggagaaggccttcgagagaacccactaccccgacatctacaccagagaggagctggcccagagaaccaagctgaccgaggccagagtgcaggtgtggttcagcaacagaagagccagatggagaaagcaggccggcgccaaccagctggccgccttcaaccacctgctgcccggcggcttcccccccaccggcatgcccaccctgcccccctaccagctgcccgacagcacctaccccaccaccaccatcagccaggacggcggcagcaccgtgcacagaccccagcccctgccccccagcaccatgcaccagggcggcctggccgccgccgccgccgccgccgacaccagcagcgcctacggcgccagacacagcttcagcagctacagcgacagcttcatgaaccccgccgcccccagcaaccacatgaaccccgtgagcaacggcctgagcccccaggtgatgagcatcctgggcaaccccagcgccgtgcccccccagccccaggccgacttcagcatcagccccctgcacggcggcctggacagcgccaccagcatcagcgccagctgcagccagagagccgacagcatcaagcccggcgacagcctgcccaccagccaggcctactgcccccccacctacagcaccaccggctacagcgtggaccccgtggccggctaccagtacggccagtacggccagagcgagtgcctggtgccctgggccagccccgtgcccatccccagccccacccccagagccagctgcctgttcatggagagctacaaggtggtgagcggctggggcatgagcatcagccagatggagaagctgaagagcagccagatggagcagttcacctag

SEQ ID NO: 92290 - DNA, 1518 bp, synthetic construct
  misc_feature 1..1518: note = Description of Artificial Sequence: Synthetic coding sequence
  source 1..1518: mol_type = other DNA
atggccgccctgcccggcaccgtgcccagaatgatgagacccgcccccggccagaactaccccagaaccggcttccccctggaggtgagcacccccctgggccagggcagagtgaaccagctgggcggcgtgttcatcaacggcagacccctgcccaaccacatcagacacaagatcgtggagatggcccaccacggcatcagaccctgcgtgatcagcagacagctgagagtgagccacggctgcgtgagcaagatcctgtgcagataccaggagaccggcagcatcagacccggcgccatcggcggcagcaagcccagacaggtggccacccccgacgtggagaagaagatcgaggagtacaagagagagaaccccggcatgttcagctgggagatcagagacagactgctgaaggacggccactgcgacagaagcaccgtgcccagcggcctggtgagcagcatcagcagagtgctgagaatcaagttcggcaagaaggaggaggaggacgaggccgacaagaaggaggacgacggcgagaagaaggccaagcacagcatcgacggcatcctgggcgacaagggcaacagactggacgagggcagcgacgtggagagcgagcccgacctgcccctgaagagaaagcagagaagaagcagaaccaccttcaccgccgagcagctggaggagctggagaaggccttcgagagaacccactaccccgacatctacaccagagaggagctggcccagagaaccaagctgaccgaggccagagtgcaggtgtggttcagcaacagaagagccagatggagaaagcaggccggcgccaaccagctggccgccttcaaccacctgctgcccggcggcttcccccccaccggcatgcccaccctgcccccctaccagctgcccgacagcacctaccccaccaccaccatcagccaggacggcggcagcaccgtgcacagaccccagcccctgccccccagcaccatgcaccagggcggcctggccgccgccgccgccgccgccgacaccagcagcgcctacggcgccagacacagcttcagcagctacagcgacagcttcatgaaccccgccgcccccagcaaccacatgaaccccgtgagcaacggcctgagcccccaggtgatgagcatcctgggcaaccccagcgccgtgcccccccagccccaggccgacttcagcatcagccccctgcacggcggcctggacagcgccaccagcatcagcgccagctgcagccagagagccgacagcatcaagcccggcgacagcctgcccaccagccaggcctactgcccccccacctacagcaccaccggctacagcgtggaccccgtggccggctaccagtacggccagtacggccagaccgccgtggactacctggccaagaacgtgagcctgagcacccagagaagaatgaagctgggcgagcacagcgccgtgctgggcctgctgcccgtggagaccggccaggcctactag

SEQ ID NO: 92291 - DNA, 1026 bp, synthetic construct
  misc_feature 1..1026: note = Description of Artificial Sequence: Synthetic coding sequence
  source 1..1026: mol_type = other DNA
atggagcccgccttcggcgaggtgaaccagctgggcggcgtgttcgtgaacggcagacccctgcccaacgccatcagactgagaatcgtggagctggcccagctgggcatcagaccctgcgacatcagcagacagctgagagtgagccacggctgcgtgagcaagatcctggccagatacaacgagaccggcagcatcctgcccggcgccatcggcggcagcaagcccagagtgaccacccccaccgtggtgaagcacatcagaacctacaagcagagagaccccggcatcttcgcctgggagatcagagacagactgctggccgacggcgtgtgcgacaagtacaacgtgcccagcgtgagcagcatcagcagaatcctgagaaacaagatcggcaacctggcccagcagggccactacgacagctacaagcagcaccagcccaccccccagcccgccctgccctacaaccacatctacagctaccccagccccatcaccgccgccgccgccaaggtgcccaccccccccggcgtgcccgccatccccggcagcgtggccatgcccagaacctggcccagcagccacagcgtgaccgacatcctgggcatcagaagcatcaccgaccaggtgagcgacagcagcccctaccacagccccaaggtggaggagtggagcagcctgggcagaaacaacttccccgccgccgccccccacgccgtgaacggcctggagaagggcgccctggagcaggaggccaagtacggccaggcccccaacggcctgcccgccgtgggcagcttcgtgagcgccagcagcatggccccctaccccacccccgcccaggtgagcccctacatgacctacagcgccgcccccagcggctacgtggccggccacggctggcagcacgccggcggcaccagcctgagcccccacaactgcgacatccccgccagcctggccttcaagggcatgcaggccgccagagagggcagccacagcgtgaccgccagcgccctgtag

SEQ ID NO: 92292 - DNA, 1026 bp, synthetic construct; identical to SEQ ID NO: 92291
  misc_feature 1..1026: note = Description of Artificial Sequence: Synthetic coding sequence
  source 1..1026: mol_type = other DNA

SEQ ID NO: 92293 - DNA, 183 bp, synthetic construct
  misc_feature 1..183: note = Description of Artificial Sequence: Synthetic coding sequence
  source 1..183: mol_type = other DNA
agcgacagcagcccctaccacagccccaaggtggaggagtggagcagcctgggcagaaacaacttccccgccgccgccccccacgccgtgaacggcctggagaagggcgccctggagcaggaggccaagtacggccagatccagaacttcttcctgctgatgatcagcagactgaagttctag

SEQ ID NO: 92294 - DNA, 912 bp, synthetic construct
  misc_feature 1..912: note = Description of Artificial Sequence: Synthetic coding sequence
  source 1..912: mol_type = other DNA
atgggcagacccctgctgctgcccctgctgcccctgctgctgccccccgccttcctgcagcccagcggcagcaccggcagcggccccagctacctgtacggcgtgacccagcccaagcacctgagcgccagcatgggcggcagcgtggagatccccttcagcttctactacccctgggagctggccaccgcccccgacgtgagaatcagctggagaagaggccacttccacagacagagcttctacagcaccagaccccccagcatccacaaggactacgtgaacagactgttcctgaactggaccgagggccagaagagcggcttcctgagaatcagcaacctgcagaagcaggaccagagcgtgtacttctgcagagtggagctggacaccagaagcagcggcagacagcagtggcagagcatcgagggcaccaagctgagcatcacccaggccgtgaccaccaccacccagagacccagcagcatgaccaccacctggagactgagcagcaccaccaccaccaccggcctgagagtgacccagggcaagagaagaagcgacagctggcacatcagcctggagaccgccgtgggcgtggccgtggccgtgaccgtgctgggcatcatgatcctgggcctgatctgcctgctgagatggagaagaagaaagggccagcagagaaccaaggccaccacccccgccagagagcccttccagaacaccgaggagccctacgagaacatcagaaacgagggccagaacaccgaccccaagctgaaccccaaggacgacggcatcgtgtacgccagcctggccctgagcagcagcaccagccccagagccccccccagccacagacccctgaagagcccccagaacgagaccctgtacagcgtgctgaaggcctag

SEQ ID NO: 92295 - DNA, 693 bp, synthetic construct
  misc_feature 1..693: note = Description of Artificial Sequence: Synthetic coding sequence
  source 1..693: mol_type = other DNA
atgggcagacccctgctgctgcccctgctgcccctgctgctgccccccgccttcctgcagcccagcggcagcaccggcagcggccccagctacctgtacggcgtgacccagcccaagcacctgagcgccagcatgggcggcagcgtggagatccccttcagcttctactacccctgggagctggccaccgcccccgacgtgagaatcagctggagaagaggccacttccacagacagagcttctacagcaccagaccccccagcatccacaaggactacgtgaacagactgttcctgaactggaccgagggccagaagagcggcttcctgagaatcagcaacctgcagaagcaggaccagagcgtgtacttctgcagagtggagctggacaccagaagcagcggcagacagcagtggcagagcatcgagggcaccaagctgagcatcacccagggccagcagagaaccaaggccaccacccccgccagagagcccttccagaacaccgaggagccctacgagaacatcagaaacgagggccagaacaccgaccccaagctgaaccccaaggacgacggcatcgtgtacgccagcctggccctgagcagcagcaccagccccagagccccccccagccacagacccctgaagagcccccagaacgagaccctgtacagcgtgctgaaggcctag

SEQ ID NO: 92296 - DNA, 528 bp, synthetic construct
  misc_feature 1..528: note = Description of Artificial Sequence: Synthetic coding sequence
  source 1..528: mol_type = other DNA
atgggcagacccctgctgctgcccctgctgcccctgctgctgccccccgccttcctgcagcccagcggcagcaccggcagcggccccagctacctgtacggcgtgacccagcccaagcacctgagcgccagcatgggcggcagcgtggagatccccttcagcttctactacccctgggagctggccaccgcccccgacgtgagaatcagctggagaagaggccacttccacagacagagcttctacagcaccagaccccccagcatccacaaggactacgtgaacagactgttcctgaactggaccgagggccagaagagcggcttcctgagaatcagcaacctgcagaagcaggaccagagcgtgtacttctgcagagtggagctggacaccagaagcagcggcagacagcagtggcagagcatcgagggcaccaagctgagcatcacccagggcaaccccagcaagacccagagaagccacatgagaatcagcggcatgaaggacaagatccagatccccagctag

SEQ ID NO: 92297 - DNA, 492 bp, synthetic construct
  misc_feature 1..492: note = Description of Artificial Sequence: Synthetic coding sequence
  source 1..492: mol_type = other DNA
atgggcagacccctgctgctgcccctgctgcccctgctgctgccccccgccttcctgcagcccagcggcagcaccggcagcggccccagctacctgtacggcgtgacccagcccaagcacctgagcgccagcatgggcggcagcgtggagatccccttcagcttctactacccctgggagctggccaccgcccccgacgtgagaatcagctggagaagaggccacttccacagacagagcttctacagcaccagaccccccagcatccacaaggactacgtgaacagactgttcctgaactggaccgagggccagaagagcggcttcctgagaatcagcaacctgcagaagcaggaccagagcgtgtacttctgcagagtggagctggacaccagaagcagcggcagacagcagtggcagagcatcgagggcaccaagctgagcatcacccagggccagcagagaaccaaggccaccacccccgccagatag

SEQ ID NO: 92298 - DNA, 684 bp, synthetic construct
  misc_feature 1..684: note = Description of Artificial Sequence: Synthetic coding sequence
  source 1..684: mol_type = other DNA
atgggcagacccctgctgctgcccctgctgctgctgctgcagccccccgccttcctgcagcccggcggcagcaccggcagcggccccagctacctgtacggcgtgacccagcccaagcacctgagcgccagcatgggcggcagcgtggagatccccttcagcttctactacccctgggagctggccatcgtgcccaacgtgagaatcagctggagaagaggccacttccacggccagagcttctacagcaccagaccccccagcatccacaaggactacgtgaacagactgttcctgaactggaccgagggccaggagagcggcttcctgagaatcagcaacctgagaaaggaggaccagagcgtgtacttctgcagagtggagctggacaccagaagaagcggcagacagcagctgcagagcatcaagggcaccaagctgaccatcacccaggccgtgaccaccaccaccacctggagacccagcagcaccaccaccatcgccggcctgagagtgaccgagagcaagggccacagcgagagctggcacctgagcctggacaccgccatcagagtggccctggccgtggccgtgctgaagaccgtgatcctgggcctgctgtgcctgctgctgctgtggtggagaagaagaaagggcagcagagcccccagcagcgacttctag

SEQ ID NO: 92299 - DNA, 999 bp, synthetic construct
  misc_feature 1..999: note = Description of Artificial Sequence: Synthetic coding sequence
  source 1..999: mol_type = other DNA
atgggcagagccagctacggcggcagccccgtgggccaccagagcagcagcgaccaccccagagccaagacctgcagaagccccgtgagagacggccccagaaccctgtgcggcgtgcccaccgtggccctgagcctgcacttcctgagagaggccagcagcggcagcagaacctgcggcagaagaaccagcctgtgcaccagcgccaagagcagctggacctacagaagcgccctgagacagcccctgcacagagcccccctgctgcccggccagctgtgctggagccccagacccctggagaagaacaaggccatgggcagacccctgctgctgcccctgctgctgctgctgcagccccccgccttcctgcagcccggcggcagcaccggcagcggccccagctacctgtacggcgtgacccagcccaagcacctgagcgccagcatgggcggcagcgtggagatccccttcagcttctactacccctgggagctggccatcgtgcccaacgtgagaatcagctggagaagaggccacttccacggccagagcttctacagcaccagaccccccagcatccacaaggactacgtgaacagactgttcctgaactggaccgagggccaggagagcggcttcctgagaatcagcaacctgagaaaggaggaccagagcgtgtacttctgcagagtggagctggacaccagaagaagcggcagacagcagctgcagagcatcaagggcaccaagctgaccatcacccaggccgtgaccaccaccaccacctggagacccagcagcaccaccaccatcgccggcctgagagtgaccgagagcaagggccacagcgagagctggcacctgagcctggacaccgccatcagagtggccctggccgtggccgtgctgaagaccgtgatcctgggcctgctgtgcctgctgctgctgtggtggagaagaagaaagggcagcagagcccccagcagcgacttctag

SEQ ID NO: 92300 - DNA, 384 bp, synthetic construct
  misc_feature 1..384: note = Description of Artificial Sequence: Synthetic coding sequence
  source 1..384: mol_type = other DNA
atgggcagacccctgctgctgcccctgctgctgctgctgcagccccccgccttcctgcagcccggcggcagcaccggcagcggccccagctacctgtacggcgtgacccagcccaagcacctgagcgccagcatgggcggcagcgtggagatccccttcagcttctactacccctgggagctggccatcgtgcccaacgtgagaatcagctggagaagaggccacttccacggccagagcttctacagcaccagaccccccagcatccacaaggactacgtgaacagactgttcctgaactggaccgagggccaggagagcggcttcctgagaatcagcaacctgagaaaggaggaccagagcgtgtacttctgcagagtgtag

SEQ ID NO: 92301 - DNA, 684 bp, synthetic construct; identical to SEQ ID NO: 92298
  misc_feature 1..684: note = Description of Artificial Sequence: Synthetic coding sequence
  source 1..684: mol_type = other DNA

SEQ ID NO: 92302 - DNA, 384 bp, synthetic construct; identical to SEQ ID NO: 92300
  misc_feature 1..384: note = Description of Artificial Sequence: Synthetic coding sequence
  source 1..384: mol_type = other DNA

SEQ ID NO: 92303 - DNA, 183 bp, synthetic construct
  misc_feature 1..183: note = Description of Artificial Sequence: Synthetic coding sequence
  source 1..183: mol_type = other DNA
atgggcagacccctgctgctgcccctgctgctgctgctgcagccccccgccttcctgcagcccggcctgtgcgagcccgccctgagcgagctggacagaggcagcggcgagagactgccccaggacctgaagcccgccgagggcggccccgtgtgcgtgttcctgcccagcagagccggctag

SEQ ID NO: 92304 - DNA, 366 bp, synthetic construct
  misc_feature 1..366: note = Description of Artificial Sequence: Synthetic coding sequence
  source 1..366: mol_type = other DNA
atgggcagacccctgctgctgcccctgctgctgctgctgcagccccccgccttcctgcagcccggcggcagcaccggcagcggccccagctacctgtacggcgtgacccagcccaagcacctgagcgccagcatgggcggcagcgtggagatccccttcagcttctactacccctgggagctggccatcgtgcccaacgtgagaatcagctggagaagaggccacttccacggccagagcttctacagcaccagaccccccagcatccacaaggactacgtgaacagactgttcctgaactggaccgagggccaggagagcggcttcctgagaatcagcaacctgagaaaggaggaccagagctag

SEQ ID NO: 92305 - DNA, 384 bp, synthetic construct; identical to SEQ ID NO: 92300
  misc_feature 1..384: note = Description of Artificial Sequence: Synthetic coding sequence
  source 1..384: mol_type = other DNA

SEQ ID NO: 92306 - DNA, 684 bp, synthetic construct; identical to SEQ ID NO: 92298
  misc_feature 1..684: note = Description of Artificial Sequence: Synthetic coding sequence
  source 1..684: mol_type = other DNA

SEQ ID NO: 92307 - DNA, 450 bp, synthetic construct
  misc_feature 1..450: note = Description of Artificial Sequence: Synthetic coding sequence
  source 1..450: mol_type = other DNA
atgggcagacccctgctgctgcccctgctgctgctgctgcagccccccgccttcctgcagcccggcctgtgcgagcccgccctgagcgagctggacagaggcagcggcgagagactgccccaggacctgaagcccgccgagggcggccccgtgtgcgtgttcctgcccagcagagccggccaccccgagatcagagaggccgccgtggccgtgcaccagggcgaccagacccaccaccaccccggctgccacaaccaccaccacctggaggcccagcagcacaaccaccacagcagaccccagggccacagaaagcagagagccctgagaatcatggcccccaagagcggccactgccaccagggctgcatcggctgcagatgcgcccagaactgccacttcggcaccgccgtgccccccccccccgtggtggaggagaaggagagatag

SEQ ID NO: 92308 - DNA, 816 bp, synthetic construct
  misc_feature 1..816: note = Description of Artificial Sequence: Synthetic coding sequence
  source 1..816: mol_type = other DNA
atgggcagagccagctacggcggcagccccgtgggccaccagagcagcagcgaccaccccagagccaagacctgcagaagccccgtgagagacggccccagaaccctgtgcggcgtgcccaccgtggccctgagcctgcacttcctgagagaggccagcagcggcagcagaacctgcggcagaagaaccagcctgtgcaccagcgccaagagcagctggacctacagaagcggcagactgagctggcagagcatcaagggcacccacctgaccatcacccaggccctgagacagcccctgcacagagcccccctgctgcccggccagctgtgctggagccccagacccctggagaagaacaaggccatgggcagacccctgctgctgcccctgctgctgctgctgcagccccccgccttcctgcagcccggcctgtgcgagcccgccctgagcgagctggacagaggcagcggcgagagactgccccaggacctgaagcccgccgagggcggccccgtgtgcgtgttcctgcccagcagagccggccaccccgagatcagagaggccgccgtggccgtgcaccagggcgaccagacccaccaccaccccggctgccacaaccaccaccacctggaggcccagcagcacaaccaccacagcagaccccagggccacagaaagcagagagccctgagaatcatggcccccaagagcggccactgccaccagggctgcatcggctgcagatgcgcccagaactgccacttcggcaccgccgtgccccccccccccgtggtggaggagaaggagagatag

SEQ ID NO: 92309 - DNA, 684 bp, synthetic construct; identical to SEQ ID NO: 92298
  misc_feature 1..684: note = Description of Artificial Sequence: Synthetic coding sequence
  source 1..684: mol_type = other DNA

SEQ ID NO: 92310 - DNA, 327 bp, synthetic construct
  misc_feature 1..327: note = Description of Artificial Sequence: Synthetic coding sequence
  source 1..327: mol_type = other DNA
atgggcagagccagctacggcggcagccccgtgggccaccagagcagcagcgaccaccccagagccaagacctgcagaagccccgtgagagacggccccagaaccctgtgcggcgtgcccaccgtggccctgagcctgcacttcctgagagaggccagcagcggcagcagaacctgcggcagaagaaccagcctgtgcaccagcgccaagagcagctggacctacagaagcggcagactgagctggcagagcatcaagggcacccacctgaccatcacccaggccctgagacagcccctgcacagagcccccctgctgcccggctag

SEQ ID NO: 92311 - DNA, 384 bp, synthetic construct; identical to SEQ ID NO: 92300
  misc_feature 1..384: note = Description of Artificial Sequence: Synthetic coding sequence
  source 1..384: mol_type = other DNA

SEQ ID NO: 92312 - DNA, 738 bp, synthetic construct
  misc_feature 1..738: note = Description of Artificial Sequence: Synthetic coding sequence
  source 1..738: mol_type = other DNA
atgaccagcagctacggccacgtgctggagagacagcccgccctgggcggcagactggacagccccggcaacctggacaccctgcaggccaagaagaacttcagcgtgagccacctgctggacctggaggaggccggcgacatggtggccgcccaggccgacgagaacgtgggcgaggccggcagaagcctgctggagagccccggcctgaccagcggcagcgacaccccccagcaggacaacgaccagctgaacagcgaggagaagaagaagagaaagcagagaagaaacagaaccaccttcaacagcagccagctgcaggccctggagagagtgttcgagagaacccactaccccgacgccttcgtgagagaggacctggccagaagagtgaacctgaccgaggccagagtgcaggtgtggttccagaacagaagagccaagttcagaagaaacgagagagccatgctggccaacaagaacgccagcctgctgaagagctacagcggcgacgtgaccgccgtggagcagcccatcgtgcccagacccgcccccagacccaccgactacctgagctggggcaccgccagcccctacagcgccatggccacctacagcgccacctgcgccaacaacagccccgcccagggcatcaacatggccaacagcatcgccaacctgagactgaaggccaaggagtacagcctgcagagaaaccaggtgcccaccgtgaactag

SEQ ID NO: 92313 - DNA, 654 bp, synthetic construct
  misc_feature 1..654: note = Description of Artificial Sequence: Synthetic coding sequence
  source 1..654: mol_type = other DNA
atgaccagcagctacggccacgtgctggagagacagcccgccctgggcggcagactggacagccccggcaacctggacaccctgcaggccaagaagaacttcagcgtgagccacctgctggacctggaggaggccggcgacatggtggccgcccaggccgacgagaacgtgggcgaggccggcagaagcctgctggagagccccggcctgaccagcggcagcgacaccccccagcaggacaacgaccagctgaacagcgaggagaagaagaagagaaagcagagaagaaacagaaccaccttcaacagcagccagctgcaggccctggagagagtgttcgagagaacccactaccccgacgccttcgtgagagaggacctggccagaagagtgaacctgaccgaggccagagtgcaggtgtggttccagaacagaagagccaagttcagaagaaacgagagagccatgctggccaacaagaacgccagcctgctgaagagctacagcggcgacgtgaccgccgtggagcagcccatcgtgcccagacccgcccccagacccaccgactacctgagctggggcaccgccagcccctacagaagcagcagcctgcccagatgctgcctgcacgagggcctgcacaacggcttctag

SEQ ID NO: 92314 - DNA, 762 bp, synthetic construct
  misc_feature 1..762: note = Description of Artificial Sequence: Synthetic coding sequence
  source 1..762: mol_type = other DNA
atggacagcgccgccgccgccttcgccctggacaagcccgccctgggccccggcccccccccccccccccccgccctgggccccggcgactgcgcccaggccagaaagaacttcagcgtgagccacctgctggacctggaggaggtggccgccgccggcagactggccgccagacccggcgccagagccgaggccagagagggcgccgccagagagcccagcggcggcagcagcggcagcgaggccgccccccaggacggcgagtgccccagccccggcagaggcagcgccgccaagagaaagaagaagcagagaagaaacagaaccaccttcaacagcagccagctgcaggccctggagagagtgttcgagagaacccactaccccgacgccttcgtgagagaggagctggccagaagagtgaacctgagcgaggccagagtgcaggtgtggttccagaacagaagagccaagttcagaagaaacgagagagccatgctggccagcagaagcgccagcctgctgaagagctacagccaggaggccgccatcgagcagcccgtggcccccagacccaccgccctgagccccgactacctgagctggaccgccagcagcccctacagcaccgtgcccccctacagccccggcagcagcggccccgccacccccggcgtgaacatggccaacagcatcgccagcctgagactgaaggccaaggagttcagcctgcaccacagccaggtgcccaccgtgaactag

SEQ ID NO: 92315 - DNA, 855 bp, synthetic construct
  misc_feature 1..855: note = Description of Artificial Sequence: Synthetic coding sequence
  source 1..855: mol_type = other DNA
atggactacagctacctgaacagctacgacagctgcgtggccgccatggaggccagcgcctacggcgacttcggcgcctgcagccagcccggcggcttccagtacagccccctgagacccgccttccccgccgccggccccccctgccccgccctgggcagcagcaactgcgccctgggcgccctgagagaccaccagcccgccccctacagcgccgtgccctacaagttcttccccgagcccagcggcctgcacgagaagagaaagcagagaagaatcagaaccaccttcaccagcgcccagctgaaggagctggagagagtgttcgccgagacccactaccccgacatctacaccagagaggagctggccctgaagatcgacctgaccgaggccagagtgcaggtgtggttccagaacagaagagccaagttcagaaagcaggagagagccgccagcgccaagggcgccgccggcgccgccggcgccaagaagggcgaggccagatgcagcagcgaggacgacgacagcaaggagagcacctgcagccccacccccgacagcaccgccagcctgccccccccccccgcccccggcctggccagccccagactgagccccagccccctgcccgtggccctgggcagcggccccggccccggccccggcccccagcccctgaagggcgccctgtgggccggcgtggccggcggcggcggcggcggccccggcgccggcgccgccgagctgctgaaggcctggcagcccgccgagagcggccccggccccttcagcggcgtgctgagcagcttccacagaaagcccggccccgccctgaagaccaacctgttctag

SEQ ID NO: 92316 - DNA, 1800 bp, synthetic construct
  misc_feature 1..1800: note = Description of Artificial Sequence: Synthetic coding sequence
  source 1..1800: mol_type = other DNA
atgaagctgctgaagctgaccggcttcatcttcttcctgttcttcctgaccgagagcctgaccctgcccacccagcccagagacatcgagaacttcaacagcacccagaagttcatcgaggacaacatcgagtacatcaccatcatcgccttcgcccagtacgtgcaggaggccaccttcgaggagatggagaagctggtgaaggacatggtggagtacaaggacagatgcatggccgacaagaccctgcccgagtgcagcaagctgcccaacaacgtgctgcaggagaagatctgcgccatggagggcctgccccagaagcacaacttcagccactgctgcagcaaggtggacgcccagagaagactgtgcttcttctacaacaagaagagcgacgtgggcttcctgccccccttccccaccctggaccccgaggagaagtgccaggcctacgagagcaacagagagagcctgctgaaccacttcctgtacgaggtggccagaagaaaccccttcgtgttcgcccccaccctgctgaccgtggccgtgcacttcgaggaggtggccaagagctgctgcgaggagcagaacaaggtgaactgcctgcagaccagagccatccccgtgacccagtacctgaaggccttcagcagctaccagaagcacgtgtgcggcgccctgctgaagttcggcaccaaggtggtgcacttcatctacatcgccatcctgagccagaagttccccaagatcgagttcaaggagctgatcagcctggtggaggacgtgagcagcaactacgacggctgctgcgagggcgacgtggtgcagtgcatcagagacaccagcaaggtgatgaaccacatctgcagcaagcaggacagcatcagcagcaagatcaaggagtgctgcgagaagaagatccccgagagaggccagtgcatcatcaacagcaacaaggacgacagacccaaggacctgagcctgagagagggcaagttcaccgacagcgagaacgtgtgccaggagagagacgccgaccccgacaccttcttcgccaagttcaccttcgagtacagcagaagacaccccgacctgagcatccccgagctgctgagaatcgtgcagatctacaaggacctgctgagaaactgctgcaacaccgagaacccccccggctgctacagatacgccgaggacaagttcaacgagaccaccgagaagagcctgaagatggtgcagcaggagtgcaagcacttccagaacctgggcaaggacggcctgaagtaccactacctgatcagactgaccaagatcgccccccagctgagcaccgaggagctggtgagcctgggcgagaagatggtgaccgccttcaccacctgctgcaccctgagcgaggagttcgcctgcgtggacaacctggccgacctggtgttcggcgagctgtgcggcgtgaacgagaacagaaccatcaaccccgccgtggaccactgctgcaagaccaacttcgccttcagaagaccctgcttcgagagcctgaaggccgacaagacctacgtgcccccccccttcagccaggacctgttcaccttccacgccgacatgtgccagagccagaacgaggagctgcagagaaagaccgacagattcctggtgaacctggtgaagctgaagcacgagctgaccgacgaggagctgcagagcctgttcaccaacttcgccaacgtggtggacaagtgctgcaaggccgagagccccgaggtgtgcttcaacgaggagagccccaagatcggcaactag

SEQ ID NO: 92317 - DNA, 945 bp, synthetic construct
  misc_feature 1..945: note = Description of Artificial Sequence: Synthetic coding sequence
  source 1..945: mol_type = other DNA
atggacgccttcaagggcggcatgagcctggagagactgcccgagggcctgagacccccccccccccccccccacgacatgggccccgccttccacctggccagacccgccgaccccagagagcccctggagaacagcgccagcgagagcagcgacaccgagctgcccgagaaggagagaggcggcgagcccaagggccccgaggacagcggcgccggcggcaccggctgcggcggcgccgacgaccccgccaagaagaagaagcagagaagacagagaacccacttcaccagccagcagctgcaggagctggaggccaccttccagagaaacagataccccgacatgagcatgagagaggagatcgccgtgtggaccaacctgaccgagcccagagtgagagtgtggttcaagaacagaagagccaagtggagaaagagagagagaaaccagcagctggacctgtgcaagggcggctacgtgccccagttcagcggcctggtgcagccctacgaggacgtgtacgccgccggctacagctacaacaactgggccgccaagagcctggcccccgcccccctgagcaccaagagcttcaccttcttcaacagcatgagccccctgagcagccagagcatgttcagcgcccccagcagcatcagcagcatgaccatgcccagcagcatgggccccggcgccgtgcccggcatgcccaacagcggcctgaacaacatcaacaacctgaccggcagcagcctgaacagcgccatgagccccggcgcctgcccctacggcacccccgccagcccctacagcgtgtacagagacacctgcaacagcagcctggccagcctgagactgaagagcaagcagcacagcagcttcggctacggcggcctgcagggccccgccagcggcctgaacgcctgccagtacaacagctag

SEQ ID NO: 92318 - DNA, 345 bp, synthetic construct
  misc_feature 1..345: note = Description of Artificial Sequence: Synthetic coding sequence
  source 1..345: mol_type = other DNA
atggacgccttcaagggcggcatgagcctggagagactgcccgagggcctgagacccccccccccccccccccacgacatgggccccgccttccacctggccagacccgccgaccccagagagcccctggagaacagcgccagcgagagcagcgacaccgagctgcccgagaaggagagaggcggcgagcccaagggccccgaggacagcggcgccggcggcaccggctgcggcggcgccgacgaccccgccaagaagaagaagcagagaagacagagaacccacttcaccagccagcagctgcaggagctggaggccaccttccagagaaacagatacccctag

SEQ ID NO: 92319 - DNA, 945 bp, synthetic construct; identical to SEQ ID NO: 92317
  misc_feature 1..945: note = Description of Artificial Sequence: Synthetic coding sequence
  source 1..945: mol_type = other DNA

SEQ ID NO: 92320 - DNA, 396 bp, synthetic construct
  misc_feature 1..396: note = Description of Artificial Sequence: Synthetic coding sequence
  source 1..396: mol_type = other DNA
atggacgccttcaagggcggcatgagcctggagagactgcccgagggcctgagacccccccccccccccccccacgacatgggccccgccttccacctggccagacccgccgaccccagagagcccctggagaacagcgccagcgagagcagcgacaccgagctgcccgagaaggagagaggcggcgagcccaagggccccgaggacagcggcgccggcggcaccggctgcggcggcgccgacgaccccgccaagaagaagaagcagagaagacagagaacccacttcaccagccagcagctgcaggagctggaggccaccttccagagaaacagataccccgacatgagcatgagagaggagatcgccgtgtggaccaacctgaccgagccctag

SEQ ID NO: 92321 - DNA, 975 bp, synthetic construct
  misc_feature 1..975: note = Description of Artificial Sequence: Synthetic coding sequence
  source 1..975: mol_type = other DNA
atgaactgcatgaagggccccctgcacctggagcacagagccgccggcaccaagctgagcgccgtgagcagcagcagctgccaccacccccagcccctggccatggccagcgtgctggcccccggccagcccagaagcctggacagcagcaagcacagactggaggtgcacaccatcagcgacaccagcagccccgaggccgccgagaaggacaagagccagcagggcaagaacgaggacgtgggcgccgaggaccccagcaagaagaagagacagagaagacagagaacccacttcaccagccagcagctgcaggagctggaggccaccttccagagaaacagataccccgacatgagcaccagagaggagatcgccgtgtggaccaacctgaccgaggccagagtgagagtgtggttcaagaacagaagagccaagtggagaaagagagagagaaaccagcaggccgagctgtgcaagaacggcttcggcccccagttcaacggcctgatgcagccctacgacgacatgtaccccggctacagctacaacaactgggccgccaagggcctgaccagcgccagcctgagcaccaagagcttccccttcttcaacagcatgaacgtgaaccccctgagcagccagagcatgttcagcccccccaacagcatcagcagcatgagcatgagcagcagcatggtgcccagcgccgtgaccggcgtgcccggcagcagcctgaacagcctgaacaacctgaacaacctgagcagccccagcctgaacagcgccgtgcccacccccgcctgcccctacgccccccccacccccccctacgtgtacagagacacctgcaacagcagcctggccagcctgagactgaaggccaagcagcacagcagcttcggctacgccagcgtgcagaaccccgccagcaacctgagcgcctgccagtacgccgtggacagacccgtgtag

SEQ ID NO: 92322 - DNA, 954 bp, synthetic construct
  misc_feature 1..954: note = Description of Artificial Sequence: Synthetic coding sequence
  source 1..954: mol_type = other DNA
atggagaccaactgcagaaagctggtgagcgcctgcgtgcagctgggcgtgcagcccgccgccgtggagtgcctgttcagcaaggacagcgagatcaagaaggtggagttcaccgacagccccgagagcagaaaggaggccgccagcagcaagttcttccccagacagcaccccggcgccaacgagaaggacaagagccagcagggcaagaacgaggacgtgggcgccgaggaccccagcaagaagaagagacagagaagacagagaacccacttcaccagccagcagctgcaggagctggaggccaccttccagagaaacagataccccgacatgagcaccagagaggagatcgccgtgtggaccaacctgaccgaggccagagtgagagtgtggttcaagaacagaagagccaagtggagaaagagagagagaaaccagcaggccgagctgtgcaagaacggcttcggcccccagttcaacggcctgatgcagccctacgacgacatgtaccccggctacagctacaacaactgggccgccaagggcctgaccagcgccagcctgagcaccaagagcttccccttcttcaacagcatgaacgtgaaccccctgagcagccagagcatgttcagcccccccaacagcatcagcagcatgagcatgagcagcagcatggtgcccagcgccgtgaccggcgtgcccggcagcagcctgaacagcctgaacaacctgaacaacctgagcagccccagcctgaacagcgccgtgcccacccccgcctgcccctacgccccccccacccccccctacgtgtacagagacacctgcaacagcagcctggccagcctgagactgaaggccaagcagcacagcagcttcggctacgccagcgtgcagaaccccgccagcaacctgagcgcctgccagtacgccgtggacagacccgtgtag

SEQ ID NO: 92323 - DNA, 816 bp, synthetic construct
  misc_feature 1..816: note = Description of Artificial Sequence: Synthetic coding sequence
  source 1..816: mol_type = other DNA
atggagaccaactgcagaaagctggtgagcgcctgcgtgcagctggagaaggacaagagccagcagggcaagaacgaggacgtgggcgccgaggaccccagcaagaagaagagacagagaagacagagaacccacttcaccagccagcagctgcaggagctggaggccaccttccagagaaacagataccccgacatgagcaccagagaggagatcgccgtgtggaccaacctgaccgaggccagagtgagagtgtggttcaagaacagaagagccaagtggagaaagagagagagaaaccagcaggccgagctgtgcaagaacggcttcggcccccagttcaacggcctgatgcagccctacgacgacatgtaccccggctacagctacaacaactgggccgccaagggcctgaccagcgccagcctgagcaccaagagcttccccttcttcaacagcatgaacgtgaaccccctgagcagccagagcatgttcagcccccccaacagcatcagcagcatgagcatgagcagcagcatggtgcccagcgccgtgaccggcgtgcccggcagcagcctgaacagcctgaacaacctgaacaacctgagcagccccagcctgaacagcgccgtgcccacccccgcctgcccctacgccccccccacccccccctacgtgtacagagacacctgcaacagcagcctggccagcctgagactgaaggccaagcagcacagcagcttcggctacgccagcgtgcagaaccccgccagcaacctgagcgcctgccagtacgccgtggacagacccgtgtag

SEQ ID NO: 92324 - DNA, 954 bp, synthetic construct; identical to SEQ ID NO: 92322
  misc_feature 1..954: note = Description of Artificial Sequence: Synthetic coding sequence
  source 1..954: mol_type = other DNA

SEQ ID NO: 92325 - DNA, 873 bp, synthetic construct
  misc_feature 1..873: note = Description of Artificial Sequence: Synthetic coding sequence
  source 1..873: mol_type = other DNA
atggagaccaactgcagaaagctggtgagcgcctgcgtgcagctgggcgtgcagcccgccgccgtggagtgcctgttcagcaaggacagcgagatcaagaaggtggagttcaccgacagccccgagagcagaaaggaggccgccagcagcaagttcttccccagacagcaccccggcgccaacgagaaggacaagagccagcagggcaagaacgaggacgtgggcgccgaggaccccagcaagaagaagagacagagaagacagagaacccacttcaccagccagcagctgcaggagctggaggccaccttccagagaaacagataccccgacatgagcaccagagaggagatcgccgtgtggaccaacctgaccgaggccagagtgagagtgtggttcaagaacagaagagccaagtggagaaagagagagagaaaccagcaggccgagctgtgcaagaacggcttcggcccccagttcaacggcctgatgcagccctacgacgacatgtaccccggctacagctacaacaactgggccgccaagggcctgaccagcgccagcctgagcaccaagagcttccccttcttcaacagcatgaacgtgaaccccctgagcagccagagcatgttcagcccccccaacagcatcagcagcatgagcatgagcagcagcatggtgcccagcgccgtgaccggcgtgcccggcagcagcctgaacagcctgaacaacctgaacaacctgagcagccccagcctgaacagcgccgtgcccacccccgcctgcccctacgccccccccacccccccctacgtgtacagagacacctgcaacagcagcctggccagcctgagactgaaggccaagcagtag

SEQ ID NO: 92326 - DNA, 357 bp, synthetic construct
  misc_feature 1..357: note = Description of Artificial Sequence: Synthetic coding sequence
  source 1..357: mol_type = other DNA
atggagaccaactgcagaaagctggtgagcgcctgcgtgcagctggagaaggacaagagccagcagggcaagaacgaggacgtgggcgccgaggaccccagcaagaagaagagacagagaagacagagaacccacttcaccagccagcagctgcaggagctggaggccaccttccagagaaacagataccccgacatgagcaccagagaggagatcgccgtgtggaccaacctgaccgaggccagagtgagagtgtggttcaagaacagaagagccaagtggagaaagagagagagaaaccagcaggccgagctgtgcaagaacggcttcggcccccagttcaacggcctgatgtag

SEQ ID NO: 92327 - DNA, 909 bp, synthetic construct
  misc_feature 1..909: note = Description of Artificial Sequence: Synthetic coding sequence
  source 1..909: mol_type = other DNA
atggagttcggcctgctgagcgaggccgaggccagaagccccgccctgagcctgagcgacgccggcaccccccacccccagctgcccgagcacggctgcaagggccaggagcacagcgacagcgagaaggccagcgccagcctgcccggcggcagccccgaggacggcagcctgaagaagaagcagagaagacagagaacccacttcaccagccagcagctgcaggagctggaggccaccttccagagaaacagataccccgacatgagcaccagagaggagatcgccgtgtggaccaacctgaccgaggccagagtgagagtgtggttcaagaacagaagagccaagtggagaaagagagagagaagccagcaggccgagctgtgcaagggcagcttcgccgcccccctgggcggcctggtgcccccctacgaggaggtgtaccccggctacagctacggcaactggccccccaaggccctggccccccccctggccgccaagaccttccccttcgccttcaacagcgtgaacgtgggccccctggccagccagcccgtgttcagcccccccagcagcatcgccgccagcatggtgcccagcgccgccgccgcccccggcaccgtgcccggccccggcgccctgcagggcctgggcggcggcccccccggcctggcccccgccgccgtgagcagcggcgccgtgagctgcccctacgccagcgccgccgccgccgccgccgccgccgccagcagcccctacgtgtacagagacccctgcaacagcagcctggccagcctgagactgaaggccaagcagcacgccagcttcagctaccccgccgtgcacggccccccccccgccgccaacctgagcccctgccagtacgccgtggagagacccgtgtag

SEQ ID NO: 92328 - DNA, 909 bp, synthetic construct; identical to SEQ ID NO: 92327
  misc_feature 1..909: note = Description of Artificial Sequence: Synthetic coding sequence
  source 1..909: mol_type = other DNA

SEQ ID NO: 92329 - DNA, 1179 bp, synthetic construct
  misc_feature 1..1179: note = Description of Artificial Sequence: Synthetic coding sequence
  source 1..1179: mol_type = other DNA
atggagctggtggccggctgctacgagcaggtgctgttcggcttcgccgtgcaccccgagcccgaggcctgcggcgaccacgagcagtggaccctggtggccgacttcacccaccacgcccacaccgccagcctgagcgccgtggccgtgaacagcagattcgtggtgaccggcagcaaggacgagaccatccacatctacgacatgaagaagaagatcgagcacggcgccctggtgcaccacagcggcaccatcacctgcctgaagttctacggcaacagacacctgatcagcggcgccgaggacggcctgatctgcatctgggacgccaagaagtgggagtgcctgaagagcatcaaggcccacaagggccaggtgaccttcctgagcatccaccccagcggcaagctggccctgagcgtgggcaccgacaagaccctgagaacctggaacctggtggagggcagaagcgccttcatcaagaacatcaagcagaacgcccacatcgtggagtggagccccagaggcgagcagtacgtggtgatcatccagaacaagatcgacatctaccagctggacaccgccagcatcagcggcaccatcaccaacgagaagagaatcagcagcgtgaagttcctgagcgagagcgtgctggccgtggccggcgacgaggaggtgatcagattcttcgactgcgacagcctggtgtgcctgtgcgagttcaaggcccacgagaacagagtgaaggacatgttcagcttcgagatccccgagcaccacgtgatcgtgagcgccagcagcgacggcttcatcaagatgtggaagctgaagcaggacaagaaggtgccccccagcctgctgtgcgagatcaacaccaacgccagactgacctgcctgggcgtgtggctggacaaggtggccgacatgaaggagagcctgccccccgccgccgagcccagccccgtgagcaaggagcagagcaagatcggcaagaaggagcccggcgacaccgtgcacaaggaggagaagagaagcaagcccaacaccaagaagagaggcctgaccggcgacagcaagaaggccaccaaggagagcggcctgatcagcaccaagaagagaaagatggtggagatgctggagaagaagagaaagaagaagaagatcaagaccatgcagtag

SEQ ID NO: 92330 - DNA, 3372 bp, synthetic construct
  misc_feature 1..3372: note = Description of Artificial Sequence: Synthetic coding sequence
  source 1..3372: mol_type = other DNA
atgagcggcaccagcagccacgagagcttctacgacagcctgagcgacatgcaggaggagagcaagaacaccgacttcttccccggcctgagcgccttcctgagccaggaggagatcaacaagagcctggacctggccagaagagccatcgccgacagcgagaccgaggacttcgacagcgagaaggagatcagccagatcttcagcaccagccccgccagcctgtgcgagcaccccagccacaaggagaccaagctgggcgagcacgccagcagaagaccccaggacaacagaagcacccccgtgcagcccctggccgagaagcagaccaagagcatcagcagccccgtgagcaagagaaagcccgccatgagccccctgctgaccagacccagctacatcagaagcctgagaaaggccgagaagagaggcgccaagacccccagcaccaacgtgaagcccaagaccccccaccagagaaagggcggcccccagagccagctgtgcgacaaggccgccaacctgatcgaggagctgaccagcatcttcaaggccgccaagcccagaaacagaagccccaacggcgagagcagcagccccgacagcggctacctgagccccaagaaccagcccagcgccctgctgagcgccagcgccagccagagccccatggaggaccagggcgagatggagagagaggtgaagagccccggcgccagacactgctaccaggacaaccaggacctggccgtgccccacaacagaaagagccacccccagccccacagcgccctgcacttccccgccgcccccagattcatccagaagctgagaagccaggaggtggccgagggcagcagagtgtacctggagtgcagagtgaccggcaaccccacccccagagtgagatggttctgcgagggcaaggagctgcacaacacccccgacatccagatccactgcgagggcggcgacctgcacaccctgatcatcgccgaggccttcgaggacgacaccggcagatacacctgcctggccaccaaccccagcggcagcgacaccaccagcgccgaggtgttcatcgagggcgccagcagcaccgacagcgacagcgagagcctggccttcaagagcagagccggcgccatgccccaggcccagaagaagaccaccagcgtgagcctgaccatcggcagcagcagccccaagaccggcgtgaccaccgccgtgatccagcccctgagcgtgcccgtgcagcaggtgcacagccccaccagctacctgtgcagacccgacggcaccaccaccgcctacttcccccccgtgttcaccaaggagctgcagaacaccgccgtggccgagggccaggtggtggtgctggagtgcagagtgagaggcgccccccccctgcaggtgcagtggttcagacagggcagcgagatccaggacagccccgacttcagaatcctgcagaagaagcccagaagcaccgccgagcccgaggagatctgcaccctggtgatcgccgagaccttccccgaggacgccggcatcttcacctgcagcgccagaaacgactacggcagcgccaccagcaccgcccagctggtggtgaccagcgccaacaccgagaactgcagctacgagagcatgggcgagagcaacaacgaccacttccagcacttccccccccccccccccatcctggagaccagcagcctggagctggccagcaagaagcccagcgagatccagcaggtgaacaaccccgagctgggcctgagcagagccgccctgcagatgcagttcaacgccgccgagagagagaccaacggcgtgcaccccagcagaggcgtgaacggcctgatcaacggcaaggccaacagcaacaagagcctgcccacccccgccgtgctgctgagccccaccaaggagcccccccccctgctggccaagcccaagctgggcttccccaagaaggccagcagaaccgccagaatcgccagcgacgaggagatccagggcaccaaggacgccgtgatccaggacctggagagaaagctgagattcaaggaggacctgctgaacaacggccagcccagactgacctacgaggagagaatggccagaagactgctgggcgccgacagcgccaccgtgttcaacatccaggagcccgaggaggagaccgccaaccaggacatcggcagcccccacgccagcgtgggcagccccctggacggccagaaggagtacaaggtgagcagctgcgagcagagactgatcagcgagatcgagtacagactggagagaagccccgtggacgagagcggcgacgaggtgcagtacggcgacgtgcccgtggagaacggcatggcccccttcttcgagatgaagctgaagcactacaagatcttcgagggcatgcccgtgaccttcacctgcagagtggccggcaaccccaagcccaagatctactggttcaaggacggcaagcagatcagccccaagagcgaccactacaccatccagagagacctggacggcacctgcagcctgcacaccaccgccagcaccctggacgacgacggcaactacaccatcatggccgccaacccccagggcagaatcagctgcaccggcagactgatggtgcaggccgtgaaccagagaggcagaagccccagaagccccagcggccacccccacgtgagaagacccagaagcagaagcagagacagcggcgacgagaacgagcccatccaggagagattcttcagaccccacttcctgcaggcccccggcgacctgaccgtgcaggagggcaagctgtgcagaatggactgcaaggtgagcggcctgcccacccccgacctgagctggcagctggacggcaagcccgtgagacccgacagcgcccacaagatgctggtgagagagaacggcgtgcacagcctgatcatcgagcccgtgaccagcagagacgccggcatctacacctgcatcgccaccaacagagccggccagaacagcttcagcctggagctggtggtggccgccaaggaggcccacaagccccccgtgttcatcgagaagctgcagaacaccggcgtggccgacggctaccccgtgagactggagtgcagagtgctgggcgtgccccccccccagatcttctggaagaaggagaacgagagcctgacccacagcaccgacagagtgagcatgcaccaggacaaccacggctacatctgcctgctgatccagggcgccaccaaggaggacgccggctggtacaccgtgagcgccaagaacgaggccggcatcgtgagctgcaccgccagactggacgtgtacatcagcagacactag

SEQ ID NO: 92331 - DNA, 2019 bp, synthetic construct
  misc_feature 1..2019: note = Description of Artificial Sequence: Synthetic coding sequence
  source 1..2019: mol_type = other DNA
atgagcgccctggccagcagaagcgcccccgccatgcagagcagcggcagcttcaactacgccagacccaagcagttcatcgccgcccagaacctgggccccgccagcggccacggcacccccgccagcagccccagcagcagcagcctgcccagccccatgagccccacccccagacagttcggcagagcccccgtgccccccttcgcccagcccttcggcgccgagcccgaggccccctggggcagcagcagccccagccccccccccccccccccccccgtgttcagccccaccgccgccttccccgtgcccgacgtgttccccctgccccccccccccccccccctgcccagccccggccaggccagccactgcagcagccccgccaccagattcggccacagccagacccccgccgccttcctgagcgccctgctgcccagccagcccccccccgccgccgtgaacgccctgggcctgcccaagggcgtgacccccgccggcttccccaagaaggccagcagaaccgccagaatcgccagcgacgaggagatccagggcaccaaggacgccgtgatccaggacctggagagaaagctgagattcaaggaggacctgctgaacaacggccagcccagactgacctacgaggagagaatggccagaagactgctgggcgccgacagcgccaccgtgttcaacatccaggagcccgaggaggagaccgccaaccaggagtacaaggtgagcagctgcgagcagagactgatcagcgagatcgagtacagactggagagaagccccgtggacgagagcggcgacgaggtgcagtacggcgacgtgcccgtggagaacggcatggcccccttcttcgagatgaagctgaagcactacaagatcttcgagggcatgcccgtgaccttcacctgcagagtggccggcaaccccaagcccaagatctactggttcaaggacggcaagcagatcagccccaagagcgaccactacaccatccagagagacctggacggcacctgcagcctgcacaccaccgccagcaccctggacgacgacggcaactacaccatcatggccgccaacccccagggcagaatcagctgcaccggcagactgatggtgcaggccgtgaaccagagaggcagaagccccagaagccccagcggccacccccacgtgagaagacccagaagcagaagcagagacagcggcgacgagaacgagcccatccaggagagattcttcagaccccacttcctgcaggcccccggcgacctgaccgtgcaggagggcaagctgtgcagaatggactgcaaggtgagcggcctgcccacccccgacctgagctggcagctggacggcaagcccgtgagacccgacagcgcccacaagatgctggtgagagagaacggcgtgcacagcctgatcatcgagcccgtgaccagcagagacgccggcatctacacctgcatcgccaccaacagagccggccagaacagcttcagcctggagctggtggtggccgccaaggaggcccacaagccccccgtgttcatcgagaagctgcagaacaccggcgtggccgacggctaccccgtgagactggagtgcagagtgctgggcgtgccccccccccagatcttctggaagaaggagaacgagagcctgacccacagcaccgacagagtgagcatgcaccaggacaaccacggctacatctgcctgctgatccagggcgccaccaaggaggacgccggctggtacaccgtgagcgccaagaacgaggccggcatcgtgagctgcaccgccagactggacgtgtacacccagtggcaccagcagagccagagcaccaagcccaagaaggtgagacccagcgccagcagatacgccgccctgagcgaccagggcctggacatcaaggccgccttccagcccgaggccaaccccagccacctgaccctgaacaccgccctggtggagagcgaggacctgtag

SEQ ID NO: 92332 - DNA, 2334 bp, synthetic construct
  misc_feature 1..2334: note = Description of Artificial Sequence: Synthetic coding sequence
  source 1..2334: mol_type = other DNA
atgccccaggcccagaagaagaccaccagcgtgagcctgaccatcggcagcagcagccccaagaccggcgtgaccaccgccgtgatccagcccctgagcgtgcccgtgcagcaggtgcacagccccaccagctacctgtgcagacccgacggcaccaccaccgcctacttcccccccgtgttcaccaaggagctgcagaacaccgccgtggccgagggccaggtggtggtgctggagtgcagagtgagaggcgccccccccctgcaggtgcagtggttcagacagggcagcgagatccaggacagccccgacttcagaatcctgcagaagaagcccagaagcaccgccgagcccgaggagatctgcaccctggtgatcgccgagaccttccccgaggacgccggcatcttcacctgcagcgccagaaacgactacggcagcgccaccagcaccgcccagctggtggtgaccagcgccaacaccgagaactgcagctacgagagcatgggcgagagcaacaacgaccacttccagcacttccccccccccccccccatcctggagaccagcagcctggagctggccagcaagaagcccagcgagatccagcaggtgaacaaccccgagctgggcctgagcagagccgccctgcagatgcagttcaacgccgccgagagagagaccaacggcgtgcaccccagcagaggcgtgaacggcctgatcaacggcaaggccaacagcaacaagagcctgcccacccccgccgtgctgctgagccccaccaaggagcccccccccctgctggccaagcccaagctgggcttccccaagaaggccagcagaaccgccagaatcgccagcgacgaggagatccagggcaccaaggacgccgtgatccaggacctggagagaaagctgagattcaaggaggacctgctgaacaacggccagcccagactgacctacgaggagagaatggccagaagactgctgggcgccgacagcgccaccgtgttcaacatccaggagcccgaggaggagaccgccaaccaggagtacaaggtgagcagctgcgagcagagactgatcagcgagatcgagtacagactggagagaagccccgtggacgagagcggcgacgaggtgcagtacggcgacgtgcccgtggagaacggcatggcccccttcttcgagatgaagctgaagcactacaagatcttcgagggcatgcccgtgaccttcacctgcagagtggccggcaaccccaagcccaagatctactggttcaaggacggcaagcagatcagccccaagagcgaccactacaccatccagagagacctggacggcacctgcagcctgcacaccaccgccagcaccctggacgacgacggcaactacaccatcatggccgccaacccccagggcagaatcagctgcaccggcagactgatggtgcaggccgtgaaccagagaggcagaagccccagaagccccagcggccacccccacgtgagaagacccagaagcagaagcagagacagcggcgacgagaacgagcccatccaggagagattcttcagaccccacttcctgcaggcccccggcgacctgaccgtgcaggagggcaagctgtgcagaatggactgcaaggtgagcggcctgcccacccccgacctgagctggcagctggacggcaagcccgtgagacccgacagcgcccacaagatgctggtgagagagaacggcgtgcacagcctgatcatcgagcccgtgaccagcagagacgccggcatctacacctgcatcgccaccaacagagccggccagaacagcttcagcctggagctggtggtggccgccaaggaggcccacaagccccccgtgttcatcgagaagctgcagaacaccggcgtggccgacggctaccccgtgagactggagtgcagagtgctgggcgtgccccccccccagatcttctggaagaaggagaacgagagcctgacccacagcaccgacagagtgagcatgcaccaggacaaccacggctacatctgcctgctgatccagggcgccaccaaggaggacgccggctggtacaccgtgagcgccaagaacgaggccggcatcgtgagctgcaccgccagactggacgtgtacacccagtggcaccagcagagccagagcaccaagcccaagaaggtgagacccagcgccagcagatacgccgccctgagcgaccagggcctggacatcaaggccgccttccagcccgaggccaaccccagccacctgaccctgaacaccgccctggtggagagcgaggacctgtag

SEQ ID NO: 92333 - DNA, 3321 bp, synthetic construct
  misc_feature 1..3321: note = Description of Artificial Sequence: Synthetic coding sequence
  source 1..3321: mol_type = other DNA
atgagcggcaccagcagccacgagagcttctacgacagcctgagcgacatgcaggaggagagcaagaacaccgacttcttccccggcctgagcgccttcctgagccaggaggagatcaacaagagcctggacctggccagaagagccatcgccgacagcgagaccgaggacttcgacagcgagaaggagatcagccagatcttcagcaccagccccgccagcctgtgcgagcaccccagccacaaggagaccaagctgggcgagcacgccagcagaagaccccaggacaacagaagcacccccgtgcagcccctggccgagaagcagaccaagagcatcagcagccccgtgagcaagagaaagcccgccatgagccccctgctgaccagacccagctacatcagaagcctgagaaaggccgagaagagaggcgccaagacccccagcaccaacgtgaagcccaagaccccccaccagagaaagggcggcccccagagccagctgtgcgacaaggccgccaacctgatcgaggagctgaccagcatcttcaaggccgccaagcccagaaacagaagccccaacggcgagagcagcagccccgacagcggctacctgagccccaagaaccagcccagcgccctgctgagcgccagcgccagccagagccccatggaggaccagggcgagatggagagagaggtgaagagccccggcgccagacactgctaccaggacaaccaggacctggccgtgccccacaacagaaagagccacccccagccccacagcgccctgcacttccccgccgcccccagattcatccagaagctgagaagccaggaggtggccgagggcagcagagtgtacctggagtgcagagtgaccggcaaccccacccccagagtgagatggttctgcgagggcaaggagctgcacaacacccccgacatccagatccactgcgagggcggcgacctgcacaccctgatcatcgccgaggccttcgaggacgacaccggcagatacacctgcctggccaccaaccccagcggcagcgacaccaccagcgccgaggtgttcatcgagggcgccagcagcaccgacagcgacagcgagagcctggccttcaagagcagagccggcgccatgccccaggcccagaagaagaccaccagcgtgagcctgaccatcggcagcagcagccccaagaccggcgtgaccaccgccgtgatccagcccctgagcgtgcccgtgcagcaggtgcacagccccaccagctacctgtgcagacccgacggcaccaccaccgcctacttcccccccgtgttcaccaaggagctgcagaacaccgccgtggccgagggccaggtggtggtgctggagtgcagagtgagaggcgccccccccctgcaggtgcagtggttcagacagggcagcgagatccaggacagccccgacttcagaatcctgcagaagaagcccagaagcaccgccgagcccgaggagatctgcaccctggtgatcgccgagaccttccccgaggacgccggcatcttcacctgcagcgccagaaacgactacggcagcgccaccagcaccgcccagctggtggtgaccagcgccaacaccgagaactgcagctacgagagcatgggcgagagcaacaacgaccacttccagcacttccccccccccccccccatcctggagaccagcagcctggagctggccagcaagaagcccagcgagatccagcaggtgaacaaccccgagctgggcctgagcagagccgccctgcagatgcagttcaacgccgccgagagagagaccaacggcgtgcaccccagcagaggcgtgaacggcctgatcaacggcaaggccaacagcaacaagagcctgcccacccccgccgtgctgctgagccccaccaaggagcccccccccctgctggccaagcccaagctgggcttccccaagaaggccagcagaaccgccagaatcgccagcgacgaggagatccagggcaccaaggacgccgtgatccaggacctggagagaaagctgagattcaaggaggacctgctgaacaacggccagcccagactgacctacgaggagagaatggccagaagactgctgggcgccgacagcgccaccgtgttcaacatccaggagcccgaggaggagaccgccaaccaggagtacaaggtgagcagctgcgagcagagactgatcagcgagatcgagtacagactggagagaagccccgtggacgagagcggcgacgaggtgcagtacggcgacgtgcccgtggagaacggcatggcccccttcttcgagatgaagctgaagcactacaagatcttcgagggcatgcccgtgaccttcacctgcagagtggccggcaaccccaagcccaagatctactggttcaaggacggcaagcagatcagccccaagagcgaccactacaccatccagagagacctggacggcacctgcagcctgcacaccaccgccagcaccctggacgacgacggcaactacaccatcatggccgccaacccccagggcagaatcagctgcaccggcagactgatggtgcaggccgtgaaccagagaggcagaagccccagaagccccagcggccacccccacgtgagaagacccagaagcagaagcagagacagcggcgacgagaacgagcccatccaggagagattcttcagaccccacttcctgcaggcccccggcgacctgaccgtgcaggagggcaagctgtgcagaatggactgcaaggtgagcggcctgcccacccccgacctgagctggcagctggacggcaagcccgtgagacccgacagcgcccacaagatgctggtgagagagaacggcgtgcacagcctgatcatcgagcccgtgaccagcagagacgccggcatctacacctgcatcgccaccaacagagccggccagaacagcttcagcctggagctggtggtggccgccaaggaggcccacaagccccccgtgttcatcgagaagctgcagaacaccggcgtggccgacggctaccccgtgagactggagtgcagagtgctgggcgtgccccccccccagatcttctggaagaaggagaacgagagcctgacccacagcaccgacagagtgagcatgcaccaggacaaccacggctacatctgcctgctgatccagggcgccaccaaggaggacgccggctggtacaccgtgagcgccaagaacgaggccggcatcgtgagctgcaccgccagactggacgtgtacatcagcagacactag

SEQ ID NO: 92334 - DNA, 1233 bp, synthetic construct
  misc_feature 1..1233: note = Description of Artificial Sequence: Synthetic coding sequence
  source 1..1233: mol_type = other DNA
atgagccccctgctgaccagacccagctacatcagaagcctgagaaaggccgagaagagaggcgccaagacccccagcaccaacgtgaagcccaagaccccccaccagagaaagggcggcccccagagccagctgtgcgacaaggccgccaacctgatcgaggagctgaccagcatcttcaaggccgccaagcccagaaacagaagccccaacggcgagagcagcagccccgacagcggctacctgagccccaagaaccagcccagcgccctgctgagcgccagcgccagccagagccccatggaggaccagggcgagatggagagagaggtgaagagccccggcgccagacactgctaccaggacaaccaggacctggccgtgccccacaacagaaagagccacccccagccccacagcgccctgcacttccccgccgcccccagattcatccagaagctgagaagccaggaggtggccgagggcagcagagtgtacctggagtgcagagtgaccggcaaccccacccccagagtgagatggttctgcgagggcaaggagctgcacaacacccccgacatccagatccactgcgagggcggcgacctgcacaccctgatcatcgccgaggccttcgaggacgacaccggcagatacacctgcctggccaccaaccccagcggcagcgacaccaccagcgccgaggtgttcatcgagggcgccagcagcaccgacagcgacagcgagagcctggccttcaagagcagagccggcgccatgccccaggcccagaagaagaccaccagcgtgagcctgaccatcggcagcagcagccccaagaccggcgtgaccaccgccgtgatccagcccctgagcgtgcccgtgcagcaggtgcacagccccaccagctacctgtgcagacccgacggcaccaccaccgcctacttcccccccgtgttcaccaaggagctgcagaacaccgccgtggccgagggccaggtggtggtgctggagtgcagagtgagaggcgccccccccctgcaggtgcagtggttcagacagggcagcgagatccaggacagccccgacttcagaatcctgcagaagaagcccagaagcaccgccgagcccgacgtgctgtacgtgttcgtgagagtgagatgccaccagatgaagatccagtactacaacctggcccacctgatcagcagctggctgagcagcttcctgtag

SEQ ID NO: 92335 - DNA, 3006 bp, synthetic construct
  misc_feature 1..3006: note = Description of Artificial Sequence: Synthetic coding sequence
  source 1..3006: mol_type = other DNA
atgccccaggcccagaagaagaccaccagcgtgagcctgaccatcggcagcagcagccccaagaccggcgtgaccaccgccgtgatccagcccctgagcgtgcccgtgcagcaggtgcacagccccaccagctacctgtgcagacccgacggcaccaccaccgcctacttcccccccgtgttcaccaaggagctgcagaacaccgccgtggccgagggccaggtggtggtgctggagtgcagagtgagaggcgccccccccctgcaggtgcagtggttcagacagggcagcgagatccaggacagccccgacttcagaatcctgcagaagaagcccagaagcaccgccgagcccgaggagatctgcaccctggtgatcgccgagaccttccccgaggacgccggcatcttcacctgcagcgccagaaacgactacggcagcgccaccagcaccgcccagctggtggtgaccagcgccaacaccgagaactgcagctacgagagcatgggcgagagcaacaacgaccacttccagcacttccccccccccccccccatcctggagaccagcagcctggagctggccagcaagaagcccagcgagatccagcaggtgaacaaccccgagctgggcctgagcagagccgccctgcagatgcagttcaacgccgccgagagagagaccaacggcgtgcaccccagcagaggcgtgaacggcctgatcaacggcaaggccaacagcaacaagagcctgcccacccccgccgtgctgctgagccccaccaaggagcccccccccctgctggccaagcccaagctggaccccctgaagctgcagcagctgcagaaccagatcagactggagcaggaggccggcgccagacagcccccccccgcccccagaagcgccccccccagcccccccttcccccccccccccgccttccccgagctggccgcctgcaccccccccgccagccccgagcccatgagcgccctggccagcagaagcgcccccgccatgcagagcagcggcagcttcaactacgccagacccaagcagttcatcgccgcccagaacctgggccccgccagcggccacggcacccccgccagcagccccagcagcagcagcctgcccagccccatgagccccacccccagacagttcggcagagcccccgtgccccccttcgcccagcccttcggcgccgagcccgaggccccctggggcagcagcagccccagccccccccccccccccccccccgtgttcagccccaccgccgccttccccgtgcccgacgtgttccccctgccccccccccccccccccctgcccagccccggccaggccagccactgcagcagccccgccaccagattcggccacagccagacccccgccgccttcctgagcgccctgctgcccagccagcccccccccgccgccgtgaacgccctgggcctgcccaagggcgtgacccccgccggcttccccaagaaggccagcagaaccgccagaatcgccagcgacgaggagatccagggcaccaaggacgccgtgatccaggacctggagagaaagctgagattcaaggaggacctgctgaacaacggccagcccagactgacctacgaggagagaatggccagaagactgctgggcgccgacagcgccaccgtgttcaacatccaggagcccgaggaggagaccgccaaccaggagtacaaggtgagcagctgcgagcagagactgatcagcgagatcgagtacagactggagagaagccccgtggacgagagcggcgacgaggtgcagtacggcgacgtgcccgtggagaacggcatggcccccttcttcgagatgaagctgaagcactacaagatcttcgagggcatgcccgtgaccttcacctgcagagtggccggcaaccccaagcccaagatctactggttcaaggacggcaagcagatcagccccaagagcgaccactacaccatccagagagacctggacggcacctgcagcctgcacaccaccgccagcaccctggacgacgacggcaactacaccatcatggccgccaacccccagggcagaatcagctgcaccggcagactgatggtgcaggccgtgaaccagagaggcagaagccccagaagccccagcggccacccccacgtgagaagacccagaagcagaagcagagacagcggcgacgagaacgagcccatccaggagagattcttcagaccccacttcctgcaggcccccggcgacctgaccgtgcaggagggcaagctgtgcagaatggactgcaaggtgagcggcctgcccacccccgacctgagctggcagctggacggcaagcccgtgagacccgacagcgcccacaagatgctggtgagagagaacggcgtgcacagcctgatcatcgagcccgtgaccagcagagacgccggcatctacacctgcatcgccaccaacagagccggccagaacagcttcagcctggagctggtggtggccgccaaggaggcccacaagccccccgtgttcatcgagaagctgcagaacaccggcgtggccgacggctaccccgtgagactggagtgcagagtgctgggcgtgccccccccccagatcttctggaagaaggagaacgagagcctgacccacagcaccgacagagtgagcatgcaccaggacaaccacggctacatctgcctgctgatccagggcgccaccaaggaggacgccggctggtacaccgtgagcgccaagaacgaggccggcatcgtgagctgcaccgccagactggacgtgtacacccagtggcaccagcagagccagagcaccaagcccaagaaggtgagacccagcgccagcagatacgccgccctgagcgaccagggcctggacatcaaggccgccttccagcccgaggccaaccccagccacctgaccctgaacaccgccctggtggagagcgaggacctgtag

SEQ ID NO: 92336 - DNA, 483 bp, synthetic construct
  misc_feature 1..483: note = Description of Artificial Sequence: Synthetic coding sequence
  source 1..483: mol_type = other DNA
tgaggcaagcccgtgagacccgacagcgcccacaagatgctggtgagagagaacggcgtgcacagcctgatcatcgagcccgtgaccagcagagacgccggcatctacacctgcatcgccaccaacagagccggccagaacagcttcagcctggagctggtggtggccgccaaggaggcccacaagccccccgtgttcatcgagaagctgcagaacaccggcgtggccgacggctaccccgtgagactggagtgcagagtgctgggcgtgccccccccccagatcttctggaagaaggagaacgagagcctgacccacagcaccgacagagtgagcatgcaccaggacaaccacggctacatctgcctgctgatccagggcgccaccaaggaggacgccggctggtacaccgtgagcgccaagaacgaggccggcatcgtgagctgcaccgccagactggacgtgtacatcagcagacactag

SEQ ID NO: 92337 - DNA, 1539 bp, synthetic construct
  misc_feature 1..1539: note = Description of Artificial Sequence: Synthetic coding sequence
  source 1..1539: mol_type = other DNA
aagaacaccgacttcttccccggcctgagcgccttcctgagccaggaggagatcaacaagagcctggacctggccagaagagccatcgccgacagcgagaccgaggacttcgacagcgagaaggagatcagccagatcttcagcaccagccccgccagcctgtgcgagcaccccagccacaaggagaccaagctgggcgagcacgccagcagaagaccccaggacaacagaagcacccccgtgcagcccctggccgagaagcagaccaagagcatcagcagccccgtgagcaagagaaagcccgccatgagccccctgctgaccagacccagctacatcagaagcctgagaaaggccgagaagagaggcgccaagacccccagcaccaacgtgaagcccaagaccccccaccagagaaagggcggcccccagagccagctgtgcgacaaggccgccaacctgatcgaggagctgaccagcatcttcaaggccgccaagcccagaaacagaagccccaacggcgagagcagcagccccgacagcggctacctgagccccaagaaccagcccagcgccctgctgagcgccagcgccagccagagccccatggaggaccagggcgagatggagagagaggtgaagagccccggcgccagacactgctaccaggacaaccaggacctggccgtgccccacaacagaaagagccacccccagccccacagcgccctgcacttccccgccgcccccagattcatccagaagctgagaagccaggaggtggccgagggcagcagagtgtacctggagtgcagagtgaccggcaaccccacccccagagtgagatggttctgcgagggcaaggagctgcacaacacccccgacatccagatccactgcgagggcggcgacctgcacaccctgatcatcgccgaggccttcgaggacgacaccggcagatacacctgcctggccaccaaccccagcggcagcgacaccaccagcgccgaggtgttcatcgagggcgccagcagcaccgacagcgacagcgagagcctggccttcaagagcagagccggcgccatgccccaggcccagaagaagaccaccagcgtgagcctgaccatcggcagcagcagccccaagaccggcgtgaccaccgccgtgatccagcccctgagcgtgcccgtgcagcaggtgcacagccccaccagctacctgtgcagacccgacggcaccaccaccgcctacttcccccccgtgttcaccaaggagctgcagaacaccgccgtggccgagggccaggtggtggtgctggagtgcagagtgagaggcgccccccccctgcaggtgcagtggttcagacagggcagcgagatccaggacagccccgacttcagaatcctgcagaagaagcccagaagcaccgccgagcccgacgtgctgtacgtgttcgtgagagtgagatgccaccagatgaagatccagtactacaacctggcccacctgatcagcagctggctgagcagcttcctgtag

SEQ ID NO: 92338 - DNA, 87 bp, synthetic construct
  misc_feature 1..87: note = Description of Artificial Sequence: Synthetic coding sequence
  source 1..87: mol_type = other DNA
atgagcggcaccagcagccacgagagcttctacgacagcctgagcgacatgcaggaggagagcaagaacaccgacttcttcccctag

SEQ ID NO: 92339 - DNA, 690 bp, synthetic construct
  misc_feature 1..690: note = Description of Artificial Sequence: Synthetic coding sequence
  source 1..690: mol_type = other DNA
atggccgcccagcccctgagacacagaagcagatgcgccaccccccccagaggcgacttctgcggcggcaccgagagagccatcgaccaggccagcttcaccaccagcatggagtgggacacccaggtggtgaagggcagcagccccctgggccccgccggcctgggcgccgaggagcccgccgccggcccccagctgcccagctggctgcagcccgagagatgcgccgtgttccagtgcgcccagtgccacgccgtgctggccgacagcgtgcacctggcctgggacctgagcagaagcctgggcgccgtggtgttcagcagagtgaccaacaacgtggtgctggaggcccccttcctggtgggcatcgagggcagcctgaagggcagcacctacaacctgctgttctgcggcagctgcggcatccccgtgggcttccacctgtacagcacccacgccgccctggccgccctgagaggccacttctgcctgagcagcgacaagatggtgtgctacctgctgaagaccaaggccatcgtgaacgccagcgagatggacatccagaacgtgcccctgagcgagaagatcgccgagctgaaggagaagatcgtgctgacccacaacagactgaagagcctgatgaagatcctgagcgaggtgacccccgaccagagcaagcccgagaactag

SEQ ID NO: 92340 - DNA, 816 bp, synthetic construct
  misc_feature 1..816: note = Description of Artificial Sequence: Synthetic coding sequence
  source 1..816: mol_type = other DNA
atggccagccccggctgcctgtggctgctggccgtggccctgctgccctggacctgcgccagcagagccctgcagcacctggacccccccgcccccctgcccctggtgatctggcacggcatgggcagcagatacgtggcccagaccggcctggagctgctggccagcagcaacccccccgccagcagctaccagagcgccggcatgatcggcgacagctgctgcaaccccctgagcatgggcgccatcaagaagatggtggagaagaagatccccggcatctacgtgctgagcctggagatcggcaagaccctgatggaggacgtggagaacagcttcttcctgaacgtgaacagccaggtgaccaccgtgtgccaggccctggccaaggaccccaagctgcagcagggctacaacgccatgggcttcagccagggcggccagttcctgagagccgtggcccagagatgccccagcccccccatgatcaacctgatcagcgtgggcggccagcaccagggcgtgttcggcctgcccagatgccccggcgagagcagccacatctgcgacttcatcagaaagaccctgaacgccggcgcctacagcaaggtggtgcaggagagactggtgcaggccgagtactggcacgaccccatcaaggaggacgtgtacagaaaccacagcatcttcctggccgacatcaaccaggagagaggcatcaacgagagctacaagaagaacctgatggccctgaagaagttcgtgatggtgaagttcctgaacgacagcatcgtggaccccgtggacagcgagtag

SEQ ID NO: 92341 - DNA, 921 bp, synthetic construct
  misc_feature 1..921: note = Description of Artificial Sequence: Synthetic coding sequence
  source 1..921: mol_type = other DNA
atggccagccccggctgcctgtggctgctggccgtggccctgctgccctggacctgcgccagcagagccctgcagcacctggacccccccgcccccctgcccctggtgatctggcacggcatgggcgacagctgctgcaaccccctgagcatgggcgccatcaagaagatggtggagaagaagatccccggcatctacgtgctgagcctggagatcggcaagaccctgatggaggacgtggagaacagcttcttcctgaacgtgaacagccaggtgaccaccgtgtgccaggccctggccaaggaccccaagctgcagcagggctacaacgccatgggcttcagccagggcggccagttcctgagagccgtggcccagagatgccccagcccccccatgatcaacctgatcagcgtgggcggccagcaccagggcgtgttcggcctgcccagatgccccggcgagagcagccacatctgcgacttcatcagaaagaccctgaacgccggcgcctacagcaaggtggtgcaggagagactggtgcaggccgagtactggcacgaccccatcaaggaggacgtgtacagaaaccacagcatcttcctggccgacatcaaccaggagagaggcatcaacgagagctacaagaagaacctgatggccctgaagaagttcgtgatggtgaagttcctgaacgacagcatcgtggaccccgtggacagcgagtggttcggcttctacagaagcggccaggccaaggagaccatccccctgcaggagaccagcctgtacacccaggacagactgggcctgaaggagatggacaacgccggccagctggtgttcctggccaccgagggcgaccacctgcagctgagcgaggagtggttctacgcccacatcatccccttcctgggctag

SEQ ID NO: 92342 - DNA, 612 bp, synthetic construct
  misc_feature 1..612: note = Description of Artificial Sequence: Synthetic coding sequence
  source 1..612: mol_type = other DNA
atggccagccccggctgcctgtggctgctggccgtggccctgctgccctggacctgcgccagcagagccctgcagcacctggacccccccgcccccctgcccctggtgatctggcacggcatgggcgtgttcggcctgcccagatgccccggcgagagcagccacatctgcgacttcatcagaaagaccctgaacgccggcgcctacagcaaggtggtgcaggagagactggtgcaggccgagtactggcacgaccccatcaaggaggacgtgtacagaaaccacagcatcttcctggccgacatcaaccaggagagaggcatcaacgagagctacaagaagaacctgatggccctgaagaagttcgtgatggtgaagttcctgaacgacagcatcgtggaccccgtggacagcgagtggttcggcttctacagaagcggccaggccaaggagaccatccccctgcaggagaccagcctgtacacccaggacagactgggcctgaaggagatggacaacgccggccagctggtgttcctggccaccgagggcgaccacctgcagctgagcgaggagtggttctacgcccacatcatccccttcctgggctag

SEQ ID NO: 92343 - DNA, 921 bp, synthetic construct; identical to SEQ ID NO: 92341
  misc_feature 1..921: note = Description of Artificial Sequence: Synthetic coding sequence
  source 1..921: mol_type = other DNA

SEQ ID NO: 92344 - DNA, 909 bp, synthetic construct
  misc_feature 1..909: note = Description of Artificial Sequence: Synthetic coding sequence
  source 1..909: mol_type = other DNA
atgctgggcctgtgcggccagagactgcccgccgcctgggtgctgctgctgctgcccttcctgcccctgctgctgctggccgcccccgccccccacagagccagctacaagcccgtgatcgtggtgcacggcctgttcgacagcagctacagcttcagacacctgctggagtacatcaacgagacccaccccggcaccgtggtgaccgtgctggacctgttcgacggcagagagagcctgagacccctgtgggagcaggtgcagggcttcagagaggccgtggtgcccatcatggccaaggccccccagggcgtgcacctgatctgctacagccagggcggcctggtgtgcagagccctgctgagcgtgatggacgaccacaacgtggacagcttcatcagcctgagcagcccccagatgggccagtacggcgacaccgactacctgaagtggctgttccccaccagcatgagaagcaacctgtacagaatctgctacagcccctggggccaggagttcagcatctgcaactactggcacgacccccaccacgacgacctgtacctgaacgccagcagcttcctggccctgatcaacggcgagagagaccaccccaacgccaccgtgtggagaaagaacttcctgagagtgggccacctggtgctgatcggcggccccgacgacggcgtgatcaccccctggcagagcagcttcttcggcttctacgacgccaacgagaccgtgctggagatggaggagcagctggtgtacctgagagacagcttcggcctgaagaccctgctggccagaggcgccatcgtgagatgccccatggccggcatcagccacaccgcctggcacagcaacagaaccctgtacgagacctgcatcgagccctggctgagctag

SEQ ID NO: 92345 - DNA, 927 bp, synthetic construct
  misc_feature 1..927: note = Description of Artificial Sequence: Synthetic coding sequence
  source 1..927: mol_type = other DNA
atgaagagctgcggcagcatgctgggcctgtgcggccagagactgcccgccgcctgggtgctgctgctgctgcccttcctgcccctgctgctgctggccgcccccgccccccacagagccagctacaagcccgtgatcgtggtgcacggcctgttcgacagcagctacagcttcagacacctgctggagtacatcaacgagacccaccccggcaccgtggtgaccgtgctggacctgttcgacggcagagagagcctgagacccctgtgggagcaggtgcagggcttcagagaggccgtggtgcccatcatggccaaggccccccagggcgtgcacctgatctgctacagccagggcggcctggtgtgcagagccctgctgagcgtgatggacgaccacaacgtggacagcttcatcagcctgagcagcccccagatgggccagtacggcgacaccgactacctgaagtggctgttccccaccagcatgagaagcaacctgtacagaatctgctacagcccctggggccaggagttcagcatctgcaactactggcacgacccccaccacgacgacctgtacctgaacgccagcagcttcctggccctgatcaacggcgagagagaccaccccaacgccaccgtgtggagaaagaacttcctgagagtgggccacctggtgctgatcggcggccccgacgacggcgtgatcaccccctggcagagcagcttcttcggcttctacgacgccaacgagaccgtgctggagatggaggagcagctggtgtacctgagagacagcttcggcctgaagaccctgctggccagaggcgccatcgtgagatgccccatggccggcatcagccacaccgcctggcacagcaacagaaccctgtacgagacctgcatcgagccctggctgagctag

SEQ ID NO: 92346 - DNA, 909 bp, synthetic construct; identical to SEQ ID NO: 92344
  misc_feature 1..909: note = Description of Artificial Sequence: Synthetic coding sequence
  source 1..909: mol_type = other DNA

SEQ ID NO: 92347 - DNA, 909 bp, synthetic construct; identical to SEQ ID NO: 92344
  misc_feature 1..909: note = Description of Artificial Sequence: Synthetic coding sequence
  source 1..909: mol_type = other DNA

SEQ ID NO: 92348 - DNA, 927 bp, synthetic construct
  misc_feature 1..927: note = Description of Artificial Sequence: Synthetic coding sequence
  source 1..927: mol_type = other DNA
atgaagagctgcggcagcatgctgggcctgtggggccagagactgcccgccgcctgggtgctgctgctgctgcccttcctgcccctgctgctgctggccgcccccgccccccacagagagagctacaagcccgtgatcgtggtgcacggcctgttcgacagcagctacagcttcagacacctgctggagtacatcaacgagacccaccccggcaccgtggtgaccgtgctggacctgttcgacggcagagagagcctgagacccctgtgggagcaggtgcagggcttcagagaggccgtggtgcccatcatggccaaggccccccagggcgtgcacctgatctgctacagccagggcggcctggtgtgcagagccctgctgagcgtgatggacgaccacaacgtggacagcttcatcagcctgagcagcccccagatgggccagtacggcgacaccgactacctgaagtggctgttccccaccagcatgagaagcaacctgtacagaatctgctacagcccctggggccaggagttcagcatctgcaactactggcacgacccccaccacgacgacctgtacctgaacgccagcagcttcctggccctgatcaacggcgagagagaccaccccaacgccaccgtgtggagaaagaacttcctgagagtgggccacctggtgctgatcggcggccccgacgacggcgtgatcaccccctggcagagcagcttcttcggcttctacgacgccaacgagaccgtgctggagatggaggagcagctggtgtacctgagagacagcttcggcctgaagaccctgctggccagaggcgccatcgtgagatgccccatggccggcatcagccacaccgcctggcacagcaacagaaccctgtacgagacctgcatcgagccctggctgagctag

SEQ ID NO: 92349 - DNA, 927 bp, synthetic construct
  misc_feature 1..927: note = Description of Artificial Sequence: Synthetic coding sequence
  source 1..927: mol_type = other DNA
atgaagagctgcggcagcatgctgggcctgtggggccagagactgcccgccgcctgggtgctgctgctgctgcccttcctgcccctgctgctgctggccgcccccgccccccacagagccagctacaagcccgtgatcgtggtgcacggcctgttcgacagcagctacagcttcagacacctgctggagtacatcaacgagacccaccccggcaccgtggtgaccgtgctggacctgttcgacggcagagagagcctgagacccctgtgggagcaggtgcagggcttcagagaggccgtggtgcccatcatggccaaggccccccagggcgtgcacctgatctgctacagccagggcggcctggtgtgcagagccctgctgagcgtgatggacgaccacaacgtggacagcttcatcagcctgagcagcccccagatgggccagtacggcgacaccgactacctgaagtggctgttccccaccagcatgagaagcaacctgtacagaatctgctacagcccctggggccaggagttcagcatctgcaactactggcacgacccccaccacgacgacctgtacctgaacgccagcagcttcctggccctgatcaacggcgagagagaccaccccaacgccaccgtgtggagaaagaacttcctgagagtgggccacctggtgctgatcggcggccccgacgacggcgtgatcaccccctggcagagcagcttcttcggcttctacgacgccaacgagaccgtgctggagatggaggagcagctggtgtacctgagagacagcttcggcctgaagaccctgctggccagaggcgccatcgtgagatgccccatggccggcatcagccacaccgcctggcacagcaacagaaccctgtacgagacctgcatcgagccctggctgagctag

SEQ ID NO: 92350 - DNA, 909 bp, synthetic construct; identical to SEQ ID NO: 92344
  misc_feature 1..909: note = Description of Artificial Sequence: Synthetic coding sequence
  source 1..909: mol_type = other DNA

SEQ ID NO: 92351 - DNA, 909 bp, synthetic construct
  misc_feature 1..909: note = Description of Artificial Sequence: Synthetic coding sequence
  source 1..909: mol_type = other DNA
atgctgggcctgtggggccagagactgcccgccgcctgggtgctgctgctgctgcccttcctgcccctgctgctgctggccgcccccgccccccacagagagagctacaagcccgtgatcgtggtgcacggcctgttcgacagcagctacagcttcagacacctgctggagtacatcaacgagacccaccccggcaccgtggtgaccgtgctggacctgttcgacggcagagagagcctgagacccctgtgggagcaggtgcagggcttcagagaggccgtggtgcccatcatggccaaggccccccagggcgtgcacctgatctgctacagccagggcggcctggtgtgcagagccctgctgagcgtgatggacgaccacaacgtggacagcttcatcagcctgagcagcccccagatgggccagtacggcgacaccgactacctgaagtggctgttccccaccagcatgagaagcaacctgtacagaatctgctacagcccctggggccaggagttcagcatctgcaactactggcacgacccccaccacgacgacctgtacctgaacgccagcagcttcctggccctgatcaacggcgagagagaccaccccaacgccaccgtgtggagaaagaacttcctgagagtgggccacctggtgctgatcggcggccccgacgacggcgtgatcaccccctggcagagcagcttcttcggcttctacgacgccaacgagaccgtgctggagatggaggagcagctggtgtacctgagagacagcttcggcctgaagaccctgctggccagaggcgccatcgtgagatgccccatggccggcatcagccacaccgcctggcacagcaacagaaccctgtacgagacctgcatcgagccctggctgagctag

SEQ ID NO: 92352 - DNA, 909 bp, synthetic construct; identical to SEQ ID NO: 92351
  misc_feature 1..909: note = Description of Artificial Sequence: Synthetic coding sequence
  source 1..909: mol_type = other DNA

SEQ ID NO: 92353 - DNA, 909 bp, synthetic construct; identical to SEQ ID NO: 92351
  misc_feature 1..909: note = Description of Artificial Sequence: Synthetic coding sequence
  source 1..909: mol_type = other DNA

SEQ ID NO: 92354 - DNA, 909 bp, synthetic construct
  misc_feature 1..909: note = Description of Artificial Sequence: Synthetic coding sequence
  source 1..909: mol_type = other DNA
atgctgggcctgtggggccagagactgcccgccgcctgggtgctgctgctgctgcccttcctgcccctgctgctgctggccgcccccgccccccacagagccagctacaagcccgtgatcgtggtgcacggcctgttcgacagcagctacagcttcagacacctgctggagtacatcaacgagacccaccccggcaccgtggtgaccgtgctggacctgttcgacggcagagagagcctgagacccctgtgggagcaggtgcagggcttcagagaggccgtggtgcccatcatggccaaggccccccagggcgtgcacctgatctgctacagccagggcggcctggtgtgcagagccctgctgagcgtgatggacgaccacaacgtggacagcttcatcagcctgagcagcccccagatgggccagtacggcgacaccgactacctgaagtggctgttccccaccagcatgagaagcaacctgtacagaatctgctacagcccctggggccaggagttcagcatctgcaactactggcacgacccccaccacgacgacctgtacctgaacgccagcagcttcctggccctgatcaacggcgagagagaccaccccaacgccaccgtgtggagaaagaacttcctgagagtgggccacctggtgctgatcggcggccccgacgacggcgtgatcaccccctggcagagcagcttcttcggcttctacgacgccaacgagaccgtgctggagatggaggagcagctggtgtacctgagagacagcttcggcctgaagaccctgctggccagaggcgccatcgtgagatgccccatggccggcatcagccacaccgcctggcacagcaacagaaccctgtacgagacctgcatcgagccctggctgagctag

SEQ ID NO: 92355 - DNA, 909 bp, synthetic construct; identical to SEQ ID NO: 92354
  misc_feature 1..909: note = Description of Artificial Sequence: Synthetic coding sequence
  source 1..909: mol_type = other DNA

SEQ ID NO: 92356 - DNA, 909 bp, synthetic construct; identical to SEQ ID NO: 92354
  misc_feature 1..909: note = Description of Artificial Sequence: Synthetic coding sequence
  source 1..909: mol_type = other DNA

SEQ ID NO: 92357 - DNA, 927 bp, synthetic construct; identical to SEQ ID NO: 92349
  misc_feature 1..927: note = Description of Artificial Sequence: Synthetic coding sequence
  source 1..927: mol_type = other DNA

SEQ ID NO: 92358 - DNA, 282 bp, synthetic construct
  misc_feature 1..282: note = Description of Artificial Sequence: Synthetic coding sequence
  source 1..282: mol_type = other DNA
atgctgggcctgtggggccagagactgcccgccgcctgggtgctgctgctgctgcccttcctgcccctgctgctgctggccgcccccgccccccacagagccagctacaagcccgtgatcgtggtgcacggcctgttcgacagcagctacagcttcagacacctgctggagtacatcaacgagggcgccctgtgcgccggcctgtgcttcctgagctggatgatcaccacctggatcctgagcagccccagccccctgcacagatgggacagcatggagtag

SEQ ID NO: 92359 - DNA, 543 bp, synthetic construct
  misc_feature 1..543: note = Description of Artificial Sequence: Synthetic coding sequence
  source 1..543: mol_type = other DNA
atgctgggcctgtgcggccagagactgcccgccgcctgggtgctgctgctgctgcccttcctgcccctgctgctgctggccgcccccgccccccacagagccagctacaagcccgtgatcgtggtgcacggcctgttcgacagcagctacagcttcagacacctgctggagtacatcaacgagacccaccccggcaccgtggtgaccgtgctggacctgttcgacggcagagagagcctgagacccctgtgggagcaggtgcagggcttcagagaggccgtggtgcccatcatggccaaggccccccagggcgtgcacctgatctgctacagccagggcggcctggtgtgcagagccctgctgagcgtgatggacgaccacaacgtggacagcttcatcagcctgagcagcccccagatgggccagtacggcgacaccgactacctgaagtggctgttccccaccagcatgagaagcaacctgtacagaatctgctacagcccctggggccaggagttcagcatctgcaactactggcactag

SEQ ID NO: 92360 - DNA, 927 bp, synthetic construct; identical to SEQ ID NO: 92349
  misc_feature 1..927: note = Description of Artificial Sequence: Synthetic coding sequence
  source 1..927: mol_type = other DNA

SEQ ID NO: 92361 - DNA, 603 bp, synthetic construct
  misc_feature 1..603: note = Description of Artificial Sequence: Synthetic coding sequence
  source 1..603: mol_type = other DNA
atgctgggcctgtggggccagagactgcccgccgcctgggtgctgctgctgctgcccttcctgcccctgctgctgctggccgcccccgccccccacagagagagctacaagcccgtgatcgtggtgcacggcctgttcgacagcagctacagcttcagacacctgctggagtacatcaacgagacccaccccggcaccgtggtgaccgtgctggacctgttcgacggcagagagagcctgagacccctgtgggagcaggtgcagggcttcagagaggccgtggtgcccatcatggccaaggccccccagggcgtgcacctgatctgctacagccagggcggcctggtgtgcagagccctgctgagcgtgatggacgaccacaacgtggacagcttcatcagcctgagcagcccccagatgggccagtacggcgacaccgactacctgaagtggctgttccccaccagcatgagaagcaacctgtacagaatctgctacagcccctggggccaggagttcagcatctgcaactactggcacgacccccaccacgacgacctgtacctgaacgccagcagcttcctggccctgatcaacggctag

SEQ ID NO: 92362 - DNA, 477 bp, synthetic construct
  misc_feature 1..477: note = Description of Artificial Sequence: Synthetic coding sequence
  source 1..477: mol_type = other DNA
atgctgggcctgtggggccagagactgcccgccgcctgggtgctgctgctgctgcccttcctgcccctgctgctgctggccgcccccgccccccacagagagagctacaagcccgtgatcgtggtgcacggcctgttcgacagcagctacagcttcagacacctgctggagtacatcaacgagatgggccagtacggcgacaccgactacctgaagtggctgttccccaccagcatgagaagcaacctgtacagaatctgctacagcccctggggccaggagttcagcatctgcaactactggcacgacccccaccacgacgacctgtacctgaacgccagcagcttcctggccctgatcaacggcgagagagaccaccccaacgccaccgtgtggagaaagaacttcctgagagtgggccacctggtgctgatcggcggccccgacgacggcgtgatcaccccctggcagagctag

SEQ ID NO: 92363 - DNA, 543 bp, synthetic construct
  misc_feature 1..543: note = Description of Artificial Sequence: Synthetic coding sequence
  source 1..543: mol_type = other DNA
atgctgggcctgtggggccagagactgcccgccgcctgggtgctgctgctgctgcccttcctgcccctgctgctgctggccgcccccgccccccacagagccagctacaagcccgtgatcgtggtgcacggcctgttcgacagcagctacagcttcagacacctgctggagtacatcaacgagacccaccccggcaccgtggtgaccgtgctggacctgttcgacggcagagagagcctgagacccctgtgggagcaggtgcagggcttcagagaggccgtggtgcccatcatggccaaggccccccagggcgtgcacctgatctgctacagccagggcggcctggtgtgcagagccctgctgagcgtgatggacgaccacaacgtggacagcttcatcagcctgagcagcccccagatgggccagtacggcgacaccgactacctgaagtggctgttccccaccagcatgagaagcaacctgtacagaatctgctacagcccctggggccaggagttcagcatctgcaactactggcactag

SEQ ID NO: 92364 - DNA, 477 bp, synthetic construct
  misc_feature 1..477: note = Description of Artificial Sequence: Synthetic coding sequence
  source 1..477: mol_type = other DNA
atgctgggcctgtggggccagagactgcccgccgcctgggtgctgctgctgctgcccttcctgcccctgctgctgctggccgcccccgccccccacagagccagctacaagcccgtgatcgtggtgcacggcctgttcgacagcagctacagcttcagacacctgctggagtacatcaacgagatgggccagtacggcgacaccgactacctgaagtggctgttccccaccagcatgagaagcaacctgtacagaatctgctacagcccctggggccaggagttcagcatctgcaactactggcacgacccccaccacgacgacctgtacctgaacgccagcagcttcctggccctgatcaacggcgagagagaccaccccaacgccaccgtgtggagaaagaacttcctgagagtgggccacctggtgctgatcggcggccccgacgacggcgtgatcaccccctggcagagctag

SEQ ID NO: 92365 - DNA, 543 bp, synthetic construct; identical to SEQ ID NO: 92363
  misc_feature 1..543: note = Description of Artificial Sequence: Synthetic coding sequence
  source 1..543: mol_type = other DNA

SEQ ID NO: 92366 - DNA, 909 bp, synthetic construct; identical to SEQ ID NO: 92354
  misc_feature 1..909: note = Description of Artificial Sequence: Synthetic coding sequence
  source 1..909: mol_type = other DNA

SEQ ID NO: 92367 - DNA, 909 bp, synthetic construct; identical to SEQ ID NO: 92354
  misc_feature 1..909: note = Description of Artificial Sequence: Synthetic coding sequence
  source 1..909: mol_type = other DNA

SEQ ID NO: 92368 - DNA, 927 bp, synthetic construct; identical to SEQ ID NO: 92349
  misc_feature 1..927: note = Description of Artificial Sequence: Synthetic coding sequence
  source 1..927: mol_type = other DNA

SEQ ID NO: 92369 - DNA, 282 bp, synthetic construct; identical to SEQ ID NO: 92358
  misc_feature 1..282: note = Description of Artificial Sequence: Synthetic coding sequence
  source 1..282: mol_type = other DNA

SEQ ID NO: 92370 - DNA, 909 bp, synthetic construct; identical to SEQ ID NO: 92354
  misc_feature 1..909: note = Description of Artificial Sequence: Synthetic coding sequence
  source 1..909: mol_type = other DNA

SEQ ID NO: 92371 - DNA, 477 bp, synthetic construct
  misc_feature 1..477: note = Description of Artificial Sequence: Synthetic coding sequence
  source 1..477: mol_type = other DNA
atgctgggcctgtgcggccagagactgcccgccgcctgggtgctgctgctgctgcccttcctgcccctgctgctgctggccgcccccgccccccacagagccagctacaagcccgtgatcgtggtgcacggcctgttcgacagcagctacagcttcagacacctgctggagtacatcaacgagatgggccagtacggcgacaccgactacctgaagtggctgttccccaccagcatgagaagcaacctgtacagaatctgctacagcccctggggccaggagttcagcatctgcaactactggcacgacccccaccacgacgacctgtacctgaacgccagcagcttcctggccctgatcaacggcgagagagaccaccccaacgccaccgtgtggagaaagaacttcctgagagtgggccacctggtgctgatcggcggccccgacgacggcgtgatcaccccctggcagagctag

SEQ ID NO: 92372 - DNA, 711 bp, synthetic construct
  misc_feature 1..711: note = Description of Artificial Sequence: Synthetic coding sequence
  source 1..711: mol_type = other DNA
atgctgggcctgtggggccagagactgcccgccgcctgggtgctgctgctgctgcccttcctgcccctgctgctgctggccgcccccgccccccacagagagagctacaagcccgtgatcgtggtgcacggcctgttcgacagcagctacagcttcagacacctgctggagtacatcaacgagacccaccccggcaccgtggtgaccgtgctggacctgttcgacggcagagagagcctgagacccctgtgggagcaggtgcagggcttcagagaggccgtggtgcccatcatggccaaggccccccagggcgtgcacctgatctgctacagccagggcggcctggtgtgcagagccctgctgagcgtgatggacgaccacaacgtggacagcttcatcagcctgagcagcccccagatgggccagtacggcgacaccgactacctgaagtggctgttccccaccagcatgagaagcaacctgtacagaatctgctacagcccctggggccaggagttcagcatctgcaactactggcacgacccccaccacgacgacctgtacctgaacgccagcagcttcctggccctgatcaacggcgagagagaccaccccaacgccaccgtgtggagaaagaacttcctgagagtgggccacctggtgctgatcggcggccccgacgacggcgtgatcaccccctggcagagctag

SEQ ID NO: 92373 - DNA, 543 bp, synthetic construct; identical to SEQ ID NO: 92363
  misc_feature 1..543: note = Description of Artificial Sequence: Synthetic coding sequence
  source 1..543: mol_type = other DNA

SEQ ID NO: 92374 - DNA, 711 bp, synthetic construct; identical to SEQ ID NO: 92372
  misc_feature 1..711: note = Description of Artificial Sequence: Synthetic coding sequence
  source 1..711: mol_type = other DNA

SEQ ID NO: 92375 - DNA, 603 bp, synthetic construct
  misc_feature 1..603: note = Description of Artificial Sequence: Synthetic coding sequence
  source 1..603: mol_type = other DNA
atgctgggcctgtggggccagagactgcccgccgcctgggtgctgctgctgctgcccttcctgcccctgctgctgctggccgcccccgccccccacagagccagctacaagcccgtgatcgtggtgcacggcctgttcgacagcagctacagcttcagacacctgctggagtacatcaacgagacccaccccggcaccgtggtgaccgtgctggacctgttcgacggcagagagagcctgagacccctgtgggagcaggtgcagggcttcagagaggccgtggtgcccatcatggccaaggccccccagggcgtgcacctgatctgctacagccagggcggcctggtgtgcagagccctgctgagcgtgatggacgaccacaacgtggacagcttcatcagcctgagcagcccccagatgggccagtacggcgacaccgactacctgaagtggctgttccccaccagcatgagaagcaacctgtacagaatctgctacagcccctggggccaggagttcagcatctgcaactactggcacgacccccaccacgacgacctgtacctgaacgccagcagcttcctggccctgatcaacggctag

SEQ ID NO: 92376 - DNA, 909 bp, synthetic construct; identical to SEQ ID NO: 92354
  misc_feature 1..909: note = Description of Artificial Sequence: Synthetic coding sequence
  source 1..909: mol_type = other DNA

SEQ ID NO: 92377 - DNA, 603 bp, synthetic construct; identical to SEQ ID NO: 92375
  misc_feature 1..603: note = Description of Artificial Sequence: Synthetic coding sequence
  source 1..603: mol_type = other DNA

SEQ ID NO: 92378 - DNA, 729 bp, synthetic construct
  misc_feature 1..729: note = Description of Artificial Sequence: Synthetic coding sequence
  source 1..729: mol_type = other DNA
atgaagagctgcggcagcatgctgggcctgtggggccagagactgcccgccgcctgggtgctgctgctgctgcccttcctgcccctgctgctgctggccgcccccgccccccacagagagagctacaagcccgtgatcgtggtgcacggcctgttcgacagcagctacagcttcagacacctgctggagtacatcaacgagacccaccccggcaccgtggtgaccgtgctggacctgttcgacggcagagagagcctgagacccctgtgggagcaggtgcagggcttcagagaggccgtggtgcccatcatggccaaggccccccagggcgtgcacctgatctgctacagccagggcggcctggtgtgcagagccctgctgagcgtgatggacgaccacaacgtggacagcttcatcagcctgagcagcccccagatgggccagtacggcgacaccgactacctgaagtggctgttccccaccagcatgagaagcaacctgtacagaatctgctacagcccctggggccaggagttcagcatctgcaactactggcacgacccccaccacgacgacctgtacctgaacgccagcagcttcctggccctgatcaacggcgagagagaccaccccaacgccaccgtgtggagaaagaacttcctgagagtgggccacctggtgctgatcggcggccccgacgacggcgtgatcaccccctggcagagctag

SEQ ID NO: 92379 - DNA, 711 bp, synthetic construct; identical to SEQ ID NO: 92372
  misc_feature 1..711: note = Description of Artificial Sequence: Synthetic coding sequence
  source 1..711: mol_type = other DNA

SEQ ID NO: 92380 - DNA, 543 bp, synthetic construct; identical to SEQ ID NO: 92363
  misc_feature 1..543: note = Description of Artificial Sequence: Synthetic coding sequence
  source 1..543: mol_type = other DNA

SEQ ID NO: 92381 - DNA, 477 bp, synthetic construct; identical to SEQ ID NO: 92364
  misc_feature 1..477: note = Description of Artificial Sequence: Synthetic coding sequence
  source 1..477: mol_type = other DNA

SEQ ID NO: 92382 - DNA, 603 bp, synthetic construct; identical to SEQ ID NO: 92361
  misc_feature 1..603: note = Description of Artificial Sequence: Synthetic coding sequence
  source 1..603: mol_type = other DNA

SEQ ID NO: 92383 - DNA, 603 bp, synthetic construct
  misc_feature 1..603: note = Description of Artificial Sequence: Synthetic coding sequence
  source 1..603: mol_type = other DNA
atgctgggcctgtgcggccagagactgcccgccgcctgggtgctgctgctgctgcccttcctgcccctgctgctgctggccgcccccgccccccacagagccagctacaagcccgtgatcgtggtgcacggcctgttcgacagcagctacagcttcagacacctgctggagtacatcaacgagacccaccccggcaccgtggtgaccgtgctggacctgttcgacggcagagagagcctgagacccctgtgggagcaggtgcagggcttcagagaggccgtggtgcccatcatggccaaggccccccagggcgtgcacctgatctgctacagccagggcggcctggtgtgcagagccctgctgagcgtgatggacgaccacaacgtggacagcttcatcagcctgagcagcccccagatgggccagtacggcgacaccgactacctgaagtggctgttccccaccagcatgagaagcaacctgtacagaatctgctacagcccctggggccaggagttcagcatctgcaactactggcacgacccccaccacgacgacctgtacctgaacgccagcagcttcctggccctgatcaacggctag

SEQ ID NO: 92384 - DNA, 441 bp, synthetic construct
  misc_feature 1..441: note = Description of Artificial Sequence: Synthetic coding sequence
  source 1..441: mol_type = other DNA
atggacgaccacaacgtggacagcttcatcagcctgagcagcccccagatgggccagtacggcgacaccgactacctgaagtggctgttccccaccagcatgagaagcaacctgtacagaatctgctacagcccctggggccaggagttcagcatctgcaactactggcacgacccccaccacgacgacctgtacctgaacgccagcagcttcctggccctgatcaacggcgagagagaccaccccaacgccaccgtgtggagaaagaacttcctgagagtgggccacctggtgctgatcggcggccccgacgacggcgtgatcaccccctggcagagcagcttcttcggcttctacgacgccaacgagaccgtgctggagatggaggagcagctgcccgtgggcagcagcgtgaaggccaaccacggcgtgcagggctag

SEQ ID NO: 92385 - DNA, 477 bp, synthetic construct; identical to SEQ ID NO: 92364
  misc_feature 1..477: note = Description of Artificial Sequence: Synthetic coding sequence
  source 1..477: mol_type = other DNA

SEQ ID NO: 92386 - DNA, 909 bp, synthetic construct; identical to SEQ ID NO: 92354
  misc_feature 1..909: note = Description of Artificial Sequence: Synthetic coding sequence
  source 1..909: mol_type = other DNA

SEQ ID NO: 92387 - DNA, 909 bp, synthetic construct; identical to SEQ ID NO: 92354
  misc_feature 1..909: note = Description of Artificial Sequence: Synthetic coding sequence
  source 1..909: mol_type = other DNA

SEQ ID NO: 92388 - DNA, 909 bp, synthetic construct; identical to SEQ ID NO: 92354
  misc_feature 1..909: note = Description of Artificial Sequence: Synthetic coding sequence
  source 1..909: mol_type = other DNA

SEQ ID NO: 92389 - DNA, 282 bp, synthetic construct
  misc_feature 1..282: note = Description of Artificial Sequence: Synthetic coding sequence
  source 1..282: mol_type = other DNA
atgctgggcctgtggggccagagactgcccgccgcctgggtgctgctgctgctgcccttcctgcccctgctgctgctggccgcccccgccccccacagagagagctacaagcccgtgatcgtggtgcacggcctgttcgacagcagctacagcttcagacacctgctggagtacatcaacgagggcgccctgtgcgccggcctgtgcttcctgagctggatgatcaccacctggatcctgagcagccccagccccctgcacagatgggacagcatggagtag

SEQ ID NO: 92390 - DNA, 603 bp, synthetic construct; identical to SEQ ID NO: 92375
  misc_feature 1..603: note = Description of Artificial Sequence: Synthetic coding sequence
  source 1..603: mol_type = other DNA

SEQ ID NO: 92391 - DNA, 603 bp, synthetic construct; identical to SEQ ID NO: 92375
  misc_feature 1..603: note = Description of Artificial Sequence: Synthetic coding sequence
  source 1..603: mol_type = other DNA

SEQ ID NO: 92392 - DNA, 909 bp, synthetic construct; identical to SEQ ID NO: 92354
  misc_feature 1..909: note = Description of Artificial Sequence: Synthetic coding sequence
  source 1..909: mol_type = other DNA

SEQ ID NO: 92393 - DNA, 906 bp, synthetic construct
  misc_feature 1..906: note = Description of Artificial Sequence: Synthetic coding sequence
  source 1..906: mol_type = other DNA
atgctgggcctgtgcggccagagactgcccgccgcctgggtgctgctgctgctgcccttcctgcccctgctgctgctggccgcccccgccccccacagagccagctacaagcccgtgatcgtggtgcacggcctgttcgacagcagctacagcttcagacacctgctggagtacatcaacgagacccaccccggcaccgtggtgaccgtgctggacctgttcgacggcagagagagcctgagacccctgtgggagcaggtgcagggcttcagagaggccgtggtgcccatcatggccaaggccccccagggcgtgcacctgatctgctacagccagggcggcctggtgtgcagagccctgctgagcgtgatggacgaccacaacgtggacagcttcatcagcctgagcagcccccagatgggccagtacggcgacaccgactacctgaagtggctgttccccaccagcatgagaagcaacctgtacagaatctgctacagcccctggggccaggagttcagcatctgcaactactggcacgacccccaccacgacgacctgtacctgaacgccagcagcttcctggccctgatcaacggcgagagagaccaccccaacgccaccgtgtggagaaagaacttcctgagagtgggccacctggtgctgatcggcggccccgacgacggcgtgatcaccccctggcagagcagcttcttcggcttctacgacgccaacgagaccgtgctggagatggaggagcagctgcccgccagacccacccaccagagcgagctgctgctgctgagactggtgtgcctgaagccccccagaagaaagaagcccgcctgcagagtgcagagacagagcgagagctggggccccggcctgagctgcgccctgagctag

SEQ ID NO: 92394 - DNA, 477 bp, synthetic construct; identical to SEQ ID NO: 92362
  misc_feature 1..477: note = Description of Artificial Sequence: Synthetic coding sequence
  source 1..477: mol_type = other DNA

SEQ ID NO: 92395 - DNA, 543 bp, synthetic construct; identical to SEQ ID NO: 92363
  misc_feature 1..543: note = Description of Artificial Sequence: Synthetic coding sequence
  source 1..543: mol_type = other DNA

SEQ ID NO: 92396 - DNA, 603 bp, synthetic construct; identical to SEQ ID NO: 92375
  misc_feature 1..603: note = Description of Artificial Sequence: Synthetic coding sequence
  source 1..603: mol_type = other DNA

SEQ ID NO: 92397 - DNA, 909 bp, synthetic construct; identical to SEQ ID NO: 92354
  misc_feature 1..909: note = Description of Artificial Sequence: Synthetic coding sequence
  source 1..909: mol_type = other DNA

SEQ ID NO: 92398 - DNA, 909 bp, synthetic construct; identical to SEQ ID NO: 92354
  misc_feature 1..909: note = Description of Artificial Sequence: Synthetic coding sequence
  source 1..909: mol_type = other DNA

SEQ ID NO: 92399 - DNA, 282 bp, synthetic construct; identical to SEQ ID NO: 92358
  misc_feature 1..282: note = Description of Artificial Sequence: Synthetic coding sequence
  source 1..282: mol_type = other DNA

SEQ ID NO: 92400 - DNA, 282 bp, synthetic construct
  misc_feature 1..282: note = Description of Artificial Sequence: Synthetic coding sequence
  source 1..282: mol_type = other DNA
atgctgggcctgtgcggccagagactgcccgccgcctgggtgctgctgctgctgcccttcctgcccctgctgctgctggccgcccccgccccccacagagccagctacaagcccgtgatcgtggtgcacggcctgttcgacagcagctacagcttcagacacctgctggagtacatcaacgagggcgccctgtgcgccggcctgtgcttcctgagctggatgatcaccacctggatcctgagcagccccagccccctgcacagatgggacagcatggagtag

SEQ ID NO: 92401 - DNA, 909 bp, synthetic construct; identical to SEQ ID NO: 92354
  misc_feature 1..909: note = Description of Artificial Sequence: Synthetic coding sequence
  source 1..909: mol_type = other DNA

SEQ ID NO: 92402 - DNA, 909 bp, synthetic construct; identical to SEQ ID NO: 92354
  misc_feature 1..909: note = Description of Artificial Sequence: Synthetic coding sequence
  source 1..909: mol_type = other DNA

SEQ ID NO: 92403 - DNA, 543 bp, synthetic construct
  misc_feature 1..543: note = Description of Artificial Sequence: Synthetic coding sequence
  source 1..543: mol_type = other DNA
atgctgggcctgtggggccagagactgcccgccgcctgggtgctgctgctgctgcccttcctgcccctgctgctgctggccgcccccgccccccacagagagagctacaagcccgtgatcgtggtgcacggcctgttcgacagcagctacagcttcagacacctgctggagtacatcaacgagacccaccccggcaccgtggtgaccgtgctggacctgttcgacggcagagagagcctgagacccctgtgggagcaggtgcagggcttcagagaggccgtggtgcccatcatggccaaggccccccagggcgtgcacctgatctgctacagccagggcggcctggtgtgcagagccctgctgagcgtgatggacgaccacaacgtggacagcttcatcagcctgagcagcccccagatgggccagtacggcgacaccgactacctgaagtggctgttccccaccagcatgagaagcaacctgtacagaatctgctacagcccctggggccaggagttcagcatctgcaactactggcactag

SEQ ID NO: 92404 - DNA, 543 bp, synthetic construct; identical to SEQ ID NO: 92403
  misc_feature 1..543: note = Description of Artificial Sequence: Synthetic coding sequence
  source 1..543: mol_type = other DNA

SEQ ID NO: 92405 - DNA, 282 bp, synthetic construct; identical to SEQ ID NO: 92389
  misc_feature 1..282: note = Description of Artificial Sequence: Synthetic coding sequence
  source 1..282: mol_type = other DNA

SEQ ID NO: 92406 - DNA, 711 bp, synthetic construct; identical to SEQ ID NO: 92372
  misc_feature 1..711: note = Description of Artificial Sequence: Synthetic coding sequence
  source 1..711: mol_type = other DNA

SEQ ID NO: 92407 - DNA, 165 bp, synthetic construct
  misc_feature 1..165: note = Description of Artificial Sequence: Synthetic coding sequence
  source 1..165: mol_type = other DNA
tgacacgacgacctgtacctgaacgccagcagcttcctggccctgatcaacggcgagagagaccaccccaacgccaccgtgtggagaaagaacttcctgagagtgggccacctggtgctgatcggcggccccgacgacggcgtgatcaccccctggcagagctag

SEQ ID NO: 92408 - DNA, 711 bp, synthetic construct; identical to SEQ ID NO: 92372
  misc_feature 1..711: note = Description of Artificial Sequence: Synthetic coding sequence
  source 1..711: mol_type = other DNA

SEQ ID NO: 92409 - DNA, 909 bp, synthetic construct; identical to SEQ ID NO: 92354
  misc_feature 1..909: note = Description of Artificial Sequence: Synthetic coding sequence
  source 1..909: mol_type = other DNA

SEQ ID NO: 92410 - DNA, 909 bp, synthetic construct; identical to SEQ ID NO: 92354
  misc_feature 1..909: note = Description of Artificial Sequence: Synthetic coding sequence
  source 1..909: mol_type = other DNA

SEQ ID NO: 92411 - DNA, 909 bp, synthetic construct; identical to SEQ ID NO: 92354
  misc_feature 1..909: note = Description of Artificial Sequence: Synthetic coding sequence
  source 1..909: mol_type = other DNA

SEQ ID NO: 92412 - DNA, 441 bp, synthetic construct; identical to SEQ ID NO: 92384
  misc_feature 1..441: note = Description of Artificial Sequence: Synthetic coding sequence
  source 1..441: mol_type = other DNA

SEQ ID NO: 92413 - DNA, 927 bp, synthetic construct; identical to SEQ ID NO: 92349
  misc_feature 1..927: note = Description of Artificial Sequence: Synthetic coding sequence
  source 1..927: mol_type = other DNA

SEQ ID NO: 92414 - DNA, 882 bp, synthetic construct; identical to SEQ ID NO: 80184
  misc_feature 1..882: note = Description of Artificial Sequence: Synthetic coding sequence
  source 1..882: mol_type = other DNA

SEQ ID NO: 92415 - DNA, 906 bp, synthetic construct
  misc_feature 1..906: note = Description of Artificial Sequence: Synthetic coding sequence
  source 1..906: mol_type = other DNA
atgctgggcctgtggggccagagactgcccgccgcctgggtgctgctgctgctgcccttcctgcccctgctgctgctggccgcccccgccccccacagagccagctacaagcccgtgatcgtggtgcacggcctgttcgacagcagctacagcttcagacacctgctggagtacatcaacgagacccaccccggcaccgtggtgaccgtgctggacctgttcgacggcagagagagcctgagacccctgtgggagcaggtgcagggcttcagagaggccgtggtgcccatcatggccaaggccccccagggcgtgcacctgatctgctacagccagggcggcctggtgtgcagagccctgctgagcgtgatggacgaccacaacgtggacagcttcatcagcctgagcagcccccagatgggccagtacggcgacaccgactacctgaagtggctgttccccaccagcatgagaagcaacctgtacagaatctgctacagcccctggggccaggagttcagcatctgcaactactggcacgacccccaccacgacgacctgtacctgaacgccagcagcttcctggccctgatcaacggcgagagagaccaccccaacgccaccgtgtggagaaagaacttcctgagagtgggccacctggtgctgatcggcggccccgacgacggcgtgatcaccccctggcagagcagcttcttcggcttctacgacgccaacgagaccgtgctggagatggaggagcagctgcccgccagacccacccaccagagcgagctgctgctgctgagactggtgtgcctgaagccccccagaagaaagaagcccgcctgcagagtgcagagacagagcgagagctggggccccggcctgagctgcgccctgagctag

SEQ ID NO: 92416 - DNA, 909 bp, synthetic construct; identical to SEQ ID NO: 92351
  misc_feature 1..909: note = Description of Artificial Sequence: Synthetic coding sequence
  source 1..909: mol_type = other DNA

SEQ ID NO: 92417 - DNA, 441 bp, synthetic construct; identical to SEQ ID NO: 92384
  misc_feature 1..441: note = Description of Artificial Sequence: Synthetic coding sequence
  source 1..441: mol_type = other DNA

SEQ ID NO: 92418 - DNA, 882 bp, synthetic construct; identical to SEQ ID NO: 80184
  misc_feature 1..882: note = Description of Artificial Sequence: Synthetic coding sequence
  source 1..882: mol_type = other DNA

SEQ ID NO: 92419 - DNA, 906 bp, synthetic construct; identical to SEQ ID NO: 92415
  misc_feature 1..906: note = Description of Artificial Sequence: Synthetic coding sequence
  source 1..906: mol_type = other DNA

SEQ ID NO: 92420 - DNA, 441 bp, synthetic construct; identical to SEQ ID NO: 92384
  misc_feature 1..441: note = Description of Artificial Sequence: Synthetic coding sequence
  source 1..441: mol_type = other DNA

SEQ ID NO: 92421 - DNA, 906 bp, synthetic construct; identical to SEQ ID NO: 92415
  misc_feature 1..906: note = Description of Artificial Sequence: Synthetic coding sequence
  source 1..906: mol_type = other DNA

SEQ ID NO: 92422 - DNA, 441 bp, synthetic construct; identical to SEQ ID NO: 92384
  misc_feature 1..441: note = Description of Artificial Sequence: Synthetic coding sequence
  source 1..441: mol_type = other DNA

SEQ ID NO: 92423 - DNA, 882 bp, synthetic construct; identical to SEQ ID NO: 80184
  misc_feature 1..882: note = Description of Artificial Sequence: Synthetic coding sequence
  source 1..882: mol_type = other DNA

SEQ ID NO: 92424 - DNA, 882 bp, synthetic construct; identical to SEQ ID NO: 80184
  misc_feature 1..882: note = Description of Artificial Sequence: Synthetic coding sequence
  source 1..882: mol_type = other DNA

SEQ ID NO: 92425 - DNA, 909 bp, synthetic construct; identical to SEQ ID NO: 92354
  misc_feature 1..909: note = Description of Artificial Sequence: Synthetic coding sequence
  source 1..909: mol_type = other DNA

SEQ ID NO: 92426 - DNA, 441 bp, synthetic construct; identical to SEQ ID NO: 92384
  misc_feature 1..441: note = Description of Artificial Sequence: Synthetic coding sequence
  source 1..441: mol_type = other DNA

SEQ ID NO: 92427 - DNA, 909 bp, synthetic construct; identical to SEQ ID NO: 92354
  misc_feature 1..909: note = Description of Artificial Sequence: Synthetic coding sequence
  source 1..909: mol_type = other DNA

SEQ ID NO: 92428 - DNA, 441 bp, synthetic construct; identical to SEQ ID NO: 92384
  misc_feature 1..441: note = Description of Artificial Sequence: Synthetic coding sequence
  source 1..441: mol_type = other DNA

SEQ ID NO: 92429 - DNA, 906 bp, synthetic construct; identical to SEQ ID NO: 92415
  misc_feature 1..906: note = Description of Artificial Sequence: Synthetic coding sequence
  source 1..906: mol_type = other DNA

SEQ ID NO: 92430 - DNA, 906 bp, synthetic construct
  misc_feature 1..906: note = Description of Artificial Sequence: Synthetic coding sequence
  source 1..906: mol_type = other DNA
atgctgggcctgtggggccagagactgcccgccgcctgggtgctgctgctgctgcccttcctgcccctgctgctgctggccgcccccgccccccacagagagagctacaagcccgtgatcgtggtgcacggcctgttcgacagcagctacagcttcagacacctgctggagtacatcaacgagacccaccccggcaccgtggtgaccgtgctggacctgttcgacggcagagagagcctgagacccctgtgggagcaggtgcagggcttcagagaggccgtggtgcccatcatggccaaggccccccagggcgtgcacctgatctgctacagccagggcggcctggtgtgcagagccctgctgagcgtgatggacgaccacaacgtggacagcttcatcagcctgagcagcccccagatgggccagtacggcgacaccgactacctgaagtggctgttccccaccagcatgagaagcaacctgtacagaatctgctacagcccctggggccaggagttcagcatctgcaactactggcacgacccccaccacgacgacctgtacctgaacgccagcagcttcctggccctgatcaacggcgagagagaccaccccaacgccaccgtgtggagaaagaacttcctgagagtgggccacctggtgctgatcggcggccccgacgacggcgtgatcaccccctggcagagcagcttcttcggcttctacgacgccaacgagaccgtgctggagatggaggagcagctgcccgccagacccacccaccagagcgagctgctgctgctgagactggtgtgcctgaagccccccagaagaaagaagcccgcctgcagagtgcagagacagagcgagagctggggccccggcctgagctgcgccctgagctag

SEQ ID NO: 92431 - DNA, 906 bp, synthetic construct; identical to SEQ ID NO: 92415
  misc_feature 1..906: note = Description of Artificial Sequence: Synthetic coding sequence
  source 1..906: mol_type = other DNA

SEQ ID NO: 92432 - DNA, 909 bp, synthetic construct; identical to SEQ ID NO: 92354
  misc_feature 1..909: note = Description of Artificial Sequence: Synthetic coding sequence
  source 1..909: mol_type = other DNA

SEQ ID NO: 92433 - DNA, 3606 bp, synthetic construct
  misc_feature 1..3606: note = Description of Artificial Sequence: Synthetic coding sequence
  source 1..3606: mol_type = other DNA
atgaacttcgagggcctggaccccggcctggccgagtacgcccccgccatgcacagcgccctggaccccgtgctggacgcccacctgaaccccagcctgctgcagaacgtggagctggaccccgagggcgtggccctggaggccctgcccgtgcaggagagcgtgcacatcatggagggcgtgtacagcgagctgcacagcgtggtggccgaggtgggcgtgcccgtgagcgtgagccacttcgacctgcacgaggagatgctgtgggtgggcagccacggcggccacgccaccagcttcttcggccccgccctggagagatacagcagcttccaggtgaacggcagcgacgacatcagacagatccagagcctggagaacggcatcctgttcctgaccaagaacaacctgaagtacatggccagaggcggcctgatcatcttcgactacctgctggacgagaacgaggacatgcacagcctgctgctgaccgacagcagcaccctgctggtgggcggcctgcagaaccacatcatcgagatcgacctgaacaccgtgcaggagacccagaagtacgccgtggagacccccggcgtgaccatcatgagacagaccaacagattcttcttctgcggccacaccagcggcaaggtgagcctgagagacctgagaaccttcaaggtggagcacgagttcgacgccttcagcggcagcctgagcgacttcgacgtgcacggcaacctgctggccgcctgcggcttcagcagcagactgaccggcctggcctgcgacagattcctgaaggtgtacgacctgagaatgatgagagccatcacccccctgcaggtgcacgtggaccccgccttcctgagattcatccccacctacaccagcagactggccatcatcagccagagcggccagtgccagttctgcgagcccaccggcctggccaaccccgccgacatcttccacgtgaaccccgtgggccccctgctgatgaccttcgacgtgagcgccagcaagcaggccctggccttcggcgacagcgagggctgcgtgcacctgtggaccgacagccccgagcccagcttcaacccctacagcagagagaccgagttcgccctgccctgcctggtggacagcctgccccccctggactggagccaggacctgctgcccctgagcctgatccccgtgcccctgaccaccgacaccctgctgagcgactggcccgccgccaacagcgcccccgcccccagaagagccccccccgtggacgccgagatcctgagaaccatgaagaaggtgggcttcatcggctacgcccccaaccccagaaccagactgagaaaccagatcccctacagactgaaggagagcgacagcgagttcgacagcttcagccaggtgaccgagagccccgtgggcagagaggaggagccccacctgcacatggtgagcaagaagtacagaaaggtgaccatcaagtacagcaagctgggcctggaggacttcgacttcaagcactacaacaagaccctgttcgccggcctggagccccacatccccaacgcctactgcaactgcatgatccaggtgctgtacttcctggagcccgtgagatgcctgatccagaaccacctgtgccagaaggagttctgcctggcctgcgagctgggcttcctgttccacatgctggacctgagcagaggcgacccctgccagggcaacaacttcctgagagccttcagaaccatccccgaggccagcgccctgggcctgatcctggccgacagcgacgaggccagcggcaagggcaacctggccagactgatccagagatggaacagattcatcctgacccagctgcaccaggacatgcaggagctggagatcccccaggcctacagaggcgccggcggcagcttctgcagcagcggcgacagcgtgatcggccagctgttcagctgcgagatggagaactgcagcctgtgcagatgcggcagcgagaccgtgagagccagcagcaccctgctgttcaccctgagctaccccgacggcagcaagagcgacaagaccggcaagaactacgacttcgcccaggtgctgaagagaagcatctgcctggaccagaacacccaggcctggtgcgacacctgcgagaagtaccagcccaccatccagaccagaaacatcagacacctgcccgacatcctggtgatcaactgcgaggtgaacagcagcaaggaggccgacttctggagaatgcaggccgaggtggccttcaagatggccgtgaagaagcacggcggcgagatcagcaagaacaaggagttcgccctggccgactggaaggagctgggcagccccgagggcgtgctggtgtgccccagcatcgaggagctgaagaacgtgtggctgcccttcagcatcagaatgaagatgaccaagaacaagggcctggacgtgtgcaactggaccgacggcgacgagatgcagtggggccccgccagagccgaggaggagcacggcgtgtacgtgtacgacctgatggccaccgtggtgcacatcctggacagcagaaccggcggcagcctggtggcccacatcaaggtgggcgagacctaccaccagagaaaggagggcgtgacccaccagcagtggtacctgttcaacgacttcctgatcgagcccatcgacaagcacgaggccgtgcagttcgacatgaactggaaggtgcccgccatcctgtactacgtgaagagaaacctgaacagcagatacaacctgaacatcaagaaccccatcgaggccagcgtgctgctggccgaggccagcctggccagaaagcagagaaagacccacaccaccttcatccccctgatgctgaacgagatgccccagatcggcgacctggtgggcctggacgccgagttcgtgaccctgaacgaggaggaggccgagctgagaagcgacggcaccaagagcaccatcaagcccagccagatgagcgtggccagaatcacctgcgtgagaggccagggccccaacgagggcatccccttcatcgacgactacatcagcacccaggagcaggtggtggactacctgacccagtacagcggcatcaagcccggcgacctggacgccaagatcagcagcaagcacctgaccaccctgaagagcacctacctgaagctgagattcctgatcgacatcggcgtgaagttcgtgggccacggcctgcagaaggacttcagagtgatcaacctgatggtgcccaaggaccaggtgctggacaccgtgtacctgttccacatgcccagaaagagaatgatcagcctgagattcctggcctggtacttcctggacctgaagatccagggcgagacccacgacagcatcgaggacgccagaaccgccctgcagctgtacagaaagtacctggagctgagcaagaacggcaccgagcccgagagcttccacaaggtgctgaagggcctgtacgagaagggcagaaagatggactggaaggtgcccgagcccgagggccagaccagccccaagaacgccgccgtgttcagcagcgtgctggccctgtag

SEQ ID NO: 92434 - DNA, 3609 bp, synthetic construct
  misc_feature 1..3609: note = Description of Artificial Sequence: Synthetic coding sequence
  source 1..3609: mol_type = other DNA
atgaacttcgagggcctggaccccggcctggccgagtacgcccccgccatgcacagcgccctggaccccgtgctggacgcccacctgaaccccagcctgctgcagaacgtggagctggaccccgagggcgtggccctggaggccctgcccgtgcaggagagcgtgcacatcatggagggcgtgtacagcgagctgcacagcgtggtggccgaggtgggcgtgcccgtgagcgtgagccacttcgacctgcacgaggagatgctgtgggtgggcagccacggcggccacgccaccagcttcttcggccccgccctggagagatacagcagcttccaggtgaacggcagcgacgacatcagacagatccagagcctggagaacggcatcctgttcctgaccaagaacaacctgaagtacatggccagaggcggcctgatcatcttcgactacctgctggacgagaacgaggacatgcacagcctgctgctgaccgacagcagcaccctgctggtgggcggcctgcagaaccacatcatcgagatcgacctgaacaccgtgcaggagacccagaagtacgccgtggagacccccggcgtgaccatcatgagacagaccaacagattcttcttctgcggccacaccagcggcaaggtgagcctgagagacctgagaaccttcaaggtggagcacgagttcgacgccttcagcggcagcctgagcgacttcgacgtgcacggcaacctgctggccgcctgcggcttcagcagcagactgaccggcctggcctgcgacagattcctgaaggtgtacgacctgagaatgatgagagccatcacccccctgcaggtgcacgtggaccccgccttcctgagattcatccccacctacaccagcagactggccatcatcagccagagcggccagtgccagttctgcgagcccaccggcctggccaaccccgccgacatcttccacgtgaaccccgtgggccccctgctgatgaccttcgacgtgagcgccagcaagcaggccctggccttcggcgacagcgagggctgcgtgcacctgtggaccgacagccccgagcccagcttcaacccctacagcagagagaccgagttcgccctgccctgcctggtggacagcctgccccccctggactggagccaggacctgctgcccctgagcctgatccccgtgcccctgaccaccgacaccctgctgagcgactggcccgccgccaacagcgcccccgcccccagaagagccccccccgtggacgccgagatcctgagaaccatgaagaaggtgggcttcatcggctacgcccccaaccccagaaccagactgagaaaccagatcccctacagactgaaggagagcgacagcgagttcgacagcttcagccaggtgaccgagagccccgtgggcagagaggaggagccccacctgcacatggtgagcaagaagtacagaaaggtgaccatcaagtacagcaagctgggcctggaggacttcgacttcaagcactacaacaagaccctgttcgccggcctggagccccacatccccaacgcctactgcaactgcatgatccaggtgctgtacttcctggagcccgtgagatgcctgatccagaaccacctgtgccagaaggagttctgcctggcctgcgagctgggcttcctgttccacatgctggacctgagcagaggcgacccctgccagggcaacaacttcctgagagccttcagaaccatccccgaggccagcgccctgggcctgatcctggccgacagcgacgaggccagcggcaagggcaacctggccagactgatccagagatggaacagattcatcctgacccagctgcaccaggacatgcaggagctggagatcccccaggcctacagaggcgccggcggcagcagcttctgcagcagcggcgacagcgtgatcggccagctgttcagctgcgagatggagaactgcagcctgtgcagatgcggcagcgagaccgtgagagccagcagcaccctgctgttcaccctgagctaccccgacggcagcaagagcgacaagaccggcaagaactacgacttcgcccaggtgctgaagagaagcatctgcctggaccagaacacccaggcctggtgcgacacctgcgagaagtaccagcccaccatccagaccagaaacatcagacacctgcccgacatcctggtgatcaactgcgaggtgaacagcagcaaggaggccgacttctggagaatgcaggccgaggtggccttcaagatggccgtgaagaagcacggcggcgagatcagcaagaacaaggagttcgccctggccgactggaaggagctgggcagccccgagggcgtgctggtgtgccccagcatcgaggagctgaagaacgtgtggctgcccttcagcatcagaatgaagatgaccaagaacaagggcctggacgtgtgcaactggaccgacggcgacgagatgcagtggggccccgccagagccgaggaggagcacggcgtgtacgtgtacgacctgatggccaccgtggtgcacatcctggacagcagaaccggcggcagcctggtggcccacatcaaggtgggcgagacctaccaccagagaaaggagggcgtgacccaccagcagtggtacctgttcaacgacttcctgatcgagcccatcgacaagcacgaggccgtgcagttcgacatgaactggaaggtgcccgccatcctgtactacgtgaagagaaacctgaacagcagatacaacctgaacatcaagaaccccatcgaggccagcgtgctgctggccgaggccagcctggccagaaagcagagaaagacccacaccaccttcatccccctgatgctgaacgagatgccccagatcggcgacctggtgggcctggacgccgagttcgtgaccctgaacgaggaggaggccgagctgagaagcgacggcaccaagagcaccatcaagcccagccagatgagcgtggccagaatcacctgcgtgagaggccagggccccaacgagggcatccccttcatcgacgactacatcagcacccaggagcaggtggtggactacctgacccagtacagcggcatcaagcccggcgacctggacgccaagatcagcagcaagcacctgaccaccctgaagagcacctacctgaagctgagattcctgatcgacatcggcgtgaagttcgtgggccacggcctgcagaaggacttcagagtgatcaacctgatggtgcccaaggaccaggtgctggacaccgtgtacctgttccacatgcccagaaagagaatgatcagcctgagattcctggcctggtacttcctggacctgaagatccagggcgagacccacgacagcatcgaggacgccagaaccgccctgcagctgtacagaaagtacctggagctgagcaagaacggcaccgagcccgagagcttccacaaggtgctgaagggcctgtacgagaagggcagaaagatggactggaaggtgcccgagcccgagggccagaccagccccaagaacgccgccgtgttcagcagcgtgctggccctgtag

SEQ ID NO: 92435 - DNA, 3597 bp, synthetic construct
  misc_feature 1..3597: note = Description of Artificial Sequence: Synthetic coding sequence
  source 1..3597: mol_type = other DNA
atgaacttcgagggcctggaccccggcctggccgagtacgcccccgccatgcacagcgccctggaccccgtgctggacgcccacctgaaccccagcctgctgcagaacgtggagctggaccccgagggcgtggccctggaggccctgcccgtgcaggagagcgtgcacatcatggagggcgtgtacagcgagctgcacagcgtggtggccgaggtgggcgtgcccgtgagcgtgagccacttcgacctgcacgaggagatgctgtgggtgggcagccacggcggccacgccaccagcttcttcggccccgccctggagagatacagcagcttccaggtgaacggcagcgacgacatcagacagatccagagcctggagaacggcatcctgttcctgaccaagaacaacctgaagtacatggccagaggcggcctgatcatcttcgactacctgctggacgagaacgaggacatgcacagcctgctgctgaccgacagcagcaccctgctggtgggcggcctgcagaaccacatcatcgagatcgacctgaacaccgtgcaggagacccagaagtacgccgtggagacccccggcgtgaccatcatgagacagaccaacagattcttcttctgcggccacaccagcggcaaggtgagcctgagagacctgagaaccttcaaggtggagcacgagttcgacgccttcagcggcagcctgagcgacttcgacgtgcacggcaacctgctggccgcctgcggcttcagcagcagactgaccggcctggcctgcgacagattcctgaaggtgtacgacctgagaatgatgagagccatcacccccctgcaggtgcacgtggaccccgccttcctgagattcatccccacctacaccagcagactggccatcatcagccagagcggccagtgccagttctgcgagcccaccggcctggccaaccccgccgacatcttccacgtgaaccccgtgggccccctgctgatgaccttcgacgtgagcgccagcaagcaggccctggccttcggcgacagcgagggctgcgtgcacctgtggaccgacagccccgagcccagcttcaacccctacagcagagagaccgagttcgccctgccctgcctggtggacagcctgccccccctggactggagccaggacctgctgcccctgagcctgatccccgtgcccctgaccaccgacaccctgctgagcgactggcccgccgccaacagcgcccccgcccccagaagagccccccccgtggacgccgagatcctgagaaccatgaagaaggtgggcttcatcggctacgcccccaaccccagaaccagactgagaaaccagatcccctacagactgaaggagagcgacagcgagttcgacagcttcagccaggtgaccgagagccccgtgggcagagaggaggagccccacctgcacatggtgagcaagaagtacagaaaggtgaccatcaagtacagcaagctgggcctggaggacttcgacttcaagcactacaacaagaccctgttcgccggcctggagccccacatccccaacgcctactgcaactgcatgatccaggtgctgtacttcctggagcccgtgagatgcctgatccagaaccacctgtgccagaaggagttctgcctggcctgcgagctgggcttcctgttccacatgctggacctgagcagaggcgacccctgccagggcaacaacttcctgagagccttcagaaccatccccgaggccagcgccctgggcctgatcctggccgacagcgacgaggccagcggcaagggcaacctggccagactgatccagagatggaacagattcatcctgacccagctgcaccaggacatgcaggagctggagatcccccaggcctacagaggcgccggcggcagcagcttctgcagcagcggcgacagcgtgatcggccagctgttcagctgcgagatggagaactgcagcctgtgcagatgcggcagcgagaccgtgagagccagcagcaccctgctgttcaccctgagctaccccgacgacaagaccggcaagaactacgacttcgcccaggtgctgaagagaagcatctgcctggaccagaacacccaggcctggtgcgacacctgcgagaagtaccagcccaccatccagaccagaaacatcagacacctgcccgacatcctggtgatcaactgcgaggtgaacagcagcaaggaggccgacttctggagaatgcaggccgaggtggccttcaagatggccgtgaagaagcacggcggcgagatcagcaagaacaaggagttcgccctggccgactggaaggagctgggcagccccgagggcgtgctggtgtgccccagcatcgaggagctgaagaacgtgtggctgcccttcagcatcagaatgaagatgaccaagaacaagggcctggacgtgtgcaactggaccgacggcgacgagatgcagtggggccccgccagagccgaggaggagcacggcgtgtacgtgtacgacctgatggccaccgtggtgcacatcctggacagcagaaccggcggcagcctggtggcccacatcaaggtgggcgagacctaccaccagagaaaggagggcgtgacccaccagcagtggtacctgttcaacgacttcctgatcgagcccatcgacaagcacgaggccgtgcagttcgacatgaactggaaggtgcccgccatcctgtactacgtgaagagaaacctgaacagcagatacaacctgaacatcaagaaccccatcgaggccagcgtgctgctggccgaggccagcctggccagaaagcagagaaagacccacaccaccttcatccccctgatgctgaacgagatgccccagatcggcgacctggtgggcctggacgccgagttcgtgaccctgaacgaggaggaggccgagctgagaagcgacggcaccaagagcaccatcaagcccagccagatgagcgtggccagaatcacctgcgtgagaggccagggccccaacgagggcatccccttcatcgacgactacatcagcacccaggagcaggtggtggactacctgacccagtacagcggcatcaagcccggcgacctggacgccaagatcagcagcaagcacctgaccaccctgaagagcacctacctgaagctgagattcctgatcgacatcggcgtgaagttcgtgggccacggcctgcagaaggacttcagagtgatcaacctgatggtgcccaaggaccaggtgctggacaccgtgtacctgttccacatgcccagaaagagaatgatcagcctgagattcctggcctggtacttcctggacctgaagatccagggcgagacccacgacagcatcgaggacgccagaaccgccctgcagctgtacagaaagtacctggagctgagcaagaacggcaccgagcccgagagcttccacaaggtgctgaagggcctgtacgagaagggcagaaagatggactggaaggtgcccgagcccgagggccagaccagccccaagaacgccgccgtgttcagcagcgtgctggccctgtag

SEQ ID NO: 92436 - DNA, 3609 bp, synthetic construct; identical to SEQ ID NO: 92434
  misc_feature 1..3609: note = Description of Artificial Sequence: Synthetic coding sequence
  source 1..3609: mol_type = other DNA

SEQ ID NO: 92437 - DNA, 987 bp, synthetic construct
  misc_feature 1..987: note = Description of Artificial Sequence: Synthetic coding sequence
  source 1..987: mol_type = other DNA
atggacgccgtgctgctggagcacttccccggcggcctggacgccttccccagcagctacttcgacgaggacgacttcttcaccgaccagagcagcagagaccccctggaggacggcgacgagctgctggccgacgagcaggccgaggtggagttcctgagccaccagctgcacgagtactgctacagagacggcgcctgcctgctgctgcagcccgccccccccgccgcccccctggccctggccccccccagcagcggcggcctgggcgagcccgacgacggcggcggcggcggctactgctgcgagaccggcgccccccccggcggcttcccctacagccccggcagcccccccagctgcctggcctacccctgcgccggcgccgccgtgctgagccccggcgccagactgagaggcctgagcggcgccgccgccgccgccgccagaagaagaagaagagtgagaagcgaggccgagctgcagcagctgagacaggccgccaacgtgagagagagaagaagaatgcagagcatcaacgacgccttcgagggcctgagaagccacatccccaccctgccctacgagaagagactgagcaaggtggacaccctgagactggccatcggctacatcaacttcctgagcgagctggtgcaggccgacctgcccctgagaggcggcggcgccggcggctgcggcggccccggcggcggcggcagactgggcggcgacagccccggcagccaggcccagaaggtgatcatctgccacagaggcaccagaagccccagccccagcgaccccgactacggcctgccccccctggccggccacagcctgagctggaccgacgagaagcagctgaaggagcagaacatcatcagaaccgccaaggtgtggacccccgaggaccccagaaagctgaacagcaagagcagcttcaacaacatcgagaacgagccccccttcgagttcgtgagctag

SEQ ID NO: 92438 - DNA, 852 bp, synthetic construct
  misc_feature 1..852: note = Description of Artificial Sequence: Synthetic coding sequence
  source 1..852: mol_type = other DNA
atgaacggcgaggagcagtactacgccgccacccagctgtacaaggacccctgcgccttccagagaggccccgcccccgagttcagcgccagcccccccgcctgcctgtacatgggcagacagcccccccccccccccccccaccccttccccggcgccctgggcgccctggagcagggcagcccccccgacatcagcccctacgaggtgccccccctggccgacgaccccgccgtggcccacctgcaccaccacctgcccgcccagctggccctgccccacccccccgccggccccttccccgagggcgccgagcccggcgtgctggaggagcccaacagagtgcagctgcccttcccctggatgaagagcaccaaggcccacgcctggaagggccagtgggccggcggcgcctacgccgccgagcccgaggagaacaagagaaccagaaccgcctacaccagagcccagctgctggagctggagaaggagttcctgttcaacaagtacatcagcagacccagaagagtggagctggccgtgatgctgaacctgaccgagagacacatcaagatctggttccagaacagaagaatgaagtggaagaaggaggaggacaagaagagaggcggcggcaccgccgtgggcggcggcggcgtggccgagcccgagcaggactgcgccgtgaccagcggcgaggagctgctggccctgccccccccccccccccccggcggcgccgtgccccccgccgcccccgtggccgccagagagggcagactgccccccggcctgagcgccagcccccagcccagcagcgtggcccccagaagaccccaggagcccagatag

SEQ ID NO: 92439 - DNA, 1398 bp, synthetic construct
  misc_feature 1..1398: note = Description of Artificial Sequence: Synthetic coding sequence
  source 1..1398: mol_type = other DNA
atgctgcccctgtggaccctgagcctgctgctgggcgccgtggccggcaaggaggtgtgctacgagagactgggctgcttcagcgacgacagcccctggagcggcatcaccgagagacccctgcacatcctgccctggagccccaaggacgtgaacaccagattcctgctgtacaccaacgagaaccccaacaacttccaggaggtggccgccgacagcagcagcatcagcggcagcaacttcaagaccaacagaaagaccagattcatcatccacggcttcatcgacaagggcgaggagaactggctggccaacgtgtgcaagaacctgttcaaggtggagagcgtgaactgcatctgcgtggactggaagggcggcagcagaaccggctacacccaggccagccagaacatcagaatcgtgggcgccgaggtggcctacttcgtggagttcctgcagagcgccttcggctacagccccagcaacgtgcacgtgatcggccacagcctgggcgcccacgccgccggcgaggccggcagaagaaccaacggcaccatcggcagaatcaccggcctggaccccgccgagccctgcttccagggcacccccgagctggtgagactggaccccagcgacgccaagttcgtggacgtgatccacaccgacggcgcccccatcgtgcccaacctgggcttcggcatgagccaggtggtgggccacctggacttcttccccaacggcggcgtggagatgcccggctgcaagaagaacatcctgagccagatcgtggacatcgacggcatctgggagggcaccagagacttcgccgcctgcaaccacctgagaagctacaagtactacaccgacagcatcgtgaaccccgacggcttcgccggcttcccctgcgccagctacaacgtgttcaccgccaacaagtgcttcccctgccccagcggcggctgcccccagatgggccactacgccgacagataccccggcaagaccaacgacgtgggccagaagttctacctggacaccggcgacgccagcaacttcgccagatggagatacaaggtgagcgtgaccctgagcggcaagaaggtgaccggccacatcctggtgagcctgttcggcaacaagggcaacagcaagcagtacgagatcttcaagggcaccctgaagcccgacagcacccacagcaacgagttcgacagcgacgtggacgtgggcgacctgcagatggtgaagttcatctggtacaacaacgtgatcaaccccaccctgcccagagtgggcgccagcaagatcatcgtggagaccaacgtgggcaagcagttcaacttctgcagccccgagaccgtgagagaggaggtgctgctgaccctgaccccctgctag

SEQ ID NO: 92440 - DNA, 3372 bp, synthetic construct
  misc_feature 1..3372: note = Description of Artificial Sequence: Synthetic coding sequence
  source 1..3372: mol_type = other DNA
atgaacagccccaacgagagcgccgacggcatgagcggcagagagcccagcctggagatcctgcccagaaccagcctgcacagcatccccgtgaccgtggaggtgaagcccgtgctgcccagagccatgcccagcagcatgggcggcggcggcggcggcagccccagccccgtggagctgagaggcgccctggtgggcagcgtggaccccaccctgagagagcagcagctgcagcaggagctgctggccctgaagcagcagcagcagctgcagaagcagctgctgttcgccgagttccagaagcagcacgaccacctgaccagacagcacgaggtgcagctgcagaagcacctgaagcagcagcaggagatgctggccgccaagcagcagcaggagatgctggccgccaagagacagcaggagctggagcagcagagacagagagagcagcagagacaggaggagctggagaagcagagactggagcagcagctgctgatcctgagaaacaaggagaagagcaaggagagcgccatcgccagcaccgaggtgaagctgagactgcaggagttcctgctgagcaagagcaaggagcccacccccggcggcctgaaccacagcctgccccagcaccccaagtgctggggcgcccaccacgccagcctggaccagagcagccccccccagagcggcccccccggcaccccccccagctacaagctgcccctgcccggcccctacgacagcagagacgacttccccctgagaaagaccgccagcgagcccaacctgaaggtgagaagcagactgaagcagaaggtggccgagagaagaagcagccccctgctgagaagaaaggacggcaccgtgatcagcaccttcaagaagagagccgtggagatcaccggcgccggccccggcgccagcagcgtgtgcaacagcgcccccggcagcggccccagcagccccaacagcagccacagcaccatcgccgagaacggcttcaccggcagcgtgcccaacatccccaccgagatgctgccccagcacagagccctgcccctggacagcagccccaaccagttcagcctgtacaccagccccagcctgcccaacatcagcctgggcctgcaggccaccgtgaccgtgaccaacagccacctgaccgccagccccaagctgagcacccagcaggaggccgagagacaggccctgcagagcctgagacagggcggcaccctgaccggcaagttcatgagcaccagcagcatccccggctgcctgctgggcgtggccctggagggcgacggcagcccccacggccacgccagcctgctgcagcacgtgctgctgctggagcaggccagacagcagagcaccctgatcgccgtgcccctgcacggccagagccccctggtgaccggcgagagagtggccaccagcatgagaaccgtgggcaagctgcccagacacagacccctgagcagaacccagagcagccccctgccccagagcccccaggccctgcagcagctggtgatgcagcagcagcaccagcagttcctggagaagcagaagcagcagcagctgcagctgggcaagatcctgaccaagaccggcgagctgcccagacagcccaccacccaccccgaggagaccgaggaggagctgaccgagcagcaggaggtgctgctgggcgagggcgccctgaccatgcccagagagggcagcaccgagagcgagagcacccaggaggacctggaggaggaggacgaggaggacgacggcgaggaggaggaggactgcatccaggtgaaggacgaggagggcgagagcggcgccgaggagggccccgacctggaggagcccggcgccggctacaagaagctgttcagcgacgcccagcccctgcagcccctgcaggtgtaccaggcccccctgagcctggccaccgtgccccaccaggccctgggcagaacccagagcagccccgccgcccccggcggcatgaagagcccccccgaccagcccgtgaagcacctgttcaccaccggcgtggtgtacgacaccttcatgctgaagcaccagtgcatgtgcggcaacacccacgtgcaccccgagcacgccggcagaatccagagcatctggagcagactgcaggagaccggcctgctgagcaagtgcgagagaatcagaggcagaaaggccaccctggacgagatccagaccgtgcacagcgagtaccacaccctgctgtacggcaccagccccctgaacagacagaagctggacagcaagaagctgctgggccccatcagccagaagatgtacgccgtgctgccctgcggcggcatcggcgtggacagcgacaccgtgtggaacgagatgcacagcagcagcgccgtgagaatggccgtgggctgcctgctggagctggccttcaaggtggccgccggcgagctgaagaacggcttcgccatcatcagaccccccggccaccacgccgaggagagcaccgccatgggcttctgcttcttcaacagcgtggccatcaccgccaagctgctgcagcagaagctgaacgtgggcaaggtgctgatcgtggactgggacatccaccacggcaacggcacccagcaggccttctacaacgaccccagcgtgctgtacatcagcctgcacagatacgacaacggcaacttcttccccggcagcggcgcccccgaggaggtgggcggcggccccggcgtgggctacaacgtgaacgtggcctggaccggcggcgtggacccccccatcggcgacgtggagtacctgaccgccttcagaaccgtggtgatgcccatcgcccacgagttcagccccgacgtggtgctggtgagcgccggcttcgacgccgtggagggccacctgagccccctgggcggctacagcgtgaccgccagatgcttcggccacctgaccagacagctgatgaccctggccggcggcagagtggtgctggccctggagggcggccacgacctgaccgccatctgcgacgccagcgaggcctgcgtgagcgccctgctgagcgtggagctgcagcccctggacgaggccgtgctgcagcagaagcccaacatcaacgccgtggccaccctggagaaggtgatcgagatccagagcaagcactggagctgcgtgcagaagttcgccgccggcctgggcagaagcctgagagaggcccaggccggcgagaccgaggaggccgagaccgtgagcgccatggccctgctgagcgtgggcgccgagcaggcccaggccgccgccgccagagagcacagccccagacccgccgaggagcccatggagcaggagcccgccctgtag

SEQ ID NO: 92441 - DNA, 1128 bp, synthetic construct
  misc_feature 1..1128: note = Description of Artificial Sequence: Synthetic coding sequence
  source 1..1128: mol_type = other DNA
atgaacaccagccacctgctggccctgctgctgcccaagagcccccagggcgagaacagaagcaagcccctgggcaccccctacaacttcagcgagcactgccaggacagcgtggacgtgatggtgttcatcgtgaccagctacagcatcgagaccgtggtgggcgtgctgggcaacctgtgcctgatgtgcgtgaccgtgagacagaaggagaaggccaacgtgaccaacctgctgatcgccaacctggccttcagcgacttcctgatgtgcctgctgtgccagcccctgaccgccgtgtacaccatcatggactactggatcttcggcgagaccctgtgcaagatgagcgccttcatccagtgcatgagcgtgaccgtgagcatcctgagcctggtgctggtggccctggagagacaccagctgatcatcaaccccaccggctggaagcccagcatcagccaggcctacctgggcatcgtgctgatctgggtgatcgcctgcgtgctgagcctgcccttcctggccaacagcatcctggagaacgtgttccacaagaaccacagcaaggccctggagttcctggccgacaaggtggtgtgcaccgagagctggcccctggcccaccacagaaccatctacaccaccttcctgctgctgttccagtactgcctgcccctgggcttcatcctggtgtgctacgccagaatctacagaagactgcagagacagggcagagtgttccacaagggcacctacagcctgagagccggccacatgaagcaggtgaacgtggtgctggtggtgatggtggtggccttcgccgtgctgtggctgcccctgcacgtgttcaacagcctggaggactggcaccacgaggccatccccatctgccacggcaacctgatcttcctggtgtgccacctgctggccatggccagcacctgcgtgaaccccttcatctacggcttcctgaacaccaacttcaagaaggagatcaaggccctggtgctgacctgccagcagagcgcccccctggaggagagcgagcacctgcccctgagcaccgtgcacaccgaggtgagcaagggcagcctgagactgagcggcagaagcaaccccatctag

SEQ ID NO: 92442 - DNA, 1128 bp, synthetic construct; identical to SEQ ID NO: 92441
  misc_feature 1..1128: note = Description of Artificial Sequence: Synthetic coding sequence
  source 1..1128: mol_type = other DNA

SEQ ID NO: 92443 - DNA, 1797 bp, synthetic construct
  misc_feature 1..1797: note = Description of Artificial Sequence: Synthetic coding sequence
  source 1..1797: mol_type = other DNA
atgctgaagctggtgggcggcggcggcggccaggactgggcctgcagcgtggccggcaccagcctgggcggcgaggaggccgccttcgaggtggccagacccggcgaccagggcaaggccggcggcggcagccccggctggggctgcgccggcatccccgacagcgcccccggcgccggcgtgctgcaggccggcgccgtgggccccgccagaggcggccagggcgccgaggaggtgggcgagagcgccggcggcggcgaggagagaagagtgagacacccccaggcccccgccctgagactgctgaacagaaagccccagggcggcagcggcgagatcaagacccccgagaacgacctgcagagaggcagactgagcagaggccccagaaccgccccccccgcccccggcatgggcgacagaagcggccagcaggagagaagcgtgccccacagccccggcgcccccgtgggcaccagcgccgccgccgtgaacggcctgctgcacaacggcttccaccccccccccgtgcagcccccccacgtgtgcagcagaggccccgtgggcggcagcgacgccgccccccagagactgcccctgctgcccgagctgcagccccagcccctgctgccccagcacgacagccccgccaagaagtgcagactgagaagaagaatggacagcggcagaaagaacagaccccccttcccctggttcggcatggacatcggcggcaccctggtgaagctggtgtacttcgagcccaaggacatcaccgccgaggaggagcaggaggaggtggagaacctgaagagcatcagaaagtacctgaccagcaacaccgcctacggcaagaccggcatcagagacgtgcacctggagctgaagaacctgaccatgtgcggcagaaagggcaacctgcacttcatcagattccccagctgcgccatgcacagattcatccagatgggcagcgagaagaacttcagcagcctgcacaccaccctgtgcgccaccggcggcggcgccttcaagttcgaggaggacttcagaatgatcgccgacctgcagctgcacaagctggacgagctggactgcctgatccagggcctgctgtacgtggacagcgtgggcttcaacggcaagcccgagtgctactacttcgagaaccccaccaaccccgagctgtgccagaagaagccctactgcctggacaacccctaccccatgctgctggtgaacatgggcagcggcgtgagcatcctggccgtgtacagcaaggacaactacaagagagtgaccggcaccagcctgggcggcggcaccttcctgggcctgtgctgcctgctgaccggctgcgagaccttcgaggaggccctggagatggccgccaagggcgacagcaccaacgtggacaagctggtgaaggacatctacggcggcgactacgagagattcggcctgcagggcagcgccgtggccagcagcttcggcaacatgatgagcaaggagaagagagacagcatcagcaaggaggacctggccagagccaccctggtgaccatcaccaacaacatcggcagcatcgccagaatgtgcgccctgaacgagaacatcgacagagtggtgttcgtgggcaacttcctgagaatcaacatggtgagcatgaagctgctggcctacgccatggacttctggagcaagggccagctgaaggccctgttcctggagcacgagggctacttcggcgccgtgggcgccctgctggagctgttcaagatgaccgacgacaagtag

SEQ ID NO: 92444 - DNA, 945 bp, synthetic construct
  misc_feature 1..945: note = Description of Artificial Sequence: Synthetic coding sequence
  source 1..945: mol_type = other DNA
atgaagctgatcaacggcaagaagcagaccttcccctggttcggcatggacatcggcggcaccctggtgaagctggtgtacttcgagcccaaggacatcaccgccgaggaggagcaggaggaggtggagaacctgaagagcatcagaaagtacctgaccagcaacaccgcctacggcaagaccggcatcagagacgtgcacctggagctgaagaacctgaccatgtgcggcagaaagggcaacctgcacttcatcagattccccagctgcgccatgcacagattcatccagatgggcagcgagaagaacttcagcagcctgcacaccaccctgtgcgccaccggcggcggcgccttcaagttcgaggaggacttcagaatgatcgccgacctgcagctgcacaagctggacgagctggactgcctgatccagggcctgctgtacgtggacagcgtgggcttcaacggcaagcccgagtgctactacttcgagaaccccaccaaccccgagctgtgccagaagaagccctactgcctggacaacccctaccccatgctgctggtgaacatgggcagcggcgtgagcatcctggccgtgtacagcaaggacaactacaagagagtgaccggcaccagcttcggcaacatgatgagcaaggagaagagagacagcatcagcaaggaggacctggccagagccaccctggtgaccatcaccaacaacatcggcagcatcgccagaatgtgcgccctgaacgagaacatcgacagagtggtgttcgtgggcaacttcctgagaatcaacatggtgagcatgaagctgctggcctacgccatggacttctggagcaagggccagctgaaggccctgttcctggagcacgagggctacttcggcgccgtgggcgccctgctggagctgttcaagatgaccgacgacaagtag

SEQ ID NO: 92445 - DNA, 1122 bp, synthetic construct
  misc_feature 1..1122: note = Description of Artificial Sequence: Synthetic coding sequence
  source 1..1122: mol_type = other DNA
atgaagctgatcaacggcaagaagcagaccttcccctggttcggcatggacatcggcggcaccctggtgaagctggtgtacttcgagcccaaggacatcaccgccgaggaggagcaggaggaggtggagaacctgaagagcatcagaaagtacctgaccagcaacaccgcctacggcaagaccggcatcagagacgtgcacctggagctgaagaacctgaccatgtgcggcagaaagggcaacctgcacttcatcagattccccagctgcgccatgcacagattcatccagatgggcagcgagaagaacttcagcagcctgcacaccaccctgtgcgccaccggcggcggcgccttcaagttcgaggaggacttcagaatgatcgccgacctgcagctgcacaagctggacgagctggactgcctgatccagggcctgctgtacgtggacagcgtgggcttcaacggcaagcccgagtgctactacttcgagaaccccaccaaccccgagctgtgccagaagaagccctactgcctggacaacccctaccccatgctgctggtgaacatgggcagcggcgtgagcatcctggccgtgtacagcaaggacaactacaagagagtgaccggcaccagcctgggcggcggcaccttcctgggcctgtgctgcctgctgaccggctgcgagaccttcgaggaggccctggagatggccgccaagggcgacagcaccaacgtggacaagctggtgaaggacatctacggcggcgactacgagagattcggcctgcagggcagcgccgtggccagcagcttcggcaacatgatgagcaaggagaagagagacagcatcagcaaggaggacctggccagagccaccctggtgaccatcaccaacaacatcggcagcatcgccagaatgtgcgccctgaacgagaacatcgacagagtggtgttcgtgggcaacttcctgagaatcaacatggtgagcatgaagctgctggcctacgccatggacttctggagcaagggccagctgaaggccctgttcctggagcacgagggctacttcggcgccgtgggcgccctgctggagctgttcaagatgaccgacgacaagtag

SEQ ID NO: 92446 - DNA, 1203 bp, synthetic construct
  misc_feature 1..1203: note = Description of Artificial Sequence: Synthetic coding sequence
  source 1..1203: mol_type = other DNA
atggccaagagcaagcacgccctgctgcccttctgccacggcatgatgcagcaggagggcctgcaccagatgcagagcctggacctgggcctgctgagcctgcagaacagcttcccctggttcggcatggacatcggcggcaccctggtgaagctggtgtacttcgagcccaaggacatcaccgccgaggaggagcaggaggaggtggagaacctgaagagcatcagaaagtacctgaccagcaacaccgcctacggcaagaccggcatcagagacgtgcacctggagctgaagaacctgaccatgtgcggcagaaagggcaacctgcacttcatcagattccccagctgcgccatgcacagattcatccagatgggcagcgagaagaacttcagcagcctgcacaccaccctgtgcgccaccggcggcggcgccttcaagttcgaggaggacttcagaatgatcgccgacctgcagctgcacaagctggacgagctggactgcctgatccagggcctgctgtacgtggacagcgtgggcttcaacggcaagcccgagtgctactacttcgagaaccccaccaaccccgagctgtgccagaagaagccctactgcctggacaacccctaccccatgctgctggtgaacatgggcagcggcgtgagcatcctggccgtgtacagcaaggacaactacaagagagtgaccggcaccagcctgggcggcggcaccttcctgggcctgtgctgcctgctgaccggctgcgagaccttcgaggaggccctggagatggccgccaagggcgacagcaccaacgtggacaagctggtgaaggacatctacggcggcgactacgagagattcggcctgcagggcagcgccgtggccagcagcttcggcaacatgatgagcaaggagaagagagacagcatcagcaaggaggacctggccagagccaccctggtgaccatcaccaacaacatcggcagcatcgccagaatgtgcgccctgaacgagaacatcgacagagtggtgttcgtgggcaacttcctgagaatcaacatggtgagcatgaagctgctggcctacgccatggacttctggagcaagggccagctgaaggccctgttcctggagcacgagggctacttcggcgccgtgggcgccctgctggagctgttcaagatgaccgacgacaagtag

SEQ ID NO: 92447 - DNA, 1386 bp, synthetic construct
  misc_feature 1..1386: note = Description of Artificial Sequence: Synthetic coding sequence
  source 1..1386: mol_type = other DNA
atgggcgacagaagcggccagcaggagagaagcgtgccccacagccccggcgcccccgtgggcaccagcgccgccgccgtgaacggcctgctgcacaacggcttccaccccccccccgtgcagcccccccacgtgtgcagcagaggccccgtgggcggcagcgacgccgccccccagagactgcccctgctgcccgagctgcagccccagcccctgctgccccagcacgacagccccgccaagaagtgcagactgagaagaagaatggacagcggcagaaagaacagaccccccttcccctggttcggcatggacatcggcggcaccctggtgaagctggtgtacttcgagcccaaggacatcaccgccgaggaggagcaggaggaggtggagaacctgaagagcatcagaaagtacctgaccagcaacaccgcctacggcaagaccggcatcagagacgtgcacctggagctgaagaacctgaccatgtgcggcagaaagggcaacctgcacttcatcagattccccagctgcgccatgcacagattcatccagatgggcagcgagaagaacttcagcagcctgcacaccaccctgtgcgccaccggcggcggcgccttcaagttcgaggaggacttcagaatgatcgccgacctgcagctgcacaagctggacgagctggactgcctgatccagggcctgctgtacgtggacagcgtgggcttcaacggcaagcccgagtgctactacttcgagaaccccaccaaccccgagctgtgccagaagaagccctactgcctggacaacccctaccccatgctgctggtgaacatgggcagcggcgtgagcatcctggccgtgtacagcaaggacaactacaagagagtgaccggcaccagcctgggcggcggcaccttcctgggcctgtgctgcctgctgaccggctgcgagaccttcgaggaggccctggagatggccgccaagggcgacagcaccaacgtggacaagctggtgaaggacatctacggcggcgactacgagagattcggcctgcagggcagcgccgtggccagcagcttcggcaacatgatgagcaaggagaagagagacagcatcagcaaggaggacctggccagagccaccctggtgaccatcaccaacaacatcggcagcatcgccagaatgtgcgccctgaacgagaacatcgacagagtggtgttcgtgggcaacttcctgagaatcaacatggtgagcatgaagctgctggcctacgccatggacttctggagcaagggccagctgaaggccctgttcctggagcacgagggctacttcggcgccgtgggcgccctgctggagctgttcaagatgaccgacgacaagtag

SEQ ID NO: 92448 - DNA, 1713 bp, synthetic construct
  misc_feature 1..1713: note = Description of Artificial Sequence: Synthetic coding sequence
  source 1..1713: mol_type = other DNA
atgagaagactgggccccttccaccccagagtgcactgggccgccccccccagcctgagcagcggcctgcacagactgctgttcctgagaggcaccagaatccccagcagcaccaccctgagcccccccagacacgacagcctgagcctggacggcggcaccgtgaacccccccagagtgagagagcccaccggcagagaggccttcggccccagccccgccagcagcgactggctgcccgccagatggagaaacggcagaggcggcagacccagagccagactgtgcagcggctggaccgccgccgaggaggccagaagaaaccccaccctgggcggcctgctgggcagacagagactgctgctgagaatgggcggcggcagactgggcgcccccatggagagacacggcagagccagcgccaccagcgtgagcagcgccggcgagcaggccgccggcgaccccgagggcagaagacaggagcccctgagaagaagagccagcagcgccagcgtgcccgccgtgggcgccagcgccgagggcaccagaagagacagactgggcagctacagcggccccaccagcgtgagcagacagagagtggagagcctgagaaagaagagacccctgttcccctggttcggcctggacatcggcggcaccctggtgaagctggtgtacttcgagcccaaggacatcaccgccgaggaggaggaggaggaggtggagagcctgaagagcatcagaaagtacctgaccagcaacgtggcctacggcagcaccggcatcagagacgtgcacctggagctgaaggacctgaccctgtgcggcagaaagggcaacctgcacttcatcagattccccacccacgacatgcccgccttcatccagatgggcagagacaagaacttcagcagcctgcacaccgtgttctgcgccaccggcggcggcgcctacaagttcgagcaggacttcctgaccatcggcgacctgcagctgtgcaagctggacgagctggactgcctgatcaagggcatcctgtacatcgacagcgtgggcttcaacggcagaagccagtgctactacttcgagaaccccgccgacagcgagaagtgccagaagctgcccttcgacctgaagaacccctaccccctgctgctggtgaacatcggcagcggcgtgagcatcctggccgtgtacagcaaggacaactacaagagagtgaccggcaccagcctgggcggcggcaccttcttcggcctgtgctgcctgctgaccggctgcaccaccttcgaggaggccctggagatggccagcagaggcgacagcaccaaggtggacaagctggtgagagacatctacggcggcgactacgagagattcggcctgcccggctgggccgtggccagcagcttcggcaacatgatgagcaaggagaagagagaggccgtgagcaaggaggacctggccagagccaccctgatcaccatcaccaacaacatcggcagcatcgccagaatgtgcgccctgaacgagaacatcaaccaggtggtgttcgtgggcaacttcctgagaatcaacaccatcgccatgagactgctggcctacgccctggactactggagcaagggccagctgaaggccctgttcagcgagcacgagggctacttcggcgccgtgggcgccctgctggagctgctgaagatcccctag

SEQ ID NO: 92449 - DNA, 1161 bp, synthetic construct
  misc_feature 1..1161: note = Description of Artificial Sequence: Synthetic coding sequence
  source 1..1161: mol_type = other DNA
agcggcagagtgaaccccgccggcggcctgggctgcagcgagagcggcaccttcggcggcccccccgcccccatcgtgttcccctggttcggcctggacatcggcggcaccctggtgaagctggtgtacttcgagcccaaggacatcaccgccgaggaggaggaggaggaggtggagagcctgaagagcatcagaaagtacctgaccagcaacgtggcctacggcagcaccggcatcagagacgtgcacctggagctgaaggacctgaccctgtgcggcagaaagggcaacctgcacttcatcagattccccacccacgacatgcccgccttcatccagatgggcagagacaagaacttcagcagcctgcacaccgtgttctgcgccaccggcggcggcgcctacaagttcgagcaggacttcctgaccatcggcgacctgcagctgtgcaagctggacgagctggactgcctgatcaagggcatcctgtacatcgacagcgtgggcttcaacggcagaagccagtgctactacttcgagaaccccgccgacagcgagaagtgccagaagctgcccttcgacctgaagaacccctaccccctgctgctggtgaacatcggcagcggcgtgagcatcctggccgtgtacagcaaggacaactacaagagagtgaccggcaccagcctgggcggcggcaccttcttcggcctgtgctgcctgctgaccggctgcaccaccttcgaggaggccctggagatggccagcagaggcgacagcaccaaggtggacaagctggtgagagacatctacggcggcgactacgagagattcggcctgcccggctgggccgtggccagcagcttcggcaacatgatgagcaaggagaagagagaggccgtgagcaaggaggacctggccagagccaccctgatcaccatcaccaacaacatcggcagcatcgccagaatgtgcgccctgaacgagaacatcaaccaggtggtgttcgtgggcaacttcctgagaatcaacaccatcgccatgagactgctggcctacgccctggactactggagcaagggccagctgaaggccctgttcagcgagcacgagggctacttcggcgccgtgggcgccctgctggagctgctgaagatcccctag

SEQ ID NO: 92450 - DNA, 840 bp, synthetic construct
  misc_feature 1..840: note = Description of Artificial Sequence: Synthetic coding sequence
  source 1..840: mol_type = other DNA
atgcccgccttcatccagatgggcagagacaagaacttcagcagcctgcacaccgtgttctgcgccaccggcggcggcgcctacaagttcgagcaggacttcctgaccatcggcgacctgcagctgtgcaagctggacgagctggactgcctgatcaagggcatcctgtacatcgacagcgtgggcttcaacggcagaagccagtgctactacttcgagaaccccgccgacagcgagaagtgccagaagctgcccttcgacctgaagaacccctaccccctgctgctggtgaacatcggcagcggcgtgagcatcctggccgtgtacagcaaggacaactacaagagagtgaccggcaccagcctgggcggcggcaccttcttcggcctgtgctgcctgctgaccggctgcaccaccttcgaggaggccctggagatggccagcagaggcgacagcaccaaggtggacaagctggtgagagacatctacggcggcgactacgagagattcggcctgcccggctgggccgtggccagcagcttcggcaacatgatgagcaaggagaagagagaggccgtgagcaaggaggacctggccagagccaccctgatcaccatcaccaacaacatcggcagcatcgccagaatgtgcgccctgaacgagaacatcaaccaggtggtgttcgtgggcaacttcctgagaatcaacaccatcgccatgagactgctggcctacgccctggactactggagcaagggccagctgaaggccctgttcagcgagcacgagggctacttcggcgccgtgggcgccctgctggagctgctgaagatcccctag

SEQ ID NO: 92451 - DNA, 1113 bp, synthetic construct
  misc_feature 1..1113: note = Description of Artificial Sequence: Synthetic coding sequence
  source 1..1113: mol_type = other DNA
atgaagatcaaggacgccaagaagcccagcttcccctggttcggcatggacatcggcggcaccctggtgaagctgagctacttcgagcccatcgacatcaccgccgaggaggagcaggaggaggtggagagcctgaagagcatcagaaagtacctgaccagcaacgtggcctacggcagcaccggcatcagagacgtgcacctggagctgaaggacctgaccctgttcggcagaagaggcaacctgcacttcatcagattccccacccaggacctgcccaccttcatccagatgggcagagacaagaacttcagcaccctgcagaccgtgctgtgcgccaccggcggcggcgcctacaagttcgagaaggacttcagaaccatcggcaacctgcacctgcacaagctggacgagctggactgcctggtgaagggcctgctgtacatcgacagcgtgagcttcaacggccaggccgagtgctactacttcgccaacgccagcgagcccgagagatgccagaagatgcccttcaacctggacgacccctaccccctgctggtggtgaacatcggcagcggcgtgagcatcctggccgtgcacagcaaggacaactacaagagagtgaccggcaccagcctgggcggcggcaccttcctgggcctgtgcagcctgctgaccggctgcgagagcttcgaggaggccctggagatggccagcaagggcgacagcacccaggccgacaagctggtgagagacatctacggcggcgactacgagagattcggcctgcccggctgggccgtggccagcagcttcggcaacatgatctacaaggagaagagagagagcgtgagcaaggaggacctggccagagccaccctggtgaccatcaccaacaacatcggcagcgtggccagaatgtgcgccgtgaacgagaagatcaacagagtggtgttcgtgggcaacttcctgagagtgaacaccctgagcatgaagctgctggcctacgccctggactactggagcaagggccagctgaaggccctgttcctggagcacgagggctacttcggcgccgtgggcgccctgctgggcctgcccaacttcagctag

SEQ ID NO: 92452 - DNA, 2322 bp, synthetic construct
  misc_feature 1..2322: note = Description of Artificial Sequence: Synthetic coding sequence
  source 1..2322: mol_type = other DNA
atggccgagtgcggcgccagcggcagcggcagcagcggcgacagcctggacaagagcatcaccctgccccccgacgagatcttcagaaacctggagaacgccaagagattcgccatcgacatcggcggcagcctgaccaagctggcctactacagcaccgtgcagcacaaggtggccaaggtgagaagcttcgaccacagcggcaaggacaccgagagagagcacgagcccccctacgagatcagcgtgcaggaggagatcaccgccagactgcacttcatcaagttcgagaacacctacatcgaggcctgcctggacttcatcaaggaccacctggtgaacaccgagaccaaggtgatccaggccaccggcggcggcgcctacaagttcaaggacctgatcgaggagaagctgagactgaaggtggacaaggaggacgtgatgacctgcctgatcaagggctgcaacttcgtgctgaagaacatcccccacgaggccttcgtgtaccagaaggacagcgaccccgagttcagattccagaccaaccacccccacatcttcccctacctgctggtgaacatcggcagcggcgtgagcatcgtgaaggtggagaccgaggacagattcgagtgggtgggcggcagcagcatcggcggcggcaccttctggggcctgggcgccctgctgaccaagaccaagaagttcgacgagctgctgcacctggccagcagaggccagcacagcaacgtggacatgctggtgagagacgtgtacggcggcgcccaccagaccctgggcctgagcggcaacctgatcgccagcagcttcggcaagagcgccaccgccgaccaggagttcagcaaggaggacatggccaagagcctgctgcacatgatcagcaacgacatcggccagctggcctgcctgcacgccagactgcacagcctggacagagtgtacttcggcggcttcttcatcagaggccaccccgtgaccatgagaaccatcacctacagcatcaacttcttcagcaagggcgaggtgcaggccctgttcctgagacacgagggctacctgggcgccatcggcgccttcctgaagggcgccgagcaggacaaccccaaccagtacagctggggcgagaactacgccggcagcagcggcctgatgagcgccagccccgagctgggccccgcccagagagccagaagcggcaccttcgacctgctggagatggacagactggagagacccctggtggacctgcccctgctgctggacccccccagctacgtgcccgacaccgtggacctgaccgacgacgccctggccagaaagtactggctgacctgcttcgaggaggccctggacggcgtggtgaagagagccgtggccagccagcccgacagcgtggacgccgccgagagagccgagaagttcagacagaagtactggaacaagctgcagaccctgagacagcagcccttcgcctacggcaccctgaccgtgagaagcctgctggacaccagagagcactgcctgaacgagttcaacttccccgacccctacagcaaggtgaagcagagagagaacggcgtggccctgagatgcttccccggcgtggtgagaagcctggacgccctgggctgggaggagagacagctggccctggtgaagggcctgctggccggcaacgtgttcgactggggcgccaaggccgtgagcgccgtgctggagagcgacccctacttcggcttcgaggaggccaagagaaagctgcaggagagaccctggctggtggacagctacagcgagtggctgcagagactgaagggccccccccacaagtgcgccctgatcttcgccgacaacagcggcatcgacatcatcctgggcgtgttccccttcgtgagagagctgctgctgagaggcaccgaggtgatcctggcctgcaacagcggccccgccctgaacgacgtgacccacagcgagagcctgatcgtggccgagagaatcgccggcatggaccccgtggtgcacagcgccctgcaggaggagagactgctgctggtgcagaccggcagcagcagcccctgcctggacctgagcagactggacaagggcctggccgccctggtgagagagagaggcgccgacctggtggtgatcgagggcatgggcagagccgtgcacaccaactaccacgccgccctgagatgcgagagcctgaagctggccgtgatcaagaacgcctggctggccgagagactgggcggcagactgttcagcgtgatcttcaagtacgaggtgcccgccgagtag

SEQ ID NO: 92453 - DNA, 1455 bp, synthetic construct
  misc_feature 1..1455: note = Description of Artificial Sequence: Synthetic coding sequence
  source 1..1455: mol_type = other DNA
atgttccccaacagcatcctgggcagaccccccttcacccccaaccaccagcagcacaacaacttcttcaccctgagccccaccgtgtacagccaccagcagctgatcgacgcccagttcaacttccagaacgccgacctgagcagagccgtgagcctgcagcagctgacctacggcaacgtgagccccatccagaccagcgccagccccctgttcagaggcagaaagagactgagcgacgagaagaacctgcccctggacggcaagagacagagattccacagcccccaccaggagcccaccgtggtgaaccagatcgtgcccctgagcggcgagagaagatacagcatgccccccctgttccacacccactacgtgcccgacatcgtgagatgcgtgccccccttcagagagatcgccttcctggagcccagagagatcaccctgcccgaggccaaggacaagctgagccagcagatcctggagctgttcgagacctgccagcagcagatcagcgacctgaagaagaaggagctgtgcagaacccagctgcagagagagatccagctgctgttcccccagagcagactgttcctggtgggcagcagcctgaacggcttcggcaccagaagcagcgacggcgacctgtgcctggtggtgaaggaggagccctgcttcttccaggtgaaccagaagaccgaggccagacacatcctgaccctggtgcacaagcacttctgcaccagactgagcggctacatcgagagaccccagctgatcagagccaaggtgcccatcgtgaagttcagagacaaggtgagctgcgtggagttcgacctgaacgtgaacaacatcgtgggcatcagaaacaccttcctgctgagaacctacgcctacctggagaacagagtgagacccctggtgctggtgatcaagaagtgggccagccaccaccagatcaacgacgccagcagaggcaccctgagcagctacagcctggtgctgatggtgctgcactacctgcagaccctgcccgagcccatcctgcccagcctgcagaagatctaccccgagagcttcagccccgccatccagctgcacctggtgcaccaggccccctgcaacgtgcccccctacctgagcaagaacgagagcaacctgggcgacctgctgctgggcttcctgaagtactacgccaccgagttcgactggaacagccagatgatcagcgtgagagaggccaaggccatccccagacccgacggcatcgagtggagaaacaagtacatctgcgtggaggagcccttcgacggcaccaacaccgccagagccgtgcacgagaagcagaagttcgacatgatcaaggaccagttcctgaagagctggcacagactgaagaacaagagagacctgaacagcatcctgcccgtgagagccgccgtgctgaagagatag

SEQ ID NO: 92454 - DNA, 1443 bp, synthetic construct
  misc_feature 1..1443: note = Description of Artificial Sequence: Synthetic coding sequence
  source 1..1443: mol_type = other DNA
atgttccccaacagcatcctgggcagaccccccttcacccccaaccaccagcagcacaacaacttcttcaccctgagccccaccgtgtacagccaccagcagctgatcgacgcccagttcaacttccagaacgccgacctgagcagagccgtgagcctgcagcagctgacctacggcaacgtgagccccatccagaccagcgccagccccctgttcagaggcagaaagagactgagcgacgagaagaacctgcccctggacggcaagagacagagattccacagcccccaccaggagcccaccgtggtgaaccagatcgtgcccctgagcggcgagagaagatacagcatgccccccctgttccacacccactacgtgcccgacatcgtgagatgcgtgccccccttcagagagatcgccttcctggagcccagagagatcaccctgcccgaggccaaggacaagctgagccagcagatcctggagctgttcgagacctgccagcagcagatcagcgacctgaagaagaaggagctgtgcagaacccagctgcagagagagatccagctgctgttcccccagagcagactgttcctggtgggcagcagcctgaacggcttcggcaccagaagcagcgacggcgacctgtgcctggtggtgaaggaggagcccgtgaaccagaagaccgaggccagacacatcctgaccctggtgcacaagcacttctgcaccagactgagcggctacatcgagagaccccagctgatcagagccaaggtgcccatcgtgaagttcagagacaaggtgagctgcgtggagttcgacctgaacgtgaacaacatcgtgggcatcagaaacaccttcctgctgagaacctacgcctacctggagaacagagtgagacccctggtgctggtgatcaagaagtgggccagccaccaccagatcaacgacgccagcagaggcaccctgagcagctacagcctggtgctgatggtgctgcactacctgcagaccctgcccgagcccatcctgcccagcctgcagaagatctaccccgagagcttcagccccgccatccagctgcacctggtgcaccaggccccctgcaacgtgcccccctacctgagcaagaacgagagcaacctgggcgacctgctgctgggcttcctgaagtactacgccaccgagttcgactggaacagccagatgatcagcgtgagagaggccaaggccatccccagacccgacggcatcgagtggagaaacaagtacatctgcgtggaggagcccttcgacggcaccaacaccgccagagccgtgcacgagaagcagaagttcgacatgatcaaggaccagttcctgaagagctggcacagactgaagaacaagagagacctgaacagcatcctgcccgtgagagccgccgtgctgaagagatag

SEQ ID NO: 92455 - DNA, 1455 bp, synthetic construct; identical to SEQ ID NO: 92453
  misc_feature 1..1455: note = Description of Artificial Sequence: Synthetic coding sequence
  source 1..1455: mol_type = other DNA

SEQ ID NO: 92456 - DNA, 1455 bp, synthetic construct; identical to SEQ ID NO: 92453
  misc_feature 1..1455: note = Description of Artificial Sequence: Synthetic coding sequence
  source 1..1455: mol_type = other DNA

SEQ ID NO: 92457 - DNA, 1476 bp, synthetic construct
  misc_feature 1..1476: note = Description of Artificial Sequence: Synthetic coding sequence
  source 1..1476: mol_type = other DNA
atgagcctggtggcctacgccagcagcgacgagagcgagcccgacgaggccgagcccgagcccgaggaggaggaggccgtggcccccaccagcggccccgccctgggcggcctgttcgccagcctgcccgcccccaagggccccgccctgctgcccccccccccccagatgctggcccccgccttccccccccccctgctgctgcccccccccaccggcgaccccagactgcagccccccccccccctgcccttcggcctgggcggcttcccccccccccccggcgtgagccccgccgaggccgccggcgtgggcgagggcctgggcctgggcctgcccagccccagaggccccggcctgaacctgcccccccccatcggcggcgccggcccccccctgggcctgcccaagcccaagaagagaaaggagcccgtgaagatcgccgcccccgagctgcacaagggcgacagcgacagcgaggaggacgagcccaccaagaagaagaccatcctgcagggcagcagcgagggcaccggcctgagcgccctgctgccccagcccaagaacctgaccgtgaaggagaccaacagactgctgctgccccacgccttcagcagaaagcccagcgacggcagccccgacaccaagcccagcagactggccagcaagaccaagaccagcagcctggcccccgtggtgggcaccaccaccaccacccccagccccagcgccatcaaggccgccgccaagagcgccgccctgcaggtgaccaagcagatcacccaggaggaggacgacagcgacgaggaggtggcccccgagaacttcttcagcctgcccgagaaggccgagccccccggcgtggagccctacccctaccccatccccaccgtgcccgaggagctgccccccggcaccgagcccgagcccgccttccaggacgacgccgccaacgcccccctggagttcaagatggccgccggcagcagcggcgccccctggatgcccaagcccggcgacgactacagctacaaccagttcagcacctacggcgacgccaacgccgccggcgcctactaccaggactactacagcggcggctactaccccgcccaggaccccgccctggtgcccccccaggagatcgcccccgacgccagcttcatcgacgacgaggccttcaagagactgcagggcaagagaaacagaggcagagaggagatcaacttcgtggagatcaagggcgacgaccagctgagcggcgcccagcagtggatgaccaagagcctgaccgaggagaagaccatgaagagcttcagcaagaagaagggcgagcagcccaccggccagcagagaagaaagcaccagatcacctacctgatccaccaggccaaggagagagagctggagctgaagaacacctggagcgagaacaagctgagcagaagacagacccaggccaagtacggcttctag

SEQ ID NO: 92458 - DNA, 1380 bp, synthetic construct
  misc_feature 1..1380: note = Description of Artificial Sequence: Synthetic coding sequence
  source 1..1380: mol_type = other DNA
atgagcctggtggcctacgccagcagcgacgagagcgagcccgacgaggccgagcccgagcccgaggaggaggaggccgtggcccccaccagcggccccgccctgggcggcctgttcgccagcctgcccgcccccaagggccccgccctgctgcccccccccccccagatgctggcccccgccttccccccccccctgctgctgcccccccccaccggcgaccccagactgcagccccccccccccctgcccttcggcctgggcggcttcccccccccccccggcgtgagccccgccgaggccgccggcgtgggcgagggcctgggcctgggcctgcccagccccagaggccccggcctgaacctgcccccccccatcggcggcgccggcccccccctgggcctgcccaagcccaagaagagaaaggagcccgtgaagatcgccgcccccgagctgcacaagggcgacagcgacagcgaggaggacgagcccaccaagaagaagaccatcctgcagggcagcagcgagggcaccggcctgagcgccctgctgccccagcccaagaacctgaccgtgaaggagaccaacagactgctgctgccccacgccttcagcagaaagcccagcgacggcagccccgacaccaagcccagcagactggccagcaagaccaagaccagcagcctggcccccgtggtgggcaccaccaccaccacccccagccccagcgccatcaaggccgccgccaagagcgccgccctgcaggtgaccaagcagatcacccaggaggaggacgacagcgacgaggaggtggcccccgagaacttcttcagcctgcccgagaaggccgagccccccggcgtggagccctacccctaccccatccccaccgtgcccgaggagctgccccccggcaccgagcccgagcccgccttccaggacgacgccgccaacgcccccctggagttcaagatggccgccggcagcagcggcgccccctggatgcccaagcccggcgacgactacagctacaaccagttcagcacctacggcgacgccaacgccgccggcgcctactaccagttcaagagactgcagggcaagagaaacagaggcagagaggagatcaacttcgtggagatcaagggcgacgaccagctgagcggcgcccagcagtggatgaccaagagcctgaccgaggagaagaccatgaagagcttcagcaagaagaagggcgagcagcccaccggccagcagagaagaaagcaccagatcacctacctgatccaccaggccaaggagagagagctggagctgaagaacacctggagcgagaacaagctgagcagaagacagacccaggccaagtacggcttctag

SEQ ID NO: 92459 - DNA, 1404 bp, synthetic construct
  misc_feature 1..1404: note = Description of Artificial Sequence: Synthetic coding sequence
  source 1..1404: mol_type = other DNA
atgctggcccccgccttccccccccccctgctgctgcccccccccaccggcgaccccagactgcagccccccccccccctgcccttcggcctgggcggcttcccccccccccccggcgtgagccccgccgaggccgccggcgtgggcgagggcctgggcctgggcctgcccagccccagaggccccggcctgaacctgcccccccccatcggcggcgccggcccccccctgggcctgcccaagcccaagaagagaaaggagcccgtgaagatcgccgcccccgagctgcacaagggcgacagcgacagcgaggaggacgagcccaccaagaagaagaccatcctgcagggcagcagcgagggcaccggcctgagcgccctgctgccccagcccaagaacctgaccgtgaaggagaccaacagactgctgctgccccacgccttcagcagaaagcccagcgacggcagccccgacaccaagcccagcagactggccagcaagaccaagaccagcagcctggcccccgtggtgggcaccaccaccaccacccccagccccagcgccatcaaggccgccgccaagagcgccgccctgcaggtgaccaagcagatcacccaggaggaggacgacagcgacgaggaggtggcccccgagaacttcttcagcctgcccgagaaggccgagccccccggcgtggagccctacccctaccccatccccaccgtgcccgaggagctgccccccggcaccgagcccgagcccgccttccaggacgacgccgccaacgcccccctggagttcaagatggccgccggcagcagcggcgccccctggatgcccaagcccggcgacgactacagctacaaccagttcagcacctacggcgacgccaacgccgccggcgcctactaccagggcctgcagcagcacctgggccacagccccctgagaggcatcatgagattcctgaacagcaagagcggcaagagaacctgcttcgtgcccagcttcgactactacagcggcggctactaccccgcccaggaccccgccctggtgcccccccaggagatcgcccccgacgccagcttcatcgacgacgaggccttcaagagactgcagggcaagagaaacagaggcagagaggagatcaacttcgtggagatcaagggcgacgaccagctgagcggcgcccagcagtggatgaccaagagcctgaccgaggagaagaccatgaagagcttcagcaagaagaagggcgagcagcccaccggccagcagagaagaaagcaccagatcacctacctgatccaccaggccaaggagagagagctggagctgaagaacacctggagcgagaacaagctgagcagaagacagacccaggccaagtacggcttctag

SEQ ID NO: 92460 - DNA, 3096 bp, synthetic construct
  misc_feature 1..3096: note = Description of Artificial Sequence: Synthetic coding sequence
  source 1..3096: mol_type = other DNA
atgaaggtgaccgtgtgcttcggcagaaccagagtggtggtgccctgcggcgacggccacatgaaggtgttcagcctgatccagcaggccgtgaccagatacagaaaggccatcgccaaggaccccaactactggatccaggtgcacagactggagcacggcgacggcggcatcctggacctggacgacatcctgtgcgacgtggccgacgacaaggacagactggtggccgtgttcgacgagcaggacccccaccacggcggcgacggcaccagcgccagcagcaccggcacccagagccccgagatcttcggcagcgagctgggcaccaacaacgtgagcgccttccagccctaccaggccaccagcgagatcgaggtgacccccagcgtgctgagagccaacatgcccctgcacgtgagaagaagcagcgaccccgccctgatcggcctgagcaccagcgtgagcgacagcaacttcagcagcgaggagcccagcagaaagaaccccaccagatggagcaccaccgccggcttcctgaagcagaacaccgccggcagccccaagacctgcgacagaaagaaggacgagaactacagaagcctgcccagagacaccagcaactggagcaaccagttccagagagacaacgccagaagcagcctgagcgccagccaccccatggtgggcaagtggctggagaagcaggagcaggacgaggacggcaccgaggaggacaacagcagagtggagcccgtgggccacgccgacaccggcctggagcacatccccaacttcagcctggacgacatggtgaagctggtggaggtgcccaacgacggcggccccctgggcatccacgtggtgcccttcagcgccagaggcggcagaaccctgggcctgctggtgaagagactggagaagggcggcaaggccgagcacgagaacctgttcagagagaacgactgcatcgtgagaatcaacgacggcgacctgagaaacagaagattcgagcaggcccagcacatgttcagacaggccatgagaacccccatcatctggttccacgtggtgcccgccgccaacaaggagcagtacgagcagctgagccagagcgagaagaacaactactacagcagcagattcagccccgacagccagtacatcgacaacagaagcgtgaacagcgccggcctgcacaccgtgcagagagcccccagactgaaccacccccccgagcagatcgacagccacagcagactgccccacagcgcccaccccagcggcaagccccccagcgcccccgccagcgccccccagaacgtgttcagcaccaccgtgagcagcggctacaacaccaagaagatcggcaagagactgaacatccagctgaagaagggcaccgagggcctgggcttcagcatcaccagcagagacgtgaccatcggcggcagcgcccccatctacgtgaagaacatcctgcccagaggcgccgccatccaggacggcagactgaaggccggcgacagactgatcgaggtgaacggcgtggacctggtgggcaagagccaggaggaggtggtgagcctgctgagaagcaccaagatggagggcaccgtgagcctgctggtgttcagacaggaggacgccttccaccccagagagctgaacgccgagcccagccagatgcagatccccaaggagaccaaggccgaggacgaggacatcgtgctgacccccgacggcaccagagagttcctgaccttcgaggtgcccctgaacgacagcggcagcgccggcctgggcgtgagcgtgaagggcaacagaagcaaggagaaccacgccgacctgggcatcttcgtgaagagcatcatcaacggcggcgccgccagcaaggacggcagactgagagtgaacgaccagctgatcgccgtgaacggcgagagcctgctgggcaagaccaaccaggacgccatggagaccctgagaagaagcatgagcaccgagggcaacaagagaggcatgatccagctgatcgtggccagaagaatcagcaagtgcaacgagctgaagagccccggcagcccccccggccccgagctgcccatcgagaccgccctggacgacagagagagaagaatcagccacagcctgtacagcggcatcgagggcctggacgagagccccagcagaaacgccgccctgagcagaatcatgggcaagtaccagctgagccccaccgtgaacatgccccaggacgacaccgtgatcatcgaggacgacagactgcccgtgctgcccccccacctgagcgaccagagcagcagcagcagccacgacgacgtgggcttcgtgaccgccgacgccggcacctgggccaaggccgccatcagcgacagcgccgactgcagcctgagccccgacgtggaccccgtgctggccttccagagagagggcttcggcagacagagcatgagcgagaagagaaccaagcagttcagcgacgccagccagctggacttcgtgaagaccagaaagagcaagagcatggacctgggcatcgccgacgagaccaagctgaacaccgtggacgaccagaaggccggcagccccagcagagacgtgggccccagcctgggcctgaagaagagcagcagcctggagagcctgcagaccgccgtggccgaggtgaccctgaacggcgacatccccttccacagacccagacccagaatcatcagaggcagaggctgcaacgagagcttcagagccgccatcgacaagagctacgacaagcccgccgtggacgacgacgacgagggcatggagaccctggaggaggacaccgaggagagcagcagaagcggcagagagagcgtgagcaccgccagcgaccagcccagccacagcctggagagacagatgaacggcaaccaggagaagggcgacaagaccgacagaaagaaggacaagaccggcaaggagaagaagaaggacagagacaaggagaaggacaagatgaaggccaagaagggcatgctgaagggcctgggcgacatgttcagcctggccaagctgaagcccgagaagagatag

SEQ ID NO: 92461 - DNA, 3960 bp, synthetic construct
  misc_feature 1..3960: note = Description of Artificial Sequence: Synthetic coding sequence
  source 1..3960: mol_type = other DNA
atgaaggtgaccgtgtgcttcggcagaaccagagtggtggtgccctgcggcgacggccacatgaaggtgttcagcctgatccagcaggccgtgaccagatacagaaaggccatcgccaaggaccccaactactggatccaggtgcacagactggagcacggcgacggcggcatcctggacctggacgacatcctgtgcgacgtggccgacgacaaggacagactggtggccgtgttcgacgagcaggacccccaccacggcggcgacggcaccagcgccagcagcaccggcacccagagccccgagatcttcggcagcgagctgggcaccaacaacgtgagcgccttccagccctaccaggccaccagcgagatcgaggtgacccccagcgtgctgagagccaacatgcccctgcacgtgagaagaagcagcgaccccgccctgatcggcctgagcaccagcgtgagcgacagcaacttcagcagcgaggagcccagcagaaagaaccccaccagatggagcaccaccgccggcttcctgaagcagaacaccgccggcagccccaagacctgcgacagaaagaaggacgagaactacagaagcctgcccagagacaccagcaactggagcaaccagttccagagagacaacgccagaagcagcctgagcgccagccaccccatggtgggcaagtggctggagaagcaggagcaggacgaggacggcaccgaggaggacaacagcagagtggagcccgtgggccacgccgacaccggcctggagcacatccccaacttcagcctggacgacatggtgaagctggtggaggtgcccaacgacggcggccccctgggcatccacgtggtgcccttcagcgccagaggcggcagaaccctgggcctgctggtgaagagactggagaagggcggcaaggccgagcacgagaacctgttcagagagaacgactgcatcgtgagaatcaacgacggcgacctgagaaacagaagattcgagcaggcccagcacatgttcagacaggccatgagaacccccatcatctggttccacgtggtgcccgccgccaacaaggagcagtacgagcagctgagccagagcgagaagaacaactactacagcagcagattcagccccgacagccagtacatcgacaacagaagcgtgaacagcgccggcctgcacaccgtgcagagagcccccagactgaaccacccccccgagcagatcgacagccacagcagactgccccacagcgcccaccccagcggcaagccccccagcgcccccgccagcgccccccagaacgtgttcagcaccaccgtgagcagcggctacaacaccaagaagatcggcaagagactgaacatccagctgaagaagggcaccgagggcctgggcttcagcatcaccagcagagacgtgaccatcggcggcagcgcccccatctacgtgaagaacatcctgcccagaggcgccgccatccaggacggcagactgaaggccggcgacagactgatcgaggtgaacggcgtggacctggtgggcaagagccaggaggaggtggtgagcctgctgagaagcaccaagatggagggcaccgtgagcctgctggtgttcagacaggaggacgccttccaccccagagagctgaacgccgagcccagccagatgcagatccccaaggagaccaaggccgaggacgaggacatcgtgctgacccccgacggcaccagagagttcctgaccttcgaggtgcccctgaacgacagcggcagcgccggcctgggcgtgagcgtgaagggcaacagaagcaaggagaaccacgccgacctgggcatcttcgtgaagagcatcatcaacggcggcgccgccagcaaggacggcagactgagagtgaacgaccagctgatcgccgtgaacggcgagagcctgctgggcaagaccaaccaggacgccatggagaccctgagaagaagcatgagcaccgagggcaacaagagaggcatgatccagctgatcgtggccagaagaatcagcaagtgcaacgagctgaagagccccggcagcccccccggccccgagctgcccatcgagaccgccctggacgacagagagagaagaatcagccacagcctgtacagcggcatcgagggcctggacgagagccccagcagaaacgccgccctgagcagaatcatgggcgagagcggcaagtaccagctgagccccaccgtgaacatgccccaggacgacaccgtgatcatcgaggacgacagactgcccgtgctgcccccccacctgagcgaccagagcagcagcagcagccacgacgacgtgggcttcgtgaccgccgacgccggcacctgggccaaggccgccatcagcgacagcgccgactgcagcctgagccccgacgtggaccccgtgctggccttccagagagagggcttcggcagacagagcatgagcgagaagagaaccaagcagttcagcgacgccagccagctggacttcgtgaagaccagaaagagcaagagcatggacctgggcatcgccgacgagaccaagctgaacaccgtggacgaccagaaggccggcagccccagcagagacgtgggccccagcctgggcctgaagaagagcagcagcctggagagcctgcagaccgccgtggccgaggtgaccctgaacggcgacatccccttccacagacccagacccagaatcatcagaggcagaggctgcaacgagagcttcagagccgccatcgacaagagctacgacaagcccgccgtggacgacgacgacgagggcatggagaccctggaggaggacaccgaggagagcagcagaagcggcagagagagcgtgagcaccgccagcgaccagcccagccacagcctggagagacagatgaacggcaaccaggagaagggcgacaagaccgacagaaagaaggacaagaccggcaaggagaagaagaaggacagagacaaggagaaggacaagatgaaggccaagaagggcatgctgaagggcctgggcgacatgttcagaatccaggccaagaccagagagttcagagagagacaggccagagagagagactacgccgagatccaggacttccacagaaccttcggctgcgacgacgagctgatgtacggcggcgtgagcagctacgagggcagcatggccctgaacgccagaccccagagccccagagagggccacatgatggacgccctgtacgcccaggtgaagaagcccagaaacagcaagcccagccccgtggacagcaacagaagcacccccagcaaccacgacagaatccagagactgagacaggagttccagcaggccaagcaggacgaggacgtggaggacagaagaagaacctacagcttcgagcagccctggcccaacgccagacccgccacccagagcggcagacacagcgtgagcgtggaggtgcagatgcagagacagagacaggaggagagagagagcagccagcaggcccagagacagtacagcagcctgcccagacagagcagaaagaacgccagcagcgtgagccaggacagctgggagcagaactacagccccggcgagggcttccagagcgccaaggagaaccccagatacagcagctaccagggcagcagaaacggctacctgggcggccacggcttcaacgccagagtgatgctggagacccaggagctgctgagacaggagcagagaagaaaggagcagcagatgaagaagcagccccccagcgagggccccagcaactacgacagctacaagaaggtgcaggaccccagctacgccccccccaagggccccttcagacaggacgtgccccccagccccagccaggtggccagactgaacagactgcagacccccgagaagggcagacccttctacagctag

SEQ ID NO: 92462 - DNA, 3933 bp, synthetic construct
  misc_feature 1..3933: note = Description of Artificial Sequence: Synthetic coding sequence
  source 1..3933: mol_type = other DNA
atgaaggtgaccgtgtgcttcggcagaaccagagtggtggtgccctgcggcgacggccacatgaaggtgttcagcctgatccagcaggccgtgaccagatacagaaaggccatcgccaaggaccccaactactggatccaggtgcacagactggagcacggcgacggcggcatcctggacctggacgacatcctgtgcgacgtggccgacgacaaggacagactggtggccgtgttcgacgagcaggacccccaccacggcggcgacggcaccagcgccagcagcaccggcacccagagccccgagatcttcggcagcgagctgggcaccaacaacgtgagcgccttccagccctaccaggccaccagcgagatcgaggtgacccccagcgtgctgagagccaacatgcccctgcacgtgagaagaagcagcgaccccgccctgatcggcctgagcaccagcgtgagcgacagcaacttcagcagcgaggagcccagcagaaagaaccccaccagatggagcaccaccgccggcttcctgaagcagaacaccgccggcagccccaagacctgcgacagaaagaaggacgagaactacagaagcctgcccagagacaccagcaactggagcaaccagttccagagagacaacgccagaagcagcctgagcgccagccaccccatggtgggcaagtggctggagaagcaggagcaggacgaggacggcaccgaggaggacaacagcagagtggagcccgtgggccacgccgacaccggcctggagcacatccccaacttcagcctggacgacatggtgaagctggtggaggtgcccaacgacggcggccccctgggcatccacgtggtgcccttcagcgccagaggcggcagaaccctgggcctgctggtgaagagactggagaagggcggcaaggccgagcacgagaacctgttcagagagaacgactgcatcgtgagaatcaacgacggcgacctgagaaacagaagattcgagcaggcccagcacatgttcagacaggccatgagaacccccatcatctggttccacgtggtgcccgccgccaacaaggagcagtacgagcagctgagccagagcgagaagaacaactactacagcagcagattcagccccgacagccagtacatcgacaacagaagcgtgaacagcgccggcctgcacaccgtgcagagagcccccagactgaaccacccccccgagcagatcgacagccacagcagactgccccacagcgcccaccccagcggcaagccccccagcgcccccgccagcgccccccagaacgtgttcagcaccaccgtgagcagcggctacaacaccaagaagatcggcaagagactgaacatccagctgaagaagggcaccgagggcctgggcttcagcatcaccagcagagacgtgaccatcggcggcagcgcccccatctacgtgaagaacatcctgcccagaggcgccgccatccaggacggcagactgaaggccggcgacagactgatcgaggtgaacggcgtggacctggtgggcaagagccaggaggaggtggtgagcctgctgagaagcaccaagatggagggcaccgtgagcctgctggtgttcagacaggaggacgccttccaccccagagagctgaaggccgaggacgaggacatcgtgctgacccccgacggcaccagagagttcctgaccttcgaggtgcccctgaacgacagcggcagcgccggcctgggcgtgagcgtgaagggcaacagaagcaaggagaaccacgccgacctgggcatcttcgtgaagagcatcatcaacggcggcgccgccagcaaggacggcagactgagagtgaacgaccagctgatcgccgtgaacggcgagagcctgctgggcaagaccaaccaggacgccatggagaccctgagaagaagcatgagcaccgagggcaacaagagaggcatgatccagctgatcgtggccagaagaatcagcaagtgcaacgagctgaagagccccggcagcccccccggccccgagctgcccatcgagaccgccctggacgacagagagagaagaatcagccacagcctgtacagcggcatcgagggcctggacgagagccccagcagaaacgccgccctgagcagaatcatgggcaagtaccagctgagccccaccgtgaacatgccccaggacgacaccgtgatcatcgaggacgacagactgcccgtgctgcccccccacctgagcgaccagagcagcagcagcagccacgacgacgtgggcttcgtgaccgccgacgccggcacctgggccaaggccgccatcagcgacagcgccgactgcagcctgagccccgacgtggaccccgtgctggccttccagagagagggcttcggcagacagatcgccgacgagaccaagctgaacaccgtggacgaccagaaggccggcagccccagcagagacgtgggccccagcctgggcctgaagaagagcagcagcctggagagcctgcagaccgccgtggccgaggtgaccctgaacggcgacatccccttccacagacccagacccagaatcatcagaggcagaggctgcaacgagagcttcagagccgccatcgacaagagctacgacaagcccgccgtggacgacgacgacgagggcatggagaccctggaggaggacaccgaggagagcagcagaagcggcagagagagcgtgagcaccgccagcgaccagcccagccacagcctggagagacagatgaacggcaaccaggagaagggcgacaagaccgacagaaagaaggacaagaccggcaaggagaagaagaaggacagagacaaggagaaggacaagatgaaggccaagaagggcatgctgaagggcctgggcgacatgttcagattcggcaagcacagaaaggacgacaagatcgagaagaccggcaagatcaagatccaggagagcttcaccagcgaggaggagagaatcagaatgaagcaggagcaggagagaatccaggccaagaccagagagttcagagagagacaggccagagagagagactacgccgagatccaggacttccacagaaccttcggctgcgacgacgagctgatgtacggcggcgtgagcagctacgagggcagcatggccctgaacgccagaccccagagccccagagagggccacatgatggacgccctgtacgcccaggtgaagaagcccagaaacagcaagcccagccccgtggacagcaacagaagcacccccagcaaccacgacagaatccagagactgagacaggagttccagcaggccaagcaggacgaggacgtggaggacagaagaagaacctacagcttcgagcagccctggcccaacgccagacccgccacccagagcggcagacacagcgtgagcgtggaggtgcagatgcagagacagagacaggaggagagagagagcagccagcaggcccagagacagtacagcagcctgcccagacagagcagaaagaacgccagcagcgtgagccaggacagctgggagcagaactacagccccggcgagggcttccagagcgccaaggagaaccccagatacagcagctaccagggcagcagaaacggctacctgggcggccacggcttcaacgccagagtgatgctggagacccaggagctgctgagacaggagcagagaagaaaggagcagcagatgaagaagcagccccccagcgagggccccagcaactacgacagctacaagaaggtgcaggaccccagctacgccccccccaagggccccttcagacaggacgtgccccccagccccagccaggtggccagactgaacagactgcagacccccgagaagggcagacccttctacagctag

SEQ ID NO: 92463 - DNA, 540 bp, synthetic construct
  misc_feature 1..540: note = Description of Artificial Sequence: Synthetic coding sequence
  source 1..540: mol_type = other DNA
atgcagatccccaaggagaccaaggccgaggacgaggacatcgtgctgacccccgacggcaccagagagttcctgaccttcgaggtgcccctgaacgacagcggcagcgccggcctgggcgtgagcgtgaagggcaacagaagcaaggagaaccacgccgacctgggcatcttcgtgaagagcatcatcaacggcggcgccgccagcaaggacggcagactgagagtgaacgaccagctgatcgccgtgaacggcgagagcctgctgggcaagaccaaccaggacgccatggagaccctgagaagaagcatgagcaccgagggcaacaagagaggcatgatccagctgatcgtggccagaagaatcagcaagtgcaacgagctgaagagccccggcagcccccccggccccgagctgcccatcgagaccgccctggacgacagagagagaagaatcagccacagcctgtacagcggcatcgagggcctggacgagagccccagcagaaacgccgccctgagcagaatcatgggcacctag

SEQ ID NO: 92464 - DNA, 3006 bp, synthetic construct
  misc_feature 1..3006: note = Description of Artificial Sequence: Synthetic coding sequence
  source 1..3006: mol_type = other DNA
atgaaggtgaccgtgtgcttcggcagaaccagagtggtggtgccctgcggcgacggccacatgaaggtgttcagcctgatccagcaggccgtgaccagatacagaaaggccatcgccaaggaccccaactactggatccaggtgcacagactggagcacggcgacggcggcatcctggacctggacgacatcctgtgcgacgtggccgacgacaaggacagactggtggccgtgttcgacgagcaggacccccaccacggcggcgacggcaccagcgccagcagcaccggcacccagagccccgagatcttcggcagcgagctgggcaccaacaacgtgagcgccttccagccctaccaggccaccagcgagatcgaggtgacccccagcgtgctgagagccaacatgcccctgcacgtgagaagaagcagcgaccccgccctgatcggcctgagcaccagcgtgagcgacagcaacttcagcagcgaggagcccagcagaaagaaccccaccagatggagcaccaccgccggcttcctgaagcagaacaccgccggcagccccaagacctgcgacagaaagaaggacgagaactacagaagcctgcccagagacaccagcaactggagcaaccagttccagagagacaacgccagaagcagcctgagcgccagccaccccatggtgggcaagtggctggagaagcaggagcaggacgaggacggcaccgaggaggacaacagcagagtggagcccgtgggccacgccgacaccggcctggagcacatccccaacttcagcctggacgacatggtgaagctggtggaggtgcccaacgacggcggccccctgggcatccacgtggtgcccttcagcgccagaggcggcagaaccctgggcctgctggtgaagagactggagaagggcggcaaggccgagcacgagaacctgttcagagagaacgactgcatcgtgagaatcaacgacggcgacctgagaaacagaagattcgagcaggcccagcacatgttcagacaggccatgagaacccccatcatctggttccacgtggtgcccgccgccaacaaggagcagtacgagcagctgagccagagcgagaagaacaactactacagcagcagattcagccccgacagccagtacatcgacaacagaagcgtgaacagcgccggcctgcacaccgtgcagagagcccccagactgaaccacccccccgagcagatcgacagccacagcagactgccccacagcgcccaccccagcggcaagccccccagcgcccccgccagcgccccccagaacgtgttcagcaccaccgtgagcagcggctacaacaccaagaagatcggcaagagactgaacatccagctgaagaagggcaccgagggcctgggcttcagcatcaccagcagagacgtgaccatcggcggcagcgcccccatctacgtgaagaacatcctgcccagaggcgccgccatccaggacggcagactgaaggccggcgacagactgatcgaggtgaacggcgtggacctggtgggcaagagccaggaggaggtggtgagcctgctgagaagcaccaagatggagggcaccgtgagcctgctggtgttcagacaggaggacgccttccaccccagagagctgaacgccgagcccagccagatgcagatccccaaggagaccaaggccgaggacgaggacatcgtgctgacccccgacggcaccagagagttcctgaccttcgaggtgcccctgaacgacagcggcagcgccggcctgggcgtgagcgtgaagggcaacagaagcaaggagaaccacgccgacctgggcatcttcgtgaagagcatcatcaacggcggcgccgccagcaaggacggcagactgagagtgaacgaccagctgatcgccgtgaacggcgagagcctgctgggcaagaccaaccaggacgccatggagaccctgagaagaagcatgagcaccgagggcaacaagagaggcatgatccagctgatcgtggccagaagaatcagcaagtgcaacgagctgaagagccccggcagcccccccggccccgagctgcccatcgagaccgccctggacgacagagagagaagaatcagccacagcctgtacagcggcatcgagggcctggacgagagccccagcagaaacgccgccctgagcagaatcatgggcaagtaccagctgagccccaccgtgaacatgccccaggacgacaccgtgatcatcgaggacgacagactgcccgtgctgcccccccacctgagcgaccagagcagcagcagcagccacgacgacgtgggcttcgtgaccgccgacgccggcacctgggccaaggccgccatcagcgacagcgccgactgcagcctgagccccgacgtggaccccgtgctggccttccagagagagggcttcggcagacagatcgccgacgagaccaagctgaacaccgtggacgaccagaaggccggcagccccagcagagacgtgggccccagcctgggcctgaagaagagcagcagcctggagagcctgcagaccgccgtggccgaggtgaccctgaacggcgacatccccttccacagacccagacccagaatcatcagaggcagaggctgcaacgagagcttcagagccgccatcgacaagagctacgacaagcccgccgtggacgacgacgacgagggcatggagaccctggaggaggacaccgaggagagcagcagaagcggcagagagagcgtgagcaccgccagcgaccagcccagccacagcctggagagacagatgaacggcaaccaggagaagggcgacaagaccgacagaaagaaggacaagaccggcaaggagaagaagaaggacagagacaaggagaaggacaagatgaaggccaagaagggcatgctgaagggcctgggcgacatgttcagcctggccaagctgaagcccgagaagagatag

SEQ ID NO: 92465 - DNA, 2967 bp, synthetic construct
  misc_feature 1..2967: note = Description of Artificial Sequence: Synthetic coding sequence
  source 1..2967: mol_type = other DNA
atgaaggtgaccgtgtgcttcggcagaaccagagtggtggtgccctgcggcgacggccacatgaaggtgttcagcctgatccagcaggccgtgaccagatacagaaaggccatcgccaaggaccccaactactggatccaggtgcacagactggagcacggcgacggcggcatcctggacctggacgacatcctgtgcgacgtggccgacgacaaggacagactggtggccgtgttcgacgagcaggacccccaccacggcggcgacggcaccagcgccagcagcaccggcacccagagccccgagatcttcggcagcgagctgggcaccaacaacgtgagcgccttccagccctaccaggccaccagcgagatcgaggtgacccccagcgtgctgagagccaacatgcccctgcacgtgagaagaagcagcgaccccgccctgatcggcctgagcaccagcgtgagcgacagcaacttcagcagcgaggagcccagcagaaagaaccccaccagatggagcaccaccgccggcttcctgaagcagaacaccgccggcagccccaagacctgcgacagaaagaaggacgagaactacagaagcctgcccagagacaccagcaactggagcaaccagttccagagagacaacgccagaagcagcctgagcgccagccaccccatggtgggcaagtggctggagaagcaggagcaggacgaggacggcaccgaggaggacaacagcagagtggagcccgtgggccacgccgacaccggcctggagcacatccccaacttcagcctggacgacatggtgaagctggtggaggtgcccaacgacggcggccccctgggcatccacgtggtgcccttcagcgccagaggcggcagaaccctgggcctgctggtgaagagactggagaagggcggcaaggccgagcacgagaacctgttcagagagaacgactgcatcgtgagaatcaacgacggcgacctgagaaacagaagattcgagcaggcccagcacatgttcagacaggccatgagaacccccatcatctggttccacgtggtgcccgccgccaacaaggagcagtacgagcagctgagccagagcgagaagaacaactactacagcagcagattcagccccgacagccagtacatcgacaacagaagcgtgaacagcgccggcctgcacaccgtgcagagagcccccagactgaaccacccccccgagcagatcgacagccacagcagactgccccacagcgcccaccccagcggcaagccccccagcgcccccgccagcgccccccagaacgtgttcagcaccaccgtgagcagcggctacaacaccaagaagatcggcaagagactgaacatccagctgaagaagggcaccgagggcctgggcttcagcatcaccagcagagacgtgaccatcggcggcagcgcccccatctacgtgaagaacatcctgcccagaggcgccgccatccaggacggcagactgaaggccggcgacagactgatcgaggtgaacggcgtggacctggtgggcaagagccaggaggaggtggtgagcctgctgagaagcaccaagatggagggcaccgtgagcctgctggtgttcagacaggaggacgccttccaccccagagagctgaaggccgaggacgaggacatcgtgctgacccccgacggcaccagagagttcctgaccttcgaggtgcccctgaacgacagcggcagcgccggcctgggcgtgagcgtgaagggcaacagaagcaaggagaaccacgccgacctgggcatcttcgtgaagagcatcatcaacggcggcgccgccagcaaggacggcagactgagagtgaacgaccagctgatcgccgtgaacggcgagagcctgctgggcaagaccaaccaggacgccatggagaccctgagaagaagcatgagcaccgagggcaacaagagaggcatgatccagctgatcgtggccagaagaatcagcaagtgcaacgagctgaagagccccggcagcccccccggccccgagctgcccatcgagaccgccctggacgacagagagagaagaatcagccacagcctgtacagcggcatcgagggcctggacgagagccccagcagaaacgccgccctgagcagaatcatgggcaagtaccagctgagccccaccgtgaacatgccccaggacgacaccgtgatcatcgaggacgacagactgcccgtgctgcccccccacctgagcgaccagagcagcagcagcagccacgacgacgtgggcttcgtgaccgccgacgccggcacctgggccaaggccgccatcagcgacagcgccgactgcagcctgagccccgacgtggaccccgtgctggccttccagagagagggcttcggcagacagatcgccgacgagaccaagctgaacaccgtggacgaccagaaggccggcagccccagcagagacgtgggccccagcctgggcctgaagaagagcagcagcctggagagcctgcagaccgccgtggccgaggtgaccctgaacggcgacatccccttccacagacccagacccagaatcatcagaggcagaggctgcaacgagagcttcagagccgccatcgacaagagctacgacaagcccgccgtggacgacgacgacgagggcatggagaccctggaggaggacaccgaggagagcagcagaagcggcagagagagcgtgagcaccgccagcgaccagcccagccacagcctggagagacagatgaacggcaaccaggagaagggcgacaagaccgacagaaagaaggacaagaccggcaaggagaagaagaaggacagagacaaggagaaggacaagatgaaggccaagaagggcatgctgaagggcctgggcgacatgttcagcctggccaagctgaagcccgagaagagatag

SEQ ID NO: 92466 - DNA, 4062 bp, synthetic construct
  misc_feature 1..4062: note = Description of Artificial Sequence: Synthetic coding sequence
  source 1..4062: mol_type = other DNA
atgaaggtgaccgtgtgcttcggcagaaccagagtggtggtgccctgcggcgacggccacatgaaggtgttcagcctgatccagcaggccgtgaccagatacagaaaggccatcgccaaggaccccaactactggatccaggtgcacagactggagcacggcgacggcggcatcctggacctggacgacatcctgtgcgacgtggccgacgacaaggacagactggtggccgtgttcgacgagcaggacccccaccacggcggcgacggcaccagcgccagcagcaccggcacccagagccccgagatcttcggcagcgagctgggcaccaacaacgtgagcgccttccagccctaccaggccaccagcgagatcgaggtgacccccagcgtgctgagagccaacatgcccctgcacgtgagaagaagcagcgaccccgccctgatcggcctgagcaccagcgtgagcgacagcaacttcagcagcgaggagcccagcagaaagaaccccaccagatggagcaccaccgccggcttcctgaagcagaacaccgccggcagccccaagacctgcgacagaaagaaggacgagaactacagaagcctgcccagagacaccagcaactggagcaaccagttccagagagacaacgccagaagcagcctgagcgccagccaccccatggtgggcaagtggctggagaagcaggagcaggacgaggacggcaccgaggaggacaacagcagagtggagcccgtgggccacgccgacaccggcctggagcacatccccaacttcagcctggacgacatggtgaagctggtggaggtgcccaacgacggcggccccctgggcatccacgtggtgcccttcagcgccagaggcggcagaaccctgggcctgctggtgaagagactggagaagggcggcaaggccgagcacgagaacctgttcagagagaacgactgcatcgtgagaatcaacgacggcgacctgagaaacagaagattcgagcaggcccagcacatgttcagacaggccatgagaacccccatcatctggttccacgtggtgcccgccgccaacaaggagcagtacgagcagctgagccagagcgagaagaacaactactacagcagcagattcagccccgacagccagtacatcgacaacagaagcgtgaacagcgccggcctgcacaccgtgcagagagcccccagactgaaccacccccccgagcagatcgacagccacagcagactgccccacagcgcccaccccagcggcaagccccccagcgcccccgccagcgccccccagaacgtgttcagcaccaccgtgagcagcggctacaacaccaagaagatcggcaagagactgaacatccagctgaagaagggcaccgagggcctgggcttcagcatcaccagcagagacgtgaccatcggcggcagcgcccccatctacgtgaagaacatcctgcccagaggcgccgccatccaggacggcagactgaaggccggcgacagactgatcgaggtgaacggcgtggacctggtgggcaagagccaggaggaggtggtgagcctgctgagaagcaccaagatggagggcaccgtgagcctgctggtgttcagacaggaggacgccttccaccccagagagctgaacgccgagcccagccagatgcagatccccaaggagaccaaggccgaggacgaggacatcgtgctgacccccgacggcaccagagagttcctgaccttcgaggtgcccctgaacgacagcggcagcgccggcctgggcgtgagcgtgaagggcaacagaagcaaggagaaccacgccgacctgggcatcttcgtgaagagcatcatcaacggcggcgccgccagcaaggacggcagactgagagtgaacgaccagctgatcgccgtgaacggcgagagcctgctgggcaagaccaaccaggacgccatggagaccctgagaagaagcatgagcaccgagggcaacaagagaggcatgatccagctgatcgtggccagaagaatcagcaagtgcaacgagctgaagagccccggcagcccccccggccccgagctgcccatcgagaccgccctggacgacagagagagaagaatcagccacagcctgtacagcggcatcgagggcctggacgagagccccagcagaaacgccgccctgagcagaatcatgggcaagtaccagctgagccccaccgtgaacatgccccaggacgacaccgtgatcatcgaggacgacagactgcccgtgctgcccccccacctgagcgaccagagcagcagcagcagccacgacgacgtgggcttcgtgaccgccgacgccggcacctgggccaaggccgccatcagcgacagcgccgactgcagcctgagccccgacgtggaccccgtgctggccttccagagagagggcttcggcagacagagcatgagcgagaagagaaccaagcagttcagcgacgccagccagctggacttcgtgaagaccagaaagagcaagagcatggacctgggcatcgccgacgagaccaagctgaacaccgtggacgaccagaaggccggcagccccagcagagacgtgggccccagcctgggcctgaagaagagcagcagcctggagagcctgcagaccgccgtggccgaggtgaccctgaacggcgacatccccttccacagacccagacccagaatcatcagaggcagaggctgcaacgagagcttcagagccgccatcgacaagagctacgacaagcccgccgtggacgacgacgacgagggcatggagaccctggaggaggacaccgaggagagcagcagaagcggcagagagagcgtgagcaccgccagcgaccagcccagccacagcctggagagacagatgaacggcaaccaggagaagggcgacaagaccgacagaaagaaggacaagaccggcaaggagaagaagaaggacagagacaaggagaaggacaagatgaaggccaagaagggcatgctgaagggcctgggcgacatgttcagattcggcaagcacagaaaggacgacaagatcgagaagaccggcaagatcaagatccaggagagcttcaccagcgaggaggagagaatcagaatgaagcaggagcaggagagaatccaggccaagaccagagagttcagagagagacaggccagagagagagactacgccgagatccaggacttccacagaaccttcggctgcgacgacgagctgatgtacggcggcgtgagcagctacgagggcagcatggccctgaacgccagaccccagagccccagagagggccacatgatggacgccctgtacgcccaggtgaagaagcccagaaacagcaagcccagccccgtggacagcaacagaagcacccccagcaaccacgacagaatccagagactgagacaggagttccagcaggccaagcaggacgaggacgtggaggacagaagaagaacctacagcttcgagcagccctggcccaacgccagacccgccacccagagcggcagacacagcgtgagcgtggaggtgcagatgcagagacagagacaggaggagagagagagcagccagcaggcccagagacagtacagcagcctgcccagacagagcagaaagaacgccagcagcgtgagccaggacagctgggagcagaactacagccccggcgagggcttccagagcgccaaggagaaccccagatacagcagctaccagggcagcagaaacggctacctgggcggccacggcttcaacgccagagtgatgctggagacccaggagctgctgagacaggagcagagaagaaaggagcagcagatgaagaagcagccccccagcgagggccccagcaactacgacagctacaagaaggtgcaggaccccagctacgccccccccaagggccccttcagacaggacgtgccccccagccccagccaggtggccagactgaacagactgcagacccccgagaagggcagacccttctacagctag

SEQ ID NO: 92467 - DNA, 4071 bp, synthetic construct
  misc_feature 1..4071: note = Description of Artificial Sequence: Synthetic coding sequence
  source 1..4071: mol_type = other DNA
atgaaggtgaccgtgtgcttcggcagaaccagagtggtggtgccctgcggcgacggccacatgaaggtgttcagcctgatccagcaggccgtgaccagatacagaaaggccatcgccaaggaccccaactactggatccaggtgcacagactggagcacggcgacggcggcatcctggacctggacgacatcctgtgcgacgtggccgacgacaaggacagactggtggccgtgttcgacgagcaggacccccaccacggcggcgacggcaccagcgccagcagcaccggcacccagagccccgagatcttcggcagcgagctgggcaccaacaacgtgagcgccttccagccctaccaggccaccagcgagatcgaggtgacccccagcgtgctgagagccaacatgcccctgcacgtgagaagaagcagcgaccccgccctgatcggcctgagcaccagcgtgagcgacagcaacttcagcagcgaggagcccagcagaaagaaccccaccagatggagcaccaccgccggcttcctgaagcagaacaccgccggcagccccaagacctgcgacagaaagaaggacgagaactacagaagcctgcccagagacaccagcaactggagcaaccagttccagagagacaacgccagaagcagcctgagcgccagccaccccatggtgggcaagtggctggagaagcaggagcaggacgaggacggcaccgaggaggacaacagcagagtggagcccgtgggccacgccgacaccggcctggagcacatccccaacttcagcctggacgacatggtgaagctggtggaggtgcccaacgacggcggccccctgggcatccacgtggtgcccttcagcgccagaggcggcagaaccctgggcctgctggtgaagagactggagaagggcggcaaggccgagcacgagaacctgttcagagagaacgactgcatcgtgagaatcaacgacggcgacctgagaaacagaagattcgagcaggcccagcacatgttcagacaggccatgagaacccccatcatctggttccacgtggtgcccgccgccaacaaggagcagtacgagcagctgagccagagcgagaagaacaactactacagcagcagattcagccccgacagccagtacatcgacaacagaagcgtgaacagcgccggcctgcacaccgtgcagagagcccccagactgaaccacccccccgagcagatcgacagccacagcagactgccccacagcgcccaccccagcggcaagccccccagcgcccccgccagcgccccccagaacgtgttcagcaccaccgtgagcagcggctacaacaccaagaagatcggcaagagactgaacatccagctgaagaagggcaccgagggcctgggcttcagcatcaccagcagagacgtgaccatcggcggcagcgcccccatctacgtgaagaacatcctgcccagaggcgccgccatccaggacggcagactgaaggccggcgacagactgatcgaggtgaacggcgtggacctggtgggcaagagccaggaggaggtggtgagcctgctgagaagcaccaagatggagggcaccgtgagcctgctggtgttcagacaggaggacgccttccaccccagagagctgaacgccgagcccagccagatgcagatccccaaggagaccaaggccgaggacgaggacatcgtgctgacccccgacggcaccagagagttcctgaccttcgaggtgcccctgaacgacagcggcagcgccggcctgggcgtgagcgtgaagggcaacagaagcaaggagaaccacgccgacctgggcatcttcgtgaagagcatcatcaacggcggcgccgccagcaaggacggcagactgagagtgaacgaccagctgatcgccgtgaacggcgagagcctgctgggcaagaccaaccaggacgccatggagaccctgagaagaagcatgagcaccgagggcaacaagagaggcatgatccagctgatcgtggccagaagaatcagcaagtgcaacgagctgaagagccccggcagcccccccggccccgagctgcccatcgagaccgccctggacgacagagagagaagaatcagccacagcctgtacagcggcatcgagggcctggacgagagccccagcagaaacgccgccctgagcagaatcatgggcgagagcggcaagtaccagctgagccccaccgtgaacatgccccaggacgacaccgtgatcatcgaggacgacagactgcccgtgctgcccccccacctgagcgaccagagcagcagcagcagccacgacgacgtgggcttcgtgaccgccgacgccggcacctgggccaaggccgccatcagcgacagcgccgactgcagcctgagccccgacgtggaccccgtgctggccttccagagagagggcttcggcagacagagcatgagcgagaagagaaccaagcagttcagcgacgccagccagctggacttcgtgaagaccagaaagagcaagagcatggacctgggcatcgccgacgagaccaagctgaacaccgtggacgaccagaaggccggcagccccagcagagacgtgggccccagcctgggcctgaagaagagcagcagcctggagagcctgcagaccgccgtggccgaggtgaccctgaacggcgacatccccttccacagacccagacccagaatcatcagaggcagaggctgcaacgagagcttcagagccgccatcgacaagagctacgacaagcccgccgtggacgacgacgacgagggcatggagaccctggaggaggacaccgaggagagcagcagaagcggcagagagagcgtgagcaccgccagcgaccagcccagccacagcctggagagacagatgaacggcaaccaggagaagggcgacaagaccgacagaaagaaggacaagaccggcaaggagaagaagaaggacagagacaaggagaaggacaagatgaaggccaagaagggcatgctgaagggcctgggcgacatgttcagattcggcaagcacagaaaggacgacaagatcgagaagaccggcaagatcaagatccaggagagcttcaccagcgaggaggagagaatcagaatgaagcaggagcaggagagaatccaggccaagaccagagagttcagagagagacaggccagagagagagactacgccgagatccaggacttccacagaaccttcggctgcgacgacgagctgatgtacggcggcgtgagcagctacgagggcagcatggccctgaacgccagaccccagagccccagagagggccacatgatggacgccctgtacgcccaggtgaagaagcccagaaacagcaagcccagccccgtggacagcaacagaagcacccccagcaaccacgacagaatccagagactgagacaggagttccagcaggccaagcaggacgaggacgtggaggacagaagaagaacctacagcttcgagcagccctggcccaacgccagacccgccacccagagcggcagacacagcgtgagcgtggaggtgcagatgcagagacagagacaggaggagagagagagcagccagcaggcccagagacagtacagcagcctgcccagacagagcagaaagaacgccagcagcgtgagccaggacagctgggagcagaactacagccccggcgagggcttccagagcgccaaggagaaccccagatacagcagctaccagggcagcagaaacggctacctgggcggccacggcttcaacgccagagtgatgctggagacccaggagctgctgagacaggagcagagaagaaaggagcagcagatgaagaagcagccccccagcgagggccccagcaactacgacagctacaagaaggtgcaggaccccagctacgccccccccaagggccccttcagacaggacgtgccccccagccccagccaggtggccagactgaacagactgcagacccccgagaagggcagacccttctacagctag

SEQ ID NO: 92468 - DNA, 3891 bp, synthetic construct
  misc_feature 1..3891: note = Description of Artificial Sequence: Synthetic coding sequence
  source 1..3891: mol_type = other DNA
atgaaggtgaccgtgtgcttcggcagaaccagagtggtggtgccctgcggcgacggccacatgaaggtgttcagcctgatccagcaggccgtgaccagatacagaaaggccatcgccaaggaccccaactactggatccaggtgcacagactggagcacggcgacggcggcatcctggacctggacgacatcctgtgcgacgtggccgacgacaaggacagactggtggccgtgttcgacgagcaggacccccaccacggcggcgacggcaccagcgccagcagcaccggcacccagagccccgagatcttcggcagcgagctgggcaccaacaacgtgagcgccttccagccctaccaggccaccagcgagatcgaggtgacccccagcgtgctgagagccaacatgcccctgcacgtgagaagaagcagcgaccccgccctgatcggcctgagcaccagcgtgagcgacagcaacttcagcagcgaggagcccagcagaaagaaccccaccagatggagcaccaccgccggcttcctgaagcagaacaccgccggcagccccaagacctgcgacagaaaggacgaggacggcaccgaggaggacaacagcagagtggagcccgtgggccacgccgacaccggcctggagcacatccccaacttcagcctggacgacatggtgaagctggtggaggtgcccaacgacggcggccccctgggcatccacgtggtgcccttcagcgccagaggcggcagaaccctgggcctgctggtgaagagactggagaagggcggcaaggccgagcacgagaacctgttcagagagaacgactgcatcgtgagaatcaacgacggcgacctgagaaacagaagattcgagcaggcccagcacatgttcagacaggccatgagaacccccatcatctggttccacgtggtgcccgccgccaacaaggagcagtacgagcagctgagccagagcgagaagaacaactactacagcagcagattcagccccgacagccagtacatcgacaacagaagcgtgaacagcgccggcctgcacaccgtgcagagagcccccagactgaaccacccccccgagcagatcgacagccacagcagactgccccacagcgcccaccccagcggcaagccccccagcgcccccgccagcgccccccagaacgtgttcagcaccaccgtgagcagcggctacaacaccaagaagatcggcaagagactgaacatccagctgaagaagggcaccgagggcctgggcttcagcatcaccagcagagacgtgaccatcggcggcagcgcccccatctacgtgaagaacatcctgcccagaggcgccgccatccaggacggcagactgaaggccggcgacagactgatcgaggtgaacggcgtggacctggtgggcaagagccaggaggaggtggtgagcctgctgagaagcaccaagatggagggcaccgtgagcctgctggtgttcagacaggaggacgccttccaccccagagagctgaaggccgaggacgaggacatcgtgctgacccccgacggcaccagagagttcctgaccttcgaggtgcccctgaacgacagcggcagcgccggcctgggcgtgagcgtgaagggcaacagaagcaaggagaaccacgccgacctgggcatcttcgtgaagagcatcatcaacggcggcgccgccagcaaggacggcagactgagagtgaacgaccagctgatcgccgtgaacggcgagagcctgctgggcaagaccaaccaggacgccatggagaccctgagaagaagcatgagcaccgagggcaacaagagaggcatgatccagctgatcgtggccagaagaatcagcaagtgcaacgagctgaagagccccggcagcccccccggccccgagctgcccatcgagaccgccctggacgacagagagagaagaatcagccacagcctgtacagcggcatcgagggcctggacgagagccccagcagaaacgccgccctgagcagaatcatgggcaagtaccagctgagccccaccgtgaacatgccccaggacgacaccgtgatcatcgaggacgacagactgcccgtgctgcccccccacctgagcgaccagagcagcagcagcagccacgacgacgtgggcttcgtgaccgccgacgccggcacctgggccaaggccgccatcagcgacagcgccgactgcagcctgagccccgacgtggaccccgtgctggccttccagagagagggcttcggcagacagagcatgagcgagaagagaaccaagcagttcagcgacgccagccagctggacttcgtgaagaccagaaagagcaagagcatggacctgggcatcgccgacgagaccaagctgaacaccgtggacgaccagaaggccggcagccccagcagagacgtgggccccagcctgggcctgaagaagagcagcagcctggagagcctgcagaccgccgtggccgaggtgaccctgaacggcgacatccccttccacagacccagacccagaatcatcagaggcagaggctgcaacgagagcttcagagccgccatcgacaagagctacgacaagcccgccgtggacgacgacgacgagggcatggagaccctggaggaggacaccgaggagagcagcagaagcggcagagagagcgtgagcaccgccagcgaccagcccagccacagcctggagagacagatgaacggcaaccaggagaagggcgacaagaccgacagaaagaaggacaagaccggcaaggagaagaagaaggacagagacaaggagaaggacaagatgaaggccaagaagggcatgctgaagggcctgggcgacatgttcagattcggcaagcacagaaaggacgacaagatcgagaagaccggcaagatcaagatccaggagagcttcaccagcgaggaggagagaatcagaatgaagcaggagcaggagagaatccaggccaagaccagagagttcagagagagacaggccagagagagagactacgccgagatccaggacttccacagaaccttcggctgcgacgacgagctgatgtacggcggcgtgagcagctacgagggcagcatggccctgaacgccagaccccagagccccagagagggccacatgatggacgccctgtacgcccaggtgaagaagcccagaaacagcaagcccagccccgtggacagcaacagaagcacccccagcaaccacgacagaatccagagactgagacaggagttccagcaggccaagcaggacgaggacgtggaggacagaagaagaacctacagcttcgagcagccctggcccaacgccagacccgccacccagagcggcagacacagcgtgagcgtggaggtgcagatgcagagacagagacaggaggagagagagagcagccagcaggcccagagacagtacagcagcctgcccagacagagcagaaagaacgccagcagcgtgagccaggacagctgggagcagaactacagccccggcgagggcttccagagcgccaaggagaaccccagatacagcagctaccagggcagcagaaacggctacctgggcggccacggcttcaacgccagagtgatgctggagacccaggagctgctgagacaggagcagagaagaaaggagcagcagatgaagaagcagccccccagcgagggccccagcaactacgacagctacaagaaggtgcaggaccccagctacgccccccccaagggccccttcagacaggacgtgccccccagccccagccaggtggccagactgaacagactgcagacccccgagaagggcagacccttctacagctag

SEQ ID NO: 92469 - DNA, 3735 bp, synthetic construct
  misc_feature 1..3735: note = Description of Artificial Sequence: Synthetic coding sequence
  source 1..3735: mol_type = other DNA
atgaaggtgaccgtgtgcttcggcagaaccagagtggtggtgccctgcggcgacggccacatgaaggtgttcagcctgatccagcaggccgtgaccagatacagaaaggccatcgccaaggaccccaactactggatccaggtgcacagactggagcacggcgacggcggcatcctggacctggacgacatcctgtgcgacgtggccgacgacaaggacagactggtggccgtgttcgacgagcaggacccccaccacggcggcgacggcaccagcgccagcagcaccggcacccagagccccgagatcttcggcagcgagctgggcaccaacaacgtgagcgccttccagccctaccaggccaccagcgagatcgaggtgacccccagcgtgctgagagccaacatgcccctgcacgtgagaagaagcagcgaccccgccctgatcggcctgagcaccagcgtgagcgacagcaacttcagcagcgaggagcccagcagaaagaaccccaccagatggagcaccaccgccggcttcctgaagcagaacaccgccggcagccccaagacctgcgacagaaaggacgaggacggcaccgaggaggacaacagcagagtggagcccgtgggccacgccgacaccggcctggagcacatccccaacttcagcctggacgacatggtgaagctggtggaggtgcccaacgacggcggccccctgggcatccacgtggtgcccttcagcgccagaggcggcagaaccctgggcctgctggtgaagagactggagaagggcggcaaggccgagcacgagaacctgttcagagagaacgactgcatcgtgagaatcaacgacggcgacctgagaaacagaagattcgagcaggcccagcacatgttcagacaggccatgagaacccccatcatctggttccacgtggtgcccgccgccaacaaggagcagtacgagcagctgagccagagcgagaagaacaactactacagcagcagattcagccccgacagccagtacatcgacaacagaagcgtgaacagcgccggcctgcacaccgtgcagagagcccccagactgaaccacccccccgagcagatcgacagccacagcagactgccccacagcgcccaccccagcggcaagccccccagcgcccccgccagcgccccccagaacgtgttcagcaccaccgtgagcagcggctacaacaccaagaagatcggcaagagactgaacatccagctgaagaagggcaccgagggcctgggcttcagcatcaccagcagagacgtgaccatcggcggcagcgcccccatctacgtgaagaacatcctgcccagaggcgccgccatccaggacggcagactgaaggccggcgacagactgatcgaggtgaacggcgtggacctggtgggcaagagccaggaggaggtggtgagcctgctgagaagcaccaagatggagggcaccgtgagcctgctggtgttcagacaggaggacgccttccaccccagagagctgaaggccgaggacgaggacatcgtgctgacccccgacggcaccagagagttcctgaccttcgaggtgcccctgaacgacagcggcagcgccggcctgggcgtgagcgtgaagggcaacagaagcaaggagaaccacgccgacctgggcatcttcgtgaagagcatcatcaacggcggcgccgccagcaaggacggcagactgagagtgaacgaccagctgatcgccgtgaacggcgagagcctgctgggcaagaccaaccaggacgccatggagaccctgagaagaagcatgagcaccgagggcaacaagagaggcatgatccagctgatcgtggccagaagaatcagcaagtgcaacgagctgaagagccccggcagcccccccggccccgagctgcccatcgagaccgccctggacgacagagagagaagaatcagccacagcctgtacagcggcatcgagggcctggacgagagccccagcagaaacgccgccctgagcagaatcatgggcaagtaccagctgagccccaccgtgaacatgccccaggacgacaccgtgatcatcgaggacgacagactgcccgtgctgcccccccacctgagcgaccagagcagcagcagcagccacgacgacgtgggcttcgtgaccgccgacgccggcacctgggccaaggccgccatcagcgacagcgccgactgcagcctgagccccgacgtggaccccgtgctggccttccagagagagggcttcggcagacagagcatgagcgagaagagaaccaagcagttcagcgacgccagccagctggacttcgtgaagaccagaaagagcaagagcatggacctgggcagcagccccagcagagacgtgggccccagcctgggcctgaagaagagcagcagcctggagagcctgcagaccgccgtggccgaggtgaccctgaacggcgacatccccttccacagacccagacccagaatcatcagaggcagaggctgcaacgagagcttcagagccgccatcgacaagagctacgacaagcccgccgtggacgacgacgacgagggcatggagaccctggaggaggacaccgaggagagcagcagaagcggcagagagagcgtgagcaccgccagcgaccagcccagccacagcctggagagacagatgaacggcaaccaggagaagggcgacaagaccgacagaaagaaggacaagaccggcaaggagaagaagaaggacagagacaaggagaaggacaagatgaaggccaagaagggcatgctgaagggcctgggcgacatgttcagaatccaggccaagaccagagagttcagagagagacaggccagagagagagactacgccgagatccaggacttccacagaaccttcggctgcgacgacgagctgatgtacggcggcgtgagcagctacgagggcagcatggccctgaacgccagaccccagagccccagagagggccacatgatggacgccctgtacgcccaggtgaagaagcccagaaacagcaagcccagccccgtggacagcaacagaagcacccccagcaaccacgacagaatccagagactgagacaggagttccagcaggccaagcaggacgaggacgtggaggacagaagaagaacctacagcttcgagcagccctggcccaacgccagacccgccacccagagcggcagacacagcgtgagcgtggaggtgcagatgcagagacagagacaggaggagagagagagcagccagcaggcccagagacagtacagcagcctgcccagacagagcagaaagaacgccagcagcgtgagccaggacagctgggagcagaactacagccccggcgagggcttccagagcgccaaggagaaccccagatacagcagctaccagggcagcagaaacggctacctgggcggccacggcttcaacgccagagtgatgctggagacccaggagctgctgagacaggagcagagaagaaaggagcagcagatgaagaagcagccccccagcgagggccccagcaactacgacagctacaagaaggtgcaggaccccagctacgccccccccaagggccccttcagacaggacgtgccccccagccccagccaggtggccagactgaacagactgcagacccccgagaagggcagacccttctacagctag

SEQ ID NO: 92470 - DNA, 2244 bp, synthetic construct
  misc_feature 1..2244: note = Description of Artificial Sequence: Synthetic coding sequence
  source 1..2244: mol_type = other DNA
atggtgaagctggtggaggtgcccaacgacggcggccccctgggcatccacgtggtgcccttcagcgccagaggcggcagaaccctgggcctgctggtgaagagactggagaagggcggcaaggccgagcacgagaacctgttcagagagaacgactgcatcgtgagaatcaacgacggcgacctgagaaacagaagattcgagcaggcccagcacatgttcagacaggccatgagaacccccatcatctggttccacgtggtgcccgccgccaacaaggagcagtacgagcagctgagccagagcgagaagaacaactactacagcagcagattcagccccgacagccagtacatcgacaacagaagcgtgaacagcgccggcctgcacaccgtgcagagagcccccagactgaaccacccccccgagcagatcgacagccacagcagactgccccacagcgcccaccccagcggcaagccccccagcgcccccgccagcgccccccagaacgtgttcagcaccaccgtgagcagcggctacaacaccaagaagatcggcaagagactgaacatccagctgaagaagggcaccgagggcctgggcttcagcatcaccagcagagacgtgaccatcggcggcagcgcccccatctacgtgaagaacatcctgcccagaggcgccgccatccaggacggcagactgaaggccggcgacagactgatcgaggtgaacggcgtggacctggtgggcaagagccaggaggaggtggtgagcctgctgagaagcaccaagatggagggcaccgtgagcctgctggtgttcagacaggaggacgccttccaccccagagagctgaaggccgaggacgaggacatcgtgctgacccccgacggcaccagagagttcctgaccttcgaggtgcccctgaacgacagcggcagcgccggcctgggcgtgagcgtgaagggcaacagaagcaaggagaaccacgccgacctgggcatcttcgtgaagagcatcatcaacggcggcgccgccagcaaggacggcagactgagagtgaacgaccagctgatcgccgtgaacggcgagagcctgctgggcaagaccaaccaggacgccatggagaccctgagaagaagcatgagcaccgagggcaacaagagaggcatgatccagctgatcgtggccagaagaatcagcaagtgcaacgagctgaagagccccggcagcccccccggccccgagctgcccatcgagaccgccctggacgacagagagagaagaatcagccacagcctgtacagcggcatcgagggcctggacgagagccccagcagaaacgccgccctgagcagaatcatgggcaagtaccagctgagccccaccgtgaacatgccccaggacgacaccgtgatcatcgaggacgacagactgcccgtgctgcccccccacctgagcgaccagagcagcagcagcagccacgacgacgtgggcttcgtgaccgccgacgccggcacctgggccaaggccgccatcagcgacagcgccgactgcagcctgagccccgacgtggaccccgtgctggccttccagagagagggcttcggcagacagagcatgagcgagaagagaaccaagcagttcagcgacgccagccagctggacttcgtgaagaccagaaagagcaagagcatggacctggtggccgacgagaccaagctgaacaccgtggacgaccagaaggccggcagccccagcagagacgtgggccccagcctgggcctgaagaagagcagcagcctggagagcctgcagaccgccgtggccgaggtgaccctgaacggcgacatccccttccacagacccagacccagaatcatcagaggcagaggctgcaacgagagcttcagagccgccatcgacaagagctacgacaagcccgccgtggacgacgacgacgagggcatggagaccctggaggaggacaccgaggagagcagcagaagcggcagagagagcgtgagcaccgccagcgaccagcccagccacagcctggagagacagatgaacggcaaccaggagaagggcgacaagaccgacagaaagaaggacaagaccggcaaggagaagaagaaggacagagacaaggagaaggacaagatgaaggccaagaagggcatgctgaagggcctgggcgacatgttcagcctggccaagctgaagcccgagaagagatag

SEQ ID NO: 92471 - DNA, 3801 bp, synthetic construct
  misc_feature 1..3801: note = Description of Artificial Sequence: Synthetic coding sequence
  source 1..3801: mol_type = other DNA
atgaaggtgaccgtgtgcttcggcagaaccagagtggtggtgccctgcggcgacggccacatgaaggtgttcagcctgatccagcaggccgtgaccagatacagaaaggccatcgccaaggaccccaactactggatccaggtgcacagactggagcacggcgacggcggcatcctggacctggacgacatcctgtgcgacgtggccgacgacaaggacagactggtggccgtgttcgacgagcaggacccccaccacggcggcgacggcaccagcgccagcagcaccggcacccagagccccgagatcttcggcagcgagctgggcaccaacaacgtgagcgccttccagccctaccaggccaccagcgagatcgaggtgacccccagcgtgctgagagccaacatgcccctgcacgtgagaagaagcagcgaccccgccctgatcggcctgagcaccagcgtgagcgacagcaacttcagcagcgaggagcccagcagaaagaaccccaccagatggagcaccaccgccggcttcctgaagcagaacaccgccggcagccccaagacctgcgacagaaaggacgaggacggcaccgaggaggacaacagcagagtggagcccgtgggccacgccgacaccggcctggagcacatccccaacttcagcctggacgacatggtgaagctggtggaggtgcccaacgacggcggccccctgggcatccacgtggtgcccttcagcgccagaggcggcagaaccctgggcctgctggtgaagagactggagaagggcggcaaggccgagcacgagaacctgttcagagagaacgactgcatcgtgagaatcaacgacggcgacctgagaaacagaagattcgagcaggcccagcacatgttcagacaggccatgagaacccccatcatctggttccacgtggtgcccgccgccaacaaggagcagtacgagcagctgagccagagcgagaagaacaactactacagcagcagattcagccccgacagccagtacatcgacaacagaagcgtgaacagcgccggcctgcacaccgtgcagagagcccccagactgaaccacccccccgagcagatcgacagccacagcagactgccccacagcgcccaccccagcggcaagccccccagcgcccccgccagcgccccccagaacgtgttcagcaccaccgtgagcagcggctacaacaccaagaagatcggcaagagactgaacatccagctgaagaagggcaccgagggcctgggcttcagcatcaccagcagagacgtgaccatcggcggcagcgcccccatctacgtgaagaacatcctgcccagaggcgccgccatccaggacggcagactgaaggccggcgacagactgatcgaggtgaacggcgtggacctggtgggcaagagccaggaggaggtggtgagcctgctgagaagcaccaagatggagggcaccgtgagcctgctggtgttcagacaggaggacgccttccaccccagagagctgaaggccgaggacgaggacatcgtgctgacccccgacggcaccagagagttcctgaccttcgaggtgcccctgaacgacagcggcagcgccggcctgggcgtgagcgtgaagggcaacagaagcaaggagaaccacgccgacctgggcatcttcgtgaagagcatcatcaacggcggcgccgccagcaaggacggcagactgagagtgaacgaccagctgatcgccgtgaacggcgagagcctgctgggcaagaccaaccaggacgccatggagaccctgagaagaagcatgagcaccgagggcaacaagagaggcatgatccagctgatcgtggccagaagaatcagcaagtgcaacgagctgaagagccccggcagcccccccggccccgagctgcccatcgagaccgccctggacgacagagagagaagaatcagccacagcctgtacagcggcatcgagggcctggacgagagccccagcagaaacgccgccctgagcagaatcatgggcaagtaccagctgagccccaccgtgaacatgccccaggacgacaccgtgatcatcgaggacgacagactgcccgtgctgcccccccacctgagcgaccagagcagcagcagcagccacgacgacgtgggcttcgtgaccgccgacgccggcacctgggccaaggccgccatcagcgacagcgccgactgcagcctgagccccgacgtggaccccgtgctggccttccagagagagggcttcggcagacagatcgccgacgagaccaagctgaacaccgtggacgaccagaaggccggcagccccagcagagacgtgggccccagcctgggcctgaagaagagcagcagcctggagagcctgcagaccgccgtggccgaggtgaccctgaacggcgacatccccttccacagacccagacccagaatcatcagaggcagaggctgcaacgagagcttcagagccgccatcgacaagagctacgacaagcccgccgtggacgacgacgacgagggcatggagaccctggaggaggacaccgaggagagcagcagaagcggcagagagagcgtgagcaccgccagcgaccagcccagccacagcctggagagacagatgaacggcaaccaggagaagggcgacaagaccgacagaaagaaggacaagaccggcaaggagaagaagaaggacagagacaaggagaaggacaagatgaaggccaagaagggcatgctgaagggcctgggcgacatgttcagattcggcaagcacagaaaggacgacaagatcgagaagaccggcaagatcaagatccaggagagcttcaccagcgaggaggagagaatcagaatgaagcaggagcaggagagaatccaggccaagaccagagagttcagagagagacaggccagagagagagactacgccgagatccaggacttccacagaaccttcggctgcgacgacgagctgatgtacggcggcgtgagcagctacgagggcagcatggccctgaacgccagaccccagagccccagagagggccacatgatggacgccctgtacgcccaggtgaagaagcccagaaacagcaagcccagccccgtggacagcaacagaagcacccccagcaaccacgacagaatccagagactgagacaggagttccagcaggccaagcaggacgaggacgtggaggacagaagaagaacctacagcttcgagcagccctggcccaacgccagacccgccacccagagcggcagacacagcgtgagcgtggaggtgcagatgcagagacagagacaggaggagagagagagcagccagcaggcccagagacagtacagcagcctgcccagacagagcagaaagaacgccagcagcgtgagccaggacagctgggagcagaactacagccccggcgagggcttccagagcgccaaggagaaccccagatacagcagctaccagggcagcagaaacggctacctgggcggccacggcttcaacgccagagtgatgctggagacccaggagctgctgagacaggagcagagaagaaaggagcagcagatgaagaagcagccccccagcgagggccccagcaactacgacagctacaagaaggtgcaggaccccagctacgccccccccaagggccccttcagacaggacgtgccccccagccccagccaggtggccagactgaacagactgcagacccccgagaagggcagacccttctacagctag

SEQ ID NO: 92472 - DNA, 4023 bp, synthetic construct
  misc_feature 1..4023: note = Description of Artificial Sequence: Synthetic coding sequence
  source 1..4023: mol_type = other DNA
atgaaggtgaccgtgtgcttcggcagaaccagagtggtggtgccctgcggcgacggccacatgaaggtgttcagcctgatccagcaggccgtgaccagatacagaaaggccatcgccaaggaccccaactactggatccaggtgcacagactggagcacggcgacggcggcatcctggacctggacgacatcctgtgcgacgtggccgacgacaaggacagactggtggccgtgttcgacgagcaggacccccaccacggcggcgacggcaccagcgccagcagcaccggcacccagagccccgagatcttcggcagcgagctgggcaccaacaacgtgagcgccttccagccctaccaggccaccagcgagatcgaggtgacccccagcgtgctgagagccaacatgcccctgcacgtgagaagaagcagcgaccccgccctgatcggcctgagcaccagcgtgagcgacagcaacttcagcagcgaggagcccagcagaaagaaccccaccagatggagcaccaccgccggcttcctgaagcagaacaccgccggcagccccaagacctgcgacagaaagaaggacgagaactacagaagcctgcccagagacaccagcaactggagcaaccagttccagagagacaacgccagaagcagcctgagcgccagccaccccatggtgggcaagtggctggagaagcaggagcaggacgaggacggcaccgaggaggacaacagcagagtggagcccgtgggccacgccgacaccggcctggagcacatccccaacttcagcctggacgacatggtgaagctggtggaggtgcccaacgacggcggccccctgggcatccacgtggtgcccttcagcgccagaggcggcagaaccctgggcctgctggtgaagagactggagaagggcggcaaggccgagcacgagaacctgttcagagagaacgactgcatcgtgagaatcaacgacggcgacctgagaaacagaagattcgagcaggcccagcacatgttcagacaggccatgagaacccccatcatctggttccacgtggtgcccgccgccaacaaggagcagtacgagcagctgagccagagcgagaagaacaactactacagcagcagattcagccccgacagccagtacatcgacaacagaagcgtgaacagcgccggcctgcacaccgtgcagagagcccccagactgaaccacccccccgagcagatcgacagccacagcagactgccccacagcgcccaccccagcggcaagccccccagcgcccccgccagcgccccccagaacgtgttcagcaccaccgtgagcagcggctacaacaccaagaagatcggcaagagactgaacatccagctgaagaagggcaccgagggcctgggcttcagcatcaccagcagagacgtgaccatcggcggcagcgcccccatctacgtgaagaacatcctgcccagaggcgccgccatccaggacggcagactgaaggccggcgacagactgatcgaggtgaacggcgtggacctggtgggcaagagccaggaggaggtggtgagcctgctgagaagcaccaagatggagggcaccgtgagcctgctggtgttcagacaggaggacgccttccaccccagagagctgaaggccgaggacgaggacatcgtgctgacccccgacggcaccagagagttcctgaccttcgaggtgcccctgaacgacagcggcagcgccggcctgggcgtgagcgtgaagggcaacagaagcaaggagaaccacgccgacctgggcatcttcgtgaagagcatcatcaacggcggcgccgccagcaaggacggcagactgagagtgaacgaccagctgatcgccgtgaacggcgagagcctgctgggcaagaccaaccaggacgccatggagaccctgagaagaagcatgagcaccgagggcaacaagagaggcatgatccagctgatcgtggccagaagaatcagcaagtgcaacgagctgaagagccccggcagcccccccggccccgagctgcccatcgagaccgccctggacgacagagagagaagaatcagccacagcctgtacagcggcatcgagggcctggacgagagccccagcagaaacgccgccctgagcagaatcatgggcaagtaccagctgagccccaccgtgaacatgccccaggacgacaccgtgatcatcgaggacgacagactgcccgtgctgcccccccacctgagcgaccagagcagcagcagcagccacgacgacgtgggcttcgtgaccgccgacgccggcacctgggccaaggccgccatcagcgacagcgccgactgcagcctgagccccgacgtggaccccgtgctggccttccagagagagggcttcggcagacagagcatgagcgagaagagaaccaagcagttcagcgacgccagccagctggacttcgtgaagaccagaaagagcaagagcatggacctgggcatcgccgacgagaccaagctgaacaccgtggacgaccagaaggccggcagccccagcagagacgtgggccccagcctgggcctgaagaagagcagcagcctggagagcctgcagaccgccgtggccgaggtgaccctgaacggcgacatccccttccacagacccagacccagaatcatcagaggcagaggctgcaacgagagcttcagagccgccatcgacaagagctacgacaagcccgccgtggacgacgacgacgagggcatggagaccctggaggaggacaccgaggagagcagcagaagcggcagagagagcgtgagcaccgccagcgaccagcccagccacagcctggagagacagatgaacggcaaccaggagaagggcgacaagaccgacagaaagaaggacaagaccggcaaggagaagaagaaggacagagacaaggagaaggacaagatgaaggccaagaagggcatgctgaagggcctgggcgacatgttcagattcggcaagcacagaaaggacgacaagatcgagaagaccggcaagatcaagatccaggagagcttcaccagcgaggaggagagaatcagaatgaagcaggagcaggagagaatccaggccaagaccagagagttcagagagagacaggccagagagagagactacgccgagatccaggacttccacagaaccttcggctgcgacgacgagctgatgtacggcggcgtgagcagctacgagggcagcatggccctgaacgccagaccccagagccccagagagggccacatgatggacgccctgtacgcccaggtgaagaagcccagaaacagcaagcccagccccgtggacagcaacagaagcacccccagcaaccacgacagaatccagagactgagacaggagttccagcaggccaagcaggacgaggacgtggaggacagaagaagaacctacagcttcgagcagccctggcccaacgccagacccgccacccagagcggcagacacagcgtgagcgtggaggtgcagatgcagagacagagacaggaggagagagagagcagccagcaggcccagagacagtacagcagcctgcccagacagagcagaaagaacgccagcagcgtgagccaggacagctgggagcagaactacagccccggcgagggcttccagagcgccaaggagaaccccagatacagcagctaccagggcagcagaaacggctacctgggcggccacggcttcaacgccagagtgatgctggagacccaggagctgctgagacaggagcagagaagaaaggagcagcagatgaagaagcagccccccagcgagggccccagcaactacgacagctacaagaaggtgcaggaccccagctacgccccccccaagggccccttcagacaggacgtgccccccagccccagccaggtggccagactgaacagactgcagacccccgagaagggcagacccttctacagctag

SEQ ID NO: 92473 - DNA, 1119 bp, synthetic construct
  misc_feature 1..1119: note = Description of Artificial Sequence: Synthetic coding sequence
  source 1..1119: mol_type = other DNA
atgaacagaagccacagacacggcgccggcagcggctgcctgggcaccatggaggtgaagagcaagttcggcgccgagttcagaagattcagcctggagagaagcaagcccggcaagttcgaggagttctacggcctgctgcagcacgtgcacaagatccccaacgtggacgtgctggtgggctacgccgacatccacggcgacctgctgcccatcaacaacgacgacaactaccacaaggccgtgagcaccgccaaccccctgctgagaatcttcatccagaagaaggaggaggccgactacagcgccttcggcaccgacaccctgatcaagaagaagaacgtgctgaccaacgtgctgagacccgacaaccacagaaagaagccccacatcgtgatcagcatgccccaggacttcagacccgtgagcagcatcatcgacgtggacatcctgcccgagacccacagaagagtgagactgtacaagtacggcaccgagaagcccctgggcttctacatcagagacggcagcagcgtgagagtgaccccccacggcctggagaaggtgcccggcatcttcatcagcagactggtgcccggcggcctggcccagagcaccggcctgctggccgtgaacgacgaggtgctggaggtgaacggcatcgaggtgagcggcaagagcctggaccaggtgaccgacatgatgatcgccaacagcagaaacctgatcatcaccgtgagacccgccaaccagagaaacaacgtggtgagaaacagcagaaccagcggcagcagcggccagagcaccgacaacagcctgctgggctacccccagcagatcgagcccagcttcgagcccgaggacgaggacagcgaggaggacgacatcatcatcgaggacaacggcgtgccccagcagatccccaaggccgtgcccaacaccgagagcctggagagcctgacccagatcgagctgagcttcgagagcggccagaacggcttcatccccagcaacgaggtgagcctggccgccatcgccagcagcagcaacaccgagttcgagacccacgcccccgaccagaagctgctggaggaggacggcaccatcatcaccctgtag

SEQ ID NO: 92474 - DNA, 1131 bp, synthetic construct
  misc_feature 1..1131: note = Description of Artificial Sequence: Synthetic coding sequence
  source 1..1131: mol_type = other DNA
atgaacagaagcttccacaagagccagaccctgagattctacgactgcagcgccgtggaggtgaagagcaagttcggcgccgagttcagaagattcagcctggacagacacaagcccggcaagttcgaggacttctacaagctggtggtgcacacccaccacatcagcaacagcgacgtgaccatcggctacgccgacgtgcacggcgacctgctgcccatcaacaacgacgacaacttctgcaaggccgtgagcagcgccaaccccctgctgagagtgttcatccagaagagagaggaggccgagagaggcagcctgggcgccggcagcctgtgcagaagaagaagagccctgggcgccctgagagacgagggccccagaagaagagcccacctggacatcggcctgcccagagacttcagacccgtgagcagcatcatcgacgtggacctggtgcccgagacccacagaagagtgagactgcacagacacggctgcgagaagcccctgggcttctacatcagagacggcgccagcgtgagagtgaccccccacggcctggagaaggtgcccggcatcttcatcagcagaatggtgcccggcggcctggccgagagcaccggcctgctggccgtgaacgacgaggtgctggaggtgaacggcatcgaggtggccggcaagaccctggaccaggtgaccgacatgatgatcgccaacagccacaacctgatcgtgaccgtgaagcccgccaaccagagaaacaacgtggtgagaggcggcagagccctgggcagcagcggcccccccagcgacggcaccgccggcttcgtgggcccccccgcccccagagtgctgcagaacttccaccccgacgaggccgagagcgacgaggacaacgacgtggtgatcgagggcaccctggagcccgccagacccccccagacccccggcgcccccgccggcagcctgagcagagtgaacggcgccggcctggcccagagactgcagagagacctggccctggacggcggcctgcagagactgctgagcagcctgagagccgaccccagacacagcctggccctgccccccggcggcgtggaggagcacggccccgccgtgaccctgtag

SEQ ID NO: 92475 - DNA, 1236 bp, synthetic construct
  misc_feature 1..1236: note = Description of Artificial Sequence: Synthetic coding sequence
  source 1..1236: mol_type = other DNA
atggccgaggccgagctgcacaaggagagactgcaggccatcgccgagaagagaaagagacagaccgagatcgagggcaagagacagcagctggacgagcagatcctgctgctgcagcacagcaagagcaaggtgctgagagagaagtggctgctgcagggcatccccgccggcaccgccgaggaggaggaggccagaagaagacagagcgaggaggacgagttcagagtgaagcagctggaggacaacatccagagactggagcaggagatccagaccctggagagcgaggagagccagatcagcgccaaggagcagatcatcctggagaagctgaaggagaccgagaagagcttcaaggacttccagaagggcttcagcagcaccgacggcgacgccgtgaactacatcagcagccagctgcccgacctgcccatcctgtgcagcagaaccgccgagcccagccccggccaggacggcaccagcagagccgccgccgtgtacgccatggagatcaacgtggagaaggacaagcagaccggcgagaccaagatcctgagcaccagcaccatcggccccgagggcgtgcaccagaagggcgtgaaggtgtacgacgacggcaccaaggtggtgtacgaggtgagaagcggcggcaccgtggtggagaacggcgtgcacaagctgagcaccaaggacgtggaggagctgatccagaaggccggccagagcagcctgggcggcggccacgtgagcgagagaaccgtgatcgccgacggcagcctgagccaccccaaggagcacatgctgtgcaaggaggccaagctggagatggtgcacaagagcagaaaggaccacagcagcggcaaccccggccagcaggcccaggcccccagcgccgccggccccgaggccaacctggaccagcccgtgaccatgatcttcatgggctaccagaacatcgaggacgaggaggagaccaagaaggtgctgggctacgacgagaccatcaaggccgagctggtgctgatcgacgaggacgacgagaagagcctgagagagaagaccgtgaccgacgtgagcaccatcgacggcaacgccgccgagctggtgagcggcagacccgtgagcgacaccaccgagcccagcagccccgagggcaaggaggagagcctggccaccgagcccgcccccggcacccagaagaagaagagatgccagtgctgcgtggtgatgtag

SEQ ID NO: 92476 - DNA, 1140 bp, synthetic construct
  misc_feature 1..1140: note = Description of Artificial Sequence: Synthetic coding sequence
  source 1..1140: mol_type = other DNA
atggagatggccgaggccgagctgcacaaggagagactgcaggccatcgccgagaagagaaagagacagaccgagatcgagggcaagagacagcagctggacgagcagatcctgctgctgcagcacagcaagagcaaggtgctgagagagaagtggctgctgcagggcatccccgccggcaccgccgaggaggaggaggccagaagaagacagagcgaggaggacgagttcagagtgaagcagctggaggacaacatccagagactggagcaggagatccagaccctggagagcgaggagagccagatcagcgccaaggagcagatcatcctggagaagctgaaggagaccgagaagagcttcaaggacttccagaagggcttcagcagcaccgacggcgccgtgtacgccatggagatcaacgtggagaaggacaagcagaccggcgagaccaagatcctgagcaccagcaccatcggccccgagggcgtgcaccagaagggcgtgaaggtgtacgacgacggcaccaaggtggtgtacgaggtgagaagcggcggcaccgtggtggagaacggcgtgcacaagctgagcaccaaggacgtggaggagctgatccagaaggccggccagagcagcctgggcggcggccacgtgagcgagagaaccgtgatcgccgacggcagcctgagccaccccaaggagcacatgctgtgcaaggaggccaagctggagatggtgcacaagagcagaaaggaccacagcagcggcaaccccggccagcaggcccaggcccccagcgccgccggccccgaggccaacctggaccagcccgtgaccatgatcttcatgggctaccagaacatcgaggacgaggaggagaccaagaaggtgctgggctacgacgagaccatcaaggccgagctggtgctgatcgacgaggacgacgagaagagcctgagagagaagaccgtgaccgacgtgagcaccatcgacggcaacgccgccgagctggtgagcggcagacccgtgagcgacaccaccgagcccagcagccccgagggcaaggaggagagcctggccaccgagcccgcccccggcacccagaagaagaagagatgccagtgctgcgtggtgatgtag

SEQ ID NO: 92477 - DNA, 1242 bp, synthetic construct
  misc_feature 1..1242: note = Description of Artificial Sequence: Synthetic coding sequence
  source 1..1242: mol_type = other DNA
atggagatggccgaggccgagctgcacaaggagagactgcaggccatcgccgagaagagaaagagacagaccgagatcgagggcaagagacagcagctggacgagcagatcctgctgctgcagcacagcaagagcaaggtgctgagagagaagtggctgctgcagggcatccccgccggcaccgccgaggaggaggaggccagaagaagacagagcgaggaggacgagttcagagtgaagcagctggaggacaacatccagagactggagcaggagatccagaccctggagagcgaggagagccagatcagcgccaaggagcagatcatcctggagaagctgaaggagaccgagaagagcttcaaggacttccagaagggcttcagcagcaccgacggcgacgccgtgaactacatcagcagccagctgcccgacctgcccatcctgtgcagcagaaccgccgagcccagccccggccaggacggcaccagcagagccgccgccgtgtacgccatggagatcaacgtggagaaggacaagcagaccggcgagaccaagatcctgagcaccagcaccatcggccccgagggcgtgcaccagaagggcgtgaaggtgtacgacgacggcaccaaggtggtgtacgaggtgagaagcggcggcaccgtggtggagaacggcgtgcacaagctgagcaccaaggacgtggaggagctgatccagaaggccggccagagcagcctgggcggcggccacgtgagcgagagaaccgtgatcgccgacggcagcctgagccaccccaaggagcacatgctgtgcaaggaggccaagctggagatggtgcacaagagcagaaaggaccacagcagcggcaaccccggccagcaggcccaggcccccagcgccgccggccccgaggccaacctggaccagcccgtgaccatgatcttcatgggctaccagaacatcgaggacgaggaggagaccaagaaggtgctgggctacgacgagaccatcaaggccgagctggtgctgatcgacgaggacgacgagaagagcctgagagagaagaccgtgaccgacgtgagcaccatcgacggcaacgccgccgagctggtgagcggcagacccgtgagcgacaccaccgagcccagcagccccgagggcaaggaggagagcctggccaccgagcccgcccccggcacccagaagaagaagagatgccagtgctgcgtggtgatgtag

SEQ ID NO: 92478 - DNA, 1167 bp, synthetic construct
  misc_feature 1..1167: note = Description of Artificial Sequence: Synthetic coding sequence
  source 1..1167: mol_type = other DNA
atgggcagagccagaagattccagtggcccctgctgctgctgtgggccgccgccgccggccccggcgccggccaggaggtgcagaccgagaacgtgaccgtggccgagggcggcgtggccgagatcacctgcagactgcaccagtacgacggcagcatcgtggtgatccagaaccccgccagacagaccctgttcttcaacggcaccagagccctgaaggacgagagattccagctggaggagttcagccccagaagagtgagaatcagactgagcgacgccagactggaggacgagggcggctacttctgccagctgtacaccgaggacacccaccaccagatcgccaccctgaccgtgctggtggcccccgagaaccccgtggtggaggtgagagagcaggccgtggagggcggcgaggtggagctgagctgcctggtgcccagaagcagacccgccgccaccctgagatggtacagagacagaaaggagctgaagggcgtgagcagcagccaggagaacggcaaggtgtggagcgtggccagcaccgtgagattcagagtggacagaaaggacgacggcggcatcatcatctgcgaggcccagaaccaggccctgcccagcggccacagcaagcagacccagtacgtgctggacgtgcagtacagccccaccgccagaatccacgccagccaggccgtggtgagagagggcgacaccctggtgctgacctgcgccgtgaccggcaaccccagacccaaccagatcagatggaacagaggcaacgagagcctgcccgagagagccgaggccgtgggcgagaccctgaccctgcccggcctggtgagcgccgacaacggcacctacacctgcgaggccagcaacaagcacggccacgccagagccctgtacgtgctggtggtgtacgaccccggcgccgtggtggaggcccagaccagcgtgccctacgccatcgtgggcggcatcctggccctgctggtgttcctgatcatctgcgtgctggtgggcatggtgtggtgcagcgtgagacagaagggcagctacctgacccacgaggccagcggcctggacgagcagggcgaggccagagaggccttcctgaacggcagcgacggccacaagagaaaggaggagttcttcatctag

SEQ ID NO: 92479 - DNA, 1068 bp, synthetic construct
  misc_feature 1..1068: note = Description of Artificial Sequence: Synthetic coding sequence
  source 1..1068: mol_type = other DNA
atgggcaagctggtggccctggtgctgctgggcgtgggcctgagcctggtgggcgagatgttcctggccttcagagagagagtgaacgccagcagagaggtggagcccgtggagcccgagaactgccacctgatcgaggagctggagaccggcagcgaggacctggagatcctgcccaacggcctggccttcatcagcagcggcctgaagtaccccggcatcaagagcttcaaccccaacagccccggcaagatcctgctgatggacctgaacgaggaggaccccaccgtgctggagctgggcatcaccggcagcaagttcgacgtgagcagcttcaacccccacggcatcagcaccttcaccgacgaggacaacgccatgtacctgctggtggtgaaccaccccgacgccaagagcaccgtggagctgttcaagttccaggaggaggagaagagcctgctgcacctgaagaccatcagacacaagctgctgcccaacctgaacgacatcgtggccgtgggccccgagcacttctacggcaccaacgaccactacttcctggacccctacctgcagagctgggagatgtacctgggcctggcctggagctacgtggtgtactacagccccagcgaggtgagagtggtggccgagggcttcgacttcgccaacggcatcaacatcagccccgacggcaagtacgtgtacatcgccgagctgctggcccacaagatccacgtgtacgagaagcacgccaactggaccctgacccccctgaagagcctggacttcaacaccctggtggacaacatcagcgtggaccccgagaccggcgacctgtgggtgggctgccaccccaacggcatgaagatcttcttctacgacagcgagaacccccccgccagcgaggtgctgagaatccagaacatcctgaccgaggagcccaaggtgacccaggtgtacgccgagaacggcaccgtgctgcagggcagcaccgtggccagcgtgtacaagggcaagctgctgatcggcaccgtgttccacaaggccctgtactgcgagctgtag

SEQ ID NO: 92480 - DNA, 1017 bp, synthetic construct
  misc_feature 1..1017: note = Description of Artificial Sequence: Synthetic coding sequence
  source 1..1017: mol_type = other DNA
atggccgccggctgcagcgaggcccccagacccgccgccgccagcgacggcagcctggtgggccaggccggcgtgctgccctgcctggagctgcccacctacgccgccgcctgcgccctggtgaacagcagatacagctgcctggtggccggcccccaccagagacacatcgccctgagccccagatacctgaacagaaagagaaccggcatcagagagcagctggacgccgagctgctgagatacagcgagagcctgctgggcgtgcccatcgcctacgacaacatcaaggtggtgggcgagctgggcgacatctacgacgaccagggccacatccacctgaacatcgaggccgacttcgtgatcttctgccccgagcccggccagaagctgatgggcatcgtgaacaaggtgagcagcagccacatcggctgcctggtgcacggctgcttcaacgccagcatccccaagcccgagcagctgagcgccgagcagtggcagaccatggagatcaacatgggcgacgagctggagttcgaggtgttcagactggacagcgacgccgccggcgtgttctgcatcagaggcaagctgaacatcaccagcctgcagttcaagagaagcgaggtgagcgaggaggtgaccgagaacggcaccgaggaggccgccaagaagcccaagaagaagaagaagaagaaggaccccgagacctacgaggtggacagcggcaccaccaagctggccgacgacgccgacgacacccccatggaggagagcgccctgcagaacaccaacaacgccaacggcatctgggaggaggagcccaagaagaagaagaagaagaagaagcaccaggaggtgcaggaccaggaccccgtgttccagggcagcgacagcagcggctaccagagcgaccacaagaagaagaagaagaagagaaagcacagcgaggaggccgagttcaccccccccctgaagtgcagccccaagagaaagggcaagagcaacttcctgtag

SEQ ID NO: 92481 - DNA, 1059 bp, synthetic construct
  misc_feature 1..1059: note = Description of Artificial Sequence: Synthetic coding sequence
  source 1..1059: mol_type = other DNA
ggcgccgccggcggctgcggcctggccggcgacagagccggcctgggcgagagactgctggccctgagaaacagactgaaggccagcagagaggtggagagcgtggacctgccccactgccacctgatcaagggcatcgaggccggcagcgaggacatcgacatcctgcccaacggcctggccttcttcagcgtgggcctgaagttccccggcctgcacagcttcgcccccgacaagcccggcggcatcctgatgatggacctgaaggaggagaagcccagagccagagagctgagaatcagcagaggcttcgacctggccagcttcaacccccacggcatcagcaccttcatcgacaacgacgacaccgtgtacctgttcgtggtgaaccaccccgagttcaagaacaccgtggagatcttcaagttcgaggaggccgagaacagcctgctgcacctgaagaccgtgaagcacgagctgctgcccagcgtgaacgacatcaccgccgtgggccccgcccacttctacgccaccaacgaccactacttcagcgaccccttcctgaagtacctggagacctacctgaacctgcactgggccaacgtggtgtactacagccccaacgaggtgaaggtggtggccgagggcttcgacagcgccaacggcatcaacatcagccccgacgacaagtacatctacgtggccgacatcctggcccacgagatccacgtgctggagaagcacaccaacatgaacctgacccagctgaaggtgctggagctggacaccctggtggacaacctgagcatcgaccccagcagcggcgacatctgggtgggctgccaccccaacggccagaagctgttcgtgtacgaccccaacaacccccccagcagcgaggtgctgagaatccagaacatcctgagcgagaagcccaccgtgaccaccgtgtacgccaacaacggcagcgtgctgcagggcagcagcgtggccagcgtgtacgacggcaagctgctgatcggcaccctgtaccacagagccctgtactgcgagctgtag

SEQ ID NO: 92482 - DNA, 1128 bp, synthetic construct
  misc_feature 1..1128: note = Description of Artificial Sequence: Synthetic coding sequence
  source 1..1128: mol_type = other DNA
atggccccccccaccgagctgctggccagacccgagagaggcagcgcccccggcagcagagccatgggcagactggtggccgtgggcctgctgggcatcgccctggccctgctgggcgagagactgctggccctgagaaacagactgaaggccagcagagaggtggagagcgtggacctgccccactgccacctgatcaagggcatcgaggccggcagcgaggacatcgacatcctgcccaacggcctggccttcttcagcgtgggcctgaagttccccggcctgcacagcttcgcccccgacaagcccggcggcatcctgatgatggacctgaaggaggagaagcccagagccagagagctgagaatcagcagaggcttcgacctggccagcttcaacccccacggcatcagcaccttcatcgacaacgacgacaccgtgtacctgttcgtggtgaaccaccccgagttcaagaacaccgtggagatcttcaagttcgaggaggccgagaacagcctgctgcacctgaagaccgtgaagcacgagctgctgcccagcgtgaacgacatcaccgccgtgggccccgcccacttctacgccaccaacgaccactacttcagcgaccccttcctgaagtacctggagacctacctgaacctgcactgggccaacgtggtgtactacagccccaacgaggtgaaggtggtggccgagggcttcgacagcgccaacggcatcaacatcagccccgacgacaagtacatctacgtggccgacatcctggcccacgagatccacgtgctggagaagcacaccaacatgaacctgacccagctgaaggtgctggagctggacaccctggtggacaacctgagcatcgaccccagcagcggcgacatctgggtgggctgccaccccaacggccagaagctgttcgtgtacgaccccaacaacccccccagcagcgaggtgctgagaatccagaacatcctgagcgagaagcccaccgtgaccaccgtgtacgccaacaacggcagcgtgctgcagggcagcagcgtggccagcgtgtacgacggcaagctgctgatcggcaccctgtaccacagagccctgtactgcgagctgtag

SEQ ID NO: 92483 - DNA, 1029 bp, synthetic construct
  misc_feature 1..1029: note = Description of Artificial Sequence: Synthetic coding sequence
  source 1..1029: mol_type = other DNA
atgggcagactggtggccgtgggcctgctgggcatcgccctggccctgctgggcgagagactgctggccctgagaaacagactgaaggccagcagagaggtggagagcgtggacctgccccactgccacctgatcaagggcatcgaggccggcagcgaggacatcgacatcctgcccaacggcctggccttcttcagcgtgggcctgaagttccccggcctgcacagcttcgcccccgacaagcccggcggcatcctgatgatggacctgaaggaggagaagcccagagccagagagctgagaatcagcagaggcttcgacctggccagcttcaacccccacggcatcagcaccttcatcgacaacgagttcaagaacaccgtggagatcttcaagttcgaggaggccgagaacagcctgctgcacctgaagaccgtgaagcacgagctgctgcccagcgtgaacgacatcaccgccgtgggccccgcccacttctacgccaccaacgaccactacttcagcgaccccttcctgaagtacctggagacctacctgaacctgcactgggccaacgtggtgtactacagccccaacgaggtgaaggtggtggccgagggcttcgacagcgccaacggcatcaacatcagccccgacgacaagtacatctacgtggccgacatcctggcccacgagatccacgtgctggagaagcacaccaacatgaacctgacccagctgaaggtgctggagctggacaccctggtggacaacctgagcatcgaccccagcagcggcgacatctgggtgggctgccaccccaacggccagaagctgttcgtgtacgaccccaacaacccccccagcagcgaggtgctgagaatccagaacatcctgagcgagaagcccaccgtgaccaccgtgtacgccaacaacggcagcgtgctgcagggcagcagcgtggccagcgtgtacgacggcaagctgctgatcggcaccctgtaccacagagccctgtactgcgagctgtag

SEQ ID NO: 92484 - DNA, 1065 bp, synthetic construct
  misc_feature 1..1065: note = Description of Artificial Sequence: Synthetic coding sequence
  source 1..1065: mol_type = other DNA
atgggcaagctggtggccctggtgctgctgggcgtgggcctgagcctggtgggcgagatgttcctggccttcagagagagagtgaacgccagcagagaggtggagcccgtggagcccgagaactgccacctgatcgaggagctggagagcggcagcgaggacatcgacatcctgcccagcggcctggccttcatcagcagcggcctgaagtaccccggcatgcccaacttcgcccccgacgagcccggcaagatcttcctgatggacctgaacgagcagaaccccagagcccaggccctggagatcagcggcggcttcgacaaggagctgttcaacccccacggcatcagcatcttcatcgacaaggacaacaccgtgtacctgtacgtggtgaaccacccccacatgaagagcaccgtggagatcttcaagttcgaggagcagcagagaagcctggtgtacctgaagaccatcaagcacgagctgctgaagagcgtgaacgacatcgtggtgctgggccccgagcagttctacgccaccagagaccactacttcaccaacagcctgctgagcttcttcgagatgatcctggacctgagatggacctacgtgctgttctacagccccagagaggtgaaggtggtggccaagggcttctgcagcgccaacggcatcaccgtgagcgccgaccagaagtacgtgtacgtggccgacgtggccgccaagaacatccacatcatggagaagcacgacaactgggacctgacccagctgaaggtgatccagctgggcaccctggtggacaacctgaccgtggaccccgccaccggcgacatcctggccggctgccaccccaaccccatgaagctgctgaactacaaccccgaggacccccccggcagcgaggtgctgagaatccagaacgtgctgagcgagaagcccagagtgagcaccgtgtacgccaacaacggcagcgtgctgcagggcaccagcgtggccagcgtgtaccacggcaagatcctgatcggcaccgtgttccacaagaccctgtactgcgagctgtag

SEQ ID NO: 92485 - DNA, 1572 bp, synthetic construct
  misc_feature 1..1572: note = Description of Artificial Sequence: Synthetic coding sequence
  source 1..1572: mol_type = other DNA
atgatgctgagaggcaacctgaagcaggtgagaatcgagaagaaccccgccagactgagagccctggagagcgccgtgggcgagagcgagcccgccgccgccgccgccatggccctggccctggccggcgagcccgccccccccgcccccgccccccccgaggaccaccccgacgaggagatgggcttcaccatcgacatcaagagcttcctgaagcccggcgagaagacctacacccagagatgcagactgttcgtgggcaacctgcccaccgacatcaccgaggaggacttcaagagactgttcgagagatacggcgagcccagcgaggtgttcatcaacagagacagaggcttcggcttcatcagactggagagcagaaccctggccgagatcgccaaggccgagctggacggcaccatcctgaagagcagacccctgagaatcagattcgccacccacggcgccgccctgaccgtgaagaacctgagccccgtggtgagcaacgagctgctggagcaggccttcagccagttcggccccgtggagaaggccgtggtggtggtggacgacagaggcagagccaccggcaagggcttcgtggagttcgccgccaagccccccgccagaaaggccctggagagatgcggcgacggcgccttcctgctgaccaccacccccagacccgtgatcgtggagcccatggagcagttcgacgacgaggacggcctgcccgagaagctgatgcagaagacccagcagtaccacaaggagagagagcagccccccagattcgcccagcccggcaccttcgagttcgagtacgccagcagatggaaggccctggacgagatggagaagcagcagagagagcaggtggacagaaacatcagagaggccaaggagaagctggaggccgagatggaggccgccagacacgagcaccagctgatgctgatgagacaggacctgatgagaagacaggaggagctgagaagactggaggagctgagaaaccaggagctgcagaagagaaagcagatccagctgagacacgaggaggagcacagaagaagagaggaggagatgatcagacacagagagcaggaggagctgagaagacagcaggagggcttcaagcccaactacatggagaacagagagcaggagatgagaatgggcgacatgggccccagaggcgccatcaacatgggcgacgccttcagccccgcccccgccggcaaccagggccccccccccatgatgggcatgaacatgaacaacagagccaccatccccggcccccccatgggccccggccccgccatgggccccgagggcgccgccaacatgggcacccccatgatgcccgacaacggcgccgtgcacaacgacagattcccccagggcccccccagccagatgggcagccccatgggcagcagaaccggcagcgagaccccccaggcccccatgagcggcgtgggccccgtgagcggcggccccggcggcttcggcagaggcagccagggcggcaacttcgagggccccaacaagagaagaagatactag

SEQ ID NO: 92486 - DNA, 1392 bp, synthetic construct
  misc_feature 1..1392: note = Description of Artificial Sequence: Synthetic coding sequence
  source 1..1392: mol_type = other DNA
atgggcttcaccatcgacatcaagagcttcctgaagcccggcgagaagacctacacccagagatgcagactgttcgtgggcaacctgcccaccgacatcaccgaggaggacttcaagagactgttcgagagatacggcgagcccagcgaggtgttcatcaacagagacagaggcttcggcttcatcagactggagagcagaaccctggccgagatcgccaaggccgagctggacggcaccatcctgaagagcagacccctgagaatcagattcgccacccacggcgccgccctgaccgtgaagaacctgagccccgtggtgagcaacgagctgctggagcaggccttcagccagttcggccccgtggagaaggccgtggtggtggtggacgacagaggcagagccaccggcaagggcttcgtggagttcgccgccaagccccccgccagaaaggccctggagagatgcggcgacggcgccttcctgctgaccaccacccccagacccgtgatcgtggagcccatggagcagttcgacgacgaggacggcctgcccgagaagctgatgcagaagacccagcagtaccacaaggagagagagcagccccccagattcgcccagcccggcaccttcgagttcgagtacgccagcagatggaaggccctggacgagatggagaagcagcagagagagcaggtggacagaaacatcagagaggccaaggagaagctggaggccgagatggaggccgccagacacgagcaccagctgatgctgatgagacaggacctgatgagaagacaggaggagctgagaagactggaggagctgagaaaccaggagctgcagaagagaaagcagatccagctgagacacgaggaggagcacagaagaagagaggaggagatgatcagacacagagagcaggaggagctgagaagacagcaggagggcttcaagcccaactacatggagaacagagagcaggagatgagaatgggcgacatgggccccagaggcgccatcaacatgggcgacgccttcagccccgcccccgccggcaaccagggccccccccccatgatgggcatgaacatgaacaacagagccaccatccccggcccccccatgggccccggccccgccatgggccccgagggcgccgccaacatgggcacccccatgatgcccgacaacggcgccgtgcacaacgacagattcccccagggcccccccagccagatgggcagccccatgggcagcagaaccggcagcgagaccccccaggcccccatgagcggcgtgggccccgtgagcggcggccccggcggcttcggcagaggcagccagggcggcaacttcgagggccccaacaagagaagaagatactag

SEQ ID NO: 92487 - DNA, 747 bp, synthetic construct
  misc_feature 1..747: note = Description of Artificial Sequence: Synthetic coding sequence
  source 1..747: mol_type = other DNA
atgatgctgagaggcaacctgaagcaggtgagaatcgagaagaaccccgccagactgagagccctggagagcgccgtgggcgagagcgagcccgccgccgccgccgccatggccctggccctggccggcgagcccgccccccccgcccccgccccccccgaggaccaccccgacgaggagatgggcttcaccatcgacatcaagagcttcctgaagcccggcgagaagacctacacccagagatgcagactgttcgtgggcaacctgcccaccgacatcaccgaggaggacttcaagagactgttcgagagatacggcgagcccagcgaggtgttcatcaacagagacagaggcttcggcttcatcagactggagagcagaaccctggccgagatcgccaaggccgagctggacggcaccatcctgaagagcagacccctgagaatcagattcgccacccacggcgccgccctgaccgtgaagaacctgagccccgtggtgagcaacgagctgctggagcaggccttcagccagttcggccccgtggagaaggccgtggtggtggtggacgacagaggcagagccaccggcaagggcttcgtggagttcgccgccaagccccccgccagaaaggccctggagagatgcggcgacggcgccttcctgctgaccaccacccccagacccgtgatcgtggagcccatggagcagttcgacgacgaggacggcctgcccgagaagctgtag

SEQ ID NO: 92488 - DNA, 309 bp, synthetic construct
  misc_feature 1..309: note = Description of Artificial Sequence: Synthetic coding sequence
  source 1..309: mol_type = other DNA
atgagcgagaagagcgtggaggccgccgccgagctgagcgccaaggacctgaaggagaagaaggagaaggtggaggagaaggccagcagaaaggagagaaagaaggaggtggtggaggaggaggagaacggcgccgaggaggaggaggaggagaccgccgaggacggcgaggaggaggacgagggcgaggaggaggacgaggaggaggaggaggaggacgacgagggccccgccctgaagagagccgccgaggaggaggacgaggccgaccccaagagacagaagaccgagaacggcgccagcgcctag

SEQ ID NO: 92489 - DNA, 315 bp, synthetic construct
  misc_feature 1..315: note = Description of Artificial Sequence: Synthetic coding sequence
  source 1..315: mol_type = other DNA
atgagcgagaagagcgtggaggccgccgccgagctgagcgccaaggacctgaaggagaagaaggagaaggtggaggagaaggccagcagaaaggagagaaagaaggaggtggtggaggcccccgtgcccctggtggtgatggtgggcaaggcctgcagccagcccgaggccacccccagccccggcccccacagaagaagaagaaccggcctgagaagaaagaagaagaagctgcccagaatggagagaagaaagatgaagggcaagaagaagatgagaaagaagaagaagagaatgatgaagggccccagatag

SEQ ID NO: 92490 - DNA, 306 bp, synthetic construct
  misc_feature 1..306: note = Description of Artificial Sequence: Synthetic coding sequence
  source 1..306: mol_type = other DNA
agcagagaccccgcctgcagagccgccgagctgagcgccaaggacctgaaggagaagaaggagaaggtggaggagaaggccagcagaaaggagagaaagaaggaggtggtggaggaggaggagaacggcgccgaggaggaggaggaggagaccgccgaggacggcgaggaggaggacgagggcgaggaggaggacgaggaggaggaggaggaggacgacgagggccccgccctgaagagagccgccgaggaggaggacgaggccgaccccaagagacagaagaccgagaacggcgccagcgcctag

SEQ ID NO: 92491 - DNA, 528 bp, synthetic construct
  misc_feature 1..528: note = Description of Artificial Sequence: Synthetic coding sequence
  source 1..528: mol_type = other DNA
atgcagagaagactggtgcagcagtggagcgtggccgtgttcctgctgagctacgccgtgcccagctgcggcagaagcgtggagggcctgagcagaagactgaagagagccgtgagcgagcaccagctgctgcacgacaagggcaagagcatccaggacctgagaagaagattcttcctgcaccacctgatcgccgagatccacaccgccgagatcagagccaccagcgaggtgagccccaacagcaagcccagccccaacaccaagaaccaccccgtgagattcggcagcgacgacgagggcagatacctgacccaggagaccaacaaggtggagacctacaaggagcagcccctgaagacccccggcaagaagaagaagggcaagcccggcaagagaaaggagcaggagaagaagaagagaagaaccagaagcgcctggctggacagcggcgtgaccggcagcggcctggagggcgaccacctgagcgacaccagcaccaccagcctggagctggacagcagatag

SEQ ID NO: 92492 - DNA, 630 bp, synthetic construct
  misc_feature 1..630: note = Description of Artificial Sequence: Synthetic coding sequence
  source 1..630: mol_type = other DNA
atgcagagaagactggtgcagcagtggagcgtggccgtgttcctgctgagctacgccgtgcccagctgcggcagaagcgtggagggcctgagcagaagactgaagagagccgtgagcgagcaccagctgctgcacgacaagggcaagagcatccaggacctgagaagaagattcttcctgcaccacctgatcgccgagatccacaccgccgagatcagagccaccagcgaggtgagccccaacagcaagcccagccccaacaccaagaaccaccccgtgagattcggcagcgacgacgagggcagatacctgacccaggagaccaacaaggtggagacctacaaggagcagcccctgaagacccccggcaagaagaagaagggcaagcccggcaagagaaaggagcaggagaagaagaagagaagaaccagaagcgcctggctggacagcggcgtgaccggcagcggcctggagggcgaccacctgagcgacaccagcaccaccagcctggagctggacagcagaaccgccctgctgtggggcctgaagaagaagaaggagaacaacagaagaacccaccacatgcagctgatgatcagcctgttcaagagccccctgctgctgctgtag

SEQ ID NO: 92493 - DNA, 528 bp, synthetic construct; identical to SEQ ID NO: 92491
  misc_feature 1..528: note = Description of Artificial Sequence: Synthetic coding sequence
  source 1..528: mol_type = other DNA

SEQ ID NO: 92494 - DNA, 534 bp, synthetic construct
  misc_feature 1..534: note = Description of Artificial Sequence: Synthetic coding sequence
  source 1..534: mol_type = other DNA
atgcagagaagactggtgcagcagtggagcgtggccgtgttcctgctgagctacgccgtgcccagctgcggcagaagcgtggagggcctgagcagaagactgaagagagccgtgagcgagcaccagctgctgcacgacaagggcaagagcatccaggacctgagaagaagattcttcctgcaccacctgatcgccgagatccacaccgccgagatcagagccaccagcgaggtgagccccaacagcaagcccagccccaacaccaagaaccaccccgtgagattcggcagcgacgacgagggcagatacctgacccaggagaccaacaaggtggagacctacaaggagcagcccctgaagacccccggcaagaagaagaagggcaagcccggcaagagaaaggagcaggagaagaagaagagaagaaccagaagcgcctggctggacagcggcgtgaccggcagcggcctggagggcgaccacctgagcgacaccagcaccaccagcctggagctggacagcagaagacactag

SEQ ID NO: 92495 - DNA, 528 bp, synthetic construct; identical to SEQ ID NO: 92491
  misc_feature 1..528: note = Description of Artificial Sequence: Synthetic coding sequence
  source 1..528: mol_type = other DNA

SEQ ID NO: 92496 - DNA, 81 bp, synthetic construct
  misc_feature 1..81: note = Description of Artificial Sequence: Synthetic coding sequence
  source 1..81: mol_type = other DNA
accgccctgctgtggggcctgaagaagaagggcaagcagcagaagaacaccagctacgccaccaacgacctgatcatctag

SEQ ID NO: 92497 - DNA, 630 bp, synthetic construct; identical to SEQ ID NO: 92492
  misc_feature 1..630: note = Description of Artificial Sequence: Synthetic coding sequence
  source 1..630: mol_type = other DNA

SEQ ID NO: 92498 - DNA, 534 bp, synthetic construct; identical to SEQ ID NO: 92494
  misc_feature 1..534: note = Description of Artificial Sequence: Synthetic coding sequence
  source 1..534: mol_type = other DNA

SEQ ID NO: 92499 - DNA, 519 bp, synthetic construct
  misc_feature 1..519: note = Description of Artificial Sequence: Synthetic coding sequence
  source 1..519: mol_type = other DNA
atgcagagaagactggtgcagcagtggagcgtggccgtgttcctgctgagctacgccgtgcccagctgcggcagaagcgtggagggcctgagcagaagactgaagagagccgtgagcgagcaccagctgctgcacgacaagggcaagagcatccaggacctgagaagaagattcttcctgcaccacctgatcgccgagatccacaccgccgagatcagagccaccagcgaggtgagccccaacagcaagcccagccccaacaccaagaaccaccccgtgagattcggcagcgacgacgagggcagatacctgacccaggagaccaacaaggtggagacctacaaggagcagcccctgaagacccccggcaagaagaagaagggcaagcccggcaagagaaaggagcaggagaagaagaagagaagaaccagaagcgcctggctggacagcggcgtgaccggcagcggcctggagggcgaccacctgagcgacaccagcaccaccagcctggagctgtag

SEQ ID NO: 92500 - DNA, 534 bp, synthetic construct; identical to SEQ ID NO: 92494
  misc_feature 1..534: note = Description of Artificial Sequence: Synthetic coding sequence
  source 1..534: mol_type = other DNA

SEQ ID NO: 92501 - DNA, 891 bp, synthetic construct
  misc_feature 1..891: note = Description of Artificial Sequence: Synthetic coding sequence
  source 1..891: mol_type = other DNA
atggtggccgagaaggagaccctgagcctgaacaagtgccccgacaagatgcccaagagaaccaagctgctggcccagcagcccctgcccgtgcaccagccccacagcctggtgagcgagggcttcaccgtgaaggccatgatgaagaacagcgtggtgagaggcccccccgccgccggcgccttcaaggagagacccaccaagcccaccgccttcagaaagttctacgagagaggcgacttccccatcgccctggagcacgacagcaagggcaacaagatcgcctggaaggtggagatcgagaagctggactaccaccactacctgcccctgttcttcgacggcctgtgcgagatgaccttcccctacgagttcttcgccagacagggcatccacgacatgctggagcacggcggcaacaagatcctgcccgtgctgccccagctgatcatccccatcaagaacgccctgaacctgagaaacagacaggtgatctgcgtgaccctgaaggtgctgcagcacctggtggtgagcgccgagatggtgggcaaggccctggtgccctactacagacagatcctgcccgtgctgaacatcttcaagaacatgaacggcagctacagcctgcccagactggagtgcagcggcgccatcatggccagatgcaacctggaccacctgggcagcagcgacccccccaccagcgccagccaggtggccgagatcatcgtgaacagcggcgacggcatcgactacagccagcagaagagagagaacatcggcgacctgatccaggagaccctggaggccttcgagagatacggcggcgagaacgccttcatcaacatcaagtacgtggtgcccacctacgagagctgcctgctgaactag

SEQ ID NO: 92502 - DNA, 774 bp, synthetic construct
  misc_feature 1..774: note = Description of Artificial Sequence: Synthetic coding sequence
  source 1..774: mol_type = other DNA
atggtggccgagaaggagaccctgagcctgaacaagtgccccgacaagatgcccaagagaaccaagctgctggcccagcagcccctgcccgtgcaccagccccacagcctggtgagcgagggcttcaccgtgaaggccatgatgaagaacagcgtggtgagaggcccccccgccgccggcgccttcaaggagagacccaccaagcccaccgccttcagaaagttctacgagagaggcgacttccccatcgccctggagcacgacagcaagggcaacaagatcgcctggaaggtggagatcgagaagctggactaccaccactacctgcccctgttcttcgacggcctgtgcgagatgaccttcccctacgagttcttcgccagacagggcatccacgacatgctggagcacggcggcaacaagatcctgcccgtgctgccccagctgatcatccccatcaagaacgccctgaacctgagaaacagacaggtgatctgcgtgaccctgaaggtgctgcagcacctggtggtgagcgccgagatggtgggcaaggccctggtgccctactacagacagatcctgcccgtgctgaacatcttcaagaacatgaacgtgaacagcggcgacggcatcgactacagccagcagaagagagagaacatcggcgacctgatccaggagaccctggaggccttcgagagatacggcggcgagaacgccttcatcaacatcaagtacgtggtgcccacctacgagagctgcctgctgaactag

SEQ ID NO: 92503 - DNA, 774 bp, synthetic construct; identical to SEQ ID NO: 92502
  misc_feature 1..774: note = Description of Artificial Sequence: Synthetic coding sequence
  source 1..774: mol_type = other DNA

SEQ ID NO: 92504 - DNA, 825 bp, synthetic construct
  misc_feature 1..825: note = Description of Artificial Sequence: Synthetic coding sequence
  source 1..825: mol_type = other DNA
atgagcggcgagtgccagagcccccactgccccggcaccagcgccgagttcttcttcaagtgcggcgcccaccccaccagcgacaaggagaccagcgtggccctgcacctgatcgccaccaacagcagaaacatcacctgcatcacctgcaccgacgtgagaagccccgtgctggtgttccagtgcaacagcagacacgtgatctgcctggactgcttccacctgtactgcgtgaccagactgaacgacagacagttcgtgcacgacccccagctgggctacagcctgccctgcgtggccggctgccccaacagcctgatcaaggagctgcaccacttcagaatcctgggcgaggagcagtacaacagataccagcagtacggcgccgaggagtgcgtgctgcagatgggcggcgtgctgtgccccagacccggctgcggcgccggcctgctgcccgagcccgaccagagaaaggtgacctgcgagggcggcaacggcctgggctgcggcttcgccttctgcagagagtgcaaggaggcctaccacgagggcgagtgcagcgccgtgttcgaggccagcggcaccaccacccaggcctacagagtggacgagagagccgccgagcaggccagatgggaggccgccagcaaggagaccatcaagaagaccaccaagccctgccccagatgccacgtgcccgtggagaagaacggcggctgcatgcacatgaagtgcccccagccccagtgcagactggagtggtgctggaactgcggctgcgagtggaacagagtgtgcatgggcgaccactggttcgacgtgtag

SEQ ID NO: 92505 - DNA, 1107 bp, synthetic construct
  misc_feature 1..1107: note = Description of Artificial Sequence: Synthetic coding sequence
  source 1..1107: mol_type = other DNA
atgatcgtgttcgtgagattcaacagcagccacggcttccccgtggaggtggacagcgacaccagcatcttccagctgaaggaggtggtggccaagagacagggcgtgcccgccgaccagctgagagtgatcttcgccggcaaggagctgagaaacgactggaccgtgcagaactgcgacctggaccagcagagcatcgtgcacatcgtgcagagaccctggagaaagggccaggagatgaacgccaccggcggcgacgaccccagaaacgccgccggcggctgcgagagagagccccagagcctgaccagagtggacctgagcagcagcgtgctgcccggcgacagcgtgggcctggccgtgatcctgcacaccgacagcagaaaggacagcccccccgccggcagccccgccggcagaagcatctacaacagcttctacgtgtactgcaagggcccctgccagagagtgcagcccggcaagctgagagtgcagtgcagcacctgcagacaggccaccctgaccctgacccagggccccagctgctgggacgacgtgctgatccccaacagaatgagcggcgagtgccagagcccccactgccccggcaccagcgccgagttcttcttcaagtgcggcgcccaccccaccagcgacaaggagaccagcgtggccctgcacctgatcgccaccaacagcagaaacatcacctgcatcacctgcaccgacgtgagaagccccgtgctggtgttccagtgcaacagcagacacgtgatctgcctggactgcttccacctgtactgcgtgaccagactgaacgacagacagttcgtgcacgacccccagctgggctacagcctgccctgcgtggccggctgccccaacagcctgatcaaggagctgcaccacttcagaatcctgggcgaggagcagtacaacagataccagcagtacggcgccgaggagtgcgtgctgcagatgggcggcgtgctgtgccccagacccggctgcggcgccggcctgctgcccgagcccgaccagagaaaggtgacctgcgagggcggcaacggcctgggctgcggctacggccagagaagaaccaagtag

SEQ ID NO: 92506 - DNA, 825 bp, synthetic construct; identical to SEQ ID NO: 92504
  misc_feature 1..825: note = Description of Artificial Sequence: Synthetic coding sequence
  source 1..825: mol_type = other DNA

SEQ ID NO: 92507 - DNA, 657 bp, synthetic construct
  misc_feature 1..657: note = Description of Artificial Sequence: Synthetic coding sequence
  source 1..657: mol_type = other DNA
atgaacgccaccggcggcgacgaccccagaaacgccgccggcggctgcgagagagagccccagagcctgaccagagtggacctgagcagcagcgtgctgcccggcgacagcgtgggcctggccgtgatcctgcacaccgacagcagaaaggacagcccccccgccggcagccccgccggcagaagcatctacaacagcttctacgtgtactgcaagggcccctgccagagagtgcagcccggcaagctgagagtgcagtgcagcacctgcagacaggccaccctgaccctgacccagggccccagctgctgggacgacgtgctgatccccaacagaatgagcggcgagtgccagagcccccactgccccggcaccagcgccgagttcttcttcaagtgcggcgcccaccccaccagcgacaaggagaccagcgtggccctgcacctgatcgccaccaacagcagaaacatcacctgcatcacctgcaccgacgtgagaagccccgtgctggtgttccagtgcaacagcagacacgtgatctgcctggactgcttccacctgtactgcgtgaccagactgaacgacagacagttcgtgcacgacccccagctgggctacagcctgccctgcgtggtgagcctgctgcccagccagtag

SEQ ID NO: 92508 - DNA, 951 bp, synthetic construct
  misc_feature 1..951: note = Description of Artificial Sequence: Synthetic coding sequence
  source 1..951: mol_type = other DNA
atgatcgtgttcgtgagattcaacagcagccacggcttccccgtggaggtggacagcgacaccagcatcttccagctgaaggaggtggtggccaagagacagggcgtgcccgccgaccagctgagagtgatcttcgccggcaaggagctgagaaacgactggaccgtgcaggagttcttcttcaagtgcggcgcccaccccaccagcgacaaggagaccagcgtggccctgcacctgatcgccaccaacagcagaaacatcacctgcatcacctgcaccgacgtgagaagccccgtgctggtgttccagtgcaacagcagacacgtgatctgcctggactgcttccacctgtactgcgtgaccagactgaacgacagacagttcgtgcacgacccccagctgggctacagcctgccctgcgtggccggctgccccaacagcctgatcaaggagctgcaccacttcagaatcctgggcgaggagcagtacaacagataccagcagtacggcgccgaggagtgcgtgctgcagatgggcggcgtgctgtgccccagacccggctgcggcgccggcctgctgcccgagcccgaccagagaaaggtgacctgcgagggcggcaacggcctgggctgcggcttcgccttctgcagagagtgcaaggaggcctaccacgagggcgagtgcagcgccgtgttcgaggccagcggcaccaccacccaggcctacagagtggacgagagagccgccgagcaggccagatgggaggccgccagcaaggagaccatcaagaagaccaccaagccctgccccagatgccacgtgcccgtggagaagaacggcggctgcatgcacatgaagtgcccccagccccagtgcagactggagtggtgctggaactgcggctgcgagtggaacagagtgtgcatgggcgaccactggttcgacgtgtag

SEQ ID NO: 92509 - DNA, 1314 bp, synthetic construct
  misc_feature 1..1314: note = Description of Artificial Sequence: Synthetic coding sequence
  source 1..1314: mol_type = other DNA
atgatcgtgttcgtgagattcaacagcagccacggcttccccgtggaggtggacagcgacaccagcatcttccagctgaaggaggtggtggccaagagacagggcgtgcccgccgaccagctgagagtgatcttcgccggcaaggagctgagaaacgactggaccgtgcagaactgcgacctggaccagcagagcatcgtgcacatcgtgcagagaccctggagaaagggccaggagatgaacgccaccggcggcgacgaccccagaaacgccgccggcggctgcgagagagagccccagagcctgaccagagtggacctgagcagcagcgtgctgcccggcgacagcgtgggcctggccgtgatcctgcacaccgacagcagaaaggacagcccccccgccggcagccccgccggcagaagcatctacaacagcttctacgtgtactgcaagggcccctgccagagagtgcagcccggcaagctgagagtgcagtgcagcacctgcagacaggccaccctgaccctgacccaggagttcttcttcaagtgcggcgcccaccccaccagcgacaaggagaccagcgtggccctgcacctgatcgccaccaacagcagaaacatcacctgcatcacctgcaccgacgtgagaagccccgtgctggtgttccagtgcaacagcagacacgtgatctgcctggactgcttccacctgtactgcgtgaccagactgaacgacagacagttcgtgcacgacccccagctgggctacagcctgccctgcgtggccggctgccccaacagcctgatcaaggagctgcaccacttcagaatcctgggcgaggagcagtacaacagataccagcagtacggcgccgaggagtgcgtgctgcagatgggcggcgtgctgtgccccagacccggctgcggcgccggcctgctgcccgagcccgaccagagaaaggtgacctgcgagggcggcaacggcctgggctgcggcttcgccttctgcagagagtgcaaggaggcctaccacgagggcgagtgcagcgccgtgttcgaggccagcggcaccaccacccaggcctacagagtggacgagagagccgccgagcaggccagatgggaggccgccagcaaggagaccatcaagaagaccaccaagccctgccccagatgccacgtgcccgtggagaagaacggcggctgcatgcacatgaagtgcccccagccccagtgcagactggagtggtgctggaactgcggctgcgagtggaacagagtgtgcatgggcgaccactggttcgacgtgtag

SEQ ID NO: 92510 - DNA, 1398 bp, synthetic construct
  misc_feature 1..1398: note = Description of Artificial Sequence: Synthetic coding sequence
  source 1..1398: mol_type = other DNA
atgatcgtgttcgtgagattcaacagcagccacggcttccccgtggaggtggacagcgacaccagcatcttccagctgaaggaggtggtggccaagagacagggcgtgcccgccgaccagctgagagtgatcttcgccggcaaggagctgagaaacgactggaccgtgcagaactgcgacctggaccagcagagcatcgtgcacatcgtgcagagaccctggagaaagggccaggagatgaacgccaccggcggcgacgaccccagaaacgccgccggcggctgcgagagagagccccagagcctgaccagagtggacctgagcagcagcgtgctgcccggcgacagcgtgggcctggccgtgatcctgcacaccgacagcagaaaggacagcccccccgccggcagccccgccggcagaagcatctacaacagcttctacgtgtactgcaagggcccctgccagagagtgcagcccggcaagctgagagtgcagtgcagcacctgcagacaggccaccctgaccctgacccagggccccagctgctgggacgacgtgctgatccccaacagaatgagcggcgagtgccagagcccccactgccccggcaccagcgccgagttcttcttcaagtgcggcgcccaccccaccagcgacaaggagaccagcgtggccctgcacctgatcgccaccaacagcagaaacatcacctgcatcacctgcaccgacgtgagaagccccgtgctggtgttccagtgcaacagcagacacgtgatctgcctggactgcttccacctgtactgcgtgaccagactgaacgacagacagttcgtgcacgacccccagctgggctacagcctgccctgcgtggccggctgccccaacagcctgatcaaggagctgcaccacttcagaatcctgggcgaggagcagtacaacagataccagcagtacggcgccgaggagtgcgtgctgcagatgggcggcgtgctgtgccccagacccggctgcggcgccggcctgctgcccgagcccgaccagagaaaggtgacctgcgagggcggcaacggcctgggctgcggcttcgccttctgcagagagtgcaaggaggcctaccacgagggcgagtgcagcgccgtgttcgaggccagcggcaccaccacccaggcctacagagtggacgagagagccgccgagcaggccagatgggaggccgccagcaaggagaccatcaagaagaccaccaagccctgccccagatgccacgtgcccgtggagaagaacggcggctgcatgcacatgaagtgcccccagccccagtgcagactggagtggtgctggaactgcggctgcgagtggaacagagtgtgcatgggcgaccactggttcgacgtgtag

SEQ ID NO: 92511 - DNA, 612 bp, synthetic construct
  misc_feature 1..612: note = Description of Artificial Sequence: Synthetic coding sequence
  source 1..612: mol_type = other DNA
atgagcggcgagtgccagagcccccactgccccggcaccagcgccgagttcttcttcaagtgcggcgcccaccccaccagcgacaaggagaccagcgtggccctgcacctgatcgccaccaacagcagaaacatcacctgcatcacctgcaccgacgtgagaagccccgtgctggtgttccagtgcaacagcagacacgtgatctgcctggactgcttccacctgtactgcgtgaccagactgaacgacagacagttcgtgcacgacccccagctgggctacagcctgccctgcgtggccggctgccccaacagcctgatcaaggagctgcaccacttcagaatcctgggcgaggagcagtacaacagataccagcagtacggcgccgaggagtgcgtgctgcagatgggcggcgtgctgtgccccagacccggctgcggcgccggcctgctgcccgagcccgaccagagaaaggtgacctgcgagggcggcaacggcctgggctgcggcttcgccttctgcagagagtgcaaggaggcctaccacgagggcgagtgcagcgccgtgttcgaggccagcggcaccaccacccagcacagcggctgcacctag

SEQ ID NO: 92512 - DNA, 429 bp, synthetic construct
  misc_feature 1..429: note = Description of Artificial Sequence: Synthetic coding sequence
  source 1..429: mol_type = other DNA
agcgtgttcgtgagattcaacagcagccacggcttccccgtggaggtggacagcgacaccagcatcttccagctgaaggaggtggtggccaagagacagggcgtgcccgccgaccagctgagagtgatcttcgccggcaaggagctgagaaacgactggaccgtgcagaactgcgacctggaccagcagagcatcgtgcacatcgtgcagagaccctggagaaagggccaggagatgaacgccaccggcggcgacgaccccagaaacgccgccggcggctgcgagagagagccccagagcctgaccagagtggacctgagcagcagcgtgctgcccggcgacagcgtgggcctggccgtgatcctgcacaccgacagcagaaaggacagcccccccgccggcagccccggcaactgcctgcacggctag

SEQ ID NO: 92513 - DNA, 429 bp, synthetic construct
  misc_feature 1..429: note = Description of Artificial Sequence: Synthetic coding sequence
  source 1..429: mol_type = other DNA
atggccgccgtggtggccgccaccgccctgaagggcagaggcgccagaaacgccagagtgctgagaggcatcctggccggcgccaccgccaacaaggccagccacaacagaaccagagccctgcagagccacagcagccccgagggcaaggaggagcccgagcccctgagccccgagctggagtacatccccagaaagagaggcaagaaccccatgaaggccgtgggcctggcctgggccatcggcttcccctgcggcatcctgctgttcatcctgaccaagagagaggtggacaaggacagagtgaagcagatgaaggccagacagaacatgagactgagcaacaccggcgagtacgagagccagagattcagagccagcagccagagcgcccccagccccgacgtgggcagcggcgtgcagacctag

SEQ ID NO: 92514 - DNA, 1086 bp, synthetic construct
  misc_feature 1..1086: note = Description of Artificial Sequence: Synthetic coding sequence
  source 1..1086: mol_type = other DNA
atggcctggcagggctggcccgccgcctggcagtgggtggccggctgctggctgctgctggtgctggtgctggtgctgctggtgagccccagaggctgcagagccagaagaggcctgagaggcctgctgatggcccacagccagagactgctgttcagaatcggctacagcctgtacaccagaacctggctgggctacctgttctacagacagcagctgagaagagccagaaacagataccccaagggccacagcaagacccagcccagactgttcaacggcgtgaaggtgctgcccatccccgtgctgagcgacaactacagctacctgatcatcgacacccaggcccagctggccgtggccgtggaccccagcgaccccagagccgtgcaggccagcatcgagaaggagggcgtgaccctggtggccatcctgtgcacccacaagcactgggaccacagcggcggcaacagagacctgagcagaagacacagagactgcagagtgtacggcagcccccaggacggcatcccctacctgacccaccccctgtgccaccaggacgtggtgagcgtgggcagactgcagatcagagccctggccacccccggccacacccagggccacctggtgtacctgctggacggcgagccctacaagggccccagctgcctgttcagcggcgacctgctgttcctgagcggctgcggcagaaccttcgagggcaacgccgagaccatgctgagcagcctggacaccgtgctgggcctgggcgacgacaccctgctgtggcccggccacgagtacgccgaggagaacctgggcttcgccggcgtggtggagcccgagaacctggccagagagagaaagatgcagtgggtgcagagacagagactggagagaaagggcacctgccccagcaccctgggcgaggagagaagctacaaccccttcctgagaacccactgcctggccctgcaggaggccctgggccccggccccggccccaccggcgacgacgactacagcagagcccagctgctggaggagctgagaagactgaaggacatgcacaagagcaagtag

SEQ ID NO: 92515 - DNA, 1158 bp, synthetic construct
  misc_feature 1..1158: note = Description of Artificial Sequence: Synthetic coding sequence
  source 1..1158: mol_type = other DNA
atggccgccgtggtggccgccaccgccctgaagggcagaggcgccagaaacgccagagtgctgagaggcatcctggccggcgccaccgccaacaaggccagccacaacagaaccagagccctgcagagccacagcagccccgagggcaaggaggagcccgagcccctgagccccgagctggagtacatccccagaaagagaggcaagaaccccatgaaggccgtgggcctggcctggtacagcctgtacaccagaacctggctgggctacctgttctacagacagcagctgagaagagccagaaacagataccccaagggccacagcaagacccagcccagactgttcaacggcgtgaaggtgctgcccatccccgtgctgagcgacaactacagctacctgatcatcgacacccaggcccagctggccgtggccgtggaccccagcgaccccagagccgtgcaggccagcatcgagaaggagggcgtgaccctggtggccatcctgtgcacccacaagcactgggaccacagcggcggcaacagagacctgagcagaagacacagagactgcagagtgtacggcagcccccaggacggcatcccctacctgacccaccccctgtgccaccaggacgtggtgagcgtgggcagactgcagatcagagccctggccacccccggccacacccagggccacctggtgtacctgctggacggcgagccctacaagggccccagctgcctgttcagcggcgacctgctgttcctgagcggctgcggcagaaccttcgagggcaacgccgagaccatgctgagcagcctggacaccgtgctgggcctgggcgacgacaccctgctgtggcccggccacgagtacgccgaggagaacctgggcttcgccggcgtggtggagcccgagaacctggccagagagagaaagatgcagtgggtgcagagacagagactggagagaaagggcacctgccccagcaccctgggcgaggagagaagctacaaccccttcctgagaacccactgcctggccctgcaggaggccctgggccccggccccggccccaccggcgacgacgactacagcagagcccagctgctggaggagctgagaagactgaaggacatgcacaagagcaagtag

SEQ ID NO: 92516 - DNA, 1455 bp, synthetic construct
  misc_feature 1..1455: note = Description of Artificial Sequence: Synthetic coding sequence
  source 1..1455: mol_type = other DNA
atggccgccggcggcgaccacggcagccccgacagctacagaagccccctggccagcagatacgccagccccgagatgtgcttcgtgttcagcgacagatacaagttcagaacctggagacagctgtggctgtggctggccgaggccgagcagaccctgggcctgcccatcaccgacgagcagatccaggagatgaagagcaacctggagaacatcgacttcaagatggccgccgaggaggagaagagactgagacacgacgtgatggcccacgtgcacaccttcggccactgctgccccaaggccgccggcatcatccacctgggcgccaccagctgctacgtgggcgacaacaccgacctgatcatcctgagaaacgccctggacctgctgctgcccaagctggccagagtgatcagcagactggccgacttcgccaaggagagagccagcctgcccaccctgggcttcacccacttccagcccgcccagctgaccaccgtgggcaagagatgctgcctgtggatccaggacctgtgcatggacctgcagaacctgaagagagtgagagacgacctgagattcagaggcgtgaagggcaccaccggcacccaggccagcttcctgcagctgttcgagggcgacgaccacaaggtggagcagctggacaagatggtgaccgagaaggccggcttcaagagagccttcatcatcaccggccagacctacaccagaaaggtggacatcgaggtgctgagcgtgctggccagcctgggcgccagcgtgcacaagatctgcaccgacatcagactgctggccaacctgaaggagatggaggagcccttcgagaagcagcagatcggcagcagcgccatgccctacaagagaaaccccatgagaagcgagagatgctgcagcctggccagacacctgatgaccctggtgatggaccccctgcagaccgccagcgtgcagtggttcgagagaaccctggacgacagcgccaacagaagaatctgcctggccgaggccttcctgaccgccgacaccatcctgaacaccctgcagaacatcagcgagggcctggtggtgtaccccaaggtgatcgagagaagaatcagacaggagctgcccttcatggccaccgagaacatcatcatggccatggtgaaggccggcggcagcagacaggactgccacgagaagatcagagtgctgagccagcaggccgccagcgtggtgaagcaggagggcggcgacaacgacctgatcgagagaatccaggtggacgcctacttcagccccatccacagccagctggaccacctgctggaccccagcagcttcaccggcagagccagccagcaggtgcagagattcctggaggaggaggtgtaccccctgctgaagccctacgagagcgtgatgaaggtgaaggccgagctgtgcctgtag

SEQ ID NO: 92517 - DNA, 237 bp, synthetic construct
  misc_feature 1..237: note = Description of Artificial Sequence: Synthetic coding sequence
  source 1..237: mol_type = other DNA
atggtgggcctgaagaagaagagcgccgacgacgtgaagaaggtgttccacatgctggacaaggacaagagcggcttcatcgaggaggacgagctgggcttcatcctgaagggcttcagccccgacgccagagacctgagcgccaaggagaccaagatgctgatggccgccggcgacaaggacggcgacggcaagatcggcgtggacgagttcagcaccctggtggccgagagctag

SEQ ID NO: 92518 - DNA, 333 bp, synthetic construct
  misc_feature 1..333: note = Description of Artificial Sequence: Synthetic coding sequence
  source 1..333: mol_type = other DNA
atgagcatgaccgacctgctgaacgccgaggacatcaagaaggccgtgggcgccttcagcgccaccgacagcttcgaccacaagaagttcttccagatggtgggcctgaagaagaagagcgccgacgacgtgaagaaggtgttccacatgctggacaaggacaagagcggcttcatcgaggaggacgagctgggcttcatcctgaagggcttcagccccgacgccagagacctgagcgccaaggagaccaagatgctgatggccgccggcgacaaggacggcgacggcaagatcggcgtggacgagttcagcaccctggtggccgagagctag

SEQ ID NO: 92519 - DNA, 306 bp, synthetic construct
  misc_feature 1..306: note = Description of Artificial Sequence: Synthetic coding sequence
  source 1..306: mol_type = other DNA
atgagcatgaccgacctgctgaacgccgaggacatcaagaaggccgtgggcgccttcagcgccaccgacagcttcgaccacaagaagttcttccagatggtgggcctgaagaagaagagcgccgacgacgtgaagaaggtgttccacatgctggacaaggacaagagcggcttcatcgaggaggacgagctgggcttcatcctgaagggcttcagccccgacgccagagacctgagcgccaaggagaccaagatgctgatggccgccggcgacaaggacggcgacggcaagatcggcgtggactag

SEQ ID NO: 92520 - DNA, 984 bp, synthetic construct
  misc_feature 1..984: note = Description of Artificial Sequence: Synthetic coding sequence
  source 1..984: mol_type = other DNA
atgagcgacctgcaggaggagggcaagaacgccatcaacagccccatgagccccgccctggtggacgtgcaccccgaggacacccagctggaggagaacgaggagagaaccatgatcgaccccaccagcaaggaggaccccaagttcaaggagctggtgaaggtgctgctggactggatcaacgacgtgctggtggaggagagaatcatcgtgaagcagctggaggaggacctgtacgacggccaggtgctgcagaagctgctggagaagctggccggctgcaagctgaacgtggccgaggtgacccagagcgagatcggccagaagcagaagctgcagaccgtgctggaggccgtgcacgacctgctgagacccagaggctgggccctgagatggagcgtggacagcatccacggcaagaacctggtggccatcctgcacctgctggtgagcctggccatgcacttcagagcccccatcagactgcccgagcacgtgaccgtgcaggtggtggtggtgagaaagagagagggcctgctgcacagcagccacatcagcgaggagctgaccaccaccaccgagatgatgatgggcagattcgagagagacgccttcgacaccctgttcgaccacgcccccgacaagctgagcgtggtgaagaagagcctgatcaccttcgtgaacaagcacctgaacaagctgaacctggaggtgaccgagctggagacccagttcgccgacggcgtgtacctggtgctgctgatgggcctgctggaggactacttcgtgcccctgcaccacttctacctgacccccgagagcttcgaccagaaggtgcacaacgtgagcttcgccttcgagctgatgctggacggcggcctgaagaagcccaaggccagacccgaggacgtggtgaacctggacctgaagagcaccctgagagtgctgtacaacctgttcaccaagtacaagaacgtggagtag

SEQ ID NO: 92521 - DNA, 1239 bp, synthetic construct
  misc_feature 1..1239: note = Description of Artificial Sequence: Synthetic coding sequence
  source 1..1239: mol_type = other DNA
atgctgggcatcatccccctgcccttcggcaagccccagccccagagcagaagaagacccctgagaccccccagcgccagcagcgccagcagacccgccagaggcagcctgagaagagccatggccaccagcccccagaagagccccagcgtgcccaagagccccacccccaagagcccccccagcagaaagaaggacgacagcttcctgggcaagctgggcggcaccctggccagaagaaagaaggccaaggaggtgagcgagctgcaggaggagggcatgaacgccatcaacctgcccctgagccccatccccttcgagctggaccccgaggacaccatgctggaggagaacgaggtgagaaccatggtggaccccaacagcagaagcgaccccaagctgcaggagctgatgaaggtgctgatcgactggatcaacgacgtgctggtgggcgagagaatcatcgtgaaggacctggccgaggacctgtacgacggccaggtgctgcagaagctgttcgagaagctggagagcgagaagctgaacgtggccgaggtgacccagagcgagatcgcccagaagcagaagctgcagaccgtgctggagaagatcaacgagaccctgaagctgccccccagaagcatcaagtggaacgtggacagcgtgcacgccaagagcctggtggccatcctgcacctgctggtggccctgagccagtacttcagagcccccatcagactgcccgaccacgtgagcatccaggtggtggtggtgcagaagagagagggcatcctgcagagcagacagatccaggaggagatcaccggcaacaccgaggccctgagcggcagacacgagagagacgccttcgacaccctgttcgaccacgcccccgacaagctgaacgtggtgaagaagaccctgatcaccttcgtgaacaagcacctgaacaagctgaacctggaggtgaccgagctggagacccagttcgccgacggcgtgtacctggtgctgctgatgggcctgctggagggctacttcgtgcccctgcacagcttcttcctgacccccgacagcttcgagcagaaggtgctgaacgtgagcttcgccttcgagctgatgcaggacggcggcctggagaagcccaagcccagacccgaggacatcgtgaactgcgacctgaagagcaccctgagagtgctgtacaacctgttcaccaagtacagaaacgtggagtag

SEQ ID NO: 92522 - DNA, 873 bp, synthetic construct
  misc_feature 1..873: note = Description of Artificial Sequence: Synthetic coding sequence
  source 1..873: mol_type = other DNA
atgaacgccatcaacctgcccctgagccccatccccttcgagctggaccccgaggacaccatgctggaggagaacgaggtgagaaccatggtggaccccaacagcagaagcgaccccaagctgcaggagctgatgaaggtgctgatcgactggatcaacgacgtgctggtgggcgagagaatcatcgtgaaggacctggccgaggacctgtacgacggccaggtgctgcagaagctgttcgagaagctggagagcgagaagctgaacgtggccgaggtgacccagagcgagatcgcccagaagcagaagctgcagaccgtgctggagaagatcaacgagaccctgaagctgccccccagaagcatcaagtggaacgtggacagcgtgcacgccaagagcctggtggccatcctgcacctgctggtggccctgagccagtacttcagagcccccatcagactgcccgaccacgtgagcatccaggtggtggtggtgcagaagagagagggcatcctgcagagcagacagatccaggaggagatcaccggcaacaccgaggccctgagcggcagacacgagagagacgccttcgacaccctgttcgaccacgcccccgacaagctgaacgtggtgaagaaggtgggcaagggctgcctgggctggaccgagggcagcgagatgcagcagaacatcggcaagacccacccctgcagcctgagagccagctgccagaactggtggcaccacctgaccagcgcccacaccggcctgagccccctgcccagcatgtacctgagcgtgccccactggatgctgcacctgggcctgttccccagcatcagcatgaacagcctgagcagccaccccggctag

SEQ ID NO: 92523 - DNA, 1119 bp, synthetic construct
  misc_feature 1..1119: note = Description of Artificial Sequence: Synthetic coding sequence
  source 1..1119: mol_type = other DNA
atggccaccagcccccagaagagccccagcgtgcccaagagccccacccccaagagcccccccagcagaaagaaggacgacagcttcctgggcaagctgggcggcaccctggccagaagaaagaaggccaaggaggtgagcgagctgcaggaggagggcatgaacgccatcaacctgcccctgagccccatccccttcgagctggaccccgaggacaccatgctggaggagaacgaggtgagaaccatggtggaccccaacagcagaagcgaccccaagctgcaggagctgatgaaggtgctgatcgactggatcaacgacgtgctggtgggcgagagaatcatcgtgaaggacctggccgaggacctgtacgacggccaggtgctgcagaagctgttcgagaagctggagagcgagaagctgaacgtggccgaggtgacccagagcgagatcgcccagaagcagaagctgcagaccgtgctggagaagatcaacgagaccctgaagctgccccccagaagcatcaagtggaacgtggacagcgtgcacgccaagagcctggtggccatcctgcacctgctggtggccctgagccagtacttcagagcccccatcagactgcccgaccacgtgagcatccaggtggtggtggtgcagaagagagagggcatcctgcagagcagacagatccaggaggagatcaccggcaacaccgagtacgtgagcagcagacacaagagagacgccttcgacaccctgttcgaccacgcccccgacaagctgaacgtggtgaagaagaccctgatcaccttcgtgaacaagcacctgaacaagctgaacctggaggtgaccgagctggagacccagttcgccgacggcgtgtacctggtgctgctgatgggcctgctggagggctacttcgtgcccctgcacagcttcttcctgacccccgacagcttcgagcagaaggtgctgaacgtgagcttcgccttcgagctgatgcaggacggcggcctggagaagcccaagcccagacccgaggacatcgtgaactgcgacctgaagagcaccctgagagtgctgtacaacctgttcaccaagtacagaaacgtggagtag

SEQ ID NO: 92524 - DNA, 1119 bp, synthetic construct
  misc_feature 1..1119: note = Description of Artificial Sequence: Synthetic coding sequence
  source 1..1119: mol_type = other DNA
atggccaccagcccccagaagagccccagcgtgcccaagagccccacccccaagagcccccccagcagaaagaaggacgacagcttcctgggcaagctgggcggcaccctggccagaagaaagaaggccaaggaggtgagcgagctgcaggaggagggcatgaacgccatcaacctgcccctgagccccatccccttcgagctggaccccgaggacaccatgctggaggagaacgaggtgagaaccatggtggaccccaacagcagaagcgaccccaagctgcaggagctgatgaaggtgctgatcgactggatcaacgacgtgctggtgggcgagagaatcatcgtgaaggacctggccgaggacctgtacgacggccaggtgctgcagaagctgttcgagaagctggagagcgagaagctgaacgtggccgaggtgacccagagcgagatcgcccagaagcagaagctgcagaccgtgctggagaagatcaacgagaccctgaagctgccccccagaagcatcaagtggaacgtggacagcgtgcacgccaagagcctggtggccatcctgcacctgctggtggccctgagccagtacttcagagcccccatcagactgcccgaccacgtgagcatccaggtggtggtggtgcagaagagagagggcatcctgcagagcagacagatccaggaggagatcaccggcaacaccgaggccctgagcggcagacacgagagagacgccttcgacaccctgttcgaccacgcccccgacaagctgaacgtggtgaagaagaccctgatcaccttcgtgaacaagcacctgaacaagctgaacctggaggtgaccgagctggagacccagttcgccgacggcgtgtacctggtgctgctgatgggcctgctggagggctacttcgtgcccctgcacagcttcttcctgacccccgacagcttcgagcagaaggtgctgaacgtgagcttcgccttcgagctgatgcaggacggcggcctggagaagcccaagcccagacccgaggacatcgtgaactgcgacctgaagagcaccctgagagtgctgtacaacctgttcaccaagtacagaaacgtggagtag

SEQ ID NO: 92525 - DNA, 1095 bp, synthetic construct
  misc_feature 1..1095: note = Description of Artificial Sequence: Synthetic coding sequence
  source 1..1095: mol_type = other DNA
atgagcagcgcccccagaagccccacccccagacccagaagaatgaagaaggacgagagcttcctgggcaagctgggcggcaccctggccagaaagagaagagccagagaggtgagcgacctgcaggaggagggcaagaacgccatcaacagccccatgagccccgccctggtggacgtgcaccccgaggacacccagctggaggagaacgaggagagaaccatgatcgaccccaccagcaaggaggaccccaagttcaaggagctggtgaaggtgctgctggactggatcaacgacgtgctggtggaggagagaatcatcgtgaagcagctggaggaggacctgtacgacggccaggtgctgcagaagctgctggagaagctggccggctgcaagctgaacgtggccgaggtgacccagagcgagatcggccagaagcagaagctgcagaccgtgctggaggccgtgcacgacctgctgagacccagaggctgggccctgagatggagcgtggacagcatccacggcaagaacctggtggccatcctgcacctgctggtgagcctggccatgcacttcagagcccccatcagactgcccgagcacgtgaccgtgcaggtggtggtggtgagaaagagagagggcctgctgcacagcagccacatcagcgaggagctgaccaccaccaccgagatgatgatgggcagattcgagagagacgccttcgacaccctgttcgaccacgcccccgacaagctgagcgtggtgaagaagagcctgatcaccttcgtgaacaagcacctgaacaagctgaacctggaggtgaccgagctggagacccagttcgccgacggcgtgtacctggtgctgctgatgggcctgctggaggactacttcgtgcccctgcaccacttctacctgacccccgagagcttcgaccagaaggtgcacaacgtgagcttcgccttcgagctgatgctggacggcggcctgaagaagcccaaggccagacccgaggacgtggtgaacctggacctgaagagcaccctgagagtgctgtacaacctgttcaccaagtacaagaacgtggagtag

SEQ ID NO: 92526 - DNA, 1194 bp, synthetic construct
  misc_feature 1..1194: note = Description of Artificial Sequence: Synthetic coding sequence
  source 1..1194: mol_type = other DNA
atgcaccacgtgttcaaggaccaccagagaggcgagaagagaggcttcctgagccccgagaacaagaactgcagaagactggagctgagaagaggctgcagctgcagctggggcctgtgcagccaggccctgatggccagcctggccggcagcctgctgcccggcagcgacagaagcggcgtggagaccagcgagtacgcccagggcggcgtgagcgacctgcaggaggagggcaagaacgccatcaacagccccatgagccccgccctggtggacgtgcaccccgaggacacccagctggaggagaacgaggagagaaccatgatcgaccccaccagcaaggaggaccccaagttcaaggagctggtgaaggtgctgctggactggatcaacgacgtgctggtggaggagagaatcatcgtgaagcagctggaggaggacctgtacgacggccaggtgctgcagaagctgctggagaagctggccggctgcaagctgaacgtggccgaggtgacccagagcgagatcggccagaagcagaagctgcagaccgtgctggaggccgtgcacgacctgctgagacccagaggctgggccctgagatggagcgtggacagcatccacggcaagaacctggtggccatcctgcacctgctggtgagcctggccatgcacttcagagcccccatcagactgcccgagcacgtgaccgtgcaggtggtggtggtgagaaagagagagggcctgctgcacagcagccacatcagcgaggagctgaccaccaccaccgagatgatgatgggcagattcgagagagacgccttcgacaccctgttcgaccacgcccccgacaagctgagcgtggtgaagaagagcctgatcaccttcgtgaacaagcacctgaacaagctgaacctggaggtgaccgagctggagacccagttcgccgacggcgtgtacctggtgctgctgatgggcctgctggaggactacttcgtgcccctgcaccacttctacctgacccccgagagcttcgaccagaaggtgcacaacgtgagcttcgccttcgagctgatgctggacggcggcctgaagaagcccaaggccagacccgaggacgtggtgaacctggacctgaagagcaccctgagagtgctgtacaacctgttcaccaagtacaagaacgtggagtag

SEQ ID NO: 92527 - DNA, 996 bp, synthetic construct
  misc_feature 1..996: note = Description of Artificial Sequence: Synthetic coding sequence
  source 1..996: mol_type = other DNA
atggagcccgagttcctgtacgacctgctgcagctgcccaagggcgtggagccccccgccgaggaggagctgagcaagggcggcaagaagaagtacctgccccccaccagcagaaaggaccccaagttcgaggagctgcagaaggtgctgatggagtggatcaacgccaccctgctgcccgagcacatcgtggtgagaagcctggaggaggacatgttcgacggcctgatcctgcaccacctgttccagagactggccgccctgaagctggaggccgaggacatcgccctgaccgccaccagccagaagcacaagctgaccgtggtgctggaggccgtgaacagaagcctgcagctggaggagtggcaggccaagtggagcgtggagagcatcttcaacaaggacctgctgagcaccctgcacctgctggtggccctggccaagagattccagcccgacctgagcctgcccaccaacgtgcaggtggaggtgatcaccatcgagagcaccaagagcggcctgaagagcgagaagctggtggagcagctgaccgagtacagcaccgacaaggacgagccccccaaggacgtgttcgacgagctgttcaagctggcccccgagaaggtgaacgccgtgaaggaggccatcgtgaacttcgtgaaccagaagctggacagactgggcctgagcgtgcagaacctggacacccagttcgccgacggcgtgatcctgctgctgctgatcggccagctggagggcttcttcctgcacctgaaggagttctacctgacccccaacagccccgccgagatgctgcacaacgtgaccctggccctggagctgctgaaggacgagggcctgctgagctgccccgtgagccccgaggacatcgtgaacaaggacgccaagagcaccctgagagtgctgtacggcctgttctgcaagcacacccagaaggcccacagagacagaaccccccacggcgcccccaactag

SEQ ID NO: 92528 - DNA, 81 bp, synthetic construct
  misc_feature 1..81: note = Description of Artificial Sequence: Synthetic coding sequence
  source 1..81: mol_type = other DNA
atggagcccgagttcctgtacgacctgctgcagctgcccaagggcgtggagccccccgccgaggaggagctgagcaagtag

SEQ ID NO: 92529 - DNA, 93 bp, synthetic construct
  misc_feature 1..93: note = Description of Artificial Sequence: Synthetic coding sequence
  source 1..93: mol_type = other DNA
atggagcccgagttcctgtacgacctgctgcagctgcccaagggcgtggagccccccgccgaggaggagctgagcaagggcgtgtgcccctag

SEQ ID NO: 92530 - DNA, 996 bp, synthetic construct; identical to SEQ ID NO: 92527
  misc_feature 1..996: note = Description of Artificial Sequence: Synthetic coding sequence
  source 1..996: mol_type = other DNA

SEQ ID NO: 92531 - DNA, 996 bp, synthetic construct; identical to SEQ ID NO: 92527
  misc_feature 1..996: note = Description of Artificial Sequence: Synthetic coding sequence
  source 1..996: mol_type = other DNA

SEQ ID NO: 92532 - DNA, 414 bp, synthetic construct
  misc_feature 1..414: note = Description of Artificial Sequence: Synthetic coding sequence
  source 1..414: mol_type = other DNA
atggtgcccgccaaggagcaggtgcccggcagatgcgacagcacccagagatgcttccccggccccagcaactggaccggcgccggcggcagagccggcagccagcccttcgtgggcgacggcaccctgggcacccccaacttctgctgggaccacaaggagaagagagccgccgagagccagctgcaggcctgggaggccatggagcccgagttcctgtacgacctgctgcagctgcccaagggcgtggagccccccgccgaggaggagctgagcaagggcggcaagaagaagtacctgccccccaccagcagaaaggaccccaagttcgaggagctgcagaagcacacctggcccagccccgtgaccggcaccggcgacaccatctgcggcctggccagaaagacctggtag

SEQ ID NO: 92533 - DNA, 1083 bp, synthetic construct
  misc_feature 1..1083: note = Description of Artificial Sequence: Synthetic coding sequence
  source 1..1083: mol_type = other DNA
atggccgccgagagaggcgccggccagcagcagagccaggagatgatggaggtggacagaagagtggagagcgaggagagcggcgacgaggagggcaagaagcacagcagcggcatcgtggccgacctgagcgagcagagcctgaaggacggcgaggagagaggcgaggaggaccccgaggaggagcacgagctgcccgtggacatggagaccatcaacctggacagagacgccgaggacgtggacctgaaccactacagaatcggcaagatcgagggcttcgaggtgctgaagaaggtgaagaccctgtgcctgagacagaacctgatcaagtgcatcgagaacctggaggagctgcagagcctgagagagctggacctgtacgacaaccagatcaagaagatcgagaacctggaggccctgaccgagctggagatcctggacatcagcttcaacctgctgagaaacatcgagggcgtggacaagctgaccagactgaagaagctgttcctggtgaacaacaagatcagcaagatcgagaacctgagcaacctgcaccagctgcagatgctggagctgggcagcaacagaatcagagccatcgagaacatcgacaccctgaccaacctggagagcctgttcctgggcaagaacaagatcaccaagctgcagaacctggacgccctgaccaacctgaccgtgctgagcatgcagagcaacagactgaccaagatcgagggcctgcagaacctggtgaacctgagagagctgtacctgagccacaacggcatcgaggtgatcgagggcctggagaacaacaacaagctgaccatgctggacatcgccagcaacagaatcaagaagatcgagaacatcagccacctgaccgagctgcaggagttctggatgaacgacaacctgctggagagctggagcgacctggacgagctgaagggcgccagaagcctggagaccgtgtacctggagagaaaccccctgcagaaggacccccagtacagaagaaaggtgatgctggccctgcccagcgtgagacagatcgacgccaccttcgtgagattctag

SEQ ID NO: 92534 - DNA, 3993 bp, synthetic construct
  misc_feature 1..3993: note = Description of Artificial Sequence: Synthetic coding sequence
  source 1..3993: mol_type = other DNA
atggaggacggcggcctgaccgccttcgaggaggaccagagatgcctgagccagagcctgcccctgcccgtgagcgccgagggccccgccgcccagaccaccgccgagcccagcagaagcttcagcagcgcccacagacacctgagcagaagaaacggcctgagcagactgtgccagagcagaaccgccctgagcgaggacagatggagcagctactgcctgagcagcctggccgcccagaacatctgcaccagcaagctgcactgccccgccgcccccgagcacaccgaccccagcgagcccagaggcagcgtgagctgctgcagcctgctgagaggcctgagcagcggctggagcagccccctgctgcccgcccccgtgtgcaaccccaacaaggccatcttcaccgtggacgccaagaccaccgagatcctggtggccaacgacaaggcctgcggcctgctgggctacagcagccaggacctgatcggccagaagctgacccagttcttcctgagaagcgacagcgacgtggtggaggccctgagcgaggagcacatggaggccgacggccacgccgccgtggtgttcggcaccgtggtggacatcatcagcagaagcggcgagaagatccccgtgagcgtgtggatgaagagaatgagacaggagagaagactgtgctgcgtggtggtgctggagcccgtggagagagtgagcacctgggtggccttccagagcgacggcaccgtgaccagctgcgacagcctgttcgcccacctgcacggctacgtgagcggcgaggacgtggccggccagcacatcaccgacctgatccccagcgtgcagctgccccccagcggccagcacatccccaagaacctgaagatccagagaagcgtgggcagagccagagacggcaccaccttccccctgagcctgaagctgaagagccagcccagcagcgaggaggccaccaccggcgaggccgcccccgtgagcggctacagagccagcgtgtgggtgttctgcaccatcagcggcctgatcaccctgctgcccgacggcaccatccacggcatcaaccacagcttcgccctgaccctgttcggctacggcaagaccgagctgctgggcaagaacatcaccttcctgatccccggcttctacagctacatggacctggcctacaacagcagcctgcagctgcccgacctggccagctgcctggacgtgggcaacgagagcggctgcggcgagagaaccctggacccctggcagggccaggaccccgccgagggcggccaggaccccagaatcaacgtggtgctggccggcggccacgtggtgcccagagacgagatcagaaagctgatggagagccaggacatcttcaccggcacccagaccgagctgatcgccggcggccagctgctgagctgcctgagcccccagcccgcccccggcgtggacaacgtgcccgagggcagcctgcccgtgcacggcgagcaggccctgcccaaggaccagcagatcaccgccctgggcagagaggagcccgtggccatcgagagccccggccaggacctgctgggcgagagcagaagcgagcccgtggacgtgaagcccttcgccagctgcgaggacagcgaggcccccgtgcccgccgaggacggcggcagcgacgccggcatgtgcggcctgtgccagaaggcccagctggagagaatgggcgtgagcggccccagcggcagcgacctgtgggccggcgccgccgtggccaagccccaggccaagggccagctggccggcggcagcctgctgatgcactgcccctgctacggcagcgagtggggcctgtggtggagaagccaggacctggcccccagccccagcggcatggccggcctgagcttcggcacccccaccctggacgagccctggctgggcgtggagaacgacagagaggagctgcagacctgcctgatcaaggagcagctgagccagctgagcctggccggcgccctggacgtgccccacgccgagctggtgcccaccgagtgccaggccgtgaccgcccccgtgagcagctgcgacctgggcggcagagacctgtgcggcggctgcaccggcagcagcagcgcctgctacgccctggccaccgacctgcccggcggcctggaggccgtggaggcccaggaggtggacgtgaacagcttcagctggaacctgaaggagctgttcttcagcgaccagaccgaccagaccagcagcaactgcagctgcgccaccagcgagctgagagagacccccagcagcctggccgtgggcagcgaccccgacgtgggcagcctgcaggagcagggcagctgcgtgctggacgacagagagctgctgctgctgaccggcacctgcgtggacctgggccagggcagaagattcagagagagctgcgtgggccacgaccccaccgagcccctggaggtgtgcctggtgagcagcgagcactacgccgccagcgacagagagagccccggccacgtgcccagcaccctggacgccggccccgaggacacctgccccagcgccgaggagcccagactgaacgtgcaggtgaccagcacccccgtgatcgtgatgagaggcgccgccggcctgcagagagagatccaggagggcgcctacagcggcagctgctaccacagagacggcctgagactgagcatccagttcgaggtgagaagagtggagctgcagggccccacccccctgttctgctgctggctggtgaaggacctgctgcacagccagagagacagcgccgccagaaccagactgttcctggccagcctgcccggcagcacccacagcaccgccgccgagctgaccggccccagcctggtggaggtgctgagagccagaccctggttcgaggagccccccaaggccgtggagctggagggcctggccgcctgcgagggcgagtacagccagaagtacagcaccatgagccccctgggcagcggcgccttcggcttcgtgtggaccgccgtggacaaggagaagaacaaggaggtggtggtgaagttcatcaagaaggagaaggtgctggaggactgctggatcgaggaccccaagctgggcaaggtgaccctggagatcgccatcctgagcagagtggagcacgccaacatcatcaaggtgctggacatcttcgagaaccagggcttcttccagctggtgatggagaagcacggcagcggcctggacctgttcgccttcatcgacagacaccccagactggacgagcccctggccagctacatcttcagacaggtgagagccggccagagcagactggtgagcgccgtgggctacctgagactgaaggacatcatccacagagacatcaaggacgagaacatcgtgatcgccgaggacttcaccatcaagctgatcgacttcggcagcgccgcctacctggagagaggcaagctgttctacaccttctgcggcaccatcgagtactgcgcccccgaggtgctgatgggcaacccctacagaggccccgagctggagatgtggagcctgggcgtgaccctgtacaccctggtgttcgaggagaaccccttctgcgagctggaggagaccgtggaggccgccatccaccccccctacctggtgagcaaggagctgatgagcctggtgagcggcctgctgcagcccgtgcccgagagaagaaccaccctggagaagctggtgaccgacccctgggtgacccagcccgtgaacctggccgactacacctgggaggaggtgttcagagtgaacaagcccgagagcggcgtgctgagcgccgccagcctggagatgggcaacagaagcctgagcgacgtggcccaggcccaggagctgtgcggcggccccgtgcccggcgaggcccccaacggccagggctgcctgcaccccggcgaccccagactgctgaccagctag

SEQ ID NO: 92535 - DNA, 3972 bp, synthetic construct
  misc_feature 1..3972: note = Description of Artificial Sequence: Synthetic coding sequence
  source 1..3972: mol_type = other DNA
atggaggacggcggcctgaccgccttcgaggaggaccagagatgcctgagccagagcctgcccctgcccgtgagcgccgagggccccgccgcccagaccaccgccgagcccagcagaagcttcagcagcgcccacagacacctgagcagaagaaacggcctgagcagactgtgccagagcagaaccgccctgagcgaggacagatggagcagctactgcctgagcagcctggccgcccagaacatctgcaccagcaagctgcactgccccgccgcccccgagcacaccgaccccagcgagcccagaggcagcgtgagctgctgcagcctgctgagaggcctgagcagcggctggagcagccccctgctgcccgcccccgtgtgcaaccccaacaaggccatcttcaccgtggacgccaagaccaccgagatcctggtggccaacgacaaggcctgcggcctgctgggctacagcagccaggacctgatcggccagaagctgacccagttcttcctgagaagcgacagcgacgtggtggaggccctgagcgaggagcacatggaggccgacggccacgccgccgtggtgttcggcaccgtggtggacatcatcagcagaagcggcgagaagatccccgtgagcgtgtggatgaagagaatgagacaggagagaagactgtgctgcgtggtggtgctggagcccgtggagagagtgagcacctgggtggccttccagagcgacggcaccgtgaccagctgcgacagcctgttcgcccacctgcacggctacgtgagcggcgaggacgtggccggccagcacatcaccgacctgatccccagcgtgcagctgccccccagcggccagcacatccccaagaacctgaagatccagagaagcgtgggcagagccagagacggcaccaccttccccctgagcctgaagctgaagagccagcccagcagcgaggaggccaccaccggcgaggccgcccccgtgagcggctacagagccagcgtgtgggtgttctgcaccatcagcggcctgatcaccctgctgcccgacggcaccatccacggcatcaaccacagcttcgccctgaccctgttcggctacggcaagaccgagctgctgggcaagaacatcaccttcctgatccccggcttctacagctacatggacctggcctacaacagcagcctgcagctgcccgacctggccagctgcctggacgtgggcaacgagagcggctgcggcgagagaaccctggacccctggcagggccaggaccccgccgagggcggccaggaccccagaatcaacgtggtgctggccggcggccacgtggtgcccagagacgagatcagaaagctgatggagagccaggacatcttcaccggcacccagaccgagctgatcgccggcggccagctgctgagctgcctgagcccccagcccgcccccggcgtggacaacgtgcccgagggcagcctgcccgtgcacggcgagcaggccctgcccaaggaccagcagatcaccgccctgggcagagaggagcccgtggccatcgagagccccggccaggacctgctgggcgagagcagaagcgagcccgtggacgtgaagcccttcgccagctgcgaggacagcgaggcccccgtgcccgccgaggacggcggcagcgacgccggcatgtgcggcctgtgccagaaggcccagctggagagaatgggcgtgagcggccccagcggcagcgacctgtgggccggcgccgccgtggccaagccccaggccaagggccagctggccggcggcagcctgctgatgcactgcccctgctacggcagcgagtggggcctgtggtggagaagccaggacctggcccccagccccagcggcatggccggcctgagcttcggcacccccaccctggacgagccctggctgggcgtggagaacgacagagaggagctgcagacctgcctgatcaaggagcagctgagccagctgagcctggccggcgccctggacgtgccccacgccgagctggtgcccaccgagtgccaggccgtgaccgcccccgtgagcagctgcgacctgggcggcagagacctgtgcggcggctgcaccggcagcagcagcgcctgctacgccctggccaccgacctgcccggcggcctggaggccgtggaggcccaggaggtggacgtgaacagcttcagctggaacctgaaggagctgttcttcagcgaccagaccgaccagaccagcagcaactgcagctgcgccaccagcgagctgagagagacccccagcagcctggccgtgggcagcgaccccgacgtgggcagcctgcaggagcagggcagctgcgtgctggacgacagagagctgctgctgctgaccggcacctgcgtggacctgggccagggcagaagattcagagagagctgcgtgggccacgaccccaccgagcccctggaggtgtgcctggtgagcagcgagcactacgccgccagcgacagagagagccccggccacgtgcccagcaccctggacgccggccccgaggacacctgccccagcgccgaggagcccagactgaacgtgcaggtgaccagcacccccgtgatcgtgatgagaggcgccgccggcctgcagagagagatccaggagggcgcctacagcggcagctgctaccacagagacggcctgagactgagcatccagttcgaggtgagaagagtggagctgcagggccccacccccctgttctgctgctggctggtgaaggacctgctgcacagccagagagacagcgccgccagaaccagactgttcctggccagcctgcccggcagcacccacagcaccgccgccgagctgaccggccccagcctggtggaggtgctgagagccagaccctggttcgaggagccccccaaggccgtggagctggagggcctggccgcctgcgagggcgagtacagccagaagtacagcaccatgagccccctgggcagcggcgccttcggcttcgtgtggaccgccgtggacaaggagaagaacaaggaggtggtggtgaagttcatcaagaaggagaaggtgctggaggactgctggatcgaggaccccaagctgggcaaggtgaccctggagatcgccatcctgagcagagtggagcacgccaacatcatcaaggtgctggacatcttcgagaaccagggcttcttccagctggtgatggagaagcacggcagcggcctggacctgttcgccttcatcgacagacaccccagactggacgagcccctggccagctacatcttcagacagctggtgagcgccgtgggctacctgagactgaaggacatcatccacagagacatcaaggacgagaacatcgtgatcgccgaggacttcaccatcaagctgatcgacttcggcagcgccgcctacctggagagaggcaagctgttctacaccttctgcggcaccatcgagtactgcgcccccgaggtgctgatgggcaacccctacagaggccccgagctggagatgtggagcctgggcgtgaccctgtacaccctggtgttcgaggagaaccccttctgcgagctggaggagaccgtggaggccgccatccaccccccctacctggtgagcaaggagctgatgagcctggtgagcggcctgctgcagcccgtgcccgagagaagaaccaccctggagaagctggtgaccgacccctgggtgacccagcccgtgaacctggccgactacacctgggaggaggtgttcagagtgaacaagcccgagagcggcgtgctgagcgccgccagcctggagatgggcaacagaagcctgagcgacgtggcccaggcccaggagctgtgcggcggccccgtgcccggcgaggcccccaacggccagggctgcctgcaccccggcgaccccagactgctgaccagctag

SEQ ID NO: 92536 - DNA, 378 bp, synthetic construct
  misc_feature 1..378: note = Description of Artificial Sequence: Synthetic coding sequence
  source 1..378: mol_type = other DNA
atggaggacggcggcctgaccgccttcgaggaggaccagagatgcctgagccagagcctgcccctgcccgtgagcgccgagggccccgccgcccagaccaccgccgagcccagcagaagcttcagcagcgcccacagacacctgagcagaagaaacggcctgagcagactgtgccagagcagaaccgccctgagcgaggacagatggagcagctactgcctgagcagcctggccgcccagaacatctgcaccagcaagctgcactgccccgccgcccccgagcacaccgaccccagcgagcccagaggcagcgtgagctgctgcagcctgctgagaggcctgagcagcggctggagcagccccctgctgcccgcctag

SEQ ID NO: 92537 - DNA, 3324 bp, synthetic construct
  misc_feature 1..3324: note = Description of Artificial Sequence: Synthetic coding sequence
  source 1..3324: mol_type = other DNA
atgaagagaatgagacaggagagaagactgtgctgcgtggtggtgctggagcccgtggagagagtgagcacctgggtggccttccagagcgacggcaccgtgaccagctgcgacagcctgttcgcccacctgcacggctacgtgagcggcgaggacgtggccggccagcacatcaccgacctgatccccagcgtgcagctgccccccagcggccagcacatccccaagaacctgaagatccagagaagcgtgggcagagccagagacggcaccaccttccccctgagcctgaagctgaagagccagcccagcagcgaggaggccaccaccggcgaggccgcccccgtgagcggctacagagccagcgtgtgggtgttctgcaccatcagcggcctgatcaccctgctgcccgacggcaccatccacggcatcaaccacagcttcgccctgaccctgttcggctacggcaagaccgagctgctgggcaagaacatcaccttcctgatccccggcttctacagctacatggacctggcctacaacagcagcctgcagctgcccgacctggccagctgcctggacgtgggcaacgagagcggctgcggcgagagaaccctggacccctggcagggccaggaccccgccgagggcggccaggaccccagaatcaacgtggtgctggccggcggccacgtggtgcccagagacgagatcagaaagctgatggagagccaggacatcttcaccggcacccagaccgagctgatcgccggcggccagctgctgagctgcctgagcccccagcccgcccccggcgtggacaacgtgcccgagggcagcctgcccgtgcacggcgagcaggccctgcccaaggaccagcagatcaccgccctgggcagagaggagcccgtggccatcgagagccccggccaggacctgctgggcgagagcagaagcgagcccgtggacgtgaagcccttcgccagctgcgaggacagcgaggcccccgtgcccgccgaggacggcggcagcgacgccggcatgtgcggcctgtgccagaaggcccagctggagagaatgggcgtgagcggccccagcggcagcgacctgtgggccggcgccgccgtggccaagccccaggccaagggccagctggccggcggcagcctgctgatgcactgcccctgctacggcagcgagtggggcctgtggtggagaagccaggacctggcccccagccccagcggcatggccggcctgagcttcggcacccccaccctggacgagccctggctgggcgtggagaacgacagagaggagctgcagacctgcctgatcaaggagcagctgagccagctgagcctggccggcgccctggacgtgccccacgccgagctggtgcccaccgagtgccaggccgtgaccgcccccgtgagcagctgcgacctgggcggcagagacctgtgcggcggctgcaccggcagcagcagcgcctgctacgccctggccaccgacctgcccggcggcctggaggccgtggaggcccaggaggtggacgtgaacagcttcagctggaacctgaaggagctgttcttcagcgaccagaccgaccagaccagcagcaactgcagctgcgccaccagcgagctgagagagacccccagcagcctggccgtgggcagcgaccccgacgtgggcagcctgcaggagcagggcagctgcgtgctggacgacagagagctgctgctgctgaccggcacctgcgtggacctgggccagggcagaagattcagagagagctgcgtgggccacgaccccaccgagcccctggaggtgtgcctggtgagcagcgagcactacgccgccagcgacagagagagccccggccacgtgcccagcaccctggacgccggccccgaggacacctgccccagcgccgaggagcccagactgaacgtgcaggtgaccagcacccccgtgatcgtgatgagaggcgccgccggcctgcagagagagatccaggagggcgcctacagcggcagctgctaccacagagacggcctgagactgagcatccagttcgaggtgagaagagtggagctgcagggccccacccccctgttctgctgctggctggtgaaggacctgctgcacagccagagagacagcgccgccagaaccagactgttcctggccagcctgcccggcagcacccacagcaccgccgccgagctgaccggccccagcctggtggaggtgctgagagccagaccctggttcgaggagccccccaaggccgtggagctggagggcctggccgcctgcgagggcgagtacagccagaagtacagcaccatgagccccctgggcagcggcgccttcggcttcgtgtggaccgccgtggacaaggagaagaacaaggaggtggtggtgaagttcatcaagaaggagaaggtgctggaggactgctggatcgaggaccccaagctgggcaaggtgaccctggagatcgccatcctgagcagagtggagcacgccaacatcatcaaggtgctggacatcttcgagaaccagggcttcttccagctggtgatggagaagcacggcagcggcctggacctgttcgccttcatcgacagacaccccagactggacgagcccctggccagctacatcttcagacagctggtgagcgccgtgggctacctgagactgaaggacatcatccacagagacatcaaggacgagaacatcgtgatcgccgaggacttcaccatcaagctgatcgacttcggcagcgccgcctacctggagagaggcaagctgttctacaccttctgcggcaccatcgagtactgcgcccccgaggtgctgatgggcaacccctacagaggccccgagctggagatgtggagcctgggcgtgaccctgtacaccctggtgttcgaggagaaccccttctgcgagctggaggagaccgtggaggccgccatccaccccccctacctggtgagcaaggagctgatgagcctggtgagcggcctgctgcagcccgtgcccgagagaagaaccaccctggagaagctggtgaccgacccctgggtgacccagcccgtgaacctggccgactacacctgggaggaggtgttcagagtgaacaagcccgagagcggcgtgctgagcgccgccagcctggagatgggcaacagaagcctgagcgacgtggcccaggcccaggagctgtgcggcggccccgtgcccggcgaggcccccaacggccagggctgcctgcaccccggcgaccccagactgctgaccagctag

SEQ ID NO: 92538 - DNA, 3414 bp, synthetic construct
  misc_feature 1..3414: note = Description of Artificial Sequence: Synthetic coding sequence
  source 1..3414: mol_type = other DNA
atgggcttccccgacagcgccagagccggccagagaagcctggtggacatcatcagcagaagcggcgagaagatccccgtgagcgtgtggatgaagagaatgagacaggagagaagactgtgctgcgtggtggtgctggagcccgtggagagagtgagcacctgggtggccttccagagcgacggcaccgtgaccagctgcgacagcctgttcgcccacctgcacggctacgtgagcggcgaggacgtggccggccagcacatcaccgacctgatccccagcgtgcagctgccccccagcggccagcacatccccaagaacctgaagatccagagaagcgtgggcagagccagagacggcaccaccttccccctgagcctgaagctgaagagccagcccagcagcgaggaggccaccaccggcgaggccgcccccgtgagcggctacagagccagcgtgtgggtgttctgcaccatcagcggcctgatcaccctgctgcccgacggcaccatccacggcatcaaccacagcttcgccctgaccctgttcggctacggcaagaccgagctgctgggcaagaacatcaccttcctgatccccggcttctacagctacatggacctggcctacaacagcagcctgcagctgcccgacctggccagctgcctggacgtgggcaacgagagcggctgcggcgagagaaccctggacccctggcagggccaggaccccgccgagggcggccaggaccccagaatcaacgtggtgctggccggcggccacgtggtgcccagagacgagatcagaaagctgatggagagccaggacatcttcaccggcacccagaccgagctgatcgccggcggccagctgctgagctgcctgagcccccagcccgcccccggcgtggacaacgtgcccgagggcagcctgcccgtgcacggcgagcaggccctgcccaaggaccagcagatcaccgccctgggcagagaggagcccgtggccatcgagagccccggccaggacctgctgggcgagagcagaagcgagcccgtggacgtgaagcccttcgccagctgcgaggacagcgaggcccccgtgcccgccgaggacggcggcagcgacgccggcatgtgcggcctgtgccagaaggcccagctggagagaatgggcgtgagcggccccagcggcagcgacctgtgggccggcgccgccgtggccaagccccaggccaagggccagctggccggcggcagcctgctgatgcactgcccctgctacggcagcgagtggggcctgtggtggagaagccaggacctggcccccagccccagcggcatggccggcctgagcttcggcacccccaccctggacgagccctggctgggcgtggagaacgacagagaggagctgcagacctgcctgatcaaggagcagctgagccagctgagcctggccggcgccctggacgtgccccacgccgagctggtgcccaccgagtgccaggccgtgaccgcccccgtgagcagctgcgacctgggcggcagagacctgtgcggcggctgcaccggcagcagcagcgcctgctacgccctggccaccgacctgcccggcggcctggaggccgtggaggcccaggaggtggacgtgaacagcttcagctggaacctgaaggagctgttcttcagcgaccagaccgaccagaccagcagcaactgcagctgcgccaccagcgagctgagagagacccccagcagcctggccgtgggcagcgaccccgacgtgggcagcctgcaggagcagggcagctgcgtgctggacgacagagagctgctgctgctgaccggcacctgcgtggacctgggccagggcagaagattcagagagagctgcgtgggccacgaccccaccgagcccctggaggtgtgcctggtgagcagcgagcactacgccgccagcgacagagagagccccggccacgtgcccagcaccctggacgccggccccgaggacacctgccccagcgccgaggagcccagactgaacgtgcaggtgaccagcacccccgtgatcgtgatgagaggcgccgccggcctgcagagagagatccaggagggcgcctacagcggcagctgctaccacagagacggcctgagactgagcatccagttcgaggtgagaagagtggagctgcagggccccacccccctgttctgctgctggctggtgaaggacctgctgcacagccagagagacagcgccgccagaaccagactgttcctggccagcctgcccggcagcacccacagcaccgccgccgagctgaccggccccagcctggtggaggtgctgagagccagaccctggttcgaggagccccccaaggccgtggagctggagggcctggccgcctgcgagggcgagtacagccagaagtacagcaccatgagccccctgggcagcggcgccttcggcttcgtgtggaccgccgtggacaaggagaagaacaaggaggtggtggtgaagttcatcaagaaggagaaggtgctggaggactgctggatcgaggaccccaagctgggcaaggtgaccctggagatcgccatcctgagcagagtggagcacgccaacatcatcaaggtgctggacatcttcgagaaccagggcttcttccagctggtgatggagaagcacggcagcggcctggacctgttcgccttcatcgacagacaccccagactggacgagcccctggccagctacatcttcagacagctggtgagcgccgtgggctacctgagactgaaggacatcatccacagagacatcaaggacgagaacatcgtgatcgccgaggacttcaccatcaagctgatcgacttcggcagcgccgcctacctggagagaggcaagctgttctacaccttctgcggcaccatcgagtactgcgcccccgaggtgctgatgggcaacccctacagaggccccgagctggagatgtggagcctgggcgtgaccctgtacaccctggtgttcgaggagaaccccttctgcgagctggaggagaccgtggaggccgccatccaccccccctacctggtgagcaaggagctgatgagcctggtgagcggcctgctgcagcccgtgcccgagagaagaaccaccctggagaagctggtgaccgacccctgggtgacccagcccgtgaacctggccgactacacctgggaggaggtgttcagagtgaacaagcccgagagcggcgtgctgagcgccgccagcctggagatgggcaacagaagcctgagcgacgtggcccaggcccaggagctgtgcggcggccccgtgcccggcgaggcccccaacggccagggctgcctgcaccccggcgaccccagactgctgaccagctag

SEQ ID NO: 92539 - DNA, 3432 bp, synthetic construct
  misc_feature 1..3432: note = Description of Artificial Sequence: Synthetic coding sequence
  source 1..3432: mol_type = other DNA
atggaggacggcggcctgaccgccttcgaggaggaccagagatgcctgagccagagcctgcccctgcccgtgagcgccgagggccccgccgcccagaccaccgccgagcccagcagaagcttcagcagcgcccacagacacctgagcagaagaaacggcctgagcagactgtgccagagcagaaccgccctgagcgaggacagatggagcagctactgcctgagcagcctggccgcccagaacatctgcaccagcaagctgcactgccccgccgcccccgagcacaccgaccccagcgagcccagaggcagcgtgagctgctgcagcctgctgagaggcctgagcagcggctggagcagccccctgctgcccgcccccgtgtgcaaccccaacaaggccatcttcaccgtggacgccaagaccaccgagatcctggtggccaacgacaaggcctgcggcctgctgggctacagcagccaggacctgatcggccagaagctgacccagttcttcctgagaagcgacagcgacgtggtggaggccctgagcgaggagcacatggaggccgacggccacgccgccgtggtgttcggcaccgtggtggacatcatcagcagaagcggcgagaagatccccgtgagcgtgtggatgaagagaatgagacaggagagaagactgtgctgcgtggtggtgctggagcccgtggagagagtgagcacctgggtggccttccagagcgacggcaccgtgaccagctgcgacagcctgttcgcccacctgcacggctacgtgagcggcgaggacgtggccggccagcacatcaccgacctgatccccagcgtgcagctgccccccagcggccagcacatccccaagaacctgaagatccagagaagcgtgggcagagccagagacggcaccaccttccccctgagcctgaagctgaagagccagcccagcagcgaggaggccaccaccggcgaggccgcccccgtgagcggctacagagccagcgtgtgggtgttctgcaccatcagcggcctgatcaccctgctgcccgacggcaccatccacggcatcaaccacagcttcgccctgaccctgttcggctacggcaagaccgagctgctgggcaagaacatcaccttcctgatccccggcttctacagctacatggacctggcctacaacagcagcctgcagctgcccgacctggccagctgcctggacgtgggcaacgagagcggctgcggcgagagaaccctggacccctggcagggccaggaccccgccgagggcggccaggaccccagaatcaacgtggtgctggccggcggccacgtggtgcccagagacgagatcagaaagctgatggagagccaggacatcttcaccggcacccagaccgagctgatcgccggcggccagctgctgagctgcctgagcccccagcccgcccccggcgtggacaacgtgcccgagggcagcctgcccgtgcacggcgagcaggccctgcccaaggaccagcagatcaccgccctgggcagagaggagcccgtggccatcgagagccccggccaggacctgctgggcgagagcagaagcgagcccgtggacgtgaagcccttcgccagctgcgaggacagcgaggcccccgtgcccgccgaggacggcggcagcgacgccggcatgtgcggcctgtgccagaaggcccagctggagagaatgggcgtgagcggccccagcggcagcgacctgtgggccggcgccgccgtggccaagccccaggccaagggccagctggccggcggcagcctgctgatgcactgcccctgctacggcagcgagtggggcctgtggtggagaagccaggacctggcccccagccccagcggcatggccggcctgagcttcggcacccccaccctggacgagccctggctgggcgtggagaacgacagagaggagctgcagacctgcctgatcaaggagcagctgagccagctgagcctggccggcgccctggacgtgccccacgccgagctggtgcccaccgagtgccaggccgtgaccgcccccgtgagcagctgcgacctgggcggcagagacctgtgcggcggctgcaccggcagcagcagcgcctgctacgccctggccaccgacctgcccggcggcctggaggccgtggaggcccaggaggtggacgtgaacagcttcagctggaacctgaaggagctgttcttcagcgaccagaccgaccagaccagcagcaactgcagctgcgccaccagcgagctgagagagacccccagcagcctggccgtgggcagcgaccccgacgtgggcagcctgcaggagcagggcagctgcgtgctggacgacagagagctgctgctgctgaccggcacctgcgtggacctgggccagggcagaagattcagagagagctgcgtgggccacgaccccaccgagcccctggaggtgtgcctggtgagcagcgagcactacgccgccagcgacagagagagccccggccacgtgcccagcaccctggacgccggccccgaggacacctgccccagcgccgaggagcccagactgaacgtgcaggtgaccagcacccccgtgatcgtgatgagaggcgccgccggcctgcagagagagatccaggagggcgcctacagcggcagctgctaccacagagacggcctgagactgagcatccagttcgaggtgagaagagtggagctgcagggccccacccccctgttctgctgctggctggtgaaggacctgctgcacagccagagagacagcgccgccagaaccagactgttcctggccagcctgcccggcagcacccacagcaccgccgccgagctgaccggccccagcctggtggaggtgctgagagccagaccctggttcgaggagccccccaaggccgtggagctggagggcctggccgcctgcgagggcgagtacagccagaagtacagcaccatgagccccctgggcagcggcgccttcggcttcgtgtggaccgccgtggacaaggagaagaacaaggaggtggtggtgaagttcatcaagaaggagaaggtgctggaggactgctggatcgaggaccccaagctgggcaaggtgaccctggagatcgccatcctgagcagagtggagcacgccaacatcatcaaggtgctggacatcttcgagaaccagggcttcttccagctggtgatggagaagcacggcagcggcctggacctgttcgccttcatcgacagacaccccagactggacgagcccctggccagctacatcttcagacaggtgagagccggccagagcagagtgagcgtgaacgccggcctgggcgcctgggtgagatggctgcagagaagcgtgatccacaccagattcagcctgtag

SEQ ID NO: 92540 - DNA, 1314 bp, synthetic construct
  misc_feature 1..1314: note = Description of Artificial Sequence: Synthetic coding sequence
  source 1..1314: mol_type = other DNA
atggtgcagatgatgagacagttcctgtacagagtgctgcccgaggacagctacaaggtgaccaccggcaagctgcacgtgagcctgaccagactgaccgacggcgagaacgtggtggtgagcgagttcaccagcaaggaggagctgatcgaggccctgtactgcagctgcttcgtgcccgtgtactgcggcctgatcccccccacctacagaggcgtgagatacatcgacggcggcttcaccggcatgcagccctgcgccttctggaccgacgccatcaccatcagcaccttcagcggccagcaggacatctgccccagagactgccccgccatcttccacgacttcagaatgttcaactgcagcttccagttcagcctggagaacatcgccagaatgacccacgccctgttcccccccgacctggtgatcctgcacgactactactacagaggctacgaggacgccgtgctgtacctgagaagactgaacgccgtgtacctgaacagcagcagcaagagagtgatcttccccagagtggaggtgtactgccagatcgagctggccctgggcaacgagtgccccgagagaagccagcccagcctgagagccagacaggccagcctggagggcgccacccagccccacaaggagtgggtgcccaagggcgacggcagaggcagccacggcccccccgtgagccagcccgtgcagaccctggagttcacctgcgagagccccgtgagcgcccccgtgagccccctggagcagccccccgcccagcccctggccagcagcacccccctgagcctgagcggcatgccccccgtgagcttccccgccgtgcacaagccccccagcagcacccccggcagcagcctgcccacccccccccccggcctgagccccctgagcccccagcagcaggtgcagcccagcggcagccccgccagaagcctgcacagccaggcccccaccagccccagacccagcctgggccccagcaccgtgggcgccccccagaccctgcccagaagcagcctgagcgccttccccgcccagccccccgtggaggagctgggccaggagcagccccaggccgtggccctgctggtgagcagcaagcccaagagcgccgtgcccctggtgcacgtgaaggagaccgtgagcaagccctacgtgaccgagagccccgccgaggacagcaactgggtgaacaaggtgttcaagaagaacaagcagaagaccagcggcaccagaaagggcttccccagacacagcggcagcaagaagcccagcagcaaggtgcagtag

SEQ ID NO: 92541 - DNA, 1599 bp, synthetic construct
  misc_feature 1..1599: note = Description of Artificial Sequence: Synthetic coding sequence
  source 1..1599: mol_type = other DNA
atggaggagcaggtgttcaagggcgaccccgacaccccccacagcatcagcttcagcggcagcggcttcctgagcttctaccaggccggcgccgtggacgccctgagagacctggcccccagaatgctggagaccgcccacagattcgccggcaccagcgccggcgccgtgatcgccgccctggccatctgcggcatcgagatggacgagtacctgagagtgctgaacgtgggcgtggccgaggtgaagaagagcttcctgggccccctgagccccagctgcaagatggtgcagatgatgagacagttcctgtacagagtgctgcccgaggacagctacaaggtgaccaccggcaagctgcacgtgagcctgaccagactgaccgacggcgagaacgtggtggtgagcgagttcaccagcaaggaggagctgatcgaggccctgtactgcagctgcttcgtgcccgtgtactgcggcctgatcccccccacctacagaggcgtgagatacatcgacggcggcttcaccggcatgcagccctgcgccttctggaccgacgccatcaccatcagcaccttcagcggccagcaggacatctgccccagagactgccccgccatcttccacgacttcagaatgttcaactgcagcttccagttcagcctggagaacatcgccagaatgacccacgccctgttcccccccgacctggtgatcctgcacgactactactacagaggctacgaggacgccgtgctgtacctgagaagactgaacgccgtgtacctgaacagcagcagcaagagagtgatcttccccagagtggaggtgtactgccagatcgagctggccctgggcaacgagtgccccgagagaagccagcccagcctgagagccagacaggccagcctggagggcgccacccagccccacaaggagtgggtgcccaagggcgacggcagaggcagccacggcccccccgtgagccagcccgtgcagaccctggagttcacctgcgagagccccgtgagcgcccccgtgagccccctggagcagccccccgcccagcccctggccagcagcacccccctgagcctgagcggcatgccccccgtgagcttccccgccgtgcacaagccccccagcagcacccccggcagcagcctgcccacccccccccccggcctgagccccctgagcccccagcagcaggtgcagcccagcggcagccccgccagaagcctgcacagccaggcccccaccagccccagacccagcctgggccccagcaccgtgggcgccccccagaccctgcccagaagcagcctgagcgccttccccgcccagccccccgtggaggagctgggccaggagcagccccaggccgtggccctgctggtgagcagcaagcccaagagcgccgtgcccctggtgcacgtgaaggagaccgtgagcaagccctacgtgaccgagagccccgccgaggacagcaactgggtgaacaaggtgttcaagaagaacaagcagaagaccagcggcaccagaaagggcttccccagacacagcggcagcaagaagcccagcagcaaggtgcagtag

SEQ ID NO: 92542 - DNA, 1602 bp, synthetic construct
  misc_feature 1..1602: note = Description of Artificial Sequence: Synthetic coding sequence
  source 1..1602: mol_type = other DNA
atggaggagcaggtgttcaagggcgaccccgacaccccccacagcatcagcttcagcggcagcggcttcctgagcttctaccaggccggcgccgtggacgccctgagagacctggcccccagaatgctggagaccgcccacagattcgccggcaccagcgccggcgccgtgatcgccgccctggccatctgcggcatcgagatggacgagtacctgagagtgctgaacgtgggcgtggccgaggtgaagaagagcttcctgggccccctgagccccagctgcaagatggtgcagatgatgagacagttcctgtacagagtgctgcccgaggacagctacaaggtgaccaccggcaagctgcacgtgagcctgaccagactgaccgacggcgagaacgtggtggtgagcgagttcaccagcaaggaggagctgatcgaggccgccctgtactgcagctgcttcgtgcccgtgtactgcggcctgatcccccccacctacagaggcgtgagatacatcgacggcggcttcaccggcatgcagccctgcgccttctggaccgacgccatcaccatcagcaccttcagcggccagcaggacatctgccccagagactgccccgccatcttccacgacttcagaatgttcaactgcagcttccagttcagcctggagaacatcgccagaatgacccacgccctgttcccccccgacctggtgatcctgcacgactactactacagaggctacgaggacgccgtgctgtacctgagaagactgaacgccgtgtacctgaacagcagcagcaagagagtgatcttccccagagtggaggtgtactgccagatcgagctggccctgggcaacgagtgccccgagagaagccagcccagcctgagagccagacaggccagcctggagggcgccacccagccccacaaggagtgggtgcccaagggcgacggcagaggcagccacggcccccccgtgagccagcccgtgcagaccctggagttcacctgcgagagccccgtgagcgcccccgtgagccccctggagcagccccccgcccagcccctggccagcagcacccccctgagcctgagcggcatgccccccgtgagcttccccgccgtgcacaagccccccagcagcacccccggcagcagcctgcccacccccccccccggcctgagccccctgagcccccagcagcaggtgcagcccagcggcagccccgccagaagcctgcacagccaggcccccaccagccccagacccagcctgggccccagcaccgtgggcgccccccagaccctgcccagaagcagcctgagcgccttccccgcccagccccccgtggaggagctgggccaggagcagccccaggccgtggccctgctggtgagcagcaagcccaagagcgccgtgcccctggtgcacgtgaaggagaccgtgagcaagccctacgtgaccgagagccccgccgaggacagcaactgggtgaacaaggtgttcaagaagaacaagcagaagaccagcggcaccagaaagggcttccccagacacagcggcagcaagaagcccagcagcaaggtgcagtag

SEQ ID NO: 92543 - DNA, 1341 bp, synthetic construct
  misc_feature 1..1341: note = Description of Artificial Sequence: Synthetic coding sequence
  source 1..1341: mol_type = other DNA
atggtgcagatgatgagacagttcctgtacagagtgctgcccgaggacagctacaaggtgaccaccggcaagctgcacgtgagcctgaccagactgaccgacggcgagaacgtggtggtgagcgagttcaccagcaaggaggagctgatcgaggccctgtactgcagctgcttcgtgcccgtgtactgcggcctgatcccccccacctacagaggcgtgtgggccttcctgaccctgcccccccagagatacatcgacggcggcttcaccggcatgcagccctgcgccttctggaccgacgccatcaccatcagcaccttcagcggccagcaggacatctgccccagagactgccccgccatcttccacgacttcagaatgttcaactgcagcttccagttcagcctggagaacatcgccagaatgacccacgccctgttcccccccgacctggtgatcctgcacgactactactacagaggctacgaggacgccgtgctgtacctgagaagactgaacgccgtgtacctgaacagcagcagcaagagagtgatcttccccagagtggaggtgtactgccagatcgagctggccctgggcaacgagtgccccgagagaagccagcccagcctgagagccagacaggccagcctggagggcgccacccagccccacaaggagtgggtgcccaagggcgacggcagaggcagccacggcccccccgtgagccagcccgtgcagaccctggagttcacctgcgagagccccgtgagcgcccccgtgagccccctggagcagccccccgcccagcccctggccagcagcacccccctgagcctgagcggcatgccccccgtgagcttccccgccgtgcacaagccccccagcagcacccccggcagcagcctgcccacccccccccccggcctgagccccctgagcccccagcagcaggtgcagcccagcggcagccccgccagaagcctgcacagccaggcccccaccagccccagacccagcctgggccccagcaccgtgggcgccccccagaccctgcccagaagcagcctgagcgccttccccgcccagccccccgtggaggagctgggccaggagcagccccaggccgtggccctgctggtgagcagcaagcccaagagcgccgtgcccctggtgcacgtgaaggagaccgtgagcaagccctacgtgaccgagagccccgccgaggacagcaactgggtgaacaaggtgttcaagaagaacaagcagaagaccagcggcaccagaaagggcttccccagacacagcggcagcaagaagcccagcagcaaggtgcagtag

SEQ ID NO: 92544 - DNA, 1515 bp, synthetic construct
  misc_feature 1..1515: note = Description of Artificial Sequence: Synthetic coding sequence
  source 1..1515: mol_type = other DNA
atgttccccagagagaagacctggaacatcagcttcgccggctgcggcttcctgggcgtgtactacgtgggcgtggccagctgcctgagagagcacgcccccttcctggtggccaacgccacccacatctacggcgccagcgccggcgccctgaccgccaccgccctggtgaccggcgtgtgcctgggcgaggccggcgccaagttcatcgaggtgagcaaggaggccagaaagagattcctgggccccctgcaccccagcttcaacctggtgaagatcatcagaagcttcctgctgaaggtgctgcccgccgacagccacgagcacgccagcggcagactgggcatcagcctgaccagagtgagcgacggcgagaacgtgatcatcagccacttcaacagcaaggacgagctgatccaggccaacgtgtgcagcggcttcatccccgtgtactgcggcctgatcccccccagcctgcagggcgtgagatacgtggacggcggcatcagcgacaacctgcccctgtacgagctgaagaacaccatcaccgtgagccccttcagcggcgagagcgacatctgcccccaggacagcagcaccaacatccacgagctgagagtgaccaacaccagcatccagttcaacctgagaaacctgtacagactgagcaaggccctgttcccccccgagcccctggtgctgagagagatgtgcaagcagggctacagagacggcctgagattcctgcagagaaacggcctgctgaacagacccaaccccctgctggccctgccccccgccagaccccacggccccgaggacaaggaccaggccgtggagagcgcccaggccgaggactacagccagctgcccggcgaggaccacatcctggagcacctgcccgccagactgaacgaggccctgctggaggcctgcgtggagcccaccgacctgctgaccaccctgagcaacatgctgcccgtgagactggccaccgccatgatggtgccctacaccctgcccctggagagcgccctgagcttcaccatcagactgctggagtggctgcccgacgtgcccgaggacatcagatggatgaaggagcagaccggcagcatctgccagtacctggtgatgagagccaagagaaagctgggcagacacctgcccagcagactgcccgagcaggtggagctgagaagagtgcagagcctgcccagcgtgcccctgagctgcgccgcctacagagaggccctgcccggctggatgagaaacaacctgagcctgggcgacgccctggccaagtgggaggagtgccagagacagctgctgctgggcctgttctgcaccaacgtggccttcccccccgaggccctgagaatgagagcccccgccgaccccgcccccgcccccgccgaccccgccagcccccagcaccagctggccggccccgcccccctgctgagcacccccgcccccgaggccagacccgtgatcggcgccctgggcctgtag

SEQ ID NO: 92545 - DNA, 1290 bp, synthetic construct
  misc_feature 1..1290: note = Description of Artificial Sequence: Synthetic coding sequence
  source 1..1290: mol_type = other DNA
atgggcttcctggaggaggagggcagatggaacctgagcttcagcggcgccggctacctgggcgcccaccacgtgggcgccaccgagtgcctgagacagagagcccccagactgctgcagggcgccagaagaatctacggcagcagcagcggcgccctgaacgccgtgagcatcgtgtgcggcaagagcgtggacttctgctgcagccacctgctgggcatggtgggccagctggagagactgagcctgagcatcctgcaccccgcctacgcccccatcgagcacgtgaagcagcagctgcaggacgccctgccccccgacgcccacgtgctggccagccagagactgggcatcagcctgaccagatggcccgacggcagaaacttcctggtgaccgacttcgccacctgcgacgagctgatccaggccctggtgtgcaccctgtacttccccttctactgcggcctgatcccccccgagttcagaggcgagagatacatcgacggcgccctgagcaacaacctgcccttcgccgactgccccagcaccatcaccgtgagccccttccacggcaccgtggacatctgcccccagagcaccagccccaacctgcacgagctgaacgtgttcaacttcagcttccagatcagcaccgagaacttcttcctgggcctgatctgcctgatcccccccagcctggaggtggtggccgacaactgcagacagggctacctggacgccctgagattcctggagagaagaggcctgaccaaggagcccgtgctgtggaccctggtgagcaaggagccccccgcccccgccgacggcaactgggacgccggctgcgaccagagatggaagggcggcctgagcctgaactggaaggtgccccacgtgcaggtgaaggacgtgcccaacttcgagcagctgagccccgagctggaggccgccctgaagaaggcctgcaccagagaccccagcagatgggccagattctggcacagcggccccggccaggtgctgacctacctgctgctgccctgcaccctgcccttcgagtacatctacttcagaagcagaagactggtggtgtggctgcccgacgtgcccgccgacctgtggtggatgcagggcctgctgagaaacatggccctggaggtgttcagcagaaccaaggcccagctgctgggccccatcagcccccccgccaccagagtgctggagaccagccccctgcagccccagatcgccccccacagagaggagctgggccccacccaccaggcctag

SEQ ID NO: 92546 - DNA, 1515 bp, synthetic construct
  misc_feature 1..1515: note = Description of Artificial Sequence: Synthetic coding sequence
  source 1..1515: mol_type = other DNA
atggccgcccagagaagaagcctgctgcagagcgagcagcagcccagctggaccgacgacctgcccctgtgccacctgagcggcgtgggcagcgccagcaacagaagctacagcgccgacggcaagggcaccgagagccacccccccgaggacagctggctgaagttcagaagcgagaacaactgcttcctgtacggcgtgttcaacggctacgacggcaacagagtgaccaacttcgtggcccagagactgagcgccgagctgctgctgggccagctgaacgccgagcacgccgaggccgacgtgagaagagtgctgctgcaggccttcgacgtggtggagagaagcttcctggagagcatcgacgacgccctggccgagaaggccagcctgcagagccagctgcccgagggcgtgccccagcaccagctgcccccccagtaccagaagatcctggagagactgaagaccctggagagagagatcagcggcggcgccatggccgtggtggccgtgctgctgaacaacaagctgtacgtggccaacgtgggcaccaacagagccctgctgtgcaagagcaccgtggacggcctgcaggtgacccagctgaacgtggaccacaccaccgagaacgaggacgagctgttcagactgagccagctgggcctggacgccggcaagatcaagcaggtgggcatcatctgcggccaggagagcaccagaagaatcggcgactacaaggtgaagtacggctacaccgacatcgacctgctgagcgccgccaagagcaagcccatcatcgccgagcccgagatccacggcgcccagcccctggacggcgtgaccggcttcctggtgctgatgagcgagggcctgtacaaggccctggaggccgcccacggccccggccaggccaaccaggagatcgccgccatgatcgacaccgagttcgccaagcagaccagcctggacgccgtggcccaggccgtggtggacagagtgaagagaatccacagcgacaccttcgccagcggcggcgagagagccagattctgccccagacacgaggacatgaccctgctggtgagaaacttcggctaccccctgggcgagatgagccagcccacccccagccccgcccccgccgccggcggcagagtgtaccccgtgagcgtgccctacagcagcgcccagagcaccagcaagaccagcgtgaccctgagcctggtgatgcccagccagggccagatggtgaacggcgcccacagcgccagcaccctggacgaggccacccccaccctgaccaaccagagccccaccctgaccctgcagagcaccaacacccacacccagagcagcagcagcagcagcgacggcggcctgttcagaagcagacccgcccacagcctgccccccggcgaggacggcagagtggagccctacgtggacttcgccgagttctacagactgtggagcgtggaccacggcgagcagagcgtggtgaccgccccctag

SEQ ID NO: 92547 - DNA, 948 bp, synthetic construct
  misc_feature 1..948: note = Description of Artificial Sequence: Synthetic coding sequence
  source 1..948: mol_type = other DNA
atgggcttcctggaggaggagggcagatggaacctgagcttcagcggcgccggctacctgggcgcccaccacgtgggcgccaccgagtgcctgagacagagagcccccagactgctgcagggcgccagaagaatctacggcagcagcagcggcgccctgaacgccgtgagcatcgtgtgcggcaagagcgtggactgccccagcaccatcaccgtgagccccttccacggcaccgtggacatctgcccccagagcaccagccccaacctgcacgagctgaacgtgttcaacttcagcttccagatcagcaccgagaacttcttcctgggcctgatctgcctgatcccccccagcctggaggtggtggccgacaactgcagacagggctacctggacgccctgagattcctggagagaagaggcctgaccaaggagcccgtgctgtggaccctggtgagcaaggagccccccgcccccgccgacggcaactgggacgccggctgcgaccagagatggaagggcggcctgagcctgaactggaaggtgccccacgtgcaggtgaaggacgtgcccaacttcgagcagctgagccccgagctggaggccgccctgaagaaggcctgcaccagagaccccagcagatgggccagattctggcacagcggccccggccaggtgctgacctacctgctgctgccctgcaccctgcccttcgagtacatctacttcagaagcagaagactggtggtgtggctgcccgacgtgcccgccgacctgtggtggatgcagggcctgctgagaaacatggccctggaggtgttcagcagaaccaaggcccagctgctgggccccatcagcccccccgccaccagagtgctggagaccagccccctgcagccccagatcgccccccacagagaggagctgggccccacccaccaggcctag

SEQ ID NO: 92548 - DNA, 807 bp, synthetic construct
  misc_feature 1..807: note = Description of Artificial Sequence: Synthetic coding sequence
  source 1..807: mol_type = other DNA
atgggcttcctggaggaggagggcagatggaacctgagcttcagcggcgccggctacctgggcgcccaccacgtgggcgccaccgagtgcctgagacagagagcccccagactgctgcagggcgccagaagaatctacggcagcagcagcggcgccctgaacgccgtgagcatcgtgtgcggcaagagcgtggacttctgctgcagccacctgctgggcatggtgggccagctggagagactgagcctgagcatcctgcaccccgcctacgcccccatcgagcacgtgaagcagcagctgcaggacgccctgccccccgacgcccacgtgctggccagccagagactgggcatcagcctgaccagatggcccgacggcagaaacttcctggtgaccgacttcgccacctgcgacgagctgatccaggtggtggccgacaactgcagacagggctacctggacgccctgagattcctggagagaagaggcctgaccaaggagcccgtgctgtggaccctggtgagcaaggagccccccgcccccgccgacggcaactgggacgccggctgcgaccagagatggaagggcggcctgagcctgaactggaaggtgccccacgtgcaggtgaaggacgtgcccaacttcgagcagctgagccccgagctggaggccgccctgaagaaggcctgcaccagagaccccagcagatgggccagattctggcacagcggccccggccaggtgctgacctacctgctgctgccctgcaccctgcccttcgagtacatctacttcagaagcagatag

SEQ ID NO: 92549 - DNA, 948 bp, synthetic construct; identical to SEQ ID NO: 92547
  misc_feature 1..948: note = Description of Artificial Sequence: Synthetic coding sequence
  source 1..948: mol_type = other DNA

SEQ ID NO: 92550 - DNA, 708 bp, synthetic construct
  misc_feature 1..708: note = Description of Artificial Sequence: Synthetic coding sequence
  source 1..708: mol_type = other DNA
atggaggaggagacccacaccgacgccaagatcagagccgagaacggcaccggcagcagccccagaggccccggctgcagcctgagacacttcgcctgcgagcagaacctgctgagcagacccgacggcagcgccagcttcctgcagggcgacaccagcgtgctggccggcgtgtacggccccgccgaggtgaaggtgagcaaggagatcttcaacaaggccaccctggaggtgatcctgagacccaagatcggcctgcccggcgtggccgagaagagcagagagagactgatcagaaacacctgcgaggccgtggtgctgggcaccctgcaccccagaaccagcatcaccgtggtgctgcaggtggtgagcgacgccggcagcctgctggcctgctgcctgaacgccgcctgcatggccctggtggacgccggcgtgcccatgagagccctgttctgcggcgtggcctgcgccctggacagcgacggcaccctggtgctggaccccaccagcaagcaggagaaggaggccagagccgtgctgaccttcgccctggacagcgtggagagaaagctgctgatgagcagcaccaagggcctgtacagcgacaccgagctgcagcagtgcctggccgccgcccaggccgccagccagcacgtgttcagattctacagagagagcctgcagagaagatacagcaagagctag

SEQ ID NO: 92551 - DNA, 4128 bp, synthetic construct
  misc_feature 1..4128: note = Description of Artificial Sequence: Synthetic coding sequence
  source 1..4128: mol_type = other DNA
atggaggcccccctgcagaccggcatgatgggcaccagcagccacggcctggccaccaacagcagcggcgccaaggtggccgagagagacggcttccaggacgtgctggcccccggcgagggcagcgccggcagaatctgcggcgcccagcccgtgcccttcgtgccccaggtgctgggcgtgatgatcggcgccggcgtggccgtggtggtgaccgccgtgctgatcctgctggtggtgagaagactgagagtgcccaagacccccgcccccgacggccccagatacagattcagaaagagagacaaggtgctgttctacggcagaaagatcatgagaaaggtgagccagagcaccagcagcctggtggacaccagcgtgagcgccaccagcagacccagaatgagaaagaagctgaagatgctgaacatcgccaagaagatcctgagaatccagaaggagacccccaccctgcagagaaaggagcccccccccgccgtgctggaggccgacctgaccgagggcgacctggccaacagccacctgcccagcgaggtgctgtacatgctgaagaacgtgagagtgctgggccacttcgagaagcccctgttcctggagctgtgcagacacatggtgttccagagactgggccagggcgactacgtgttcagacccggccagcccgacgccagcatctacgtggtgcaggacggcctgctggagctgtgcctgcccggccccgacggcaaggagtgcgtggtgaaggaggtggtgcccggcgacagcgtgaacagcctgctgagcatcctggacgtgatcaccggccaccagcacccccagagaaccgtgagcgccagagccgccagagacagcaccgtgctgagactgcccgtggaggccttcagcgccgtgttcaccaagtaccccgagagcctggtgagagtggtgcagatcatcatggtgagactgcagagagtgaccttcctggccctgcacaactacctgggcctgaccaacgagctgttcagccacgagatccagcccctgagactgttccccagccccggcctgcccaccagaaccagccccgtgagaggcagcaagagaatggtgagcaccagcgccaccgacgagcccagagagacccccggcagaccccccgaccccaccggcgcccccctgcccggccccaccggcgaccccgtgaagcccaccagcctggagacccccagcgcccccctgctgagcagatgcgtgagcatgcccggcgacatcagcggcctgcagggcggccccagaagcgacttcgacatggcctacgagagaggcagaatcagcgtgagcctgcaggaggaggccagcggcggcagcctggccgcccccgccagaacccccacccaggagcccagagagcagcccgccggcgcctgcgagtacagctactgcgaggacgagagcgccaccggcggctgccccttcggcccctaccagggcagacagaccagcagcatcttcgaggccgccaagcaggagctggccaagctgatgagaatcgaggaccccagcctgctgaacagcagagtgctgctgcaccacgccaaggccggcaccatcatcgccagacagggcgaccaggacgtgagcctgcacttcgtgctgtggggctgcctgcacgtgtaccagagaatgatcgacaaggccgaggacgtgtgcctgttcgtggcccagcccggcgagctggtgggccagctggccgtgctgaccggcgagcccctgatcttcaccctgagagcccagagagactgcaccttcctgagaatcagcaagagcgacttctacgagatcatgagagcccagcccagcgtggtgctgagcgccgcccacaccgtggccgccagaatgagccccttcgtgagacagatggacttcgccatcgactggaccgccgtggaggccggcagagccctgtacagacagggcgacagaagcgactgcacctacatcgtgctgaacggcagactgagaagcgtgatccagagaggcagcggcaagaaggagctggtgggcgagtacggcagaggcgacctgatcggcgtggtggaggccctgaccagacagcccagagccaccaccgtgcacgccgtgagagacaccgagctggccaagctgcccgagggcaccctgggccacatcaagagaagatacccccaggtggtgaccagactgatccacctgctgagccagaagatcctgggcaacctgcagcagctgcagggccccttccccgccggcagcggcctgggcgtgcccccccacagcgagctgaccaaccccgccagcaacctggccaccgtggccatcctgcccgtgtgcgccgaggtgcccatggtggccttcaccctggagctgcagcacgccctgcaggccatcggccccaccctgctgctgaacagcgacatcatcagagccagactgggcgccagcgccctggacagcatccaggagttcagactgagcggctggctggcccagcaggaggacgcccacagaatcgtgctgtaccagaccgacgccagcctgaccccctggaccgtgagatgcctgagacaggccgactgcatcctgatcgtgggcctgggcgaccaggagcccaccctgggccagctggagcagatgctggagaacaccgccgtgagagccctgaagcagctggtgctgctgcacagagaggagggcgccggccccaccagaaccgtggagtggctgaacatgagaagctggtgcagcggccacctgcacctgagatgccccagaagactgttcagcagaagaagccccgccaagctgcacgagctgtacgagaaggtgttcagcagaagagccgacagacacagcgacttcagcagactggccagagtgctgaccggcaacaccatcgccctggtgctgggcggcggcggcgccagaggctgcagccacatcggcgtgctgaaggccctggaggaggccggcgtgcccgtggacctggtgggcggcaccagcatcggcagcttcatcggcgccctgtacgccgaggagagaagcgccagcagaaccaagcagagagccagagagtgggccaagagcatgaccagcgtgctggagcccgtgctggacctgacctaccccgtgaccagcatgttcaccggcagcgccttcaacagaagcatccacagagtgttccaggacaagcagatcgaggacctgtggctgccctacttcaacgtgaccaccgacatcaccgccagcgccatgagagtgcacaaggacggcagcctgtggagatacgtgagagccagcatgaccctgagcggctacctgccccccctgtgcgaccccaaggacggccacctgctgatggacggcggctacatcaacaacctgcccgccgacatcgccagaagcatgggcgccaagaccgtgatcgccatcgacgtgggcagccaggacgagaccgacctgagcacctacggcgacagcctgagcggctggtggctgctgtggaagagactgaacccctgggccgacaaggtgaaggtgcccgacatggccgagatccagagcagactggcctacgtgagctgcgtgagacagctggaggtggtgaagagcagcagctactgcgagtacctgagaccccccatcgactgcttcaagaccatggacttcggcaagttcgaccagatctacgacgtgggctaccagtacggcaaggccgtgttcggcggctggagcagaggcaacgtgatcgagaagatgctgaccgacagaagaagcaccgacctgaacgagagcagaagagccgacgtgctggccttccccagcagcggcttcaccgacctggccgagatcgtgagcagaatcgagccccccaccagctacgtgagcgacggctgcgccgacggcgaggagagcgactgcctgaccgagtacgaggaggacgccggccccgactgcagcagagacgagggcggcagccccgagggcgccagccccagcaccgccagcgagatggaggaggagaagagcatcctgagacagagaagatgcctgccccaggagccccccggcagcgccaccgacgcctag

SEQ ID NO: 92552 - DNA, 3984 bp, synthetic construct
  misc_feature 1..3984: note = Description of Artificial Sequence: Synthetic coding sequence
  source 1..3984: mol_type = other DNA
atggaggcccccctgcagaccggcatggtgctgggcgtgatgatcggcgccggcgtggccgtggtggtgaccgccgtgctgatcctgctggtggtgagaagactgagagtgcccaagacccccgcccccgacggccccagatacagattcagaaagagagacaaggtgctgttctacggcagaaagatcatgagaaaggtgagccagagcaccagcagcctggtggacaccagcgtgagcgccaccagcagacccagaatgagaaagaagctgaagatgctgaacatcgccaagaagatcctgagaatccagaaggagacccccaccctgcagagaaaggagcccccccccgccgtgctggaggccgacctgaccgagggcgacctggccaacagccacctgcccagcgaggtgctgtacatgctgaagaacgtgagagtgctgggccacttcgagaagcccctgttcctggagctgtgcagacacatggtgttccagagactgggccagggcgactacgtgttcagacccggccagcccgacgccagcatctacgtggtgcaggacggcctgctggagctgtgcctgcccggccccgacggcaaggagtgcgtggtgaaggaggtggtgcccggcgacagcgtgaacagcctgctgagcatcctggacgtgatcaccggccaccagcacccccagagaaccgtgagcgccagagccgccagagacagcaccgtgctgagactgcccgtggaggccttcagcgccgtgttcaccaagtaccccgagagcctggtgagagtggtgcagatcatcatggtgagactgcagagagtgaccttcctggccctgcacaactacctgggcctgaccaacgagctgttcagccacgagatccagcccctgagactgttccccagccccggcctgcccaccagaaccagccccgtgagaggcagcaagagaatggtgagcaccagcgccaccgacgagcccagagagacccccggcagaccccccgaccccaccggcgcccccctgcccggccccaccggcgaccccgtgaagcccaccagcctggagacccccagcgcccccctgctgagcagatgcgtgagcatgcccggcgacatcagcggcctgcagggcggccccagaagcgacttcgacatggcctacgagagaggcagaatcagcgtgagcctgcaggaggaggccagcggcggcagcctggccgcccccgccagaacccccacccaggagcccagagagcagcccgccggcgcctgcgagtacagctactgcgaggacgagagcgccaccggcggctgccccttcggcccctaccagggcagacagaccagcagcatcttcgaggccgccaagcaggagctggccaagctgatgagaatcgaggaccccagcctgctgaacagcagagtgctgctgcaccacgccaaggccggcaccatcatcgccagacagggcgaccaggacgtgagcctgcacttcgtgctgtggggctgcctgcacgtgtaccagagaatgatcgacaaggccgaggacgtgtgcctgttcgtggcccagcccggcgagctggtgggccagctggccgtgctgaccggcgagcccctgatcttcaccctgagagcccagagagactgcaccttcctgagaatcagcaagagcgacttctacgagatcatgagagcccagcccagcgtggtgctgagcgccgcccacaccgtggccgccagaatgagccccttcgtgagacagatggacttcgccatcgactggaccgccgtggaggccggcagagccctgtacagacagggcgacagaagcgactgcacctacatcgtgctgaacggcagactgagaagcgtgatccagagaggcagcggcaagaaggagctggtgggcgagtacggcagaggcgacctgatcggcgtggtggaggccctgaccagacagcccagagccaccaccgtgcacgccgtgagagacaccgagctggccaagctgcccgagggcaccctgggccacatcaagagaagatacccccaggtggtgaccagactgatccacctgctgagccagaagatcctgggcaacctgcagcagctgcagggccccttccccgccggcagcggcctgggcgtgcccccccacagcgagctgaccaaccccgccagcaacctggccaccgtggccatcctgcccgtgtgcgccgaggtgcccatggtggccttcaccctggagctgcagcacgccctgcaggccatcggccccaccctgctgctgaacagcgacatcatcagagccagactgggcgccagcgccctggacagcatccaggagttcagactgagcggctggctggcccagcaggaggacgcccacagaatcgtgctgtaccagaccgacgccagcctgaccccctggaccgtgagatgcctgagacaggccgactgcatcctgatcgtgggcctgggcgaccaggagcccaccctgggccagctggagcagatgctggagaacaccgccgtgagagccctgaagcagctggtgctgctgcacagagaggagggcgccggccccaccagaaccgtggagtggctgaacatgagaagctggtgcagcggccacctgcacctgagatgccccagaagactgttcagcagaagaagccccgccaagctgcacgagctgtacgagaaggtgttcagcagaagagccgacagacacagcgacttcagcagactggccagagtgctgaccggcaacaccatcgccctggtgctgggcggcggcggcgccagaggctgcagccacatcggcgtgctgaaggccctggaggaggccggcgtgcccgtggacctggtgggcggcaccagcatcggcagcttcatcggcgccctgtacgccgaggagagaagcgccagcagaaccaagcagagagccagagagtgggccaagagcatgaccagcgtgctggagcccgtgctggacctgacctaccccgtgaccagcatgttcaccggcagcgccttcaacagaagcatccacagagtgttccaggacaagcagatcgaggacctgtggctgccctacttcaacgtgaccaccgacatcaccgccagcgccatgagagtgcacaaggacggcagcctgtggagatacgtgagagccagcatgaccctgagcggctacctgccccccctgtgcgaccccaaggacggccacctgctgatggacggcggctacatcaacaacctgcccgccgacatcgccagaagcatgggcgccaagaccgtgatcgccatcgacgtgggcagccaggacgagaccgacctgagcacctacggcgacagcctgagcggctggtggctgctgtggaagagactgaacccctgggccgacaaggtgaaggtgcccgacatggccgagatccagagcagactggcctacgtgagctgcgtgagacagctggaggtggtgaagagcagcagctactgcgagtacctgagaccccccatcgactgcttcaagaccatggacttcggcaagttcgaccagatctacgacgtgggctaccagtacggcaaggccgtgttcggcggctggagcagaggcaacgtgatcgagaagatgctgaccgacagaagaagcaccgacctgaacgagagcagaagagccgacgtgctggccttccccagcagcggcttcaccgacctggccgagatcgtgagcagaatcgagccccccaccagctacgtgagcgacggctgcgccgacggcgaggagagcgactgcctgaccgagtacgaggaggacgccggccccgactgcagcagagacgagggcggcagccccgagggcgccagccccagcaccgccagcgagatggaggaggagaagagcatcctgagacagagaagatgcctgccccaggagccccccggcagcgccaccgacgcctag

SEQ ID NO: 92553 - DNA, 1371 bp, synthetic construct
  misc_feature 1..1371: note = Description of Artificial Sequence: Synthetic coding sequence
  source 1..1371: mol_type = other DNA
atgagaaaggtgagccagagcaccagcagcctggtggacaccagcgtgagcgccaccagcagacccagaatgagaaagaagctgaagatgctgaacatcgccaagaagatcctgagaatccagaaggagacccccaccctgcagagaaaggagcccccccccgccgtgctggaggccgacctgaccgagggcgacctggccaacagccacctgcccagcgaggtgctgtacatgctgaagaacgtgagagtgctgggccacttcgagaagcccctgttcctggagctgtgcagacacatggtgttccagagactgggccagggcgactacgtgttcagacccggccagcccgacgccagcatctacgtggtgcaggacggcctgctggagctgtgcctgcccggccccgacggcaaggagtgcgtggtgaaggaggtggtgcccggcgacagcgtgaacagcctgctgagcatcctggacgtgatcaccggccaccagcacccccagagaaccgtgagcgccagagccgccagagacagcaccgtgctgagactgcccgtggaggccttcagcgccgtgttcaccaagtaccccgagagcctggtgagagtggtgcagatcatcatggtgagactgcagagagtgaccttcctggccctgcacaactacctgggcctgaccaacgagctgttcagccacgagatccagcccctgagactgttccccagccccggcctgcccaccagaaccagccccgtgagaggcagcaagagaatggtgagcaccagcgccaccgacgagcccagagagacccccggcagaccccccgaccccaccggcgcccccctgcccggccccaccggcgaccccgtgaagcccaccagcctggagacccccagcgcccccctgctgagcagatgcgtgagcatgcccggcgacatcagcggcctgcagggcggccccagaagcgacttcgacatggcctacgagagaggcagaatcagcgtgagcctgcaggaggaggccagcggcggcagcctggccgcccccgccagaacccccacccaggagcccagagagcagcccgccggcgcctgcgagtacagctactgcgaggacgagagcgccaccggcggctgccccttcggcccctaccagggcagacagaccagcagcatcttcgaggccgccaagcaggagctggccaagctgatgagaatcgaggaccccagcctgctgaacagcagagtgctgctgcaccacgccaaggccggcaccatcatcgccagacagggcgaccaggacgtgagcggcccccacaccggcctgacctgccccgagagaggctgcagcgtggccctgatgacctag

SEQ ID NO: 92554 - DNA, 3903 bp, synthetic construct
  misc_feature 1..3903: note = Description of Artificial Sequence: Synthetic coding sequence
  source 1..3903: mol_type = other DNA
atggaggcccccctgcagaccggcatggtgctgggcgtgatgatcggcgccggcgtggccgtggtggtgaccgccgtgctgatcctgctggtggtgagaagactgagagtgcccaagacccccgcccccgacggccccagatacagattcagaaagagagacaaggtgctgttctacggcagaaagatcatgagaaaggtgagccagagcaccagcagcctggtggacaccagcgtgagcgccaccagcagacccagaatgagaaagaagctgaagatgctgaacatcgccaagaagatcctgagaatccagaaggagacccccaccctgcagagaaaggagcccccccccgccgtgctggaggccgacctgaccgagggcgacctggccaacagccacctgcccagcgaggtgctgtacatgctgaagaacgtgagagtgctgggccacttcgagaagcccctgttcctggagctgtgcagacacatggtgttccagagactgggccagggcgactacgtgttcagacccggccagcccgacgccagcatctacgtggtgcaggacggcctgctggagctgtgcctgcccggccccgacggcaaggagtgcgtggtgaaggaggtggtgcccggcgacagcgtgaacagcctgctgagcatcctggacgtgatcaccggccaccagcacccccagagaaccgtgagcgccagagccgccagagacagcaccgtgctgagactgcccgtggaggccttcagcgccgtgttcaccaagtaccccgagagcctggtgagagtggtgcagatcatcatggtgagactgcagagagtgaccttcctggccctgcacaactacctgggcctgaccaacgagctgttcagccacgagatccagcccctgagactgttccccagccccggcctgcccaccagaaccagccccgtgagaggcagcaagagaatggtgagcaccagcgccaccgacgagcccagagagacccccggcagaccccccgaccccaccggcgcccccctgcccggccccaccggcgaccccgtgaagcccaccagcctggagacccccagcgcccccctgctgagcagatgcgtgagcatgcccggcgacatcagcggcctgcagggcggccccagaagcgacttcgacatggcctacgagagaggcagaatcagcgtgagcctgcaggaggaggccagcggcggcagcctggccgcccccgccagaacccccacccaggagcccagagagcagcccgccggcgcctgcgagtacagctactgcgaggacgagagcgccaccggcggctgccccttcggcccctaccagggcagacagaccagcagcatcttcgaggccgccaagcaggagctggccaagctgatgagaatcgaggacgtgagcctgcacttcgtgctgtggggctgcctgcacgtgtaccagagaatgatcgacaaggccgaggacgtgtgcctgttcgtggcccagcccggcgagctggtgggccagctggccgtgctgaccggcgagcccctgatcttcaccctgagagcccagagagactgcaccttcctgagaatcagcaagagcgacttctacgagatcatgagagcccagcccagcgtggtgctgagcgccgcccacaccgtggccgccagaatgagccccttcgtgagacagatggacttcgccatcgactggaccgccgtggaggccggcagagccctgtacagacagggcgacagaagcgactgcacctacatcgtgctgaacggcagactgagaagcgtgatccagagaggcagcggcaagaaggagctggtgggcgagtacggcagaggcgacctgatcggcgtggtggaggccctgaccagacagcccagagccaccaccgtgcacgccgtgagagacaccgagctggccaagctgcccgagggcaccctgggccacatcaagagaagatacccccaggtggtgaccagactgatccacctgctgagccagaagatcctgggcaacctgcagcagctgcagggccccttccccggcagcggcctgggcgtgcccccccacagcgagctgaccaaccccgccagcaacctggccaccgtggccatcctgcccgtgtgcgccgaggtgcccatggtggccttcaccctggagctgcagcacgccctgcaggccatcggccccaccctgctgctgaacagcgacatcatcagagccagactgggcgccagcgccctggacagcatccaggagttcagactgagcggctggctggcccagcaggaggacgcccacagaatcgtgctgtaccagaccgacgccagcctgaccccctggaccgtgagatgcctgagacaggccgactgcatcctgatcgtgggcctgggcgaccaggagcccaccctgggccagctggagcagatgctggagaacaccgccgtgagagccctgaagcagctggtgctgctgcacagagaggagggcgccggccccaccagaaccgtggagtggctgaacatgagaagctggtgcagcggccacctgcacctgagatgccccagaagactgttcagcagaagaagccccgccaagctgcacgagctgtacgagaaggtgttcagcagaagagccgacagacacagcgacttcagcagactggccagagtgctgaccggcaacaccatcgccctggtgctgggcggcggcggcgccagaggctgcagccacatcggcgtgctgaaggccctggaggaggccggcgtgcccgtggacctggtgggcggcaccagcatcggcagcttcatcggcgccctgtacgccgaggagagaagcgccagcagaaccaagcagagagccagagagtgggccaagagcatgaccagcgtgctggagcccgtgctggacctgacctaccccgtgaccagcatgttcaccggcagcgccttcaacagaagcatccacagagtgttccaggacaagcagatcgaggacctgtggctgccctacttcaacgtgaccaccgacatcaccgccagcgccatgagagtgcacaaggacggcagcctgtggagatacgtgagagccagcatgaccctgagcggctacctgccccccctgtgcgaccccaaggacggccacctgctgatggacggcggctacatcaacaacctgcccgccgacatcgccagaagcatgggcgccaagaccgtgatcgccatcgacgtgggcagccaggacgagaccgacctgagcacctacggcgacagcctgagcggctggtggctgctgtggaagagactgaacccctgggccgacaaggtgaaggtgcccgacatggccgagatccagagcagactggcctacgtgagctgcgtgagacagctggaggtggtgaagagcagcagctactgcgagtacctgagaccccccatcgactgcttcaagaccatggacttcggcaagttcgaccagatctacgacgtgggctaccagtacggcaaggccgtgttcggcggctggagcagaggcaacgtgatcgagaagatgctgaccgacagaagaagcaccgacctgaacgagagcagaagagccgacgtgctggccttccccagcagcggcttcaccgacctggccgagatcgtgagcagaatcgagccccccaccagctacgtgagcgacggctgcgccgacggcgaggagagcgactgcctgaccgagtacgaggaggacgccggccccgactgcagcagagacgagggcggcagccccgagggcgccagccccagcaccgccagcgagatggaggaggagaagagcatcctgagacagagaagatgcctgccccaggagccccccggcagcgccaccgacgcctag

SEQ ID NO: 92555 - DNA, 3954 bp, synthetic construct
  misc_feature 1..3954: note = Description of Artificial Sequence: Synthetic coding sequence
  source 1..3954: mol_type = other DNA
atggaggaggagaaggacgacagcccccagctgaccggcatcgccgtgggcgccctgctggccctggccctggtgggcgtgctgatcctgttcatgttcagaagactgagacagttcagacaggcccagcccaccccccagtacagattcagaaagagagacaaggtgatgttctacggcagaaagatcatgagaaaggtgaccaccctgcccaacaccctggtggagaacaccgccctgcccagacagagagccagaaagagaaccaaggtgctgagcctggccaagagaatcctgagattcaagaaggagtaccccgccctgcagcccaaggagcccccccccagcctgctggaggccgacctgaccgagttcgacgtgaagaacagccacctgcccagcgaggtgctgtacatgctgaagaacgtgagagtgctgggccacttcgagaagcccctgttcctggagctgtgcaagcacatcgtgttcgtgcagctgcaggagggcgagcacgtgttccagcccagagagcccgaccccagcatctgcgtggtgcaggacggcagactggaggtgtgcatccaggacaccgacggcaccgaggtggtggtgaaggaggtgctggccggcgacagcgtgcacagcctgctgagcatcctggacatcatcaccggccacgccgccccctacaagaccgtgagcgtgagagccgccatccccagcaccatcctgagactgcccgccgccgccttccacggcgtgttcgagaagtaccccgagaccctggtgagagtggtgcagatcatcatggtgagactgcagagagtgaccttcctggccctgcacaactacctgggcctgaccaccgagctgttcaacgccgagagccaggccatccccctggtgagcgtggccagcgtggccgccggcaaggccaagaagcaggtgttctacggcgaggaggagagactgaagaagccccccagactgcaggagagctgcgacagcgaccacggcggcggcagacccgccgccgccggccccctgctgaagagaagccacagcgtgcccgcccccagcatcagaaagcagatcctggaggagctggagaagcccggcgccggcgaccccgaccccagcgccccccagggcggccccggcagcgccaccagcgacctgggcatggcctgcgacagagccagagtgttcctgcacagcgacgagcaccccggcagcagcgtggccagcaagagcagaaagagcgtgatggtggccgagatccccagcaccgtgagccagcacagcgagagccacaccgacgagaccctggccagcagaaagagcgacgccatcttcagagccgccaagaaggacctgctgaccctgatgaagctggaggacagcagcctgctggacggcagagtggccctgctgcacgtgcccgccggcaccgtggtgagcagacagggcgaccaggacgccagcatcctgttcgtggtgagcggcctgctgcacgtgtaccagagaaagatcggcagccaggaggacacctgcctgttcctgaccagacccggcgagatggtgggccagctggccgtgctgaccggcgagcccctgatcttcaccgtgaaggccaacagagactgcagcttcctgagcatcagcaaggcccacttctacgagatcatgagaaagcagcccaccgtggtgctgggcgtggcccacaccgtggtgaagagaatgagcagcttcgtgagacagatcgacttcgccctggactgggtggaggtggaggccggcagagccatctacagacagggcgacaagagcgactgcacctacatcatgctgagcggcagactgagaagcgtgatcagaaaggacgacggcaagaagagactggccggcgagtacggcagaggcgacctggtgggcgtggtggagaccctgacccaccaggccagagccaccaccgtgcacgccgtgagagacagcgagctggccaagctgcccgccggcgccctgaccagcatcaagagaagatacccccaggtggtgaccagactgatccacctgctgggcgagaagatcctgggcagcctgcagcagggccccgtgaccggccaccagctgggcctgcccaccgagggcagcaagtgggacctgggcaaccccgccgtgaacctgagcaccgtggccgtgatgcccgtgagcgaggaggtgcccctgaccgccttcgccctggagctggagcacgccctgagcgccatcggccccaccctgctgctgaccagcgacaacatcaagagaagactgggcagcgccgccctggacagcgtgcacgagtacagactgagcagctggctgggccagcaggaggacacccacagaatcgtgctgtaccaggtggacggcaccctgaccccctggacccagagatgcgtgagacaggccgactgcatcctgatcgtgggcctgggcgaccaggagcccaccgtgggcgagctggagagaatgctggagagcaccgccgtgagagcccagaagcagctgatcctgctgcacagagaggagggccccgcccccgccagaaccgtggagtggctgaacatgagaagctggtgcagcggccacctgcacctgtgctgccccagaagagtgttcagcagaagaagcctgcccaagctggtggagatgtacaagcacgtgttccagagaccccccgacagacacagcgacttcagcagactggccagagtgctgaccggcaacgccatcgccctggtgctgggcggcggcggcgccagaggctgcgcccaggtgggcgtgctgaaggccctggccgagtgcggcatccccgtggacatggtgggcggcaccagcatcggcgccttcgtgggcgccctgtacagcgaggagagaaactacagccagatgagaatcagagccaagcagtgggccgagggcatgaccagcctgatgaaggccgccctggacctgacctaccccatcaccagcatgttcagcggcgccggcttcaacagcagcatcttcagcgtgttcaaggaccagcagatcgaggacctgtggatcccctacttcgccatcaccaccgacatcaccgccagcgccatgagagtgcacaccgacggcagcctgtggtggtacgtgagagccagcatgagcctgagcggctacatgccccccctgtgcgaccccaaggacggccacctgctgatggacggcggctacatcaacaacctgcccgccgacgtggccagaagcatgggcgccaaggtggtgatcgccatcgacgtgggcagcagagacgagaccgacctgaccaactacggcgacgccctgagcggctggtggctgctgtggaagagatggaaccccctggccaccaaggtgaaggtgctgaacatggccgagatccagaccagactggcctacgtgtgctgcgtgagacagctggaggtggtgaagagcagcgactactgcgagtacctgagaccccccatcgacagctacagcaccctggacttcggcaagttcaacgagatctgcgaggtgggctaccagcacggcagaaccgtgttcgacatctggggcagaagcggcgtgctggagaagatgctgagagaccagcagggccccagcaagaagcccgccagcgccgtgctgacctgccccaacgccagcttcaccgacctggccgagatcgtgagcagaatcgagcccgccaagcccgccatggtggacgacgagagcgactaccagaccgagtacgaggaggagctgctggacgtgcccagagacgcctacgccgacttccagagcaccagcgcccagcagggcagcgacctggaggacgagagcagcctgagacacagacaccccagcctggccttccccaagctgagcgagggcagcagcgaccaggacggctag

SEQ ID NO: 92556 - DNA, 2178 bp, synthetic construct
  misc_feature 1..2178: note = Description of Artificial Sequence: Synthetic coding sequence
  source 1..2178: mol_type = other DNA
atggtgagactgcagagagtgaccttcctggccctgcacaactacctgggcctgaccaccgagctgttcaacgccgagagccaggccatccccctggtgagcgtggccagcgtggccgccggcaaggccaagaagcaggtgttctacggcgaggaggagagactgaagaagccccccagactgcaggagagctgcgacagcgccgaccacggcggcggcagacccgccgccgccggccccctgctgaagagaagccacagcgtgcccgcccccagcatcagaaagcagatcctggaggagctggagaagcccggcgccggcgaccccgaccccagcgccccccagggccaccagctgggcctgcccaccgagggcagcaagtgggacctgggcaaccccgccgtgaacctgagcaccgtggccgtgatgcccgtgagcgaggaggtgcccctgaccgccttcgccctggagctggagcacgccctgagcgccatcggccccaccctgctgctgaccagcgacaacatcaagagaagactgggcagcgccgccctggacagcgtgcacgagtacagactgagcagctggctgggccagcaggaggacacccacagaatcgtgctgtaccaggtggacggcaccctgaccccctggacccagagatgcgtgagacaggccgactgcatcctgatcgtgggcctgggcgaccaggagcccaccgtgggcgagctggagagaatgctggagagcaccgccgtgagagcccagaagcagctgatcctgctgcacagagaggagggccccgcccccgccagaaccgtggagtggctgaacatgagaagctggtgcagcggccacctgcacctgtgctgccccagaagagtgttcagcagaagaagcctgcccaagctggtggagatgtacaagcacgtgttccagagaccccccgacagacacagcgacttcagcagactggccagagtgctgaccggcaacgccatcgccctggtgctgggcggcggcggcgccagaggctgcgcccaggtgggcgtgctgaaggccctggccgagtgcggcatccccgtggacatggtgggcggcaccagcatcggcgccttcgtgggcgccctgtacagcgaggagagaaactacagccagatgagaatcagagccaagcagtgggccgagggcatgaccagcctgatgaaggccgccctggacctgacctaccccatcaccagcatgttcagcggcgccggcttcaacagcagcatcttcagcgtgttcaaggaccagcagatcgaggacctgtggatcccctacttcgccatcaccaccgacatcaccgccagcgccatgagagtgcacaccgacggcagcctgtggtggtacgtgagagccagcatgagcctgagcggctacatgccccccctgtgcgaccccaaggacggccacctgctgatggacggcggctacatcaacaacctgcccgccgacgtggccagaagcatgggcgccaaggtggtgatcgccatcgacgtgggcagcagagacgagaccgacctgaccaactacggcgacgccctgagcggctggtggctgctgtggaagagatggaaccccctggccaccaaggtgaaggtgctgaacatggccgagatccagaccagactggcctacgtgtgctgcgtgagacagctggaggtggtgaagagcagcgactactgcgagtacctgagaccccccatcgacagctacagcaccctggacttcggcaagttcaacgagatctgcgaggtgggctaccagcacggcagaaccgtgttcgacatctggggcagaagcggcgtgctggagaagatgctgagagaccagcagggccccagcaagaagcccgccagcgccgtgctgacctgccccaacgccagcttcaccgacctggccgagatcgtgagcagaatcgagcccgccaagcccgccatggtggacgacgagagcgactaccagaccgagtacgaggaggagctgctggacgtgcccagagacgcctacgccgacttccagagcaccagcgcccagcagggcagcgacctggaggacgagagcagcctgagacacagacaccccagcctggccttccccaagctgagcgagggcagcagcgaccaggacggctag

SEQ ID NO: 92557 - DNA, 1377 bp, synthetic construct
  misc_feature 1..1377: note = Description of Artificial Sequence: Synthetic coding sequence
  source 1..1377: mol_type = other DNA
atggaggaggagaaggacgacagcccccaggccgacttctgcctgggcaccgccctgcacagctggggcctgtggttcaccgaggagggcagccccagcaccatgctgaccggcatcgccgtgggcgccctgctggccctggccctggtgggcgtgctgatcctgttcatgttcagaagactgagacagttcagacaggcccagcccaccccccagtacagattcagaaagagagacaaggtgatgttctacggcagaaagatcatgagaaaggtgaccaccctgcccaacaccctggtggagaacaccgccctgcccagacagagagccagaaagagaaccaaggtgctgagcctggccaagagaatcctgagattcaagaaggagtaccccgccctgcagcccaaggagcccccccccagcctgctggaggccgacctgaccgagttcgacgtgaagaacagccacctgcccagcgaggtgctgtacatgctgaagaacgtgagagtgctgggccacttcgagaagcccctgttcctggagctgtgcaagcacatcgtgttcgtgcagctgcaggagggcgagcacgtgttccagcccagagagcccgaccccagcatctgcgtggtgcaggacggcagactggaggtgtgcatccaggacaccgacggcaccgaggtggtggtgaaggaggtgctggccggcgacagcgtgcacagcctgctgagcatcctggacatcatcaccggccacgccgccccctacaagaccgtgagcgtgagagccgccatccccagcaccatcctgagactgcccgccgccgccttccacggcgtgttcgagaagtaccccgagaccctggtgagagtggtgcagatcatcatggtgagactgcagagagtgaccttcctggccctgcacaactacctgggcctgaccaccgagctgttcaacgccgagagccaggccatccccctggtgagcgtggccagcgtggccgccggcaaggccaagaagcaggtgttctacggcgaggaggagagactgaagaagccccccagactgcaggagagctgcgacagcgaccacggcggcggcagacccgccgccgccggccccctgctgaagagaagccacagcgtgcccgcccccagcatcagaaagcagatcctggaggagctggagaagcccggcgccggcgaccccgaccccagcgccccccaggccagagtgctgtgcctgctgccccagtgcctgggcggcctgccccccaccgacaccagcgtgtacagcagcgccagcagcgactgctgcggctgcagcatgcccgtgctgtgcatcatgggccacaagccccacgtgaccgtggacacctag

SEQ ID NO: 92558 - DNA, 3765 bp, synthetic construct
  misc_feature 1..3765: note = Description of Artificial Sequence: Synthetic coding sequence
  source 1..3765: mol_type = other DNA
atggaggaggagaaggacgacagcccccagctgaccggcatcgccgtgggcgccctgctggccctggccctggtgggcgtgctgatcctgttcatgttcagaagactgagacagttcagacaggcccagcccaccccccagtacagattcagaaagagagacaaggtgatgttctacggcagaaagatcatgagaaaggtgaccaccctgcccaacaccctggtggagaacaccgccctgcccagacagagagccagaaagagaaccaaggtgctgagcctggccaagagaatcctgagattcaagaaggagtaccccgccctgcagcccaaggagcccccccccagcctgctggaggccgacctgaccgagttcgacgtgaagaacagccacctgcccagcgaggtgctgtacatgctgaagaacgtgagagtgctgggccacttcgagaagcccctgttcctggagctgtgcaagcacatcgtgttcgtgcagctgcaggagggcgagcacgtgttccagcccagagagcccgaccccagcatctgcgtggtgcaggacggcagactggaggtgtgcatccaggacaccgacggcaccgaggtggtggtgaaggaggtgctggccggcgacagcgtgcacagcctgctgagcatcctggacatcatcaccggccacgccgccccctacaagaccgtgagcgtgagagccgccatccccagcaccatcctgagactgcccgccgccgccttccacggcgtgttcgagaagtaccccgagaccctggtgagagtggtgcagatcatcatggtgagactgcagagagtgaccttcctggccctgcacaactacctgggcctgaccaccgagctgttcaacgccgagagccaggccatccccctggtgagcgtggccagcgtggccgccggcaaggccaagaagcaggtgttctacggcgaggaggagagactgaagaagccccccagactgcaggagagctgcgacagcgaccacggcggcggcagacccgccgccgccggccccctgctgaagagaagccacagcgtgcccgcccccagcatcagaaagcagatcctggaggagctggagaagcccggcgccggcgaccccgaccccagcgccccccagggcggccccggcagcgccaccagcgacctgggcatggcctgcgacagagccagagtgttcctgcacagcgacgagcaccccggcagcagcgtggccagcaagagcagaaagagcgtgatggtggccgagatccccagcaccgtgagccagcacagcgagagccacaccgacgagaccctggccagcagaaagagcgacgccatcttcagagccgccaagaaggacctgctgaccctgatgaagctggaggacagcagcctgctggacggcagagtggccctgctgcacgtgcccgccggcaccgtggtgagcagacagggcgaccaggacgccagcatcctgttcgtggtgagcggcctgctgcacgtgtaccagagaaagatcggcagccaggaggacacctgcctgttcctgaccagacccggcgagatggtgggccagctggccgtgctgaccggcgagcccctgatcttcaccgtgaaggccaacagagactgcagcttcctgagcatcagcaaggcccacttctacgagatcatgagaaagcagcccaccgtggtgctgggcgtggcccacaccgtggtgaagagaatgagcagcttcgtgagacagatcgacttcgccctggactgggtggaggtggaggccggcagagccatctacagacagggcgacaagagcgactgcacctacatcatgctgagcggcagactgagaagcgtgatcagaaaggacgacggcaagaagagactggccggcgagtacggcagaggcgacctggtgggcgtggtggagaccctgacccaccaggccagagccaccaccgtgcacgccgtgagagacagcgagctggccaagctgcccgccggcgccctgaccagcatcaagagaagatacccccaggtggtgaccagactgatccacctgctgggcgagaagatcctgggcagcctgcagcagggccccgtgaccggccaccagctgggcctgcccaccgagggcagcaagtgggacctgggcaaccccgccgtgaacctgagcaccgtggccgtgatgcccgtgagcgaggaggtgcccctgaccgccttcgccctggagctggagcacgccctgagcgccatcggccccaccctgctgctgaccagcgacaacatcaagagaagactgggcagcgccgccctggacagcgtgcacgagtacagactgagcagctggctgggccagcaggaggacacccacagaatcgtgctgtaccaggtggacggcaccctgaccccctggacccagagatgcgtgagacaggccgactgcatcctgatcgtgggcctgggcgaccaggagcccaccgtgggcgagctggagagaatgctggagagcaccgccgtgagagcccagaagcagctgatcctgctgcacagagaggagggccccgcccccgccagaaccgtggagtggctgaacatgagaagctggtgcagcggccacctgcacctgtgctgccccagaagagtgttcagcagaagaagcctgcccaagctggtggagatgtacaagcacgtgttccagagaccccccgacagacacagcgacttcagcagactggccagagtgctgaccggcaacgccatcgccctggtgctgggcggcggcggcgccagaggctgcgcccaggtgggcgtgctgaaggccctggccgagtgcggcatccccgtggacatggtgggcggcaccagcatcggcgccttcgtgggcgccctgtacagcgaggagagaaactacagccagatgagaatcagagccaagcagtgggccgagggcatgaccagcctgatgaaggccgccctggacctgacctaccccatcaccagcatgttcagcggcgccggcttcaacagcagcatcttcagcgtgttcaaggaccagcagatcgaggacctgtggatcccctacttcgccatcaccaccgacatcaccgccagcgccatgagagtgcacaccgacggcagcctgtggtggtacgtgagagccagcatgagcctgagcggctacatgccccccctgtgcgaccccaaggacggccacctgctgatggacggcggctacatcaacaacctgcccgccgacgtggccagaagcatgggcgccaaggtggtgatcgccatcgacgtgggcagcagagacgagaccgacctgaccaactacggcgacgccctgagcggctggtggctgctgtggaagagatggaaccccctggccaccaaggtgaaggtgctgaacatggccgagatccagaccagactggcctacgtgtgctgcgtgagacagctggaggtggtgaagagcagcgactactgcgagtacctgagaccccccatcgacagctacagcaccctggacttcggcaagttcaacgagatctgcgtgcccgacgagagcgactaccagaccgagtacgaggaggagctgctggacgtgcccagagacgcctacgccgacttccagagcaccagcgcccagcagggcagcgacctggaggacgagagcagcctgagacacagacaccccagcctggccttccccaagctgagcgagggcagcagcgaccaggacggctag

SEQ ID NO: 92559 - DNA, 2772 bp, synthetic construct
  misc_feature 1..2772: note = Description of Artificial Sequence: Synthetic coding sequence
  source 1..2772: mol_type = other DNA
atggcctgcgacagagccagagtgttcctgcacagcgacgagcaccccggcagcagcgtggccagcaagagcagaaagagcgtgatggtggccgagatccccagcaccgtgagccagcacagcgagagccacaccgacgagaccctggccagcagaaagagcgacgccatcttcagagccgccaagaaggacctgctgaccctgatgaagctggaggacagcagcctgctggacggcagagtggccctgctgcacgtgcccgccggcaccgtggtgagcagacagggcgaccaggacgccagcatcctgttcgtggtgagcggcctgctgcacgtgtaccagagaaagatcggcagccaggaggacacctgcctgttcctgaccagacccggcgagatggtgggccagctggccgtgctgaccggcgagcccctgatcttcaccgtgaaggccaacagagactgcagcttcctgagcatcagcaaggcccacttctacgagatcatgagaaagcagcccaccgtggtgctgggcgtggcccacaccgtggtgaagagaatgagcagcttcgtgagacagatcgacttcgccctggactgggtggaggtggaggccggcagagccatctacagacagggcgacaagagcgactgcacctacatcatgctgagcggcagactgagaagcgtgatcagaaaggacgacggcaagaagagactggccggcgagtacggcagaggcgacctggtgggcgtggtggagaccctgacccaccaggccagagccaccaccgtgcacgccgtgagagacagcgagctggccaagctgcccgccggcgccctgaccagcatcaagagaagatacccccaggtggtgaccagactgatccacctgctgggcgagaagatcctgggcagcctgcagcagggccccgtgaccggccaccagctgggcctgcccaccgagggcagcaagtgggacctgggcaaccccgccgtgaacctgagcaccgtggccgtgatgcccgtgagcgaggaggtgcccctgaccgccttcgccctggagctggagcacgccctgagcgccatcggccccaccctgctgctgaccagcgacaacatcaagagaagactgggcagcgccgccctggacagcgtgcacgagtacagactgagcagctggctgggccagcaggaggacacccacagaatcgtgctgtaccaggtggacggcaccctgaccccctggacccagagatgcgtgagacaggccgactgcatcctgatcgtgggcctgggcgaccaggagcccaccgtgggcgagctggagagaatgctggagagcaccgccgtgagagcccagaagcagctgatcctgctgcacagagaggagggccccgcccccgccagaaccgtggagtggctgaacatgagaagctggtgcagcggccacctgcacctgtgctgccccagaagagtgttcagcagaagaagcctgcccaagctggtggagatgtacaagcacgtgttccagagaccccccgacagacacagcgacttcagcagactggccagagtgctgaccggcaacgccatcgccctggtgctgggcggcggcggcgccagaggctgcgcccaggtgggcgtgctgaaggccctggccgagtgcggcatccccgtggacatggtgggcggcaccagcatcggcgccttcgtgggcgccctgtacagcgaggagagaaactacagccagatgagaatcagagccaagcagtgggccgagggcatgaccagcctgatgaaggccgccctggacctgacctaccccatcaccagcatgttcagcggcgccggcttcaacagcagcatcttcagcgtgttcaaggaccagcagatcgaggacctgtggatcccctacttcgccatcaccaccgacatcaccgccagcgccatgagagtgcacaccgacggcagcctgtggtggtacgtgagagccagcatgagcctgagcggctacatgccccccctgtgcgaccccaaggacggccacctgctgatggacggcggctacatcaacaacctgcccgccgacgtggccagaagcatgggcgccaaggtggtgatcgccatcgacgtgggcagcagagacgagaccgacctgaccaactacggcgacgccctgagcggctggtggctgctgtggaagagatggaaccccctggccaccaaggtgaaggtgctgaacatggccgagatccagaccagactggcctacgtgtgctgcgtgagacagctggaggtggtgaagagcagcgactactgcgagtacctgagaccccccatcgacagctacagcaccctggacttcggcaagttcaacgagatctgcgaggtgggctaccagcacggcagaaccgtgttcgacatctggggcagaagcggcgtgctggagaagatgctgagagaccagcagggccccagcaagaagcccgccagcgccgtgctgacctgccccaacgccagcttcaccgacctggccgagatcgtgagcagaatcgagcccgccaagcccgccatggtggacgacgagagcgactaccagaccgagtacgaggaggagctgctggacgtgcccagagacgcctacgccgacttccagagcaccagcgcccagcagggcagcgacctggaggacgagagcagcctgagacacagacaccccagcctggccttccccaagctgagcgagggcagcagcgaccaggacggctag

SEQ ID NO: 92560 - DNA, 4029 bp, synthetic construct
  misc_feature 1..4029: note = Description of Artificial Sequence: Synthetic coding sequence
  source 1..4029: mol_type = other DNA
atggaggaggagaaggacgacagcccccaggccgacttctgcctgggcaccgccctgcacagctggggcctgtggttcaccgaggagggcagccccagcaccatgctgaccggcatcgccgtgggcgccctgctggccctggccctggtgggcgtgctgatcctgttcatgttcagaagactgagacagttcagacaggcccagcccaccccccagtacagattcagaaagagagacaaggtgatgttctacggcagaaagatcatgagaaaggtgaccaccctgcccaacaccctggtggagaacaccgccctgcccagacagagagccagaaagagaaccaaggtgctgagcctggccaagagaatcctgagattcaagaaggagtaccccgccctgcagcccaaggagcccccccccagcctgctggaggccgacctgaccgagttcgacgtgaagaacagccacctgcccagcgaggtgctgtacatgctgaagaacgtgagagtgctgggccacttcgagaagcccctgttcctggagctgtgcaagcacatcgtgttcgtgcagctgcaggagggcgagcacgtgttccagcccagagagcccgaccccagcatctgcgtggtgcaggacggcagactggaggtgtgcatccaggacaccgacggcaccgaggtggtggtgaaggaggtgctggccggcgacagcgtgcacagcctgctgagcatcctggacatcatcaccggccacgccgccccctacaagaccgtgagcgtgagagccgccatccccagcaccatcctgagactgcccgccgccgccttccacggcgtgttcgagaagtaccccgagaccctggtgagagtggtgcagatcatcatggtgagactgcagagagtgaccttcctggccctgcacaactacctgggcctgaccaccgagctgttcaacgccgagagccaggccatccccctggtgagcgtggccagcgtggccgccggcaaggccaagaagcaggtgttctacggcgaggaggagagactgaagaagccccccagactgcaggagagctgcgacagcgaccacggcggcggcagacccgccgccgccggccccctgctgaagagaagccacagcgtgcccgcccccagcatcagaaagcagatcctggaggagctggagaagcccggcgccggcgaccccgaccccagcgccccccagggcggccccggcagcgccaccagcgacctgggcatggcctgcgacagagccagagtgttcctgcacagcgacgagcaccccggcagcagcgtggccagcaagagcagaaagagcgtgatggtggccgagatccccagcaccgtgagccagcacagcgagagccacaccgacgagaccctggccagcagaaagagcgacgccatcttcagagccgccaagaaggacctgctgaccctgatgaagctggaggacagcagcctgctggacggcagagtggccctgctgcacgtgcccgccggcaccgtggtgagcagacagggcgaccaggacgccagcatcctgttcgtggtgagcggcctgctgcacgtgtaccagagaaagatcggcagccaggaggacacctgcctgttcctgaccagacccggcgagatggtgggccagctggccgtgctgaccggcgagcccctgatcttcaccgtgaaggccaacagagactgcagcttcctgagcatcagcaaggcccacttctacgagatcatgagaaagcagcccaccgtggtgctgggcgtggcccacaccgtggtgaagagaatgagcagcttcgtgagacagatcgacttcgccctggactgggtggaggtggaggccggcagagccatctacagacagggcgacaagagcgactgcacctacatcatgctgagcggcagactgagaagcgtgatcagaaaggacgacggcaagaagagactggccggcgagtacggcagaggcgacctggtgggcgtggtggagaccctgacccaccaggccagagccaccaccgtgcacgccgtgagagacagcgagctggccaagctgcccgccggcgccctgaccagcatcaagagaagatacccccaggtggtgaccagactgatccacctgctgggcgagaagatcctgggcagcctgcagcagggccccgtgaccggccaccagctgggcctgcccaccgagggcagcaagtgggacctgggcaaccccgccgtgaacctgagcaccgtggccgtgatgcccgtgagcgaggaggtgcccctgaccgccttcgccctggagctggagcacgccctgagcgccatcggccccaccctgctgctgaccagcgacaacatcaagagaagactgggcagcgccgccctggacagcgtgcacgagtacagactgagcagctggctgggccagcaggaggacacccacagaatcgtgctgtaccaggtggacggcaccctgaccccctggacccagagatgcgtgagacaggccgactgcatcctgatcgtgggcctgggcgaccaggagcccaccgtgggcgagctggagagaatgctggagagcaccgccgtgagagcccagaagcagctgatcctgctgcacagagaggagggccccgcccccgccagaaccgtggagtggctgaacatgagaagctggtgcagcggccacctgcacctgtgctgccccagaagagtgttcagcagaagaagcctgcccaagctggtggagatgtacaagcacgtgttccagagaccccccgacagacacagcgacttcagcagactggccagagtgctgaccggcaacgccatcgccctggtgctgggcggcggcggcgccagaggctgcgcccaggtgggcgtgctgaaggccctggccgagtgcggcatccccgtggacatggtgggcggcaccagcatcggcgccttcgtgggcgccctgtacagcgaggagagaaactacagccagatgagaatcagagccaagcagtgggccgagggcatgaccagcctgatgaaggccgccctggacctgacctaccccatcaccagcatgttcagcggcgccggcttcaacagcagcatcttcagcgtgttcaaggaccagcagatcgaggacctgtggatcccctacttcgccatcaccaccgacatcaccgccagcgccatgagagtgcacaccgacggcagcctgtggtggtacgtgagagccagcatgagcctgagcggctacatgccccccctgtgcgaccccaaggacggccacctgctgatggacggcggctacatcaacaacctgcccgccgacgtggccagaagcatgggcgccaaggtggtgatcgccatcgacgtgggcagcagagacgagaccgacctgaccaactacggcgacgccctgagcggctggtggctgctgtggaagagatggaaccccctggccaccaaggtgaaggtgctgaacatggccgagatccagaccagactggcctacgtgtgctgcgtgagacagctggaggtggtgaagagcagcgactactgcgagtacctgagaccccccatcgacagctacagcaccctggacttcggcaagttcaacgagatctgcgaggtgggctaccagcacggcagaaccgtgttcgacatctggggcagaagcggcgtgctggagaagatgctgagagaccagcagggccccagcaagaagcccgccagcgccgtgctgacctgccccaacgccagcttcaccgacctggccgagatcgtgagcagaatcgagcccgccaagcccgccatggtggacgacgagagcgactaccagaccgagtacgaggaggagctgctggacgtgcccagagacgcctacgccgacttccagagcaccagcgcccagcagggcagcgacctggaggacgagagcagcctgagacacagacaccccagcctggccttccccaagctgagcgagggcagcagcgaccaggacggctag

SEQ ID NO: 92561 - DNA, 3846 bp, synthetic construct
  misc_feature 1..3846: note = Description of Artificial Sequence: Synthetic coding sequence
  source 1..3846: mol_type = other DNA
atgctgaccggcatcgccgtgggcgccctgctggccctggccctggtgggcgtgctgatcctgttcatgttcagaagactgagacagttcagacaggcccagcccaccccccagtacagattcagaaagagagacaaggtgatgttctacggcagaaagatcatgagaaaggtgaccaccctgcccaacaccctggtggagaacaccgccctgcccagacagagagccagaaagagaaccaaggtgctgagcctggccaagagaatcctgagattcaagaaggagtaccccgccctgcagcccaaggagcccccccccagcctgctggaggccgacctgaccgagttcgacgtgaagaacagccacctgcccagcgaggtgctgtacatgctgaagaacgtgagagtgctgggccacttcgagaagcccctgttcctggagctgtgcaagcacatcgtgttcgtgcagctgcaggagggcgagcacgtgttccagcccagagagcccgaccccagcatctgcgtggtgcaggacggcagactggaggtgtgcatccaggacaccgacggcaccgaggtggtggtgaaggaggtgctggccggcgacagcgtgcacagcctgctgagcatcctggacatcatcaccggccacgccgccccctacaagaccgtgagcgtgagagccgccatccccagcaccatcctgagactgcccgccgccgccttccacggcgtgttcgagaagtaccccgagaccctggtgagagtggtgcagatcatcatggtgagactgcagagagtgaccttcctggccctgcacaactacctgggcctgaccaccgagctgttcaacgccgagagccaggccatccccctggtgagcgtggccagcgtggccgccggcaaggccaagaagcaggtgttctacggcgaggaggagagactgaagaagccccccagactgcaggagagctgcgacagcgaccacggcggcggcagacccgccgccgccggccccctgctgaagagaagccacagcgtgcccgcccccagcatcagaaagcagatcctggaggagctggagaagcccggcgccggcgaccccgaccccagcgccccccagggcggccccggcagcgccaccagcgacctgggcatggcctgcgacagagccagagtgttcctgcacagcgacgagcaccccggcagcagcgtggccagcaagagcagaaagagcgtgatggtggccgagatccccagcaccgtgagccagcacagcgagagccacaccgacgagaccctggccagcagaaagagcgacgccatcttcagagccgccaagaaggacctgctgaccctgatgaagctggaggacagcagcctgctggacggcagagtggccctgctgcacgtgcccgccggcaccgtggtgagcagacagggcgaccaggacgccagcatcctgttcgtggtgagcggcctgctgcacgtgtaccagagaaagatcggcagccaggaggacacctgcctgttcctgaccagacccggcgagatggtgggccagctggccgtgctgaccggcgagcccctgatcttcaccgtgaaggccaacagagactgcagcttcctgagcatcagcaaggcccacttctacgagatcatgagaaagcagcccaccgtggtgctgggcgtggcccacaccgtggtgaagagaatgagcagcttcgtgagacagatcgacttcgccctggactgggtggaggtggaggccggcagagccatctacagacagggcgacaagagcgactgcacctacatcatgctgagcggcagactgagaagcgtgatcagaaaggacgacggcaagaagagactggccggcgagtacggcagaggcgacctggtgggcgtggtggagaccctgacccaccaggccagagccaccaccgtgcacgccgtgagagacagcgagctggccaagctgcccgccggcgccctgaccagcatcaagagaagatacccccaggtggtgaccagactgatccacctgctgggcgagaagatcctgggcagcctgcagcagggccccgtgaccggccaccagctgggcctgcccaccgagggcagcaagtgggacctgggcaaccccgccgtgaacctgagcaccgtggccgtgatgcccgtgagcgaggaggtgcccctgaccgccttcgccctggagctggagcacgccctgagcgccatcggccccaccctgctgctgaccagcgacaacatcaagagaagactgggcagcgccgccctggacagcgtgcacgagtacagactgagcagctggctgggccagcaggaggacacccacagaatcgtgctgtaccaggtggacggcaccctgaccccctggacccagagatgcgtgagacaggccgactgcatcctgatcgtgggcctgggcgaccaggagcccaccgtgggcgagctggagagaatgctggagagcaccgccgtgagagcccagaagcagctgatcctgctgcacagagaggagggccccgcccccgccagaaccgtggagtggctgaacatgagaagctggtgcagcggccacctgcacctgtgctgccccagaagagtgttcagcagaagaagcctgcccaagctggtggagatgtacaagcacgtgttccagagaccccccgacagacacagcgacttcagcagactggccagagtgctgaccggcaacgccatcgccctggtgctgggcggcggcggcgccagaggctgcgcccaggtgggcgtgctgaaggccctggccgagtgcggcatccccgtggacatggtgggcggcaccagcatcggcgccttcgtgggcgccctgtacagcgaggagagaaactacagccagatgagaatcagagccaagcagtgggccgagggcatgaccagcctgatgaaggccgccctggacctgacctaccccatcaccagcatgttcagcggcgccggcttcaacagcagcatcttcagcgtgttcaaggaccagcagatcgaggacctgtggatcccctacttcgccatcaccaccgacatcaccgccagcgccatgagagtgcacaccgacggcagcctgtggtggtacgtgagagccagcatgagcctgagcggctacatgccccccctgtgcgaccccaaggacggccacctgctgatggacggcggctacatcaacaacctgcccgccgacgtggccagaagcatgggcgccaaggtggtgatcgccatcgacgtgggcagcagagacgagaccgacctgaccaactacggcgacgccctgagcggctggtggctgctgtggaagagatggaaccccctggccaccaaggtgaaggtgctgaacatggccgagatccagaccagactggcctacgtgtgctgcgtgagacagctggaggtggtgaagagcagcgactactgcgagtacctgagaccccccatcgacagctacagcaccctggacttcggcaagttcaacgagatctgcgaggtgggctaccagcacggcagaaccgtgttcgacatctggggcagaagcggcgtgctggagaagatgctgagagaccagcagggccccagcaagaagcccgccagcgccgtgctgacctgccccaacgccagcttcaccgacctggccgagatcgtgagcagaatcgagcccgccaagcccgccatggtggacgacgagagcgactaccagaccgagtacgaggaggagctgctggacgtgcccagagacgcctacgccgacttccagagcaccagcgcccagcagggcagcgacctgtag

SEQ ID NO: 92562 - DNA, 2349 bp, synthetic construct
  misc_feature 1..2349: note = Description of Artificial Sequence: Synthetic coding sequence
  source 1..2349: mol_type = other DNA
atgagcatcaacctgaccgtggacatctacatctacctgctgagcaacgccagaagcgtgtgcggcaagcagagaagcaagcagctgtacttcctgttcagccccaagcactactggagaatcagccacatcagcctgcagagaggcttccacaccaacatcatcagatgcaagtggaccaagagcgaggcccacagctgcagcaagcactgctacagccccagcaaccacggcctgcacatcggcatcctgaagctgagcaccagcgcccccaagggcctgaccaaggtgaacatctgcatgagcagaatcaagagcaccctgaacagcgtgagcaaggccgtgttcggcaaccagaacgagatgatcagcagactggcccagttcaagcccagcagccagatcctgagaaaggtgagcgacagcggctggctgaagcagaagaacatcaagcaggccatcaagagcctgaagaagtacagcgacaagagcgccgagaagagccccttccccgaggagaagagccacatcatcgacaaggaggaggacatcggcaagagaagcctgttccactacaccagcagcatcaccaccaagttcggcgacagcttctacttcctgagcaaccacatcaacagctacttcaagagaaaggagaagatgagccagcagaaggagaacgagcacttcagagacaagagcgagctggaggacaagaaggtggaggagggcaagctgagaagccccgaccccggcatcctggcctacaagcccggcagcgagagcgtgcacaccgtggacaagcccaccagccccagcgccatccccgacgtgctgcaggtgagcaccaagcagagcatcgccaacttcctgagcagacccaccgagggcgtgcaggccctggtgggcggctacatcggcggcctggtgcccaagctgaagtacgacagcaagagccagagcgaggagcaggaggagcccgccaagaccgaccaggccgtgagcaaggacagaaacgccgaggagaagaagagactgagcctgcagagagagaagatcatcgccagagtgagcatcgacaacagaaccagagccctggtgcaggccctgagaagaaccaccgaccccaagctgtgcatcaccagagtggaggagctgaccttccacctgctggagttccccgagggcaagggcgtggccgtgaaggagagaatcatcccctacctgctgagactgagacagatcaaggacgagaccctgcaggccgccgtgagagagatcctggccctgatcggctacgtggaccccgtgaagggcagaggcatcagaatcctgagcatcgacggcggcggcaccagaggcgtggtggccctgcagaccctgagaaagctggtggagctgacccagaagcccgtgcaccagctgttcgactacatctgcggcgtgagcaccggcgccatcctggccttcatgctgggcctgttccacatgcccctggacgagtgcgaggagctgtacagaaagctgggcagcgacgtgttcagccagaacgtgatcgtgggcaccgtgaagatgagctggagccacgccttctacgacagccagacctgggagaacatcctgaaggacagaatgggcagcgccctgatgatcgagaccgccagaaaccccacctgccccaaggtggccgccgtgagcaccatcgtgaacagaggcatcacccccaaggccttcgtgttcagaaactacggccacttccccggcatcaacagccactacctgggcggctgccagtacaagatgtggcaggccatcagagccagcagcgccgcccccggctacttcgccgagtacgccctgggcaacgacctgcaccaggacggcggcctgctgctgaacaaccccagcgccctggccatgcacgagtgcaagtgcctgtggcccgacgtgcccctggagtgcatcgtgagcctgggcaccggcagatacgagagcgacgtgagaaacaccgtgacctacaccagcctgaagaccaagctgagcaacgtgatcaacagcgccaccgacaccgaggaggtgcacatcatgctggacggcctgctgccccccgacacctacttcagattcaaccccgtgatgtgcgagaacatccccctggacgagagcagaaacgagaagctggaccagctgcagctggagggcctgaagtacatcgagagaaacgagcagaagatgaagaaggtggccaagatcctgagccaggagaagaccaccctgcagaagatcaacgactggatcaagctgaagaccgacatgtacgagggcctgcccttcttcagcaagctgtag

SEQ ID NO: 92563 - DNA, 2163 bp, synthetic construct
  misc_feature 1..2163: note = Description of Artificial Sequence: Synthetic coding sequence
  source 1..2163: mol_type = other DNA
atgagcatcaacctgaccgtggacatctacatctacctgctgagcaacgccagaagcgtgtgcggcaagcagagaagcaagcagctgtacttcctgttcagccccaagcactactggagaatcagccacatcagcctgcagagaggcttccacaccaacatcatcagatgcaagtggaccaagagcgaggcccacagctgcagcaagcactgctacagccccagcaaccacggcctgcacatcggcatcctgaagctgagcaccagcgcccccaagggcctgaccaaggtgaacatctgcatgagcagaatcaagagcaccctgaacagcgtgagcaaggccgtgttcggcaaccagaacgagatgatcagcagactggcccagttcaagcccagcagccagatcctgagaaaggtgagcgacagcggctggctgaagcagaagaacatcaagcaggccatcaagagcctgaagaagtacagcgacaagagcgccgagaagagccccttccccgaggagaagagccacatcatcgacaaggaggaggacatcggcaagagaagcctgttccactacaccagcagcatcaccaccaagttcggcgacagcttctacttcctgagcaaccacatcaacagctacttcaagagaaaggagaagatgagccagcagaaggagaacgagcacttcagagacaagagcgagctggaggacaagaaggtggaggagggcaagctgagaagccccgaccccggcatcctggcctacaagcccggcagcgagagcgtgcacaccgtggacaagcccaccagccccagcgccatccccgacgtgctgcaggtgagcaccaagcagagcatcgccaacttcctgagcagacccaccgagggcgtgcaggccctggtgggcggctacatcggcggcctggtgcccaagctgaagtacgacagcaagagccagagcgaggagcaggaggagcccgccaagaccgaccaggccgtgagcaaggacagaaacgccgaggagaagaagagactgagcctgcagagagagaagatcatcgccagagtgagcatcgacaacagaaccagagccctggtgcaggccctgagaagaaccaccgaccccaagctgtgcatcaccagagtggaggagctgaccttccacctgctggagttccccgagggcaagggcgtggccgtgaaggagagaatcatcccctacctgctgagactgagacagatcaaggacgagaccctgcaggccgccgtgagagagatcctggccctgatcggctacgtggaccccgtgaagggcagaggcatcagaatcctgagcatcgacggcggcggcaccagaggcgtggtggccctgcagaccctgagaaagctggtggagctgacccagaagcccgtgcaccagctgttcgactacatctgcggcgtgagcaccggcgccatcctggccttcatgctgggcctgttccacatgcccctggacgagtgcgaggagctgtacagaaagctgggcagcgacgtgttcagccagaacgtgatcgtgggcaccgtgaagatgagctggagccacgccttctacgacagccagacctgggagaacatcctgaaggacagaatgggcagcgccctgatgatcgagaccgccagaaaccccacctgccccaaggtgagaaaggacggcggcctgctgctgaacaaccccagcgccctggccatgcacgagtgcaagtgcctgtggcccgacgtgcccctggagtgcatcgtgagcctgggcaccggcagatacgagagcgacgtgagaaacaccgtgacctacaccagcctgaagaccaagctgagcaacgtgatcaacagcgccaccgacaccgaggaggtgcacatcatgctggacggcctgctgccccccgacacctacttcagattcaaccccgtgatgtgcgagaacatccccctggacgagagcagaaacgagaagctggaccagctgcagctggagggcctgaagtacatcgagagaaacgagcagaagatgaagaaggtggccaagatcctgagccaggagaagaccaccctgcagaagatcaacgactggatcaagctgaagaccgacatgtacgagggcctgcccttcttcagcaagctgtag

SEQ ID NO: 92564 - DNA, 168 bp, synthetic construct
  misc_feature 1..168: note = Description of Artificial Sequence: Synthetic coding sequence
  source 1..168: mol_type = other DNA
atgagcatcaacctgaccgtggacatctacatctacctgctgagcaacgccagaagcgtgtgcggcaagcagagaagcaagcagctgtacttcctgttcagccccaagcactactggagaatcagccacatcagcctgcagagaggcttccacaccaacatcatctag

SEQ ID NO: 92565 - DNA, 2349 bp, synthetic construct; identical to SEQ ID NO: 92562
  misc_feature 1..2349: note = Description of Artificial Sequence: Synthetic coding sequence
  source 1..2349: mol_type = other DNA

SEQ ID NO: 92566 - DNA, 582 bp, synthetic construct
  misc_feature 1..582: note = Description of Artificial Sequence: Synthetic coding sequence
  source 1..582: mol_type = other DNA
atgagcatcaacctgaccgtggacatctacatctacctgctgagcaacgccagaagcgtgtgcggcaagcagagaagcaagcagctgtacttcctgttcagccccaagcactactggagaatcagccacatcagcctgcagagaggcttccacaccaacatcatcagatgcaagtggaccaagagcgaggcccacagctgcagcaagcactgctacagccccagcaaccacggcctgcacatcggcatcctgaagctgagcaccagcgcccccaagggcctgaccaaggtgaacatctgcatgagcagaatcaagagcaccctgaacagcgtgagcaaggccgtgttcggcaaccagaacgagatgatcagcagactggcccagttcaagcccagcagccagatcctgagaaaggtgagcgacagcggctggctgaagcagaagaacatcaagcaggccatcaagagcctgaagaagtacagcgacaagagcgccgagaagagccccttccccgaggagaagagccacatcatcgacaaggaggaggacatcggcaagagaagcctgttccactacacctag

SEQ ID NO: 92567 - DNA, 2349 bp, synthetic construct; identical to SEQ ID NO: 92562
  misc_feature 1..2349: note = Description of Artificial Sequence: Synthetic coding sequence
  source 1..2349: mol_type = other DNA

SEQ ID NO: 92568 - DNA, 2154 bp, synthetic construct
  misc_feature 1..2154: note = Description of Artificial Sequence: Synthetic coding sequence
  source 1..2154: mol_type = other DNA
atgagcatcaacctgaccgtggacatctacatctacctgctgagcaacgccagaagcgtgtgcggcaagcagagaagcaagcagctgtacttcctgttcagccccaagcactactggagaatcagccacatcagcctgcagagaggcttccacaccaacatcatcagatgcaagtggaccaagagcgaggcccacagctgcagcaagcactgctacagccccagcaaccacggcctgcacatcggcatcctgaagctgagcaccagcgcccccaagggcctgaccaaggtgaacatctgcatgagcagaatcaagagcaccctgaacagcgtgagcaaggccgtgttcggcaaccagaacgagatgatcagcagactggcccagttcaagcccagcagccagatcctgagaaaggtgagcgacagcggctggctgaagcagaagaacatcaagcaggccatcaagagcctgaagaagtacagcgacaagagcgccgagaagagccccttccccgaggagaagagccacatcatcgacaaggaggaggacatcggcaagagaagcctgttccactacaccagcagcatcaccaccaagttcggcgacagcttctacttcctgagcaaccacatcaacagctacttcaagagaaaggagaagatgagccagcagaaggagaacgagcacttcagagacaagagcgagctggaggacaagaaggtggaggagggcaagctgagaagccccgaccccggcatcctggcctacaagcccggcagcgagagcgtgcacaccgtggacaagcccaccagccccagcgccatccccgacgtgctgcaggtgagcaccaagcagagcatcgccaacttcctgagcagacccaccgagggcgtgcaggccctggtgggcggctacatcggcggcctggtgcccaagctgaagtacgacagcaagagccagagcgaggagcaggaggagcccgccaagaccgaccaggccgtgagcaaggacagaaacgccgaggagaagaagagactgagcctgcagagagagaagatcatcgccagagtgagcatcgacaacagaaccagagccctggtgcaggccctgagaagaaccaccgaccccaagctgtgcatcaccagagtggaggagctgaccttccacctgctggagttccccgagggcaagggcgtggccgtgaaggagagaatcatcccctacctgctgagactgagacagatcaaggacgagaccctgcaggccgccgtgagagagatcctggccctgatcggctacgtggaccccgtgaagggcagaggcatcagaatcctgagcatcgacggcggcggcaccagaggcgtggtggccctgcagaccctgagaaagctggtggagctgacccagaagcccgtgcaccagctgttcgactacatctgcggcgtgagcaccggcgccatcctggccttcatgctgggcctgttccacatgcccctggacgagtgcgaggagctgtacagaaagctgggcagcgacgtgttcagccagaacgtgatcgtgggcaccgtgaagatgagctggagccacgccttctacgacagccagacctgggagaacatcctgaaggacagaatgggcagcgccctgatgatcgagaccgccagaaaccccacctgccccaaggacggcggcctgctgctgaacaaccccagcgccctggccatgcacgagtgcaagtgcctgtggcccgacgtgcccctggagtgcatcgtgagcctgggcaccggcagatacgagagcgacgtgagaaacaccgtgacctacaccagcctgaagaccaagctgagcaacgtgatcaacagcgccaccgacaccgaggaggtgcacatcatgctggacggcctgctgccccccgacacctacttcagattcaaccccgtgatgtgcgagaacatccccctggacgagagcagaaacgagaagctggaccagctgcagctggagggcctgaagtacatcgagagaaacgagcagaagatgaagaaggtggccaagatcctgagccaggagaagaccaccctgcagaagatcaacgactggatcaagctgaagaccgacatgtacgagggcctgcccttcttcagcaagctgtag

SEQ ID NO: 92569 - DNA, 2049 bp, synthetic construct
  misc_feature 1..2049: note = Description of Artificial Sequence: Synthetic coding sequence
  source 1..2049: mol_type = other DNA
atgagcagaatcaagagcaccctgaacagcgtgagcaaggccgtgttcggcaaccagaacgagatgatcagcagactggcccagttcaagcccagcagccagatcctgagaaaggtgagcgacagcggctggctgaagcagaagaacatcaagcaggccatcaagagcctgaagaagtacagcgacaagagcgccgagaagagccccttccccgaggagaagagccacatcatcgacaaggaggaggacatcggcaagagaagcctgttccactacaccagcagcatcaccaccaagttcggcgacagcttctacttcctgagcaaccacatcaacagctacttcaagagaaaggagaagatgagccagcagaaggagaacgagcacttcagagacaagagcgagctggaggacaagaaggtggaggagggcaagctgagaagccccgaccccggcatcctggcctacaagcccggcagcgagagcgtgcacaccgtggacaagcccaccagccccagcgccatccccgacgtgctgcaggtgagcaccaagcagagcatcgccaacttcctgagcagacccaccgagggcgtgcaggccctggtgggcggctacatcggcggcctggtgcccaagctgaagtacgacagcaagagccagagcgaggagcaggaggagcccgccaagaccgaccaggccgtgagcaaggacagaaacgccgaggagaagaagagactgagcctgcagagagagaagatcatcgccagagtgagcatcgacaacagaaccagagccctggtgcaggccctgagaagaaccaccgaccccaagctgtgcatcaccagagtggaggagctgaccttccacctgctggagttccccgagggcaagggcgtggccgtgaaggagagaatcatcccctacctgctgagactgagacagatcaaggacgagaccctgcaggccgccgtgagagagatcctggccctgatcggctacgtggaccccgtgaagggcagaggcatcagaatcctgagcatcgacggcggcggcaccagaggcgtggtggccctgcagaccctgagaaagctggtggagctgacccagaagcccgtgcaccagctgttcgactacatctgcggcgtgagcaccggcgccatcctggccttcatgctgggcctgttccacatgcccctggacgagtgcgaggagctgtacagaaagctgggcagcgacgtgttcagccagaacgtgatcgtgggcaccgtgaagatgagctggagccacgccttctacgacagccagacctgggagaacatcctgaaggacagaatgggcagcgccctgatgatcgagaccgccagaaaccccacctgccccaaggtggccgccgtgagcaccatcgtgaacagaggcatcacccccaaggccttcgtgttcagaaactacggccacttccccggcatcaacagccactacctgggcggctgccagtacaagatgtggcaggccatcagagccagcagcgccgcccccggctacttcgccgagtacgccctgggcaacgacctgcaccaggacggcggcctgctgctgaacaaccccagcgccctggccatgcacgagtgcaagtgcctgtggcccgacgtgcccctggagtgcatcgtgagcctgggcaccggcagatacgagagcgacgtgagaaacaccgtgacctacaccagcctgaagaccaagctgagcaacgtgatcaacagcgccaccgacaccgaggaggtgcacatcatgctggacggcctgctgccccccgacacctacttcagattcaaccccgtgatgtgcgagaacatccccctggacgagagcagaaacgagaagctggaccagctgcagctggagggcctgaagtacatcgagagaaacgagcagaagatgaagaaggtggccaagatcctgagccaggagaagaccaccctgcagaagatcaacgactggatcaagctgaagaccgacatgtacgagggcctgcccttcttcagcaagctgtag

SEQ ID NO: 92570 - DNA, 3612 bp, synthetic construct
  misc_feature 1..3612: note = Description of Artificial Sequence: Synthetic coding sequence
  source 1..3612: mol_type = other DNA
atgaccagaagcccccccctgagagagctgccccccagctacaccccccccgccagaaccgccgccccccagatcctggccggcagcctgaaggcccccctgtggctgagagcctacttccagggcctgctgttcagcctgggctgcggcatccagagacactgcggcaaggtgctgttcctgggcctgctggccttcggcgccctggccctgggcctgagaatggccatcatcgagaccaacctggagcagctgtgggtggaggtgggcagcagagtgagccaggagctgcactacaccaaggagaagctgggcgaggaggccgcctacaccagccagatgctgatccagaccgccagacaggagggcgagaacatcctgacccccgaggccctgggcctgcacctgcaggccgccctgaccgccagcaaggtgcaggtgagcctgtacggcaagagctgggacctgaacaagatctgctacaagagcggcgtgcccctgatcgagaacggcatgatcgagagaatgatcgagaagctgttcccctgcgtgatcctgacccccctggactgcttctgggagggcgccaagctgcagggcggcagcgcctacctgcccggcagacccgacatccagtggaccaacctggaccccgagcagctgctggaggagctgggccccttcgccagcctggagggcttcagagagctgctggacaaggcccaggtgggccaggcctacgtgggcagaccctgcctgcaccccgacgacctgcactgcccccccagcgcccccaaccaccacagcagacaggcccccaacgtggcccacgagctgagcggcggctgccacggcttcagccacaagttcatgcactggcaggaggagctgctgctgggcggcatggccagagacccccagggcgagctgctgagagccgaggccctgcagagcaccttcctgctgatgagccccagacagctgtacgagcacttcagaggcgactaccagacccacgacatcggctggagcgaggagcaggccagcaccgtgctgcaggcctggcagagaagattcgtgcagctggcccaggaggccctgcccgagaacgccagccagcagatccacgccttcagcagcaccaccctggacgacatcctgcacgccttcagcgaggtgagcgccgccagagtggtgggcggctacctgctgatgctggcctacgcctgcgtgaccatgctgagatgggactgcgcccagagccagggcagcgtgggcctggccggcgtgctgctggtggccctggccgtggccagcggcctgggcctgtgcgccctgctgggcatcaccttcaacgccgccaccacccaggtgctgcccttcctggccctgggcatcggcgtggacgacgtgttcctgctggcccacgccttcaccgaggccctgcccggcacccccctgcaggagagaatgggcgagtgcctgcagagaaccggcaccagcgtggtgctgaccagcatcaacaacatggccgccttcctgatggccgccctggtgcccatccccgccctgagagccttcagcctgcaggccgccatcgtggtgggctgcaccttcgtggccgtgatgctggtgttccccgccatcctgagcctggacctgagaagaagacactgccagagactggacgtgctgtgctgcttcagcagcccctgcagcgcccaggtgatccagatcctgccccaggagctgggcgacggcaccgtgcccgtgggcatcgcccacctgaccgccaccgtgcaggccttcacccactgcgaggccagcagccagcacgtggtgaccatcctgcccccccaggcccacctggtgcccccccccagcgaccccctgggcagcgagctgttcagccccggcggcagcaccagagacctgctgggccaggaggaggagaccagacagaaggccgcctgcaagagcctgccctgcgccagatggaacctggcccacttcgccagataccagttcgcccccctgctgctgcagagccacgccaaggccatcgtgctggtgctgttcggcgccctgctgggcctgagcctgtacggcgccaccctggtgcaggacggcctggccctgaccgacgtggtgcccagaggcaccaaggagcacgccttcctgagcgcccagctgagatacttcagcctgtacgaggtggccctggtgacccagggcggcttcgactacgcccacagccagagagccctgttcgacctgcaccagagattcagcagcctgaaggccgtgctgcccccccccgccacccaggcccccagaacctggctgcactactacagaaactggctgcagggcatccaggccgccttcgaccaggactgggccagcggcagaatcaccagacacagctacagaaacggcagcgaggacggcgccctggcctacaagctgctgatccagaccggcgacgcccaggagcccctggacttcagccagctgaccaccagaaagctggtggacagagagggcctgatcccccccgagctgttctacatgggcctgaccgtgtgggtgagcagcgaccccctgggcctggccgccagccaggccaacttctacccccccccccccgagtggctgcacgacaagtacgacaccaccggcgagaacctgagaatcccccccgcccagcccctggagttcgcccagttccccttcctgctgagaggcctgcagaagaccgccgacttcgtggaggccatcgagggcgccagagccgcctgcgccgaggccggccaggccggcgtgcacgcctaccccagcggcagccccttcctgttctgggagcagtacctgggcctgagaagatgcttcctgctggccgtgtgcatcctgctggtgtgcaccttcctggtgtgcgccctgctgctgctgaacccctggaccgccggcctgatcgtgctggtgctggccatgatgaccgtggagctgttcggcatcatgggcttcctgggcatcaagctgagcgccatccccgtggtgatcctggtggccagcgtgggcatcggcgtggagttcaccgtgcacgtggccctgggcttcctgaccacccagggcagcagaaacctgagagccgcccacgccctggagcacaccttcgcccccgtgaccgacggcgccatcagcaccctgctgggcctgctgatgctggccggcagccacttcgacttcatcgtgagatacttcttcgccgccctgaccgtgctgaccctgctgggcctgctgcacggcctggtgctgctgcccgtgctgctgagcatcctgggccccccccccgaggtgatccagatgtacaaggagagccccgagatcctgagcccccccgccccccagggcggcggcctgagatggggcgccagcagcagcctgccccagagcttcgccagagtgaccaccagcatgaccgtggccatccaccccccccccctgcccggcgcctacatccaccccgcccccgacgagcccccctggagccccgccgccaccagcagcggcaacctgagcagcagaggccccggccccgccaccggctag

SEQ ID NO: 92571 - DNA, 267 bp, synthetic construct
  misc_feature 1..267: note = Description of Artificial Sequence: Synthetic coding sequence
  source 1..267: mol_type = other DNA
tgattcgacttcatcgtgagatacttcttcgccgccctgaccgtgctgaccctgctgggcctgctgcacggcctggtgctgctgcccgtgctgctgagcatcctgggccccccccccgaggtgatccagatgtacaaggagagccccgagatcctgagcccccccgccccccagggcggcggcctgagagtgggcagcctgcaggtgaacatcagctactggaaggagctgctgtggtgccaggacctgagacccgaggagatctag

SEQ ID NO: 92572 - DNA, 3441 bp, synthetic construct
  misc_feature 1..3441: note = Description of Artificial Sequence: Synthetic coding sequence
  source 1..3441: mol_type = other DNA
atgaccagaagcccccccctgagagagctgccccccagctacaccccccccgccagaaccgccgccccccagatcctggccggcagcctgaaggcccccctgtggctgagagcctacttccagggcctgctgttcagcctgggctgcggcatccagagacactgcggcaaggtgctgttcctgggcctgctggccttcggcgccctggccctgggcctgagaatggccatcatcgagaccaacctggagcagctgtgggtggaggtgggcagcagagtgagccaggagctgcactacaccaaggagaagctgggcgaggaggccgcctacaccagccagatgctgatccagaccgccagacaggagggcgagaacatcctgacccccgaggccctgggcctgcacctgcaggccgccctgaccgccagcaaggtgcaggtgagcctgtacggcaagagctgggacctgaacaagatctgctacaagagcggcgtgcccctgatcgagaacggcatgatcgagagaatgatcgagaagctgttcccctgcgtgatcctgacccccctggactgcttctgggagggcgccaagctgcagggcggcagcgcctacctgcccggcagacccgacatccagtggaccaacctggaccccgagcagctgctggaggagctgggccccttcgccagcctggagggcttcagagagctgctggacaaggcccaggtgggccaggcctacgtgggcagaccctgcctgcaccccgacgacctgcactgcccccccagcgcccccaaccaccacagcagacaggcccccaacgtggcccacgagctgagcggcggctgccacggcttcagccacaagttcatgcactggcaggaggagctgctgctgggcggcatggccagagacccccagggcgagctgctgagagccgaggccctgcagagcaccttcctgctgatgagccccagacagctgtacgagcacttcagaggcgactaccagacccacgacatcggctggagcgaggagcaggccagcaccgtgctgcaggcctggcagagaagattcgtgcagctggcccaggaggccctgcccgagaacgccagccagcagatccacgccttcagcagcaccaccctggacgacatcctgcacgccttcagcgaggtgagcgccgccagagtggtgggcggctacctgctgatgctggcctacgcctgcgtgaccatgctgagatgggactgcgcccagagccagggcagcgtgggcctggccggcgtgctgctggtggccctggccgtggccagcggcctgggcctgtgcgccctgctgggcatcaccttcaacgccgccaccacccaggtgctgcccttcctggccctgggcatcggcgtggacgacgtgttcctgctggcccacgccttcaccgaggccctgcccggcacccccctgcaggagagaatgggcgagtgcctgcagagaaccggcaccagcgtggtgctgaccagcatcaacaacatggccgccttcctgatggccgccctggtgcccatccccgccctgagagccttcagcctgcaggccgccatcgtggtgggctgcaccttcgtggccgtgatgctggtgttccccgccatcctgagcctggacctgagaagaagacactgccagagactggacgtgctgtgctgcttcagcagcccctgcagcgcccaggtgatccagatcctgccccaggagctgggcgacggcaccgtgcccgtgggcatcgcccacctgaccgccaccgtgcaggccttcacccactgcgaggccagcagccagcacgtggtgaccatcctgcccccccaggcccacctggtgcccccccccagcgaccccctgggcagcgagctgttcagccccggcggcagcaccagagacctgctgggccaggaggaggagaccagacagaaggccgcctgcaagagcctgccctgcgccagatggaacctggcccacttcgccagataccagttcgcccccctgctgctgcagagccacgccaaggccatcgtgctggtgctgttcggcgccctgctgggcctgagcctgtacggcgccaccctggtgcaggacggcctggccctgaccgacgtggtgcccagaggcaccaaggagcacgccttcctgagcgcccagctgagatacttcagcctgtacgaggtggccctggtgacccagggcggcttcgactacgcccacagccagagagccctgttcgacctgcaccagagattcagcagcctgaaggccgtgctgcccccccccgccacccaggcccccagaacctggctgcactactacagaaactggctgcagggcatccaggccgccttcgaccaggactgggccagcggcagaatcaccagacacagctacagaaacggcagcgaggacggcgccctggcctacaagctgctgatccagaccggcgacgcccaggagcccctggacttcagccagctgaccaccagaaagctggtggacagagagggcctgatcccccccgagctgttctacatgggcctgaccgtgtgggtgagcagcgaccccctgggcctggccgccagccaggccaacttctacccccccccccccgagtggctgcacgacaagtacgacaccaccggcgagaacctgagaatcccccccgcccagcccctggagttcgcccagttccccttcctgctgagaggcctgcagaagaccgccgacttcgtggaggccatcgagggcgccagagccgcctgcgccgaggccggccaggccggcgtgcacgcctaccccagcggcagccccttcctgttctgggagcagtacctgggcctgagaagatgcttcctgctggccgtgtgcatcctgctggtgtgcaccttcctggtgtgcgccctgctgctgctgaacccctggaccgccggcctgatcgtgctggtgctggccatgatgaccgtggagctgttcggcatcatgggcttcctgggcatcaagctgagcgccatccccgtggtgatcctggtggccagcgtgggcatcggcgtggagttcaccgtgcacgtggccctgggcttcctgaccacccagggcagcagaaacctgagagccgcccacgccctggagcacaccttcgcccccgtgaccgacggcgccatcagcaccctgctgggcctgctgatgctggccggcagccacttcgacttcatcgtgagatacttcttcgccgccctgaccgtgctgaccctgctgggcctgctgcacggcctggtgctgctgcccgtgctgctgagcatcctgggccccccccccgaggtgatccagatgtacaaggagagccccgagatcctgagcccccccgccccccagggcggcggcctgagacccgaggagatctag

SEQ ID NO: 92573 - DNA, 2667 bp, synthetic construct
  misc_feature 1..2667: note = Description of Artificial Sequence: Synthetic coding sequence
  source 1..2667: mol_type = other DNA
atgctgagacaggtgctgcacagaggcctgagaacctgcttcagcagactgggccacttcatcgccagccaccccgtgttcttcgccagcgcccccgtgctgatcagcatcctgctgggcgccagcttcagcagataccaggtggaggagagcgtggagcacctgctggccccccagcacagcctggccaagatcgagagaaacctggtgaacagcctgttccccgtgaacagaagcaagcacagactgtacagcgacctgcagacccccggcagatacggcagagtgatcgtgaccagcttccagaaggccaacatgctggaccagcaccacaccgacctgatcctgaagctgcacgccgccgtgaccaagatccaggtgcccagacccggcttcaactacaccttcgcccacatctgcatcctgaacaacgacaagacctgcatcgtggacgacatcgtgcacgtgctggaggagctgaagaacgccagagccaccaacagaaccaacttcgccatcacctaccccatcacccacctgaaggacggcagagccgtgtacaacggccaccagctgggcggcgtgaccgtgcacagcaaggacagagtgaagagcgccgaggccatccagctgacctactacctgcagagcatcaacagcctgaacgacatggtggccgagagatgggagagcagcttctgcgacaccgtgagactgttccagaagagcaacagcaaggtgaagatgtacccctacaccagcagcagcctgagagaggacttccagaagaccagcagagtgagcgagagatacctggtgaccagcctgatcctggtggtgaccatggccatcctgtgctgcagcatgcaggactgcgtgagaagcaagccctggctgggcctgctgggcctggtgaccatcagcctggccaccctgaccgccgccggcatcatcaacctgaccggcggcaagtacaacagcaccttcctgggcgtgcccttcgtgatgctgggccacggcctgtacggcaccttcgagatgctgagcagctggagaaagaccagagaggaccagcacgtgaaggagagaaccgccgccgtgtacgccgacagcatgctgagcttcagcctgaccaccgccatgtacctggtgaccttcggcatcggcgccagccccttcaccaacatcgaggccgccagaatcttctgctgcaacagctgcatcgccatcttcttcaactacctgtacgtgctgagcttctacggcagcagcctggtgttcaccggctacatcgagaacaactaccagcacagcatcttctgcagaaaggtgcccaagcccgaggccctgcaggagaagcccgcctggtacagattcctgctgaccgccagattcagcgaggacaccgccgagggcgaggaggccaacacctacgagagccacctgctggtgtgcttcctgaagagatactactgcgactggatcaccaacacctacgtgaagcccttcgtggtgctgttctacctgatctacatcagcttcgccctgatgggctacctgcaggtgagcgagggcagcgacctgagcaacatcgtggccaccgccacccagaccatcgagtacaccaccgcccagcagaagtacttcagcaactacagccccgtgatcggcttctacatctacgagagcatcgagtactggaacaccagcgtgcaggaggacgtgctggagtacaccaagggcttcgtgagaatcagctggttcgagagctacctgaactacctgagaaagctgaacgtgagcaccggcctgcccaagaagaacttcaccgacatgctgagaaacagcttcctgaaggccccccagttcagccacttccaggaggacatcatcttcagcaagaagtacaacgacgaggtggacgtggtggccagcagaatgttcctggtggccaagaccatggagaccaacagagaggagctgtacgacctgctggagaccctgagaagactgagcgtgaccagcaaggtgaagttcatcgtgttcaaccccagcttcgtgtacatggacagatacgccagcagcctgggcgcccccctgcacaacagctgcatcagcgccctgttcctgctgttcttcagcgccttcctggtggccgacagcctgatcaacgtgtggatcaccctgaccgtggtgagcgtggagttcggcgtgatcggcttcatgaccctgtggaaggtggagctggactgcatcagcgtgctgtgcctgatctacggcatcaactacaccatcgacaactgcgcccccatgctgagcaccttcgtgctgggcaaggacttcaccagaaccaagtgggtgaagaacgccctggaggtgcacggcgtggccatcctgcagagctacctgtgctacatcgtgggcctgatccccctggccgccgtgcccagcaacctgacctgcaccctgttcagatgcctgttcctgatcgccttcgtgaccttcttccactgcttcgccatcctgcccgtgatcctgaccttcctgccccccagcaagaagaagagaaaggagaagaagaaccccgagaacagagaggagatcgagtgcgtggagatggtggacatcgacagcaccagagtggtggaccagatcaccaccgtgtag

SEQ ID NO: 92574 - DNA, 4179 bp, synthetic construct
  misc_feature 1..4179: note = Description of Artificial Sequence: Synthetic coding sequence
  source 1..4179: mol_type = other DNA
atggacaccgaggacgaccccctgctgcaggacgtgtggctggaggaggagcaggaggaggaggaggccaccggcgagaccttcctgggcgcccagaagcccggcccccagcccggcgccggcggccagtgctgctggagacactggcccctggccagcagaccccccgccagcggcttctggagcaccctgggctgggccttcaccaacccctgctgcgccggcctggtgctgttcctgggctgcagcatccccatggccctgagcgccttcatgttcctgtactacccccccctggacatcgacatcagctacaacgccttcgagatcagaaaccacgaggccagccagagattcgacgccctgaccctggccctgaagagccagttcggcagctggggcagaaacagaagagacctggccgacttcaccagcgagaccctgcagagactgatcagcgagcagctgcagcagctgcacctgggcaacagaagcagacaggccagcagagcccccagagtgatccccgccgccagcctgggcggccccggcccctacagagacaccagcgccgcccagaagcccaccgccaacagaagcggcagactgagaagagagaccccccccctggaggacctggccgccaaccagagcgaggaccccagaaaccagagactgagcaagaacggcagataccagcccagcatccccccccacgccgccgtggccgccaaccagagcagagccagaagaggcgccagcagatgggactacagcagagcctacgtgagcgccaacacccagacccacgcccactggagaatcgagctgatcttcctggccagaggcgacgccgagagaaacatcttcaccagcgagagactggtgaccatccacgagatcgagagaaagatcatggaccaccccggcttcagagagttctgctggaagccccacgaggtgctgaaggacctgcccctgggcagctacagctactgcagcccccccagcagcctgatgacctacttcttccccaccgagagaggcggcaagatctactacgacggcatgggccaggacctggccgacatcagaggcagcctggagctggccatgacccaccccgagttctactggtacgtggacgagggcctgagcgccgacaacctgaagagcagcctgctgagaagcgagatcctgttcggcgcccccctgcccaactactacagcgtggacgacagatgggaggagcagagagccaagttccagagcttcgtggtgacctacgtggccatgctggccaagcagagcaccagcaaggtgcaggtgctgtacggcggcaccgacctgttcgactacgaggtgagaagaaccttcaacaacgacatgctgctggccttcatcagcagcagctgcatcgccgccctggtgtacatcctgaccagctgcagcgtgttcctgagcttcttcggcatcgccagcatcggcctgagctgcctggtggccctgttcctgtaccacgtggtgttcggcatccagtacctgggcatcctgaacggcgtggccgccttcgtgatcgtgggcatcggcgtggacgacgtgttcgtgttcatcaacacctacagacaggccacccacctggaggacccccagctgagaatgatccacaccgtgcagaccgccggcaaggccaccttcttcaccagcctgaccaccgccgccgcctacgccgccaacgtgttcagccagatccccgccgtgcacgacttcggcctgttcatgagcctgatcgtgagctgctgctggctggccgtgctggtgaccatgcccgccgccctgggcctgtggagcctgtacctggcccccctggagagcagctgccagaccagctgccaccagaactgcagcagaaagaccagcctgcacttccccggcgacgtgttcgccgcccccgagcaggtgggcggcagccccgcccagggccccatcccctacctggacgacgacatccccctgctggaggtggaggaggagcccgtgagcctggagctgggcgacgtgagcctggtgagcgtgagccccgagggcctgcagcccgccagcaacaccggcagcagaggccacctgatcgtgcagctgcaggagctgctgcaccactgggtgctgtggagcgccgtgaagagcagatgggtgatcgtgggcctgttcgtgagcatcctgatcctgagcctggtgttcgccagcagactgagacccgccagcagagcccccctgctgttcagacccgacaccaacatccaggtgctgctggacctgaagtacaacctgagcgccgagggcatcagctgcatcacctgcagcggcctgttccaggagaagccccacagcctgcagaacaacatcagaaccagcctggagaagaagagaagaggcagcggcgtgccctgggccagcagacccgaggccaccctgcaggacttccccggcaccgtgtacatcagcaaggtgaagagccagggccaccccgccgtgtacagactgagcctgaacgccagcctgcccgccccctggcaggccgtgagccccggcgacggcgaggtgcccagcttccaggtgtacagagcccccttcggcaacttcaccaagaagctgaccgcctgcatgagcaccgtgggcctgctgcaggccgccagccccagcagaaagtggatgctgaccaccctggcctgcgacgccaagagaggctggaagttcgacttcagcttctacgtggccaccaaggagcagcagcacaccagaaagctgtacttcgcccagagccacaagccccccttccacggcagagtgtgcatggccccccccggctgcctgctgagcagcagccccgacggccccaccaagggcttcttcttcgtgcccagcgagaaggtgcccaaggccagactgagcgccaccttcggcttcaacccctgcgtgaacaccggctgcggcaagcccgccgtgagacccctggtggacaccggcgccatggtgttcgtggtgttcggcatcatcggcgtgaacagaaccagacaggtggacaaccacgtgatcggcgaccccggcagcgtggtgtacgacagcagcttcgacctgttcaaggagatcggccacctgtgccacctgtgcaaggccatcgccgccaacagcgagctggtgaagcccggcggcgcccagtgcctgcccagcggctacagcatcagcagcttcctgcagatgctgcaccccgagtgcaaggagctgcccgagcccaacctgctgcccggccagctgagccacggcgccgtgggcgtgagagagggcagagtgcagtggatcagcatggccttcgagagcaccacctacaagggcaagagcagcttccagacctacagcgactacctgagatgggagagcttcctgcagcagcagctgcaggccctgcccgagggcagcgtgctgagaagaggcttccagacctgcgagcactggaagcagatcttcatggagatcgtgggcgtgcagagcgccctgtgcggcctggtgctgagcctgctgatctgcgtggccgccgtggccgtgttcaccacccacatcctgctgctgctgcccgtgctgctgagcatcctgggcatcgtgtgcctggtggtgaccatcatgtactggagcggctgggagatgggcgccgtggaggccatcagcctgagcatcctggtgggcagcagcgtggactactgcgtgcacctggtggagggctacctgctggccggcgagaacctgcccccccaccaggccgaggacgccagaacccagagacagtggagaaccctggaggccgtgagacacgtgggcgtggccatcgtgagcagcgccctgaccaccgtgatcgccaccgtgcccctgttcttctgcatcatcgcccccttcgccaagttcggcaagatcgtggccctgaacaccggcgtgagcatcctgtacaccctgaccgtgagcaccgccctgctgggcatcatggcccccagcagcttcaccagaaccagaaccagcttcctgaaggccctgggcgccgtgctgctggccggcgccctgggcctgggcgcctgcctggtgctgctgcagagcggctacaagatccccctgcccgccggcgccagcctgtag

SEQ ID NO: 92575 - DNA, 4179 bp, synthetic construct
  misc_feature 1..4179: note = Description of Artificial Sequence: Synthetic coding sequence
  source 1..4179: mol_type = other DNA
atggacaccgaggacgaccccctgctgcaggacgtgtggctggaggaggagcaggaggaggaggaggccaccggcgagaccttcctgggcgcccagaagcccggcccccagcccggcgccggcggccagtgctgctggagacactggcccctggccagcagaccccccgccagcggcttctggagcaccctgggctgggccttcaccaacccctgctgcgccggcctggtgctgttcctgggctgcagcatccccatggccctgagcgccttcatgttcctgtactacccccccctggacatcgacatcagctacaacgccttcgagatcagaaaccacgaggccagccagagattcgacgccctgaccctggccctgaagagccagttcggcagctggggcagaaacagaagagacctggccgacttcaccagcgagaccctgcagagactgatcagcgagcagctgcagcagctgcacctgggcaacagaagcagacaggccagcagagcccccagagtgatccccgccgccagcctgggcggccccggcccctacagagacaccagcgccgcccagaagcccaccgccaacagaagcggcagactgagaagagagaccccccccctggaggacctggccgccaaccagagcgaggaccccagaaaccagagactgagcaagaacggcagataccagcccagcatccccccccacgccgccgtggccgccaaccagagcagagccagaagaggcgccagcagatgggactacagcagagcctacgtgagcgccaacacccagacccacgcccactggagaatcgagctgatcttcctggccagaggcgacgccgagagaaacatcttcaccagcgagagactggtgaccatccacgagatcgagagaaagatcatggaccaccccggcttcagagagttctgctggaagccccacgaggtgctgaaggacctgcccctgggcagctacagctactgcagcccccccagcagcctgatgacctacttcttccccaccgagagaggcggcaagatctactacgacggcatgggccaggacctggccgacatcagaggcagcctggagctggccatgacccaccccgagttctactggtacgtggacgagggcctgagcgccgacaacctgaagagcagcctgctgagaagcgagatcctgttcggcgcccccctgcccaactactacagcgtggacgacagatgggaggagcagagagccaagttccagagcttcgtggtgacctacgtggccatgctggccaagcagagcaccagcaaggtgcaggtgctgtacggcggcaccgacctgttcgactacgaggtgagaagaaccttcaacaacgacatgctgctggccttcatcagcagcagctgcatcgccgccctggtgtacatcctgaccagctgcagcgtgttcctgagcttcttcggcatcgccagcatcggcctgagctgcctggtggccctgttcctgtaccacgtggtgttcggcatccagtacctgggcatcctgaacggcgtggccgccttcgtgatcgtgggcatcggcgtggacgacgtgttcgtgttcatcaacacctacagacaggccacccacctggaggacccccagctgagaatgatccacaccgtgcagaccgccggcaaggccaccttcttcaccagcctgaccaccgccgccgcctacgccgccaacgtgttcagccagatccccgccgtgcacgacttcggcctgttcatgagcctgatcgtgagctgctgctggctggccgtgctggtgaccatgcccgccgccctgggcctgtggagcctgtacctggcccccctggagagcagctgccagaccagctgccaccagaactgcagcagaaagaccagcctgcacttccccggcgacgtgttcgccgcccccgagcaggtgggcggcagccccgcccagggccccatcccctacctggacgacgacatccccctgctggaggtggaggaggagcccgtgagcctggagctgggcgacgtgagcctggtgagcgtgagccccgagggcctgcagcccgccagcaacaccggcagcagaggccacctgatcgtgcagctgcaggagctgctgcaccactgggtgctgtggagcgccgtgaagagcagatgggtgatcgtgggcctgttcgtgagcatcctgatcctgagcctggtgttcgccagcagactgagacccgccagcagagcccccctgctgttcagacccgacaccaacatccaggtgctgctggacctgaagtacaacctgagcgccgagggcatcagctgcatcacctgcagcggcctgttccaggagaagccccacagcctgcagaacaacatcagaaccagcctggagaagaagagaagaggcagcggcgtgccctgggccagcagacccgaggccaccctgcaggacttccccggcaccgtgtacatcagcaaggtgaagagccagggccaccccgccgtgtacagactgagcctgaacgccagcctgcccgccccctggcaggccgtgagccccggcgacggcgaggtgcccagcttccaggtgtacagagcccccttcggcaacttcaccaagaagctgaccgcctgcatgagcaccgtgggcctgctgcaggccgccagccccagcagaaagtggatgctgaccaccctggcctgcgacgccaagagaggctggaagttcgacttcagcttctacgtggccaccaaggagcagcagcacaccagaaagctgtacttcgcccagagccacaagccccccttccacggcagagtgtgcatggccccccccggctgcctgctgagcagcagccccgacggccccaccaagggcttcttcttcgtgcccagcgagaaggtgcccaaggccagactgagcgccaccttcggcttcaacccctgcgtgaacaccggctgcggcaagcccgccgtgagacccctggtggacaccggcgccatggtgttcgtggtgttcggcatcatcggcgtgaacagaaccagacaggtggacaaccacgtgatcggcgaccccggcagcgtggtgtacgacagcagcttcgacctgttcaaggagatcggccacctgtgccacctgtgcaaggccatcgccgccaacagcgagctggtgaagcccggcggcgcccagtgcctgcccagcggctacagcatcagcagcttcctgcagatgctgcaccccgagtgcaaggagctgcccgagcccaacctgctgcccggccagctgagccacggcgccgtgggcgtgagagagggcagagtgcagtggatcagcatggccttcgagagcaccacctacaagggcaagagcagcttccagacctacagcgactacctgagatgggagagcttcctgcagcagcagctgcaggccctgcccgagggcagcgtgctgagaagaggcttccagacctgcgagcactggaagcagatcttcatggagatcgccggcgtgcagagcgccctgtgcggcctggtgctgagcctgctgatctgcgtggccgccgtggccgtgttcaccacccacatcctgctgctgctgcccgtgctgctgagcatcctgggcatcgtgtgcctggtggtgaccatcatgtactggagcggctgggagatgggcgccgtggaggccatcagcctgagcatcctggtgggcagcagcgtggactactgcgtgcacctggtggagggctacctgctggccggcgagaacctgcccccccaccaggccgaggacgccagaacccagagacagtggagaaccctggaggccgtgagacacgtgggcgtggccatcgtgagcagcgccctgaccaccgtgatcgccaccgtgcccctgttcttctgcatcatcgcccccttcgccaagttcggcaagatcgtggccctgaacaccggcgtgagcatcctgtacaccctgaccgtgagcaccgccctgctgggcatcatggcccccagcagcttcaccagaaccagaaccagcttcctgaaggccctgggcgccgtgctgctggccggcgccctgggcctgggcgcctgcctggtgctgctgcagagcggctacaagatccccctgcccgccggcgccagcctgtag

SEQ ID NO: 92576 - DNA, 2304 bp, synthetic construct
  misc_feature 1..2304: note = Description of Artificial Sequence: Synthetic coding sequence
  source 1..2304: mol_type = other DNA
atgccctgggtggagcccaagcccagacccggccccgagcagaagcccaagctgaccaagcccgacagcgccaccggcccccagtggtaccaggagagccaggagagcgagagcgagggcaagcagcccccccccggccccctggccccccccaagagccccgagcccagcggccccctggccagcgagcaggacgcccccctgcccgagggcgacgacgccccccccagacccagcatgctggacgacgcccccagactgcccctggagctggacgacgcccccctgcccgaggaggagacccccgagcccaccgccatctgcagacacagacacagatgccacaccgactgcctggagggcctgctgagcagaaccttccagtggctgggctggcaggtgggcgcccacccctggatcttcctgctggcccccctgatgctgaccgccgccctgggcaccggcttcctgtacctgcccaaggacgaggaggaggacctggaggagcactacacccccgtgggcagccccgccaaggccgagagaagattcgtgcagggccacttcaccaccaacgacagctacagattcagcgccagcagaagaagcaccgaggccaacttcgtgagcctgctggtggtgagctacagcgacagcctgctggaccccgccaccttcgccgaggtgagcaagctggacggcgccgtgcaggacctgagagtggccagagagaagggcagccagatccagtaccagcaggtgtgcgccagatacagagccctgtgcgtgccccccaaccccatcctgtacgcctggcaggtgaacaagaccctgaacctgagcagcatcagcttccccgcctacaaccacggcagacaccccctgtacctgaccggcttcttcggcggctacatcctgggcggcagcctgggcatgggccagctgctgctgagagccaaggccatgagactgctgtactacctgaagaccgaggaccccgagtacgacgtgcagagcaagcagtggctgacccacctgctggaccagttcaccaacatcaagaacatcctggccctgaagaagatcgaggtggtgcacttcaccagcctgagcagacagctggagttcgaggccaccagcgtgaccgtgatccccgtgttccacctggcctacatcctgatcatcctgttcgccgtgaccagctgcttcagattcgactgcatcagaaacaagatgtgcgtggccgccttcggcgtgatcagcgccttcctggccgtggtgagcggcttcggcctgctgctgcacatcggcgtgcccttcgtgatcatcgtggccaacagccccttcctgatcctgggcgtgggcgtggacgacatgttcatcatgatcagcgcctggcacaagaccaacctggccgacgacatcagagagagaatgagcaacgtgtacagcaaggccgccgtgagcatcaccatcaccaccatcaccaacatcctggccctgtacaccggcatcatgagcagcttcagaagcgtgcagtgcttctgcatctacaccggcatgaccctgctgttctgctacttctacaacatcacctgcttcggcgccttcatggccctggacggcaagagagaggtggtgtgcctgtgctggctgaagaaggccgaccccaagtggcccagcttcaagaagttctgctgcttccccttcggcagcgtgcccgacgagcacggcaccgacatccaccccatcagcctgttcttcagagactacttcggccccttcctgaccagaagcgagagcaagtacttcgtggtgttcatctacgtgctgtacatcatcagcagcatctacggctgcttccacgtgcaggagggcctggacctgagaaacctggccagcgacgacagctacatcaccccctacttcaacgtggaggagaactacttcagcgactacggccccagagtgatggtgatcgtgaccaagaaggtggactactgggacaaggacgtgagacagaagctggagaactgcaccaagatcttcgagaagaacgtgtacgtggacaagaacctgaccgagttctggctggacgcctacgtgcagtacctgaagggcaacagccaggaccccaacgagaagaacaccttcatgaacaacatccccgacttcctgagcaacttccccaacttccagcacgacatcaacatcagcagcagcaacgagatcatcagcagcagaggcttcatccagaccaccgacgtgagcagcagcgccaagaagaagatcctgctgttctag

SEQ ID NO: 92577 - DNA, 978 bp, synthetic construct
  misc_feature 1..978: note = Description of Artificial Sequence: Synthetic coding sequence
  source 1..978: mol_type = other DNA
atgaccgagagaagaagagacgagctgagcgaggagatcaacaacctgagagagaaggtgatgaagcagagcgaggagaacaacaacctgcagagccaggtgcagaagctgaccgaggagaacaccaccctgagagagcaggtggagcccacccccgaggacgaggacgacgacatcgagctgagaggcgccgccgccgccgccgccccccccccccccatcgaggaggagtgccccgaggacctgcccgagaagttcgacggcaaccccgacatgctggcccccttcatggcccagtgccagatcttcatggagaagagcaccagagacttcagcgtggacagagtgagagtgtgcttcgtgaccagcatgatgaccggcagagccgccagatgggccagcgccaagctggagagaagccactacctgatgcacaactaccccgccttcatgatggagatgaagcacgtgttcgaggacccccagagaagagaggtggccaagagaaagatcagaagactgagacagggcatgggcagcgtgatcgactacagcaacgccttccagatgatcgcccaggacctggactggaacgagcccgccctgatcgaccagtaccacgagggcctgagcgaccacatccaggaggagctgagccacctggaggtggccaagagcctgagcgccctgatcggccagtgcatccacatcgagagaagactggccagagccgccgccgccagaaagcccagaagcccccccagagccctggtgctgccccacatcgccagccaccaccaggtggaccccaccgagcccgtgggcggcgccagaatgagactgacccaggaggagaaggagagaagaagaaagctgaacctgtgcctgtactgcggcaccggcggccactacgccgacaactgccccgccaaggccagcaagagcagccccgccggcaacagccccgcccccctgtag

SEQ ID NO: 92578 - DNA, 978 bp, synthetic construct; identical to SEQ ID NO: 92577
  misc_feature 1..978: note = Description of Artificial Sequence: Synthetic coding sequence
  source 1..978: mol_type = other DNA

SEQ ID NO: 92579 - DNA, 1311 bp, synthetic construct
  misc_feature 1..1311: note = Description of Artificial Sequence: Synthetic coding sequence
  source 1..1311: mol_type = other DNA
atgatggccacccagaccctgagcatcgacagctaccaggacggccagcagatgcaggtggtgaccgagctgaagaccgagcaggaccccaactgcagcgagcccgacgccgagggcgtgagccccccccccgtggagagccagacccccatggacgtggacaagcaggccatctacagacaccccctgttccccctgctggccctgctgttcgagaagtgcgagcagagcacccagggcagcgagggcaccaccagcgccagcttcgacgtggacatcgagaacttcgtgagaaagcaggagaaggagggcaagcccttcttctgcgaggaccccgagaccgacaacctgatggtgaaggccatccaggtgctgagaatccacctgctggagctggagaaggtgaacgagctgtgcaaggacttctgcagcagatacatcgcctgcctgaagaccaagatgaacagcgagaccctgctgagcggcgagcccggcagcccctacagccccgtgcagagccagcagatccagagcgccatcaccggcaccatcagcccccagggcatcgtggtgcccgccagcgccctgcagcagggcaacgtggccatggccaccgtggccggcggcaccgtgtaccagcccgtgaccgtggtgaccccccagggccaggtggtgacccagaccctgagccccggcaccatcagaatccagaacagccagctgcagctgcagctgaaccaggacctgagcatcctgcaccaggacgacggcagcagcaagaacaagagaggcgtgctgcccaagcacgccaccaacgtgatgagaagctggctgttccagcacatcggccacccctaccccaccgaggacgagaagaagcagatcgccgcccagaccaacctgaccctgctgcaggtgaacaactggttcatcaacgccagaagaagaatcctgcagcccatgctggacagcagctgcagcgagacccccaagaccaagaagaagaccgcccagaacagacccgtgcagagattctggcccgacagcatcgccagcggcgtggcccagcccccccccagcgagctgaccatgagcgagggcgccgtggtgaccatcaccacccccgtgaacatgaacgtggacagcctgcagagcctgagcagcgacggcgccaccctggccgtgcagcaggtgatgatggccggccagagcgaggacgagagcgtggacagcaccgaggaggacgccggcgccctggcccccgcccacatcagcggcctggtgctggagaacagcgacagcctgcagtag

SEQ ID NO: 92580 - DNA, 960 bp, synthetic construct
  misc_feature 1..960: note = Description of Artificial Sequence: Synthetic coding sequence
  source 1..960: mol_type = other DNA
atggtgaaggccatccaggtgctgagaatccacctgctggagctggagaaggtgaacgagctgtgcaaggacttctgcagcagatacatcgcctgcctgaagaccaagatgaacagcgagaccctgctgagcggcgagcccggcagcccctacagccccgtgcagagccagcagatccagagcgccatcaccggcaccatcagcccccagggcatcgtggtgcccgccagcgccctgcagcagggcaacgtggccatggccaccgtggccggcggcaccgtgtaccagcccgtgaccgtggtgaccccccagggccaggtggtgacccagaccctgagccccggcaccatcagaatccagaacagccagctgcagctgcagctgaaccaggacctgagcatcctgcaccaggacgacggcagcagcaagaacaagagaggcgtgctgcccaagcacgccaccaacgtgatgagaagctggctgttccagcacatcggccacccctaccccaccgaggacgagaagaagcagatcgccgcccagaccaacctgaccctgctgcaggtgaacaactggttcatcaacgccagaagaagaatcctgcagcccatgctggacagcagctgcagcgagacccccaagaccaagaagaagaccgcccagaacagacccgtgcagagattctggcccgacagcatcgccagcggcgtggcccagcccccccccagcgagctgaccatgagcgagggcgccgtggtgaccatcaccacccccgtgaacatgaacgtggacagcctgcagagcctgagcagcgacggcgccaccctggccgtgcagcaggtgatgatggccggccagagcgaggacgagagcgtggacagcaccgaggaggacgccggcgccctggcccccgcccacatcagcggcctggtgctggagaacagcgacagcctgcagtag

SEQ ID NO: 92581 - DNA, 1260 bp, synthetic construct
  misc_feature 1..1260: note = Description of Artificial Sequence: Synthetic coding sequence
  source 1..1260: mol_type = other DNA
atgatggccacccagaccctgagcatcgacagctaccaggacggccagcagatgcaggtggtgaccgagctgaagaccgagcaggaccccaactgcagcgagcccgacgccgagggcgtgagccccccccccgtggagagccagacccccatggacgtggacaagcaggccatctacagacaccccctgttccccctgctggccctgctgttcgagaagtgcgagcagagcacccagggcagcgagggcaccaccagcgccagcttcgacgtggacatcgagaacttcgtgagaaagcaggagaaggagggcaagcccttcttctgcgaggaccccgagaccgacaacctgatggtgaaggccatccaggtgctgagaatccacctgctggagctggagaaggtgaacgagctgtgcaaggacttctgcagcagatacatcgcctgcctgaagaccaagatgaacagcgagaccctgctgagcggcgagcccggcagcccctacagccccgtgcagagccagcagatccagagcgccatcaccggcaccatcagcccccagggcatcgtggtgcccgccagcgccctgcagcagggcaacgtggccatggccaccgtggccggcggcaccgtgtaccagcccgtgaccgtggtgaccccccagggccaggtggtgacccagaccctgagccccggcaccatcagaatccagaacagccagctgcagctgcagctgaaccaggacctgagcatcctgcaccaggacgacggcagcagcaagaacaagagaggcgtgctgcccaagcacgccaccaacgtgatgagaagctggctgttccagcacatcggccacccctaccccaccgaggacgagaagaagcagatcgccgcccagaccaacctgaccctgctgcaggtgaacaactggttcatcaacgccagaagaagaatcctgcagcccatgctggacagcagctgcagcgagacccccaagaccaagaagaagaccgcccagaacagacccgtgcagagattctggcccgacagcatcgccagcggcgtggcccagcccccccccagcgagctgaccatgagcgagggcaccggcggcagacccagacccgacatggtggaccacggcgtgggcatcatgaacaagagacccggcagcggcctgctggccccccccagacccgccgagaacgacatcctgaagccccccctgagaagcagcttcgtgaactgcctgctgatcttctag

SEQ ID NO: 92582 - DNA, 1419 bp, synthetic construct
  misc_feature 1..1419: note = Description of Artificial Sequence: Synthetic coding sequence
  source 1..1419: mol_type = other DNA
atgatgcagcacgccagccccgcccccgccctgaccatgatggccacccagaacgtgcccccccccccctaccaggacagcccccagatgaccgccaccgcccagccccccagcaaggcccaggccgtgcacatcagcgcccccagcgccgccgccagcacccccgtgcccagcgcccccatcgacccccaggcccagctggaggccgacaagagagccgtgtacagacaccccctgttccccctgctgaccctgctgttcgagaagtgcgagcaggccacccagggcagcgagtgcatcaccagcgccagcttcgacgtggacatcgagaacttcgtgcaccagcaggagcaggagcacaagcccttcttcagcgacgaccccgagctggacaacctgatggtgaaggccatccaggtgctgagaatccacctgctggagctggagaaggtgaacgagctgtgcaaggacttctgcaacagatacatcacctgcctgaagaccaagatgcacagcgacaacctgctgagaaacgacctgggcggcccctacagccccaaccagcccagcatcaacctgcacagccaggacctgctgcagaacagccccaacagcatgagcggcgtgagcaacaacccccagggcatcgtggtgcccgccagcgccctgcagcagggcaacatcgccatgaccaccgtgaacagccaggtggtgagcggcggcgccctgtaccagcccgtgaccatggtgaccagccagggccaggtggtgacccaggccatcccccagggcgccatccagatccagaacacccaggtgaacctggacctgaccagcctgctggacaacgaggacaagaagagcaagaacaagagaggcgtgctgcccaagcacgccaccaacatcatgagaagctggctgttccagcacctgatgcacccctaccccaccgaggacgagaagagacagatcgccgcccagaccaacctgaccctgctgcaggtgaacaactggttcatcaacgccagaagaagaatcctgcagcccatgctggacgccagcaaccccgaccccgcccccaaggccaagaagatcaagagccagcacagacccacccagagattctggcccaacagcatcgccgccggcgtgctgcagcagcagggcggcgcccccggcaccaaccccgacggcagcatcaacctggacaacctgcagagcctgagcagcgacagcgccaccatggccatgcagcaggccatgatggccgcccacgacgacagcctggacggcaccgaggaggaggacgaggacgagatggaggaggaggaggaggaggagctggaggaggaggtggacgagctgcagaccaccaacgtgagcgacctgggcctggagcacagcgacagcctggagtag

SEQ ID NO: 92583 - DNA, 120 bp, synthetic construct
  misc_feature 1..120: note = Description of Artificial Sequence: Synthetic coding sequence
  source 1..120: mol_type = other DNA
atgatgcagcacgccagccccgcccccgccctgaccatgatggccacccagaacgtgcccccccccccctaccaggacagcccccagatgaccgccaccgcccagccccccagcaagtag

SEQ ID NO: 92584 - DNA, 1332 bp, synthetic construct
  misc_feature 1..1332: note = Description of Artificial Sequence: Synthetic coding sequence
  source 1..1332: mol_type = other DNA
atgaccgccaccgcccagccccccagcaaggcccaggccgtgcacatcagcgcccccagcgccgccgccagcacccccgtgcccagcgcccccatcgacccccaggcccagctggaggccgacaagagagccgtgtacagacaccccctgttccccctgctgaccctgctgttcgagaagtgcgagcaggccacccagggcagcgagtgcatcaccagcgccagcttcgacgtggacatcgagaacttcgtgcaccagcaggagcaggagcacaagcccttcttcagcgacgaccccgagctggacaacctgatggtgaaggccatccaggtgctgagaatccacctgctggagctggagaaggtgaacgagctgtgcaaggacttctgcaacagatacatcacctgcctgaagaccaagatgcacagcgacaacctgctgagaaacgacctgggcggcccctacagccccaaccagcccagcatcaacctgcacagccaggacctgctgcagaacagccccaacagcatgagcggcgtgagcaacaacccccagggcatcgtggtgcccgccagcgccctgcagcagggcaacatcgccatgaccaccgtgaacagccaggtggtgagcggcggcgccctgtaccagcccgtgaccatggtgaccagccagggccaggtggtgacccaggccatcccccagggcgccatccagatccagaacacccaggtgaacctggacctgaccagcctgctggacaacgaggacaagaagagcaagaacaagagaggcgtgctgcccaagcacgccaccaacatcatgagaagctggctgttccagcacctgatgcacccctaccccaccgaggacgagaagagacagatcgccgcccagaccaacctgaccctgctgcaggtgaacaactggttcatcaacgccagaagaagaatcctgcagcccatgctggacgccagcaaccccgaccccgcccccaaggccaagaagatcaagagccagcacagacccacccagagattctggcccaacagcatcgccgccggcgtgctgcagcagcagggcggcgcccccggcaccaaccccgacggcagcatcaacctggacaacctgcagagcctgagcagcgacagcgccaccatggccatgcagcaggccatgatggccgcccacgacgacagcctggacggcaccgaggaggaggacgaggacgagatggaggaggaggaggaggaggagctggaggaggaggtggacgagctgcagaccaccaacgtgagcgacctgggcctggagcacagcgacagcctggagtag

SEQ ID NO: 92585 - DNA, 1332 bp, synthetic construct; identical to SEQ ID NO: 92584
  misc_feature 1..1332: note = Description of Artificial Sequence: Synthetic coding sequence
  source 1..1332: mol_type = other DNA

SEQ ID NO: 92586 - DNA, 123 bp, synthetic construct
  misc_feature 1..123: note = Description of Artificial Sequence: Synthetic coding sequence
  source 1..123: mol_type = other DNA
atgatgcagcacgccagccccgcccccgccctgaccatgatggccacccagaacgtgcccccccccccctaccaggacagcccccagatgaccgccaccgcccagccccccagcaaggcctag

SEQ ID NO: 92587 - DNA, 921 bp, synthetic construct
  misc_feature 1..921: note = Description of Artificial Sequence: Synthetic coding sequence
  source 1..921: mol_type = other DNA
atgatggccacccagaacgtgcccccccccccctaccaggacagcccccagatgaccgccaccgcccagccccccagcaaggcccaggccgtgcacatcagcgcccccagcgccgccgccagcacccccgtgcccagcgcccccatcgacccccaggcccagctggaggccgacaagagagccgtgtacagacaccccctgttccccctgctgaccctgctgttcgagaagtgcgagcaggccacccagggcagcgagtgcatcaccagcgccagcttcgacgtggacatcgagaacttcgtgcaccagcaggagcaggagcacaagcccttcttcagcgacgaccccgagctggacaacctgatggtgaaggccatccaggtgctgagaatccacctgctggagctggagaaggtgaacgagctgtgcaaggacttctgcaacagatacatcacctgcctgaagaccaagatgcacagcgacaacctgctgagaaacgacctgggcggcccctacagccccaaccagcccagcatcaacctgcacagccaggacctgctgcagaacagccccaacagcatgagcggcgtgagcaacaacccccagggcatcgtggtgcccgccagcgccctgcagcagggcaacatcgccatgaccaccgtgaacagccaggtggtgagcggcggcgccctgtaccagcccgtgaccatggtgaccagccagggccaggtggtgacccaggccatcccccagggcgccatccagatccagaacacccaggtgaacctggacctgaccagcctgctggacaacgaggacaagaagagcaagaacaagagaggcgtgctgcccaagcacgccaccaacatcatgagaagctggctgttccagcaccacgcccccctgccccacggcggctag

SEQ ID NO: 92588 - DNA, 1227 bp, synthetic construct
  misc_feature 1..1227: note = Description of Artificial Sequence: Synthetic coding sequence
  source 1..1227: mol_type = other DNA
atgagcagaccccaccccaccagaaccgcccacagacaccccctgttccccctgctgaccctgctgttcgagaagtgcgagcaggccacccagggcagcgagtgcatcaccagcgccagcttcgacgtggacatcgagaacttcgtgcaccagcaggagcaggagcacaagcccttcttcagcgacgaccccgagctggacaacctgatggtgaaggccatccaggtgctgagaatccacctgctggagctggagaaggtgaacgagctgtgcaaggacttctgcaacagatacatcacctgcctgaagaccaagatgcacagcgacaacctgctgagaaacgacctgggcggcccctacagccccaaccagcccagcatcaacctgcacagccaggacctgctgcagaacagccccaacagcatgagcggcgtgagcaacaacccccagggcatcgtggtgcccgccagcgccctgcagcagggcaacatcgccatgaccaccgtgaacagccaggtggtgagcggcggcgccctgtaccagcccgtgaccatggtgaccagccagggccaggtggtgacccaggccatcccccagggcgccatccagatccagaacacccaggtgaacctggacctgaccagcctgctggacaacgaggacaagaagagcaagaacaagagaggcgtgctgcccaagcacgccaccaacatcatgagaagctggctgttccagcacctgatgcacccctaccccaccgaggacgagaagagacagatcgccgcccagaccaacctgaccctgctgcaggtgaacaactggttcatcaacgccagaagaagaatcctgcagcccatgctggacgccagcaaccccgaccccgcccccaaggccaagaagatcaagagccagcacagacccacccagagattctggcccaacagcatcgccgccggcgtgctgcagcagcagggcggcgcccccggcaccaaccccgacggcagcatcaacctggacaacctgcagagcctgagcagcgacagcgccaccatggccatgcagcaggccatgatggccgcccacgacgacagcctggacggcaccgaggaggaggacgaggacgagatggaggaggaggaggaggaggagctggaggaggaggtggacgagctgcagaccaccaacgtgagcgacctgggcctggagcacagcgacagcctggagtag

SEQ ID NO: 92589 - DNA, 297 bp, synthetic construct
  misc_feature 1..297: note = Description of Artificial Sequence: Synthetic coding sequence
  source 1..297: mol_type = other DNA
atgatgcagcacgccagccccgcccccgccctgaccatgatggccacccagaacgtgcccccccccccctaccaggacagcccccagatgaccgccaccgcccagccccccagcaaggcccaggccgtgcacatcagcgcccccagcgccgccgccagcacccccgtgcccagcgcccccatcgacccccaggcccagctggaggccgacaagagagccgtgtacagacaccccctgttccccctgctgaccctgctgttcgagaagtgcgagcaggccacccagggcagcgagtag

SEQ ID NO: 92590 - DNA, 234 bp, synthetic construct
  misc_feature 1..234: note = Description of Artificial Sequence: Synthetic coding sequence
  source 1..234: mol_type = other DNA
atgatgcagcacgccagccccgcccccgccctgaccatgatggccacccagaacgtgcccccccccccctaccaggacagcccccagatgaccgccaccgcccagccccccagcaaggcccaggccgtgcacatcagcgcccccagcgccgccgccagcacccccgtgcccagcgcccccatcgacccccaggcccagctggaggccgacaagagagccgtgtacagatggtag

SEQ ID NO: 92591 - DNA, 990 bp, synthetic construct
  misc_feature 1..990: note = Description of Artificial Sequence: Synthetic coding sequence
  source 1..990: mol_type = other DNA
atgaccagagacttcaagcccggcgacctgatcttcgccaagatgaagggctacccccactggcccgccagagtggacgaggtgcccgacggcgccgtgaagccccccaccaacaagctgcccatcttcttcttcggcacccacgagaccgccttcctgggccccaaggacatcttcccctacagcgagaacaaggagaagtacggcaagcccaacaagagaaagggcttcaacgagggcctgtgggagatcgacaacaaccccaaggtgaagttcagcagccagcaggccgccaccaagcagagcaacgccagcagcgacgtggaggtggaggagaaggagaccagcgtgagcaaggaggacaccgaccacgaggagaaggccagcaacgaggacgtgaccaaggccgtggacatcaccacccccaaggccgccagaagaggcagaaagagaaaggccgagaagcaggtggagaccgaggaggccggcgtggtgaccaccgccaccgccagcgtgaacctgaaggtgagccccaagagaggcagacccgccgccaccgaggtgaagatccccaagcccagaggcagacccaagatggtgaagcagccctgccccagcgagagcgacatcatcaccgaggaggacaagagcaagaagaagggccaggaggagaagcagcccaagaagcagcccaagaaggacgaggagggccagaaggaggaggacaagcccagaaaggagcccgacaagaaggagggcaagaaggaggtggagagcaagagaaagaacctggccaagaccggcgtgaccagcaccagcgacagcgaggaggagggcgacgaccaggagggcgagaagaagagaaagggcggcagaaacttccagaccgcccacagaagaaacatgctgaagggccagcacgagaaggaggccgccgacagaaagagaaagcaggaggagcagatggagaccgagcacttcgccctgtag

SEQ ID NO: 92592 - DNA, 1002 bp, synthetic construct
  misc_feature 1..1002: note = Description of Artificial Sequence: Synthetic coding sequence
  source 1..1002: mol_type = other DNA
atgaccagagacttcaagcccggcgacctgatcttcgccaagatgaagggctacccccactggcccgccagagtggacgaggtgcccgacggcgccgtgaagccccccaccaacaagctgcccatcttcttcttcggcacccacgagaccgccttcctgggccccaaggacatcttcccctacagcgagaacaaggagaagtacggcaagcccaacaagagaaagggcttcaacgagggcctgtgggagatcgacaacaaccccaaggtgaagttcagcagccagcaggccgccaccaagcagagcaacgccagcagcgacgtggaggtggaggagaaggagaccagcgtgagcaaggaggacaccgaccacgaggagaaggccagcaacgaggacgtgaccaaggccgtggacatcaccacccccaaggccgccagaagaggcagaaagagaaaggccgagaagcaggtggagaccgaggaggccggcgtggtgaccaccgccaccgccagcgtgaacctgaaggtgagccccaagagaggcagacccgccgccaccgaggtgaagatccccaagcccagaggcagacccaagatggtgaagcagccctgccccagcgagagcgacatcatcaccgaggaggacaagagcaagaagaagggccaggaggagaagcagcccaagaagcagcccaagaaggacgaggagggccagaaggaggaggacaagcccagaaaggagcccgacaagaaggagggcaagaaggaggtggagagcaagagaaagaacctggccaagaccggcgtgaccagcaccagcgacagcgaggaggagggcgacgaccaggagggcgagaagaagagaaagggcggcagaaacttccagaccgcccacagaagaaacatgctgaagggccagcacgagaaggaggccgccgacagaaagagaaagcaggaggagcagatggagaccgagcaccagaccacctgcaacctgcagtag

SEQ ID NO: 92593 - DNA, 1593 bp, synthetic construct
  misc_feature 1..1593: note = Description of Artificial Sequence: Synthetic coding sequence
  source 1..1593: mol_type = other DNA
atgaccagagacttcaagcccggcgacctgatcttcgccaagatgaagggctacccccactggcccgccagagtggacgaggtgcccgacggcgccgtgaagccccccaccaacaagctgcccatcttcttcttcggcacccacgagaccgccttcctgggccccaaggacatcttcccctacagcgagaacaaggagaagtacggcaagcccaacaagagaaagggcttcaacgagggcctgtgggagatcgacaacaaccccaaggtgaagttcagcagccagcaggccgccaccaagcagagcaacgccagcagcgacgtggaggtggaggagaaggagaccagcgtgagcaaggaggacaccgaccacgaggagaaggccagcaacgaggacgtgaccaaggccgtggacatcaccacccccaaggccgccagaagaggcagaaagagaaaggccgagaagcaggtggagaccgaggaggccggcgtggtgaccaccgccaccgccagcgtgaacctgaaggtgagccccaagagaggcagacccgccgccaccgaggtgaagatccccaagcccagaggcagacccaagatggtgaagcagccctgccccagcgagagcgacatcatcaccgaggaggacaagagcaagaagaagggccaggaggagaagcagcccaagaagcagcccaagaaggacgaggagggccagaaggaggaggacaagcccagaaaggagcccgacaagaaggagggcaagaaggaggtggagagcaagagaaagaacctggccaagaccggcgtgaccagcaccagcgacagcgaggaggagggcgacgaccaggagggcgagaagaagagaaagggcggcagaaacttccagaccgcccacagaagaaacatgctgaagggccagcacgagaaggaggccgccgacagaaagagaaagcaggaggagcagatggagaccgagcagcagaacaaggacgagggcaagaagcccgaggtgaagaaggtggagaagaagagagagaccagcatggacagcagactgcagagaatccacgccgagatcaagaacagcctgaagatcgacaacctggacgtgaacagatgcatcgaggccctggacgagctggccagcctgcaggtgaccatgcagcaggcccagaagcacaccgagatgatcaccaccctgaagaagatcagaagattcaaggtgagccaggtgatcatggagaagagcaccatgctgtacaacaagttcaagaacatgttcctggtgggcgagggcgacagcgtgatcacccaggtgctgaacaagagcctggccgagcagagacagcacgaggaggccaacaagaccaaggaccagggcaagaagggccccaacaagaagctggagaaggagcagaccggcagcaagaccctgaacggcggcagcgacgcccaggacggcaaccagccccagcacaacggcgagagcaacgaggacagcaaggacaaccacgaggccagcaccaagaagaagcccagcagcgaggagagagagaccgagatcagcctgaaggacagcaccctggacaactag

SEQ ID NO: 92594 - DNA, 1593 bp, synthetic construct; identical to SEQ ID NO: 92593
  misc_feature 1..1593: note = Description of Artificial Sequence: Synthetic coding sequence
  source 1..1593: mol_type = other DNA

SEQ ID NO: 92595 - DNA, 1002 bp, synthetic construct; identical to SEQ ID NO: 92592
  misc_feature 1..1002: note = Description of Artificial Sequence: Synthetic coding sequence
  source 1..1002: mol_type = other DNA

SEQ ID NO: 92596 - DNA, 1362 bp, synthetic construct
  misc_feature 1..1362: note = Description of Artificial Sequence: Synthetic coding sequence
  source 1..1362: mol_type = other DNA
atggcccacatcaccatcaaccagtacctgcagcaggtgtacgaggccatcgacagcagagacggcgccagctgcgccgagctggtgagcttcaagcacccccacgtggccaaccccagactgcagatggccagccccgaggagaagtgccagcaggtgctggagcccccctacgacgagatgttcgccgcccacctgagatgcacctacgccgtgggcaaccacgacttcatcgaggcctacaagtgccagaccgtgatcgtgcagtaccccctgagcttcatggccgccgtgccccacagaacccacgccgtggactacctgggcctggagaccagaaagcactgggccagctgcagcttcctgcagctggagagaaacgacagcgtgctggagcagaagctggtgagcgccctgagcctgggcaccagcttcctgagagccttccaggcccacaaggaggagaactgggccctgcccgtgatgtacgccgtggccctggacctgagagtgttcgccaacaacgccgaccagcagctggtgaagaagggcaagagcaaggtgggcgacatgctggagaaggccgccgagctgctgatgagctgcttcagagtgtgcgccagcgacaccagagccggcatcgaggacagcaagaagtggggcatgctgttcctggtgaaccagctgttcaagatctacttcaagatcaacaagctgcacctgtgcaagcccctgatcagagccatcgacagcagcaacctgaaggacgactacagcaccgcccagagagtgacctacaagtactacgtgggcagaaaggccatgttcgacagcgacttcaagcaggccgaggagtacctgagcttcgccttcgagcactgccacagaagcagccagaagaacaagagaatgatcctgatctacctgctgcccgtgaagatgctgctgggccacatgcccaccgtggagctgctgaagaagtaccacctgatgcagttcgccgaggtgaccagagccgtgagcgagggcaacctgctgctgctgcacgaggccctggccaagcacgaggccttcttcatcagatgcggcatcttcctgatcctggagaagctgaagatcatcacctacagaaacctgttcaagaaggtgtacctgctgctgaagacccaccagctgagcctggacgccttcctggtggccctgaagttcatgcaggtggaggacgtggacatcgacgaggtgcagtgcatcctggccaacctgatctacatgggccacgtgaagggctacatcagccaccagcaccagaagctggtggtgagcaagcagaaccccttcccccccctgagcaccgtgtgctag

SEQ ID NO: 92597 - DNA, 1200 bp, synthetic construct
  misc_feature 1..1200: note = Description of Artificial Sequence: Synthetic coding sequence
  source 1..1200: mol_type = other DNA
atgagactgaccgacgtggtgcagcagctggtgtacgaggccatcgacagcagagacggcgccagctgcgccgagctggtgagcttcaagcacccccacgtggccaaccccagactgcagatggccagccccgaggagaagtgccagcaggtgctggagcccccctacgacgagatgttcgccgcccacctgagatgcacctacgccgtgggcaaccacgacttcatcgaggcctacaagtgccagaccgtgatcgtgcagtacaccagcttcctgagagccttccaggcccacaaggaggagaactgggccctgcccgtgatgtacgccgtggccctggacctgagagtgttcgccaacaacgccgaccagcagctggtgaagaagggcaagagcaaggtgggcgacatgctggagaaggccgccgagctgctgatgagctgcttcagagtgtgcgccagcgacaccagagccggcatcgaggacagcaagaagtggggcatgctgttcctggtgaaccagctgttcaagatctacttcaagatcaacaagctgcacctgtgcaagcccctgatcagagccatcgacagcagcaacctgaaggacgactacagcaccgcccagagagtgacctacaagtactacgtgggcagaaaggccatgttcgacagcgacttcaagcaggccgaggagtacctgagcttcgccttcgagcactgccacagaagcagccagaagaacaagagaatgatcctgatctacctgctgcccgtgaagatgctgctgggccacatgcccaccgtggagctgctgaagaagtaccacctgatgcagttcgccgaggtgaccagagccgtgagcgagggcaacctgctgctgctgcacgaggccctggccaagcacgaggccttcttcatcagatgcggcatcttcctgatcctggagaagctgaagatcatcacctacagaaacctgttcaagaaggtgtacctgctgctgaagacccaccagctgagcctggacgccttcctggtggccctgaagttcatgcaggtggaggacgtggacatcgacgaggtgcagtgcatcctggccaacctgatctacatgggccacgtgaagggctacatcagccaccagcaccagaagctggtggtgagcaagcagaaccccttcccccccctgagcaccgtgtgctag

SEQ ID NO: 92598 - DNA, 1200 bp, synthetic construct
  misc_feature 1..1200: note = Description of Artificial Sequence: Synthetic coding sequence
  source 1..1200: mol_type = other DNA
atggcccacatcaccatcaaccagtacctgcagcaggtgtacgaggccatcgacagcagagacggcgccagctgcgccgagctggtgagcttcaagcacccccacgtggccaaccccagactgcagatggccagccccgaggagaagtgccagcaggtgctggagcccccctacgacgagatgttcgccgcccacctgagatgcacctacgccgtgggcaaccacgacttcatcgaggcctacaagtgccagaccgtgatcgtgcagagcttcctgagagccttccaggcccacaaggaggagaactgggccctgcccgtgatgtacgccgtggccctggacctgagagtgttcgccaacaacgccgaccagcagctggtgaagaagggcaagagcaaggtgggcgacatgctggagaaggccgccgagctgctgatgagctgcttcagagtgtgcgccagcgacaccagagccggcatcgaggacagcaagaagtggggcatgctgttcctggtgaaccagctgttcaagatctacttcaagatcaacaagctgcacctgtgcaagcccctgatcagagccatcgacagcagcaacctgaaggacgactacagcaccgcccagagagtgacctacaagtactacgtgggcagaaaggccatgttcgacagcgacttcaagcaggccgaggagtacctgagcttcgccttcgagcactgccacagaagcagccagaagaacaagagaatgatcctgatctacctgctgcccgtgaagatgctgctgggccacatgcccaccgtggagctgctgaagaagtaccacctgatgcagttcgccgaggtgaccagagccgtgagcgagggcaacctgctgctgctgcacgaggccctggccaagcacgaggccttcttcatcagatgcggcatcttcctgatcctggagaagctgaagatcatcacctacagaaacctgttcaagaaggtgtacctgctgctgaagacccaccagctgagcctggacgccttcctggtggccctgaagttcatgcaggtggaggacgtggacatcgacgaggtgcagtgcatcctggccaacctgatctacatgggccacgtgaagggctacatcagccaccagcaccagaagctggtggtgagcaagcagaaccccttcccccccctgagcaccgtgtgctag

SEQ ID NO: 92599 - DNA, 1131 bp, synthetic construct
  misc_feature 1..1131: note = Description of Artificial Sequence: Synthetic coding sequence
  source 1..1131: mol_type = other DNA
atggcccacatcaccatcaaccagtacctgcagcaggtgtacgaggccatcgacagcagagacggcgccagctgcgccgagctggtgagcttcaagcacccccacgtggccaaccccagactgcagatggccagccccgaggagaagtgccagcaggtgctggagcccccctacgacgagatgttcgccgcccacctgagatgcacctacgccgtgggcaaccacgacttcatcgaggcctacaagtgccagaccgtgatcgtgcagtaccccctgagcttcatggccgccgtggccgaccagcagctggtgaagaagggcaagagcaaggtgggcgacatgctggagaaggccgccgagctgctgatgagctgcttcagagtgtgcgccagcgacaccagagccggcatcgaggacagcaagaagtggggcatgctgttcctggtgaaccagctgttcaagatctacttcaagatcaacaagctgcacctgtgcaagcccctgatcagagccatcgacagcagcaacctgaaggacgactacagcaccgcccagagagtgacctacaagtactacgtgggcagaaaggccatgttcgacagcgacttcaagcaggccgaggagtacctgagcttcgccttcgagcactgccacagaagcagccagaagaacaagagaatgatcctgatctacctgctgcccgtgaagatgctgctgggccacatgcccaccgtggagctgctgaagaagtaccacctgatgcagttcgccgaggtgaccagagccgtgagcgagggcaacctgctgctgctgcacgaggccctggccaagcacgaggccttcttcatcagatgcggcatcttcctgatcctggagaagctgaagatcatcacctacagaaacctgttcaagaaggtgtacctgctgctgaagacccaccagctgagcctggacgccttcctggtggccctgaagttcatgcaggtggaggacgtggacatcgacgaggtgcagtgcatcctggccaacctgatctacatgggccacgtgaagggctacatcagccaccagcaccagaagctggtggtgagcaagcagaaccccttcccccccctgagcaccgtgtgctag

SEQ ID NO: 92600 - DNA, 1200 bp, synthetic construct; identical to SEQ ID NO: 92598
  misc_feature 1..1200: note = Description of Artificial Sequence: Synthetic coding sequence
  source 1..1200: mol_type = other DNA

SEQ ID NO: 92601 - DNA, 1200 bp, synthetic construct; identical to SEQ ID NO: 92598
  misc_feature 1..1200: note = Description of Artificial Sequence: Synthetic coding sequence
  source 1..1200: mol_type = other DNA

SEQ ID NO: 92602 - DNA, 1194 bp, synthetic construct
  misc_feature 1..1194: note = Description of Artificial Sequence: Synthetic coding sequence
  source 1..1194: mol_type = other DNA
atgagactgaccgacgtggtgcagcagctggtgtacgaggccatcgacagcagagacggcgccagctgcgccgagctggtgagcttcaagcacccccacgtggccaaccccagactgcagatggccagccccgaggagaagtgccagcaggtgctggagcccccctacgacgagatgttcgccgcccacctgagatgcacctacgccgtgggcaaccacgacttcatcgaggcctacaagtgccagaccgtgatcgtgcagagcttcctgagagccttccaggcccacaaggaggagaactgggccctgcccgtgatgtacgccgtggccctggacctgagagtgttcgccaacaacgccgaccagcagctggtgaagaagggcaagagcaaggtgggcgacatgctggagaaggccgccgagctgctgatgagctgcttcagagtgtgcgccagcgacaccagagccggcatcgaggacagcaagaagtggggcatgctgttcctggtgaaccagctgttcaagatctacttcaagatcaacaagctgcacctgtgcaagcccctgatcagagccatcgacagcagcaacctgaaggacgactacagcaccgcccagagagtgacctacaagtactacgtgggcagaaaggccatgttcgacagcgacttcaagcaggccgaggagtacctgagcttcgccttcgagcactgccacagaagcagccagaagaacaagagaatgatcctgatctacctgctgcccgtgaagatgctgctgggccacatgcccaccgtggagctgctgaagaagtaccacctgatgcagttcgccgaggtgaccagagccgtgagcgagggcaacctgctgctgctgcacgaggccctggccaagcacgaggccttcttcatcagatgcggcatcttcctgatcctggagaagctgaagatcatcacctacagaaacctgttcaagaaggtgtacctgctgctgaagacccaccagctgagcctggacgccttcctggtggccctgaagttcatgcaggtggaggacgtggacatcgacgaggtgcagtgcatcctggccaacctgatctacatgggccacgtgaagggctacatcagccaccagcaccagaagctggtggtgagcaagcagaaccccttcccccccctgagcaccgtgtgctag

SEQ ID NO: 92603 - DNA, 546 bp, synthetic construct
  misc_feature 1..546: note = Description of Artificial Sequence: Synthetic coding sequence
  source 1..546: mol_type = other DNA
atgcccaagggcggcagaaagggcggccacaagggcagagccagacagtacaccagccccgaggagatcgacgcccagctgcaggccgagaagcagaaggccagagaggaggaggagcagaaggagggcggcgacggcgccgccggcgaccccaagaaggagaagaagagcctggacagcgacgagagcgaggacgaggaggacgactaccagcagaagagaaagggcgtggagggcctgatcgacatcgagaaccccaacagagtggcccagaccaccaagaaggtgacccagctggacctggacggccccaaggagctgagcagaagagagagagaggagatcgagaagcagaaggccaaggagagatacatgaagatgcacctggccggcaagaccgagcaggccaaggccgacctggccagactggccatcatcagaaagcagagagaggaggccgccagaaagaaggaggaggagagaaaggccaaggacgacgccaccctgagcggcaagagaatgcagagcctgagcctgaacaagtag

SEQ ID NO: 92604 - DNA, 1026 bp, synthetic construct
  misc_feature 1..1026: note = Description of Artificial Sequence: Synthetic coding sequence
  source 1..1026: mol_type = other DNA
atggtgagcagccagcccaagtacgacctgatcagagaggtgggcagaggcagctacggcgtggtgtacgaggccgtgatcagaaagaccagcgccagagtggccgtgaagaagatcagatgccacgcccccgagaacgtggagctggccctgagagagttctgggccctgagcagcatcaagagccagcaccccaacgtgatccacctggaggagtgcatcctgcagaaggacggcatggtgcagaagatgagccacggcagcaacagcagcctgtacctgcagctggtggagaccagcctgaagggcgagatcgccttcgaccccagaagcgcctactacctgtggttcgtgatggacttctgcgacggcggcgacatgaacgagtacctgctgagcagaaagcccaacagaaagaccaacaccagcttcatgctgcagctgagcagcgccctggccttcctgcacaagaaccagatcatccacagagacctgaagcccgacaacatcctgatcagccagaccagactggacaccagcgacctggagcccaccctgaaggtggccgacttcggcctgagcaaggtgtgcagcgccagcggccagaaccccgaggagcccgtgagcgtgaacaagtgcttcctgagcaccgcctgcggcaccgacttctacatggcccccgaggtgtgggagggccactacaccgccaaggccgacatcttcgccctgggcatcatcatctgggccatgctggagagaatcaccttcatcgacaccgagaccaagaaggagctgctgggcagctacgtgaagcagggcaccgagatcgtgcccgtgggcgaggccctgctggagaaccccaagatggagctgctgatccccgtgaagaagaagagcatgaacggcagaatgaagcagctgatcaaggagatgctggccgccaacccccaggacagacccgacgccttcgagctggagctgagactggtgcagatcgccttcaaggacagcagctgggagacctag

SEQ ID NO: 92605 - DNA, 1026 bp, synthetic construct; identical to SEQ ID NO: 92604
  misc_feature 1..1026: note = Description of Artificial Sequence: Synthetic coding sequence
  source 1..1026: mol_type = other DNA

SEQ ID NO: 92606 - DNA, 576 bp, synthetic construct
  misc_feature 1..576: note = Description of Artificial Sequence: Synthetic coding sequence
  source 1..576: mol_type = other DNA
atggtgagcagccagcccaagtacgacctgatcagagaggtgggcagaggcagctacggcgtggtgtacgaggccgtgatcagaaagaccagcgccagagtggccgtgaagaagatcagatgccacgcccccgagaacgtggagctggccctgagagagttctgggccctgagcagcatcaagagccagcaccccaacgtgatccacctggaggagtgcatcctgcagaaggacggcatggtgcagaagatgagccacggcagcaacagcagcctgtacctgcagctggtggagaccagcctgaagggcgagatcgccttcgaccccagaagcgcctactacctgtggttcgtgatggacttctgcgacggcggcgacatgaacgagtacctgctgagcagaaagcccaacagaaagaccaacaccagcttcatgctgcagctgagcagcgccctggccttcctgcacaagaaccagatcatccacagagacctgaagcccgacaacatcctgatcagccagaccagactggacaccagcgacctggagcccaccctgaaggtggccgacttctag

SEQ ID NO: 92607 - DNA, 4014 bp, synthetic construct
  misc_feature 1..4014: note = Description of Artificial Sequence: Synthetic coding sequence
  source 1..4014: mol_type = other DNA
atggacttcaccgcccagcccaagcccgccaccgccctgtgcggcgtggtgagcgccgacggcaagatcgcctacccccccggcgtgaaggagatcaccgacaagatcaccaccgacgagatgatcaagagactgaagatggtggtgaagaccttcatggacatggaccaggacagcgaggacgagaagcagcagtacctgcccctggccctgcacctggccagcgagttcttcctgagaaaccccaacaaggacgtgagactgctggtggcctgctgcctggccgacatcttcagaatctacgcccccgaggccccctacaccagccacgacaagctgaaggacatcttcctgttcatcaccagacagctgaagggcctggaggacaccaagagcccccagttcaacagatacttctacctgctggagaacctggcctgggtgaagagctacaacatctgcttcgagctggaggactgcaacgagatcttcatccagctgttcagaaccctgttcagcgtgatcaacaacagccacaacaagaaggtgcagatgcacatgctggacctgatgagcagcatcatcatggagggcgacggcgtgacccaggagctgctggacagcatcctgatcaacctgatccccgcccacaagaacctgaacaagcagagcttcgacctggccaaggtgctgctgaagagaaccgtgcagaccatcgaggcctgcatcgccaacttcttcaaccaggtgctggtgctgggcagaagcagcgtgagcgacctgagcgagcacgtgttcgacctgatccaggagctgttcgccatcgacccccacctgctgctgagcgtgatgccccagctggagttcaagctgaagagcaacgacggcgaggagagactggccgtggtgagactgctggccaagctgttcggcagcaaggacagcgacctggccacccagaacagacccctgtggcagtgcttcctgggcagattcaacgacatccacgtgcccgtgagactggagagcgtgaagttcgccagccactgcctgatgaaccaccccgacctggccaaggacctgaccgagtacctgaaggtgagaagccacgaccccgaggaggccatcagacacgacgtgatcgtgaccatcatcaccgccgccaagagagacctggccctggtgaacgaccagctgctgggcttcgtgagagagagaaccctggacaagagatggagagtgagaaaggaggccatgatgggcctggcccagctgtacaagaagtactgcctgcacggcgaggccggcaaggaggccgccgagaaggtgagctggatcaaggacaagctgctgcacatctactaccagaacagcatcgacgacaagctgctggtggagaagatcttcgcccagtacctggtgccccacaacctggagaccgaggagagaatgaagtgcctgtactacctgtacgccagcctggaccccaacgccgtgaaggccctgaacgagatgtggaagtgccagaacatgctgagaagccacgtgagagagctgctggacctgcacaagcagcccaccagcgaggccaactgcagcgccatgttcggcaagctgatgaccatcgccaagaacctgcccgaccccggcaaggcccaggacttcgtgaagaagttcaaccaggtgctgggcgacgacgagaagctgagaagccagctggagctgctgatcagccccacctgcagctgcaagcaggccgacatctgcgtgagagagatcgccagaaagctggccaaccccaagcagcccaccaaccccttcctggagatggtgaagttcctgctggagagaatcgcccccgtgcacatcgacagcgaggccatcagcgccctggtgaagctgatgaacaagagcatcgagggcaccgccgacgacgaggaggagggcgtgagccccgacaccgccatcagaagcggcctggagctgctgaaggtgctgagcttcacccaccccaccagcttccacagcgccgagacctacgagagcctgctgcagtgcctgagaatggaggacgacaaggtggccgaggccgccatccagatcttcagaaacaccggccacaagatcgagaccgacctgccccagatcagaagcaccctgatccccatcctgcaccagaaggccaagagaggcaccccccaccaggccaagcaggccgtgcactgcatccacgccatcttcaccaacaaggaggtgcagctggcccagatcttcgagcccctgagcagaagcctgaacgccgacgtgcccgagcagctgatcacccccctggtgagcctgggccacatcagcatgctggcccccgaccagttcgccagccccatgaagagcgtggtggccaacttcatcgtgaaggacctgctgatgaacgacagaagcaccggcgagaagaacggcaagctgtggagccccgacgaggaggtgagccccgaggtgctggccaaggtgcaggccatcaagctgctggtgagatggctgctgggcatgaagaacaaccagagcaagagcgccaacagcaccctgagactgctgagcgccatgctggtgagcgagggcgacctgaccgagcagaagagaatcagcaagagcgacatgagcagactgagactggccgccggcagcgccatcatgaagctggcccaggagccctgctaccacgagatcatcacccccgagcagttccagctgtgcgccctggtgatcaacgacgagtgctaccaggtgagacagatcttcgcccagaagctgcacaaggccctggtgaagctgctgctgcccctggagtacatggccatcttcgccctgtgcgccaaggaccccgtgaaggagagaagagcccacgccagacagtgcctgctgaagaacatcagcatcagaagagagtacatcaagcagaaccccatggccaccgagaagctgctgagcctgctgcccgagtacgtggtgccctacatgatccacctgctggcccacgaccccgacttcaccagaagccaggacgtggaccagctgagagacatcaaggagtgcctgtggttcatgctggaggtgctgatgaccaagaacgagaacaacagccacgccttcatgaagaagatggccgagaacatcaagctgaccagagacgcccagagccccgacgagagcaagaccaacgagaagctgtacaccgtgtgcgacgtggccctgtgcgtgatcaacagcaagagcgccctgtgcaacgccgacagccccaaggaccccgtgctgcccatgaagttcttcacccagcccgagaaggacttctgcaacgacaagagctacatcagcgaggagaccagagtgctgctgctgaccggcaagcccaagcccgccggcgtgctgggcgccgtgaacaagcccctgagcgccaccggcagaaagccctacgtgagaagcaccggcaccgagaccggcagcaacatcaacgtgaacagcgagctgaaccccagcaccggcaacagaagcagagagcagagcagcgaggccgccgagaccggcgtgagcgagaacgaggagaaccccgtgagaatcatcagcgtgacccccgtgaagaacatcgaccccgtgaagaacaaggagatcaacagcgaccaggccacccagggcaacatcagcagcgacagaggcaagaagagaaccgtgaccgccgccggcgccgagaacatccagcagaagaccgacgagaaggtggacgagagcggcccccccgcccccagcaagcccagaagaggcagaagacccaagagcgagagccagggcaacgccaccaagaacgacgacctgaacaagcccatcaacaagggcagaaagagagccgccgtgggccaggagagccccggcggcctggaggccggcaacgccaaggcccccaagctgcaggacctggccaagaaggccgcccccgccgagagacagatcgacctgcagagatag

SEQ ID NO: 92608 - DNA, 1803 bp, synthetic construct
  misc_feature 1..1803: note = Description of Artificial Sequence: Synthetic coding sequence
  source 1..1803: mol_type = other DNA
atggacttcaccgcccagcccaagcccgccaccgccctgtgcggcgtggtgagcgccgacggcaagatcgcctacccccccggcgtgaaggagatcaccgacaagatcaccaccgacgagatgatcaagagactgaagatggtggtgaagaccttcatggacatggaccaggacagcgaggacgagaagcagcagtacctgcccctggccctgcacctggccagcgagttcttcctgagaaaccccaacaaggacgtgagactgctggtggcctgctgcctggccgacatcttcagaatctacgcccccgaggccccctacaccagccacgacaagctgaaggacatcttcctgttcatcaccagacagctgaagggcctggaggacaccaagagcccccagttcaacagatacttctacctgctggagaacctggcctgggtgaagagctacaacatctgcttcgagctggaggactgcaacgagatcttcatccagctgttcagaaccctgttcagcgtgatcaacaacagccacaacaagaaggtgcagatgcacatgctggacctgatgagcagcatcatcatggagggcgacggcgtgacccaggagctgctggacagcatcctgatcaacctgatccccgcccacaagaacctgaacaagcagagcttcgacctggccaaggtgctgctgaagagaaccgtgcagaccatcgaggcctgcatcgccaacttcttcaaccaggtgctggtgctgggcagaagcagcgtgagcgacctgagcgagcacgtgttcgacctgatccaggagctgttcgccatcgacccccacctgctgctgagcgtgatgccccagctggagttcaagctgaagagcaacgacggcgaggagagactggccgtggtgagactgctggccaagctgttcggcagcaaggacagcgacctggccacccagaacagacccctgtggcagtgcttcctgggcagattcaacgacatccacgtgcccgtgagactggagagcgtgaagttcgccagccactgcctgatgaaccaccccgacctggccaaggacctgaccgagtacctgaaggtgagaagccacgaccccgaggaggccatcagacacgacgtgatcgtgaccatcatcaccgccgccaagagagacctggccctggtgaacgaccagctgctgggcttcgtgagagagagaaccctggacaagagatggagagtgagaaaggaggccatgatgggcctggcccagctgtacaagaagtactgcctgcacggcgaggccggcaaggaggccgccgagaaggtgagctggatcaaggacaagctgctgcacatctactaccagaacagcatcgacgacaagctgctggtggagaagatcttcgcccagtacctggtgccccacaacctggagaccgaggagagaatgaagtgcctgtactacctgtacgccagcctggaccccaacgccgtgaaggccctgaacgagatgtggaagtgccagaacatgctgagaagccacgtgagagagctgctggacctgcacaagcagcccaccagcgaggccaactgcagcgccatgttcggcaagctgatgaccatcgccaagaacctgcccgaccccggcaaggcccaggacttcgtgaagaagttcaaccaggtgctgggcgacgacgagaagctgagaagccagctggagctgctgatcagccccacctgcagctgcaagcaggccgacatctgcgtggtgagcaagagctacttcaccctgttcctgtag

SEQ ID NO: 92609 - DNA, 990 bp, synthetic construct
  misc_feature 1..990: note = Description of Artificial Sequence: Synthetic coding sequence
  source 1..990: mol_type = other DNA
atgaccacccagcagatcgacctgcagggccccggcccctggggcttcagactggtgggcggcaaggacttcgagcagcccctggccatcagcagagtgacccccggcagcaaggccgccctggccaacctgtgcatcggcgacgtgatcaccgccatcgacggcgagaacaccagcaacatgacccacctggaggcccagaacagaatcaagggctgcaccgacaacctgaccctgaccgtggccagaagcgagcacaaggtgtggagccccctggtgaccgaggagggcaagagacacccctacaagatgaacctggccagcgagccccaggaggtgctgcacatcggcagcgcccacaacagaagcgccatgcccttcaccgccagccccgccagcagcaccaccgccagagtgatcaccaaccagtacaacaaccccgccggcctgtacagcagcgagaacatcagcaacttcaacaacgccctggagagcaagaccgccgccagcggcgtggaggccaacagcagacccctggaccacgcccagccccccagcagcctggtgatcgacaaggagagcgaggtgtacaagatgctgcaggagaagcaggagctgaacgagccccccaagcagagcaccagcttcctggtgctgcaggagatcctggagagcgaggagaagggcgaccccaacaagcccagcggcttcagaagcgtgaaggcccccgtgaccaaggtggccgccagcatcggcaacgcccagaagctgcccatgtgcgacaagtgcggcaccggcatcgtgggcgtgttcgtgaagctgagagacagacacagacaccccgagtgctacgtgtgcaccgactgcggcaccaacctgaagcagaagggccacttcttcgtggaggaccagatctactgcgagaagcacgccagagagagagtgaccccccccgagggctacgaggtggtgaccgtgttccccaagtag

SEQ ID NO: 92610 - DNA, 1101 bp, synthetic construct
  misc_feature 1..1101: note = Description of Artificial Sequence: Synthetic coding sequence
  source 1..1101: mol_type = other DNA
atggccctgaccgtggacgtggccggccccgccccctggggcttcagaatcaccggcggcagagacttccacacccccatcatggtgaccaaggtggccgagagaggcaaggccaaggacgccgacctgagacccggcgacatcatcgtggccatcaacggcgagagcgccgagggcatgctgcacgccgaggcccagagcaagatcagacagagccccagccccctgagactgcagctggacagaagccaggccaccagccccggccagaccaacggcgacagcagcctggaggtgctggccaccagattccagggcagcgtgagaacctacaccgagagccagagcagcctgagaagcagctacagcagccccaccagcctgagccccagagccggcagccccttcagccccccccccagcagcagcagcctgaccggcgaggccgccatcagcagaagcttccagagcctggcctgcagccccggcctgcccgccgccgacagactgagctacagcggcagacccggcagcagacaggccggcctgggcagagccggcgacagcgccgtgctggtgctgccccccagccccggccccagaagcagcagacccagcatggacagcgagggcggcagcctgctgctggacgaggacagcgaggtgttcaagatgctgcaggagaacagagagggcagagccgcccccagacagagcagcagcttcagactgctgcaggaggccctggaggccgaggagagaggcggcacccccgccttcctgcccagcagcctgagcccccagagcagcctgcccgccagcagagccctggccaccccccccaagctgcacacctgcgagaagtgcagcaccagcatcgccaaccaggccgtgagaatccaggagggcagatacagacaccccggctgctacacctgcgccgactgcggcctgaacctgaagatgagaggccacttctgggaggacgcctgcgccatggagggcatgagactgagcctggaggccctggagggcatggtggagggcgccaagagaagagacagaagaaagaccagaagacccatccagcccagctggtag

SEQ ID NO: 92611 - DNA, 1809 bp, synthetic construct
  misc_feature 1..1809: note = Description of Artificial Sequence: Synthetic coding sequence
  source 1..1809: mol_type = other DNA
atgagaggcggcagagccagacccgcctgggagagcttcatgggcctgccccccagaagcagcgccaagtggggcgccggccagagcctggacagactgtgctgcgcccccggcagcagaggcctggccggcgcccccggcagaatgagagccccccccgccggcagaagccagcccgccggcggccccggcgacagcctgccccacccccccggcggcctgggccccggcggcagcgcctgggccagaagagccgaggccgccgccagcagagccagaggcggcggcagaggcggccccggcatcacctgggccgaggccggccccggcgcccccggcggcctgagccccgagagcggcagaagacagagagagagatggagactgcccgccttcccccccagcagagcctgggcccccagcagaaccggcgagagacagcccggcgagagagcccacctgagactgagcgccagacccgccctgcccggcgccggcctgctgagcgcccccctgagcgccagaaaccccggcctggtgagaggccccgccccctggagcctggccagcgccggcgccccccccagagccgccctgagccccgccggcgccctgctgctgcagccccccgccagaagagtgctgtgccccagaagcgagggcggcagcagaaccggcagagccggccccagcggctgggccccccccagaggcgccagaagcgccgagagcaccgacagactgaagggcatggccctgaccgtggacgtggccggccccgccccctggggcttcagaatcaccggcggcagagacttccacacccccatcatggtgaccaaggtggccgagagaggcaaggccaaggacgccgacctgagacccggcgacatcatcgtggccatcaacggcgagagcgccgagggcatgctgcacgccgaggcccagagcaagatcagacagagccccagccccctgagactgcagctggacagaagccaggccaccagccccggccagaccaacggcgacagcagcctggaggtgctggccaccagattccagggcagcgtgagaacctacaccgagagccagagcagcctgagaagcagctacagcagccccaccagcctgagccccagagccggcagccccttcagccccccccccagcagcagcagcctgaccggcgaggccgccatcagcagaagcttccagagcctggcctgcagccccggcctgcccgccgccgacagactgagctacagcggcagacccggcagcagacaggccggcctgggcagagccggcgacagcgccgtgctggtgctgccccccagccccggccccagaagcagcagacccagcatggacagcgagggcggcagcctgctgctggacgaggacagcgaggtgttcaagatgctgcaggagaacagagagggcagagccgcccccagacagagcagcagcttcagactgctgcaggaggccctggaggccgaggagagaggcggcacccccgccttcctgcccagcagcctgagcccccagagcagcctgcccgccagcagagccctggccaccccccccaagctgcacacctgcgagaagtgcagcaccagcatcgccaaccaggccgtgagaatccaggagggcagatacagacaccccggctgctacacctgcgccgactgcggcctgaacctgaagatgagaggccacttctgggtgggcgacgagctgtactgcgagaagcacgccagacagagatacagcgcccccgccaccctgagcagcagagcctag

SEQ ID NO: 92612 - DNA, 837 bp, synthetic construct
  misc_feature 1..837: note = Description of Artificial Sequence: Synthetic coding sequence
  source 1..837: mol_type = other DNA
atggccctgaccgtggacgtggccggccccgccccctggggcttcagaatcaccggcggcagagacttccacacccccatcatggtgaccaaggtggccgagagaggcaaggccaaggacgccgacctgagacccggcgacatcatcgtggccatcaacggcgagagcgccgagggcatgctgcacgccgaggcccagagcaagatcagacagagccccagccccctgagactgcagctggacagaagccaggccaccagccccggccagaccaacggcgacagcagcctggaggtgctggccaccagattccagggcagcgtgagaacctacaccgagagccagagcagcctgagaagcagctacagcagccccaccagcctgagccccagagccggcagccccttcagccccccccccagcagcagcagcctgaccggcgaggccgccatcagcagaagcttccagagcctggcctgcagccccggcctgcccgccgccgacagactgagctacagcggcagacccggcagcagacaggccggcctgggcagagccggcgacagcgccgtgctggtgctgccccccagccccggccccagaagcagcagacccagcatggacagcgagggcggcagcctgctgctggacgaggacagcgaggtgttcaagatgctgcaggagaacagagagggcagagccgcccccagacagagcagcagcttcagactgctgcaggaggccctggaggccgaggagagaggcaccagactgtgcgccagcagaagagccggcaccgccacccccgccgccacccccgtgcccaccgtgggctag

SEQ ID NO: 92613 - DNA, 675 bp, synthetic construct
  misc_feature 1..675: note = Description of Artificial Sequence: Synthetic coding sequence
  source 1..675: mol_type = other DNA
atggccctgaccgtggacgtggccggccccgccccctggggcttcagaatcaccggcggcagagacttccacacccccatcatggtgaccaaggtggccgagagaggcaaggccaaggacgccgacctgagacccggcgacatcatcgtggccatcaacggcgagagcgccgagggcatgctgcacgccgaggcccagagcaagatcagacagagccccagccccctgagactgcagctggacagaagccaggccaccagccccggccagaccaacggcgacagcagcctggaggtgctggccaccagattccagggcagcgtgagaacctacaccgagagccagagcagcctgagaagcagctacagcagccccaccagcctgagccccagagccggcagccccttcagccccccccccagcagcagcagcctgaccggcgaggccgccatcagcagaagcagacccagacccagatggagactgggcggcgccggcgccgccgccttccccggccccagcttcctgcaggcccagcacggcctgggcagaggcaagcccccccccggcagaggcctgggcagcctgcaggacgccgccggcaagagcagaggcaccggcggcccccccaccgtgcagctgctgagcgccctggccggcagccccggcggctag

SEQ ID NO: 92614 - DNA, 1059 bp, synthetic construct
  misc_feature 1..1059: note = Description of Artificial Sequence: Synthetic coding sequence
  source 1..1059: mol_type = other DNA
atggccctgaccgtggacgtggccggccccgccccctggggcttcagaatcaccggcggcagagacttccacacccccatcatggtgaccaaggtggccgagagaggcaaggccaaggacgccgacctgagacccggcgacatcatcgtggccatcaacggcgagagcgccgagggcatgctgcacgccgaggcccagagcaagatcagacagagccccagccccctgagactgcagctggacagaagccaggccaccagccccggccagaccaacggcgacagcagcctggaggtgctggccaccagattccagggcagcgtgagaacctacaccgagagccagagcagcctgagaagcagctacagcagccccaccagcctgagccccagagccggcagccccttcagccccccccccagcagcagcagcctgaccggcgaggccgccatcagcagaagcttccagagcctggcctgcagccccggcctgcccgccgccgacagactgagctacagcggcagacccggcagcagacaggccggcctgggcagagccggcgacagcgccgtgctggtgctgccccccagccccggccccagaagcagcagacccagcatggacagcgagggcggcagcctgctgctggacgaggacagcgaggtgttcaagatgctgcaggagaacagagagggcagagccgcccccagacagagcagcagcttcagactgctgcaggaggccctggaggccgaggagagaggcggcacccccgccttcctgcccagcagcctgagcccccagagcagcctgcccgccagcagagccctggccaccccccccaagctgcacacctgcgagaagtgcagcaccagcatcgccaaccaggccgtgagaatccaggagggcagatacagacaccccggctgctacacctgcgccgactgcggcctgaacctgaagatgagaggccacttctgggtgggcgacgagctgtactgcgagaagcacgccagacagagatacagcgcccccgccaccctgagcagcagagcctag

SEQ ID NO: 92615 - DNA, 1059 bp, synthetic construct; identical to SEQ ID NO: 92614
  misc_feature 1..1059: note = Description of Artificial Sequence: Synthetic coding sequence
  source 1..1059: mol_type = other DNA

SEQ ID NO: 92616 - DNA, 837 bp, synthetic construct; identical to SEQ ID NO: 92612
  misc_feature 1..837: note = Description of Artificial Sequence: Synthetic coding sequence
  source 1..837: mol_type = other DNA

SEQ ID NO: 92617 - DNA, 1059 bp, synthetic construct; identical to SEQ ID NO: 92614
  misc_feature 1..1059: note = Description of Artificial Sequence: Synthetic coding sequence
  source 1..1059: mol_type = other DNA

SEQ ID NO: 92618 - DNA, 1560 bp, synthetic construct
  misc_feature 1..1560: note = Description of Artificial Sequence: Synthetic coding sequence
  source 1..1560: mol_type = other DNA
atgaccagcaccttcaaccccagagagtgcaagctgagcaagcaggagggccagaactacggcttcttcctgagaatcgagaaggacaccgagggccacctggtgagagtggtggagaagtgcagccccgccgagaaggccggcctgcaggacggcgacagagtgctgagaatcaacggcgtgttcgtggacaaggaggagcacatgcaggtggtggacctggtgagaaagagcggcaacagcgtgaccctgctggtgctggacggcgacagctacgagaaggccgtgaagaccagagtggacctgaaggagctgggccagagccagaaggagcagggcctgagcgacaacatcctgagccccgtgatgaacggcggcgtgcagacctggacccagcccagactgtgctacctggtgaaggagggcggcagctacggcttcagcctgaagaccgtgcagggcaagaagggcgtgtacatgaccgacatcaccccccagggcgtggccatgagagccggcgtgctggccgacgaccacctgatcgaggtgaacggcgagaacgtggaggacgccagccacgaggaggtggtggagaaggtgaagaagagcggcagcagagtgatgttcctgctggtggacaaggagaccgacaagagacacgtggagcagaagatccagttcaagagagagaccgccagcctgaagctgctgccccaccagcccagaatcgtggagatgaagaagggcagcaacggctacggcttctacctgagagccggcagcgagcagaagggccagatcatcaaggacatcgacagcggcagccccgccgaggaggccggcctgaagaacaacgacctggtggtggccgtgaacggcgagagcgtggagaccctggaccacgacagcgtggtggagatgatcagaaagggcggcgaccagaccagcctgctggtggtggacaaggagaccgacaacatgtacagactggcccacttcagccccttcctgtactaccagagccaggagctgcccaacggcagcgtgaaggaggcccccgcccccacccccaccagcctggaggtgagcagcccccccgacaccaccgaggaggtggaccacaagcccaagctgtgcagactggccaagggcgagaacggctacggcttccacctgaacgccatcagaggcctgcccggcagcttcatcaaggaggtgcagaagggcggccccgccgacctggccggcctggaggacgaggacgtgatcatcgaggtgaacggcgtgaacgtgctggacgagccctacgagaaggtggtggacagaatccagagcagcggcaagaacgtgaccctgctggtgtgcggcaagaaggcctacgactacttccaggccaagaagatccccatcgtgagcagcctggccgaccccctggacaccccccccgacagcaaggagggcatcgtggtggagagcaaccacgacagccacatggccaaggagagagcccacagcaccgccagccacagcagcagcaacagcgaggacaccgagatgtag

SEQ ID NO: 92619 - DNA, 1560 bp, synthetic construct; identical to SEQ ID NO: 92618
  misc_feature 1..1560: note = Description of Artificial Sequence: Synthetic coding sequence
  source 1..1560: mol_type = other DNA

SEQ ID NO: 92620 - DNA, 795 bp, synthetic construct
  misc_feature 1..795: note = Description of Artificial Sequence: Synthetic coding sequence
  source 1..795: mol_type = other DNA
atgaccagcaccttcaaccccagagagtgcaagctgagcaagcaggagggccagaactacggcttcttcctgagaatcgagaaggacaccgagggccacctggtgagagtggtggagaagtgcagccccgccgagaaggccggcctgcaggacggcgacagagtgctgagaatcaacggcgtgttcgtggacaaggaggagcacatgcaggtggtggacctggtgagaaagagcggcaacagcgtgaccctgctggtgctggacggcgacagctacgagaaggccgtgaagaccagagtggacctgaaggagctgggccagagccagaaggagcagggcctgagcgacaacatcctgagccccgtgatgaacggcggcgtgcagacctggacccagcccagactgtgctacctggtgaaggagggcggcagctacggcttcagcctgaagaccgtgcagggcaagaagggcgtgtacatgaccgacatcaccccccagggcgtggccatgagagccggcgtgctggccgacgaccacctgatcgaggtgaacggcgagaacgtggaggacgccagccacgaggaggtggtggagaaggtgaagaagagcggcagcagagtgatgttcctgctggtggacaaggagaccgacaagagacacgtggagcagaagatccagttcaagagagagaccgccagcctgaagctgctgccccaccagcccagaatcgtggagatgaagaagggcagcaacggctacggcttctacctgagagccggcagcgagcagaagtag

SEQ ID NO: 92621 - DNA, 1227 bp, synthetic construct
  misc_feature 1..1227: note = Description of Artificial Sequence: Synthetic coding sequence
  source 1..1227: mol_type = other DNA
atgaccagcaccttcaaccccagagagtgcaagctgagcaagcaggagggccagaactacggcttcttcctgagaatcgagaaggacaccgagggccacctggtgagagtggtggagaagtgcagccccgccgagaaggccggcctgcaggacggcgacagagtgctgagaatcaacggcgtgttcgtggacaaggaggagcacatgcaggtggtggacctggtgagaaagagcggcaacagcgtgaccctgctggtgctggacggcgacagctacgagaaggccgtgaagaccagagtggacctgaaggagctgggccagagccagaaggagcagggcctgagcgacaacatcctgagccccgtgatgaacggcggcgtgcagacctggacccagcccagactgtgctacctggtgaaggagggcggcagctacggcttcagcctgaagaccgtgcagggccagatcatcaaggacatcgacagcggcagccccgccgaggaggccggcctgaagaacaacgacctggtggtggccgtgaacggcgagagcgtggagaccctggaccacgacagcgtggtggagatgatcagaaagggcggcgaccagaccagcctgctggtggtggacaaggagaccgacaacatgtacagactggcccacttcagccccttcctgtactaccagagccaggagctgcccaacggcagcgtgaaggaggcccccgcccccacccccaccagcctggaggtgagcagcccccccgacaccaccgaggaggtggaccacaagcccaagctgtgcagactggccaagggcgagaacggctacggcttccacctgaacgccatcagaggcctgcccggcagcttcatcaaggaggtgcagaagggcggccccgccgacctggccggcctggaggacgaggacgtgatcatcgaggtgaacggcgtgaacgtgctggacgagccctacgagaaggtggtggacagaatccagagcagcggcaagaacgtgaccctgctggtgtgcggcaagaaggcctacgactacttccaggccaagaagatccccatcgtgagcagcctggccgaccccctggacaccccccccgacagcaaggagggcatcgtggtggagagcaaccacgacagccacatggccaaggagagagcccacagcaccgccagccacagcagcagcaacagcgaggacaccgagatgtag

SEQ ID NO: 92622 - DNA, 423 bp, synthetic construct
  misc_feature 1..423: note = Description of Artificial Sequence: Synthetic coding sequence
  source 1..423: mol_type = other DNA
atggacagcagaatcccctacgacgactaccccgtggtgttcctgcccgcctacgagaacccccccgcctggatccccccccacgagagagtgcaccaccccgactacaacaacgagctgacccagttcctgcccagaaccatcaccctgaagaagccccccggcgcccagctgggcttcaacatcagaggcggcaaggccagccagctgggcatcttcatcagcaaggtgatccccgacagcgacgcccacagagccggcctgcaggagggcgaccaggtgctggccgtgaacgacgtggacttccaggacatcgagcacagcaaggccgtggagatcctgaagaccgccagagagatcagcatgagagtgagattcttcccctacaactaccacagacagaaggagagaaccgtgcactag

SEQ ID NO: 92623 - DNA, 423 bp, synthetic construct; identical to SEQ ID NO: 92622
  misc_feature 1..423: note = Description of Artificial Sequence: Synthetic coding sequence
  source 1..423: mol_type = other DNA

SEQ ID NO: 92624 - DNA, 8520 bp, synthetic construct
  misc_feature 1..8520: note = Description of Artificial Sequence: Synthetic coding sequence
  source 1..8520: mol_type = other DNA
atgcccatcacccaggacaacgccgtgctgcacctgcccctgctgtaccagtggctgcagaacagcctgcaggagggcggcgacggccccgagcagagactgtgccaggccgccatccagaagctgcaggagtacatccagctgaacttcgccgtggacgagagcaccgtgccccccgaccacagcccccccgagatggagatctgcaccgtgtacctgaccaaggagctgggcgacaccgagaccgtgggcctgagcttcggcaacatccccgtgttcggcgactacggcgagaagagaagaggcggcaagaagagaaagacccaccagggccccgtgctggacgtgggctgcatctgggtgaccgagctgagaaagaacagccccgccggcaagagcggcaaggtgagactgagagacgagatcctgagcctgaacggccagctgatggtgggcgtggacgtgagcggcgccagctacctggccgagcagtgctggaacggcggcttcatctacctgatcatgctgagaagattcaagcacaaggcccacagcacctacaacggcaacagcagcaacagcagcgagcccggcgagacccccaccctggagctgggcgacagaaccgccaagaagggcaagagaaccagaaagttcggcgtgatcagcagaccccccgccaacaaggcccccgaggagagcaagggcagcgccggctgcgaggtgagcagcgaccccagcaccgagctggagaacggccccgaccccgagctgggcaacggccacgtgttccagctggagaacggccccgacagcctgaaggaggtggccggcccccacctggagagaagcgaggtggacagaggcaccgagcacagaatccccaagaccgacgcccccctgaccaccagcaacgacaagagaagattcagcaagggcggcaagaccgacttccagagcagcgactgcctggccagagaggaggtgggcagaatctggaagatggagctgctgaaggagagcgacggcctgggcatccaggtgagcggcggcagaggcagcaagagaagcccccacgccatcgtggtgacccaggtgaaggagggcggcgccgcccacagagacggcagactgagcctgggcgacgagctgctggtgatcaacggccacctgctggtgggcctgagccacgaggaggccgtggccatcctgagaagcgccaccggcatggtgcagctggtggtggccagcaaggagaacagcgccgaggacctgctgagactgaccagcaagagcctgcccgacctgaccagcagcgtggaggacgtgagcagctggaccgacaacgaggaccaggaggccgacggcgaggaggacgagggcaccagcagcagcgtgcagagagccatgcccggcaccgacgagccccaggacgtgtgcggcgccgaggagagcaagggcaacctggagagccccaagcagggcagcaacaagatcaagctgaagagcagactgagcggcggcgtgcacagactggagagcgtggaggagtacaacgagctgatggtgagaaacggcgaccccagaatcagaatgctggaggtgagcagagacggcagaaagcacagcctgccccagctgctggacagcagcagcgccagccaggagtaccacatcgtgaagaagagcaccagaagcctgagcaccacccaggtggagagcccctggagactgatcagacccagcgtgatcagcatcatcggcctgtacaaggagaagggcaagggcctgggcttcagcatcgccggcggcagagactgcatcagaggccagatgggcatcttcgtgaagaccatcttccccaacggcagcgccgccgaggacggcagactgaaggagggcgacgagatcctggacgtgaacggcatccccatcaagggcctgaccttccaggaggccatccacaccttcaagcagatcagaagcggcctgttcgtgctgaccgtgagaaccaagctggtgagccccagcctgaccccctgcagcacccccacccacatgagcagaagcgccagccccaacttcaacaccagcggcggcgccagcgccggcggcagcgacgagggcagcagcagcagcctgggcagaaagacccccggccccaaggacagaatcgtgatggaggtgaccctgaacaaggagcccagagtgggcctgggcatcggcgcctgctgcctggccctggagaacagcccccccggcatctacatccacagcctggcccccggcagcgtggccaagatggagagcaacctgagcagaggcgaccagatcctggaggtgaacagcgtgaacgtgagacacgccgccctgagcaaggtgcacgccatcctgagcaagtgcccccccggccccgtgagactggtgatcggcagacaccccaaccccaaggtgagcgagcaggagatggacgaggtgatcgccagaagcacctaccaggagagcaaggaggccaacagcagccccggcctgggcacccccctgaagagccccagcctggccaagaaggacagcctgatcagcgagagcgagctgagccagtacttcgcccacgacgtgcccggccccctgagcgacttcatggtggccggcagcgaggacgaggaccaccccggcagcggctgcagcaccagcgaggagggcagcctgccccccagcaccagcacccacaaggagcccggcaagcccagagccaacagcctggtgaccctgggcagccacagagccagcggcctgttccacaagcaggtgaccgtggccagacaggccagcctgcccggcagcccccaggccctgagaaaccccctgctgagacagagaaaggtgggctgctacgacgccaacgacgccagcgacgaggaggagttcgacagagagggcgactgcatcagcctgcccggcgccctgcccggccccatcagacccctgagcgaggacgaccccagaagagtgagcatcagcagcagcaagggcatggacgtgcacaaccaggaggagagacccagaaagaccctggtgagcaaggccatcagcgcccccctgctgggcagcagcgtggacctggaggagagcatccccgagggcatggtggacgccgccagctacgccgccaacctgaccgacagcgccgaggcccccaagggcagccccggcagctggtggaagaaggagctgagcggcagcagcagcgcccccaagctggagtacaccgtgagaaccgacacccagagccccaccaacaccggcagccccagcagcccccagcagaagagcgagggcctgggcagcagacacagacccgtggccagagtgagcccccactgcaagagaagcgaggccgaggccaagcccagcggcagccagaccgtgaacctgaccggcagagccaacgacccctgcgacctggacagcagagtgcaggccaccagcgtgaaggtgaccgtggccggcttccagcccggcggcgccgtggagaaggagagcctgggcaagctgaccaccggcgacgcctgcgtgagcaccagctgcgagctggccagcgccctgagccacctggacgccagccacctgaccgagaacctgcccaaggccgccagcgagctgggccagcagcccatgaccgagctggacagcagcagcgacctgatcagcagccccggcaagaagggcgccgcccaccccgaccccagcaagaccagcgtggacaccggccaggtgagcagacccgagaaccccagccagcccgccagccccagagtgaccaagtgcaaggccagaagccccgtgagactgccccacgagggcagccccagccccggcgagaaggccgccgccccccccgactacagcaagaccagaagcgccagcgagaccagcaccccccacaacaccagaagagtggccgccctgagaggcgccggccccggcgccgagggcatgacccccgccggcgccgtgctgcccggcgaccccctgaccagccaggagcagagacagggcgcccccggcaaccacagcaaggccctggagatgaccggcatccacgcccccgagagcagccaggagcccagcctgctggagggcgccgacagcgtgagcagcagagccccccaggccagcctgagcatgctgcccagcaccgacaacaccaaggaggcctgcggccacgtgagcggccactgctgccccggcggcagcagagagagccccgtgaccgacatcgacagcttcatcaaggagctggacgccagcgccgccagaagccccagcagccagaccggcgacagcggcagccaggagggcagcgcccagggccacccccccgccggcgccggcggcggcagcagctgcagagccgagcccgtgcccggcggccagaccagcagccccagaagagcctgggccgccggcgcccccgcctacccccagtgggccagccagcccagcgtgctggacagcatcaaccccgacaagcacttcaccgtgaacaagaacttcctgagcaactacagcagaaacttcagcagcttccacgaggacagcaccagcctgagcggcctgggcgacagcaccgagcccagcctgagcagcatgtacggcgacgccgaggacagcagcagcgaccccgagagcctgaccgaggcccccagagccagcgccagagacggctggagcccccccagaagcagagtgagcctgcacaaggaggaccccagcgagagcgaggaggagcagatcgagatctgcagcaccagaggctgccccaacccccccagcagccccgcccacctgcccacccaggccgccatctgccccgccagcgccaaggtgctgagcctgaagtacagcacccccagagagagcgtggccagccccagagagaaggccgcctgcctgcccggcagctacaccagcggccccgacagcagccagcccagcagcctgctggagatgagcagccaggagcacgagacccacgccgacatcagcaccagccagaaccacagacccagctgcgccgaggagaccaccgaggtgaccagcgccagcagcgccatggagaacagccccctgagcaaggtggccagacacttccacagcccccccatcatcctgagcagccccaacatggtgaacggcctggagcacgacctgctggacgacgagaccctgaaccagtacgagaccagcatcaacgccgccgccagcctgagcagcttcagcgtggacgtgcccaagaacggcgagagcgtgctggagaacctgcacatcagcgagagccaggacctggacgacctgctgcagaagcccaagatgatcgccagaagacccatcatggcctggttcaaggagatcaacaagcacaaccagggcacccacctgagaagcaagaccgagaaggagcagcccctgatgcccgccagaagccccgacagcaagatccagatggtgagcagcagccagaagaagggcgtgaccgtgccccacagccccccccagcccaagaccaacctggagaacaaggacctgagcaagaagagccccgccgagatgctgctgaccaacggccagaaggccaagtgcggccccaagctgaagagactgagcctgaagggcaaggccaaggtgaacagcgaggcccccgccgccaacgccgtgaaggccggcggcaccgaccacagaaagcccctgatcagcccccagaccagccacaagaccctgagcaaggccgtgagccagagactgcacgtggccgaccacgaggaccccgacagaaacaccaccgccgcccccagaagcccccagtgcgtgctggagagcaagccccccctggccaccagcggccccctgaagcccagcgtgagcgacaccagcatcagaaccttcgtgagccccctgaccagccccaagcccgtgcccgagcagggcatgtggagcagattccacatggccgtgctgagcgagcccgacagaggctgccccaccacccccaagagccccaagtgcagagccgagggcagagcccccagagccgacagcggccccgtgagccccgccgccagcagaaacggcatgagcgtggccggcaacagacagagcgagcccagactggccagccacgtggccgccgacaccgcccagcccagacccaccggcgagaagggcggcaacatcatggccagcgacagactggagagaaccaaccagctgaagatcgtggagatcagcgccgaggccgtgagcgagaccgtgtgcggcaacaagcccgccgagagcgacagaagaggcggctgcctggcccagggcaactgccaggagaagagcgagatcagactgtacagacaggtggccgagagcagcaccagccaccccagcagcctgcccagccacgccagccaggccgagcaggagatgagcagaagcttcagcatggccaagctggccagcagcagcagcagcctgcagaccgccatcagaaaggccgagtacagccagggcaagagcagcctgatgagcgacagcagaggcgtgcccagaaacagcatccccggcggccccagcggcgaggaccacctgtacttcacccccagacccgccaccagaacctacagcatgcccgcccagttcagcagccacttcggcagagagggccaccccccccacagcctgggcagaagcagagacagccaggtgcccgtgaccagcagcgtggtgcccgaggccaaggccagcagaggcggcctgcccagcctggccaacggccagggcatctacagcgtgaagcccctgctggacaccagcagaaacctgcccgccaccgacgagggcgacatcatcagcgtgcaggagaccagctgcctggtgaccgacaagatcaaggtgaccagaagacactactgctacgagcagaactggccccacgagagcaccagcttcttcagcgtgaagcagagaatcaagagcttcgagaacctggccaacgccgacagacccgtggccaagagcggcgccagccccttcctgagcgtgagcagcaagccccccatcggcagaagaagcagcggcagcatcgtgagcggcagcctgggccaccccggcgacgccgccgccagactgctgagaagaagcctgagcagctgcagcgagaaccagagcgaggccggcaccctgctgccccagatggccaagagccccagcatcatgaccctgaccatcagcagacagaacccccccgagaccagcagcaagggcagcgacagcgagctgaagaagagcctgggccccctgggcatccccacccccaccatgaccctggccagccccgtgaagagaaacaagagcagcgtgagacacacccagcccagccccgtgagcagaagcaagctgcaggagctgagagccctgagcatgcccgacctggacaagctgtgcagcgaggactacagcgccggccccagcgccgtgctgttcaagaccgagctggagatcacccccagaagaagccccggcccccccgccggcggcgtgagctgccccgagaagggcggcaacagagcctgccccggcggcagcggccccaagaccagcgccgccgagacccccagcagcgccagcgacaccggcgaggccgcccaggacctgcccttcagaagaagctggagcgtgaacctggaccagctgctggtgagcgccggcgaccagcagagactgcagagcgtgctgagcagcgtgggcagcaagagcaccatcctgaccctgatccaggaggccaaggcccagagcgagaacgaggaggacgtgtgcttcatcgtgctgaacagaaaggagggcagcggcctgggcttcagcgtggccggcggcaccgacgtggagcccaagagcatcaccgtgcacagagtgttcagccagggcgccgccagccaggagggcaccatgaacagaggcgacttcctgctgagcgtgaacggcgccagcctggccggcctggcccacggcaacgtgctgaaggtgctgcaccaggcccagctgcacaaggacgccctggtggtgatcaagaagggcatggaccagcccagacccagcgccagacaggagccccccaccgccaacggcaagggcctgctgagcagaaagaccatccccctggagcccggcatcggcagaagcgtggccgtgcacgacgccctgtgcgtggaggtgctgaagaccagcgccggcctgggcctgagcctggacggcggcaagagcagcgtgaccggcgacggccccctggtgatcaagagagtgtacaagggcggcgccgccgagcaggccggcatcatcgaggccggcgacgagatcctggccatcaacggcaagcccctggtgggcctgatgcacttcgacgcctggaacatcatgaagagcgtgcccgagggccccgtgcagctgctgatcagaaagcacagaaacagcagctag

SEQ ID NO: 92625 - DNA, 7923 bp, synthetic construct
  misc_feature 1..7923: note = Description of Artificial Sequence: Synthetic coding sequence
  source 1..7923: mol_type = other DNA
atgcccatcacccaggacaacgccgtgctgcacctgcccctgctgtaccagtggctgcagaacagcctgcaggagggcggcgacggccccgagcagagactgtgccaggccgccatccagaagctgcaggagtacatccagctgaacttcgccgtggacgagagcaccgtgccccccgaccacagcccccccgagatggagatctgcaccgtgtacctgaccaaggagctgggcgacaccgagaccgtgggcctgagcttcggcaacatccccgtgttcggcgactacggcgagaagagaagaggcggcaagaagagaaagacccaccagggccccgtgctggacgtgggctgcatctgggtgaccgagctgagaaagaacagccccgccggcaagagcggcaaggtgagactgagagacgagatcctgagcctgaacggccagctgatggtgggcgtggacgtgagcggcgccagctacctggccgagcagtgctggaacggcggcttcatctacctgatcatgctgagaagattcaagcacaaggcccacagcacctacaacggcaacagcagcaacagcagcgagcccggcgagacccccaccctggagctgggcgacagaaccgccaagaagggcaagagaaccagaaagttcggcgtgatcagcagaccccccgccaacaaggcccccgaggagagcaagggcagcgccggctgcgaggtgagcagcgaccccagcaccgagctggagaacggccccgaccccgagctgggcaacggccacgtgttccagctggagaacggccccgacagcctgaaggaggtggccggcccccacctggagagaagcgaggtggacagaggcaccgagcacagaatccccaagaccgacgcccccctgaccaccagcaacgacaagagaagattcagcaagggcggcaagaccgacttccagagcagcgactgcctggccagagaggaggtgggcagaatctggaagatggagctgctgaaggagagcgacggcctgggcatccaggtgagcggcggcagaggcagcaagagaagcccccacgccatcgtggtgacccaggtgaaggagggcggcgccgcccacagagagtaccacatcgtgaagaagagcaccagaagcctgagcaccacccaggtggagagcccctggagactgatcagacccagcgtgatcagcatcatcggcctgtacaaggagaagggcaagggcctgggcttcagcatcgccggcggcagagactgcatcagaggccagatgggcatcttcgtgaagaccatcttccccaacggcagcgccgccgaggacggcagactgaaggagggcgacgagatcctggacgtgaacggcatccccatcaagggcctgaccttccaggaggccatccacaccttcaagcagatcagaagcggcctgttcgtgctgaccgtgagaaccaagctggtgagccccagcctgaccccctgcagcacccccacccacatgagcagaagcgccagccccaacttcaacaccagcggcggcgccagcgccggcggcagcgacgagggcagcagcagcagcctgggcagaaagacccccggccccaaggacagaatcgtgatggaggtgaccctgaacaaggagcccagagtgggcctgggcatcggcgcctgctgcctggccctggagaacagcccccccggcatctacatccacagcctggcccccggcagcgtggccaagatggagagcaacctgagcagaggcgaccagatcctggaggtgaacagcgtgaacgtgagacacgccgccctgagcaaggtgcacgccatcctgagcaagtgccccgtgagcgagcaggagatggacgaggtgatcgccagaagcacctaccaggagagcaaggaggccaacagcagccccggcctgggcacccccctgaagagccccagcctggccaagaaggacagcctgatcagcgagagcgagctgagccagtacttcgcccacgacgtgcccggccccctgagcgacttcatggtggccggcagcgaggacgaggaccaccccggcagcggctgcagcaccagcgaggagggcagcctgccccccagcaccagcaaggagcccggcaagcccagagccaacagcctggtgaccctgggcagccacagagccagcggcctgttccacaagcaggtgaccgtggccagacaggccagcctgcccggcagcccccaggccctgagaaaccccctgctgagacagagaaaggtgggctgctacgacgccaacgacgccagcgacgaggaggagttcgacagagagggcgactgcatcagcctgcccggcgccctgcccggccccatcagacccctgagcgaggacgaccccagaagagtgagcatcagcagcagcaagggcatggacgtgcacaaccaggaggagagacccagaaagaccctggtgagcaaggccatcagcgcccccctgctgggcagcagcgtggacctggaggagagcatccccgagggcatggtggacgccgccagctacgccgccaacctgaccgacagcgccgaggcccccaagggcagccccggcagctggtggaagaaggagctgagcggcagcagcagcgcccccaagctggagtacaccgtgagaaccgacacccagagccccaccaacaccggcagccccagcagcccccagcagaagagcgagggcctgggcagcagacacagacccgtggccagagtgagcccccactgcaagagaagcgaggccgaggccaagcccagcggcagccagaccgtgaacctgaccggcagagccaacgacccctgcgacctggacagcagagtgcaggccaccagcgtgaaggtgaccgtggccggcttccagcccggcggcgccgtggagaagctgtgccaggagagcctgggcaagctgaccaccggcgacgcctgcgtgagcaccagctgcgagctggccagcgccctgagccacctggacgccagccacctgaccgagaacctgcccaaggccgccagcgagctgggccagcagcccatgaccgccagcgacctgatcagcagccccggcaagaagggcgccgcccaccccgaccccagcaagaccagcgtggacaccggccaggtgagcagacccgagaaccccagccagcccgccagccccagagtgaccaagtgcaaggccagaagccccgtgagactgccccacgagggcagccccagccccggcgagaaggccgccgccccccccgactacagcaagaccagaagcgccagcgagaccagcaccccccacaacaccagaagagtggccgccctgagaggcgccggccccggcgccgagggcatgacccccgccggcgccgtgctgcccggcgaccccctgaccagccaggagcagagacagggcgcccccggcaaccacagcaaggccctggagatgaccggcatccacgcccccgagagcagccaggagcccagcctgctggagggcgccgacagcgtgagcagcagagccccccaggccagcctgagcatgctgcccagcaccgacaacaccaaggaggcctgcggccacgtgagcggccactgctgccccggcggcagcagagagagccccgtgaccgacatcgacagcttcatcaaggagctggacgccagcgccgccagaagccccagcagccagaccggcgacagcggcagccaggagggcagcgcccagggccacccccccgccggcgccggcggcggcagcagctgcagagccgagcccgtgcccggcggccagaccagcagccccagaagagcctgggccgccggcgcccccgcctacccccagtgggccagccagcccagcgtgctggacagcatcaaccccgacaagcacttcaccgtgaacaagaacttcctgagcaactacagcagaaacttcagcagcttccacgaggacagcaccagcctgagcggcctgggcgacagcaccgagcccagcctgagcagcatgtacggcgacgccgaggacagcagcagcgaccccgagagcctgaccgaggcccccagagccagcgccagagacggctggagcccccccagaagcagagtgagcctgcacaaggaggaccccagcgagagcgaggaggagcagatcgagatctgcagcaccagaggctgccccaacccccccagcagccccgcccacctgcccacccaggccgccatctgccccgccagcgccaaggtgctgagcctgaagtacagcacccccagagagagcgtggccagccccagagagaaggccgcctgcctgcccggcagctacaccagcggccccgacagcagccagcccagcagcctgctggagatgagcagccaggagcacgagacccacgccgacatcagcaccagccagaaccacagacccagctgcgccgaggagaccaccgaggtgaccagcgccagcagcgccatggagaacagccccctgagcaaggtggccagacacttccacagcccccccatcatcctgagcagccccaacatggtgaacggcctggagcacgacctgctggacgacgagaccctgaaccagtacgagaccagcatcaacgccgccgccagcctgagcagcttcagcgtggacgtgcccaagaacggcgagagcgtgctggagaacctgcacatcagcgagagccaggacctggacgacctgctgcagaagcccaagatgatcgccagaagacccatcatggcctggttcaaggagatcaacaagcacaaccagggcacccacctgagaagcaagaccgagaaggagcagcccctgatgcccgccagaagccccgacagcaagatccagatggtgagcagcagccagaagaagggcgtgaccgtgccccacagccccccccagcccaagaccaacctggagaacaaggacctgagcaagaagagccccgccgagatgctgctgaccaacggccagaaggccaagtgcggccccaagctgaagagactgagcctgaagggcaaggccaaggtgaacagcgaggcccccgccgccaacgccgtgaaggccggcggcaccgaccacagaaagcccctgatcagcccccagaccagccacaagaccctgagcaaggccgtgagccagagactgcacgtggccgaccacgaggaccccgacagaaacaccaccgccgcccccagaagcccccagtgcgtgctggagagcaagccccccctggccaccagcggccccctgaagcccagcgtgagcgacaccagcatcagaaccttcgtgagccccctgaccagccccaagcccgtgcccgagcagggcatgtggagcagattccacatggccgtgctgagcgagcccgacagaggctgccccaccacccccaagagccccaagtgcagagccgagggcagagcccccagagccgacagcggccccgtgagccccgccgccagcagaaacggcatgagcgtggccggcaacagacagagcgagcccagactggccagccacgtggccgccgacaccgcccagcccagacccaccggcgagaagggcggcaacatcatggccagcgacagactggagagaaccaaccagctgaagatcgtggagatcagcgccgaggccgtgagcgagaccgtgtgcggcaacaagcccgccgagagcgacagaagaggcggctgcctggcccagggcaactgccaggagaagagcgagatcagactgtacagacaggtggccgagagcagcaccagccaccccagcagcctgcccagccacgccagccaggccgagcaggagatgagcagaagcttcagcatggccaagctggccagcagcagcagcagcctgcagaccgccatcagaaaggccgagtacagccagggcaagagcagcctgatgagcgacagcagaggcgtgcccagaaacagcatccccggcggccccagcggcgaggaccacctgtacttcacccccagacccgccaccagaacctacagcatgcccgcccagttcagcagccacttcggcagagagggccaccccccccacagcctgggcagaagcagagacagccaggtgcccgtgaccagcagcgtggtgcccgaggccaaggccagcagaggcggcctgcccagcctggccaacggccagggcatctacagcgtgaagcccctgctggacaccagcagaaacctgcccgccaccgacgagggcgacatcatcagcgtgcaggagaccagctgcctggtgaccgacaagatcaaggtgaccagaagacactactgctacgagcagaactggccccacgagagcaccagcttcttcagcgtgaagcagagaatcaagagcttcgagaacctggccaacgccgacagacccgtggccaagagcggcgccagccccttcctgagcgtgagcagcaagccccccatcggcagaagaagcagcggcagcatcgtgagcggcagcctgggccaccccggcgacgccgccgccagactgctgagaagaagcctgagcagctgcagcgagaaccagagcgaggccggcaccctgctgccccagatggccaagagccccagcatcatgaccctgaccatcagcagacagaacccccccgagaccagcagcaagggcagcgacagcgagctgaagaagagcctgggccccctgggcatccccacccccaccatgaccctggccagccccgtgaagagaaacaagagcagcgtgagacacacccagcccagccccgtgagcagaagcaagctgcaggagctgagagccctgagcatgcccgacctggacaagctgtgcagcgaggactacagcgccggccccagcgccgtgctgttcaagaccgagctggagatcacccccagaagaagccccggcccccccgccggcggcgtgagctgccccgagaagggcggcaacagagcctgccccggcggcagcggccccaagaccagcgccgccgagacccccagcagcgccagcgacaccggcgaggccgcccaggacctgcccttcagaagaagctggagcgtgaacctggaccagctgctggtgagcgccggcgaccagcagagactgcagagcgtgctgagcagcgtgggcagcaagagcaccatcctgaccctgatccaggaggccaaggcccagagcgagaacgaggaggacgtgtgcttcatcgtgctgaacagaaaggagggcagcggcctgggcttcagcgtggccggcggcaccgacgtggagcccaagagcatcaccgtgcacagagtgttcagccagggcgccgccagccaggagggcaccatgaacagaggcgacttcctgctgagcgtgaacggcgccagcctggccggcctggcccacggcaacgtgctgaaggtgctgcaccaggcccagctgcacaaggacgccctggtggtgatcaagaagggcatggaccagcccagacccagcgccagacaggagccccccaccgccaacggcaagggcctgctgagcagaaagaccatccccctggagcccggcatcggcagaagcgtggccgtgcacgacgccctgtgcgtggaggtgctgaagaccagcgccggcctgggcctgagcctggacggcggcaagagcagcgtgaccggcgacggccccctggtgatcaagagagtgtacaagggcggcgccgccgagcaggccggcatcatcgaggccggcgacgagatcctggccatcaacggcaagcccctggtgggcctgatgcacttcgacgcctggaacatcatgaagagcgtgcccgagggccccgtgcagctgctgatcagaaagcacagaaacagcagctag

SEQ ID NO: 92626 - DNA, 8520 bp, synthetic construct; identical to SEQ ID NO: 92624
  misc_feature 1..8520: note = Description of Artificial Sequence: Synthetic coding sequence
  source 1..8520: mol_type = other DNA

SEQ ID NO: 92627 - DNA, 45 bp, synthetic construct
  misc_feature 1..45: note = Description of Artificial Sequence: Synthetic coding sequence
  source 1..45: mol_type = other DNA
atgcccatcacccaggacaacgccgtgctgcacctgcccctgtag

SEQ ID NO: 92628 - DNA, 1476 bp, synthetic construct
  misc_feature 1..1476: note = Description of Artificial Sequence: Synthetic coding sequence
  source 1..1476: mol_type = other DNA
atggagaaggccgccgacctgcaggacaccgccagcctgaccctgaagttcaagttcaaccccaagctgggcatcgacaaccccgtgctgagcctggccgaggaccacgacccctacgacccctggagcctggagagacccagattctgcctgctgagcaaggaggagggcaagagcttcggcttccacctgcagcaggagctgggcagagccggccacgtggtgtgcagagtggaccccggcaccagcgcccagagacagggcctgcaggagggcgacagaatcctggccgtgaacaacgacgtggtggagcacgaggactacgccgtggtggtgagaagaatcagagccagcagccccagagtgctgctgaccgtgctggccagacacgcccacgacgtggccagagcccagctgggcgaggacgcccacctgtgccccaccctgggccccggcgtgagacccagactgtgccacatcgtgaaggacgagggcggcttcggcttcagcgtgacccacggcaaccagggccccttctggctggtgctgagcaccggcggcgccgccgagagagccggcgtgccccccggcgccagactgctggaggtgaacggcctgtggcagagcggccagcaggtgaccctgctggtggccggccccgaggtggaggagcagtgcagacagctgggcctgcccctggccgcccccctggccgagggctgggccctgcccaccaagcccagatgcctgcacctggagaagggcccccagggcttcggcttcctgctgagagaggagaagggcctggacggcagacccggccagttcctgtgggaggtggaccccggcctgcccgccaagaaggccggcatgcaggccggcgacagactggtggccgtggccggcgagagcgtggagggcctgggccacgaggagaccgtgagcagaatccagggccagggcagctgcgtgagcctgaccgtggtggaccccgaggccgacagattcttcagcatggtgagactgagccccctgctgttcctggagaacaccgaggcccccgccagccccagaggcagcagcagcgccagcctggtggagaccgaggaccccagcctggaggacaccagcgtgcccagcgtgcccctgggcagcagacagtgcttcctgtaccccggccccggcggcagctacggcttcagactgagctgcgtggccagcggccccagactgttcatcagccaggtgacccccggcggcagcgccgccagagccggcctgcaggtgggcgacgtgatcctggaggtgaacggctaccccgtgggcggccagaacgacctggagagactgcagcagctgcccgaggccgagccccccctgtgcctgaagctggccgccagaagcctgagaggcctggaggcctggatcccccccggcgccgccgaggactgggccctggccagcgacctgctgtag

SEQ ID NO: 92629 - DNA, 1518 bp, synthetic construct
  misc_feature 1..1518: note = Description of Artificial Sequence: Synthetic coding sequence
  source 1..1518: mol_type = other DNA
atggagaaggccgccgacctgcaggacaccgccagcctgaccctgaagttcaagttcaaccccaagctgggcatcgacaaccccgtgctgagcctggccgaggaccacgacccctacgacccctggagcctggagagacccagattctgcctgctgagcaaggaggagggcaagagcttcggcttccacctgcagcaggagctgggcagagccggccacgtggtgtgcagagtggaccccggcaccagcgcccagagacagggcctgcaggagggcgacagaatcctggccgtgaacaacgacgtggtggagcacgaggactacgccgtggtggtgagaagaatcagagccagcagccccagagtgctgctgaccgtgctggccagacacgcccacgacgtggccagagcccagctgggcgaggacgcccacctgtgccccaccctgggccccggcgtgagacccagactgtgccacatcgtgaaggacgagggcggcttcggcttcagcgtgacccacggcaaccagggccccttctggctggtgctgagcaccggcggcgccgccgagagagccggcgtgccccccggcgccagactgctggaggtgaacggcgtgagcgtggagaagttcacccacaaccagctgaccagaaagctgtggcagagcggccagcaggtgaccctgctggtggccggccccgaggtggaggagcagtgcagacagctgggcctgcccctggccgcccccctggccgagggctgggccctgcccaccaagcccagatgcctgcacctggagaagggcccccagggcttcggcttcctgctgagagaggagaagggcctggacggcagacccggccagttcctgtgggaggtggaccccggcctgcccgccaagaaggccggcatgcaggccggcgacagactggtggccgtggccggcgagagcgtggagggcctgggccacgaggagaccgtgagcagaatccagggccagggcagctgcgtgagcctgaccgtggtggaccccgaggccgacagattcttcagcatggtgagactgagccccctgctgttcctggagaacaccgaggcccccgccagccccagaggcagcagcagcgccagcctggtggagaccgaggaccccagcctggaggacaccagcgtgcccagcgtgcccctgggcagcagacagtgcttcctgtaccccggccccggcggcagctacggcttcagactgagctgcgtggccagcggccccagactgttcatcagccaggtgacccccggcggcagcgccgccagagccggcctgcaggtgggcgacgtgatcctggaggtgaacggctaccccgtgggcggccagaacgacctggagagactgcagcagctgcccgaggccgagccccccctgtgcctgaagctggccgccagaagcctgagaggcctggaggcctggatcccccccggcgccgccgaggactgggccctggccagcgacctgctgtag

SEQ ID NO: 92630 - DNA, 1716 bp, synthetic construct
  misc_feature 1..1716: note = Description of Artificial Sequence: Synthetic coding sequence
  source 1..1716: mol_type = other DNA
atggtgacccccagcccccccggcaaccacagcctgagcctggaggcccccagactgcacaccgccagcgacctgctgggcaaccacagcctgggcctgcccctgatcaccgccctggtgggcagcagagacagaagaggcagagtgttcagccccgtgcccgtgcccctgcccaccaaccccaccacccagcaccccaccagacagaagctgcccagcaccctgagcggccacagagtgtgccaggcccacggcgagcccgtgctgggcctgtgccccctgctgcccctgttctgctgccccccccacccccccgacccctggagcctggagagacccagattctgcctgctgagcaaggaggagggcaagagcttcggcttccacctgcagcaggagctgggcagagccggccacgtggtgtgcagagtggaccccggcaccagcgcccagagacagggcctgcaggagggcgacagaatcctggccgtgaacaacgacgtggtggagcacgaggactacgccgtggtggtgagaagaatcagagccagcagccccagagtgctgctgaccgtgctggccagacacgcccacgacgtggccagagcccagctgggcgaggacgcccacctgtgccccaccctgggccccggcgtgagacccagactgtgccacatcgtgaaggacgagggcggcttcggcttcagcgtgacccacggcaaccagggccccttctggctggtgctgagcaccggcggcgccgccgagagagccggcgtgccccccggcgccagactgctggaggtgaacggcgtgagcgtggagaagttcacccacaaccagctgaccagaaagctgtggcagagcggccagcaggtgaccctgctggtggccggccccgaggtggaggagcagtgcagacagctgggcctgcccctggccgcccccctggccgagggctgggccctgcccaccaagcccagatgcctgcacctggagaagggcccccagggcttcggcttcctgctgagagaggagaagggcctggacggcagacccggccagttcctgtgggaggtggaccccggcctgcccgccaagaaggccggcatgcaggccggcgacagactggtggccgtggccggcgagagcgtggagggcctgggccacgaggagaccgtgagcagaatccagggccagggcagctgcgtgagcctgaccgtggtggaccccgaggccgacagattcttcagcatggtgagactgagccccctgctgttcctggagaacaccgaggcccccgccagccccagaggcagcagcagcgccagcctggtggagaccgaggaccccagcctggaggacaccagcgtgcccagcgtgcccctgggcagcagacagtgcttcctgtaccccggccccggcggcagctacggcttcagactgagctgcgtggccagcggccccagactgttcatcagccaggtgacccccggcggcagcgccgccagagccggcctgcaggtgggcgacgtgatcctggaggtgaacggctaccccgtgggcggccagaacgacctggagagactgcagcagctgcccgaggccgagccccccctgtgcctgaagctggccgccagaagcctgagaggcctggaggcctggatcccccccggcgccgccgaggactgggccctggccagcgacctgctgtag

SEQ ID NO: 92631 - DNA, 1518 bp, synthetic construct
  misc_feature 1..1518: note = Description of Artificial Sequence: Synthetic coding sequence
  source 1..1518: mol_type = other DNA
atggaggaggccctggacctgcaggacaccgccagcctgaccctgaagttcaagttcaaccccaagctgggcatcgacaaccccgtgctgagcctggccgaggaccacgacccctacgacccctggagcctggagagacccagattctgcctgctgagcaaggaggagggcaagagcttcggcttccacctgcagcaggagctgggcagagccggccacgtggtgtgcagagtggaccccggcaccagcgcccagagacagggcctgcaggagggcgacagaatcctggccgtgaacaacgacgtggtggagcacgaggactacgccgtggtggtgagaagaatcagagccagcagccccagagtgctgctgaccgtgctggccagacacgcccacgacgtggccagagcccagctgggcgaggacgcccacctgtgccccaccctgggccccggcgtgagacccagactgtgccacatcgtgaaggacgagggcggcttcggcttcagcgtgacccacggcaaccagggccccttctggctggtgctgagcaccggcggcgccgccgagagagccggcgtgccccccggcgccagactgctggaggtgaacggcgtgagcgtggagaagttcacccacaaccagctgaccagaaagctgtggcagagcggccagcaggtgaccctgctggtggccggccccgaggtggaggagcagtgcagacagctgggcctgcccctggccgcccccctggccgagggctgggccctgcccaccaagcccagatgcctgcacctggagaagggcccccagggcttcggcttcctgctgagagaggagaagggcctggacggcagacccggccagttcctgtgggaggtggaccccggcctgcccgccaagaaggccggcatgcaggccggcgacagactggtggccgtggccggcgagagcgtggagggcctgggccacgaggagaccgtgagcagaatccagggccagggcagctgcgtgagcctgaccgtggtggaccccgaggccgacagattcttcagcatggtgagactgagccccctgctgttcctggagaacaccgaggcccccgccagccccagaggcagcagcagcgccagcctggtggagaccgaggaccccagcctggaggacaccagcgtgcccagcgtgcccctgggcagcagacagtgcttcctgtaccccggccccggcggcagctacggcttcagactgagctgcgtggccagcggccccagactgttcatcagccaggtgacccccggcggcagcgccgccagagccggcctgcaggtgggcgacgtgatcctggaggtgaacggctaccccgtgggcggccagaacgacctggagagactgcagcagctgcccgaggccgagccccccctgtgcctgaagctggccgccagaagcctgagaggcctggaggcctggatcccccccggcgccgccgaggactgggccctggccagcgacctgctgtag

SEQ ID NO: 92632 - DNA, 1716 bp, synthetic construct; identical to SEQ ID NO: 92630
  misc_feature 1..1716: note = Description of Artificial Sequence: Synthetic coding sequence
  source 1..1716: mol_type = other DNA

SEQ ID NO: 92633 - DNA, 2310 bp, synthetic construct
  misc_feature 1..2310: note = Description of Artificial Sequence: Synthetic coding sequence
  source 1..2310: mol_type = other DNA
atgggctgcaacatgtgcgtggtgcagaagcccgaggagcagtacaaggtgatgctgcaggtgaacggcaaggagctgagcaagctgagccaggagcagaccctgcaggccctgagaagcagcaaggagcccctggtgatccaggtgctgagaagaagccccagactgagaggcgacagcagctgccacgacctgcagctggtggacagcggcacccagaccgacatcaccttcgagcacatcatggccctgggcaagctgagaccccccaccccccccatggtgatcctggagcccccccccatcagccacgagtactacgaccccgccgagttcatggagggcggcccccaggaggccgacagactggacgagctggagtacgaggaggtggagctgtacaagagcagccacagagacaagctgggcctgatggtgtgctacagaaccgacgacgaggaggacctgggcatctacgtgggcgaggtgaaccccaacagcatcgccgccaaggacggcagaatcagagagggcgacagaatcatccagatcaacggcgtggacgtgcagaacagagaggaggccgtggccatcctgagccaggaggagaacaccaacatcagcctgctggtggccagacccgagagccagctggccaagagatggaaggacagcgacagagacgacttcctggacgacttcggcagcgagaacgagggcgagctgagagccagaaagctgaagagcccccccgcccagcagcccggcaacgaggaggagaagggcgcccccgacgccggccccggcctgagcaacagccaggagctggacagcggcgtgggcagaaccgacgagagcaccagaaacgaggagagcagcgagcacgacctgctgggcgacgagccccccagcagcaccaacacccccggcagcctgagaaagttcggcctgcagggcgacgccctgcagagcagagacttccacttcagcatggacagcctgctggccgagggcgccggcctgggcggcggcgacgtgcccggcctgaccgacgaggagtacgagagatacagagagctgctggagatcaagtgccacctggagaacggcaaccagctgggcctgctgttccccagagccagcggcggcaacagcgccctggacgtgaacagaaacgagagcctgggccacgagatggccatgctggaggaggagctgagacacctggagttcaagtgcagaaacatcctgagagcccagaagatgcagcagctgagagagagatgcatgaaggcctggctgctggaggaggagagcctgtacgacctggccgccagcgagcccaagaagcacgagctgagcgacatcagcgagctgcccgagaagagcgacaaggacagcaccagcgcctacaacaccggcgagagctgcagaagcacccccctgctggtggagcccctgcccgagagccccctgagaagagccatggccggcaacagcaacctgaacagaaccccccccggccccgccgtggccacccccgccaaggccgcccccccccccggcagccccgccaagttcagaagcctgagcagagaccccgaggccggcagaagacagcacgccgaggagagaggcagaagaaaccccaagaccggcctgaccctggagagagtgggccccgagagcagcccctacctgagcagaagacacagaggccagggccaggagggcgagcactaccacagctgcgtgcagctggcccccaccagaggcctggaggagctgggccacggccccctgagcctggccggcggccccagagtgggcggcgtggccgccgccgccaccgaggcccccagaatggagtggaaggtgaaggtgagaagcgacggcaccagatacgtggccaagagacccgtgagagacagactgctgaaggccagagccctgaagatcagagaggagagaagcggcatgaccaccgacgacgacgccgtgagcgagatgaagatgggcagatactggagcaaggaggagagaaagcagcacctgatcagagccagagagcagagaaagagaagagagttcatgatgcagagcagactggagtgcctgagagagcagcagaacggcgacagcaagcccgagctgaacatcatcgccctgagccacagaaagaccatgaagaagagaaacaagaagatcctggacaactggatcaccatccaggagatgctggcccacggcgccagaagcgccgacggcaagagagtgtacaaccccctgctgagcgtgaccaccgtgtag

SEQ ID NO: 92634 - DNA, 2085 bp, synthetic construct
  misc_feature 1..2085: note = Description of Artificial Sequence: Synthetic coding sequence
  source 1..2085: mol_type = other DNA
atggccctgggcaagctgagaccccccaccccccccatggtgatcctggagccctacgtgctgagcgagctgccccccatcagccacgagtactacgaccccgccgagttcatggagggcggcccccaggaggccgacagactggacgagctggagtacgaggaggtggagctgtacaagagcagccacagagacaagctgggcctgatggtgtgctacagaaccgacgacgaggaggacctgggcatctacgtgggcgaggtgaaccccaacagcatcgccgccaaggacggcagaatcagagagggcgacagaatcatccagatcaacggcgtggacgtgcagaacagagaggaggccgtggccatcctgagccaggaggagaacaccaacatcagcctgctggtggccagacccgagagccagctggccaagagatggaaggacagcgacagagacgacttcctggacgacttcggcagcgagaacgagggcgagctgagagccagaaagctgaagagcccccccgcccagcagcccggcaacgaggaggagaagggcgcccccgacgccggccccggcctgagcaacagccaggagctggacagcggcgtgggcagaaccgacgagagcaccagaaacgaggagagcagcgagcacgacctgctgggcgacgagccccccagcagcaccaacacccccggcagcctgagaaagttcggcctgcagggcgacgccctgcagagcagagacttccacttcagcatggacagcctgctggccgagggcgccggcctgggcggcggcgacgtgcccggcctgaccgacgaggagtacgagagatacagagagctgctggagatcaagtgccacctggagaacggcaaccagctgggcctgctgttccccagagccagcggcggcaacagcgccctggacgtgaacagaaacgagagcctgggccacgagatggccatgctggaggaggagctgagacacctggagttcaagtgcagaaacatcctgagagcccagaagatgcagcagctgagagagagatgcatgaaggcctggctgctggaggaggagagcctgtacgacctggccgccagcgagcccaagaagcacgagctgagcgacatcagcgagctgcccgagaagagcgacaaggacagcaccagcgcctacaacaccggcgagagctgcagaagcacccccctgctggtggagcccctgcccgagagccccctgagaagagccatggccggcaacagcaacctgaacagaaccccccccggccccgccgtggccacccccgccaaggccgcccccccccccggcagccccgccaagttcagaagcctgagcagagaccccgaggccggcagaagacagcacgccgaggagagaggcagaagaaaccccaagaccggcctgaccctggagagagtgggccccgagagcagcccctacctgagcagaagacacagaggccagggccaggagggcgagcactaccacagctgcgtgcagctggcccccaccagaggcctggaggagctgggccacggccccctgagcctggccggcggccccagagtgggcggcgtggccgccgccgccaccgaggcccccagaatggagtggaaggtgaaggtgagaagcgacggcaccagatacgtggccaagagacccgtgagagacagactgctgaaggccagagccctgaagatcagagaggagagaagcggcatgaccaccgacgacgacgccgtgagcgagatgaagatgggcagatactggagcaaggaggagagaaagcagcacctgatcagagccagagagcagagaaagagaagagagttcatgatgcagagcagactggagtgcctgagagagcagcagaacggcgacagcaagcccgagctgaacatcatcgccctgagccacagaaagaccatgaagaagagaaacaagaagatcctggacaactggatcaccatccaggagatgctggcccacggcgccagaagcgccgacggcaagagagtgtacaaccccctgctgagcgtgaccaccgtgtag

SEQ ID NO: 92635 - DNA, 2022 bp, synthetic construct
  misc_feature 1..2022: note = Description of Artificial Sequence: Synthetic coding sequence
  source 1..2022: mol_type = other DNA
atgaccgccccccccatcagccacgagtactacgaccccgccgagttcatggagggcggcccccaggaggccgacagactggacgagctggagtacgaggaggtggagctgtacaagagcagccacagagacaagctgggcctgatggtgtgctacagaaccgacgacgaggaggacctgggcatctacgtgggcgaggtgaaccccaacagcatcgccgccaaggacggcagaatcagagagggcgacagaatcatccagatcaacggcgtggacgtgcagaacagagaggaggccgtggccatcctgagccaggaggagaacaccaacatcagcctgctggtggccagacccgagagccagctggccaagagatggaaggacagcgacagagacgacttcctggacgacttcggcagcgagaacgagggcgagctgagagccagaaagctgaagagcccccccgcccagcagcccggcaacgaggaggagaagggcgcccccgacgccggccccggcctgagcaacagccaggagctggacagcggcgtgggcagaaccgacgagagcaccagaaacgaggagagcagcgagcacgacctgctgggcgacgagccccccagcagcaccaacacccccggcagcctgagaaagttcggcctgcagggcgacgccctgcagagcagagacttccacttcagcatggacagcctgctggccgagggcgccggcctgggcggcggcgacgtgcccggcctgaccgacgaggagtacgagagatacagagagctgctggagatcaagtgccacctggagaacggcaaccagctgggcctgctgttccccagagccagcggcggcaacagcgccctggacgtgaacagaaacgagagcctgggccacgagatggccatgctggaggaggagctgagacacctggagttcaagtgcagaaacatcctgagagcccagaagatgcagcagctgagagagagatgcatgaaggcctggctgctggaggaggagagcctgtacgacctggccgccagcgagcccaagaagcacgagctgagcgacatcagcgagctgcccgagaagagcgacaaggacagcaccagcgcctacaacaccggcgagagctgcagaagcacccccctgctggtggagcccctgcccgagagccccctgagaagagccatggccggcaacagcaacctgaacagaaccccccccggccccgccgtggccacccccgccaaggccgcccccccccccggcagccccgccaagttcagaagcctgagcagagaccccgaggccggcagaagacagcacgccgaggagagaggcagaagaaaccccaagaccggcctgaccctggagagagtgggccccgagagcagcccctacctgagcagaagacacagaggccagggccaggagggcgagcactaccacagctgcgtgcagctggcccccaccagaggcctggaggagctgggccacggccccctgagcctggccggcggccccagagtgggcggcgtggccgccgccgccaccgaggcccccagaatggagtggaaggtgaaggtgagaagcgacggcaccagatacgtggccaagagacccgtgagagacagactgctgaaggccagagccctgaagatcagagaggagagaagcggcatgaccaccgacgacgacgccgtgagcgagatgaagatgggcagatactggagcaaggaggagagaaagcagcacctgatcagagccagagagcagagaaagagaagagagttcatgatgcagagcagactggagtgcctgagagagcagcagaacggcgacagcaagcccgagctgaacatcatcgccctgagccacagaaagaccatgaagaagagaaacaagaagatcctggacaactggatcaccatccaggagatgctggcccacggcgccagaagcgccgacggcaagagagtgtacaaccccctgctgagcgtgaccaccgtgtag

SEQ ID NO: 92636 - DNA, 1983 bp, synthetic construct
  misc_feature 1..1983: note = Description of Artificial Sequence: Synthetic coding sequence
  source 1..1983: mol_type = other DNA
atgggctgcaacatgtgcgtggtgcagaagcccgaggagcagtacaaggtgatgctgcaggaggtggagctgtacaagagcagccacagagacaagctgggcctgatggtgtgctacagaaccgacgacgaggaggacctgggcatctacgtgggcgaggtgaaccccaacagcatcgccgccaaggacggcagaatcagagagggcgacagaatcatccagatcaacggcgtggacgtgcagaacagagaggaggccgtggccatcctgagccaggaggagaacaccaacatcagcctgctggtggccagacccgagagccagctggccaagagatggaaggacagcgacagagacgacttcctggacgacttcggcagcgagaacgagggcgagctgagagccagaaagctgaagagcccccccgcccagcagcccggcaacgaggaggagaagggcgcccccgacgccggccccggcctgagcaacagccaggagctggacagcggcgtgggcagaaccgacgagagcaccagaaacgaggagagcagcgagcacgacctgctgggcgacgagccccccagcagcaccaacacccccggcagcctgagaaagttcggcctgcagggcgacgccctgcagagcagagacttccacttcagcatggacagcctgctggccgagggcgccggcctgggcggcggcgacgtgcccggcctgaccgacgaggagtacgagagatacagagagctgctggagatcaagtgccacctggagaacggcaaccagctgggcctgctgttccccagagccagcggcggcaacagcgccctggacgtgaacagaaacgagagcctgggccacgagatggccatgctggaggaggagctgagacacctggagttcaagtgcagaaacatcctgagagcccagaagatgcagcagctgagagagagatgcatgaaggcctggctgctggaggaggagagcctgtacgacctggccgccagcgagcccaagaagcacgagctgagcgacatcagcgagctgcccgagaagagcgacaaggacagcaccagcgcctacaacaccggcgagagctgcagaagcacccccctgctggtggagcccctgcccgagagccccctgagaagagccatggccggcaacagcaacctgaacagaaccccccccggccccgccgtggccacccccgccaaggccgcccccccccccggcagccccgccaagttcagaagcctgagcagagaccccgaggccggcagaagacagcacgccgaggagagaggcagaagaaaccccaagaccggcctgaccctggagagagtgggccccgagagcagcccctacctgagcagaagacacagaggccagggccaggagggcgagcactaccacagctgcgtgcagctggcccccaccagaggcctggaggagctgggccacggccccctgagcctggccggcggccccagagtgggcggcgtggccgccgccgccaccgaggcccccagaatggagtggaaggtgaaggtgagaagcgacggcaccagatacgtggccaagagacccgtgagagacagactgctgaaggccagagccctgaagatcagagaggagagaagcggcatgaccaccgacgacgacgccgtgagcgagatgaagatgggcagatactggagcaaggaggagagaaagcagcacctgatcagagccagagagcagagaaagagaagagagttcatgatgcagagcagactggagtgcctgagagagcagcagaacggcgacagcaagcccgagctgaacatcatcgccctgagccacagaaagaccatgaagaagagaaacaagaagatcctggacaactggatcaccatccaggagatgctggcccacggcgccagaagcgccgacggcaagagagtgtacaaccccctgctgagcgtgaccaccgtgtag

SEQ ID NO: 92637 - DNA, 1554 bp, synthetic construct
  misc_feature 1..1554: note = Description of Artificial Sequence: Synthetic coding sequence
  source 1..1554: mol_type = other DNA
atggcccagggcttcgccgtgggcttcgaccccctgggcctgggcgacctgagcagcggcagcctgagcagcctgagcagcagaggccacctgggcagcgacagcggcagcaccgccaccagatacctgctgagaaagcagcagagactgctgaacggcccccccagaggcatcagagccagcagccccatgggcagagtgatcctgatcaacagccccatcgaggccaacagcgacgagagcgacatcatccacagcgtgagagtggagaagagccccgccggcagactgggcttcagcgtgagaggcggcagcgagcacggcctgggcatcttcgtgagcaaggtggaggagggcagcagcgccgagagagccggcctgtgcgtgggcgacaagatcaccgaggtgaacggcctgagcctggagagcaccaccatgggcagcgccgtgaaggtgctgaccagcagcagcagactgcacatgatggtgagaagaatgggcagagtgcccggcatcaagttcagcaaggagaagaccacctgggtggacgtggtgaacagaagactggtggtggagaagtgcggcagcacccccagcgacaccagcagcgaggacggcgtgagaagaatcgtgcacctgtacaccaccagcgacgacttctgcctgggcttcaacatcagaggcggcaaggagttcggcctgggcatctacgtgagcaaggtggaccacggcggcctggccgaggagaacggcatcaaggtgggcgaccaggtgctggccgccaacggcgtgagattcgacgacatcagccacagccaggccgtggaggtgctgaagggccagacccacatcatgctgaccatcaaggagaccggcagataccccgcctacaaggagatggtgagcgagtactgctggctggacagactgagcaacggcgtgctgcagcagctgagccccgccagcgagagcagcagcagcgtgagcagctgcgccagcagcgccccctacagcagcggcagcctgcccagcgacagaatggacatctgcctgggccaggaggagcccggcagcagaggccccggctggggcagagccgacaccgccatgcagaccgagcccgacgccggcggcagagtggagacctggtgcagcgtgagacccaccgtgatcctgagagacaccgccatcagaagcgacggcccccaccccggcagaagactggacagcgccctgagcgagagccccaagaccgccctgctgctggccctgagcagacccagaccccccatcaccagaagccagagctacctgaccctgtgggaggagaagcagcagagaaagaaggagaagagcggcagccccggcgagaagggcgccctgcagagaagcaagaccctgatgaacctgttcttcaagggcggcagacagggcagactggccagagacggcagaagagaggcctggaccctggacagcggcagcctggccaagacctaccccagactggacatcgagaaggagatgggcgtgagcccctgctgccccggctag

SEQ ID NO: 92638 - DNA, 3102 bp, synthetic construct
  misc_feature 1..3102: note = Description of Artificial Sequence: Synthetic coding sequence
  source 1..3102: mol_type = other DNA
atggcccagggcttcgccgtgggcttcgaccccctgggcctgggcgacctgagcagcggcagcctgagcagcctgagcagcagaggccacctgggcagcgacagcggcagcaccgccaccagatacctgctgagaaagcagcagagactgctgaacggcccccccagaggcatcagagccagcagccccatgggcagagtgatcctgatcaacagccccatcgaggccaacagcgacgagagcgacatcatccacagcgtgagagtggagaagagccccgccggcagactgggcttcagcgtgagaggcggcagcgagcacggcctgggcatcttcgtgagcaaggtggaggagggcagcagcgccgagagagccggcctgtgcgtgggcgacaagatcaccgaggtgaacggcctgagcctggagagcaccaccatgggcagcgccgtgaaggtgctgaccagcagcagcagactgcacatgatggtgagaagaatgggcagagtgcccggcatcaagttcagcaaggagaagaccacctgggtggacgtggtgaacagaagactggtggtggagaagtgcggcagcacccccagcgacaccagcagcgaggacggcgtgagaagaatcgtgcacctgtacaccaccagcgacgacttctgcctgggcttcaacatcagaggcggcaaggagttcggcctgggcatctacgtgagcaaggtggaccacggcggcctggccgaggagaacggcatcaaggtgggcgaccaggtgctggccgccaacggcgtgagattcgacgacatcagccacagccaggccgtggaggtgctgaagggccagacccacatcatgctgaccatcaaggagaccggcagataccccgcctacaaggagatggtgagcgagtactgctggctggacagactgagcaacggcgtgctgcagcagctgagccccgccagcgagagcagcagcagcgtgagcagctgcgccagcagcgccccctacagcagcggcagcctgcccagcgacagaatggacatctgcctgggccaggaggagcccggcagcagaggccccggctggggcagagccgacaccgccatgcagaccgagcccgacgccggcggcagagtggagacctggtgcagcgtgagacccaccgtgatcctgagagacaccgccatcagaagcgacggcccccaccccggcagaagactggacagcgccctgagcgagagccccaagaccgccctgctgctggccctgagcagacccagaccccccatcaccagaagccagagctacctgaccctgtgggaggagaagcagcagagaaagaaggagaagagcggcagccccggcgagaagggcgccctgcagagaagcaagaccctgatgaacctgttcttcaagggcggcagacagggcagactggccagagacggcagaagagaggcctggaccctggacagcggcagcctggccaagacctaccccagactggacatcgagaaggccggcggcgtgggccccgtgcagaagttcgtgacctggagactgagaagagaccaggagagaggcagagccctgctgagcgccagaagcggcagccccagcagccagctgcccaacgtggacgagcaggtgcaggcctgggagagcagaagacccctgatccaggacctggcccagagactgctgaccgacgacgaggtgctggccgtgaccagacactgcagcagatacgtgcacgagggcggcatcgaggacctggtgagacccctgctggccatcctggacagacccgagaagctgctgctgctgcaggacatcagaagcgtggtggcccccaccgacctgggcagattcgacagcatggtgatgctggtggagctggaggccttcgaggccctgaagagcagagccgtgagaccccccgccctgagacccgccagacaggacaccccccccaagagacacctgatcacccccgtgcccgacagcagaggcggcttctacctgctgcccgtgaacggcttccccgaggaggaggacaacggcgagctgagagagagactgggcgccctgaaggtgagccccagcgccagcgcccccagacacccccacaagggcatcccccccctgcaggacgtgcccgtggacgccttcacccccctgagaatcgcctgcaccccccccccccagctgccccccgtggcccccagacccctgagacccaactggctgctgaccgagcccctgagcagagagcaccccccccagagccagatcagaggcagagcccagagcagaagcagaagcagaagcagaagcagaagcagaagcagcagaggccagggcaagagccccggcagaagaagccccagccccgtgcccacccccgcccccagcatgaccaacggcagataccacaagcccagaaaggccagaccccccctgcccagacccctggacggcgaggccgccaaggtgggcgccaagcagggccccagcgagagcggcaccgagggcaccgccaaggaggccgccatgaagaaccccagcggcgagctgaagaccgtgaccctgagcaagatgaagcagagcctgggcatcagcatcagcggcggcatcgagagcaaggtgcagcccatggtgaagatcgagaagatcttccccggcggcgccgccttcctgagcggcgccctgcaggccggcttcgagctggtggccgtggacggcgagaacctggagcaggtgacccaccagagagccgtggacaccatcagaagagcctacagaaacaaggccagagagcccatggagctggtggtgagagtgcccggccccagccccagacccagccccagcgacagcagcgccctgaccgacggcggcctgcccgccgaccacctgcccgcccaccagcccctggacgccgcccccgtgcccgcccactggctgcccgagccccccaccaacccccagaccccccccaccgacgccagactgctgcagcccacccccagccccgcccccagccccgccctgcagacccccgacagcaagcccgcccccagccccagaatcccctag

SEQ ID NO: 92639 - DNA, 627 bp, synthetic construct
  misc_feature 1..627: note = Description of Artificial Sequence: Synthetic coding sequence
  source 1..627: mol_type = other DNA
tgacccagaccccccatcaccagaagccagagctacctgaccctgtgggaggagaagcagcagagaaagaaggagaagagcggcagccccggcgagaagggcgccctgcagagaagcaagaccctgatgaacctgttcttcaagggcggcagacagggcagactggccagagacggcagaagagaggcctggaccctggacagcggcagcctggccaagacctaccccagactggacatcgagaaggccggcggcgtgggccccgtgcagaagttcgtgacctggagactgagaagagaccaggagagaggcagagccctgctgagcgccagaagcggcagccccagcagccagctgcccaacgtggacgagcaggtgcaggcctgggagagcagaagacccctgatccaggacctggcccagagactgctgaccgacgacgaggtgctggccgtgaccagacactgcagcagatacgtgcacgagggcggcatcgaggacctggtgagacccctgctggccatcctggacagacccgagaagctgctgctgctgcaggacatcagaagcgtggtggcccccaccgacctgggcagattcgacagcatggtgatgctggtggagtag

SEQ ID NO: 92640 - DNA, 3465 bp, synthetic construct
  misc_feature 1..3465: note = Description of Artificial Sequence: Synthetic coding sequence
  source 1..3465: mol_type = other DNA
atgggcctgctgctgatgatcctggccagcgccgtgctgggcagcttcctgaccctgctggcccagttcttcctgctgtacagaagacagcccgagccccccgccgacgaggccgccagagccggcgagggcttcagatacatcaagcccgtgcccggcctgctgctgagagagtacctgtacggcggcggcagagacgaggagcccagcggcgccgcccccgagggcggcgccacccccaccgccgcccccgagacccccgccccccccaccagagagacctgctacttcctgaacgccaccatcctgttcctgttcagagagctgagagacaccgccctgaccagaagatgggtgaccaagaagatcaaggtggagttcgaggagctgctgcagaccaagaccgccggcagactgctggagggcctgagcctgagagacgtgttcctgggcgagaccgtgcccttcatcaagaccatcagactggtgagacccgtggtgcccagcgccaccggcgagcccgacggccccgagggcgaggccctgcccgccgcctgccccgaggagctggccttcgaggccgaggtggagtacaacggcggcttccacctggccatcgacgtggacctggtgttcggcaagagcgcctacctgttcgtgaagctgagcagagtggtgggcagactgagactggtgttcaccagagtgcccttcacccactggttcttcagcttcgtggaggaccccctgatcgacttcgaggtgagaagccagttcgagggcagacccatgccccagctgaccagcatcatcgtgaaccagctgaagaagatcatcaagagaaagcacaccctgcccaactacaagatcagattcaagcccttcttcccctaccagaccctgcagggcttcgaggaggacgaggagcacatccacatccagcagtgggccctgaccgagggcagactgaaggtgaccctgctggagtgcagcagactgctgatcttcggcagctacgacagagaggccaacgtgcactgcaccctggagctgagcagcagcgtgtgggaggagaagcagagaagcagcatcaagaccgtggagctgatcaagggcaacctgcagagcgtgggcctgaccctgagactggtgcagagcaccgacggctacgccggccacgtgatcatcgagaccgtggcccccaacagccccgccgccatcgccgacctgcagagaggcgacagactgatcgccatcggcggcgtgaagatcaccagcaccctgcaggtgctgaagctgatcaagcaggccggcgacagagtgctggtgtactacgagagacccgtgggccagagcaaccagggcgccgtgctgcaggacaacttcggccagctggaggagaacttcctgagcagcagctgccagagcggctacgaggaggaggccgccggcctgaccgtggacaccgagagcagagagctggacagcgagttcgaggacctggccagcgacgtgagagcccagaacgagttcaaggacgaggcccagagcctgagccacagccccaagagagtgcccaccaccctgagcatcaagcccctgggcgccatcagccccgtgctgaacagaaagctggccgtgggcagccaccccctgccccccaagatccagagcaaggacggcaacaagcccccccccctgaagaccagcgagatcaccgaccccgcccaggtgagcaagcccacccagggcagcgccttcaagccccccgtgccccccagaccccaggccaaggtgcccctgcccagcgccgacgcccccaaccaggccgagcccgacgtgctggtggagaagcccgagaaggtggtgcccccccccctggtggacaagagcgccgagaagcaggccaagaacgtggacgccatcgacgacgccgccgcccccaagcagttcctggccaagcaggaggtggccaaggacgtgaccagcgagaccagctgccccaccaaggacagcagcgacgacagacagacctgggagagcagcgagatcctgtacagaaacaagctgggcaagtggaccagaaccagagccagctgcctgttcgacatcgaggcctgccacagatacctgaacatcgccctgtggtgcagagaccccttcaagctgggcggcctgatctgcctgggccacgtgagcctgaagctggaggacgtggccctgggctgcctggccaccagcaacaccgagtacctgagcaagctgagactggaggcccccagccccaaggccatcgtgaccagaaccgccctgagaaacctgagcatgcagaagggcttcaacgacaagttctgctacggcgacatcaccatccacttcaagtacctgaaggagggcgagagcgaccaccacgtggtgaccaacgtggagaaggagaaggagccccacctggtggaggaggtgagcgtgctgcccaaggaggagcagttcgtgggccagatgggcctgaccgagaacaagcacagcttccaggacacccagttccagaaccccacctggtgcgactactgcaagaagaaggtgtggaccaaggccgccagccagtgcatgttctgcgcctacgtgtgccacaagaagtgccaggagaagtgcctggccgagaccagcgtgtgcggcgccaccgacagaagaatcgacagaaccctgaagaacctgagactggagggccaggagaccctgctgggcctgccccccagagtggacgccgaggccagcaagagcgtgaacaagaccaccggcctgaccagacacatcatcaacaccagcagcagactgctgaacctgagacaggtgagcaagaccagactgagcgagcccggcaccgacctggtggagcccagccccaagcacacccccaacaccagcgacaacgagggcagcgacaccgaggtgtgcggccccaacagccccagcaagagaggcaacagcaccggcatcaagctggtgagaaaggagggcggcctggacgacagcgtgttcatcgccgtgaaggagatcggcagagacctgtacagaggcctgcccaccgaggagagaatccagaagctggagttcatgctggacaagctgcagaacgagatcgaccaggagctggagcacaacaacagcctggtgagagaggagaaggagaccaccgacaccagaaagaagagcctgctgagcgccgccctggccaagagcggcgagagactgcaggccctgaccctgctgatgatccactacagagccggcatcgaggacatcgagaccctggagagcctgagcctggaccagcacagcaagaagatcagcaagtacaccgacgacaccgaggaggacctggacaacgagatcagccagctgatcgacagccagcccttcagcagcatcagcgacgacctgttcggccccagcgagagcgtgtag

SEQ ID NO: 92641 - DNA, 3201 bp, synthetic construct
  misc_feature 1..3201: note = Description of Artificial Sequence: Synthetic coding sequence
  source 1..3201: mol_type = other DNA
atgggcttcgagctggacagattcgacggcgacgtggaccccgacctgaagtgcgccctgtgccacaaggtgctggaggaccccctgaccaccccctgcggccacgtgttctgcgccggctgcgtgctgccctgggtggtgcaggagggcagctgccccgccagatgcagaggcagactgagcgccaaggagctgaaccacgtgctgcccctgaagagactgatcctgaagctggacatcaagtgcgcctacgccaccagaggctgcggcagagtggtgaagctgcagcagctgcccgagcacctggagagatgcgacttcgcccccgccagatgcagacacgccggctgcggccaggtgctgctgagaagagacgtggaggcccacatgagagacgcctgcgacgccagacccgtgggcagatgccaggagggctgcggcctgcccctgacccacggcgagcagagagccggcggccactgctgcgccagagccctgagagcccacaacggcgccctgcaggccagactgggcgccctgcacaaggccctgaagaaggaggccctgagagccggcaagagagagaagagcctggtggcccagctggccgccgcccagctggagctgcagatgaccgccctgagataccagaagaagttcaccgagtacagcgccagactggacagcctgagcagatgcgtggccgccccccccggcggcaagggcgaggagaccaagagcctgaccctggtgctgcacagagacagcggcagcctgggcttcaacatcatcggcggcagacccagcgtggacaaccacgacggcagcagcagcgagggcatcttcgtgagcaagatcgtggacagcggccccgccgccaaggagggcggcctgcagatccacgacagaatcatcgaggtgaacggcagagacctgagcagagccacccacgaccaggccgtggaggccttcaagaccgccaaggagcccatcgtggtgcaggtgctgagaagaacccccagaaccaagatgttcaccccccccagcgagagccagctggtggacaccggcacccagaccgacatcaccttcgagcacatcatggccctgaccaagatgagcagccccagcccccccgtgctggacccctacctgctgcccgaggagcaccccagcgcccacgagtactacgaccccaacgactacatcggcgacatccaccaggagatggacagagaggagctggagctggaggaggtggacctgtacagaatgaacagccaggacaagctgggcctgaccgtgtgctacagaaccgacgacgaggacgacatcggcatctacatcagcgagatcgaccccaacagcatcgccgccaaggacggcagaatcagagagggcgacagaatcatccagatcaacggcatcgaggtgcagaacagagaggaggccgtggccctgctgaccagcgaggagaacaagaacttcagcctgctgatcgccagacccgagctgcagctggacgagggctggatggacgacgacagaaacgacttcctggacgacctgcacatggacatgctggaggagcagcaccaccaggccatgcagttcaccgccagcgtgctgcagcagaagaagcacgacgaggacggcggcaccaccgacaccgccaccatcctgagcaaccagcacgagaaggacagcggcgtgggcagaaccgacgagagcaccagaaacgacgagagcagcgagcaggagaacaacggcgacgacgccaccgccagcagcaaccccctggccggccagagaaagctgacctgcagccaggacaccctgggcagcggcgacctgcccttcagcaacgagagcttcatcagcgccgactgcaccgacgccgactacctgggcatccccgtggacgagtgcgagagattcagagagctgctggagctgaagtgccaggtgaagagcgccaccccctacggcctgtactaccccagcggccccctggacgccggcaagagcgaccccgagagcgtggacaaggagctggagctgctgaacgaggagctgagaagcatcgagctggagtgcctgagcatcgtgagagcccacaagatgcagcagctgaaggagcagtacagagagagctggatgctgcacaacagcggcttcagaaactacaacaccagcatcgacgtgagaagacacgagctgagcgacatcaccgagctgcccgagaagagcgacaaggacagcagcagcgcctacaacaccggcgagagctgcagaagcacccccctgaccctggagatcagccccgacaacagcctgagaagagccgccgagggcatcagctgccccagcagcgagggcgccgtgggcaccaccgaggcctacggccccgccagcaagaacctgctgagcatcaccgaggaccccgaggtgggcacccccacctacagccccagcctgaaggagctggaccccaaccagcccctggagagcaaggagagaagagccagcgacggcagcagaagccccacccccagccagaagctgggcagcgcctacctgcccagctaccaccacagcccctacaagcacgcccacatccccgcccacgcccagcactaccagagctacatgcagctgatccagcagaagagcgccgtggagtacgcccagagccagatgagcctggtgagcatgtgcaaggacctgagcagccccacccccagcgagcccagaatggagtggaaggtgaagatcagaagcgacggcaccagatacatcaccaagagacccgtgagagacagactgctgagagagagagccctgaagatcagagaggagagaagcggcatgaccaccgacgacgacgccgtgagcgagatgaagatgggcagatactggagcaaggaggagagaaagcagcacctggtgaaggccaaggagcagagaagaagaagagagttcatgatgcagagcagactggactgcctgaaggagcagcaggccgccgacgacagaaaggagatgaacatcctggagctgagccacaagaagatgatgaagaagagaaacaagaagatcttcgacaactggatgaccatccaggagctgctgacccacggcaccaagagccccgacggcaccagagtgtacaacagcttcctgagcgtgaccaccgtgtag

SEQ ID NO: 92642 - DNA, 2190 bp, synthetic construct
  misc_feature 1..2190: note = Description of Artificial Sequence: Synthetic coding sequence
  source 1..2190: mol_type = other DNA
atgggcttcgagctggacagattcgacggcgacgtggaccccgacctgaagtgcgccctgtgccacaaggtgctggaggaccccctgaccaccccctgcggccacgtgttctgcgccggctgcgtgctgccctgggtggtgcaggagggcagctgccccgccagatgcagaggcagactgagcgccaaggagctgaaccacgtgctgcccctgaagagactgatcctgaagctggacatcaagtgcgcctacgccaccagaggctgcggcagagtggtgaagctgcagcagctgcccgagcacctggagagatgcgacttcgcccccgccagatgcagacacgccggctgcggccaggtgctgctgagaagagacgtggaggcccacatgagagacgcctgcgacgccagacccgtgggcagatgccaggagggctgcggcctgcccctgacccacggcgagcagagagccggcggccactgctgcgccagagccctgagagcccacaacggcgccctgcaggccagactgggcgccctgcacaaggccctgaagaaggaggccctgagagccggcaagagagagaagagcctggtggcccagctggccgccgcccagctggagctgcagatgaccgccctgagataccagaagaagttcaccgagtacagcgccagactggacagcctgagcagatgcgtggccgccccccccggcggcaagggcgaggagaccaagagcctgaccctggtgctgcacagagacagcggcagcctgggcttcaacatcatcggcggcagacccagcgtggacaaccacgacggcagcagcagcgagggcatcttcgtgagcaagatcgtggacagcggccccgccgccaaggagggcggcctgcagatccacgacagaatcatcgaggtgaacggcagagacctgagcagagccacccacgaccaggccgtggaggccttcaagaccgccaaggagcccatcgtggtgcaggtgctgagaagaacccccagaaccaagatgttcaccccccccagcgagagccagctggtggacaccggcacccagaccgacatcaccttcgagcacatcatggccctgaccaagatgagcagccccagcccccccgtgctggacccctacctgctgcccgaggagcaccccagcgcccacgagtactacgaccccaacgactacatcggcgacatccaccaggagatggacagagaggagctggagctggaggaggtggacctgtacagaatgaacagccaggacaagctgggcctgaccgtgtgctacagaaccgacgacgaggacgacatcggcatctacatcagcgagatcgaccccaacagcatcgccgccaaggacggcagaatcagagagggcgacagaatcatccagatcaacggcatcgaggtgcagaacagagaggaggccgtggccctgctgaccagcgaggagaacaagaacttcagcctgctgatcgccagacccgagctgcagctggacgagggctggatggacgacgacagaaacgacttcctggacgacctgcacatggacatgctggaggagcagcaccaccaggccatgcagttcaccgccagcgtgctgcagcagaagaagcacgacgaggacggcggcaccaccgacaccgccaccatcctgagcaaccagcacgagaaggacagcggcgtgggcagaaccgacgagagcaccagaaacgacgagagcagcgagcaggagaacaacggcgacgacgccaccgccagcagcaaccccctggccggccagagaaagctgacctgcagccaggacaccctgggcagcggcgacctgcccttcagcaacgagagcttcatcagcgccgactgcaccgacgccgactacctgggcatccccgtggagggcgaggacccccagagaagagacgccctgcaccaccaggaggccagagccggcccccccgccgccggcgccagacccgaggaccccggcagagcccagagacacgaccacagaagaagaagaggcgagagagacgaggacggcgccctgctggagcagggcggcgaggaggccgcccccggcgagggccagggcgccgccgccgccgccagagtgcacgacgccgagcaggtgggcctgagccagggcgccgccagcagcagatag

SEQ ID NO: 92643 - DNA, 2352 bp, synthetic construct
  misc_feature 1..2352: note = Description of Artificial Sequence: Synthetic coding sequence
  source 1..2352: mol_type = other DNA
atgggctgcagcctgtgcagcctgcagaagcaggaggagcagtacaagctgctgtacgaggtgtgccaggtgaacggcagagacctgagcagagccacccacgaccaggccgtggaggccttcaagaccgccaaggagcccatcgtggtgcaggtgctgagaagaacccccagaaccaagatgttcaccccccccagcgagagccagctggtggacaccggcacccagaccgacatcaccttcgagcacatcatggccctgaccaagatgagcagccccagcccccccgtgctggacccctacctgctgcccgaggagcaccccagcgcccacgagtactacgaccccaacgactacatcggcgacatccaccaggagatggacagagaggagctggagctggaggaggtggacctgtacagaatgaacagccaggacaagctgggcctgaccgtgtgctacagaaccgacgacgaggacgacatcggcatctacatcagcgagatcgaccccaacagcatcgccgccaaggacggcagaatcagagagggcgacagaatcatccagatcaacggcatcgaggtgcagaacagagaggaggccgtggccctgctgaccagcgaggagaacaagaacttcagcctgctgatcgccagacccgagctgcagctggacgagggctggatggacgacgacagaaacgacttcctggacgacctgcacatggacatgctggaggagcagcaccaccaggccatgcagttcaccgccagcgtgctgcagcagaagaagcacgacgaggacggcggcaccaccgacaccgccaccatcctgagcaaccagcacgagaaggacagcggcgtgggcagaaccgacgagagcaccagaaacgacgagagcagcgagcaggagaacaacggcgacgacgccaccgccagcagcaaccccctggccggccagagaaagctgacctgcagccaggacaccctgggcagcggcgacctgcccttcagcaacgagagcttcatcagcgccgactgcaccgacgccgactacctgggcatccccgtggacgagtgcgagagattcagagagctgctggagctgaagtgccaggtgaagagcgccaccccctacggcctgtactaccccagcggccccctggacgccggcaagagcgaccccgagagcgtggacaaggagctggagctgctgaacgaggagctgagaagcatcgagctggagtgcctgagcatcgtgagagcccacaagatgcagcagctgaaggagcagtacagagagagctggatgctgcacaacagcggcttcagaaactacaacaccagcatcgacgtgagaagacacgagctgagcgacatcaccgagctgcccgagaagagcgacaaggacagcagcagcgcctacaacaccggcgagagctgcagaagcacccccctgaccctggagatcagccccgacaacagcctgagaagagccgccgagggcatcagctgccccagcagcgagggcgccgtgggcaccaccgaggcctacggccccgccagcaagaacctgctgagcatcaccgaggaccccgaggtgggcacccccacctacagccccagcctgaaggagctggaccccaaccagcccctggagagcaaggagagaagagccagcgacggcagcagaagccccacccccagccagaagctgggcagcgcctacctgcccagctaccaccacagcccctacaagcacgcccacatccccgcccacgcccagcactaccagagctacatgcagctgatccagcagaagagcgccgtggagtacgcccagagccagatgagcctggtgagcatgtgcaaggacctgagcagccccacccccagcgagcccagaatggagtggaaggtgaagatcagaagcgacggcaccagatacatcaccaagagacccgtgagagacagactgctgagagagagagccctgaagatcagagaggagagaagcggcatgaccaccgacgacgacgccgtgagcgagatgaagatgggcagatactggagcaaggaggagagaaagcagcacctggtgaaggccaaggagcagagaagaagaagagagttcatgatgcagagcagactggactgcctgaaggagcagcaggccgccgacgacagaaaggagatgaacatcctggagctgagccacaagaagatgatgaagaagagaaacaagaagatcttcgacaactggatgaccatccaggagctgctgacccacggcaccaagagccccgacggcaccagagtgtacaacagcttcctgagcgtgaccaccgtgtag

SEQ ID NO: 92644 - DNA, 2367 bp, synthetic construct
  misc_feature 1..2367: note = Description of Artificial Sequence: Synthetic coding sequence
  source 1..2367: mol_type = other DNA
atgaagatggagcacaagagaatgatcctgctgttcagcaagttcaccctgatccacaagccccacggcggcagatggtacctggtgaacggcagagacctgagcagagccacccacgaccaggccgtggaggccttcaagaccgccaaggagcccatcgtggtgcaggtgctgagaagaacccccagaaccaagatgttcaccccccccagcgagagccagctggtggacaccggcacccagaccgacatcaccttcgagcacatcatggccctgaccaagatgagcagccccagcccccccgtgctggacccctacctgctgcccgaggagcaccccagcgcccacgagtactacgaccccaacgactacatcggcgacatccaccaggagatggacagagaggagctggagctggaggaggtggacctgtacagaatgaacagccaggacaagctgggcctgaccgtgtgctacagaaccgacgacgaggacgacatcggcatctacatcagcgagatcgaccccaacagcatcgccgccaaggacggcagaatcagagagggcgacagaatcatccagatcaacggcatcgaggtgcagaacagagaggaggccgtggccctgctgaccagcgaggagaacaagaacttcagcctgctgatcgccagacccgagctgcagctggacgagggctggatggacgacgacagaaacgacttcctggacgacctgcacatggacatgctggaggagcagcaccaccaggccatgcagttcaccgccagcgtgctgcagcagaagaagcacgacgaggacggcggcaccaccgacaccgccaccatcctgagcaaccagcacgagaaggacagcggcgtgggcagaaccgacgagagcaccagaaacgacgagagcagcgagcaggagaacaacggcgacgacgccaccgccagcagcaaccccctggccggccagagaaagctgacctgcagccaggacaccctgggcagcggcgacctgcccttcagcaacgagagcttcatcagcgccgactgcaccgacgccgactacctgggcatccccgtggacgagtgcgagagattcagagagctgctggagctgaagtgccaggtgaagagcgccaccccctacggcctgtactaccccagcggccccctggacgccggcaagagcgaccccgagagcgtggacaaggagctggagctgctgaacgaggagctgagaagcatcgagctggagtgcctgagcatcgtgagagcccacaagatgcagcagctgaaggagcagtacagagagagctggatgctgcacaacagcggcttcagaaactacaacaccagcatcgacgtgagaagacacgagctgagcgacatcaccgagctgcccgagaagagcgacaaggacagcagcagcgcctacaacaccggcgagagctgcagaagcacccccctgaccctggagatcagccccgacaacagcctgagaagagccgccgagggcatcagctgccccagcagcgagggcgccgtgggcaccaccgaggcctacggccccgccagcaagaacctgctgagcatcaccgaggaccccgaggtgggcacccccacctacagccccagcctgaaggagctggaccccaaccagcccctggagagcaaggagagaagagccagcgacggcagcagaagccccacccccagccagaagctgggcagcgcctacctgcccagctaccaccacagcccctacaagcacgcccacatccccgcccacgcccagcactaccagagctacatgcagctgatccagcagaagagcgccgtggagtacgcccagagccagatgagcctggtgagcatgtgcaaggacctgagcagccccacccccagcgagcccagaatggagtggaaggtgaagatcagaagcgacggcaccagatacatcaccaagagacccgtgagagacagactgctgagagagagagccctgaagatcagagaggagagaagcggcatgaccaccgacgacgacgccgtgagcgagatgaagatgggcagatactggagcaaggaggagagaaagcagcacctggtgaaggccaaggagcagagaagaagaagagagttcatgatgcagagcagactggactgcctgaaggagcagcaggccgccgacgacagaaaggagatgaacatcctggagctgagccacaagaagatgatgaagaagagaaacaagaagatcttcgacaactggatgaccatccaggagctgctgacccacggcaccaagagccccgacggcaccagagtgtacaacagcttcctgagcgtgaccaccgtgtag

SEQ ID NO: 92645 - DNA, 2331 bp, synthetic construct
  misc_feature 1..2331: note = Description of Artificial Sequence: Synthetic coding sequence
  source 1..2331: mol_type = other DNA
atgagcggcaagagacagttcttcctgaagcccctggccctgctgacctgctggcccagcaccgtgaacggcaaggacctgagcaaggccacccacgaggaggccgtggaggccttcagaaacgccaaggagcccatcgtggtgcaggtgctgagaagaacccccctgagcagacccgcctacggcatggccagcgaggtgcagctgatgaacgccagcacccagaccgacatcaccttcgagcacatcatggccctggccaagctgagaccccccaccccccccgtgcccgacatctgccccttcctgctgagcgacagctgccacagcctgcaccccatggagcacgagttctacgaggacaacgagtacatcagcagcctgcccgccgacgccgacagaaccgaggacttcgagtacgaggaggtggagctgtgcagagtgagcagccaggagaagctgggcctgaccgtgtgctacagaaccgacgacgaggaggacaccggcatctacgtgagcgaggtggaccccaacagcatcgccgccaaggacggcagaatcagagagggcgacagaatcctgcagatcaacggcgaggacgtgcagaacagagaggaggccgtggccctgctgagcaacgacgagtgcaagagaatcgtgctgctggtggccagacccgagatccagctggacgagggctggctggaggacgagagaaacgagttcctggaggagctgaacctggagatgctggaggaggagcacaacgaggccatgcagcccaccgccaacgaggtggagcagcccaagaagcaggaggaggaggagggcaccaccgacaccgccaccagcagcagcaacaaccacgagaaggacagcggcgtgggcagaaccgacgagagcctgagaaacgacgagagcagcgagcaggagaacgccgccgaggaccccaacagcaccagcctgaagagcaagagagacctgggccagagccaggacaccctgggcagcgtggagctgcagtacaacgagagcctggtgagcggcgagtacatcgacagcgactgcatcggcaaccccgacgaggactgcgagagattcagacagctgctggagctgaagtgcaagatcagaaaccacggcgagtacgacctgtactacagcagcagcaccatcgagtgcaaccagggcgagcaggagggcgtggagcacgagctgcagctgctgaacgaggagctgagaaacatcgagctggagtgccagaacatcatgcaggcccacagactgcagaaggtgaccgaccagtacggcgacatctggaccctgcacgacggcggcttcagaaactacaacaccagcatcgacatgcagagaggcaagctggacgacatcatggagcaccccgagaagagcgacaaggacagcagcagcgcctacaacaccgccgagagctgcagaagcacccccctgaccgtggacagaagccccgacagcagcctgcccagagtgatcaacctgaccaacaagaagaacctgagaagcaccatggccgccacccagagcagcagcggccagagcagcaaggagagcaccagcaccaaggccaagaccaccgagcagggctgcagcgccgagagcaaggagaaggtgctggagggcagcaagctgcccgaccaggagaaggccgtgagcgagcacatcccctacctgagcccctaccacagcagcagctacagatacgccaacatccccgcccacgccagacactaccagagctacatgcagctgatccagcagaagagcgccgtggagtacgcccagagccagctgagcctggtgagcatgtgcaaggagagccagaagtgcagcgagcccaagatggagtggaaggtgaagatcagaagcgacggcaccagatacatcaccaagagacccgtgagagacagaatcctgaaggagagagccctgaagatcaaggaggagagaagcggcatgaccaccgacgacgacaccatgagcgagatgaagatgggcagatactggagcaaggaggagagaaagcagcacctggtgagagccaaggagcagagaagaagaagagagttcatgatgagaagcagactggagtgcctgaaggagagcccccagagcggcagcgagggcaagaaggagatcaacatcatcgagctgagccacaagaagatgatgaagaagagaaacaagaagatcctggacaactggatgaccatccaggagctgatgacccacggcgccaagagccccgacggcaccagagtgcacaacgccttcctgagcgtgaccaccgtgtag

SEQ ID NO: 92646 - DNA, 3111 bp, synthetic construct
  misc_feature 1..3111: note = Description of Artificial Sequence: Synthetic coding sequence
  source 1..3111: mol_type = other DNA
atgggcttcgccctggagagattcgccgaggccgtggaccccgccctggagtgcaagctgtgcggccaggtgctggaggagcccctgtgcaccccctgcggccacgtgttctgcgccagctgcctgctgccctgggccgtgagaagaagaagatgccccctgcagtgccagcccctggcccccggcgagctgtacagagtgctgcccctgagaagcctgatccagaagctgagagtgcagtgcgactacagagccagaggctgcggccacagcgtgagactgcacgagctggaggcccacgtggagcactgcgacttcggccccgccagaagactgagaagcagaggcggctgcgccagcggcctgggcggcggcgaggtgcccgccagaggcggctgcggccccacccccagagccggcagaggcggcggcgccagaggcggcccccccggcggcagatggggcagaggcagaggccccggccccagagtgctggcctggagaagaagagagaaggccctgctggcccagctgtgggccctgcagggcgaggtgcagctgaccgccagaagataccaggagaagttcacccagtacatggcccacgtgagaaacttcgtgggcgacctgggcggcggccacagaagagacggcgagcacaagcccttcaccatcgtgctggagagagagaacgacaccctgggcttcaacatcatcggcggcagacccaaccagaacaaccaggagggcaccagcaccgagggcatctacgtgagcaagatcctggagaacggccccgccgacagagccgacggcctggagatccacgacaagatcatggaggtgaacggcaaggacctgagcaaggccacccacgaggaggccgtggaggccttcagaaacgccaaggagcccatcgtggtgcaggtgctgagaagaacccccctgagcagacccgcctacggcatggccagcgaggtgcagctgatgaacgccagcacccagaccgacatcaccttcgagcacatcatggccctggccaagctgagaccccccaccccccccgtgcccgacatctgccccttcctgctgagcgacagctgccacagcctgcaccccatggagcacgagttctacgaggacaacgagtacatcagcagcctgcccgccgacgccgacagaaccgaggacttcgagtacgaggaggtggagctgtgcagagtgagcagccaggagaagctgggcctgaccgtgtgctacagaaccgacgacgaggaggacaccggcatctacgtgagcgaggtggaccccaacagcatcgccgccaaggacggcagaatcagagagggcgacagaatcctgcagatcaacggcgaggacgtgcagaacagagaggaggccgtggccctgctgagcaacgacgagtgcaagagaatcgtgctgctggtggccagacccgagatccagctggacgagggctggctggaggacgagagaaacgagttcctggaggagctgaacctggagatgctggaggaggagcacaacgaggccatgcagcccaccgccaacgaggtggagcagcccaagaagcaggaggaggaggagggcaccaccgacaccgccaccagcagcagcaacaaccacgagaaggacagcggcgtgggcagaaccgacgagagcctgagaaacgacgagagcagcgagcaggagaacgccgccgaggaccccaacagcaccagcctgaagagcaagagagacctgggccagagccaggacaccctgggcagcgtggagctgcagtacaacgagagcctggtgagcggcgagtacatcgacagcgactgcatcggcaaccccgacgaggactgcgagagattcagacagctgctggagctgaagtgcaagatcagaaaccacggcgagtacgacctgtactacagcagcagcaccatcgagtgcaaccagggcgagcaggagggcgtggagcacgagctgcagctgctgaacgaggagctgagaaacatcgagctggagtgccagaacatcatgcaggcccacagactgcagaaggtgaccgaccagtacggcgacatctggaccctgcacgacggcggcttcagaaactacaacaccagcatcgacatgcagagaggcaagctggacgacatcatggagcaccccgagaagagcgacaaggacagcagcagcgcctacaacaccgccgagagctgcagaagcacccccctgaccgtggacagaagccccgacagcagcctgcccagagtgatcaacctgaccaacaagaagaacctgagaagcaccatggccgccacccagagcagcagcggccagagcagcaaggagagcaccagcaccaaggccaagaccaccgagcagggctgcagcgccgagagcaaggagaaggtgctggagggcagcaagctgcccgaccaggagaaggccgtgagcgagcacatcccctacctgagcccctaccacagcagcagctacagatacgccaacatccccgcccacgccagacactaccagagctacatgcagctgatccagcagaagagcgccgtggagtacgcccagagccagctgagcctggtgagcatgtgcaaggagagccagaagtgcagcgagcccaagatggagtggaaggtgaagatcagaagcgacggcaccagatacatcaccaagagacccgtgagagacagaatcctgaaggagagagccctgaagatcaaggaggagagaagcggcatgaccaccgacgacgacaccatgagcgagatgaagatgggcagatactggagcaaggaggagagaaagcagcacctggtgagagccaaggagcagagaagaagaagagagttcatgatgagaagcagactggagtgcctgaaggagagcccccagagcggcagcgagggcaagaaggagatcaacatcatcgagctgagccacaagaagatgatgaagaagagaaacaagaagatcctggacaactggatgaccatccaggagctgatgacccacggcgccaagagccccgacggcaccagagtgcacaacgccttcctgagcgtgaccaccgtgtag

SEQ ID NO: 92647 - DNA, 2337 bp, synthetic construct
  misc_feature 1..2337: note = Description of Artificial Sequence: Synthetic coding sequence
  source 1..2337: mol_type = other DNA
atgggctgcaacctgtgcaccttccagaagagagaggagcactacaagctgctgtacgaggtgagccaggtgaacggcaaggacctgagcaaggccacccacgaggaggccgtggaggccttcagaaacgccaaggagcccatcgtggtgcaggtgctgagaagaacccccctgagcagacccgcctacggcatggccagcgaggtgcagctgatgaacgccagcacccagaccgacatcaccttcgagcacatcatggccctggccaagctgagaccccccaccccccccgtgcccgacatctgccccttcctgctgagcgacagctgccacagcctgcaccccatggagcacgagttctacgaggacaacgagtacatcagcagcctgcccgccgacgccgacagaaccgaggacttcgagtacgaggaggtggagctgtgcagagtgagcagccaggagaagctgggcctgaccgtgtgctacagaaccgacgacgaggaggacaccggcatctacgtgagcgaggtggaccccaacagcatcgccgccaaggacggcagaatcagagagggcgacagaatcctgcagatcaacggcgaggacgtgcagaacagagaggaggccgtggccctgctgagcaacgacgagtgcaagagaatcgtgctgctggtggccagacccgagatccagctggacgagggctggctggaggacgagagaaacgagttcctggaggagctgaacctggagatgctggaggaggagcacaacgaggccatgcagcccaccgccaacgaggtggagcagcccaagaagcaggaggaggaggagggcaccaccgacaccgccaccagcagcagcaacaaccacgagaaggacagcggcgtgggcagaaccgacgagagcctgagaaacgacgagagcagcgagcaggagaacgccgccgaggaccccaacagcaccagcctgaagagcaagagagacctgggccagagccaggacaccctgggcagcgtggagctgcagtacaacgagagcctggtgagcggcgagtacatcgacagcgactgcatcggcaaccccgacgaggactgcgagagattcagacagctgctggagctgaagtgcaagatcagaaaccacggcgagtacgacctgtactacagcagcagcaccatcgagtgcaaccagggcgagcaggagggcgtggagcacgagctgcagctgctgaacgaggagctgagaaacatcgagctggagtgccagaacatcatgcaggcccacagactgcagaaggtgaccgaccagtacggcgacatctggaccctgcacgacggcggcttcagaaactacaacaccagcatcgacatgcagagaggcaagctggacgacatcatggagcaccccgagaagagcgacaaggacagcagcagcgcctacaacaccgccgagagctgcagaagcacccccctgaccgtggacagaagccccgacagcagcctgcccagagtgatcaacctgaccaacaagaagaacctgagaagcaccatggccgccacccagagcagcagcggccagagcagcaaggagagcaccagcaccaaggccaagaccaccgagcagggctgcagcgccgagagcaaggagaaggtgctggagggcagcaagctgcccgaccaggagaaggccgtgagcgagcacatcccctacctgagcccctaccacagcagcagctacagatacgccaacatccccgcccacgccagacactaccagagctacatgcagctgatccagcagaagagcgccgtggagtacgcccagagccagctgagcctggtgagcatgtgcaaggagagccagaagtgcagcgagcccaagatggagtggaaggtgaagatcagaagcgacggcaccagatacatcaccaagagacccgtgagagacagaatcctgaaggagagagccctgaagatcaaggaggagagaagcggcatgaccaccgacgacgacaccatgagcgagatgaagatgggcagatactggagcaaggaggagagaaagcagcacctggtgagagccaaggagcagagaagaagaagagagttcatgatgagaagcagactggagtgcctgaaggagagcccccagagcggcagcgagggcaagaaggagatcaacatcatcgagctgagccacaagaagatgatgaagaagagaaacaagaagatcctggacaactggatgaccatccaggagctgatgacccacggcgccaagagccccgacggcaccagagtgcacaacgccttcctgagcgtgaccaccgtgtag

SEQ ID NO: 92648 - DNA, 1158 bp, synthetic construct
  misc_feature 1..1158: note = Description of Artificial Sequence: Synthetic coding sequence
  source 1..1158: mol_type = other DNA
atgaagctggtgagaaagaacatcgagaaggacaacgccggccaggtgaccctggtgcccgaggagcccgaggacatgtggcacacctacaacctggtgcaggtgggcgacagcctgagagccagcaccatcagaaaggtgcagaccgagagcagcaccggcagcgtgggcagcaacagagtgagaaccaccctgaccctgtgcgtggaggccatcgacttcgacagccaggcctgccagctgagagtgaagggcaccaacatccaggagaacgagtacgtgaagatgggcgcctaccacaccatcgagctggagcccaacagacagttcaccctggccaagaagcagtgggacagcgtggtgctggagagaatcgagcaggcctgcgaccccgcctggagcgccgacgtggccgccgtggtgatgcaggagggcctggcccacatctgcctggtgacccccagcatgaccctgaccagagccaaggtggaggtgaacatccccagaaagagaaagggcaactgcagccagcacgacagagccctggagagattctacgagcaggtggtgcaggccatccagagacacatccacttcgacgtggtgaagtgcatcctggtggccagccccggcttcgtgagagagcagttctgcgactacctgttccagcaggccgtgaagaccgacaacaagctgctgctggagaacagaagcaagttcctgcaggtgcacgccagcagcggccacaagtacagcctgaaggaggccctgtgcgaccccaccgtggccagcagactgagcgacaccaaggccgccggcgaggtgaaggccctggacgacttctacaagatgctgcagcacgagcccgacagagccttctacggcctgaagcaggtggagaaggccaacgaggccatggccatcgacaccctgctgatcagcgacgagctgttcagacaccaggacgtggccaccagaagcagatacgtgagactggtggacagcgtgaaggagaacgccggcaccgtgagaatcttcagcagcctgcacgtgagcggcgagcagctgagccagctgaccggcgtggccgccatcctgagattccccgtgcccgagctgagcgaccaggagggcgacagcagcagcgaggaggactag

SEQ ID NO: 92649 - DNA, 855 bp, synthetic construct
  misc_feature 1..855: note = Description of Artificial Sequence: Synthetic coding sequence
  source 1..855: mol_type = other DNA
atggccagctacccctacagacagggctgccccggcgccgccggccaggcccccggcgccccccccggcagctactaccccggcccccccaacagcggcggccagtacggcagcggcctgccccccggcggcggctacggcggccccgcccccggcggcccctacggcccccccgccggcggcggcccctacggccaccccaaccccggcatgttccccagcggcacccccggcggcccctacggcggcgccgcccccggcggcccctacggccagcccccccccagcagctacggcgcccagcagcccggcctgtacggccagggcggcgccccccccaacgtggaccccgaggcctacagctggttccagagcgtggacagcgaccacagcggctacatcagcatgaaggagctgaagcaggccctggtgaactgcaactggagcagcttcaacgacgagacctgcctgatgatgatcaacatgttcgacaagaccaagagcggcagaatcgacgtgtacggcttcagcgccctgtggaagttcatccagcagtggaagaacctgttccagcagtacgacagagacagaagcggcagcatcagctacaccgagctgcagcaggccctgagccagatgggctacaacctgagcccccagttcacccagctgctggtgagcagatactgccccagaagcgccaaccccgccatgcagctggacagattcatccaggtgtgcacccagctgcaggtgctgaccgaggccttcagagagaaggacaccgccgtgcagggcaacatcagactgagcttcgaggacttcgtgaccatgaccgccagcagaatgctgtag

SEQ ID NO: 92650 - DNA, 423 bp, synthetic construct
  misc_feature 1..423: note = Description of Artificial Sequence: Synthetic coding sequence
  source 1..423: mol_type = other DNA
atggccagctacccctacagacagggctgccccggcgccgccggccaggcccccggcgccccccccggcagctactaccccggcccccccaacagcggcggccagtacggcagcggcctgccccccggcggcggctacggcggccccgcccccggcggcccctacggcccccccgccggcggcggcccctacggccaccccaaccccggcatgttccccagcggcacccccggcggcccctacggcggcgccgcccccggcggcccctacggccagcccccccccagcagctacggcgcccagcagcccggcctgtacggccagggcatccacgccgagggcgccgcccccgtgtgggacatgctgagcctgtggcagagagagggcgccggcgagctggccagaatgcacaacgccagctag

SEQ ID NO: 92651 - DNA, 1146 bp, synthetic construct
  misc_feature 1..1146: note = Description of Artificial Sequence: Synthetic coding sequence
  source 1..1146: mol_type = other DNA
atgcacctgctggccatcctgttctgcgccctgtggagcgccgtgctggccgagaacagcgacgactacgacctgatgtacgtgaacctggacaacgagatcgacaacggcctgcaccccaccgaggaccccaccccctgcgcctgcggccaggagcacagcgagtgggacaagctgttcatcatgctggagaacagccagatgagagagagaatgctgctgcaggccaccgacgacgtgctgagaggcgagctgcagagactgagagaggagctgggcagactggccgagagcctggccagaccctgcgcccccggcgcccccgccgaggccagactgaccagcgccctggacgagctgctgcaggccaccagagacgccggcagaagactggccagaatggagggcgccgaggcccagagacccgaggaggccggcagagccctggccgccgtgctggaggagctgagacagaccagagccgacctgcacgccgtgcagggctgggccgccagaagctggctgcccgccggctgcgagaccgccatcctgttccccatgagaagcaagaagatcttcggcagcgtgcaccccgtgagacccatgagactggagagcttcagcgcctgcatctgggtgaaggccaccgacgtgctgaacaagaccatcctgttcagctacggcaccaagagaaacccctacgagatccagctgtacctgagctaccagagcatcgtgttcgtggtgggcggcgaggagaacaagctggtggccgaggccatggtgagcctgggcagatggacccacctgtgcggcacctggaacagcgaggagggcctgaccagcctgtgggtgaacggcgagctggccgccaccaccgtggagatggccaccggccacatcgtgcccgagggcggcatcctgcagatcggccaggagaagaacggctgctgcgtgggcggcggcttcgacgagaccctggccttcagcggcagactgaccggcttcaacatctgggacagcgtgctgagcaacgaggagatcagagagaccggcggcgccgagagctgccacatcagaggcaacatcgtgggctggggcgtgaccgagatccagccccacggcggcgcccagtacgtgagctag

SEQ ID NO: 92652 - DNA, 1422 bp, synthetic construct
  misc_feature 1..1422: note = Description of Artificial Sequence: Synthetic coding sequence
  source 1..1422: mol_type = other DNA
atgggcagcggcaactgggaggtgaccggccccccctgcggcagcagatgcgagagaccccccggcctgcccagaggcgtgcacggccagttcagaagcgccgtgggcctgagcggcctgagatggttcagaagattccaggaggtgacctggacccacctgcagaacatcgccagcaactacaacgtgagctacaacgtggacgtgagattcagaagcctggccgaggagagccaggccgtggcccaggccgtgaacagaagccaggccagcgtgcagggcgagctggcccagctgaaggcctgggtgagaaagctgcagagaagaggcagaaaggtggacaccagactgagagccctggacctgaccctgggcgagagaagccagcagagagccagagagagaaaggcccacaaggcccagagagacgccctgcaggacagcctggccagactggagggcctggtgcacagccagggcgccagactggccgccctggagggcagactgcccgtggcccaccccggcaccgccgccctgggccccgccctggtgcccacccccacccagcccgaggagctgggccccaccagcctgaagctgcagagagacagacaggagctgagagccgccagcgagcacagaggccccccccaggacagcagcgcccccctgcagggcagaagagagccccccgccagcggcagccacagagtgctgagcggcaccgcccccaaggaccccagacagcaggcctggagcccccaggtgcccggcgagatctgcggcgtgggccccaccctggtgttccccaacgccagcaccagaaacgtggtgttcctgagccccggcttcgtgaccgccctgagagccctgagcttctgcagctgggtgagaaccgccagcggcagactgggcaccctgctgagctacgccaccgaggacaacgacaacaagctggtgctgcacggcagagacagcctgctgcccggcagcatccacttcgtgatcggcgaccccgccttcagagagctgcccctgcagctgctgctggacggccagtggcaccacatctgcgtgatctggaccagcacccagggcagatactggctgcacgtggacagaagactggtggccaccggcagcagattcagagagggctacgagatcccccccggcggcagcctggtgctgggccaggagcaggacagcgtgggcggcggcttcgacagcagcgaggccttcgtgggcagcatgagcggcctggccatctgggacagagccctggtgcccggcgaggtggccaacctggccatcggcaaggagttccccaccggcgccatcctgaccctggccaacgccgccctggccggcggcttcgtgcagggcgccaactgcacctgcctggagagatgcccctag

SEQ ID NO: 92653 - DNA, 1437 bp, synthetic construct
  misc_feature 1..1437: note = Description of Artificial Sequence: Synthetic coding sequence
  source 1..1437: mol_type = other DNA
atgggctgcagctggagaaagaccctgagcttcttcctggtgttcgtgcccatctacctgcacggcgccagcagccaggaggccgcccccgtgggccccagaaagcccttcttcgagagactgagaagactggaggagcagttcagaagattccaggaggtgacctggacccacctgcagaacatcgccagcaactacaacgtgagctacaacgtggacgtgagattcagaagcctggccgaggagagccaggccgtggcccaggccgtgaacagaagccaggccagcgtgcagggcgagctggcccagctgaaggcctgggtgagaaagctgcagagaagaggcagaaaggtggacaccagactgagagccctggacctgaccctgggcgagagaagccagcagagagccagagagagaaaggcccacaaggcccagagagacgccctgcaggacagcctggccagactggagggcctggtgcacagccagggcgccagactggccgccctggagggcagactgcccgtggcccaccccggcaccgccgccctgggccccgccctggtgcccacccccacccagcccgaggagctgggccccaccagcctgaagctgcagagagacagacaggagctgagagccgccagcgagcacagaggccccccccaggacagcagcgcccccctgcagggcagaagagagccccccgccagcggcagccacagagtgctgagcggcaccgcccccaaggaccccagacagcaggcctggagcccccaggtgcccggcgagatctgcggcgtgggccccaccctggtgttccccaacgccagcaccagaaacgtggtgttcctgagccccggcttcgtgaccgccctgagagccctgagcttctgcagctgggtgagaaccgccagcggcagactgggcaccctgctgagctacgccaccgaggacaacgacaacaagctggtgctgcacggcagagacagcctgctgcccggcagcatccacttcgtgatcggcgaccccgccttcagagagctgcccctgcagctgctgctggacggccagtggcaccacatctgcgtgatctggaccagcacccagggcagatactggctgcacgtggacagaagactggtggccaccggcagcagattcagagagggctacgagatcccccccggcggcagcctggtgctgggccaggagcaggacagcgtgggcggcggcttcgacagcagcgaggccttcgtgggcagcatgagcggcctggccatctgggacagagccctggtgcccggcgaggtggccaacctggccatcggcaaggagttccccaccggcgccatcctgaccctggccaacgccgccctggccggcggcttcgtgcagggcgccaactgcacctgcctggagagatgcccctag

SEQ ID NO: 92654 - DNA, 1167 bp, synthetic construct
  misc_feature 1..1167: note = Description of Artificial Sequence: Synthetic coding sequence
  source 1..1167: mol_type = other DNA
atgaagtggctgctgctgctgggcctggtggccctgagcgagtgcatcatgtacaaggtgcccctgatcagaaagaagagcctgagaagaaccctgagcgagagaggcctgctgaaggacttcctgaagaagcacaacctgaaccccgccagaaagtacttcccccagtggaaggcccccaccctggtggacgagcagcccctggagaactacctggacatggagtacttcggcaccatcggcatcggcacccccgcccaggacttcaccgtggtgttcgacaccggcagcagcaacctgtgggtgcccagcgtgtactgcagcagcctggcctgcaccaaccacaacagattcaaccccgaggacagcagcacctaccagagcaccagcgagaccgtgagcatcacctacggcaccggcagcatgaccggcatcctgggctacgacaccgtgcaggtgggcggcatcagcgacaccaaccagatcttcggcctgagcgagaccgagcccggcagcttcctgtactacgcccccttcgacggcatcctgggcctggcctaccccagcatcagcagcagcggcgccacccccgtgttcgacaacatctggaaccagggcctggtgagccaggacctgttcagcgtgtacctgagcgccgacgaccagagcggcagcgtggtgatcttcggcggcatcgacagcagctactacaccggcagcctgaactgggtgcccgtgaccgtggagggctactggcagatcaccgtggacagcatcaccatgaacggcgaggccatcgcctgcgccgagggctgccaggccatcgtggacaccggcaccagcctgctgaccggccccaccagccccatcgccaacatccagagcgacatcggcgccagcgagaacagcgacggcgacatggtggtgagctgcagcgccatcagcagcctgcccgacatcgtgttcaccatcaacggcgtgcagtaccccgtgccccccagcgcctacatcctgcagagcgagggcagctgcatcagcggcttccagggcatgaacctgcccaccgagagcggcgagctgtggatcctgggcgacgtgttcatcagacagtacttcaccgtgttcgacagagccaacaaccaggtgggcctggcccccgtggcctag

SEQ ID NO: 92655 - DNA, 849 bp, synthetic construct
  misc_feature 1..849: note = Description of Artificial Sequence: Synthetic coding sequence
  source 1..849: mol_type = other DNA
atgaagtggctgctgctgctgggcctggtggccctgagcgagtgcatcatgtacaaggtgcccctgatcagaaagaagagcctgagaagaaccctgagcgagagaggcctgctgaaggacttcctgaagaagcacaacctgaaccccgccagaaagtacttcccccagtggaaggcccccaccctggtggacgagcagcccctggagaactacctggacatggagtacttcggcaccatcggcatcggcacccccgcccaggacttcaccgtggtgttcgacaccggcagcagcaacctgtgggtgcccagcgtgtactgcagcagcctggcctgcaccaaccacaacagattcaaccccgaggacagcagcacctaccagagcaccagcgagaccgtgagcatcacctacggcaccggcagcatgaccggcatcctgggctacgacaccgtgcagaccgtggccatctggagaagcgccgccatgggcctggtgagccaggacctgttcagcgtgtacctgagcgccgacgaccagagcggcagcgtggtgatcttcggcggcatcgacagcagctactacaccggcagcctgaactgggtgcccgtgaccgtggagggctactggcagatcaccgtggacagcatcaccatgaacggcgaggccatcgcctgcgccgagggctgccaggccatcgtggacaccggcaccagcctgctgaccggccccaccagccccatcgccaacatccagagcgacatcggcgccagcgagaacagcgacggcgacatggtggtgagctgcagcgccatcagcagcctgcccgacatcgtgttcaccatcaactag

SEQ ID NO: 92656 - DNA, 750 bp, synthetic construct
  misc_feature 1..750: note = Description of Artificial Sequence: Synthetic coding sequence
  source 1..750: mol_type = other DNA
atgaccggcatcctgggctacgacaccgtgcaggtgggcggcatcagcgacaccaaccagatcttcggcctgagcgagaccgagcccggcagcttcctgtactacgcccccttcgacggcatcctgggcctggcctaccccagcatcagcagcagcggcgccacccccgtgttcgacaacatctggaaccagggcctggtgagccaggacctgttcagcgtgtacctgagcgccgacgaccagagcggcagcgtggtgatcttcggcggcatcgacagcagctactacaccggcagcctgaactgggtgcccgtgaccgtggagggctactggcagatcaccgtggacagcatcaccatgaacggcgaggccatcgcctgcgccgagggctgccaggccatcgtggacaccggcaccagcctgctgaccggccccaccagccccatcgccaacatccagagcgacatcggcgccagcgagaacagcgacggcgacatggtggtgagctgcagcgccatcagcagcctgcccgacatcgtgttcaccatcaacggcgtgcagtaccccgtgccccccagcgcctacatcctgcagctgcccagcgagggcagctgcatcagcggcttccagggcatgaacctgcccaccgagagcggcgagctgtggatcctgggcgacgtgttcatcagacagtacttcaccgtgttcgacagagccaacaaccaggtgggcctggcccccgtggcctag

SEQ ID NO: 92657 - DNA, 1167 bp, synthetic construct
  misc_feature 1..1167: note = Description of Artificial Sequence: Synthetic coding sequence
  source 1..1167: mol_type = other DNA
atgaagtggctgctgctgctgggcctggtggccctgagcgagtgcatcatgtacaaggtgcccctgatcagaaagaagagcctgagaagaaccctgagcgagagaggcctgctgaaggacttcctgaagaagcacaacctgaaccccgccagaaagtacttcccccagtgggaggcccccaccctggtggacgagcagcccctggagaactacctggacatggagtacttcggcaccatcggcatcggcacccccgcccaggacttcaccgtggtgttcgacaccggcagcagcaacctgtgggtgcccagcgtgtactgcagcagcctggcctgcaccaaccacaacagattcaaccccgaggacagcagcacctaccagagcaccagcgagaccgtgagcatcacctacggcaccggcagcatgaccggcatcctgggctacgacaccgtgcaggtgggcggcatcagcgacaccaaccagatcttcggcctgagcgagaccgagcccggcagcttcctgtactacgcccccttcgacggcatcctgggcctggcctaccccagcatcagcagcagcggcgccacccccgtgttcgacaacatctggaaccagggcctggtgagccaggacctgttcagcgtgtacctgagcgccgacgaccagagcggcagcgtggtgatcttcggcggcatcgacagcagctactacaccggcagcctgaactgggtgcccgtgaccgtggagggctactggcagatcaccgtggacagcatcaccatgaacggcgaggccatcgcctgcgccgagggctgccaggccatcgtggacaccggcaccagcctgctgaccggccccaccagccccatcgccaacatccagagcgacatcggcgccagcgagaacagcgacggcgacatggtggtgagctgcagcgccatcagcagcctgcccgacatcgtgttcaccatcaacggcgtgcagtaccccgtgccccccagcgcctacatcctgcagagcgagggcagctgcatcagcggcttccagggcatgaacctgcccaccgagagcggcgagctgtggatcctgggcgacgtgttcatcagacagtacttcaccgtgttcgacagagccaacaaccaggtgggcctggcccccgtggcctag

SEQ ID NO: 92658 - DNA, 1167 bp, synthetic construct
  misc_feature 1..1167: note = Description of Artificial Sequence: Synthetic coding sequence
  source 1..1167: mol_type = other DNA
atgaagtggctgctgctgctgggcctggtggccctgagcgagtgcatcatgtacaaggtgcccctgatcagaaagaagagcctgagaagaaccctgagcgagagaggcctgctgaaggacttcctgaagaagcacaacctgaaccccgccagaaagtacttcccccagtgggaggcccccaccctggtggacgagcagcccctggagaactacctggacatggagtacttcggcaccatcggcatcggcacccccgcccaggacttcaccgtggtgttcgacaccggcagcagcaacctgtgggtgcccagcgtgtactgcagcagcctggcctgcaccaaccacaacagattcaaccccgaggacagcagcacctaccagagcaccagcgagaccgtgagcatcacctacggcaccggcagcatgaccggcatcctgggctacgacaccgtgcaggtgggcggcatcagcgacaccaaccagatcttcggcctgagcgagaccgagcccggcagcttcctgtactacgcccccttcgacggcatcctgggcctggcctaccccagcatcagcagcagcggcgccacccccgtgttcgacaacatctggaaccagggcctggtgagccaggacctgttcagcgtgtacctgagcgccgacgacaagagcggcagcgtggtgatcttcggcggcatcgacagcagctactacaccggcagcctgaactgggtgcccgtgaccgtggagggctactggcagatcaccgtggacagcatcaccatgaacggcgagaccatcgcctgcgccgagggctgccaggccatcgtggacaccggcaccagcctgctgaccggccccaccagccccatcgccaacatccagagcgacatcggcgccagcgagaacagcgacggcgacatggtggtgagctgcagcgccatcagcagcctgcccgacatcgtgttcaccatcaacggcgtgcagtaccccgtgccccccagcgcctacatcctgcagagcgagggcagctgcatcagcggcttccagggcatgaacgtgcccaccgagagcggcgagctgtggatcctgggcgacgtgttcatcagacagtacttcaccgtgttcgacagagccaacaaccaggtgggcctggcccccgtggcctag

SEQ ID NO: 92659 - DNA, 849 bp, synthetic construct
  misc_feature 1..849: note = Description of Artificial Sequence: Synthetic coding sequence
  source 1..849: mol_type = other DNA
atgaagtggctgctgctgctgggcctggtggccctgagcgagtgcatcatgtacaaggtgcccctgatcagaaagaagagcctgagaagaaccctgagcgagagaggcctgctgaaggacttcctgaagaagcacaacctgaaccccgccagaaagtacttcccccagtgggaggcccccaccctggtggacgagcagcccctggagaactacctggacatggagtacttcggcaccatcggcatcggcacccccgcccaggacttcaccgtggtgttcgacaccggcagcagcaacctgtgggtgcccagcgtgtactgcagcagcctggcctgcaccaaccacaacagattcaaccccgaggacagcagcacctaccagagcaccagcgagaccgtgagcatcacctacggcaccggcagcatgaccggcatcctgggctacgacaccgtgcagaccgtggccatctggagaagcgccgccatgggcctggtgagccaggacctgttcagcgtgtacctgagcgccgacgaccagagcggcagcgtggtgatcttcggcggcatcgacagcagctactacaccggcagcctgaactgggtgcccgtgaccgtggagggctactggcagatcaccgtggacagcatcaccatgaacggcgaggccatcgcctgcgccgagggctgccaggccatcgtggacaccggcaccagcctgctgaccggccccaccagccccatcgccaacatccagagcgacatcggcgccagcgagaacagcgacggcgacatggtggtgagctgcagcgccatcagcagcctgcccgacatcgtgttcaccatcaactag

SEQ ID NO: 92660 - DNA, 750 bp, synthetic construct; identical to SEQ ID NO: 92656
  misc_feature 1..750: note = Description of Artificial Sequence: Synthetic coding sequence
  source 1..750: mol_type = other DNA

SEQ ID NO: 92661 - DNA, 1167 bp, synthetic construct; identical to SEQ ID NO: 92658
  misc_feature 1..1167: note = Description of Artificial Sequence: Synthetic coding sequence
  source 1..1167: mol_type = other DNA

SEQ ID NO: 92662 - DNA, 849 bp, synthetic construct
  misc_feature 1..849: note = Description of Artificial Sequence: Synthetic coding sequence
  source 1..849: mol_type = other DNA
atgaagtggctgctgctgctgggcctggtggccctgagcgagtgcatcatgtacaaggtgcccctgatcagaaagaagagcctgagaagaaccctgagcgagagaggcctgctgaaggacttcctgaagaagcacaacctgaaccccgccagaaagtacttcccccagtgggaggcccccaccctggtggacgagcagcccctggagaactacctggacatggagtacttcggcaccatcggcatcggcacccccgcccaggacttcaccgtggtgttcgacaccggcagcagcaacctgtgggtgcccagcgtgtactgcagcagcctggcctgcaccaaccacaacagattcaaccccgaggacagcagcacctaccagagcaccagcgagaccgtgagcatcacctacggcaccggcagcatgaccggcatcctgggctacgacaccgtgcagaccgtggccatctggagaagcgccgccatgggcctggtgagccaggacctgttcagcgtgtacctgagcgccgacgacaagagcggcagcgtggtgatcttcggcggcatcgacagcagctactacaccggcagcctgaactgggtgcccgtgaccgtggagggctactggcagatcaccgtggacagcatcaccatgaacggcgagaccatcgcctgcgccgagggctgccaggccatcgtggacaccggcaccagcctgctgaccggccccaccagccccatcgccaacatccagagcgacatcggcgccagcgagaacagcgacggcgacatggtggtgagctgcagcgccatcagcagcctgcccgacatcgtgttcaccatcaactag

SEQ ID NO: 92663 - DNA, 750 bp, synthetic construct
  misc_feature 1..750: note = Description of Artificial Sequence: Synthetic coding sequence
  source 1..750: mol_type = other DNA
atgaccggcatcctgggctacgacaccgtgcaggtgggcggcatcagcgacaccaaccagatcttcggcctgagcgagaccgagcccggcagcttcctgtactacgcccccttcgacggcatcctgggcctggcctaccccagcatcagcagcagcggcgccacccccgtgttcgacaacatctggaaccagggcctggtgagccaggacctgttcagcgtgtacctgagcgccgacgacaagagcggcagcgtggtgatcttcggcggcatcgacagcagctactacaccggcagcctgaactgggtgcccgtgaccgtggagggctactggcagatcaccgtggacagcatcaccatgaacggcgagaccatcgcctgcgccgagggctgccaggccatcgtggacaccggcaccagcctgctgaccggccccaccagccccatcgccaacatccagagcgacatcggcgccagcgagaacagcgacggcgacatggtggtgagctgcagcgccatcagcagcctgcccgacatcgtgttcaccatcaacggcgtgcagtaccccgtgccccccagcgcctacatcctgcagctgcccagcgagggcagctgcatcagcggcttccagggcatgaacgtgcccaccgagagcggcgagctgtggatcctgggcgacgtgttcatcagacagtacttcaccgtgttcgacagagccaacaaccaggtgggcctggcccccgtggcctag

SEQ ID NO: 92664 - DNA, 1578 bp, synthetic construct
  misc_feature 1..1578: note = Description of Artificial Sequence: Synthetic coding sequence
  source 1..1578: mol_type = other DNA
atggccgccgtggtgctggccgccaccagactgctgagaggcagcggcagctggggctgcagcagactgagattcggcccccccgcctacagaagattcagcagcggcggcgcctaccccaacatccccctgagcagccccctgcccggcgtgcccaagcccgtgttcgccaccgtggacggccaggagaagttcgagaccaaggtgaccaccctggacaacggcctgagagtggccagccagaacaagttcggccagttctgcaccgtgggcatcctgatcaacagcggcagcagatacgaggccaagtacctgagcggcatcgcccacttcctggagaagctggccttcagcagcaccgccagattcgacagcaaggacgagatcctgctgaccctggagaagcacggcggcatctgcgactgccagaccagcagagacaccaccatgtacgccgtgagcgccgacagcaagggcctggacaccgtggtggccctgctggccgacgtggtgctgcagcccagactgaccgacgaggaggtggagatgaccagaatggccgtgcagttcgagctggaggacctgaacctgagacccgaccccgagcccctgctgaccgagatgatccacgaggccgcctacagagagaacaccgtgggcctgcacagattctgccccaccgagaacgtggccaagatcaacagagaggtgctgcacagctacctgagaaactactacacccccgacagaatggtgctggccggcgtgggcgtggagcacgagcacctggtggactgcgccagaaagtacctgctgggcgtgcagcccgcctggggcagcgccgaggccgtggacatcgacagaagcgtggcccagtacaccggcggcatcgccaagctggagagagacatgagcaacgtgagcctgggccccacccccatccccgagctgacccacatcatggtgggcctggagagctgcagcttcctggaggaggacttcatccccttcgccgtgctgaacatgatgatgggcggcggcggcagcttcagcgccggcggccccggcaagggcatgttcagcagactgtacctgaacgtgctgaacagacaccactggatgtacaacgccaccagctaccaccacagctacgaggacaccggcctgctgtgcatccacgccagcgccgaccccagacaggtgagagagatggtggagatcatcaccaaggagttcatcctgatgggcggcaccgtggacaccgtggagctggagagagccaagacccagctgaccagcatgctgatgatgaacctggagagcagacccgtgatcttcgaggacgtgggcagacaggtgctggccaccagaagcagaaagctgccccacgagctgtgcaccctgatcagaaacgtgaagcccgaggacgtgaagagagtggccagcaagatgctgagaggcaagcccgccgtggccgccctgggcgacctgaccgacctgcccacctacgagcacatccagaccgccctgagcagcaaggacggcagactgcccagaacctacagactgttcagatag

SEQ ID NO: 92665 - DNA, 441 bp, synthetic construct
  misc_feature 1..441: note = Description of Artificial Sequence: Synthetic coding sequence
  source 1..441: mol_type = other DNA
atggccgccgtggtgctggccgccaccagactgctgagaggcagcggcagctggggctgcagcagactgagattcggcccccccgcctacagaagattcagcagcggcggcgcctaccccaacatccccctgagcagccccctgcccggcgtgcccaagcccgtgttcgccaccgtggacggccaggagaagttcgagaccaaggtgaccaccctggacaacggcctgagagtggccagccagaacaagttcggccagttctgcaccgtgggcatcctgatcaacagcggcagcagatacgaggccaagtacctgagcggcatcgcccacttcctggagaagctggccttcagcagcaccgccagattcgacagcaaggacgagatcctgctgaccctggagaagcacggcggcatctgcgactgccagaccagcagatag

SEQ ID NO: 92666 - DNA, 1185 bp, synthetic construct
  misc_feature 1..1185: note = Description of Artificial Sequence: Synthetic coding sequence
  source 1..1185: mol_type = other DNA
atgaagagaaacaccctggtggagctgctgaccttctggaagaactggcacttcagactgctgctggacctgaccgccaagatgaagttctgcctgagatggaagagcatgggcgtgagcgtgaccgccagacaccaggacgaggaggtggagatgaccagaatggccgtgcagttcgagctggaggacctgaacctgagacccgaccccgagcccctgctgaccgagatgatccacgaggccgcctacagagagaacaccgtgggcctgcacagattctgccccaccgagaacgtggccaagatcaacagagaggtgctgcacagctacctgagaaactactacacccccgacagaatggtgctggccggcgtgggcgtggagcacgagcacctggtggactgcgccagaaagtacctgctgggcgtgcagcccgcctggggcagcgccgaggccgtggacatcgacagaagcgtggcccagtacaccggcggcatcgccaagctggagagagacatgagcaacgtgagcctgggccccacccccatccccgagctgacccacatcatggtgggcctggagagctgcagcttcctggaggaggacttcatccccttcgccgtgctgaacatgatgatgggcggcggcggcagcttcagcgccggcggccccggcaagggcatgttcagcagactgtacctgaacgtgctgaacagacaccactggatgtacaacgccaccagctaccaccacagctacgaggacaccggcctgctgtgcatccacgccagcgccgaccccagacaggtgagagagatggtggagatcatcaccaaggagttcatcctgatgggcggcaccgtggacaccgtggagctggagagagccaagacccagctgaccagcatgctgatgatgaacctggagagcagacccgtgatcttcgaggacgtgggcagacaggtgctggccaccagaagcagaaagctgccccacgagctgtgcaccctgatcagaaacgtgaagcccgaggacgtgaagagagtggccagcaagatgctgagaggcaagcccgccgtggccgccctgggcgacctgaccgacctgcccacctacgagcacatccagaccgccctgagcagcaaggacggcagactgcccagaacctacagactgttcagatag

SEQ ID NO: 92667 - DNA, 816 bp, synthetic construct
  misc_feature 1..816: note = Description of Artificial Sequence: Synthetic coding sequence
  source 1..816: mol_type = other DNA
tacaccggcggcatcgccaagctggagagagacatgagcaacgtgagcctgggccccacccccatccccgagctgacccacatcatggtgggcctggagagctgcagcttcctggaggaggacttcatccccttcgccgtgctgaacatgatgatgggcggcggcggcagcttcagcgccggcggccccggcaagggcatgttcagcagactgtacctgaacgtgctgaacagacaccactggatgtacaacgccaccagctaccaccacagctacgaggacaccggcctgctgtgcatccacgccagcgccgaccccagacaggtgagagagatggtggagatcatcaccaaggagttcatcctgatgggcggcaccgtggacaccgtggagctggagagagccaagacccagctgaccagcatgctgatgatgaacctggagagcagacccgtgatcttcgaggacgtgggcagacaggtgctggccaccagaagcagaaagctgccccacgagctgtgcaccctgatcagagagtacagaagaggcagcgagggcctgccccaggccagcgccagactgagaggcggcagactggccctgccccaggccgtggtgggcctgtggtacgtgcaccacacccagaacctgggccccagccccgtggtgctgagcagaggcggccagggccagggcagaggcgtggccgacctggtgagcctgcccggccccaccatgcacctgctgcccccctggcaggtgaccccccccagcgcccccctgggcggcgccgtgaccaccgcccagagctgctag

SEQ ID NO: 92668 - DNA, 1482 bp, synthetic construct
  misc_feature 1..1482: note = Description of Artificial Sequence: Synthetic coding sequence
  source 1..1482: mol_type = other DNA
atggccgccgccaccggccccagcttctggctgggcaacgagaccctgaaggtgcccctggccctgttcgccctgaacagacagagactgtgcgagagactgagaaagaaccccgccgtgcaggccggcagcatcgtggtgctgcagggcggcgaggagacccagagatactgcaccgacaccggcgtgctgttcagacaggagagcttcttccactgggccttcggcgtgaccgagcccggctgctacggcgtgatcgacgtggacaccggcaagagcaccctgttcgtgcccagactgcccgccagccacgccacctggatgggcaagatccacagcaaggagcacttcaaggagaagtacgccgtggacgacgtgcagtacgtggacgagatcgccagcgtgctgaccagccagaagcccagcgtgctgctgaccctgagaggcgtgaacaccgacagcggcagcgtgtgcagagaggccagcttcgacggcatcagcaagttcgaggtgaacaacaccatcctgcaccccgagatcgtggagtgcagagtgttcaagaccgacatggagctggaggtgctgagatacaccaacaagatcagcagcgaggcccacagagaggtgatgaaggccgtgaaggtgggcatgaaggagtacgagctggagagcctgttcgagcactactgctacagcagaggcggcatgagacacagcagctacacctgcatctgcggcagcggcgagaacagcgccgtgctgcactacggccacgccggcgcccccaacgacagaaccatccagaacggcgacatgtgcctgttcgacatgggcggcgagtactactgcttcgccagcgacatcacctgcagcttccccgccaacggcaagttcaccgccgaccagaaggccgtgtacgaggccgtgctgagaagcagcagagccgtgatgggcgccatgaagcccggcgtgtggtggcccgacatgcacagactggccgacagaatccacctggaggagctggcccacatgggcatcctgagcggcagcgtggacgccatggtgcaggcccacctgggcgccgtgttcatgccccacggcctgggccacttcctgggcatcgacgtgcacgacgtgggcggctaccccgagggcgtggagagaatcgacgagcccggcctgagaagcctgagaaccgccagacacctgcagcccggcatggtgctgaccgtggagcccggcatctacttcatcgaccacctgctggacgaggccctggccgaccccgccagagccagcttcctgaacagagaggtgctgcagagattcagaggcttcggcggcgtgagaatcgaggaggacgtggtggtgaccgacagcggcatcgagctgctgacctgcgtgcccagaaccgtggaggagatcgaggcctgcatggccggctgcgacaaggccttcacccccttcagcggccccaagtag

SEQ ID NO: 92669 - DNA, 1359 bp, synthetic construct
  misc_feature 1..1359: note = Description of Artificial Sequence: Synthetic coding sequence
  source 1..1359: mol_type = other DNA
atggccgccgccaccggccccagcttctggctgggcaacgagaccctgaaggtgcccctggccctgttcgccctgaacagacagagactgtgcgagagactgagaaagaaccccgccgtgcaggccggcagcatcgtggtgctgcagggcggcgaggagacccagagatactgcaccgacaccggcgtgctgttcagacaggagagcttcttccactgggccttcggcgtgaccgagcccggctgctacggcgtgatcgacgtggacaccggcaagagcaccctgttcgtgcccagactgcccgccagccacgccacctggatgggcaagatccacagcaaggagcacttcaaggagaagtacgccgtggacgacgtgcagtacgtggacgagatcgccagcgtgctgaccagccagaagcccagcgtgctgctgaccctgagaggcgtgaacaccgacagcggcagcgtgtgcagagaggccagcttcgacggcatcagcaagttcgaggtgaacaacaccatcctgcaccccgagatcgtggagtgcctgttcgagcactactgctacagcagaggcggcatgagacacagcagctacacctgcatctgcggcagcggcgagaacagcgccgtgctgcactacggccacgccggcgcccccaacgacagaaccatccagaacggcgacatgtgcctgttcgacatgggcggcgagtactactgcttcgccagcgacatcacctgcagcttccccgccaacggcaagttcaccgccgaccagaaggccgtgtacgaggccgtgctgagaagcagcagagccgtgatgggcgccatgaagcccggcgtgtggtggcccgacatgcacagactggccgacagaatccacctggaggagctggcccacatgggcatcctgagcggcagcgtggacgccatggtgcaggcccacctgggcgccgtgttcatgccccacggcctgggccacttcctgggcatcgacgtgcacgacgtgggcggctaccccgagggcgtggagagaatcgacgagcccggcctgagaagcctgagaaccgccagacacctgcagcccggcatggtgctgaccgtggagcccggcatctacttcatcgaccacctgctggacgaggccctggccgaccccgccagagccagcttcctgaacagagaggtgctgcagagattcagaggcttcggcggcgtgagaatcgaggaggacgtggtggtgaccgacagcggcatcgagctgctgacctgcgtgcccagaaccgtggaggagatcgaggcctgcatggccggctgcgacaaggccttcacccccttcagcggccccaagtag

SEQ ID NO: 92670 - DNA, 1290 bp, synthetic construct
  misc_feature 1..1290: note = Description of Artificial Sequence: Synthetic coding sequence
  source 1..1290: mol_type = other DNA
atggccgccgccaccggccccagcttctggctgggcaacgagaccctgaaggtgcccctggccctgttcgccctgaacagacagagactgtgcgagagactgagaaagaaccccgccgtgcaggccggcagcatcgtggtgctgcagggcggcgaggagacccagagatactgcaccgacaccggcgtgctgttcagacagatcgccagcgtgctgaccagccagaagcccagcgtgctgctgaccctgagaggcgtgaacaccgacagcggcagcgtgtgcagagaggccagcttcgacggcatcagcaagttcgaggtgaacaacaccatcctgcaccccgagatcgtggagtgcagagtgttcaagaccgacatggagctggaggtgctgagatacaccaacaagatcagcagcgaggcccacagagaggtgatgaaggccgtgaaggtgggcatgaaggagtacgagctggagagcctgttcgagcactactgctacagcagaggcggcatgagacacagcagctacacctgcatctgcggcagcggcgagaacagcgccgtgctgcactacggccacgccggcgcccccaacgacagaaccatccagaacggcgacatgtgcctgttcgacatgggcggcgagtactactgcttcgccagcgacatcacctgcagcttccccgccaacggcaagttcaccgccgaccagaaggccgtgtacgaggccgtgctgagaagcagcagagccgtgatgggcgccatgaagcccggcgtgtggtggcccgacatgcacagactggccgacagaatccacctggaggagctggcccacatgggcatcctgagcggcagcgtggacgccatggtgcaggcccacctgggcgccgtgttcatgccccacggcctgggccacttcctgggcatcgacgtgcacgacgtgggcggctaccccgagggcgtggagagaatcgacgagcccggcctgagaagcctgagaaccgccagacacctgcagcccggcatggtgctgaccgtggagcccggcatctacttcatcgaccacctgctggacgaggccctggccgaccccgccagagccagcttcctgaacagagaggtgctgcagagattcagaggcttcggcggcgtgagaatcgaggaggacgtggtggtgaccgacagcggcatcgagctgctgacctgcgtgcccagaaccgtggaggagatcgaggcctgcatggccggctgcgacaaggccttcacccccttcagcggccccaagtag

SEQ ID NO: 92671 - DNA, 354 bp, synthetic construct
  misc_feature 1..354: note = Description of Artificial Sequence: Synthetic coding sequence
  source 1..354: mol_type = other DNA
atgagagccagcagcttcctgatcgtggtggtgttcctgatcgccggcaccctggtgctggaggccgccgtgaccggcgtgcccgtgaagggccaggacaccgtgaagggcagagtgcccttcaacggccaggaccccgtgaagggccaggtgagcgtgaagggccaggacaaggtgaaggcccaggagcccgtgaagggccccgtgagcaccaagcccggcagctgccccatcatcctgatcagatgcgccatgctgaacccccccaacagatgcctgaaggacaccgactgccccggcatcaagaagtgctgcgagggcagctgcggcatggcctgcttcgtgccccagtag

SEQ ID NO: 92672 - DNA, 732 bp, synthetic construct
  misc_feature 1..732: note = Description of Artificial Sequence: Synthetic coding sequence
  source 1..732: mol_type = other DNA
atggccagactgtggggcgccctgagcctgtggcccctgtgggccgccgtgccctggggcggcgccgccgccgtgggcgtgagagcctgcagcagcaccgccgcccccgacggcgtggagggccccgccctgagaagaagctactggagacacctgagaagactggtgctgggcccccccgagccccccttcagccacgtgtgccaggtgggcgaccccgtgctgagaggcgtggccgcccccgtggagagagcccagctgggcggccccgagctgcagagactgacccagagactggtgcaggtgatgagaagaagaagatgcgtgggcctgagcgccccccagctgggcgtgcccagacaggtgctggccctggagctgcccgaggccctgtgcagagagtgcccccccagacagagagccctgagacagatggagcccttccccctgagagtgttcgtgaaccccagcctgagagtgctggacagcagactggtgaccttccccgagggctgcgagagcgtggccggcttcctggcctgcgtgcccagattccaggccgtgcagatcagcggcctggaccccaacggcgagcaggtggtgtggcaggccagcggctgggccgccagaatcatccagcacgagatggaccacctgcagggctgcctgttcatcgacaagatggacagcagaaccttcaccaacgtgtactggatgaaggtgaacgactag

SEQ ID NO: 92673 - DNA, 294 bp, synthetic construct
  misc_feature 1..294: note = Description of Artificial Sequence: Synthetic coding sequence
  source 1..294: mol_type = other DNA
atggtgttcgtgagaagaccctggcccgccctgaccaccgtgctgctggccctgctggtgtgcctgggcgccctggtggacgcctaccccatcaagcccgaggcccccagagaggacgccagccccgaggagctgaacagatactacgccagcctgagacactacctgaacctggtgaccagacagagatacggcaagagagacggccccgacaccctgctgagcaagaccttcttccccgacggcgaggacagacccgtgagaagcagaagcgagggccccgacctgtggtag

SEQ ID NO: 92674 - DNA, 1992 bp, synthetic construct
  misc_feature 1..1992: note = Description of Artificial Sequence: Synthetic coding sequence
  source 1..1992: mol_type = other DNA
atggcccccaagagagtggtgcagctgagcctgaagatgcccacccacgccgtgtgcgtggtgggcgtggaggcccacgtggacatccacagcgacgtgcccaagggcgccaacagcttcagagtgagcggcagcagcggcgtggaggtgttcatggtgtacaacagaaccagagtgaaggagcccatcggcaaggccagatggcccctggacaccgacgccgacatggtggtgagcgtgggcaccgccagcaaggagctgaaggacttcaaggtgagagtgagctacttcggcgagcaggaggaccaggccctgggcagaagcgtgctgtacctgaccggcgtggacatcagcctggaggtggacaccggcagaaccggcaaggtgaagagaagccagggcgacaagaagacctggagatggggccccgagggctacggcgccatcctgctggtgaactgcgacagagacaaccacagaagcgccgagcccgacctgacccacagctggctgatgagcctggccgacctgcaggacatgagccccatgctgctgagctgcaacggccccgacaagctgttcgacagccacaagctggtgctgaacgtgcccttcagcgacagcaagagagtgagagtgttctgcgccagaggcggcaacagcctgagcgactacaagcaggtgctgggcccccagtgcctgagctacgaggtggagagacagcccggcgagcaggagatcaagttctacgtggagggcctgaccttccccgacgccgacttcctgggcctggtgagcctgagcgtgagcctggtggaccccggcaccctgcccgaggtgaccctgttcaccgacaccgtgggcttcagaatggccccctggatcatgacccccaacacccagccccccgaggagctgtacgtgtgcagagtgatggacacccacggcagcaacgagaagttcctggaggacatgagctacctgaccctgaaggccaactgcaagctgaccatctgcccccaggtggagaacagaaacgacagatggatccaggacgagatggagttcggctacatcgaggccccccacaagagcttccccgtggtgttcgacagccccagaaacagaggcctgaaggacttcccctacaagagaatcctgggccccgacttcggctacgtgaccagagagatccccctgcccggccccagcagcctggacagcttcggcaacctggacgtgagcccccccgtgaccgtgggcggcaccgagtaccccctgggcagaatcctgatcggcagcagcttccccaagagcggcggcagacagatggccagagccgtgagaaacttcctgaaggcccagcaggtgcaggcccccgtggagctgtacagcgactggctgagcgtgggccacgtggacgagttcctgaccttcgtgcccaccagcgaccagaagggcttcagactgctgctggccagccccagcgcctgcctgaagctgttccaggagaagaaggaggagggctacggcgaggccgcccagttcgacggcctgaagcaccaggccaagagaagcatcaacgagatgctggccgacagacacctgcagagagacaacctgcacgcccagaagtgcatcgactggaacagaaacgtgctgaagagagagctgggcctggccgagagcgacatcgtggacatcccccagctgttcttcctgaagaacttctacgccgaggccttcttccccgacatggtgaacatggtggtgctgggcaagtacctgggcatccccaagccctacggccccatcatcaacggcagatgctgcctggaggagaaggtgcagagcctgctggagcccctgggcctgcactgcatcttcatcgacgactacctgagctaccacgagctgcagggcgagatccactgcggcaccaacgtgagaagaaagcccttccccttcaagtggtggaacatggtgccctag

SEQ ID NO: 92675 - DNA, 537 bp, synthetic construct
  misc_feature 1..537: note = Description of Artificial Sequence: Synthetic coding sequence
  source 1..537: mol_type = other DNA
atggccagagccgtgagaaacttcctgaaggcccagcaggtgcaggcccccgtggagctgtacagcgactggctgagcgtgggccacgtggacgagttcctgaccttcgtgcccaccagcgaccagaagggcttcagactgctgctggccagccccagcgcctgcctgaagctgttccaggagaagaaggaggagggctacggcgaggccgcccagttcgacggcctgaagcaccaggccaagagaagcatcaacgagatgctggccgacagacacctgcagagagacaacctgcacgcccaggtgaacatggtggtgctgggcaagtacctgggcatccccaagccctacggccccatcatcaacggcagatgctgcctggaggagaaggtgcagagcctgctggagcccctgggcctgcactgcatcttcatcgacgactacctgagctaccacgagctgcagggcgagatccactgcggcaccaacgtgagaagaaagcccttccccttcaagtggtggaacatggtgccctag

SEQ ID NO: 92676 - DNA, 405 bp, synthetic construct
  misc_feature 1..405: note = Description of Artificial Sequence: Synthetic coding sequence
  source 1..405: mol_type = other DNA
atgctggccgacagacacctgcagagagacaacctgcacgcccagaagtgcatcgactggaacagaaacgtgctgaagagagagctgggcctggccgagagcgacatcgtggacatcccccagctgttcttcctgaagaacttctacgccgaggccttcttccccgacatggtgaacatggtggtgctgggcaagtacctgggcatccccaagccctacggccccatcatcaacggcagatgctgcctggaggagaaggtgcagagcctgctggagcccctgggcctgcactgcatcttcatcgacgactacctgagctaccacgagctgcagggcgagatccactgcggcaccaacgtgagaagaaagcccttccccttcaagtggtggaacatggtgccctag

SEQ ID NO: 92677 - DNA, 663 bp, synthetic construct
  misc_feature 1..663: note = Description of Artificial Sequence: Synthetic coding sequence
  source 1..663: mol_type = other DNA
atggccagagccgtgagaaacttcctgaaggcccagcaggtgcaggcccccgtggagctgtacagcgactggctgagcgtgggccacgtggacgagttcctgaccttcgtgcccaccagcgaccagaagggcttcagactgctgctggccagccccagcgcctgcctgaagctgttccaggagaagaaggaggagggctacggcgaggccgcccagttcgacggcctgaagcaccaggccaagagaagcatcaacgagatgctggccgacagacacctgcagagagacaacctgcacgcccagaagtgcatcgactggaacagaaacgtgctgaagagagagctgggcctggccgagagcgacatcgtggacatcccccagctgttcttcctgaagaacttctacgccgaggccttcttccccgacatggtgaacatggtggtgctgggcaagtacctgggcatccccaagccctacggccccatcatcaacggcagatgctgcctggaggagaaggtgcagagcctgctggagcccctgggcctgcactgcatcttcatcgacgactacctgagctaccacgagctgcagggcgagatccactgcggcaccaacgtgagaagaaagcccttccccttcaagtggtggaacatggtgccctag

SEQ ID NO: 92678 - DNA, 1314 bp, synthetic construct
  misc_feature 1..1314: note = Description of Artificial Sequence: Synthetic coding sequence
  source 1..1314: mol_type = other DNA
atgctgagagagagaaccgtgagactgcagtacggcagcagagtggaggccgtgtacgtgctgggcacctacctgtggaccgacgtgtacagcgccgcccccgccggcgcccagaccttcagcctgaagcacagcgagcacgtgtgggtggaggtggtgagagacggcgaggccgaggaggtggccaccaacggcaagcagagatggctgctgagccccagcaccaccctgagagtgaccatgagccaggccagcaccgaggccagcagcgacaaggtgaccgtgaactactacgacgaggagggcagcatccccatcgaccaggccggcctgttcctgaccgccatcgagatcagcctggacgtggacgccgacagagacggcgtggtggagaagaacaaccccaagaaggccagctggacctggggccccgagggccagggcgccatcctgctggtgaactgcgacagagagaccccctggctgcccaaggaggactgcagagacgagaaggtgtacagcaaggaggacctgaaggacatgagccagatgatcctgagaaccaagggccccgacagactgcccgccggctacgagatcgtgctgtacatcagcatgagcgacagcgacaaggtgggcgtgttctacgtggagaaccccttcttcggccagagatacatccacatcctgggcagaagaaagctgtaccacgtggtgaagtacaccggcggcagcgccgagctgctgttcttcgtggagggcctgtgcttccccgacgagggcttcagcggcctggtgagcatccacgtgagcctgctggagtacatggcccaggacatccccctgacccccatcttcaccgacaccgtgatcttcagaatcgccccctggatcatgacccccaacatcctgccccccgtgagcgtgttcgtgtgctgcatgaaggacaactacctgttcctgaaggaggtgaagaacctggtggagaagaccaactgcgagctgaaggtgtgcttccagtacctgaacagaggcgacagatggatccaggacgagatcgagttcggctacatcgaggccccccacaagggcttccccgtggtgctggacagccccagagacggcaacctgaaggacttccccgtgaaggagctgctgggccccgacttcggctacgtgaccagagagcccctgttcgagagcgtgaccagcctggacagcttcggcaacctggaggtgagcccccccgtgaccgtgaacggcaagacctaccccctgggcagaatcctgatcggcagcagcttccccctgtag

SEQ ID NO: 92679 - DNA, 1998 bp, synthetic construct
  misc_feature 1..1998: note = Description of Artificial Sequence: Synthetic coding sequence
  source 1..1998: mol_type = other DNA
atgctgagagagagaaccgtgagactgcagtacggcagcagagtggaggccgtgtacgtgctgggcacctacctgtggaccgacgtgtacagcgccgcccccgccggcgcccagaccttcagcctgaagcacagcgagcacgtgtgggtggaggtggtgagagacggcgaggccgaggaggtggccaccaacggcaagcagagatggctgctgagccccagcaccaccctgagagtgaccatgagccaggccagcaccgaggccagcagcgacaaggtgaccgtgaactactacgacgaggagggcagcatccccatcgaccaggccggcctgttcctgaccgccatcgagatcagcctggacgtggacgccgacagagacggcgtggtggagaagaacaaccccaagaaggccagctggacctggggccccgagggccagggcgccatcctgctggtgaactgcgacagagagaccccctggctgcccaaggaggactgcagagacgagaaggtgtacagcaaggaggacctgaaggacatgagccagatgatcctgagaaccaagggccccgacagactgcccgccggctacgagatcgtgctgtacatcagcatgagcgacagcgacaaggtgggcgtgttctacgtggagaaccccttcttcggccagagatacatccacatcctgggcagaagaaagctgtaccacgtggtgaagtacaccggcggcagcgccgagctgctgttcttcgtggagggcctgtgcttccccgacgagggcttcagcggcctggtgagcatccacgtgagcctgctggagtacatggcccaggacatccccctgacccccatcttcaccgacaccgtgatcttcagaatcgccccctggatcatgacccccaacatcctgccccccgtgagcgtgttcgtgtgctgcatgaaggacaactacctgttcctgaaggaggtgaagaacctggtggagaagaccaactgcgagctgaaggtgtgcttccagtacctgaacagaggcgacagatggatccaggacgagatcgagttcggctacatcgaggccccccacaagggcttccccgtggtgctggacagccccagagacggcaacctgaaggacttccccgtgaaggagctgctgggccccgacttcggctacgtgaccagagagcccctgttcgagagcgtgaccagcctggacagcttcggcaacctggaggtgagcccccccgtgaccgtgaacggcaagacctaccccctgggcagaatcctgatcggcagcagcttccccctgagcggcggcagaagaatgaccaaggtggtgagagacttcctgaaggcccagcaggtgcaggcccccgtggagctgtacagcgactggctgaccgtgggccacgtggacgagttcatgagcttcgtgcccatccccggcaccaagaagttcctgctgctgatggccagcaccagcgcctgctacaagctgttcagagagaagcagaaggacggccacggcgaggccatcatgttcaagggcctgggcggcatgagcagcaagagaatcaccatcaacaagatcctgagcaacgagagcctggtgcaggagaacctgtacttccagagatgcctggactggaacagagacatcctgaagaaggagctgggcctgaccgagcaggacatcatcgacctgcccgccctgttcaagatggacgaggaccacagagccagagccttcttccccaacatggtgaacatgatcgtgctggacaaggacctgggcatccccaagcccttcggcccccaggtggaggaggagtgctgcctggagatgcacgtgagaggcctgctggagcccctgggcctggagtgcaccttcatcgacgacatcagcgcctaccacaagttcctgggcgaggtgcactgcggcaccaacgtgagaagaaagcccttcaccttcaagtggtggcacatggtgccctag

SEQ ID NO: 92680 - DNA, 1650 bp, synthetic construct
  misc_feature 1..1650: note = Description of Artificial Sequence: Synthetic coding sequence
  source 1..1650: mol_type = other DNA
atgctgagagagagaaccgtgagactgcagtacggcagcagagtggaggccgtgtacgtgctgggcacctacctgtggaccgacgtgtacagcgccgcccccgccggcgcccagaccttcagcctgaagcacagcgagcacgtgtgggtggaggtggtgagagacggcgaggccgaggaggtggccaccaacggcaagcagagatggctgctgagccccagcaccaccctgagagtgaccatgagccaggccagcaccgaggccagcagcgacaaggtgaccgtgaactactacgacgaggagggcagcatccccatcgaccaggccggcctgttcctgaccgccatcgagatcagcctggacgtggacgccgacagagacggcgtggtggagaagaacaaccccaagaagaccagaagcagcgccaacgccatcagcaccagctgggccggcggcagcagcaccatgtggagcagcaccagagtggcccccagaagctgctgcagcagctggaaggccagcgtgagccccaccagagccagccaggcctggagccccagcatgagcgcctgctggagcacctggcccagcatgaaggacaactacctgttcctgaaggaggtgaagaacctggtggagaagaccaactgcgagctgaaggtgtgcttccagtacctgaacagaggcgacagatggatccaggacgagatcgagttcggctacatcgaggccccccacaagggcttccccgtggtgctggacagccccagagacggcaacctgaaggacttccccgtgaaggagctgctgggccccgacttcggctacgtgaccagagagcccctgttcgagagcgtgaccagcctggacagcttcggcaacctggaggtgagcccccccgtgaccgtgaacggcaagacctaccccctgggcagaatcctgatcggcagcagcttccccctgagcggcggcagaagaatgaccaaggtggtgagagacttcctgaaggcccagcaggtgcaggcccccgtggagctgtacagcgactggctgaccgtgggccacgtggacgagttcatgagcttcgtgcccatccccggcaccaagaagttcctgctgctgatggccagcaccagcgcctgctacaagctgttcagagagaagcagaaggacggccacggcgaggccatcatgttcaagggcctgggcggcatgagcagcaagagaatcaccatcaacaagatcctgagcaacgagagcctggtgcaggagaacctgtacttccagagatgcctggactggaacagagacatcctgaagaaggagctgggcctgaccgagcaggacatcatcgacctgcccgccctgttcaagatggacgaggaccacagagccagagccttcttccccaacatggtgaacatgatcgtgctggacaaggacctgggcatccccaagcccttcggcccccaggtggaggaggagtgctgcctggagatgcacgtgagaggcctgctggagcccctgggcctggagtgcaccttcatcgacgacatcagcgcctaccacaagttcctgggcgaggtgcactgcggcaccaacgtgagaagaaagcccttcaccttcaagtggtggcacatggtgccctag

SEQ ID NO: 92681 - DNA, 1995 bp, synthetic construct
  misc_feature 1..1995: note = Description of Artificial Sequence: Synthetic coding sequence
  source 1..1995: mol_type = other DNA
atgagcctgcagagaatcgtgagagtgagcctggagcaccccaccagcgccgtgtgcgtggccggcgtggagaccctggtggacatctacggcagcgtgcccgagggcaccgagatgttcgaggtgtacggcacccccggcgtggacatctacatcagccccaacatggagagaggcagagagagagccgacaccagaagatggagattcgacgccaccctggagatcatcgtggtgatgaacagccccagcaacgacctgaacgacagccacgtgcagatcagctaccacagcagccacgagcccctgcccctggcctacgccgtgctgtacctgacctgcgtggacatcagcctggactgcgacctgaactgcgagggcagacaggacagaaacttcgtggacaagagacagtgggtgtggggccccagcggctacggcggcatcctgctggtgaactgcgacagagacgaccccagctgcgacgtgcaggacaactgcgaccagcacgtgcactgcctgcaggacctggaggacatgagcgtgatggtgctgagaacccagggccccgccgccctgttcgacgaccacaagctggtgctgcacaccagcagctacgacgccaagagagcccaggtgttccacatctgcggccccgaggacgtgtgcgaggcctacagacacgtgctgggccaggacaaggtgagctacgaggtgcccagactgcacggcgacgaggagagattcttcgtggagggcctgagcttccccgacgccggcttcaccggcctgatcagcttccacgtgaccctgctggacgacagcaacgaggacttcagcgccagccccatcttcaccgacaccgtggtgttcagagtggccccctggatcatgacccccagcaccctgccccccctggaggtgtacgtgtgcagagtgagaaacaacacctgcttcgtggacgccgtggccgagctggccagaaaggccggctgcaagctgaccatctgcccccaggccgagaacagaaacgacagatggatccaggacgagatggagctgggctacgtgcaggccccccacaagaccctgcccgtggtgttcgacagccccagaaacggcgagctgcaggacttcccctacaagagaatcctgggccccgacttcggctacgtgaccagagagcccagagacagaagcgtgagcggcctggacagcttcggcaacctggaggtgagcccccccgtggtggccaacggcaaggagtaccccctgggcagaatcctgatcggcggcaacctgcccggcagcagcggcagaagagtgacccaggtggtgagagacttcctgcacgcccagaaggtgcagccccccgtggagctgttcgtggactggctggccgtgggccacgtggacgagttcctgagcttcgtgcccgcccccgacggcaagggcttcagaatgctgctggccagccccggcgcctgcttcaagctgttccaggagaagcagaagtgcggccacggcagagccctgctgttccagggcgtggtggacgacgagcaggtgaagaccatcagcatcaaccaggtgctgagcaacaaggacctgatcaactacaacaagttcgtgcagagctgcatcgactggaacagagaggtgctgaagagagagctgggcctggccgagtgcgacatcatcgacatcccccagctgttcaagaccgagagaaagaaggccaccgccttcttccccgacctggtgaacatgctggtgctgggcaagcacctgggcatccccaagcccttcggccccatcatcaacggctgctgctgcctggaggagaaggtgagaagcctgctggagcccctgggcctgcactgcaccttcatcgacgacttcaccccctaccacatgctgcacggcgaggtgcactgcggcaccaacgtgtgcagaaagcccttcagcttcaagtggtggaacatggtgccctag

SEQ ID NO: 92682 - DNA, 645 bp, synthetic construct
  misc_feature 1..645: note = Description of Artificial Sequence: Synthetic coding sequence
  source 1..645: mol_type = other DNA
atggcccagggcaccctgatcagagtgacccccgagcagcccacccacgccgtgtgcgtgctgggcaccctgacccagctggacatctgcagcagcgcccccgaggactgcaccagcttcagcatcaacgccagccccggcgtggtggtggacatcgcccacggcccccccgccaagaagaagagcaccggcagcagcacctggcccctggaccccggcgtggaggtgaccctgaccatgaaggtggccagcggcagcaccggcgaccagaaggtgcagatcagctactacggccccaagaccccccccgtgaaggccctgctgtacctgaccggcgtggacggcgtgagcccctgccaccccggctggagcgccatgcacgacctggcccactgcaacctgagactgcaggtgcaggccatcctgtgcttcagcgtgcccagcagctggaccaccggcgcctgccaccacgcctggctgatcttcgtgttcctggtggagatggagttccaccacgtgggccaggccggcctggagctgctgaccagcggcgacctgcccgccagcggcagccagagcgccagaatcaccggcatgaaccactgcgccagacccagcatcttcctgatcctgaagtacctgtag

SEQ ID NO: 92683 - DNA, 1992 bp, synthetic construct
  misc_feature 1..1992: note = Description of Artificial Sequence: Synthetic coding sequence
  source 1..1992: mol_type = other DNA
atggcccagggcaccctgatcagagtgacccccgagcagcccacccacgccgtgtgcgtgctgggcaccctgacccagctggacatctgcagcagcgcccccgaggactgcaccagcttcagcatcaacgccagccccggcgtggtggtggacatcgcccacggcccccccgccaagaagaagagcaccggcagcagcacctggcccctggaccccggcgtggaggtgaccctgaccatgaaggtggccagcggcagcaccggcgaccagaaggtgcagatcagctactacggccccaagaccccccccgtgaaggccctgctgtacctgaccggcgtggagatcagcctgtgcgccgacatcaccagaaccggcaaggtgaagcccaccagagccgtgaaggaccagagaacctggacctggggcccctgcggccagggcgccatcctgctggtgaactgcgacagagacaacctggagagcagcgccatggactgcgaggacgacgaggtgctggacagcgaggacctgcaggacatgagcctgatgaccctgagcaccaagacccccaaggacttcttcaccaaccacaccctggtgctgcacgtggccagaagcgagatggacaaggtgagagtgttccaggccaccagaggcaagctgagcagcaagtgcagcgtggtgctgggccccaagtggcccagccactacctgatggtgcccggcggcaagcacaacatggacttctacgtggaggccctggccttccccgacaccgacttccccggcctgatcaccctgaccatcagcctgctggacaccagcaacctggagctgcccgaggccgtggtgttccaggacagcgtggtgttcagagtggccccctggatcatgacccccaacacccagcccccccaggaggtgtacgcctgcagcatcttcgagaacgaggacttcctgaagagcgtgaccaccctggccatgaaggccaagtgcaagctgaccatctgccccgaggaggagaacatggacgaccagtggatgcaggacgagatggagatcggctacatccaggccccccacaagaccctgcccgtggtgttcgacagccccagaaacagaggcctgaaggagttccccatcaagagagtgatgggccccgacttcggctacgtgaccagaggcccccagaccggcggcatcagcggcctggacagcttcggcaacctggaggtgagcccccccgtgaccgtgagaggcaaggagtaccccctgggcagaatcctgttcggcgacagctgctaccccagcaacgacagcagacagatgcaccaggccctgcaggacttcctgagcgcccagcaggtgcaggcccccgtgaagctgtacagcgactggctgagcgtgggccacgtggacgagttcctgagcttcgtgcccgcccccgacagaaagggcttcagactgctgctggccagccccagaagctgctacaagctgttccaggagcagcagaacgagggccacggcgaggccctgctgttcgagggcatcaagaagaagaagcagcagaagatcaagaacatcctgagcaacaagaccctgagagagcacaacagcttcgtggagagatgcatcgactggaacagagagctgctgaagagagagctgggcctggccgagagcgacatcatcgacatcccccagctgttcaagctgaaggagttcagcaaggccgaggccttcttccccaacatggtgaacatgctggtgctgggcaagcacctgggcatccccaagcccttcggccccgtgatcaacggcagatgctgcctggaggagaaggtgtgcagcctgctggagcccctgggcctgcagtgcaccttcatcaacgacttcttcacctaccacatcagacacggcgaggtgcactgcggcaccaacgtgagaagaaagcccttcagcttcaagtggtggaacatggtgccctag

SEQ ID NO: 92684 - DNA, 384 bp, synthetic construct
  misc_feature 1..384: note = Description of Artificial Sequence: Synthetic coding sequence
  source 1..384: mol_type = other DNA
atggcccagggcaccctgatcagagtgacccccgagcagcccacccacgccgtgtgcgtgctgggcaccctgacccagctggacatctgcagcagcgcccccgaggactgcaccagcttcagcatcaacgccagccccggcgtggtggtggacatcgcccacggcccccccgccaagaagaagagcaccggcagcagcacctggcccctggaccccggcgtggaggtgaccctgaccatgaaggtggccagcggcagcaccggcgaccagaaggtgcagatcagctactacggccccaagaccccccccgtgaaggccctgctgtacctgaccggcgtggacggcgtgagcccctgccaccccggctggagcgccatggcctag

SEQ ID NO: 92685 - DNA, 2628 bp, synthetic construct
  misc_feature 1..2628: note = Description of Artificial Sequence: Synthetic coding sequence
  source 1..2628: mol_type = other DNA
atggacaccgtgcaccacatgctgctgttcggctgcaacatgcccagcagcaccggcagctactggttctgcgacgagggcacctgcaccgacaaggccaacatcctgtacgcctgggccagaaacgccccccccaccagactgcccaagggcgtgggcttcagagtgggcggcgagaccggcagcaagtacttcgtgctgcaggtgcactacggcgacatcagcgccttcagagacaacaacaaggactgcagcggcgtgagcctgcacctgaccagactgccccagcccctgatcgccggcatgtacctgatgatgagcgtggacaccgtgatccccgccggcgagaaggtggtgaacagcgacatcagctgccactacaagaactaccccatgcacgtgttcgcctacagagtgcacacccaccacctgggcaaggtggtgagcggctacagagtgagaaacggccagtggaccctgatcggcagacagagcccccagctgccccaggccttctaccccgtgggccaccccgtggacgtgagcttcggcgacctgctggccgccagatgcgtgttcaccggcgagggcagaaccgaggccacccacatcggcggcaccagcagcgacgagatgtgcaacctgtacatcatgtactacatggaggccaagcacgccgtgagcttcatgacctgcacccagaacgtggcccccgacatgttcagaaccatcccccccgaggccaacatccccatccccgtgaagagcgacatggtgatgatgcacgagcaccacaaggagaccgagtacaaggacaagatccccctgctgcagcagcccaagagagaggaggaggaggtgctggaccagggcgacttctacagcctgctgagcaagctgctgggcgagagagaggacgtggtgcacgtgcacaagtacaaccccaccgagaaggccgagagcgagagcgacctggtggccgagatcgccaacgtggtgcagaagaaggacctgggcagaagcgacgccagagagggcgccgagcacgagagaggcaacgccatcctggtgagagacagaatccacaagttccacagactggtgagcaccctgagaccccccgagagcagagtgttcagcctgcagcagcccccccccggcgagggcacctgggagcccgagcacaccggcgacttccacatggaggaggccctggactggcccggcgtgtacctgctgcccggccaggtgagcggcgtggccctggaccccaagaacaacctggtgatcttccacagaggcgaccacgtgtgggacggcaacagcttcgacagcaagttcgtgtaccagcagatcggcctgggccccatcgaggaggacaccatcctggtgatcgaccccaacaacgccgccgtgctgcagagcagcggcaagaacctgttctacctgccccacggcctgagcatcgacaaggacggcaactactgggtgaccgacgtggccctgcaccaggtgttcaagctggaccccaacaacaaggagggccccgtgctgatcctgggcagaagcatgcagcccggcagcgaccagaaccacttctgccagcccaccgacgtggccgtggaccccggcaccggcgccatctacgtgagcgacggctactgcaacagcagaatcgtgcagttcagccccagcggcaagttcatcacccagtggggcgaggagagcagcggcagcagccccctgcccggccagttcaccgtgccccacagcctggccctggtgcccctgctgggccagctgtgcgtggccgacagagagaacggcagaatccagtgcttcaagaccgacaccaaggagttcgtgagagagatcaagcacagcagcttcggcagaaacgtgttcgccatcagctacatccccggcctgctgttcgccgtgaacggcaagccccacttcggcgaccaggagcccgtgcagggcttcgtgatgaacttcagcaacggcgagatcatcgacatcttcaagcccgtgagaaagcacttcgacatgccccacgacatcgtggccagcgaggacggcaccgtgtacatcggcgacgcccacaccaacaccgtgtggaagttcaccctgaccgagaagctggagcacagaagcgtgaagaaggccggcatcgaggtgcaggagatcaaggccgaggccgtggtggagaccaagatggagaacaagcccaccagcagcgagctgcagaagatgcaggagaagcagaagctgatcaaggagcccggcagcggcgtgcccgtggtgctgatcaccaccctgctggtgatccccgtggtggtgctgctggccatcgccatcttcatcagatggaagaagagcagagccttcggcgacagcgagcacaagctggagaccagcagcggcagagtgctgggcagattcagaggcaagggcagcggcggcctgaacctgggcaacttcttcgccagcagaaagggctacagcagaaagggcttcgacagactgagcaccgagggcagcgaccaggagaaggaggacgacggcagcgagagcgaggaggagtacagcgcccccctgcccgccctggcccccagcagcagctag

SEQ ID NO: 92686 - DNA, 2925 bp, synthetic construct
  misc_feature 1..2925: note = Description of Artificial Sequence: Synthetic coding sequence
  source 1..2925: mol_type = other DNA
atggccggcagagtgcccagcctgctggtgctgctggtgttccccagcagctgcctggccttcagaagccccctgagcgtgttcaagagattcaaggagaccaccagacccttcagcaacgagtgcctgggcaccaccagacccgtggtgcccatcgacagcagcgacttcgccctggacatcagaatgcccggcgtgacccccaagcagagcgacacctacttctgcatgagcatgagaatccccgtggacgaggaggccttcgtgatcgacttcaagcccagagccagcatggacaccgtgcaccacatgctgctgttcggctgcaacatgcccagcagcaccggcagctactggttctgcgacgagggcacctgcaccgacaaggccaacatcctgtacgcctgggccagaaacgccccccccaccagactgcccaagggcgtgggcttcagagtgggcggcgagaccggcagcaagtacttcgtgctgcaggtgcactacggcgacatcagcgccttcagagacaacaacaaggactgcagcggcgtgagcctgcacctgaccagactgccccagcccctgatcgccggcatgtacctgatgatgagcgtggacaccgtgatccccgccggcgagaaggtggtgaacagcgacatcagctgccactacaagaactaccccatgcacgtgttcgcctacagagtgcacacccaccacctgggcaaggtggtgagcggctacagagtgagaaacggccagtggaccctgatcggcagacagagcccccagctgccccaggccttctaccccgtgggccaccccgtggacgtgagcttcggcgacctgctggccgccagatgcgtgttcaccggcgagggcagaaccgaggccacccacatcggcggcaccagcagcgacgagatgtgcaacctgtacatcatgtactacatggaggccaagcacgccgtgagcttcatgacctgcacccagaacgtggcccccgacatgttcagaaccatcccccccgaggccaacatccccatccccgtgaagagcgacatggtgatgatgcacgagcaccacaaggagaccgagtacaaggacaagatccccctgctgcagcagcccaagagagaggaggaggaggtgctggaccagggcgacttctacagcctgctgagcaagctgctgggcgagagagaggacgtggtgcacgtgcacaagtacaaccccaccgagaaggccgagagcgagagcgacctggtggccgagatcgccaacgtggtgcagaagaaggacctgggcagaagcgacgccagagagggcgccgagcacgagagaggcaacgccatcctggtgagagacagaatccacaagttccacagactggtgagcaccctgagaccccccgagagcagagtgttcagcctgcagcagcccccccccggcgagggcacctgggagcccgagcacaccggcgacttccacatggaggaggccctggactggcccggcgtgtacctgctgcccggccaggtgagcggcgtggccctggaccccaagaacaacctggtgatcttccacagaggcgaccacgtgtgggacggcaacagcttcgacagcaagttcgtgtaccagcagatcggcctgggccccatcgaggaggacaccatcctggtgatcgaccccaacaacgccgccgtgctgcagagcagcggcaagaacctgttctacctgccccacggcctgagcatcgacaaggacggcaactactgggtgaccgacgtggccctgcaccaggtgttcaagctggaccccaacaacaaggagggccccgtgctgatcctgggcagaagcatgcagcccggcagcgaccagaaccacttctgccagcccaccgacgtggccgtggaccccggcaccggcgccatctacgtgagcgacggctactgcaacagcagaatcgtgcagttcagccccagcggcaagttcatcacccagtggggcgaggagagcagcggcagcagccccctgcccggccagttcaccgtgccccacagcctggccctggtgcccctgctgggccagctgtgcgtggccgacagagagaacggcagaatccagtgcttcaagaccgacaccaaggagttcgtgagagagatcaagcacagcagcttcggcagaaacgtgttcgccatcagctacatccccggcctgctgttcgccgtgaacggcaagccccacttcggcgaccaggagcccgtgcagggcttcgtgatgaacttcagcaacggcgagatcatcgacatcttcaagcccgtgagaaagcacttcgacatgccccacgacatcgtggccagcgaggacggcaccgtgtacatcggcgacgcccacaccaacaccgtgtggaagttcaccctgaccgagaagctggagcacagaagcgtgaagaaggccggcatcgaggtgcaggagatcaaggaggccgaggccgtggtggagaccaagatggagaacaagcccaccagcagcgagctgcagaagatgcaggagaagcagaagctgatcaaggagcccggcagcggcgtgcccgtggtgctgatcaccaccctgctggtgatccccgtggtggtgctgctggccatcgccatcttcatcagatggaagaagagcagagccttcggcgccgacagcgagcacaagctggagaccagcagcggcagagtgctgggcagattcagaggcaagggcagcggcggcctgaacctgggcaacttcttcgccagcagaaagggctacagcagaaagggcttcgacagactgagcaccgagggcagcgaccaggagaaggaggacgacggcagcgagagcgaggaggagtacagcgcccccctgcccgccctggcccccagcagcagctag

SEQ ID NO: 92687 - DNA, 2664 bp, synthetic construct
  misc_feature 1..2664: note = Description of Artificial Sequence: Synthetic coding sequence
  source 1..2664: mol_type = other DNA
atggccggcagagtgcccagcctgctggtgctgctggtgttccccagcagctgcctggccttcagaagccccctgagcgtgttcaagagattcaaggagaccaccagacccttcagcaacgagtgcctgggcaccaccagacccgtggtgcccatcgacagcagcgacttcgccctggacatcagaatgcccggcgtgacccccaagcagagcgacacctacttctgcatgagcatgagaatccccgtggacgaggaggccttcgtgatcgacttcaagcccagagccagcatggacaccgtgcaccacatgctgctgttcggctgcaacatgcccagcagcaccggcagctactggttctgcgacgagggcacctgcaccgacaaggccaacatcctgtacgcctgggccagaaacgccccccccaccagactgcccaagggcgtgggcttcagagtgggcggcgagaccggcagcaagtacttcgtgctgcaggtgcactacggcgacatcagcgccttcagagacaacaacaaggactgcagcggcgtgagcctgcacctgaccagactgccccagcccctgatcgccggcatgtacctgatgatgagcgtggacaccgtgatccccgccggcgagaaggtggtgaacagcgacatcagctgccactacaagaactaccccatgcacgtgttcgcctacagagtgcacacccaccacctgggcaaggtggtgagcggctacagagtgagaaacggccagtggaccctgatcggcagacagagcccccagctgccccaggccttctaccccgtgggccaccccgtggacgtgagcttcggcgacctgctggccgccagatgcgtgttcaccggcgagggcagaaccgaggccacccacatcggcggcaccagcagcgacgagatgtgcaacctgtacatcatgtactacatggaggccaagcacgccgtgagcttcatgacctgcacccagaacgtggcccccgacatgttcagaaccatcccccccgaggccaacatccccatccccgtgaagagcgacatggtgatgatgcacgagcaccacaaggagaccgagtacaaggacaagatccccctgctgcagcagcccaagagagaggaggaggaggtgctggaccagggcgacttctacagcctgctgagcaagctgctgggcgagagagaggacgtggtgcacgtgcacaagtacaaccccaccgagaaggccgagagcgagagcgacctggtggccgagatcgccaacgtggtgcagaagaaggacctgggcagaagcgacgccagagagggcgccgagcacgagagaggcaacgccatcctggtgagagacagaatccacaagttccacagactggtgagcaccctgagaccccccgagagcagagtgttcagcctgcagcagcccccccccggcgagggcacctgggagcccgagcacaccggcgacttccacatggaggaggccctggactggcccggcgtgtacctgctgcccggccaggtgagcggcgtggccctggaccccaagaacaacctggtgatcttccacagaggcgaccacgtgtgggacggcaacagcttcgacagcaagttcgtgtaccagcagatcggcctgggccccatcgaggaggacaccatcctggtgatcgaccccaacaacgccgccgtgctgcagagcagcggcaagaacctgttctacctgccccacggcctgagcatcgacaaggacggcaactactgggtgaccgacgtggccctgcaccaggtgttcaagctggaccccaacaacaaggagggccccgtgctgatcctgggcagaagcatgcagcccggcagcgaccagaaccacttctgccagcccaccgacgtggccgtggaccccggcaccggcgccatctacgtgagcgacggctactgcaacagcagaatcgtgcagttcagccccagcggcaagttcatcacccagtggggcgaggagagcagcggcagcagccccctgcccggccagttcaccgtgccccacagcctggccctggtgcccctgctgggccagctgtgcgtggccgacagagagaacggcagaatccagtgcttcaagaccgacaccaaggagttcgtgagagagatcaagcacagcagcttcggcagaaacgtgttcgccatcagctacatccccggcctgctgttcgccgtgaacggcaagccccacttcggcgaccaggagcccgtgcagggcttcgtgatgaacttcagcaacggcgagatcatcgacatcttcaagcccgtgagaaagcacttcgacatgccccacgacatcgtggccagcgaggacggcaccgtgtacatcggcgacgcccacaccaacaccgtgtggaagttcaccctgaccgagaagctggagcacagaagcgtgaagaaggccggcatcgaggtgcaggagatcaagggcaagggcagcggcggcctgaacctgggcaacttcttcgccagcagaaagggctacagcagaaagggcttcgacagactgagcaccgagggcagcgaccaggagaaggaggacgacggcagcgagagcgaggaggagtacagcgcccccctgcccgccctggcccccagcagcagctag

SEQ ID NO: 92688 - DNA, 2601 bp, synthetic construct
  misc_feature 1..2601: note = Description of Artificial Sequence: Synthetic coding sequence
  source 1..2601: mol_type = other DNA
atggccggcagagtgcccagcctgctggtgctgctggtgttccccagcagctgcctggccttcagaagccccctgagcgtgttcaagagattcaaggagaccaccagacccttcagcaacgagtgcctgggcaccaccagacccgtggtgcccatcgacagcagcgacttcgccctggacatcagaatgcccggcgtgacccccaagcagagcgacacctacttctgcatgagcatgagaatccccgtggacgaggaggccttcgtgatcgacttcaagcccagagccagcatggacaccgtgcaccacatgctgctgttcggctgcaacatgcccagcagcaccggcagctactggttctgcgacgagggcacctgcaccgacaaggccaacatcctgtacgcctgggccagaaacgccccccccaccagactgcccaagggcgtgggcttcagagtgggcggcgagaccggcagcaagtacttcgtgctgcaggtgcactacggcgacatcagcgccttcagagacaacaacaaggactgcagcggcgtgagcctgcacctgaccagactgccccagcccctgatcgccggcatgtacctgatgatgagcgtggacaccgtgatccccgccggcgagaaggtggtgaacagcgacatcagctgccactacaagaactaccccatgcacgtgttcgcctacagagtgcacacccaccacctgggcaaggtggtgagcggctacagagtgagaaacggccagtggaccctgatcggcagacagagcccccagctgccccaggccttctaccccgtgggccaccccgtggacgtgagcttcggcgacctgctggccgccagatgcgtgttcaccggcgagggcagaaccgaggccacccacatcggcggcaccagcagcgacgagatgtgcaacctgtacatcatgtactacatggaggccaagcacgccgtgagcttcatgacctgcacccagaacgtggcccccgacatgttcagaaccatcccccccgaggccaacatccccatccccgtgaagagcgacatggtgatgatgcacgagcaccacaaggagaccgagtacaaggacaagatccccctgctgcagcagcccaagagagaggaggaggaggtgctggaccaggacttccacatggaggaggccctggactggcccggcgtgtacctgctgcccggccaggtgagcggcgtggccctggaccccaagaacaacctggtgatcttccacagaggcgaccacgtgtgggacggcaacagcttcgacagcaagttcgtgtaccagcagatcggcctgggccccatcgaggaggacaccatcctggtgatcgaccccaacaacgccgccgtgctgcagagcagcggcaagaacctgttctacctgccccacggcctgagcatcgacaaggacggcaactactgggtgaccgacgtggccctgcaccaggtgttcaagctggaccccaacaacaaggagggccccgtgctgatcctgggcagaagcatgcagcccggcagcgaccagaaccacttctgccagcccaccgacgtggccgtggaccccggcaccggcgccatctacgtgagcgacggctactgcaacagcagaatcgtgcagttcagccccagcggcaagttcatcacccagtggggcgaggagagcagcggcagcagccccctgcccggccagttcaccgtgccccacagcctggccctggtgcccctgctgggccagctgtgcgtggccgacagagagaacggcagaatccagtgcttcaagaccgacaccaaggagttcgtgagagagatcaagcacagcagcttcggcagaaacgtgttcgccatcagctacatccccggcctgctgttcgccgtgaacggcaagccccacttcggcgaccaggagcccgtgcagggcttcgtgatgaacttcagcaacggcgagatcatcgacatcttcaagcccgtgagaaagcacttcgacatgccccacgacatcgtggccagcgaggacggcaccgtgtacatcggcgacgcccacaccaacaccgtgtggaagttcaccctgaccgagaagctggagcacagaagcgtgaagaaggccggcatcgaggtgcaggagatcaaggaggccgaggccgtggtggagaccaagatggagaacaagcccaccagcagcgagctgcagaagatgcaggagaagcagaagctgatcaaggagcccggcagcggcgtgcccgtggtgctgatcaccaccctgctggtgatccccgtggtggtgctgctggccatcgccatcttcatcagatggaagaagagcagagccttcggcgacagcgagcacaagctggagaccagcagcggcagagtgctgggcagattcagaggcaagggcagcggcggcctgaacctgggcaacttcttcgccagcagaaagggctacagcagaaagggcttcgacagactgagcaccgagggcagcgaccaggagaaggaggacgacggcagcgagagcgaggaggagtacagcgcccccctgcccgccctggcccccagcagcagctag

SEQ ID NO: 92689 - DNA, 1008 bp, synthetic construct
  misc_feature 1..1008: note = Description of Artificial Sequence: Synthetic coding sequence
  source 1..1008: mol_type = other DNA
atgcagcccggcagcgaccagaaccacttctgccagcccaccgacgtggccgtggaccccggcaccggcgccatctacgtgagcgacggctactgcaacagcagaatcgtgcagttcagccccagcggcaagttcatcacccagtggggcgaggagagcagcggcagcagccccctgcccggccagttcaccgtgccccacagcctggccctggtgcccctgctgggccagctgtgcgtggccgacagagagaacggcagaatccagtgcttcaagaccgacaccaaggagttcgtgagagagatcaagcacagcagcttcggcagaaacgtgttcgccatcagctacatccccggcctgctgttcgccgtgaacggcaagccccacttcggcgaccaggagcccgtgcagggcttcgtgatgaacttcagcaacggcgagatcatcgacatcttcaagcccgtgagaaagcacttcgacatgccccacgacatcgtggccagcgaggacggcaccgtgtacatcggcgacgcccacaccaacaccgtgtggaagttcaccctgaccgagaagctggagcacagaagcgtgaagaaggccggcatcgaggtgcaggagatcaaggaggccgaggccgtggtggagaccaagatggagaacaagcccaccagcagcgagctgcagaagatgcaggagaagcagaagctgatcaaggagcccggcagcggcgtgcccgtggtgctgatcaccaccctgctggtgatccccgtggtggtgctgctggccatcgccatcttcatcagatggaagaagagcagagccttcggcggcaagggcagcggcggcctgaacctgggcaacttcttcgccagcagaaagggctacagcagaaagggcttcgacagactgagcaccgagggcagcgaccaggagaaggaggacgacggcagcgagagcgaggaggagtacagcgcccccctgcccgccctggcccccagcagcagctag

SEQ ID NO: 92690 - DNA, 468 bp, synthetic construct
  misc_feature 1..468: note = Description of Artificial Sequence: Synthetic coding sequence
  source 1..468: mol_type = other DNA
atgcacgagcaccacaaggagaccgagtacaaggacaagatccccctgctgcagcagcccaagagagaggaggaggaggtgctggaccagggcgacttctacagcctgctgagcaagctgctgggcgagagagaggacgtggtgcacgtgcacaagtacaaccccaccgagaaggccgagagcgagagcgacctggtggccgagatcgccaacgtggtgcagaagaaggacctgggcagaagcgacgccagagagggcgccgagcacgagagaggcaacgccatcctggtgagagacagaatccacaagttccacagactggtgagcaccctgagaccccccgagagcagagtgttcagcctgcagcagcccccccccggcgagggcacctgggagcccgagcacaccggcgccagaagagaggacatgaagtgcttccagtgcaaggagatgatcagcgtgcagtag

SEQ ID NO: 92691 - DNA, 2922 bp, synthetic construct
  misc_feature 1..2922: note = Description of Artificial Sequence: Synthetic coding sequence
  source 1..2922: mol_type = other DNA
atggccggcagagtgcccagcctgctggtgctgctggtgttccccagcagctgcctggccttcagaagccccctgagcgtgttcaagagattcaaggagaccaccagacccttcagcaacgagtgcctgggcaccaccagacccgtggtgcccatcgacagcagcgacttcgccctggacatcagaatgcccggcgtgacccccaagcagagcgacacctacttctgcatgagcatgagaatccccgtggacgaggaggccttcgtgatcgacttcaagcccagagccagcatggacaccgtgcaccacatgctgctgttcggctgcaacatgcccagcagcaccggcagctactggttctgcgacgagggcacctgcaccgacaaggccaacatcctgtacgcctgggccagaaacgccccccccaccagactgcccaagggcgtgggcttcagagtgggcggcgagaccggcagcaagtacttcgtgctgcaggtgcactacggcgacatcagcgccttcagagacaacaacaaggactgcagcggcgtgagcctgcacctgaccagactgccccagcccctgatcgccggcatgtacctgatgatgagcgtggacaccgtgatccccgccggcgagaaggtggtgaacagcgacatcagctgccactacaagaactaccccatgcacgtgttcgcctacagagtgcacacccaccacctgggcaaggtggtgagcggctacagagtgagaaacggccagtggaccctgatcggcagacagagcccccagctgccccaggccttctaccccgtgggccaccccgtggacgtgagcttcggcgacctgctggccgccagatgcgtgttcaccggcgagggcagaaccgaggccacccacatcggcggcaccagcagcgacgagatgtgcaacctgtacatcatgtactacatggaggccaagcacgccgtgagcttcatgacctgcacccagaacgtggcccccgacatgttcagaaccatcccccccgaggccaacatccccatccccgtgaagagcgacatggtgatgatgcacgagcaccacaaggagaccgagtacaaggacaagatccccctgctgcagcagcccaagagagaggaggaggaggtgctggaccagggcgacttctacagcctgctgagcaagctgctgggcgagagagaggacgtggtgcacgtgcacaagtacaaccccaccgagaaggccgagagcgagagcgacctggtggccgagatcgccaacgtggtgcagaagaaggacctgggcagaagcgacgccagagagggcgccgagcacgagagaggcaacgccatcctggtgagagacagaatccacaagttccacagactggtgagcaccctgagaccccccgagagcagagtgttcagcctgcagcagcccccccccggcgagggcacctgggagcccgagcacaccggcgacttccacatggaggaggccctggactggcccggcgtgtacctgctgcccggccaggtgagcggcgtggccctggaccccaagaacaacctggtgatcttccacagaggcgaccacgtgtgggacggcaacagcttcgacagcaagttcgtgtaccagcagatcggcctgggccccatcgaggaggacaccatcctggtgatcgaccccaacaacgccgccgtgctgcagagcagcggcaagaacctgttctacctgccccacggcctgagcatcgacaaggacggcaactactgggtgaccgacgtggccctgcaccaggtgttcaagctggaccccaacaacaaggagggccccgtgctgatcctgggcagaagcatgcagcccggcagcgaccagaaccacttctgccagcccaccgacgtggccgtggaccccggcaccggcgccatctacgtgagcgacggctactgcaacagcagaatcgtgcagttcagccccagcggcaagttcatcacccagtggggcgaggagagcagcggcagcagccccctgcccggccagttcaccgtgccccacagcctggccctggtgcccctgctgggccagctgtgcgtggccgacagagagaacggcagaatccagtgcttcaagaccgacaccaaggagttcgtgagagagatcaagcacagcagcttcggcagaaacgtgttcgccatcagctacatccccggcctgctgttcgccgtgaacggcaagccccacttcggcgaccaggagcccgtgcagggcttcgtgatgaacttcagcaacggcgagatcatcgacatcttcaagcccgtgagaaagcacttcgacatgccccacgacatcgtggccagcgaggacggcaccgtgtacatcggcgacgcccacaccaacaccgtgtggaagttcaccctgaccgagaagctggagcacagaagcgtgaagaaggccggcatcgaggtgcaggagatcaaggaggccgaggccgtggtggagaccaagatggagaacaagcccaccagcagcgagctgcagaagatgcaggagaagcagaagctgatcaaggagcccggcagcggcgtgcccgtggtgctgatcaccaccctgctggtgatccccgtggtggtgctgctggccatcgccatcttcatcagatggaagaagagcagagccttcggcgacagcgagcacaagctggagaccagcagcggcagagtgctgggcagattcagaggcaagggcagcggcggcctgaacctgggcaacttcttcgccagcagaaagggctacagcagaaagggcttcgacagactgagcaccgagggcagcgaccaggagaaggaggacgacggcagcgagagcgaggaggagtacagcgcccccctgcccgccctggcccccagcagcagctag

SEQ ID NO: 92692 - DNA, 2718 bp, synthetic construct
  misc_feature 1..2718: note = Description of Artificial Sequence: Synthetic coding sequence
  source 1..2718: mol_type = other DNA
atggccggcagagtgcccagcctgctggtgctgctggtgttccccagcagctgcctggccttcagaagccccctgagcgtgttcaagagattcaaggagaccaccagacccttcagcaacgagtgcctgggcaccaccagacccgtggtgcccatcgacagcagcgacttcgccctggacatcagaatgcccggcgtgacccccaagcagagcgacacctacttctgcatgagcatgagaatccccgtggacgaggaggccttcgtgatcgacttcaagcccagagccagcatggacaccgtgcaccacatgctgctgttcggctgcaacatgcccagcagcaccggcagctactggttctgcgacgagggcacctgcaccgacaaggccaacatcctgtacgcctgggccagaaacgccccccccaccagactgcccaagggcgtgggcttcagagtgggcggcgagaccggcagcaagtacttcgtgctgcaggtgcactacggcgacatcagcgccttcagagacaacaacaaggactgcagcggcgtgagcctgcacctgaccagactgccccagcccctgatcgccggcatgtacctgatgatgagcgtggacaccgtgatccccgccggcgagaaggtggtgaacagcgacatcagctgccactacaagaactaccccatgcacgtgttcgcctacagagtgcacacccaccacctgggcaaggtggtgagcggctacagagtgagaaacggccagtggaccctgatcggcagacagagcccccagctgccccaggccttctaccccgtgggccaccccgtggacgtgagcttcggcgacctgctggccgccagatgcgtgttcaccggcgagggcagaaccgaggccacccacatcggcggcaccagcagcgacgagatgtgcaacctgtacatcatgtactacatggaggccaagcacgccgtgagcttcatgacctgcacccagaacgtggcccccgacatgttcagaaccatcccccccgaggccaacatccccatccccgtgaagagcgacatggtgatgatgcacgagcaccacaaggagaccgagtacaaggacaagatccccctgctgcagcagcccaagagagaggaggaggaggtgctggaccagggcgacttctacagcctgctgagcaagctgctgggcgagagagaggacgtggtgcacgtgcacaagtacaaccccaccgagaaggccgagagcgagagcgacctggtggccgagatcgccaacgtggtgcagaagaaggacctgggcagaagcgacgccagagagggcgccgagcacgagagaggcaacgccatcctggtgagagacagaatccacaagttccacagactggtgagcaccctgagaccccccgagagcagagtgttcagcctgcagcagcccccccccggcgagggcacctgggagcccgagcacaccggcgacttccacatggaggaggccctggactggcccggcgtgtacctgctgcccggccaggtgagcggcgtggccctggaccccaagaacaacctggtgatcttccacagaggcgaccacgtgtgggacggcaacagcttcgacagcaagttcgtgtaccagcagatcggcctgggccccatcgaggaggacaccatcctggtgatcgaccccaacaacgccgccgtgctgcagagcagcggcaagaacctgttctacctgccccacggcctgagcatcgacaaggacggcaactactgggtgaccgacgtggccctgcaccaggtgttcaagctggaccccaacaacaaggagggccccgtgctgatcctgggcagaagcatgcagcccggcagcgaccagaaccacttctgccagcccaccgacgtggccgtggaccccggcaccggcgccatctacgtgagcgacggctactgcaacagcagaatcgtgcagttcagccccagcggcaagttcatcacccagtggggcgaggagagcagcggcagcagccccctgcccggccagttcaccgtgccccacagcctggccctggtgcccctgctgggccagctgtgcgtggccgacagagagaacggcagaatccagtgcttcaagaccgacaccaaggagttcgtgagagagatcaagcacagcagcttcggcagaaacgtgttcgccatcagctacatccccggcctgctgttcgccgtgaacggcaagccccacttcggcgaccaggagcccgtgcagggcttcgtgatgaacttcagcaacggcgagatcatcgacatcttcaagcccgtgagaaagcacttcgacatgccccacgacatcgtggccagcgaggacggcaccgtgtacatcggcgacgcccacaccaacaccgtgtggaagttcaccctgaccgagaagctggagcacagaagcgtgaagaaggccggcatcgaggtgcaggagatcaaggacagcgagcacaagctggagaccagcagcggcagagtgctgggcagattcagaggcaagggcagcggcggcctgaacctgggcaacttcttcgccagcagaaagggctacagcagaaagggcttcgacagactgagcaccgagggcagcgaccaggagaaggaggacgacggcagcgagagcgaggaggagtacagcgcccccctgcccgccctggcccccagcagcagctag

SEQ ID NO: 92693 - DNA, 90 bp, synthetic construct
  misc_feature 1..90: note = Description of Artificial Sequence: Synthetic coding sequence
  source 1..90: mol_type = other DNA
atggccggcagagtgcccagcctgctggtgctgctggtgttccccagcagctgcctggccttcagaagccccctgagcgtgttcaagtag

SEQ ID NO: 92694 - DNA, 87 bp, synthetic construct
  misc_feature 1..87: note = Description of Artificial Sequence: Synthetic coding sequence
  source 1..87: mol_type = other DNA
atggccggcagagtgcccagcctgctggtgctgctggtgttccccagcagctgcctggccttcagaagccccctgagcgtgttctag

SEQ ID NO: 92695 - DNA, 162 bp, synthetic construct
  misc_feature 1..162: note = Description of Artificial Sequence: Synthetic coding sequence
  source 1..162: mol_type = other DNA
atggccggcagagtgcccagcctgctggtgctgctggtgttccccagcagctgcctggccttcagaagccccctgagcgtgttcaagagattcaaggagaccaccagacccttcagcaacgagtgcctgggcaccaccagacccgtggtgcccatcgactag

SEQ ID NO: 92696 - DNA, 129 bp, synthetic construct
  misc_feature 1..129: note = Description of Artificial Sequence: Synthetic coding sequence
  source 1..129: mol_type = other DNA
atggccggcagagtgcccagcctgctggtgctgctggtgttccccagcagctgcctggccttcagaagccccctgagcgtgttcaagagattcaaggagaccaccagacccttcagcaacgagtgctag

SEQ ID NO: 92697 - DNA, 207 bp, synthetic construct
  misc_feature 1..207: note = Description of Artificial Sequence: Synthetic coding sequence
  source 1..207: mol_type = other DNA
atggccggcagagtgcccagcctgctggtgctgctggtgttccccagcagctgcctggccttcagaagccccctgagcgtgttcaagagattcaaggagaccaccagacccttcagcaacgagtgcctgggcaccaccagacccgtggtgcccatcgacagcagcgacttcgccctggacatcagaatgcccggcgtgaccccctag

SEQ ID NO: 92698 - DNA, 78 bp, synthetic construct
  misc_feature 1..78: note = Description of Artificial Sequence: Synthetic coding sequence
  source 1..78: mol_type = other DNA
atggccggcagagtgcccagcctgctggtgctgctggtgttccccagcagctgcctggccttcagaagccccctgtag

SEQ ID NO: 92699 - DNA, 501 bp, synthetic construct
  misc_feature 1..501: note = Description of Artificial Sequence: Synthetic coding sequence
  source 1..501: mol_type = other DNA
atggccgccatcccccccgacagctggcagccccccaacgtgtacctggagaccagcatgggcatcatcgtgctggagctgtactggaagcacgcccccaagacctgcaagaacttcgccgagctggccagaagaggctactacaacggcaccaagttccacagaatcatcaaggacttcatgatccagggcggcgaccccaccggcaccggcagaggcggcgccagcatctacggcaagcagttcgaggacgagctgcaccccgacctgaagttcaccggcgccggcatcctggccatggccaacgccggccccgacaccaacggcagccagttcttcgtgaccctggcccccacccagtggctggacggcaagcacaccatcttcggcagagtgtgccagggcatcggcatggtgaacagagtgggcatggtggagaccaacagccaggacagacccgtggacgacgtgaagatcatcaaggcctaccccagcggctag

SEQ ID NO: 92700 - DNA, 1563 bp, synthetic construct
  misc_feature 1..1563: note = Description of Artificial Sequence: Synthetic coding sequence
  source 1..1563: mol_type = other DNA
atgggcaagagacagcaccagaaggacaagatgtacatcacctgcgccgagtacacccacttctacggcggcaagaagcccgacctgccccagaccaacttcagaagactgcccttcgaccactgcagcctgagcctgcagcccttcgtgtaccccgtgtgcacccccgacggcatcgtgttcgacctgctgaacatcgtgccctggctgaagaagtacggcaccaaccccagcaacggcgagaagctggacggcagaagcctgatcaagctgaacttcagcaagaacagcgagggcaagtaccactgccccgtgctgttcaccgtgttcaccaacaacacccacatcgtggccgtgagaaccaccggcaacgtgtacgcctacgaggccgtggagcagctgaacatcaaggccaagaacttcagagacctgctgaccgacgagcccttcagcagacaggacatcatcaccctgcaggaccccaccaacctggacaagttcaacgtgagcaacttctaccacgtgaagaacaacatgaagatcatcgaccccgacgaggagaaggccaagcaggaccccagctactacctgaagaacaccaacgccgagaccagagagaccctgcaggagctgtacaaggagttcaagggcgacgagatcctggccgccaccatgaaggcccccgagaagaagaaggtggacaagctgaacgccgcccactacagcaccggcaaggtgagcgccagcttcaccagcaccgccatggtgcccgagaccacccacgaggccgccgccatcgacgaggacgtgctgagataccagttcgtgaagaagaagggctacgtgagactgcacaccaacaagggcgacctgaacctggagctgcactgcgacctgacccccaagacctgcgagaacttcatcagactgtgcaagaagcactactacgacggcaccatcttccacagaagcatcagaaacttcgtgatccagggcggcgaccccaccggcaccggcaccggcggcgagagctactggggcaagcccttcaaggacgagttcagacccaacctgagccacaccggcagaggcatcctgagcatggccaacagcggccccaacagcaacagaagccagttcttcatcaccttcagaagctgcgcctacctggacaagaagcacaccatcttcggcagagtggtgggcggcttcgacgtgctgaccgccatggagaacgtggagagcgaccccaagaccgacagacccaaggaggagatcagaatcgacgccaccaccgtgttcgtggacccctacgaggaggccgacgcccagatcgcccaggagagaaagacccagctgaaggtggcccccgagaccaaggtgaagagcagccagccccaggccggcagccagggcccccagaccttcagacagggcgtgggcaagtacatcaaccccgccgccaccaagagagccgccgaggaggagcccagcaccagcgccaccgtgcccatgagcaagaagaagcccagcagaggcttcggcgacttcagcagctggtag

SEQ ID NO: 92701 - DNA, 1563 bp, synthetic construct; identical to SEQ ID NO: 92700
  misc_feature 1..1563: note = Description of Artificial Sequence: Synthetic coding sequence
  source 1..1563: mol_type = other DNA

SEQ ID NO: 92702 - DNA, 1563 bp, synthetic construct; identical to SEQ ID NO: 92700
  misc_feature 1..1563: note = Description of Artificial Sequence: Synthetic coding sequence
  source 1..1563: mol_type = other DNA

SEQ ID NO: 92703 - DNA, 1584 bp, synthetic construct
  misc_feature 1..1584: note = Description of Artificial Sequence: Synthetic coding sequence
  source 1..1584: mol_type = other DNA
atgggcaagagacagcaccagaaggacaagatgtacatcacctgcgccgagtacacccacttctacggcggcaagaagcccgacctgccccagaccaacttcagaagactgcccttcgaccactgcagcctgagcctgcagcccttcgtgtaccccgtgtgcacccccgacggcatcgtgttcgacctgctgaacatcgtgccctggctgaagaagtacggcaccaaccccagcaacggcgagaagctggacggcagaagcctgatcaagctgaacttcagcaagaacagcgagggcaagtaccactgccccgtgctgttcaccgtgttcaccaacaacacccacatcgtggccgtgagaaccaccggcaacgtgtacgcctacgaggccgtggagcagctgaacatcaaggccaagaacttcagagacctgctgaccgacgagcccttcagcagacaggacatcatcaccctgcaggaccccaccaacctggacaagttcaacgtgagcaacttctaccacgtgaagaacaacatgaagatcatcgaccccgacgaggagaaggccaagcaggaccccagctactacctgaagaacaccaacgccgagaccagagagaccctgcaggagctgtacaaggagttcaagggcgacgagatcctggccgccaccatgaaggcccccgagaagaagaaggtggacaagctgaacgccgcccactacagcaccggcaaggtgagcgccagcttcaccagcaccgccatggtgcccgagaccacccacgaggccgccgccatcgacgaggacgtgctgagataccagttcgtgaagaagaagggctacgtgagactgcacaccaacaagggcgacctgaacctggagctgcactgcgacctgacccccaagacctgcgagaacttcatcagactgtgcaagaagcactactacgacggcaccatcttccacagaagcatcagaaacttcgtgatccagggcggcgaccccaccggcaccggcaccggcggcgagagctactggggcaagcccttcaaggacgagttcagacccaacctgagccacaccggcagaggcatcctgagcatggccaacagcggccccaacagcaacagaagccagttcttcatcaccttcagaagctgcgcctacctggacaagaagcacaccatcttcggcagagtggtgggcggcttcgacgtgctgaccgccatggagaacgtggagagcgaccccaagaccgacagacccaaggaggagatcagaatcgacgccaccaccgtgttcgtggacccctacgaggaggccgacgcccagatcgcccaggagagaaagacccagctgaaggtggcccccgagaccaaggtgaagagcagccagccccaggccggcagccagggcccccagaccttcagacagggcgtgggcaagtacatcaaccccgccgccaccgagcagcagagaaagagcccccagcccgtgcccctgagcccctgccccagaagaagccccgtgggcgtgctgggcaccagcgcccccggcagcagcagactgcccgacgaccactag

SEQ ID NO: 92704 - DNA, 1470 bp, synthetic construct
  misc_feature 1..1470: note = Description of Artificial Sequence: Synthetic coding sequence
  source 1..1470: mol_type = other DNA
atgggcaagagacagcaccagaaggacaagatgtacatcacctgcgccgagtacacccacttctacggcggcaagaagcccgacctgccccagaccaacttcagaagactgcccttcgaccactgcagaaacatcgtgccctggctgaagaagtacggcaccaaccccagcaacggcgagaagctggacggcagaagcctgatcaagctgaacttcagcaagaacagcgagggcaagtaccactgccccgtgctgttcaccgtgttcaccaacaacacccacatcgtggccgtgagaaccaccggcaacgtgtacgcctacgaggccgtggagcagctgaacatcaaggccaagaacttcagagacctgctgaccgacgagcccttcagcagacaggacatcatcaccctgcaggaccccaccaacctggacaagttcaacgtgagcaacttctaccacgtgaagaacaacatgaagatcatcgaccccgacgaggagaaggccaagcaggaccccagctactacctgaagaacaccaacgccgagaccagagagaccctgcaggagctgtacaaggagttcaagggcgacgagatcctggccgccaccatgaaggcccccgagaagaagaaggtggacaagctgaacgccgcccactacagcaccggcaaggtgagcgccagcttcaccagcaccgccatggtgcccgagaccacccacgaggccgccgccatcgacgaggacgtgctgagataccagttcgtgaagaagaagggctacgtgagactgcacaccaacaagggcgacctgaacctggagctgcactgcgacctgacccccaagacctgcgagaacttcatcagactgtgcaagaagcactactacgacggcaccatcttccacagaagcatcagaaacttcgtgatccagggcggcgaccccaccggcaccggcaccggcggcgagagctactggggcaagcccttcaaggacgagttcagacccaacctgagccacaccggcagaggcatcctgagcatggccaacagcggccccaacagcaacagaagccagttcttcatcaccttcagaagctgcgcctacctggacaagaagcacaccatcttcggcagagtggtgggcggcttcgacgtgctgaccgccatggagaacgtggagagcgaccccaagaccgacagacccaaggaggagatcagaatcgacgccaccaccgtgttcgtggacccctacgaggaggccgacgcccagatcgcccaggagagaaagacccagctgaaggaggccagcagcagaggcagagccctgaaccagtgccactgcccccacgtgcaggaggaggcccagagcggcttctggggcctgcagctgctggtggccgccgccacctgcagactgtacctgtgccccagcttcagccaccagagcctgatgctgaagctgcaggcctag

SEQ ID NO: 92705 - DNA, 1563 bp, synthetic construct; identical to SEQ ID NO: 92700
  misc_feature 1..1563: note = Description of Artificial Sequence: Synthetic coding sequence
  source 1..1563: mol_type = other DNA

SEQ ID NO: 92706 - DNA, 1479 bp, synthetic construct
  misc_feature 1..1479: note = Description of Artificial Sequence: Synthetic coding sequence
  source 1..1479: mol_type = other DNA
atggccgtgctgctggagaccaccctgggcgacgtggtgatcgacctgtacaccgaggagagacccagagcctgcctgaacttcctgaagctgtgcaagatcaagtactacaactactgcctgatccacaacgtgcagagagacttcatcatccagaccggcgaccccaccggcaccggcagaggcggcgagagcatcttcggccagctgtacggcgaccaggccagcttcttcgaggccgagaaggtgcccagaatcaagcacaagaagaagggcaccgtgagcatggtgaacaacggcagcgaccagcacggcagccagttcctgatcaccaccggcgagaacctggactacctggacggcgtgcacaccgtgttcggcgaggtgaccgagggcatggacatcatcaagaagatcaacgagaccttcgtggacaaggacttcgtgccctaccaggacatcagaatcaaccacaccgtgatcctggacgaccccttcgacgacccccccgacctgctgatccccgacagaagccccgagcccaccagagagcagctggacagcggcagaatcggcgccgacgaggagatcgacgacttcaagggcagaagcgccgaggaggtggaggagatcaaggccgagaaggaggccaagacccaggccatcctgctggagatggtgggcgacctgcccgacgccgacatcaagccccccgagaacgtgctgttcgtgtgcaagctgaaccccgtgaccaccgacgaggacctggagatcatcttcagcagattcggccccatcagaagctgcgaggtgatcagagactggaagaccggcgagagcctgtgctacgccttcatcgagttcgagaaggaggaggactgcgagaaggccttcttcaagatggacaacgtgctgatcgacgacagaagaatccacgtggacttcagccagagcgtggccaaggtgaagtggaagggcaagggcggcaagtacaccaagagcgacttcaaggagtacgagaaggagcaggacaagccccccaacctggtgctgaaggacaaggtgaagcccaagcaggacaccaagtacgacctgatcctggacgagcaggccgaggacagcaagagcagccacagccacaccagcaagaagcacaagaagaagacccaccactgcagcgaggagaaggaggacgaggactacatgcccatcaagaacaccaaccaggacatctacagagagatgggcttcggccactacgaggaggaggagagctgctgggagaagcagaagagcgagaagagagacagaacccagaacagaagcagaagcagaagcagagagagagacggccactacagcaacagccacaagagcaagtaccagaccgacctgtacgagagagagagaagcaagaagagagacagaagcagaagccccaagaagagcaaggacaaggagaagagcaagtacagatag

SEQ ID NO: 92707 - DNA, 384 bp, synthetic construct
  misc_feature 1..384: note = Description of Artificial Sequence: Synthetic coding sequence
  source 1..384: mol_type = other DNA
atgagcagacccaagacccagaaccaggtgacccacacccaggtgaagaacaccagaagaaagcccatcaccgtgctgaagagaaagaagatgagaaccacctgccagagcaagatcctgatcagaatcagcatcgagaagtggggcctggtgaccatgaagaagaagaaggccgtgggcagaaacaagagagtgaagagagagaccgagctgagaaccgaggtggtggccgacctggagagaggcatggccatcatcgtgatcgtgatcaaccagaacaccaagcagatcttcatgaaggagaagggcgtgaagagagagaccgaggccgaggtgcagagaagccccaagatcaagaagaacctgagcatcgacgagagatag

SEQ ID NO: 92708 - DNA, 318 bp, synthetic construct
  misc_feature 1..318: note = Description of Artificial Sequence: Synthetic coding sequence
  source 1..318: mol_type = other DNA
atgtgccagggcggcgacttcaccagacacaacggcaccggcggcaagagcatctacggcgagaagttcgaggacgagaacttcatcctgaagcacaccggccccggcatcctgagcatggccaacgccggccccaacaccaacggcagccagttcttcatctgcaccgccaagaccgagtggctggacggcaagcacgtggtgttcggcaaggtgaaggagggcatgaacatcgtggaggccatggagagattcggcagcagaaacggcaagaccagcaagaagatcaccatcgccgactgcggccagctggagtag

SEQ ID NO: 92709 - DNA, 390 bp, synthetic construct
  misc_feature 1..390: note = Description of Artificial Sequence: Synthetic coding sequence
  source 1..390: mol_type = other DNA
atggtgaaccccaccgtgttcttcgacatcgccgtggacggcgagcccctgggcagagtgagcttcgagctgttcgccgacaaggtgcccaagaccgccgagaacttcagagccctgagcaccggcgagaagggcttcggctacaagggcagctgcttccacagaatcatccccggcttcatgtgccagggcggcgacttcaccagacacaacggcaccggcggcaagagcatctgcaccgccaagaccgagtggctggacggcaagcacgtggtgttcggcaaggtgaaggagggcatgaacatcgtggaggccatggagagattcggcagcagaaacggcaagaccagcaagaagatcaccatcgccgactgcggccagctggagtag

SEQ ID NO: 92710 - DNA, 498 bp, synthetic construct
  misc_feature 1..498: note = Description of Artificial Sequence: Synthetic coding sequence
  source 1..498: mol_type = other DNA
atggtgaaccccaccgtgttcttcgacatcgccgtggacggcgagcccctgggcagagtgagcttcgagctgttcgccgacaaggtgcccaagaccgccgagaacttcagagccctgagcaccggcgagaagggcttcggctacaagggcagctgcttccacagaatcatccccggcttcatgtgccagggcggcgacttcaccagacacaacggcaccggcggcaagagcatctacggcgagaagttcgaggacgagaacttcatcctgaagcacaccggccccggcatcctgagcatggccaacgccggccccaacaccaacggcagccagttcttcatctgcaccgccaagaccgagtggctggacggcaagcacgtggtgttcggcaaggtgaaggagggcatgaacatcgtggaggccatggagagattcggcagcagaaacggcaagaccagcaagaagatcaccatcgccgactgcggccagctggagtag

SEQ ID NO: 92711 - DNA, 495 bp, synthetic construct
  misc_feature 1..495: note = Description of Artificial Sequence: Synthetic coding sequence
  source 1..495: mol_type = other DNA
atggtgaacagcgtggtgttcttcgacatcaccgtggacggcaagcccctgggcagaatcagcatcaagctgttcgccgacaagatcctgaagaccgccgagaacttcagagccctgagcaccggcgagaagggcttcagatacaagggcagctgcttccacagaatcatccccggcttcatgtgccagggcggcgacttcaccagacacaacggcaccggcgacaagagcatctacggcgagaagttcgacgacgagaacctgatcagaaagcacaccggcagcggcatcctgagcatggccaacgccggccccaacaccaacggcagccagttcttcatctgcgccgccaagaccgagtggctggacggcaagcacgtggccttcggcaaggtgaaggagagagtgaacatcgtggaggccatggagcacttcggctacagaaacagcaagaccagcaagaagatcaccatcgccgactgcggccagttctag

SEQ ID NO: 92712 - DNA, 651 bp, synthetic construct
  misc_feature 1..651: note = Description of Artificial Sequence: Synthetic coding sequence
  source 1..651: mol_type = other DNA
atgctgagactgagcgagagaaacatgaaggtgctgctggccgccgccctgatcgccggcagcgtgttcttcctgctgctgcccggccccagcgccgccgacgagaagaagaagggccccaaggtgaccgtgaaggtgtacttcgacctgagaatcggcgacgaggacgtgggcagagtgatcttcggcctgttcggcaagaccgtgcccaagaccgtggacaacttcgtggccctggccaccggcgagaagggcttcggctacaagaacagcaagttccacagagtgatcaaggacttcatgatccagggcggcgacttcaccagaggcgacggcaccggcggcaagagcatctacggcgagagattccccgacgagaacttcaagctgaagcactacggccccggctgggtgagcatggccaacgccggcaaggacaccaacggcagccagttcttcatcaccaccgtgaagaccgcctggctggacggcaagcacgtggtgttcggcaaggtgctggagggcatggaggtggtgagaaaggtggagagcaccaagaccgacagcagagacaagcccctgaaggacgtgatcatcgccgactgcggcaagatcgaggtggagaagcccttcgccatcgccaaggagtag

SEQ ID NO: 92713 - DNA, 639 bp, synthetic construct
  misc_feature 1..639: note = Description of Artificial Sequence: Synthetic coding sequence
  source 1..639: mol_type = other DNA
atgggccccggccccagactgctgctgcccctggtgctgtgcgtgggcctgggcgccctggtgttcagcagcggcgccgagggcttcagaaagagaggccccagcgtgaccgccaaggtgttcttcgacgtgagaatcggcgacaaggacgtgggcagaatcgtgatcggcctgttcggcaaggtggtgcccaagaccgtggagaacttcgtggccctggccaccggcgagaagggctacggctacaagggcagcaagttccacagagtgatcaaggacttcatgatccagggcggcgacatcaccaccggcgacggcaccggcggcgtgagcatctacggcgagaccttccccgacgagaacttcaagctgaagcactacggcatcggctgggtgagcatggccaacgccggccccgacaccaacggcagccagttcttcatcaccctgaccaagcccacctggctggacggcaagcacgtggtgttcggcaaggtgatcgacggcatgaccgtggtgcacagcatcgagctgcaggccaccgacggccacgacagacccctgaccaactgcagcatcatcaacagcggcaagatcgacgtgaagacccccttcgtggtggagatcgccgactggtag

SEQ ID NO: 92714 - DNA, 1113 bp, synthetic construct
  misc_feature 1..1113: note = Description of Artificial Sequence: Synthetic coding sequence
  source 1..1113: mol_type = other DNA
atgagccaccccagcccccaggccaagcccagcaaccccagcaaccccagagtgttcttcgacgtggacatcggcggcgagagagtgggcagaatcgtgctggagctgttcgccgacatcgtgcccaagaccgccgagaacttcagagccctgtgcaccggcgagaagggcatcggccacaccaccggcaagcccctgcacttcaagggctgccccttccacagaatcatcaagaagttcatgatccagggcggcgacttcagcaaccagaacggcaccggcggcgagagcatctacggcgagaagttcgaggacgagaacttccactacaagcacgacagagagggcctgctgagcatggccaacgccggcagaaacaccaacggcagccagttcttcatcaccaccgtgcccaccccccacctggacggcaagcacgtggtgttcggccaggtgatcaagggcatcggcgtggccagaatcctggagaacgtggaggtgaagggcgagaagcccgccaagctgtgcgtgatcgccgagtgcggcgagctgaaggagggcgacgacggcggcatcttccccaaggacggcagcggcgacagccaccccgacttccccgaggacgccgacatcgacctgaaggacgtggacaagatcctgctgatcaccgaggacctgaagaacatcggcaacaccttcttcaagagccagaactgggagatggccatcaagaagtacgccgaggtgctgagatacgtggacagcagcaaggccgtgatcgagaccgccgacagagccaagctgcagcccatcgccctgagctgcgtgctgaacatcggcgcctgcaagctgaagatgagcaactggcagggcgccatcgacagctgcctggaggccctggagctggaccccagcaacaccaaggccctgtacagaagagcccagggctggcagggcctgaaggagtacgaccaggccctggccgacctgaagaaggcccagggcatcgcccccgaggacaaggccatccaggccgagctgctgaaggtgaagcagaagatcaaggcccagaaggacaaggagaaggccgtgtacgccaagatgttcgcctag

SEQ ID NO: 92715 - DNA, 597 bp, synthetic construct
  misc_feature 1..597: note = Description of Artificial Sequence: Synthetic coding sequence
  source 1..597: mol_type = other DNA
atggacgccatcctgaactacagaagcgaggacaccgaggactactacaccctgctgggctgcgacgagctgagcagcgtggagcagatcctggccgagttcaaggtgagagccctggagtgccaccccgacaagcaccccgagaaccccaaggccgtggagaccttccagaagctgcagaaggccaaggagatcctgaccaacgaggagagcagagccagatacgaccactggagaagaagccagatgagcatgcccttccagcagtgggaggccctgaacgacagcgtgaagaccagcatgcactgggtggtgagaggcaagaaggacctgatgctggaggagagcgacaagacccacaccaccaagatggagaacgaggagtgcaacgagcagagagagagaaagaaggaggagctggccagcaccgccgagaagaccgagcagaaggagcccaagcccctggagaagagcgtgagcccccagaacagcgacagcagcggcttcgccgacgtgaacggctggcacctgagattcagatggagcaaggacgcccccagcgagctgctgagaaagttcagaaactacgagatctag

SEQ ID NO: 92716 - DNA, 468 bp, synthetic construct
  misc_feature 1..468: note = Description of Artificial Sequence: Synthetic coding sequence
  source 1..468: mol_type = other DNA
atgctggccctgagatgcggcagcagatggctgggcctgctgagcgtgcccagaagcgtgcccctgagactgcccgccgccagagcctgcagcaagggcagcggcgaccccagcagcagcagcagcagcggcaaccccctggtgtacctggacgtggacgccaacggcaagcccctgggcagagtggtgctggagctgaaggccgacgtggtgcccaagaccgccgagaacttcagagccctgtgcaccggcgagaagggcttcggctacaagggcagcaccttccacagagtgatccccagcttcatgtgccaggccggcgacttcaccaaccacaacggcaccggcggcaagagcatctacggcagcagattccccgacgagaacttcaccctgaagcacgtgggccccggctggatggccagcatgctgtgcagcgtgaccagcaagagagcctggaccagctag

SEQ ID NO: 92717 - DNA, 498 bp, synthetic construct
  misc_feature 1..498: note = Description of Artificial Sequence: Synthetic coding sequence
  source 1..498: mol_type = other DNA
tgaagcagcagcagcagcagcggcaaccccctggtgtacctggacgtggacgccaacggcaagcccctgggcagagtggtgctggagctgaaggccgacgtggtgcccaagaccgccgagaacttcagagccctgtgcaccggcgagaagggcttcggctacaagggcagcaccttccacagagtgatccccagcttcatgtgccaggccggcgacttcaccaaccacaacggcaccggcggcaagagcatctacggcagcagattccccgacgagaacttcaccctgaagcacgtgggccccggcgtgctgagcatggccaacgccggccccaacaccaacggcagccagttcttcatctgcaccatcaagaccgactggagcatggccctggacgacatcgccctgcactgctgcagccccggcagccccgtgctgaccggctggatggccagcatgctgtgcagcgtgaccagcaagagagcctggaccagctag

SEQ ID NO: 92718 - DNA, 2265 bp, synthetic construct
  misc_feature 1..2265: note = Description of Artificial Sequence: Synthetic coding sequence
  source 1..2265: mol_type = other DNA
atgggcatcaaggtgcagagacccagatgcttcttcgacatcgccatcaacaaccagcccgccggcagagtggtgttcgagctgttcagcgacgtgtgccccaagacctgcgagaacttcagatgcctgtgcaccggcgagaagggcaccggcaagagcacccagaagcccctgcactacaagagctgcctgttccacagagtggtgaaggacttcatggtgcagggcggcgacttcagcgagggcaacggcagaggcggcgagagcatctacggcggcttcttcgaggacgagagcttcgccgtgaagcacaacaaggagttcctgctgagcatggccaacagaggcaaggacaccaacggcagccagttcttcatcaccaccaagcccaccccccacctggacggccaccacgtggtgttcggccaggtgatcagcggccaggaggtggtgagagagatcgagaaccagaagaccgacgccgccagcaagcccttcgccgaggtgagaatcctgagctgcggcgagctgatccccaagagcaaggtgaagaaggaggagaagaagagacacaagagcagcagcagcagcagcagcagcagcagcgacagcgacagcagcagcgacagccagagcagcagcgacagcagcgacagcgagagcgccaccgaggagaagagcaagaagagaaagaagaagcacagaaagaacagcagaaagcacaagaaggagaagaagaagagaaagaagagcaagaagagcgccagcagcgagagcgaggccgagaacctggaggcccagccccagagcaccgtgagacccgaggagatcccccccatccccgagaacagattcctgatgagaaagagcccccccaaggccgacgagaaggagagaaagaacagagagagagagagagagagagagtgcaacccccccaacagccagcccgccagctaccagagaagactgctggtgaccagaagcggcagaaagatcaagggcagaggccccagaagatacagaacccccagcagaagcagaagcagagacagattcagaagaagcgagacccccccccactggagacaggagatgcagagagcccagagaatgagagtgagcagcggcgagagatggatcaagggcgacaagagcgagctgaacgagatcaaggagaaccagagaagccccgtgagagtgaaggagagaaagatcaccgaccacagaaacgtgagcgagagccccaacagaaagaacgagaaggagaagaaggtgaaggaccacaagagcaacagcaaggagagagacatcagaagaaacagcgagaaggacgacaagtacaagaacaaggtgaagaagagagccaagagcaagagcagaagcaagagcaaggagaagagcaagagcaaggagagagacagcaagcacaacagaaacgaggagaagagaatgagaagcagaagcaagggcagagaccacgagaacgtgaaggagaaggagaagcagagcgacagcaagggcaaggaccaggagagaagcagaagcaaggagaagagcaagcagctggagagcaagagcaacgagcacgaccacagcaagagcaaggagaaggacagaagagcccagagcagaagcagagagtgcgacatcaccaagggcaagcacagctacaacagcagaaccagagagagaagcagaagcagagacagaagcagaagagtgagaagcagaacccacgacagagacagaagcagaagcaaggagtaccacagatacagagagcaggagtacagaagaagaggcagaagcagaagcagagagagaagaaccccccccggcagaagcagaagcaaggacagaagaagaagaagaagagacagcagaagcagcgagagagaggagagccagagcagaaacaaggacaagtacagaaaccaggagagcaagagcagccacagaaaggagaacagcgagagcgagaagagaatgtacagcaagagcagagaccacaacagcagcaacaacagcagagagaagaaggccgacagagaccagagccccttcagcaagatcaagcagagcagccaggacaacgagctgaagagcagcatgctgaagaacaaggaggacgagaagatcagaagcagcgtggagaaggagaaccagaagagcaagggccaggagaacgaccacgtgcacgagaagaacaagaagttcgaccacgagagcagccccggcaccgacgaggacaagagcggctag

SEQ ID NO: 92719 - DNA, 741 bp, synthetic construct
  misc_feature 1..741: note = Description of Artificial Sequence: Synthetic coding sequence
  source 1..741: mol_type = other DNA
atgggcatcaaggtgcagagacccagatgcttcttcgacatcgccatcaacaaccagcccgccggcagagtggtgttcgagctgttcagcgacgtgtgccccaagacctgcgagaacttcagatgcctgtgcaccggcgagaagggcaccggcaagagcacccagaagcccctgcactacaagagctgcctgttccacagagtggtgaaggacttcatggtgcagggcggcgacttcagcgagggcaacggcagaggcggcgagagcatctacggcggcttcttcgaggacgagagcttcgccgtgaagcacaacaaggagttcctgctgagcatggccaacagaggcaaggacaccaacggcagccagttcttcatcaccaccaagcccaccccccacctggacggccaccacgtggtgttcggccaggtgatcagcggccaggaggtggtgagagagatcgagaaccagaagaccgacgccgccagcaagcccttcgccgaggtgagaatcctgagctgcggcgagctgatccccaagagcaaggtgaagaaggaggagaagaagagacacaagagcagcagcagcagcagcagcagcagcagcgacagcgacagcagcagcgacagccagagcagcagcgacagcagcgacagcgagagcgccaccgaggagaagagcaagaagagaaagaagaagcacagaaagaacagcagaaagcacaagaaggagaagaagtag

SEQ ID NO: 92720 - DNA, 180 bp, synthetic construct
  misc_feature 1..180: note = Description of Artificial Sequence: Synthetic coding sequence
  source 1..180: mol_type = other DNA
atgggcatcaaggtgcagagacccagatgcttcttcgacatcgccatcaacaaccagcccgccggcagagtggtgttcgagctgttcagcgacgtgtgccccaagacctgcgagaacttcagatgcctgtgcaccggcgagaagggcaccggcaagagcacccagaagcccctgcactag

SEQ ID NO: 92721 - DNA, 2265 bp, synthetic construct; identical to SEQ ID NO: 92718
  misc_feature 1..2265: note = Description of Artificial Sequence: Synthetic coding sequence
  source 1..2265: mol_type = other DNA

SEQ ID NO: 92722 - DNA, 1347 bp, synthetic construct
  misc_feature 1..1347: note = Description of Artificial Sequence: Synthetic coding sequence
  source 1..1347: mol_type = other DNA
atgggcatcaaggtgcagagacccagatgcttcttcgacatcgccatcaacaaccagcccgccggcagagtggtgttcgagctgttcagcgacgtgtgccccaagacctgcgagaacttcagatgcctgtgcaccggcgagaagggcaccggcaagagcacccagaagcccctgcactacaagagctgcctgttccacagagtggtgaaggacttcatggtgcagggcggcgacttcagcgagggcaacggcagaggcggcgagagcatctacggcggcttcttcgaggacgagagcttcgccgtgaagcacaacaaggagttcctgctgagcatggccaacagaggcaaggacaccaacggcagccagttcttcatcaccaccaagcccaccccccacctggacggccaccacgtggtgttcggccaggtgatcagcggccaggaggtggtgagagagatcgagaaccagaagaccgacgccgccagcaagcccttcgccgaggtgagaatcctgagctgcggcgagctgatccccaagagcaaggtgaagaaggaggagaagaagagacacaagagcagcagcagcagcagcagcagcagcagcgacagcgacagcagcagcgacagccagagcagcagcgacagcagcgacagcgagagcgccaccgaggagaagagcaagaagagaaagaagaagcacagaaagaacagcagaaagcacaagaaggagaagaagaagagaaagaagagcaagaagagcgccagcagcgagagcgaggccgagaacctggaggcccagccccagagcaccgtgagacccgaggagatcccccccatccccgagaacagattcctgatgagaaagagcccccccaaggccgacgagaaggagagaaagaacagagagagagagagagagagagagtgcaacccccccaacagccagcccgccagctaccagagaagactgctggtgaccagaagcggcagaaagatcaagggcagaggccccagaagatacagaacccccagcagaagcagaagcagagacagattcagaagaagcgagacccccccccactggagacaggagatgcagagagcccagagaatgagagtgagcagcggcgagagatggatcaagggcgacaagagcgagctgaacgagatcaaggagaaccagagaagccccgtgagagtgaaggagagaaagatcaccgaccacagaaacgtgagcgagagccccaacagaaagaacgagaaggagaagaaggtgaaggaccacaagagcaacagcaaggagagagacatcagaagaaagaagaagaagaagaagaagaagtag

SEQ ID NO: 92723 - DNA, 534 bp, synthetic construct
  misc_feature 1..534: note = Description of Artificial Sequence: Synthetic coding sequence
  source 1..534: mol_type = other DNA
atggccgtggccaacagcagccccgtgaaccccgtggtgttcttcgacgtgagcatcggcggccaggaggtgggcagaatgaagatcgagctgttcgccgacgtggtgcccaagaccgccgagaacttcagacagttctgcaccggcgagttcagaaaggacggcgtgcccatcggctacaagggcagcaccttccacagagtgatcaaggacttcatgatccagggcggcgacttcgtgaacggcgacggcaccggcgtggccagcatctacagaggccccttcgccgacgagaacttcaagctgagacacagcgcccccggcctgctgagcatggccaacagcggccccagcaccaacggctgccagttcttcatcacctgcagcaagtgcgactggctggacggcaagcacgtggtgttcggcaagatcatcgacggcctgctggtgatgagaaagatcgagaacgtgcccaccggccccaacaacaagcccaagctgcccgtggtgatcagccagtgcggcgagatgtag

SEQ ID NO: 92724 - DNA, 174 bp, synthetic construct
  misc_feature 1..174: note = Description of Artificial Sequence: Synthetic coding sequence
  source 1..174: mol_type = other DNA
atgaagatcgagctgttcgccgacgtggtgcccaagaccgccgagaacttcagacagttctgcaccggcgagttcagaagcgtgagcgacgtgttcgacttcttcgcctgcagcagaggcgtgttctggggctgcagcgagggcatcggcgagccccccgccggcctggagtag

SEQ ID NO: 92725 - DNA, 405 bp, synthetic construct
  misc_feature 1..405: note = Description of Artificial Sequence: Synthetic coding sequence
  source 1..405: mol_type = other DNA
atgatcgccggcgacagcgacagaagaaaggacggcgtgcccatcggctacaagggcagcaccttccacagagtgatcaaggacttcatgatccagggcggcgacttcgtgaacggcgacggcaccggcgtggccagcatctacagaggccccttcgccgacgagaacttcaagctgagacacagcgcccccggcctgctgagcatggccaacagcggccccagcaccaacggctgccagttcttcatcacctgcagcaagtgcgactggctggacggcaagcacgtggtgttcggcaagatcatcgacggcctgctggtgatgagaaagatcgagaacgtgcccaccggccccaacaacaagcccaagctgcccgtggtgatcagccagtgcggcgagatgtag

SEQ ID NO: 92726 - DNA, 207 bp, synthetic construct
  misc_feature 1..207: note = Description of Artificial Sequence: Synthetic coding sequence
  source 1..207: mol_type = other DNA
atggtgaactggaagggcctggtgctgcccgccgtgacccccagcctgttcctgttcggctacagaaaggacggcgtgcccatcggctacaagggcagcaccttccacagagtgatcaaggacttcatgatccagggcggcgacttcgtgaacgtgagcaccatccccttcctgagcaagaccagaagcttcagcttctgctgctag

SEQ ID NO: 92727 - DNA, 435 bp, synthetic construct
  misc_feature 1..435: note = Description of Artificial Sequence: Synthetic coding sequence
  source 1..435: mol_type = other DNA
atgaagatcgagctgttcgccgacgtggtgcccaagaccgccgagaacttcagacagttctgcaccggcgagttcagaaaggacggcgtgcccatcggctacaagggcagcaccttccacagagtgatcaaggacttcatgatccagggcggcgacttcgtgaacggcgacggcaccggcgtggccagcatctacagaggccccttcgccgacgagaacttcaagctgagacacagcgcccccggcctgctgagcatggccaacagcggccccagcaccaacggctgccagttcttcatcacctgcagcaagtgcgactggctggacggcaagcacgtggtgttcggcaagatcatcgacggcctgctggtgatgagaaagatcgagaacgtgcccaccggccccaacaacaagcccaagctgcccgtggtgtag

SEQ ID NO: 92728 - DNA, 405 bp, synthetic construct; identical to SEQ ID NO: 92725
  misc_feature 1..405: note = Description of Artificial Sequence: Synthetic coding sequence
  source 1..405: mol_type = other DNA

SEQ ID NO: 92729 - DNA, 540 bp, synthetic construct
  misc_feature 1..540: note = Description of Artificial Sequence: Synthetic coding sequence
  source 1..540: mol_type = other DNA
atgcccagcaagagcctggtgatggagtacctggcccaccccagcaccctgggcctggccgtgggcgtggcctgcggcatgtgcctgggctggagcctgagagtgtgcttcggcatgctgcccaagagcaagaccagcaagacccacaccgacaccgagagcgaggccagcatcctgggcgacagcggcgagtacaagatgatcctggtggtgagaaacgacctgaagatgggcaagggcaaggtggccgcccagtgcagccacgccgccgtgagcgcctacaagcagatccagagaagaaaccccgagatgctgaagcagtgggagtactgcggccagcccaaggtggtggtgaaggcccccgacgaggagaccctgatcgccctgctggcccacgccaagatgctgggcctgaccgtgagcctgatccaggacgccggcagaacccagatcgcccccggcagccagaccgtgctgggcatcggccccggccccgccgacctgatcgacaaggtgaccggccacctgaagctgtactag

SEQ ID NO: 92730 - DNA, 543 bp, synthetic construct
  misc_feature 1..543: note = Description of Artificial Sequence: Synthetic coding sequence
  source 1..543: mol_type = other DNA
atgatgcccagcaagagcctggtgatggagtacctggcccaccccagcaccctgggcctggccgtgggcgtggcctgcggcatgtgcctgggctggagcctgagagtgtgcttcggcatgctgcccaagagcaagaccagcaagacccacaccgacaccgagagcgaggccagcatcctgggcgacagcggcgagtacaagatgatcctggtggtgagaaacgacctgaagatgggcaagggcaaggtggccgcccagtgcagccacgccgccgtgagcgcctacaagcagatccagagaagaaaccccgagatgctgaagcagtgggagtactgcggccagcccaaggtggtggtgaaggcccccgacgaggagaccctgatcgccctgctggcccacgccaagatgctgggcctgaccgtgagcctgatccaggacgccggcagaacccagatcgcccccggcagccagaccgtgctgggcatcggccccggccccgccgacctgatcgacaaggtgaccggccacctgaagctgtactag

SEQ ID NO: 92731 - DNA, 540 bp, synthetic construct; identical to SEQ ID NO: 92729
  misc_feature 1..540: note = Description of Artificial Sequence: Synthetic coding sequence
  source 1..540: mol_type = other DNA

SEQ ID NO: 92732 - DNA, 1668 bp, synthetic construct
  misc_feature 1..1668: note = Description of Artificial Sequence: Synthetic coding sequence
  source 1..1668: mol_type = other DNA
atggccgccagactgctgctgctgggcatcctgctgctgctgctgcccctgcccgtgcccgccccctgccacaccgccgccagaagcgagtgcaagagaagccacaagttcgtgcccggcgcctggctggccggcgagggcgtggacgtgaccagcctgagaagaagcggcagcttccccgtggacacccagagattcctgagacccgacggcacctgcaccctgtgcgagaacgccctgcaggagggcaccctgcagagactgcccctggccctgaccaactggagagcccagggcagcggctgccagagacacgtgaccagagccaaggtgagcagcaccgaggccgtggccagagacgccgccagaagcatcagaaacgactggaaggtgggcctggacgtgacccccaagcccaccagcaacgtgcacgtgagcgtggccggcagccacagccaggccgccaacttcgccgcccagaagacccaccaggaccagtacagcttcagcaccgacaccgtggagtgcagattctacagcttccacgtggtgcacaccccccccctgcaccccgacttcaagagagccctgggcgacctgccccaccacttcaacgccagcacccagcccgcctacctgagactgatcagcaactacggcacccacttcatcagagccgtggagctgggcggcagaatcagcgccctgaccgccctgagaacctgcgagctggccctggagggcctgaccgacaacgaggtggaggactgcctgaccgtggaggcccaggtgaacatcggcatccacggcagcatcagcgccgaggccaaggcctgcgaggagaagaagaagaagcacaagatgaccgccagcttccaccagacctacagagagagacacagcgaggtggtgggcggccaccacaccagcatcaacgacctgctgttcggcatccaggccggccccgagcagtacagcgcctgggtgaacagcctgcccggcagccccggcctggtggactacaccctggagcccctgcacgtgctgctggacagccaggaccccagaagagaggccctgagaagagccctgagccagtacctgaccgacagagccagatggagagactgcagcagaccctgcccccccggcagacagaagagccccagagacccctgccagtgcgtgtgccacggcagcgccgtgaccacccaggactgctgccccagacagagaggcctggcccagctggaggtgaccttcatccaggcctggggcctgtggggcgactggttcaccgccaccgacgcctacgtgaagctgttcttcggcggccaggagctgagaaccagcaccgtgtgggacaacaacaaccccatctggagcgtgagactggacttcggcgacgtgctgctggccaccggcggccccctgagactgcaggtgtgggaccaggacagcggcagagacgacgacctgctgggcacctgcgaccaggcccccaagagcggcagccacgaggtgagatgcaacctgaaccacggccacctgaagttcagataccacgccagatgcctgccccacctgggcggcggcacctgcctggactacgtgccccagatgctgctgggcgagccccccggcaacagaagcggcgccgtgtggtag

SEQ ID NO: 92733 - DNA, 1668 bp, synthetic construct; identical to SEQ ID NO: 92732
  misc_feature 1..1668: note = Description of Artificial Sequence: Synthetic coding sequence
  source 1..1668: mol_type = other DNA

SEQ ID NO: 92734 - DNA, 1668 bp, synthetic construct; identical to SEQ ID NO: 92732
  misc_feature 1..1668: note = Description of Artificial Sequence: Synthetic coding sequence
  source 1..1668: mol_type = other DNA

SEQ ID NO: 92735 - DNA, 444 bp, synthetic construct
  misc_feature 1..444: note = Description of Artificial Sequence: Synthetic coding sequence
  source 1..444: mol_type = other DNA
atggaggccagaagcagaagcgccgaggagctgagaagagccgagctggtggagatcatcgtggagaccgaggcccagaccggcgtgagcggcatcaacgtggccggcggcggcaaggagggcatcttcgtgagagagctgagagaggacagccccgccgccagaagcctgagcctgcaggagggcgaccagctgctgagcgccagagtgttcttcgagaacttcaagtacgaggacgccctgagactgctgcagtgcgccgagccctacaaggtgagcttctgcctgaagagaaccgtgcccaccggcgacctggccctgagacccggcaccgtgagcggctacgagatcaagggccccagagccaaggtggccaagctggtgagagtgctgagccccgcccccgccctggactgccccagcgaccccgtgagcgccccctag

SEQ ID NO: 92736 - DNA, 4386 bp, synthetic construct
  misc_feature 1..4386: note = Description of Artificial Sequence: Synthetic coding sequence
  source 1..4386: mol_type = other DNA
atggaggccagaagcagaagcgccgaggagctgagaagagccgagctggtggagatcatcgtggagaccgaggcccagaccggcgtgagcggcatcaacgtggccggcggcggcaaggagggcatcttcgtgagagagctgagagaggacagccccgccgccagaagcctgagcctgcaggagggcgaccagctgctgagcgccagagtgttcttcgagaacttcaagtacgaggacgccctgagactgctgcagtgcgccgagccctacaaggtgagcttctgcctgaagagaaccgtgcccaccggcgacctggccctgagacccggcaccgtgagcggctacgagatcaagggccccagagccaaggtggccaagctgaacatccagagcctgagccccgtgaagaagaagaagatggtgcccggcgccctgggcgtgcccgccgacctggcccccgtggacgtggagttcagcttccccaagttcagcagactgagaagaggcctgaaggccgaggccgtgaagggccccgtgcccgccgcccccgccagaagaagactgcagctgcccagactgagagtgagagaggtggccgaggaggcccaggccgccagactggccgccgccgcccccccccccagaaaggccaaggtggaggccgaggtggccgccggcgccagattcaccgccccccaggtggagctggtgggccccagactgcccggcgccgaggtgggcgtgccccaggtgagcgcccccaaggccgcccccagcgccgaggccgccggcggcttcgccctgcacctgcccaccctgggcctgggcgcccccgccccccccgccgtggaggcccccgccgtgggcatccaggtgccccaggtggagctgcccgccctgcccagcctgcccaccctgcccaccctgccctgcctggagaccagagagggcgccgtgagcgtggtggtgcccaccctggacgtggccgcccccaccgtgggcgtggacctggccctgcccggcgccgaggtggaggccagaggcgaggcccccgaggtggccctgaagatgcccagactgagcttccccagattcggcgccagagccaaggaggtggccgaggccaaggtggccaaggtgagccccgaggccagagtgaagggccccagactgagaatgcccaccttcggcctgagcctgctggagcccagacccgccgcccccgaggtggtggagagcaagctgaagctgcccaccatcaagatgcccagcctgggcatcggcgtgagcggccccgaggtgaaggtgcccaagggccccgaggtgaagctgcccaaggcccccgaggtgaagctgcccaaggtgcccgaggccgccctgcccgaggtgagactgcccgaggtggagctgcccaaggtgagcgagatgaagctgcccaaggtgcccgagatggccgtgcccgaggtgagactgcccgaggtggagctgcccaaggtgagcgagatgaagctgcccaaggtgcccgagatggccgtgcccgaggtgagactgcccgaggtgcagctgctgaaggtgagcgagatgaagctgcccaaggtgcccgagatggccgtgcccgaggtgagactgcccgaggtgcagctgcccaaggtgagcgagatgaagctgcccgaggtgagcgaggtggccgtgcccgaggtgagactgcccgaggtgcagctgcccaaggtgcccgagatgaaggtgcccgagatgaagctgcccaaggtgcccgagatgaagctgcccgagatgaagctgcccgaggtgcagctgcccaaggtgcccgagatggccgtgcccgacgtgcacctgcccgaggtgcagctgcccaaggtgcccgagatgaagctgcccgagatgaagctgcccgaggtgaagctgcccaaggtgcccgagatggccgtgcccgacgtgcacctgcccgaggtgcagctgcccaaggtgcccgagatgaagctgcccaagatgcccgagatggccgtgcccgaggtgagactgcccgaggtgcagctgcccaaggtgagcgagatgaagctgcccaaggtgcccgagatggccgtgcccgacgtgcacctgcccgaggtgcagctgcccaaggtgtgcgagatgaaggtgcccgacatgaagctgcccgagatcaagctgcccaaggtgcccgagatggccgtgcccgacgtgcacctgcccgaggtgcagctgcccaaggtgagcgagatcagactgcccgagatgcaggtgcccaaggtgcccgacgtgcacctgcccaaggcccccgaggtgaagctgcccagagcccccgaggtgcagctgaaggccaccaaggccgagcaggccgagggcatggagttcggcttcaagatgcccaagatgaccatgcccaagctgggcagagccgagagccccagcagaggcaagcccggcgaggccggcgccgaggtgagcggcaagctggtgaccctgccctgcctgcagcccgaggtggacggcgaggcccacgtgggcgtgcccagcctgaccctgcccagcgtggagctggacctgcccggcgccctgggcctgcagggccaggtgcccgccgccaagatgggcaagggcgagagagtggagggccccgaggtggccgccggcgtgagagaggtgggcttcagagtgcccagcgtggagatcgtgaccccccagctgcccgccgtggagatcgaggagggcagactggagatgatcgagaccaaggtgaagcccagcagcaagttcagcctgcccaagttcggcctgagcggccccaaggtggccaaggccgaggccgagggcgccggcagagccaccaagctgaaggtgagcaagttcgccatcagcctgcccaaggccagagtgggcgccgaggccgaggccaagggcgccggcgaggccggcctgctgcccgccctggacctgagcatcccccagctgagcctggacgcccacctgcccagcggcaaggtggaggtggccggcgccgacctgaagttcaagggccccagattcgccctgcccaagttcggcgtgagaggcagagacaccgaggccgccgagctggtgcccggcgtggccgagctggagggcaagggctggggctgggacggcagagtgaagatgcccaagctgaagatgcccagcttcggcctggccagaggcaaggaggccgaggtgcagggcgacagagccagccccggcgagaaggccgagagcaccgccgtgcagctgaagatccccgaggtggagctggtgaccctgggcgcccaggaggagggcagagccgagggcgccgtggccgtgagcggcatgcagctgagcggcctgaaggtgagcaccgccggccaggtggtgaccgagggccacgacgccggcctgagaatgccccccctgggcatcagcctgccccaggtggagctgaccggcttcggcgaggccggcacccccggccagcaggcccagagcaccgtgcccagcgccgagggcaccgccggctacagagtgcaggtgccccaggtgaccctgagcctgcccggcgcccaggtggccggcggcgagctgctggtgggcgagggcgtgttcaagatgcccaccgtgaccgtgccccagctggagctggacgtgggcctgagcagagaggcccaggccggcgaggccgccaccggcgagggcggcctgagactgaagctgcccaccctgggcgccagagccagagtgggcggcgagggcgccgaggagcagccccccggcgccgagagaaccttctgcctgagcctgcccgacgtggagctgagccccagcggcggcaaccacgccgagtaccaggtggccgagggcgagggcgaggccggccacaagctgaaggtgagactgcccagattcggcctggtgagagccaaggagggcgccgaggagggcgagaaggccaagagccccaagctgagactgcccagagtgggcttcagccagagcgagatggtgaccggcgagggcagccccagccccgaggaggaggaggaggaggaggaggagggcagcggcgagggcgccagcggcagaagaggcagagtgagagtgagactgcccagagtgggcctggccgcccccagcaaggccagcagaggccaggagggcgacgccgcccccaagagccccgtgagagagaagagccccaagttcagattccccagagtgagcctgagccccaaggccagaagcggcagcggcgaccaggaggagggcggcctgagagtgagactgcccagcgtgggcttcagcgagaccggcgcccccggccccgccagaatggagggcgcccaggccgccgccgtgtag

SEQ ID NO: 92737 - DNA, 4191 bp, synthetic construct
  misc_feature 1..4191: note = Description of Artificial Sequence: Synthetic coding sequence
  source 1..4191: mol_type = other DNA
atggaggccagaagcagaagcgccgaggagctgagaagagccgagctggtggagatcatcgtggagaccgaggcccagaccggcgtgagcggcatcaacgtggccggcggcggcaaggagggcatcttcgtgagagagctgagagaggacagccccgccgccagaagcctgagcctgcaggagggcgaccagctgctgagcgccagagtgttcttcgagaacttcaagtacgaggacgccctgagactgctgcagtgcgccgagccctacaaggtgagcttctgcctgaagagaaccgtgcccaccggcgacctggccctgagacccggcaccgtgagcggctacgagatcaagggccccagagccaaggtggccaagctgaacatccagagcctgagccccgtgaagaagaagaagatggtgcccggcgccctgggcgtgcccgccgacctggcccccgtggacgtggagttcagcttccccaagttcagcagactgagaagaggcctgaaggccgaggccgtgaagggccccgtgcccgccgcccccgccagaagaagactgcagctgcccagactgagagtgagagaggtggccgaggaggcccaggccgccagactggccgccgccgcccccccccccagaaaggccaaggtggaggccgaggtggccgccggcgccagattcaccgccccccaggtggagctggtgggccccagactgcccggcgccgaggtgggcgtgccccaggtgagcgcccccaaggccgcccccagcgccgaggccgccggcggcttcgccctgcacctgcccaccctgggcctgggcgcccccgccccccccgccgtggaggcccccgccgtgggcatccaggtgccccaggtggagctgcccgccctgcccagcctgcccaccctgcccaccctgccctgcctggagaccagagagggcgccgtgagcgtggtggtgcccaccctggacgtggccgcccccaccgtgggcgtggacctggccctgcccggcgccgaggtggaggccagaggcgaggcccccgaggtggccctgaagatgcccagactgagcttccccagattcggcgccagagccaaggaggtggccgaggccaaggtggccaaggtgagccccgaggccagagtgaagggccccagactgagaatgcccaccttcggcctgagcctgctggagcccagacccgccgcccccgaggtggtggagagcaagctgaagctgcccaccatcaagatgcccagcctgggcatcggcgtgagcggccccgaggtgaaggtgcccaagggccccgaggtgaagctgcccaaggcccccgaggtgaagctgcccaaggtgcccgaggccgccctgcccgaggtgagactgcccgaggtggagctgcccaaggtgagcgagatgaagctgcccaaggtgcccgagatggccgtgcccgaggtgagactgcccgaggtggagctgcccaaggtgagcgagatgaagctgcccaaggtgcccgagatggccgtgcccgaggtgagactgcccgaggtgcagctgctgaaggtgagcgagatgaagctgcccaaggtgcccgagatggccgtgcccgaggtgagactgcccgaggtgcagctgcccaaggtgagcgagatgaagctgcccgaggtgagcgaggtggccgtgcccgaggtgagactgcccgaggtgcagctgcccaaggtgcccgagatgaaggtgcccgagatgaagctgcccaaggtgcccgagatgaagctgcccgagatgaagctgcccgaggtgcagctgcccaaggtgcccgagatggccgtgcccgacgtgcacctgcccgaggtgcagctgcccaaggtgcccgagatgaagctgcccgagatgaagctgcccgaggtgaagctgcccaaggtgcccgagatggccgtgcccgacgtgcacctgcccgaggtgcagctgcccaaggtgcccgagatgaagctgcccaagatgcccgagatggccgtgcccgaggtgagactgcccgaggtgcagctgcccaaggtgagcgagatgaagctgcccaaggtgcccgagatggccgtgcccgacgtgcacctgcccgaggtgcagctgcccaaggtgtgcgagatgaaggtgcccgacatgaagctgcccgagatcaagctgcccaaggtgcccgagatggccgtgcccgacgtgcacctgcccgaggtgcagctgcccaaggtgagcgagatcagactgcccgagatgcaggtgcccaaggtgcccgacgtgcacctgcccaaggcccccgaggtgaagctgcccagagcccccgaggtgcagctgaaggccaccaaggccgagcaggccgagggcatggagttcggcttcaagatgcccaagatgaccatgcccaagctgggcagagccgagagccccagcagaggcaagcccggcgaggccggcgccgaggtgagcggcaagctggtgaccctgccctgcctgcagcccgaggtggacggcgaggcccacgtgggcgtgcccagcctgaccctgcccagcgtggagctggacctgcccggcgccctgggcctgcagggccaggtgcccgccgccaagatgggcaagggcgagagagtggagggccccgaggtggccgccggcgtgagagaggtgggcttcagagtgcccagcgtggagatcgtgaccccccagctgcccgccgtggagatcgaggagggcagactggagatgatcgagaccaaggtgaagcccagcagcaagttcagcctgcccaagttcggcctgagcggccccaaggtggccaaggccgaggccgagggcgccggcagagccaccaagctgaaggtgagcaagttcgccatcagcctgcccaaggccagagtgggcgccgaggccgaggccaagggcgccggcgaggccggcctgctgcccgccctggacctgagcatcccccagctgagcctggacgcccacctgcccagcggcaaggtggaggtggccggcgccgacctgaagttcaagggccccagattcgccctgcccaagttcggcgtgagaggcagagacaccgaggccgccgagctggtgcccggcgtggccgagctggagggcaagggctggggctgggacggcagagtgaagatgcccaagctgaaggtgagcaccgccggccaggtggtgaccgagggccacgacgccggcctgagaatgccccccctgggcatcagcctgccccaggtggagctgaccggcttcggcgaggccggcacccccggccagcaggcccagagcaccgtgcccagcgccgagggcaccgccggctacagagtgcaggtgccccaggtgaccctgagcctgcccggcgcccaggtggccggcggcgagctgctggtgggcgagggcgtgttcaagatgcccaccgtgaccgtgccccagctggagctggacgtgggcctgagcagagaggcccaggccggcgaggccgccaccggcgagggcggcctgagactgaagctgcccaccctgggcgccagagccagagtgggcggcgagggcgccgaggagcagccccccggcgccgagagaaccttctgcctgagcctgcccgacgtggagctgagccccagcggcggcaaccacgccgagtaccaggtggccgagggcgagggcgaggccggccacaagctgaaggtgagactgcccagattcggcctggtgagagccaaggagggcgccgaggagggcgagaaggccaagagccccaagctgagactgcccagagtgggcttcagccagagcgagatggtgaccggcgagggcagccccagccccgaggaggaggaggaggaggaggaggagggcagcggcgagggcgccagcggcagaagaggcagagtgagagtgagactgcccagagtgggcctggccgcccccagcaaggccagcagaggccaggagggcgacgccgcccccaagagccccgtgagagagaagagccccaagttcagattccccagagtgagcctgagccccaaggccagaagcggcagcggcgaccaggaggagggcggcctgagagtgagactgcccagcgtgggcttcagcgagaccggcgcccccggccccgccagaatggagggcgcccaggccgccgccgtgtag

SEQ ID NO: 92738 - DNA, 2214 bp, synthetic construct
  misc_feature 1..2214: note = Description of Artificial Sequence: Synthetic coding sequence
  source 1..2214: mol_type = other DNA
atggaggtggagcaggagcagagaagaagaaaggtggaggccggcagaaccaagctggcccacttcagacagagaaagaccaagggcgacagcagccacagcgagaagaagaccgccaagagaaagggcagcgccgtggacgccagcgtgcaggaggagagccccgtgaccaaggaggacagcgccctgtgcggcggcggcgacatctgcaagagcaccagctgcgacgacacccccgacggcgccggcggcgccttcgccgcccagcccgaggactgcgacggcgagaagagagaggacctggagcagctgcagcagaagcaggtgaacgaccacccccccgagcagtgcggcatgttcaccgtgagcgaccacccccccgagcagcacggcatgttcaccgtgggcgaccacccccccgagcagagaggcatgttcaccgtgagcgaccacccccccgagcagagaggcatgttcaccatcagcgaccaccagcccgagcagagaggcatgttcaccgtgagcgaccacacccccgagcagagaggcatcttcaccatcagcgaccaccccgccgagcagagaggcatgttcaccaaggagtgcgagcaggagtgcgagctggccatcaccgacctggagagcggcagagaggacgaggccggcctgcaccagagccaggccgtgcacggcctggagctggaggccctgagactgagcctgagcaacatgcacaccgcccagctggagctgacccaggccaacctgcagaaggagaaggagaccgccctgaccgagctgagagagatgctgaacagcagaagagcccaggagctggccctgctgcagagcagacagcagcacgagctggagctgctgagagagcagcacgccagagagaaggaggaggtggtgctgagatgcggccaggaggccgccgagctgaaggagaagctgcagagcgagatggagaagaacgcccagatcgtgaagaccctgaaggaggactgggagagcgagaaggacctgtgcctggagaacctgagaaaggagctgagcgccaagcaccagagcgagatggaggacctgcagaaccagttccagaaggagctggccgagcagagagccgagctggagaagatcttccaggacaagaaccaggccgagagagccctgagaaacctggagagccaccaccaggccgccatcgagaagctgagagaggacctgcagagcgagcacggcagatgcctggaggacctggagttcaagttcaaggagagcgagaaggagaagcagctggagctggagaacctgcaggccagctacgaggacctgaaggcccagagccaggaggagatcagaagactgtggagccagctggacagcgccagaaccagcagacaggagctgagcgagctgcacgagcagctgctggccagaaccagcagagtggaggacctggagcagctgaagcagagagagaagacccagcacgagagcgagctggagcagctgagaatctacttcgagaagaagctgagagacgccgagaagacctaccaggaggacctgaccctgctgcagcagagactgcagggcgccagagaggacgccctgctggacagcgtggaggtgggcctgagctgcgtgggcctggaggagaagcccgagaagggcagaaaggaccacgtggacgagctggagcccgagagacacaaggagagcctgcccagattccaggccgagctggaggagagccacagacaccagctggaggccctggagagccccctgtgcatccagcacgagggccacgtgagcgacagatgctgcgtggagaccagcgccctgggccacgagtggagactggagcccagcgagggccacagccaggagctgccctgggtgcacctgcagggcgtgcaggacggcgacctggaggccgacaccgagagagccgccagagtgctgggcctggagaccgagcacaaggtgcagctgagcctgctgcagaccgagctgaaggaggagatcgagctgctgaagatcgagaacagaaacctgtacggcaagctgcagcacgagaccagactgaaggacgacctggagaaggtgaagcacaacctgatcgaggaccaccagaaggagctgaacaacgccaagcagaagaccgagctgatgaagcaggagttccagagaaaggagacctag

SEQ ID NO: 92739 - DNA, 10011 bp, synthetic construct
  misc_feature 1..10011: note = Description of Artificial Sequence: Synthetic coding sequence
  source 1..10011: mol_type = other DNA
atggaggtggagcaggagcagagaagaagaaaggtggaggccggcagaaccaagctggcccacttcagacagagaaagaccaagggcgacagcagccacagcgagaagaagaccgccaagagaaagggcagcgccgtggacgccagcgtgcaggaggagagccccgtgaccaaggaggacagcgccctgtgcggcggcggcgacatctgcaagagcaccagctgcgacgacacccccgacggcgccggcggcgccttcgccgcccagcccgaggactgcgacggcgagaagagagaggacctggagcagctgcagcagaagcaggtgaacgaccacccccccgagcagtgcggcatgttcaccgtgagcgaccacccccccgagcagcacggcatgttcaccgtgggcgaccacccccccgagcagagaggcatgttcaccgtgagcgaccacccccccgagcagcacggcatgttcaccgtgagcgaccacccccccgagcagagaggcatgttcaccatcagcgaccaccagcccgagcagagaggcatgttcaccgtgagcgaccacacccccgagcagagaggcatcttcaccatcagcgaccaccccgccgagcagagaggcatgttcaccaaggagtgcgagcaggagtgcgagctggccatcaccgacctggagagcggcagagaggacgaggccggcctgcaccagagccaggccgtgcacggcctggagctggaggccctgagactgagcctgagcaacatgcacaccgcccagctggagctgacccaggccaacctgcagaaggagaaggagaccgccctgaccgagctgagagagatgctgaacagcagaagagcccaggagctggccctgctgcagagcagacagcagcacgagctggagctgctgagagagcagcacgccagagagaaggaggaggtggtgctgagatgcggccaggaggccgccgagctgaaggagaagctgcagagcgagatggagaagaacgcccagatcgtgaagaccctgaaggaggactgggagagcgagaaggacctgtgcctggagaacctgagaaaggagctgagcgccaagcaccagagcgagatggaggacctgcagaaccagttccagaaggagctggccgagcagagagccgagctggagaagatcttccaggacaagaaccaggccgagagagccctgagaaacctggagagccaccaccaggccgccatcgagaagctgagagaggacctgcagagcgagcacggcagatgcctggaggacctggagttcaagttcaaggagagcgagaaggagaagcagctggagctggagaacctgcaggccagctacgaggacctgaaggcccagagccaggaggagatcagaagactgtggagccagctggacagcgccagaaccagcagacaggagctgagcgagctgcacgagcagctgctggccagaaccagcagagtggaggacctggagcagctgaagcagagagagaagacccagcacgagagcgagctggagcagctgagaatctacttcgagaagaagctgagagacgccgagaagacctaccaggaggacctgaccctgctgcagcagagactgcagggcgccagagaggacgccctgctggacagcgtggaggtgggcctgagctgcgtgggcctggaggagaagcccgagaagggcagaaaggaccacgtggacgagctggagcccgagagacacaaggagagcctgcccagattccaggccgagctggaggagagccacagacaccagctggaggccctggagagccccctgtgcatccagcacgagggccacgtgagcgacagatgctgcgtggagaccagcgccctgggccacgagtggagactggagcccagcgagggccacagccaggagctgccctgggtgcacctgcagggcgtgcaggacggcgacctggaggccgacaccgagagagccgccagagtgctgggcctggagaccgagcacaaggtgcagctgagcctgctgcagaccgagctgaaggaggagatcgagctgctgaagatcgagaacagaaacctgtacggcaagctgcagcacgagaccagactgaaggacgacctggagaaggtgaagcacaacctgatcgaggaccaccagaaggagctgaacaacgccaagcagaagaccgagctgatgaagcaggagttccagagaaaggagaccgactggaaggtgatgaaggaggagctgcagagagaggccgaggagaagctgaccctgatgctgctggagctgagagagaaggccgagagcgagaagcagaccatcatcaacaagttcgagctgagagaggccgagatgagacagctgcaggaccagcaggccgcccagatcctggacctggagagaagcctgaccgagcagcagggcagactgcagcagctggagcaggacctgaccagcgacgacgccctgcactgcagccagtgcggcagagagccccccaccgcccaggacggcgagctggccgccctgcacgtgaaggaggactgcgccctgcagctgatgctggccagaagcagattcctggaggagagaaaggagatcaccgagaagttcagcgccgagcaggacgccttcctgcaggaggcccaggagcagcacgccagagagctgcagctgctgcaggagagacaccagcagcagctgctgagcgtgaccgccgagctggaggccagacaccaggccgccctgggcgagctgaccgccagcctggagagcaagcagggcgccctgctggccgccagagtggccgagctgcagaccaagcacgccgccgacctgggcgccctggagaccagacacctgagcagcctggacagcctggagagctgctacctgagcgagttccagaccatcagagaggagcacagacaggccctggagctgctgagagccgacttcgaggagcagctgtggaagaaggacagcctgcaccagaccatcctgacccaggagctggagaagctgaagagaaagcacgagggcgagctgcagagcgtgagagaccacctgagaaccgaggtgagcaccgagctggccggcaccgtggcccacgagctgcagggcgtgcaccagggcgagttcggcagcgagaagaagaccgccctgcacgagaaggaggagaccctgagactgcagagcgcccaggcccagcccttccaccaggaggagaaggagagcctgagcctgcagctgcagaagaagaaccaccaggtgcagcagctgaaggaccaggtgctgagcctgagccacgagatcgaggagtgcagaagcgagctggaggtgctgcagcagagaagagagagagagaacagagagggcgccaacctgctgagcatgctgaaggccgacgtgaacctgagccacagcgagagaggcgccctgcaggacgccctgagaagactgctgggcctgttcggcgagaccctgagagccgccgtgaccctgagaagcagaatcggcgagagagtgggcctgtgcctggacgacgccggcgccggcctggccctgagcaccgcccccgccctggaggagacctggagcgacgtggccctgcccgagctggacagaaccctgagcgagtgcgccgagatgagcagcgtggccgagatcagcagccacatgagagagagcttcctgatgagccccgagagcgtgagagagtgcgagcagcccatcagaagagtgttccagagcctgagcctggccgtggacggcctgatggagatggccctggacagcagcagacagctggaggaggccagacagatccacagcagattcgagaaggagttcagcttcaagaacgaggagaccgcccaggtggtgagaaagcaccaggagctgctggagtgcctgaaggaggagagcgccgccaaggccgagctggccctggagctgcacaagacccagggcaccctggagggcttcaaggtggagaccgccgacctgaaggaggtgctggccggcaaggaggacagcgagcacagactggtgctggagctggagagcctgagaagacagctgcagcaggccgcccaggagcaggccgccctgagagaggagtgcaccagactgtggagcagaggcgaggccaccgccaccgacgccgaggccagagaggccgccctgagaaaggaggtggaggacctgaccaaggagcagagcgagaccagaaagcaggccgagaaggacagaagcgccctgctgagccagatgaagatcctggagagcgagctggaggagcagctgagccagcacagaggctgcgccaagcaggccgaggccgtgaccgccctggagcagcaggtggccagcctggacaagcacctgagaaaccagagacagttcatggacgagcaggccgccgagagagagcacgagagagaggagttccagcaggagatccagagactggagggccagctgagacaggccgccaagccccagccctggggccccagagacagccagcaggcccccctggacggcgaggtggagctgctgcagcagaagctgagagagaagctggacgagttcaacgagctggccatccagaaggagagcgccgacagacaggtgctgatgcaggaggaggagatcaagagactggaggagatgaacatcaacatcagaaagaaggtggcccagctgcaggaggaggtggagaagcagaagaacatcgtgaagggcctggagcaggacaaggaggtgctgaagaagcagcagatgagcagcctgctgctggccagcaccctgcagagcaccctggacgccggcagatgccccgagccccccagcggcagcccccccgagggccccgagatccagctggaggtgacccagagagccctgctgagaagagagagcgaggtgctggacctgaaggagcagctggagaagatgaagggcgacctggagagcaagaacgaggagatcctgcacctgaacctgaagctggacatgcagaacagccagaccgccgtgagcctgagagagctggaggaggagaacaccagcctgaaggtgatctacaccagaagcagcgagatcgaggagctgaaggccaccatcgagaacctgcaggagaaccagaagagactgcagaaggagaaggccgaggagatcgagcagctgcacgaggtgatcgagaagctgcagcacgagctgagcctgatgggccccgtggtgcacgaggtgagcgacagccaggccggcagcctgcagagcgagctgctgtgcagccaggccggcggccccagaggccaggccctgcagggcgagctggaggccgccctggaggccaaggaggccctgagcagactgctggccgaccaggagagaagacacagccaggccctggaggccctgcagcagagactgcagggcgccgaggaggccgccgagctgcagctggccgagctggagagaaacgtggccctgagagaggccgaggtggaggacatggccagcagaatccaggagttcgaggccgccctgaaggccaaggaggccaccatcgccgagagaaacctggagatcgacgccctgaaccagagaaaggccgcccacagcgccgagctggaggccgtgctgctggccctggccagaatcagaagagccctggagcagcagcccctggccgccggcgccgccccccccgagctgcagtggctgagagcccagtgcgccagactgagcagacagctgcaggtgctgcaccagagattcctgagatgccaggtggagctggacagaagacaggccagaagagccaccgcccacaccagagtgcccggcgcccacccccagcccagaatggacggcggcgccaaggcccaggtgaccggcgacgtggaggccagccacgacgccgccctggagcccgtggtgcccgacccccagggcgacctgcagcccgtgctggtgaccctgaaggacgcccccctgtgcaagcaggagggcgtgatgagcgtgctgaccgtgtgccagagacagctgcagagcgagctgctgctggtgaagaacgagatgagactgagcctggaggacggcggcaagggcaaggagaaggtgctggaggactgccagctgcccaaggtggacctggtggcccaggtgaagcagctgcaggagaagctgaacagactgctgtacagcatgaccttccagaacgtggacgccgccgacaccaagagcctgtggcccatggccagcgcccacctgctggagagcagctggagcgacgacagctgcgacggcgaggagcccgacatcagcccccacatcgacacctgcgacgccaacaccgccaccggcggcgtgaccgacgtgatcaagaaccaggccatcgacgcctgcgacgccaacaccacccccggcggcgtgaccgacgtgatcaagaactgggacagcctgatccccgacgagatgcccgacagccccatccaggagaagagcgagtgccaggacatgagcctgagcagccccaccagcgtgctgggcggcagcagacaccagagccacaccgccgaggccggccccagaaagagccccgtgggcatgctggacctgagcagctggagcagccccgaggtgctgagaaaggactggaccctggagccctggcccagcctgcccgtgaccccccacagcggcgccctgagcctgtgcagcgccgacaccagcctgggcgacagagccgacaccagcctgccccagacccagggccccggcctgctgtgcagccccggcgtgagcgccgccgccctggccctgcagtgggccgagagcccccccgccgacgaccaccacgtgcagagaaccgccgtggagaaggacgtggaggacttcatcaccaccagcttcgacagccaggagaccctgagcagccccccccccggcctggagggcaaggccgacagaagcgagaagagcgacggcagcggcttcggcgccagactgagccccggcagcggcggccccgaggcccagaccgccggccccgtgacccccgccagcatcagcggcagattccagcccctgcccgaggccatgaaggagaaggaggtgagacccaagcacgtgaaggccctgctgcagatggtgagagacgagagccaccagatcctggccctgagcgagggcctggccccccccagcggcgagccccacccccccagaaaggaggacgagatccaggacatcagcctgcacggcggcaagacccaggaggtgcccaccgcctgccccgactggagaggcgacctgctgcaggtggtgcaggaggccttcgagaaggagcaggagatgcagggcgtggagctgcagcccagactgagcggcagcgacctgggcggccacagcagcctgctggagagactggagaagatcatcagagagcagggcgacctgcaggagaagagcctggagcacctgagactgcccgacagaagcagcctgctgagcgagatccaggccctgagagcccagctgagaatgacccacctgcagaaccaggagaagctgcagcacctgagaaccgccctgaccagcgccgaggccagaggcagccagcaggagcaccagctgagaagacaggtggagctgctggcctacaaggtggagcaggagaagtgcatcgccggcgacctgcagaagaccctgagcgaggagcaggagaaggccaacagcgtgcagaagctgctggccgccgagcagaccgtggtgagagacctgaagagcgacctgtgcgagagcagacagaagagcgagcagctgagcagaagcctgtgcgaggtgcagcaggaggtgctgcagctgagaagcatgctgagcagcaaggagaacgagctgaaggccgccctgcaggagctggagagcgagcagggcaagggcagagccctgcagagccagctggaggaggagcagctgagacacctgcagagagagagccagagcgccaaggccctggaggagctgagagccagcctggagacccagagagcccagagcagcagactgtgcgtggccctgaagcacgagcagaccgccaaggacaacctgcagaaggagctgagaatcgagcacagcagatgcgaggccctgctggcccaggagagaagccagctgagcgagctgcagaaggacctggccgccgagaagagcagaaccctggagctgagcgaggccctgagacacgagagactgctgaccgagcagctgagccagagaacccaggaggcctgcgtgcaccaggacacccaggcccaccacgccctgctgcagaagctgaaggaggagaagagcagagtggtggacctgcaggccatgctggagaaggtgcagcagcaggccctgcacagccagcagcagctggaggccgaggcccagaagcactgcgaggccctgagaagagagaaggaggtgagcgccaccctgaagagcaccgtggaggccctgcacacccagaagagagagctgagatgcagcctggagagagagagagagaagcccgcctggctgcaggccgagctggagcagagccaccccagactgaaggagcaggagggcagaaaggccgccagaagaagcgccgaggccagacagagccccgccgccgccgagcagtggagaaagtggcagagagacaaggagaagctgagagagctggagctgcagagacagagagacctgcacaagatcaagcagctgcagcagaccgtgagagacctggagagcaaggacgaggtgcccggcagcagactgcacctgggcagcgccagaagagccgccggcagcgacgccgaccacctgagagagcagcagagagagctggaggccatgagacagagactgctgagcgccgccagactgctgaccagcttcaccagccaggccgtggacagaaccgtgaacgactggaccagcagcaacgagaaggccgtgatgagcctgctgcacaccctggaggagctgaagagcgacctgagcagacccaccagcagccagaagaagatggccgccgagctgcagttccagttcgtggacgtgctgctgaaggacaacgtgagcctgaccaaggccctgagcaccgtgacccaggagaagctggagctgagcagagccgtgagcaagctggagaagctgctgaagcaccacctgcagaagggctgcagccccagcagaagcgagagaagcgcctggaagcccgacgagaccgccccccagagcagcctgagaagacccgaccccggcagactgccccccgccgccagcgaggaggcccacaccagcaacgtgaagatggagaagctgtacctgcactacctgagagccgagagcttcagaaaggccctgatctaccagaagaagtacctgctgctgctgatcggcggcttccaggacagcgagcaggagaccctgagcatgatcgcccacctgggcgtgttccccagcaaggccgagagaaagatcaccagcagacccttcaccagattcagaaccgccgtgagagtggtgatcgccatcctgagactgagattcctggtgaagaagtggcaggaggtggacagaaagggcgccctggcccagggcaaggcccccagacccggccccagagccagacagccccagagcccccccagaaccagagagagcccccccaccagagacgtgcccagcggccacaccagagaccccgccagaggcagaagactggccgccgccgccagcccccacagcggcggcagagccacccccagccccaacagcagactggagagaagcctgaccgccagccaggaccccgagcacagcctgaccgagtacatccaccacctggaggtgatccagcagagactgggcggcgtgctgcccgacagcaccagcaagaagagctgccaccccatgatcaagcagtag

SEQ ID NO: 92740 - DNA, 6075 bp, synthetic construct
  misc_feature 1..6075: note = Description of Artificial Sequence: Synthetic coding sequence
  source 1..6075: mol_type = other DNA
atggccaccggcggcggccccttcgaggacggcatgaacgaccaggacctgcccaactggagcaacgagaacgtggacgacagactgaacaacatggactggggcgcccagcagaagaaggccaacagaagcagcgagaagaacaagaagaagttcggcgtggagagcgacaagagagtgaccaacgacatcagccccgagagcagccccggcgtgggcagaagaagaaccaagaccccccacaccttcccccacagcagatacatgagccagatgagcgtgcccgagcaggccgagctggagaagctgaagcagagaatcaacttcagcgacctggaccagagaagcatcggcagcgacagccagggcagagccaccgccgccaacaacaagagacagctgagcgagaacagaaagcccttcaacttcctgcccatgcagatcaacaccaacaagagcaaggacgccagcaccaacccccccaacagagagaccatcggcagcgcccagtgcaaggagctgttcgccagcgccctgagcaacgacctgctgcagaactgccaggtgagcgaggaggacggcagaggcgagcccgccatggagagcagccagatcgtgagcagactggtgcagatcagagactacatcaccaaggccagcagcatgagagaggacctggtggagaagaacgagagaagcgccaacgtggagagactgacccacctgatcgaccacctgaaggagcaggagaagagctacatgaagttcctgaagaagatcctggccagagacccccagcaggagcccatggaggagatcgagaacctgaagaagcagcacgacctgctgaagagaatgctgcagcagcaggagcagctgagagccctgcagggcagacaggccgccctgctggccctgcagcacaaggccgagcaggccatcgccgtgatggacgacagcgtggtggccgagaccgccggcagcctgagcggcgtgagcatcaccagcgagctgaacgaggagctgaacgacctgatccagagattccacaaccagctgagagacagccagccccccgccgtgcccgacaacagaagacaggccgagagcctgagcctgaccagagaggtgagccagagcagaaagcccagcgccagcgagagactgcccgacgagaaggtggagctgttcagcaagatgagagtgctgcaggagaagaagcagaagatggacaagctgctgggcgagctgcacaccctgagagaccagcacctgaacaacagcagcagcagcccccagagaagcgtggaccagagaagcaccagcgcccccagcgccagcgtgggcctggcccccgtggtgaacggcgagagcaacagcctgaccagcagcgtgccctaccccaccgccagcctggtgagccagaacgagagcgagaacgagggccacctgaaccccagcgagaagctgcagaagctgaacgaggtgagaaagagactgaacgagctgagagagctggtgcactactacgagcagaccagcgacatgatgaccgacgccgtgaacgagaacagaaaggacgaggagaccgaggagagcgagtacgacagcgagcacgagaacagcgagcccgtgaccaacatcagaaacccccaggtggccagcacctggaacgaggtgaacagccacagcaacgcccagtgcgtgagcaacaacagagacggcagaaccgtgaacagcaactgcgagatcaacaacagaagcgccgccaacatcagagccctgaacatgccccccagcctggactgcagatacaacagagagggcgagcaggagatccacgtggcccagggcgaggacgacgaggaggaggaggaggaggccgaggaggagggcgtgagcggcgccagcctgagcagccacagaagcagcctggtggacgagcaccccgaggacgccgagttcgagcagaagatcaacagactgatggccgccaagcagaagctgagacagctgcaggacctggtggccatggtgcaggacgacgacgccgcccagggcgtgatcagcgccagcgccagcaacctggacgacttctaccccgccgaggaggacaccaagcagaacagcaacaacaccagaggcaacgccaacaagacccagaaggacaccggcgtgaacgagaaggccagagagaagttctacgaggccaagctgcagcagcagcagagagagctgaagcagctgcaggaggagagaaagaagctgatcgacatccaggagaagatccaggccctgcagaccgcctgccccgacctgcagctgagcgccgccagcgtgggcaactgccccaccaagaagtacatgcccgccgtgaccagcacccccaccgtgaaccagcacgagaccagcaccagcaagagcgtgttcgagcccgaggacagcagcatcgtggacaacgagctgtggagcgagatgagaagacacgagatgctgagagaggagctgagacagagaagaaagcagctggaggccctgatggccgagcaccagagaagacagggcctggccgagaccgccagccccgtggccgtgagcctgagaagcgacggcagcgagaacctgtgcaccccccagcagagcagaaccgagaagaccatggccacctggggcggcagcacccagtgcgccctggacgaggagggcgacgaggacggctacctgagcgagggcatcgtgagaaccgacgaggaggaggaggaggagcaggacgccagcagcaacgacaacttcagcgtgtgccccagcaacagcgtgaaccacaacagctacaacggcaaggagaccaagaacagatggaagaacaactgccccttcagcgccgacgagaactacagacccctggccaagaccagacagcagaacatcagcatgcagagacaggagaacctgagatgggtgagcgagctgagctacgtggaggagaaggagcagtggcaggagcagatcaaccagctgaagaagcagctggacttcagcgtgagcatctgccagaccctgatgcaggaccagcagaccctgagctgcctgctgcagaccctgctgaccggcccctacagcgtgatgcccagcaacgtggccagcccccaggtgcacttcatcatgcaccagctgaaccagtgctacacccagctgacctggcagcagaacaacgtgcagagactgaagcagatgctgaacgagctgatgagacagcagaaccagcaccccgagaagcccggcggcaaggagagaggcagcagcgccagccacccccccagccccagcctgttctgccccttcagcttccccacccagcccgtgaacctgttcaacatccccggcttcaccaacttcagcagcttcgcccccggcatgaacttcagccccctgttccccagcaacttcggcgacttcagccagaacatcagcacccccagcgagcagcagcagcccctggcccagaacagcagcggcaagaccgagtacatggccttccccaagcccttcgagagcagcagcagcatcggcgccgagaagcccagaaacaagaagctgcccgaggaggaggtggagagcagcagaaccccctggctgtacgagcaggagggcgaggtggagaagcccttcatcaagaccggcttcagcgtgagcgtggagaagagcaccagcagcaacagaaagaaccagctggacaccaacggcagaagaagacagttcgacgaggagagcctggagagcttcagcagcatgcccgaccccgtggaccccaccaccgtgaccaagaccttcaagaccagaaaggccagcgcccaggccagcctggccagcaaggacaagacccccaagagcaagagcaagaagagaaacagcacccagctgaagagcagagtgaagaacatcagatacgagagcgccagcatgagcagcacctgcgagccctgcaagagcagaaacagacacagcgcccagaccgaggagcccgtgcaggccaaggtgttcagcagaaagaaccacgagcagctggagaagatcatcaagtgcaacagaagcaccgagatcagcagcgagaccggcagcgacttcagcatgttcgaggccctgagagacaccatctacagcgaggtggccaccctgatcagccagaacgagagcagaccccacttcctgatcgagctgttccacgagctgcagctgctgaacaccgactacctgagacagagagccctgtacgccctgcaggacatcgtgagcagacacatcagcgagagccacgagaagggcgagaacgtgaagagcgtgaacagcggcacctggatcgccagcaacagcgagctgacccccagcgagagcctggccaccaccgacgacgagaccttcgagaagaacttcgagagagagacccacaagatcagcgagcagaacgacgccgacaacgccagcgtgctgagcgtgagcagcaacttcgagcccttcgccaccgacgacctgggcaacaccgtgatccacctggaccaggccctggccagaatgagagagtacgagagaatgaagaccgaggccgagagcaacagcaacatgagatgcacctgcagaatcatcgaggacggcgacggcgccggcgccggcaccaccgtgaacaacctggaggagacccccgtgatcgagaacagaagcagccagcagcccgtgagcgaggtgagcaccatcccctgccccagaatcgacacccagcagctggacagacagatcaaggccatcatgaaggaggtgatccccttcctgaaggagcacatggacgaggtgtgcagcagccagctgctgaccagcgtgagaagaatggtgctgaccctgacccagcagaacgacgagagcaaggagttcgtgaagttcttccacaagcagctgggcagcatcctgcaggacagcctggccaagttcgccggcagaaagctgaaggactgcggcgaggacctgctggtggagatcagcgaggtgctgttcaacgagctggccttcttcaagctgatgcaggacctggacaacaacagcatcaccgtgaagcagagatgcaagagaaagatcgaggccaccggcgtgatccagagctgcgccaaggaggccaagagaatcctggaggaccacggcagccccgccggcgagatcgacgacgaggacaaggacaaggacgagaccgagaccgtgaagcagacccagaccagcgaggtgtacgacggccccaagaacgtgagaagcgacatcagcgaccaggaggaggacgaggagagcgagggctgccccgtgagcatcaacctgagcaaggccgagacccaggccctgaccaactacggcagcggcgaggacgagaacgaggacgaggagatggaggagttcgaggagggccccgtggacgtgcagaccagcctgcaggccaacaccgaggccaccgaggagaacgagcacgacgagcaggtgctgcagagagacttcaagaagaccgccgagagcaagaacgtgcccctggagagagaggccaccagcaagaacgaccagaacaactgccccgtgaagccctgctacctgaacatcctggaggacgagcagcccctgaacagcgccgcccacaaggagagcccccccaccgtggacagcacccagcagcccaaccccctgcccctgagactgcccgagatggagcccctggtgcccagagtgaaggaggtgaagagcgcccaggagacccccgagagcagcctggccggcagccccgacaccgagagccccgtgctggtgaacgactacgaggccgagagcggcaacatcagccagaagagcgacgaggaggacttcgtgaaggtggaggacctgcccctgaagctgaccatctacagcgaggccgacctgagaaagaagatggtggaggaggagcagaagaaccacctgagcggcgagatctgcgagatgcagaccgaggagctggccggcaacagcgagaccctgaaggagcccgagaccgtgggcgcccagagcatctag

SEQ ID NO: 92741 - DNA, 1590 bp, synthetic construct
  misc_feature 1..1590: note = Description of Artificial Sequence: Synthetic coding sequence
  source 1..1590: mol_type = other DNA
atggccaccggcggcggccccttcgaggacggcatgaacgaccaggacctgcccaactggagcaacgagaacgtggacgacagactgaacaacatggactggggcgcccagcagaagaaggccaacagaagcagcgagaagaacaagaagaagttcggcgtggagagcgacaagagagtgaccaacgacatcagccccgagagcagccccggcgtgggcagaagaagaaccaagaccccccacaccttcccccacagcagatacatgagccagatgagcgtgcccgagcaggccgagctggagaagctgaagcagagaatcaacttcagcgacctggaccagagaagcatcggcagcgacagccagggcagagccaccgccgccaacaacaagagacagctgagcgagaacagaaagcccttcaacttcctgcccatgcagatcaacaccaacaagagcaaggacgccagcaccaacccccccaacagagagaccatcggcagcgcccagtgcaaggagctgttcgccagcgccctgagcaacgacctgctgcagaactgccaggtgagcgaggaggacggcagaggcgagcccgccatggagagcagccagatcgtgagcagactggtgcagatcagagactacatcaccaaggccagcagcatgagagaggacctggtggagaagaacgagagaagcgccaacgtggagagactgacccacctgatcgaccacctgaaggagcaggagaagagctacatgaagttcctgaagaagatcctggccagagagaacgaggaggaggacgtgagaaccatcgacagcgccgtgggcagcggcagcgtggccgagagcaccagcctgaacatcgacgtgcagagcgaggccagcgacaccaccgccagagacccccagcaggagcccatggaggagatcgagaacctgaagaagcagcacgacctgctgaagagaatgctgcagcagcaggagcagctgagagccctgcagggcagacaggccgccctgctggccctgcagcacaaggccgagcaggccatcgccgtgatggacgacagcgtggtggccgagaccgccggcagcctgagcggcgtgagcatcaccagcgagctgaacgaggagctgaacgacctgatccagagattccacaaccagctgagagacagccagccccccgccgtgcccgacaacagaagacaggccgagagcctgagcctgaccagagaggtgagccagagcagaaagcccagcgccagcgagagactgcccgacgagaaggtggagctgttcagcaagatgagagtgctgcaggagaagaagcagaagatggacaagctgctgggcgagctgcacaccctgagagaccagcacctgaacaacagcagcagcagcccccagagaagcgtggaccagagaagcaccagcgcccccagcgccagcgtgggcctggcccccgtggtgaacggcgagagcaacagcctgaccagcagcgtgccctaccccaccgccagcctggtgagccagaacgagagcgagaacgagggccacctgaaccccagcgagaagctgtag

SEQ ID NO: 92742 - DNA, 2172 bp, synthetic construct
  misc_feature 1..2172: note = Description of Artificial Sequence: Synthetic coding sequence
  source 1..2172: mol_type = other DNA
atgagcagcacctgcgagccctgcaagagcagaaacagacacagcgcccagaccgaggagcccgtgcaggccaaggtgttcagcagaaagaaccacgagcagctggagaagatcatcaagtgcaacagaagcaccgagatcagcagcgcccacgccagaagaatcctgcagcagagcaacagaaacgcctgcaacgaggcccccgagaccggcagcgacttcagcatgttcgaggccctgagagacaccatctacagcgaggtggccaccctgatcagccagaacgagagcagaccccacttcctgatcgagctgttccacgagctgcagctgctgaacaccgactacctgagacagagagccctgtacgccctgcaggacatcgtgagcagacacatcagcgagagccacgagaagggcgagaacgtgaagagcgtgaacagcggcacctggatcgccagcaacagcgagctgacccccagcgagagcctggccaccaccgacgacgagaccttcgagaagaacttcgagagagagacccacaagatcagcgagcagaacgacgccgacaacgccagcgtgctgagcgtgagcagcaacttcgagcccttcgccaccgacgacctgggcaacaccgtgatccacctggaccaggccctggccagaatgagagagtacgagagaatgaagaccgaggccgagagcaacagcaacatgagatgcacctgcagaatcatcgaggacggcgacggcgccggcgccggcaccaccgtgaacaacctggaggagacccccgtgatcgagaacagaagcagccagcagcccgtgagcgaggtgagcaccatcccctgccccagaatcgacacccagcagctggacagacagatcaaggccatcatgaaggaggtgatccccttcctgaaggagcacatggacgaggtgtgcagcagccagctgctgaccagcgtgagaagaatggtgctgaccctgacccagcagaacgacgagagcaaggagttcgtgaagttcttccacaagcagctgggcagcatcctgcaggacagcctggccaagttcgccggcagaaagctgaaggactgcggcgaggacctgctggtggagatcagcgaggtgctgttcaacgagctggccttcttcaagctgatgcaggacctggacaacaacagcatcaccgtgaagcagagatgcaagagaaagatcgaggccaccggcgtgatccagagctgcgccaaggaggccaagagaatcctggaggaccacggcagccccgccggcgagatcgacgacgaggacaaggacaaggacgagaccgagaccgtgaagcagacccagaccagcgaggtgtacgacggccccaagaacgtgagaagcgacatcagcgaccaggaggaggacgaggagagcgagggctgccccgtgagcatcaacctgagcaaggccgagacccaggccctgaccaactacggcagcggcgaggacgagaacgaggacgaggagatggaggagttcgaggagggccccgtggacgtgcagaccagcctgcaggccaacaccgaggccaccgaggagaacgagcacgacgagcaggtgctgcagagagacttcaagaagaccgccgagagcaagaacgtgcccctggagagagaggccaccagcaagaacgaccagaacaactgccccgtgaagccctgctacctgaacatcctggaggacgagcagcccctgaacagcgccgcccacaaggagagcccccccaccgtggacagcacccagcagcccaaccccctgcccctgagactgcccgagatggagcccctggtgcccagagtgaaggaggtgaagagcgcccaggagacccccgagagcagcctggccggcagccccgacaccgagagccccgtgctggtgaacgactacgaggccgagagcggcaacatcagccagaagagcgacgaggaggacttcgtgaaggtggaggacctgcccctgaagctgaccatctacagcgaggccgacctgagaaagaagatggtggaggaggagcagaagaaccacctgagcggcgagatctgcgagatgcagaccgaggagctggccggcaacagcgagaccctgaaggagcccgagaccgtgggcgcccagagcatctag

SEQ ID NO: 92743 - DNA, 2295 bp, synthetic construct
  misc_feature 1..2295: note = Description of Artificial Sequence: Synthetic coding sequence
  source 1..2295: mol_type = other DNA
tgaaaggccagcgcccaggccagcctggccagcaaggacaagacccccaagagcaagagcaagaagagaaacagcacccagctgaagagcagagtgaagaacatcagatacgagagcgccagcatgagcagcacctgcgagccctgcaagagcagaaacagacacagcgcccagaccgaggagcccgtgcaggccaaggtgttcagcagaaagaaccacgagcagctggagaagatcatcaagtgcaacagaagcaccgagatcagcagcgcccacgccagaagaatcctgcagcagagcaacagaaacgcctgcaacgaggcccccgagaccggcagcgacttcagcatgttcgaggccctgagagacaccatctacagcgaggtggccaccctgatcagccagaacgagagcagaccccacttcctgatcgagctgttccacgagctgcagctgctgaacaccgactacctgagacagagagccctgtacgccctgcaggacatcgtgagcagacacatcagcgagagccacgagaagggcgagaacgtgaagagcgtgaacagcggcacctggatcgccagcaacagcgagctgacccccagcgagagcctggccaccaccgacgacgagaccttcgagaagaacttcgagagagagacccacaagatcagcgagcagaacgacgccgacaacgccagcgtgctgagcgtgagcagcaacttcgagcccttcgccaccgacgacctgggcaacaccgtgatccacctggaccaggccctggccagaatgagagagtacgagagaatgaagaccgaggccgagagcaacagcaacatgagatgcacctgcagaatcatcgaggacggcgacggcgccggcgccggcaccaccgtgaacaacctggaggagacccccgtgatcgagaacagaagcagccagcagcccgtgagcgaggtgagcaccatcccctgccccagaatcgacacccagcagctggacagacagatcaaggccatcatgaaggaggtgatccccttcctgaaggagcacatggacgaggtgtgcagcagccagctgctgaccagcgtgagaagaatggtgctgaccctgacccagcagaacgacgagagcaaggagttcgtgaagttcttccacaagcagctgggcagcatcctgcaggacagcctggccaagttcgccggcagaaagctgaaggactgcggcgaggacctgctggtggagatcagcgaggtgctgttcaacgagctggccttcttcaagctgatgcaggacctggacaacaacagcatcaccgtgaagcagagatgcaagagaaagatcgaggccaccggcgtgatccagagctgcgccaaggaggccaagagaatcctggaggaccacggcagccccgccggcgagatcgacgacgaggacaaggacaaggacgagaccgagaccgtgaagcagacccagaccagcgaggtgtacgacggccccaagaacgtgagaagcgacatcagcgaccaggaggaggacgaggagagcgagggctgccccgtgagcatcaacctgagcaaggccgagacccaggccctgaccaactacggcagcggcgaggacgagaacgaggacgaggagatggaggagttcgaggagggccccgtggacgtgcagaccagcctgcaggccaacaccgaggccaccgaggagaacgagcacgacgagcaggtgctgcagagagacttcaagaagaccgccgagagcaagaacgtgcccctggagagagaggccaccagcaagaacgaccagaacaactgccccgtgaagccctgctacctgaacatcctggaggacgagcagcccctgaacagcgccgcccacaaggagagcccccccaccgtggacagcacccagcagcccaaccccctgcccctgagactgcccgagatggagcccctggtgcccagagtgaaggaggtgaagagcgcccaggagacccccgagagcagcctggccggcagccccgacaccgagagccccgtgctggtgaacgactacgaggccgagagcggcaacatcagccagaagagcgacgaggaggacttcgtgaaggtggaggacctgcccctgaagctgaccatctacagcgaggccgacctgagaaagaagatggtggaggaggagcagaagaaccacctgagcggcgagatctgcgagatgcagaccgaggagctggccggcaacagcgagaccctgaaggagcccgagaccgtgggcgcccagagcatctag

SEQ ID NO: 92744 - DNA, 1227 bp, synthetic construct
  misc_feature 1..1227: note = Description of Artificial Sequence: Synthetic coding sequence
  source 1..1227: mol_type = other DNA
atggccaccggcggcggccccttcgaggacggcatgaacgaccaggacctgcccaactggagcaacgagaacgtggacgacagactgaacaacatggactggggcgcccagcagaagaaggccaacagaagcagcgagaagaacaagaagaagttcggcgtggagagcgacaagagagtgaccaacgacatcagccccgagagcagccccggcgtgggcagaagaagaaccaagaccccccacaccttcccccacagcagatacatgagccagatgagcgtgcccgagcaggccgagctggagaagctgaagcagagaatcaacttcagcgacctggaccagagaagcatcggcagcgacagccagggcagagccaccgccgccaacaacaagagacagctgagcgagaacagaaagcccttcaacttcctgcccatgcagatcaacaccaacaagagcaaggacgccagcaccaacccccccaacagagagaccatcggcagcgcccagtgcaaggagctgttcgccagcgccctgagcaacgacctgctgcagaactgccaggtgagcgaggaggacggcagaggcgagcccgccatggagagcagccagatcgtgagcagactggtgcagatcagagactacatcaccaaggccagcagcatgagagaggacctggtggagaagaacgagagaagcgccaacgtggagagactgacccacctgatcgaccacctgaaggagcaggagaagagctacatgaagttcctgaagaagatcctggccagagacccccagcaggagcccatggaggagatcgagaacctgaagaagcagcacgacctgctgaagagaatgctgcagcagcaggagcagctgagagccctgcagggcagacaggccgccctgctggccctgcagcacaaggccgagcaggccatcgccgtgatggacgacagcgtggtggccgagaccgccggcagcctgagcggcgtgagcatcaccagcgagctgaacgaggagctgaacgacctgatccagagattccacaaccagctgagagacagccagccccccgccgtgcccgacaacagaagacaggccgagagcctgagcctgaccagagaggtgagccagagcagaaagcccagcgccagcgagagactgcccgacgagaaggtggagctgttcagcaagatgagagtgctgcaggagaagaagcagtag

SEQ ID NO: 92745 - DNA, 1569 bp, synthetic construct
  misc_feature 1..1569: note = Description of Artificial Sequence: Synthetic coding sequence
  source 1..1569: mol_type = other DNA
atggccgtgaacaagggcctgaccctgctggacggcgacctgcccgagcaggagaacgtgctgcagagagtgctgcagctgcccgtggtgagcggcacctgcgagtgcttccagaagacctacaccagcaccaaggaggcccaccccctggtggccagcgtgtgcaacgcctacgagaagggcgtgcagagcgccagcagcctggccgcctggagcatggagcccgtggtgagaagactgagcacccagttcaccgccgccaacgagctggcctgcagaggcctggaccacctggaggagaagatccccgccctgcagtacccccccgagaagatcgccagcgagctgaaggacaccatcagcaccagactgagaagcgccagaaacagcatcagcgtgcccatcgccagcaccagcgacaaggtgctgggcgccgccctggccggctgcgagctggcctggggcgtggccagagacaccgccgagttcgccgccaacaccagagccggcagactggccagcggcggcgccgacctggccctgggcagcatcgagaaggtggtggagtacctgctgccccccgacaaggaggagagcgcccccgcccccggccaccagcaggcccagaagagccccaaggccaagcccagcctgctgagcagagtgggcgccctgaccaacaccctgagcagatacaccgtgcagaccatggccagagccctggagcagggccacaccgtggccatgtggatccccggcgtggtgcccctgagcagcctggcccagtggggcgccagcgtggccatgcaggccgtgagcagaagaagaagcgaggtgagagtgccctggctgcacagcctggccgccgcccaggaggaggaccacgaggaccagaccgacaccgagggcgaggacaccgaggaggaggaggagctggagaccgaggagaacaagttcagcgaggtggccgccctgcccggccccagaggcctgctgggcggcgtggcccacaccctgcagaagaccctgcagaccaccatcagcgccgtgacctgggcccccgccgccgtgctgggcatggccggcagagtgctgcacctgacccccgcccccgccgtgagcagcaccaagggcagagccatgagcctgagcgacgccctgaagggcgtgaccgacaacgtggtggacaccgtggtgcactacgtgcccctgcccagactgagcctgatggagcccgagagcgagttcagagacatcgacaacccccccgccgaggtggagagaagagaggccgagagaagagccagcggcgcccccagcgccggccccgagcccgcccccagactggcccagcccagaagaagcctgagaagcgcccagagccccggcgccccccccggccccggcctggaggacgaggtggccacccccgccgcccccagacccggcttccccgccgtgcccagagagaagcccaagagaagagtgagcgacagcttcttcagacccagcgtgatggagcccatcctgggcagaacccactacagccagctgagaaagaagagctag

SEQ ID NO: 92746 - DNA, 1569 bp, synthetic construct; identical to SEQ ID NO: 92745
  misc_feature 1..1569: note = Description of Artificial Sequence: Synthetic coding sequence
  source 1..1569: mol_type = other DNA

SEQ ID NO: 92747 - DNA, 1314 bp, synthetic construct
  misc_feature 1..1314: note = Description of Artificial Sequence: Synthetic coding sequence
  source 1..1314: mol_type = other DNA
atggccagcgtggccgtggacccccagcccagcgtggtgaccagagtggtgaacctgcccctggtgagcagcacctacgacctgatgagcagcgcctacctgagcaccaaggaccagtacccctacctgaagagcgtgtgcgagatggccgagaacggcgtgaagaccatcaccagcgtggccatgaccagcgccctgcccatcatccagaagctggagccccagatcgccgtggccaacacctacgcctgcaagggcctggacagaatcgaggagagactgcccatcctgaaccagcccagcacccagatcgtggccaacgccaagggcgccgtgaccggcgccaaggacgccgtgaccaccaccgtgaccggcgccaaggacagcgtggccagcaccatcaccggcgtgatggacaagaccaagggcgccgtgaccggcagcgtggagaagaccaagagcgtggtgagcggcagcatcaacaccgtgctgggcagcagaatgatgcagctggtgagcagcggcgtggagaacgccctgaccaagagcgagctgctggtggagcagtacctgcccctgaccgaggaggagctggagaaggaggccaagaaggtggagggcttcgacctggtgcagaagcccagctactacgtgagactgggcagcctgagcaccaagctgcacagcagagcctaccagcaggccctgagcagagtgaaggaggccaagcagaagagccagcagaccatcagccagctgcacagcaccgtgcacctgatcgagttcgccagaaagaacgtgtacagcgccaaccagaagatccaggacgcccaggacaagctgtacctgagctgggtggagtggaagagaagcatcggctacgacgacaccgacgagagccactgcgccgagcacatcgagagcagaaccctggccatcgccagaaacctgacccagcagctgcagaccacctgccacaccctgctgagcaacatccagggcgtgccccagaacatccaggaccaggccaagcacatgggcgtgatggccggcgacatctacagcgtgttcagaaacgccgccagcttcaaggaggtgagcgacagcctgctgaccagcagcaagggccagctgcagaagatgaaggagagcctggacgacgtgatggactacctggtgaacaacacccccctgaactggctggtgggccccttctacccccagctgaccgagagccagaacgcccaggaccagggcgccgagatggacaagagcagccaggagacccagagaagcgagcacaagacccactag

SEQ ID NO: 92748 - DNA, 333 bp, synthetic construct
  misc_feature 1..333: note = Description of Artificial Sequence: Synthetic coding sequence
  source 1..333: mol_type = other DNA
atggccagcgtggccgtggacccccagcccagcgtggtgaccagagtggtgaacctgcccctggtgagcagcacctacgacctgatgagcagcgcctacctgagcaccaaggaccagtacccctacctgaagagcgtgtgcgagatggccgagaacggcgtgaagaccatcaccagcgtggccatgaccagcgccctgcccatcatccagaagctggagccccagatcgccgtggccaacacctacgcctgcaagggcctggacagaatcgaggagagactgcccatcctgaaccagcccagcacccaggtgagcctgggccagaagtgctag

SEQ ID NO: 92749 - DNA, 381 bp, synthetic construct
  misc_feature 1..381: note = Description of Artificial Sequence: Synthetic coding sequence
  source 1..381: mol_type = other DNA
atggccagcgtggccgtggacccccagcccagcgtggtgaccagagtggtgaacctgcccctggtgagcagcacctacgacctgatgagcagcgcctacctgagcaccaaggaccagtacccctacctgaagagcgtgtgcgagatggccgagaacggcgtgaagaccatcaccagcgtggccatgaccagcgccctgcccatcatccagaagctggagccccagatcgccgtggccaacacctacgcctgcaagggcctggacagaatcgaggagagactgcccatcctgaaccagcccagcacccaggccaacacctgcttccccaacctggacctggacgtgtgcctgaagaacaacggccacttcctgaccagctag

SEQ ID NO: 92750 - DNA, 1071 bp, synthetic construct
  misc_feature 1..1071: note = Description of Artificial Sequence: Synthetic coding sequence
  source 1..1071: mol_type = other DNA
atggccagcgtggccgtggacccccagcccagcgtggtgaccagagtggtgaacctgcccctggtgagcagcacctacgacctgatgagcagcgcctacctgagcaccaaggaccagtacccctacctgaagagcgtgtgcgagatggccgagaacggcgtgaagaccatcaccagcgtggccatgaccagcgccctgcccatcatccagaagctggagccccagatcgccgtggccaacacctacgcctgcaagggcctggacagaatcgaggagagactgcccatcctgaaccagcccagcacccagatcgtggccaacgccaagggcgccgtgaccggcgccaaggacgccgtgaccaccaccgtgaccggcgccaaggacagcgtggccagcaccatcaccggcgtgatggacaagaccaagggcgccgtgaccggcagcgtggagaagaccaagagcgtgaagaagaagcagaagaagctgaaggacctgatctggttcagaagccagctgcacagcaccgtgcacctgatcgagttcgccagaaagaacgtgtacagcgccaaccagaagatccaggacgcccaggacaagctgtacctgagctgggtggagtggaagagaagcatcggctacgacgacaccgacgagagccactgcgccgagcacatcgagagcagaaccctggccatcgccagaaacctgacccagcagctgcagaccacctgccacaccctgctgagcaacatccagggcgtgccccagaacatccaggaccaggccaagcacatgggcgtgatggccggcgacatctacagcgtgttcagaaacgccgccagcttcaaggaggtgagcgacagcctgctgaccagcagcaagggccagctgcagaagatgaaggagagcctggacgacgtgatggactacctggtgaacaacacccccctgaactggctggtgggccccttctacccccagctgaccgagagccagaacgcccaggaccagggcgccgagatggacaagagcagccaggagacccagagaagcgagcacaagacccactag

SEQ ID NO: 92751 - DNA, 378 bp, synthetic construct
  misc_feature 1..378: note = Description of Artificial Sequence: Synthetic coding sequence
  source 1..378: mol_type = other DNA
atggccagcgtggccgtggacccccagcccagcgtggtgaccagagtggtgaacctgcccctggtgagcagcacctacgacctgatgagcagcgcctacctgagcaccaaggaccagtacccctacctgaagagcgtgtgcgagatggccgagaacggcgtgaagaccatcaccagcgtggccatgaccagcgccctgcccatcatccagaagctggagccccagatcgccgtggccaacacctacgcctgcaagggcctggacagaatcgaggagagactgcccatcctgaaccagcccagcacccagatcgtggccaacgccaagggcgccgtgaccggcgccaaggacgccgtgaccaccaccgtgaccggctag

SEQ ID NO: 92752 - DNA, 735 bp, synthetic construct
  misc_feature 1..735: note = Description of Artificial Sequence: Synthetic coding sequence
  source 1..735: mol_type = other DNA
atgggcccccccagcgccgcccccagaggcggccacagaccctggcagggcctgctgatcaccgccagcctgctgaccttctggcacccccccaccaccgtgcagttcaccatcgaggccctgcccagcagcgccgccgagggcaaggacgtgctgctgctggcctgcaacatcagcgagaccatccaggcctactactggcacaagggcaagaccgccgagggcagccccctgatcgccggctacatcaccgacatccaggccaacatccccggcgccgcctacagcggcagagagaccgtgtaccccaacggcagcctgctgttccagaacatcaccctggaggacgccggcagctacaccctgagaaccatcaacgccagctacgacagcgaccaggccaccggccagctgcacgtgcaccagaacaacgtgcccggcctgcccgtgggcgccgtggccggcatcgtgaccggcgtgctggtgggcgtggccctggtggccgccctggtgtgcttcctgctgctgagcagaaccggcagagccagcatccagagagacctgagagagcagcccccccccgccagcacccccggccacggccccagccacagaagcaccttcagcgcccccctgcccagccccagaaccgccacccccatctacgaggagctgctgtacagcgacgccaacatctactgccagatcgaccacaaggccgacgtggtgagctag

SEQ ID NO: 92753 - DNA, 1269 bp, synthetic construct
  misc_feature 1..1269: note = Description of Artificial Sequence: Synthetic coding sequence
  source 1..1269: mol_type = other DNA
atgagcgccgacggcgccgaggccgacggcagcacccaggtgaccgtggaggagcccgtgcagcagcccagcgtggtggacagagtggccagcatgcccctgatcagcagcacctgcgacatggtgagcgccgcctacgccagcaccaaggagagctacccccacatcaagaccgtgtgcgacgccgccgagaagggcgtgagaaccctgaccgccgccgccgtgagcggcgcccagcccatcctgagcaagctggagccccagatcgccagcgccagcgagtacgcccacagaggcctggacaagctggaggagaacctgcccatcctgcagcagcccaccgagaaggtgagcggcgcccaggagatggtgagcagcgccaaggacaccgtggccacccagctgagcgaggccgtggacgccaccagaggcgccgtgcagagcggcgtggacaagaccaagagcgtggtgaccggcggcgtgcagagcgtgatgggcagcagactgggccagatggtgctgagcggcgtggacaccgtgctgggcaagagcgaggagtgggccgacaaccacctgcccctgaccgacgccgagctggccagaatcgccaccagcctggacggcttcgacgtggccagcgtgcagcagcagagacaggagcagagctacttcgtgagactgggcagcctgagcgagagactgagacagcacgcctacgagcacagcctgggcaagctgagagccaccaagcagagagcccaggaggccctgctgcagctgagccaggtgctgagcctgatggagaccgtgaagcagggcgtggaccagaagctggtggagggccaggagaagctgcaccagatgtggctgagctggaaccagaagcagctgcagggccccgagaaggagccccccaagcccgagcaggtggagagcagagccctgaccatgttcagagacatcgcccagcagctgcaggccacctgcaccagcctgggcagcagcatccagggcctgcccaccaacgtgaaggaccaggtgcagcaggccagaagacaggtggaggacctgcaggccaccttcagcagcatccacagcttccaggacctgagcagcagcatcctggcccagagcagagagagagtggccagcgccagagaggccctggaccacatggtggagtacgtggcccagaacacccccgtgacctggctggtgggccccttcgcccccggcatcaccgagaaggcccccgaggagaagaagtag

SEQ ID NO: 92754 - DNA, 1392 bp, synthetic construct
  misc_feature 1..1392: note = Description of Artificial Sequence: Synthetic coding sequence
  source 1..1392: mol_type = other DNA
atgagcgaggaggaggccgcccagatccccagaagcagcgtgtgggagcaggaccagcagaacgtggtgcagagagtggtggccctgcccctggtgagagccacctgcaccgccgtgtgcgacgtgtacagcgccgccaaggacagacaccccctgctgggcagcgcctgcagactggccgagaactgcgtgtgcggcctgaccaccagagccctggaccacgcccagcccctgctggagcacctgcagccccagctggccaccatgaacagcctggcctgcagaggcctggacaagctggaggagaagctgcccttcctgcagcagcccagcgagaccgtggtgaccagcgccaaggacgtggtggccagcagcgtgaccggcgtggtggacctggccagaagaggcagaagatggagcgtggagctgaagagaagcgtgagccacgccgtggacgtggtgctggagaagagcgaggagctggtggaccacttcctgcccatgaccgaggaggagctggccgccctggccgccgaggccgagggccccgaggtgggcagcgtggaggaccagagaagacagcagggctacttcgtgagactgggcagcctgagcgccagaatcagacacctggcctacgagcacagcgtgggcaagctgagacagagcaagcacagagcccaggacaccctggcccagctgcaggagaccctggagctgatcgaccacatgcagtgcggcgtgacccccaccgcccccgcctgccccggcaaggtgcacgagctgtggggcgagtggggccagagaccccccgagagcagaagaagaagccaggccgagctggagaccctggtgctgagcagaagcctgacccaggagctgcagggcaccgtggaggccctggagagcagcgtgagaggcctgcccgccggcgcccaggagaaggtggccgaggtgagaagaagcgtggacgccctgcagaccgccttcgccgacgccagatgcttcagagacgtgcccgccgccgccctggccgagggcagaggcagagtggcccacgcccacgcctgcgtggacgagctgctggagctggtggtgcaggccgtgcccctgccctggctggtgggccccttcgcccccatcctggtggagagacccgagcccctgcccgacctggccgacctggtggacgaggtgatcggcggccccgaccccagatgggcccacctggactggcccgcccagcagagagcctgggaggccgagcacagagacggcagcggcaacggcgacggcgacagaatgggcgtggccggcgacatctgcgagcaggagcccgagacccccagctgccccgtgaagcacaccctgatgcccgagctggacttctag

SEQ ID NO: 92755 - DNA, 3768 bp, synthetic construct
  misc_feature 1..3768: note = Description of Artificial Sequence: Synthetic coding sequence
  source 1..3768: mol_type = other DNA
atgaacggctacgccgagttcccccccagccccagcaaccccaccaaggagcccgtggagccccagcccagccaggtgcccctgcaggaggacgtggacatgagcagcggcagcagcggccacgagaccaacgagaactgcagcaccggcagagacagccagggcagcgactgcgacgacagcggcaaggagctgggcatgctggtggagccccccgacgccagacagagccccgacaccttcagcctgatgatggccaagagcgagcacaaccccagcaccagcggctgcagcagcgaccagagcagcaaggtggacacccacaaggagctgatcaagaccctgaaggagctgaaggtgcacctgcccgccgacaagaaggccaagggcaaggccagcaccctggccaccctgaagtacgccctgagaagcgtgaagcaggtgaaggccaacgaggagtactaccagctgctgatgagcagcgagggccacccctgcggcgccgacgtgcccagctacaccgtggaggagatggagagcgtgaccagcgagcacatcgtgaagaacgccgacatgttcgccgtggccgtgagcctggtgagcggcaagatcctgtacatcagcgaccaggtggccagcatcttccactgcaagagagacgccttcagcgacgccaagttcgtggagttcctggccccccacgacgtgggcgtgttccacagcttcaccagcccctacaagctgcccctgtggagcatgtgcagcggcgccgacagcttcacccaggagtgcatggaggagaagagcttcttctgcagagtgagcgtgagaaagagccacgagaacgagatcagataccaccccttcagaatgaccccctacctggtgaaggtgagagaccagcagggcgccgagagccagctgtgctgcctgctgctggccgagagagtgcacagcggctacgaggcccccagaatcccccccgagaagagaatcttcaccaccacccacacccccaactgcctgttccaggacgtggacgagagagccgtgcccctgctgggctacctgccccaggacctgatcgagacccccgtgctggtgcagctgcaccccagcgacagacccctgatgctggccatccacaagaagatcctgcagagcggcggccagcccttcgactacagccccatcagattcagagccagaaacggcgagtacatcaccctggacaccagctggagcagcttcatcaacccctggagcagaaagatcagcttcatcatcggcagacacaaggtgagagtgggccccctgaacgaggacgtgttcgccgcccacccctgcaccgaggagaaggccctgcaccccagcatccaggagctgaccgagcagatccacagactgctgctgcagcccgtgccccacagcggcagcagcggctacggcagcctgggcagcaacggcagccacgagcacctgatgagccagaccagcagcagcgacagcaacggccacgaggacagcagaagaagaagagccgagatctgcaagaacggcaacaagaccaagaacagaagccactacagccacgagagcggcgagcagaagaagaagagcgtgaccgagatgcagaccaacccccccgccgagaagaaggccgtgcccgccatggagaaggacagcctgggcgtgagcttccccgaggagctggcctgcaagaaccagcccacctgcagctaccagcagatcagctgcctggacagcgtgatcagatacctggagagctgcaacgaggccgccaccctgaagagaaagtgcgagttccccgccaacgtgcccgccctgagaagcagcgacaagagaaaggccaccgtgagccccggcccccacgccggcgaggccgagccccccagcagagtgaacagcagaaccggcgtgggcacccacctgaccagcctggccctgcccggcaaggccgagagcgtggccagcctgaccagccagtgcagctacagcagcaccatcgtgcacgtgggcgacaagaagccccagcccgagctggagatggtggaggacgccgccagcggccccgagagcctggactgcctggccggccccgccctggcctgcggcctgagccaggagaaggagcccttcaagaagctgggcctgaccaaggaggtgctggccgcccacacccagaaggaggagcagagcttcctgcagaagttcaaggagatcagaaagctgagcatcttccagagccactgccactactacctgcaggagagaagcaagggccagcccagcgagagaaccgcccccggcctgagaaacaccagcggcatcgacagcccctggaagaagaccggcaagaacagaaagctgaagagcaagagagtgaagcccagagacagcagcgagagcaccggcagcggcggccccgtgagcgccagaccccccctggtgggcctgaacgccaccgcctggagccccagcgacaccagccagagcagctgccccgccgtgcccttccccgcccccgtgcccgccgcctacagcctgcccgtgttccccgcccccggcaccgtggccgccccccccgcccccccccacgccagcttcaccgtgcccgccgtgcccgtggacctgcagcaccagttcgccgtgcagcccccccccttccccgcccccctggcccccgtgatggccttcatgctgcccagctacagcttccccagcggcacccccaacctgccccaggccttcttccccagccagccccagttccccagccaccccaccctgaccagcgagatggccagcgccagccagcccgagttccccagcagaaccagcatccccagacagccctgcgcctgccccgccaccagagccaccccccccagcgccatgggcagagccagcccccccctgttccagagcagaagcagcagccccctgcagctgaacctgctgcagctggaggaggcccccgagggcggcaccggcgccatgggcaccaccggcgccaccgagaccgccgccgtgggcgccgactgcaagcccggcaccagcagagaccagcagcccaaggcccccctgaccagagacgagcccagcgacacccagaacagcgacgccctgagcaccagcagcggcctgctgaacctgctgctgaacgaggacctgtgcagcgccagcggcagcgccgccagcgagagcctgggcagcggcagcctgggctgcgacgccagccccagcggcgccggcagcagcgacaccagccacaccagcaagtacttcggcagcatcgacagcagcgagaacaaccacaaggccaagatgaacaccggcatggaggagagcgagcacttcatcaagtgcgtgctgcaggaccccatctggctgctgatggccgacgccgacagcagcgtgatgatgacctaccagctgcccagcagaaacctggaggccgtgctgaaggaggacagagagaagctgaagctgctgcagaagctgcagcccagattcaccgagagccagaagcaggagctgagagaggtgcaccagtggatgcagaccggcggcctgcccgccgccatcgacgtggccgagtgcgtgtactgcgagaacaaggagaagggcaacatctgcatcccctacgaggaggacatccccagcctgggcctgagcgaggtgagcgacaccaaggaggacgagaacggcagccccctgaaccacagaatcgaggagcagacctag

SEQ ID NO: 92756 - DNA, 1215 bp, synthetic construct
  misc_feature 1..1215: note = Description of Artificial Sequence: Synthetic coding sequence
  source 1..1215: mol_type = other DNA
atgaacggctacgccgagttcccccccagccccagcaaccccaccaaggagcccgtggagccccagcccagccaggtgcccctgcaggaggacgtggacatgagcagcggcagcagcggccacgagaccaacgagaactgcagcaccggcagagacagccagggcagcgactgcgacgacagcggcaaggagctgggcatgctggtggagccccccgacgccagacagagccccgacaccttcagcctgatgatggccaagagcgagcacaaccccagcaccagcggctgcagcagcgaccagagcagcaaggtggacacccacaaggagctgatcaagaccctgaaggagctgaaggtgcacctgcccgccgacaagaaggccaagggcaaggccagcaccctggccaccctgaagtacgccctgagaagcgtgaagcaggtgaaggccaacgaggagtactaccagctgctgatgagcagcgagggccacccctgcggcgccgacgtgcccagctacaccgtggaggagatggagagcgtgaccagcgagcacatcgtgaagaacgccgacatgttcgccgtggccgtgagcctggtgagcggcaagatcctgtacatcagcgaccaggtggccagcatcttccactgcaagagagacgccttcagcgacgccaagttcgtggagttcctggccccccacgacgtgggcgtgttccacagcttcaccagcccctacaagctgcccctgtggagcatgtgcagcggcgccgacagcttcacccaggagtgcatggaggagaagagcttcttctgcagagtgagcgtgagaaagagccacgagaacgagatcagataccaccccttcagaatgaccccctacctggtgaaggtgagagaccagcagggcgccgagagccagctgtgctgcctgctgctggccgagagagtgcacagcggctacgaggcccccagaatcccccccgagaagagaatcttcaccaccacccacacccccaactgcctgttccaggacgtggacgagagccccgccgtgagaagagccgccttcagactgttcagccacagcgtgagcagacccgagagaagagtgcaccacgtgggccaccagctggtgcagctgcaccagcccatggagcaggagaacctgctgcaccactgggaggcccagagccagggcggccccttcgagtag

SEQ ID NO: 92757 - DNA, 1215 bp, synthetic construct; identical to SEQ ID NO: 92756
  misc_feature 1..1215: note = Description of Artificial Sequence: Synthetic coding sequence
  source 1..1215: mol_type = other DNA

SEQ ID NO: 92758 - DNA, 330 bp, synthetic construct
  misc_feature 1..330: note = Description of Artificial Sequence: Synthetic coding sequence
  source 1..330: mol_type = other DNA
atgaacggctacgccgagttcccccccagccccagcaaccccaccaaggagcccgtggagccccagcccagccaggtgcccctgcaggaggacgtggacatgagcagcggcagcagcggccacgagaccaacgagaactgcagcaccggcagagacagccagggcagcgactgcgacgacagcggcaaggagctgggcatgctggtggagccccccgacgccagacagagccccgacaccttcagcctgatgatggccaagagcgagcacaaccccagcaccagcggctgcagcagcgaccagagcagcaaggtggacacccacaagtag

SEQ ID NO: 92759 - DNA, 1452 bp, synthetic construct
  misc_feature 1..1452: note = Description of Artificial Sequence: Synthetic coding sequence
  source 1..1452: mol_type = other DNA
atgaacggctacgccgagttcccccccagccccagcaaccccaccaaggagcccgtggagccccagcccagccaggtgcccctgcaggaggacgtggacatgagcagcggcagcagcggccacgagaccaacgagaactgcagcaccggcagagacagccagggcagcgactgcgacgacagcggcaaggagctgggcatgctggtggagccccccgacgccagacagagccccgacaccttcagcctgatgatggccaagagcgagcacaaccccagcaccagcggctgcagcagcgaccagagcagcaaggtggacacccacaaggagctgatcaagaccctgaaggagctgaaggtgcacctgcccgccgacaagaaggccaagggcaaggccagcaccctggccaccctgaagtacgccctgagaagcgtgaagcaggtgaaggccaacgaggagtactaccagctgctgatgagcagcgagggccacccctgcggcgccgacgtgcccagctacaccgtggaggagatggagagcgtgaccagcgagcacatcgtgaagaacgccgacatgttcgccgtggccgtgagcctggtgagcggcaagatcctgtacatcagcgaccaggtggccagcatcttccactgcaagagagacgccttcagcgacgccaagttcgtggagttcctggccccccacgacgtgggcgtgttccacagcttcaccagcccctacaagctgcccctgtggagcatgtgcagcggcgccgacagcttcacccaggagtgcatggaggagaagagcttcttctgcagagtgagcgtgagaaagagccacgagaacgagatcagataccaccccttcagaatgaccccctacctggtgaaggtgagagaccagcagggcgccgagagccagctgtgctgcctgctgctggccgagagagtgcacagcggctacgaggcccccagaatcccccccgagaagagaatcttcaccaccacccacacccccaactgcctgttccaggacgtggacgagagagccgtgcccctgctgggctacctgccccaggacctgatcgagacccccgtgctggtgcagctgcaccccagcgacagacccctgatgctggccatccacaagaagatcctgcagagcggcggccagcccttcgactacagccccatcagattcagagccagaaacggcgagtacatcaccctggacaccagctggagcagcttcatcaacccctggagcagaaagatcagcttcatcatcggcagacacaaggtgagagtgggccccctgaacgaggacgtgttcgccgcccacccctgcaccgaggagaaggccctgcaccccagcatccaggagctgaccgagcagatccacagactgctgctgcaggtgggcgtggtgcccgcctgccccccccccagatag

SEQ ID NO: 92760 - DNA, 2340 bp, synthetic construct
  misc_feature 1..2340: note = Description of Artificial Sequence: Synthetic coding sequence
  source 1..2340: mol_type = other DNA
atgatccccttcctgcccatgttcagcctgctgctgctgctgatcgtgaaccccatcaacgccaacaaccactacgacaagatcctggcccacagcagaatcagaggcagagaccagggccccaacgtgtgcgccctgcagcagatcctgggcaccaagaagaagtacttcagcacctgcaagaactggtacaagaagagcatctgcggccagaagaccaccgtgctgtacgagtgctgccccggctacatgagaatggagggcatgaagggctgccccgccgtgctgcccatcgaccacgtgtacggcaccctgggcatcgtgggcgccaccaccacccagagatacagcgacgccagcaagctgagagaggagatcgagggcaagggcagcttcacctacttcgcccccagcaacgaggcctgggacaacctggacagcgacatcagaagaggcctggagagcaacgtgaacgtggagctgctgaacgccctgcacagccacatgatcaacaagagaatgctgaccaaggacctgaagaacggcatgatcatccccagcatgtacaacaacctgggcctgttcatcaaccactaccccaacggcgtggtgaccgtgaactgcgccagaatcatccacggcaaccagatcgccaccaacggcgtggtgcacgtgatcgacagagtgctgacccagatcggcaccagcatccaggacttcatcgaggccgaggacgacctgagcagcttcagagccgccgccatcaccagcgacatcctggaggccctgggcagagacggccacttcaccctgttcgcccccaccaacgaggccttcgagaagctgcccagaggcgtgctggagagaatcatgggcgacaaggtggccagcgaggccctgatgaagtaccacatcctgaacaccctgcagtgcagcgagagcatcatgggcggcgccgtgttcgagaccctggagggcaacaccatcgagatcggctgcgacggcgacagcatcaccgtgaacggcatcaagatggtgaacaagaaggacatcgtgaccaacaacggcgtgatccacctgatcgaccaggtgctgatccccgacagcgccaagcaggtgatcgagctggccggcaagcagcagaccaccttcaccgacctggtggcccagctgggcctggccagcgccctgagacccgacggcgagtacaccctgctggcccccgtgaacaacgccttcagcgacgacaccctgagcatggaccagagactgctgaagctgatcctgcagaaccacatcctgaaggtgaaggtgggcctgaacgagctgtacaacggccagatcctggagaccatcggcggcaagcagctgagagtgttcgtgtacagaaccgccgtgtgcatcgagaacagctgcatggagaagggcagcaagcagggcagaaacggcgccatccacatcttcagagagatcatcaagcccgccgagaagagcctgcacgagaagctgaagcaggacaagagattcagcaccttcctgagcctgctggaggccgccgacctgaaggagctgctgacccagcccggcgactggaccctgttcgtgcccaccaacgacgccttcaagggcatgaccagcgaggagaaggagatcctgatcagagacaagaacgccctgcagaacatcatcctgtaccacctgacccccggcgtgttcatcggcaagggcttcgagcccggcgtgaccaacatcctgaagaccacccagggcagcaagatcttcctgaaggaggtgaacgacaccctgctggtgaacgagctgaagagcaaggagagcgacatcatgaccaccaacggcgtgatccacgtggtggacaagctgctgtaccccgccgacacccccgtgggcaacgaccagctgctggagatcctgaacaagctgatcaagtacatccagatcaagttcgtgagaggcagcaccttcaaggagatccccgtgaccgtgtacaagcccatcatcaagaagtacaccaagatcatcgacggcgtgcccgtggagatcaccgagaaggagaccagagaggagagaatcatcaccggccccgagatcaagtacaccagaatcagcaccggcggcggcgagaccgaggagaccctgaagaagctgctgcaggaggaggtgaccaaggtgaccaagttcatcgagggcggcgacggccacctgttcgaggacgaggagatcaagagactgctgcagggcgacacccccgtgagaaagctgcaggccaacaagaaggtgcagggcagcagaagaagactgagagagggcagaagccagtag

SEQ ID NO: 92761 - DNA, 2430 bp, synthetic construct
  misc_feature 1..2430: note = Description of Artificial Sequence: Synthetic coding sequence
  source 1..2430: mol_type = other DNA
atgatccccttcctgcccatgttcagcctgctgctgctgctgatcgtgaaccccatcaacgccaacaaccactacgacaagatcctggcccacagcagaatcagaggcagagaccagggccccaacgtgtgcgccctgcagcagatcctgggcaccaagaagaagtacttcagcacctgcaagaactggtacaagaagagcatctgcggccagaagaccaccgtgctgtacgagtgctgccccggctacatgagaatggagggcatgaagggctgccccgccgtgctgcccatcgaccacgtgtacggcaccctgggcatcgtgggcgccaccaccacccagagatacagcgacgccagcaagctgagagaggagatcgagggcaagggcagcttcacctacttcgcccccagcaacgaggcctgggacaacctggacagcgacatcagaagaggcctggagagcaacgtgaacgtggagctgctgaacgccctgcacagccacatgatcaacaagagaatgctgaccaaggacctgaagaacggcatgatcatccccagcatgtacaacaacctgggcctgttcatcaaccactaccccaacggcgtggtgaccgtgaactgcgccagaatcatccacggcaaccagatcgccaccaacggcgtggtgcacgtgatcgacagagtgctgacccagatcggcaccagcatccaggacttcatcgaggccgaggacgacctgagcagcttcagagccgccgccatcaccagcgacatcctggaggccctgggcagagacggccacttcaccctgttcgcccccaccaacgaggccttcgagaagctgcccagaggcgtgctggagagaatcatgggcgacaaggtggccagcgaggccctgatgaagtaccacatcctgaacaccctgcagtgcagcgagagcatcatgggcggcgccgtgttcgagaccctggagggcaacaccatcgagatcggctgcgacggcgacagcatcaccgtgaacggcatcaagatggtgaacaagaaggacatcgtgaccaacaacggcgtgatccacctgatcgaccaggtgctgatccccgacagcgccaagcaggtgatcgagctggccggcaagcagcagaccaccttcaccgacctggtggcccagctgggcctggccagcgccctgagacccgacggcgagtacaccctgctggcccccgtgaacaacgccttcagcgacgacaccctgagcatggaccagagactgctgaagctgatcctgcagaaccacatcctgaaggtgaaggtgggcctgaacgagctgtacaacggccagatcctggagaccatcggcggcaagcagctgagagtgttcgtgtacagaaccgccgtgtgcatcgagaacagctgcatggagaagggcagcaagcagggcagaaacggcgccatccacatcttcagagagatcatcaagcccgccgagaagagcctgcacgagaagctgaagcaggacaagagattcagcaccttcctgagcctgctggaggccgccgacctgaaggagctgctgacccagcccggcgactggaccctgttcgtgcccaccaacgacgccttcaagggcatgaccagcgaggagaaggagatcctgatcagagacaagaacgccctgcagaacatcatcctgtaccacctgacccccggcgtgttcatcggcaagggcttcgagcccggcgtgaccaacatcctgaagaccacccagggcagcaagatcttcctgaaggaggtgaacgacaccctgctggtgaacgagctgaagagcaaggagagcgacatcatgaccaccaacggcgtgatccacgtggtggacaagctgctgtaccccgccgacacccccgtgggcaacgaccagctgctggagatcctgaacaagctgatcaagtacatccagatcaagttcgtgagaggcagcaccttcaaggagatccccgtgaccgtgtacagacccaccctgaccaaggtgaagatcgagggcgagcccgagttcagactgatcaaggagggcgagaccatcaccgaggtgatccacggcgagcccatcatcaagaagtacaccaagatcatcgacggcgtgcccgtggagatcaccgagaaggagaccagagaggagagaatcatcaccggccccgagatcaagtacaccagaatcagcaccggcggcggcgagaccgaggagaccctgaagaagctgctgcaggaggaggtgaccaaggtgaccaagttcatcgagggcggcgacggccacctgttcgaggacgaggagatcaagagactgctgcagggcgacacccccgtgagaaagctgcaggccaacaagaaggtgcagggcagcagaagaagactgagagagggcagaagccagtag

SEQ ID NO: 92762 - DNA, 2511 bp, synthetic construct
  misc_feature 1..2511: note = Description of Artificial Sequence: Synthetic coding sequence
  source 1..2511: mol_type = other DNA
atgatccccttcctgcccatgttcagcctgctgctgctgctgatcgtgaaccccatcaacgccaacaaccactacgacaagatcctggcccacagcagaatcagaggcagagaccagggccccaacgtgtgcgccctgcagcagatcctgggcaccaagaagaagtacttcagcacctgcaagaactggtacaagaagagcatctgcggccagaagaccaccgtgctgtacgagtgctgccccggctacatgagaatggagggcatgaagggctgccccgccgtgctgcccatcgaccacgtgtacggcaccctgggcatcgtgggcgccaccaccacccagagatacagcgacgccagcaagctgagagaggagatcgagggcaagggcagcttcacctacttcgcccccagcaacgaggcctgggacaacctggacagcgacatcagaagaggcctggagagcaacgtgaacgtggagctgctgaacgccctgcacagccacatgatcaacaagagaatgctgaccaaggacctgaagaacggcatgatcatccccagcatgtacaacaacctgggcctgttcatcaaccactaccccaacggcgtggtgaccgtgaactgcgccagaatcatccacggcaaccagatcgccaccaacggcgtggtgcacgtgatcgacagagtgctgacccagatcggcaccagcatccaggacttcatcgaggccgaggacgacctgagcagcttcagagccgccgccatcaccagcgacatcctggaggccctgggcagagacggccacttcaccctgttcgcccccaccaacgaggccttcgagaagctgcccagaggcgtgctggagagaatcatgggcgacaaggtggccagcgaggccctgatgaagtaccacatcctgaacaccctgcagtgcagcgagagcatcatgggcggcgccgtgttcgagaccctggagggcaacaccatcgagatcggctgcgacggcgacagcatcaccgtgaacggcatcaagatggtgaacaagaaggacatcgtgaccaacaacggcgtgatccacctgatcgaccaggtgctgatccccgacagcgccaagcaggtgatcgagctggccggcaagcagcagaccaccttcaccgacctggtggcccagctgggcctggccagcgccctgagacccgacggcgagtacaccctgctggcccccgtgaacaacgccttcagcgacgacaccctgagcatggaccagagactgctgaagctgatcctgcagaaccacatcctgaaggtgaaggtgggcctgaacgagctgtacaacggccagatcctggagaccatcggcggcaagcagctgagagtgttcgtgtacagaaccgccgtgtgcatcgagaacagctgcatggagaagggcagcaagcagggcagaaacggcgccatccacatcttcagagagatcatcaagcccgccgagaagagcctgcacgagaagctgaagcaggacaagagattcagcaccttcctgagcctgctggaggccgccgacctgaaggagctgctgacccagcccggcgactggaccctgttcgtgcccaccaacgacgccttcaagggcatgaccagcgaggagaaggagatcctgatcagagacaagaacgccctgcagaacatcatcctgtaccacctgacccccggcgtgttcatcggcaagggcttcgagcccggcgtgaccaacatcctgaagaccacccagggcagcaagatcttcctgaaggaggtgaacgacaccctgctggtgaacgagctgaagagcaaggagagcgacatcatgaccaccaacggcgtgatccacgtggtggacaagctgctgtaccccgccgacacccccgtgggcaacgaccagctgctggagatcctgaacaagctgatcaagtacatccagatcaagttcgtgagaggcagcaccttcaaggagatccccgtgaccgtgtacaccaccaagatcatcaccaaggtggtggagcccaagatcaaggtgatcgagggcagcctgcagcccatcatcaagaccgagggccccaccctgaccaaggtgaagatcgagggcgagcccgagttcagactgatcaaggagggcgagaccatcaccgaggtgatccacggcgagcccatcatcaagaagtacaccaagatcatcgacggcgtgcccgtggagatcaccgagaaggagaccagagaggagagaatcatcaccggccccgagatcaagtacaccagaatcagcaccggcggcggcgagaccgaggagaccctgaagaagctgctgcaggaggaggtgaccaaggtgaccaagttcatcgagggcggcgacggccacctgttcgaggacgaggagatcaagagactgctgcagggcgacacccccgtgagaaagctgcaggccaacaagaaggtgcagggcagcagaagaagactgagagagggcagaagccagtag

SEQ ID NO: 92763 - DNA, 2427 bp, synthetic construct
  misc_feature 1..2427: note = Description of Artificial Sequence: Synthetic coding sequence
  source 1..2427: mol_type = other DNA
atgatccccttcctgcccatgttcagcctgctgctgctgctgatcgtgaaccccatcaacgccaacaaccactacgacaagatcctggcccacagcagaatcagaggcagagaccagggccccaacgtgtgcgccctgcagcagatcctgggcaccaagaagaagtacttcagcacctgcaagaactggtacaagaagagcatctgcggccagaagaccaccgtgctgtacgagtgctgccccggctacatgagaatggagggcatgaagggctgccccgccgtgctgcccatcgaccacgtgtacggcaccctgggcatcgtgggcgccaccaccacccagagatacagcgacgccagcaagctgagagaggagatcgagggcaagggcagcttcacctacttcgcccccagcaacgaggcctgggacaacctggacagcgacatcagaagaggcctggagagcaacgtgaacgtggagctgctgaacgccctgcacagccacatgatcaacaagagaatgctgaccaaggacctgaagaacggcatgatcatccccagcatgtacaacaacctgggcctgttcatcaaccactaccccaacggcgtggtgaccgtgaactgcgccagaatcatccacggcaaccagatcgccaccaacggcgtggtgcacgtgatcgacagagtgctgacccagatcggcaccagcatccaggacttcatcgaggccgaggacgacctgagcagcttcagagccgccgccatcaccagcgacatcctggaggccctgggcagagacggccacttcaccctgttcgcccccaccaacgaggccttcgagaagctgcccagaggcgtgctggagagaatcatgggcgacaaggtggccagcgaggccctgatgaagtaccacatcctgaacaccctgcagtgcagcgagagcatcatgggcggcgccgtgttcgagaccctggagggcaacaccatcgagatcggctgcgacggcgacagcatcaccgtgaacggcatcaagatggtgaacaagaaggacatcgtgaccaacaacggcgtgatccacctgatcgaccaggtgctgatccccgacagcgccaagcaggtgatcgagctggccggcaagcagcagaccaccttcaccgacctggtggcccagctgggcctggccagcgccctgagacccgacggcgagtacaccctgctggcccccgtgaacaacgccttcagcgacgacaccctgagcatggaccagagactgctgaagctgatcctgcagaaccacatcctgaaggtgaaggtgggcctgaacgagctgtacaacggccagatcctggagaccatcggcggcaagcagctgagagtgttcgtgtacagaaccgccgtgtgcatcgagaacagctgcatggagaagggcagcaagcagggcagaaacggcgccatccacatcttcagagagatcatcaagcccgccgagaagagcctgcacgagaagctgaagcaggacaagagattcagcaccttcctgagcctgctggaggccgccgacctgaaggagctgctgacccagcccggcgactggaccctgttcgtgcccaccaacgacgccttcaagggcatgaccagcgaggagaaggagatcctgatcagagacaagaacgccctgcagaacatcatcctgtaccacctgacccccggcgtgttcatcggcaagggcttcgagcccggcgtgaccaacatcctgaagaccacccagggcagcaagatcttcctgaaggaggtgaacgacaccctgctggtgaacgagctgaagagcaaggagagcgacatcatgaccaccaacggcgtgatccacgtggtggacaagctgctgtaccccgccgacacccccgtgggcaacgaccagctgctggagatcctgaacaagctgatcaagtacatccagatcaagttcgtgagaggcagcaccttcaaggagatccccgtgaccgtgtacaccaccaagatcatcaccaaggtggtggagcccaagatcaaggtgatcgagggcagcctgcagcccatcatcaagaccgagggccccaccctgaccaaggtgaagatcgagggcgagcccgagttcagactgatcaaggagggcgagaccatcaccgaggtgatccacggcgagcccatcatcaagaagtacaccaagatcatcgacggcgtgcccgtggagatcaccgagaaggagaccagagaggagagaatcatcaccggccccgagatcaagtacaccagaatcagcaccggcggcggcgagaccgaggagaccctgaagaagctgctgcaggaggacacccccgtgagaaagctgcaggccaacaagaaggtgcagggcagcagaagaagactgagagagggcagaagccagtag

SEQ ID NO: 92764 - DNA, 834 bp, synthetic construct
  misc_feature 1..834: note = Description of Artificial Sequence: Synthetic coding sequence
  source 1..834: mol_type = other DNA
atgagaatggagggcatgaagggctgccccgccgtgctgcccatcgaccacgtgtacggcaccctgggcatcgtgggcgccaccaccacccagagatacagcgacgccagcaagctgagagaggagatcgagggcaagggcagcttcacctacttcgcccccagcaacgaggcctgggacaacctggacagcgacatcagaagaggcctggagagcaacgtgaacgtggagctgctgaacgccctgcacagccacatgatcaacaagagaatgctgaccaaggacctgaagaacggcatgatcatccccagcatgtacaacaacctgggcctgttcatcaaccactaccccaacggcgtggtgaccgtgaactgcgccagaatcatccacggcaaccagatcgccaccaacggcgtggtgcacgtgatcgacagagtgctgacccagatcggcaccagcatccaggacttcatcgaggccgaggacgacctgagcagcttcagagccgccgccatcaccagcgacatcctggaggccctgggcagagacggccacttcaccctgttcgcccccaccaacgaggccttcgagaagctgcccagaggcgtgctggagagaatcatgggcgacaaggtggccagcgaggccctgatgaagtaccacatcctgaacaccctgcagtgcagcgagagcatcatgggcggcgccgtgttcgagaccctggagggcaacaccatcgagatcggctgcgacggcgacagcatcaccgtgaacggcatcaagatggtgaacaagaaggacatcgtgaccaactggtgcgaccccttcgactag

SEQ ID NO: 92765 - DNA, 2346 bp, synthetic construct
  misc_feature 1..2346: note = Description of Artificial Sequence: Synthetic coding sequence
  source 1..2346: mol_type = other DNA
atgatccccttcctgcccatgttcagcctgctgctgctgctgatcgtgaaccccatcaacgccaacaaccactacgacaagatcctggcccacagcagaatcagaggcagagaccagggccccaacgtgtgcgccctgcagcagatcctgggcaccaagaagaagtacttcagcacctgcaagaactggtacaagaagagcatctgcggccagaagaccaccgtgctgtacgagtgctgccccggctacatgagaatggagggcatgaagggctgccccgccgtgctgcccatcgaccacgtgtacggcaccctgggcatcgtgggcgccaccaccacccagagatacagcgacgccagcaagctgagagaggagatcgagggcaagggcagcttcacctacttcgcccccagcaacgaggcctgggacaacctggacagcgacatcagaagaggcctggagagcaacgtgaacgtggagctgctgaacgccctgcacagccacatgatcaacaagagaatgctgaccaaggacctgaagaacggcatgatcatccccagcatgtacaacaacctgggcctgttcatcaaccactaccccaacggcgtggtgaccgtgaactgcgccagaatcatccacggcaaccagatcgccaccaacggcgtggtgcacgtgatcgacagagtgctgacccagatcggcaccagcatccaggacttcatcgaggccgaggacgacctgagcagcttcagagccgccgccatcaccagcgacatcctggaggccctgggcagagacggccacttcaccctgttcgcccccaccaacgaggccttcgagaagctgcccagaggcgtgctggagagaatcatgggcgacaaggtggccagcgaggccctgatgaagtaccacatcctgaacaccctgcagtgcagcgagagcatcatgggcggcgccgtgttcgagaccctggagggcaacaccatcgagatcggctgcgacggcgacagcatcaccgtgaacggcatcaagatggtgaacaagaaggacatcgtgaccaacaacggcgtgatccacctgatcgaccaggtgctgatccccgacagcgccaagcaggtgatcgagctggccggcaagcagcagaccaccttcaccgacctggtggcccagctgggcctggccagcgccctgagacccgacggcgagtacaccctgctggcccccgtgaacaacgccttcagcgacgacaccctgagcatggaccagagactgctgaagctgatcctgcagaaccacatcctgaaggtgaaggtgggcctgaacgagctgtacaacggccagatcctggagaccatcggcggcaagcagctgagagtgttcgtgtacagaaccgccgtgtgcatcgagaacagctgcatggagaagggcagcaagcagggcagaaacggcgccatccacatcttcagagagatcatcaagcccgccgagaagagcctgcacgagaagctgaagcaggacaagagattcagcaccttcctgagcctgctggaggccgccgacctgaaggagctgctgacccagcccggcgactggaccctgttcgtgcccaccaacgacgccttcaagggcatgaccagcgaggagaaggagatcctgatcagagacaagaacgccctgcagaacatcatcctgtaccacctgacccccggcgtgttcatcggcaagggcttcgagcccggcgtgaccaacatcctgaagaccacccagggcagcaagatcttcctgaaggaggtgaacgacaccctgctggtgaacgagctgaagagcaaggagagcgacatcatgaccaccaacggcgtgatccacgtggtggacaagctgctgtaccccgccgacacccccgtgggcaacgaccagctgctggagatcctgaacaagctgatcaagtacatccagatcaagttcgtgagaggcagcaccttcaaggagatccccgtgaccgtgtacagacccaccctgaccaaggtgaagatcgagggcgagcccgagttcagactgatcaaggagggcgagaccatcaccgaggtgatccacggcgagcccatcatcaagaagtacaccaagatcatcgacggcgtgcccgtggagatcaccgagaaggagaccagagaggagagaatcatcaccggccccgagatcaagtacaccagaatcagcaccggcggcggcgagaccgaggagaccctgaagaagctgctgcaggaggacacccccgtgagaaagctgcaggccaacaagaaggtgcagggcagcagaagaagactgagagagggcagaagccagtag

SEQ ID NO: 92766 - DNA, 2250 bp, synthetic construct
  misc_feature 1..2250: note = Description of Artificial Sequence: Synthetic coding sequence
  source 1..2250: mol_type = other DNA
atgatccccttcctgcccatgttcagcctgctgctgctgctgatcgtgaaccccatcaacgccaacaaccactacgacaagatcctggcccacagcagaatcagaggcagagaccagggccccaacgtgtgcgccctgcagcagatcctgggcaccaagaagaagtacttcagcacctgcaagaactggtacaagaagagcatctgcggccagaagaccaccgtgctgtacgagtgctgccccggctacatgagaatggagggcatgaagggctgccccgccgtgctgcccatcgaccacgtgtacggcaccctgggcatcgtgggcgccaccaccacccagagatacagcgacgccagcaagctgagagaggagatcgagggcaagggcagcttcacctacttcgcccccagcaacgaggcctgggacaacctggacagcgacatcagaagaggcctggagagcaacgtgaacgtggagctgctgaacgccctgcacagccacatgatcaacaagagaatgctgaccaaggacctgaagaacggcatgatcatccccagcatgtacaacaacctgggcctgttcatcaaccactaccccaacggcgtggtgaccgtgaactgcgccagaatcatccacggcaaccagatcgccaccaacggcgtggtgcacgtgatcgacagagtgctgacccagatcggcaccagcatccaggacttcatcgaggccgaggacgacctgagcagcttcagagccgccgccatcaccagcgacatcctggaggccctgggcagagacggccacttcaccctgttcgcccccaccaacgaggccttcgagaagctgcccagaggcgtgctggagagaatcatgggcgacaaggtggccagcgaggccctgatgaagtaccacatcctgaacaccctgcagtgcagcgagagcatcatgggcggcgccgtgttcgagaccctggagggcaacaccatcgagatcggctgcgacggcgacagcatcaccgtgaacggcatcaagatggtgaacaagaaggacatcgtgaccaacaacggcgtgatccacctgatcgaccaggtgctgatccccgacagcgccaagcaggtgatcgagctggccggcaagcagcagaccaccttcaccgacctggtggcccagctgggcctggccagcgccctgagacccgacggcgagtacaccctgctggcccccgtgaacaacgccttcagcgacgacaccctgagcatggaccagagactgctgaagctgatcctgcagaaccacatcctgaaggtgaaggtgggcctgaacgagctgtacaacggccagatcctggagaccatcggcggcaagcagctgagagtgttcgtgtacagaaccgccgtgtgcatcgagaacagctgcatggagaagggcagcaagcagggcagaaacggcgccatccacatcttcagagagatcatcaagcccgccgagaagagcctgcacgagaagctgaagcaggacaagagattcagcaccttcctgagcctgctggaggccgccgacctgaaggagctgctgacccagcccggcgactggaccctgttcgtgcccaccaacgacgccttcaagggcatgaccagcgaggagaaggagatcctgatcagagacaagaacgccctgcagaacatcatcctgtaccacctgacccccggcgtgttcatcggcaagggcttcgagcccggcgtgaccaacatcctgaagaccacccagggcagcaagatcttcctgaaggaggtgaacgacaccctgctggtgaacgagctgaagagcaaggagagcgacatcatgaccaccaacggcgtgatccacgtggtggacaagctgctgtaccccgccgacacccccgtgggcaacgaccagctgctggagatcctgaacaagctgatcaagtacatccagatcaagttcgtgagaggcagcaccttcaaggagatccccgtgaccgtgtacagccccgagatcaagtacaccagaatcagcaccggcggcggcgagaccgaggagaccctgaagaagctgctgcaggaggaggtgaccaaggtgaccaagttcatcgagggcggcgacggccacctgttcgaggacgaggagatcaagagactgctgcagggcgacacccccgtgagaaagctgcaggccaacaagaaggtgcagggcagcagaagaagactgagagagggcagaagccagtag

SEQ ID NO: 92767 - DNA, 399 bp, synthetic construct
  misc_feature 1..399: note = Description of Artificial Sequence: Synthetic coding sequence
  source 1..399: mol_type = other DNA
atgagcaacaagttcctgggcacctggaagctggtgagcagcgagaacttcgacgactacatgaaggccctgggcgtgggcctggccaccagaaagctgggcaacctggccaagcccaccgtgatcatcagcaagaagggcgacatcatcaccatcagaaccgagagcaccttcaagaacaccgagatcagcttcaagctgggccaggagttcgaggagaccaccgccgacaacagaaagaccaagagcatcgtgaccctgcagagaggcagcctgaaccaggtgcagagatgggacggcaaggagaccaccatcaagagaaagctggtgaacggcaagatggtggccgagtgcaagatgaagggcgtggtgtgcaccagaatctacgagaaggtgtag

SEQ ID NO: 92768 - DNA, 483 bp, synthetic construct
  misc_feature 1..483: note = Description of Artificial Sequence: Synthetic coding sequence
  source 1..483: mol_type = other DNA
atgctgctgctgctgctgagcatcatcgtgctgcacgtggccgtgctggtgctgctgttcgtgagcaccatcgtgagccagtggatcgtgggcaacggccacgccaccgacctgtggcagaactgcagcaccagcagcagcggcaacgtgcaccactgcttcagcagcagccccaacgagtggctgcagagcgtgcaggccaccatgatcctgagcatcatcttcagcatcctgagcctgttcctgttcttctgccagctgttcaccctgaccaagggcggcagattctacatcaccggcatcttccagatcctggccggcctgtgcgtgatgagcgccgccgccatctacaccgtgagacaccccgagtggcacctgaacagcgactacagctacggcttcgcctacatcctggcctgggtggccttccccctggccctgctgagcggcgtgatctacgtgatcctgagaaagagagagtag

SEQ ID NO: 92769 - DNA, 357 bp, synthetic construct
  misc_feature 1..357: note = Description of Artificial Sequence: Synthetic coding sequence
  source 1..357: mol_type = other DNA
atgctgctgctgctgctgagcatcatcgtgctgcacgtggccgtgctggtgctgctgttcgtgagcaccatcgtgagccagtggatcgtgggcaacggccacgccaccgacctgtggcagaactgcagcaccagcagcagcggcaacgtgcaccactgcttcagcagcagccccaacgagtggctgcagagcgtgcaggccaccatgatcctgagcatcatcttcagcatcctgagcctgttcctgttcttctgccagctgttcaccctgaccaagggcggcagattctacatcaccggcatcttccagatcctggccgagagcaacagcagccagatgtgcggctacagagactag

SEQ ID NO: 92770 - DNA, 483 bp, synthetic construct; identical to SEQ ID NO: 92768
  misc_feature 1..483: note = Description of Artificial Sequence: Synthetic coding sequence
  source 1..483: mol_type = other DNA

SEQ ID NO: 92771 - DNA, 450 bp, synthetic construct
  misc_feature 1..450: note = Description of Artificial Sequence: Synthetic coding sequence
  source 1..450: mol_type = other DNA
atgctgctgctgctgctgagcatcatcgtgctgcacgtggccgtgctggtgctgctgttcgtgagcaccatcgtgagccagtggatcgtgggcaacggccacgccaccgacctgtggcagaactgcagcaccagcagcagcggcaacgtgcaccactgcttcagcagcagccccaacgagtggctgcagagcgtgcaggccaccatgatcctgagcatcatcttcagcatcctgagcctgttcctgttcttctgccagctgttcaccctgaccaagggcggcagattctacatcaccggcatcttccagatcctggccggcctgtgcgtgatgagcgccgccgccatctacaccgtgagacaccccgagtggcacctgaacagcgactacagcttccccctggccctgctgagcggcgtgatctacgtgatcctgagaaagagagagtag

SEQ ID NO: 92772 - DNA, 1413 bp, synthetic construct
  misc_feature 1..1413: note = Description of Artificial Sequence: Synthetic coding sequence
  source 1..1413: mol_type = other DNA
atgagccaccaccccagcggcctgagagccggcttcagcagcaccagctacagaagaaccttcggccccccccccagcctgagccccggcgccttcagctacagcagcagcagcagattcagcagcagcagactgctgggcagcgccagccccagcagcagcgtgagactgggcagcttcagaagccccagagccggcgccggcgccctgctgagactgcccagcgagagactggacttcagcatggccgaggccctgaaccaggagttcctggccaccagaagcaacgagaagcaggagctgcaggagctgaacgacagattcgccaacttcatcgagaaggtgagattcctggagcagcagaacgccgccctgagaggcgagctgagccaggccagaggccaggagcccgccagagccgaccagctgtgccagcaggagctgagagagctgagaagagagctggagctgctgggcagagagagagacagagtgcaggtggagagagacggcctggccgaggacctggccgccctgaagcagagactggaggaggagaccagaaagagagaggacgccgagcacaacctggtgctgttcagaaaggacgtggacgacgccaccctgagcagactggagctggagagaaagatcgagagcctgatggacgagatcgagttcctgaagaagctgcacgaggaggagctgagagacctgcaggtgagcgtggagagccagcaggtgcagcaggtggaggtggaggccaccgtgaagcccgagctgaccgccgccctgagagacatcagagcccagtacgagagcatcgccgccaagaacctgcaggaggccgaggagtggtacaagagcaagtacgccgacctgagcgacgccgccaacagaaaccacgaggccctgagacaggccaagcaggagatgaacgagagcagaagacagatccagagcctgacctgcgaggtggacggcctgagaggcaccaacgaggccctgctgagacagctgagagagctggaggagcagttcgccctggaggccggcggctaccaggccggcgccgccagactggaggaggagctgagacagctgaaggaggagatggccagacacctgagagagtaccaggagctgctgaacgtgaagatggccctggacatcgagatcgccacctacagaaagctgctggagggcgaggagagcagaatcagcgtgcccgtgcacagcttcgccagcctgaacatcaagaccaccgtgcccgaggtggagcccccccaggacagccacagcagaaagaccgtgctgatcaagaccatcgagaccagaaacggcgaggtggtgaccgagagccagaaggagcagagaagcgagctggacaagagcagcgcccacagctactag

SEQ ID NO: 92773 - DNA, 603 bp, synthetic construct
  misc_feature 1..603: note = Description of Artificial Sequence: Synthetic coding sequence
  source 1..603: mol_type = other DNA
atgggccaggagttcagctgggaggaggccgaggccgccggcgagatcgacgtggccgagctgcaggagtggtacaagaagttcgtgatggagtgccccagcggcaccctgttcatgcacgagttcaagagattcttcaaggtgaccgacgacgaggaggccagccagtacgtggagggcatgttcagagccttcgacaagaacggcgacaacaccatcgacttcctggagtacgtggccgccctgaacctggtgctgagaggcaccctggagcacaagctgaagtggaccttcaagatctacgacaaggacggcaacggctgcatcgacagactggagctgctgaacatcgtggagggcatctaccagctgaagaaggcctgcagaagagagctgcagaccgagcagggccagctgctgacccccgaggaggtggtggacagaatcttcctgctggtggacgagaacggcgacggccagctgagcctgaacgagttcgtggagggcgccagaagagacaagtgggtgatgaagatgctgcagatggacatgaaccccagcagctggctggcccagcagagaagaaagagcgccatgttctag

SEQ ID NO: 92774 - DNA, 1104 bp, synthetic construct
  misc_feature 1..1104: note = Description of Artificial Sequence: Synthetic coding sequence
  source 1..1104: mol_type = other DNA
atgtggagcgagggcagatacgagtacgagagaatccccagagagagagccccccccagaagccaccccagcgacggctacaacagactggtgaacatcgtgcccaagaagccccccctgctggacagacccggcgagggcagctacaacagatactacagccacgtggactacagagactacgacgagggcagaagcttcagccacgacagaagaagcggccccccccacagaggcgacgagagcggctacagatggaccagagacgaccacagcgccagcagacagcccgagtacagagacatgagagacggcttcagaagaaagagcttctacagcagccactacgccagagagagaagcccctacaagagagacaacaccttcttcagagagagccccgtgggcagaaaggacagcccccacagcagaagcggcagcagcgtgagcagcagaagctacagccccgagagaagcaagagctacagcttccaccagagccagcacagaaagagcgtgagacccggcgccagctacaagagacagaacgagggcaaccccgagagagacaaggagagacccgtgcagagcctgaagaccagcagagacaccagccccagcagcggcagcgccgtgagcagcagcaaggtgctggacaagcccagcagactgaccgagaaggagctggccgaggccgccagcaagtgggccgccgagaagctggagaagagcgacgagagcaacctgcccgagatcagcgagtacgaggccggcagcaccgcccccctgttcaccgaccagcccgaggagcccgagagcaacaccacccacggcatcgagctgttcgaggacagccagctgaccaccagaagcaaggccatcgccagcaagaccaaggagatcgagcaggtgtacagacaggactgcgagaccttcggcatggtggtgaagatgctgatcgagaaggaccccagcctggagaagagcatccagttcgccctgagacagaacctgcacgagatcggcgagagatgcgtggaggagctgaagcacttcatcgccgagtacgacaccagcacccaggacttcggcgagcccttctag

SEQ ID NO: 92775 - DNA, 1377 bp, synthetic construct
  misc_feature 1..1377: note = Description of Artificial Sequence: Synthetic coding sequence
  source 1..1377: mol_type = other DNA
atgtggagcgagggcagatacgagtacgagagaatccccagagagagagccccccccagaagccaccccagcgacggctacaacagactggtgaacatcgtgcccaagaagccccccctgctggacagacccggcgagggcagctacaacagatactacagccacgtggactacagagactacgacgagggcagaagcttcagccacgacagaagaagcggccccccccacagaggcgacgagagcggctacagatggaccagagacgaccacagcgccagcagacagcccgagtacagagacatgagagacggcttcagaagaaagagcttctacagcagccactacgccagagagagaagcccctacaagagagacaacaccttcttcagagagagccccgtgggcagaaaggacagcccccacagcagaagcggcagcagcgtgagcagcagaagctacagccccgagagaagcaagagctacagcttccaccagagccagcacagaaagagcgtgagacccggcgccagctacaagagacagaacgagggcaaccccgagagagacaaggagagacccgtgcagagcctgaagaccagcagagacaccagccccagcagcggcagcgccgtgagcagcagcaaggtgctggacaagcccagcagactgaccgagaaggagctggccgaggccgccagcaagtgggccgccgagaagctggagaagagcgacgagagcaacctgcccgagatcagcgagtacgaggccggcagcaccgcccccctgttcaccgaccagcccgaggagcccgagagcaacaccacccacggcatcgagctgttcgaggacagccagctgaccaccagaagcaaggccatcgccagcaagaccaaggagatcgagcaggtgtacagacaggactgcgagaccttcggcatggtggtgaagatgctgatcgagaaggaccccagcctggagaagagcatccagttcgccctgagacagaacctgcacgagatcgagagcgccggccagacctggcagcaggtgccccccgtgagaaacaccgagatggaccacgacggcacccccgagaacgagggcgaggagaccgcccagagcgccccccagcccccccaggccccccagcccctgcagcccagaaagaagagagtgagaagaaccacccagctgagaagaaccaccggcgcccccgacatcacctggggcatgctgaagaagaccacccaggaggccgagagaatcctgctgagaacccagacccccttcacccccgagaacctgttcctggccatgctgagcgtggtgcactgcaacagcagaaaggacgtgaagcccgagaacaagcagtag

SEQ ID NO: 92776 - DNA, 1125 bp, synthetic construct
  misc_feature 1..1125: note = Description of Artificial Sequence: Synthetic coding sequence
  source 1..1125: mol_type = other DNA
atggcctacagaagagacgagatgtggagcgagggcagatacgagtacgagagaatccccagagagagagccccccccagaagccaccccagcgacggctacaacagactggtgaacatcgtgcccaagaagccccccctgctggacagacccggcgagggcagctacaacagatactacagccacgtggactacagagactacgacgagggcagaagcttcagccacgacagaagaagcggccccccccacagaggcgacgagagcggctacagatggaccagagacgaccacagcgccagcagacagcccgagtacagagacatgagagacggcttcagaagaaagagcttctacagcagccactacgccagagagagaagcccctacaagagagacaacaccttcttcagagagagccccgtgggcagaaaggacagcccccacagcagaagcggcagcagcgtgagcagcagaagctacagccccgagagaagcaagagctacagcttccaccagagccagcacagaaagagcgtgagacccggcgccagctacaagagacagaacgagggcaaccccgagagagacaaggagagacccgtgcagagcctgaagaccagcagagacaccagccccagcagcggcagcgccgtgagcagcagcaaggtgctggacaagcccagcagactgaccgagaaggagctggccgaggccgccagcaagtgggccgccgagaagctggagaagagcgacgagagcaacctgcccgagatcagcgagtacgaggccggcagcaccgcccccctgttcaccgaccagcccgaggagcccgagagcaacaccacccacggcatcgagctgttcgaggacagccagctgaccaccagaagcaaggccatcgccagcaagaccaaggagatcgagcaggtgtacagacaggactgcgagaccttcggcatggtggtgaagatgctgatcgagaaggaccccagcctggagaagagcatccagttcgccctgagacagaacctgcacgagatcggcgagagatgcgtggaggagctgaagcacttcatcgccgagtacgacaccagcacccaggacttcggcgagcccttctag

SEQ ID NO: 92777 - DNA, 1305 bp, synthetic construct
  misc_feature 1..1305: note = Description of Artificial Sequence: Synthetic coding sequence
  source 1..1305: mol_type = other DNA
atgtggagcgagggcagatacgagtacgagagaatccccagagagagagccccccccagaagccaccccagcgacgagagcggctacagatggaccagagacgaccacagcgccagcagacagcccgagtacagagacatgagagacggcttcagaagaaagagcttctacagcagccactacgccagagagagaagcccctacaagagagacaacaccttcttcagagagagccccgtgggcagaaaggacagcccccacagcagaagcggcagcagcgtgagcagcagaagctacagccccgagagaagcaagagctacagcttccaccagagccagcacagaaagagcgtgagacccggcgccagctacaagagacagaacgagggcaaccccgagagagacaaggagagacccgtgcagagcctgaagaccagcagagacaccagccccagcagcggcagcgccgtgagcagcagcaaggtgctggacaagcccagcagactgaccgagaaggagctggccgaggccgccagcaagtgggccgccgagaagctggagaagagcgacgagagcaacctgcccgagatcagcgagtacgaggccggcagcaccgcccccctgttcaccgaccagcccgaggagcccgagagcaacaccacccacggcatcgagctgttcgaggacagccagctgaccaccagaagcaaggccatcgccagcaagaccaaggagatcgagcaggtgtacagacaggactgcgagaccttcggcatggtggtgaagatgctgatcgagaaggaccccagcctggagaagagcatccagttcgccctgagacagaacctgcacgagatcgagagcgccggccagacctggcagcaggtgccccccgtgagaaacaccgagatggaccacgacggcacccccgagaacgagggcgaggagaccgcccagagcgccctgttcggcttccagcacgacgccagcaaccacaccatcgtgggcctgggccccaaccaggtgcccgagatgaaggagaccaccctgcaggccccccagcccccccaggccccccagcccctgcagcccagaaagaagagagtgagaagaaccacccagctgagaagaaccaccggcgcccccgacatcacctggggcatgctgaagaagaccacccaggaggccgagagaatcctgctgagaacccagacccccttcacccccgagaacctgttcctggccatgctgagcgtggtgcactgcaacagcagaaaggacgtgaagcccgagaacaagcagtag

SEQ ID NO: 92778 - DNA, 1047 bp, synthetic construct
  misc_feature 1..1047: note = Description of Artificial Sequence: Synthetic coding sequence
  source 1..1047: mol_type = other DNA
atgtggagcgagggcagatacgagtacgagagaatccccagagagagagccccccccagaagccaccccagcgacggctacaacagactggtgaacatcgtgcccaagaagccccccctgctggacagacccggcgagggcagctacaacagatactacagccacgtggactacagagactacgacgagggcagaagcttcagccacgacagaagaagcggccccccccacagaggcgacgagagcggctacagatggaccagagacgaccacagcgccagcagacagcccgagtacagagacatgagagacggcttcagaagaaagagcttctacagcagccactacgccagagagagaagcccctacaagagagacaacaccttcttcagagagagccccgtgggcagaaaggacagcccccacagcagaagcggcagcagcgtgagcagcagaagctacagccccgagagaagcaagagctacagcttccaccagagccagcacagaaacaaggagagacccgtgcagagcctgaagaccagcagagacaccagccccagcagcggcagcgccgtgagcagcagcaaggtgctggacaagcccagcagactgaccgagaaggagctggccgaggccgccagcaagtgggccgccgagaagctggagaagagcgacgagagcaacctgcccgagatcagcgagtacgaggccggcagcaccgcccccctgttcaccgaccagcccgaggagcccgagagcaacaccacccacggcatcgagctgttcgaggacagccagctgaccaccagaagcaaggccatcgccagcaagaccaaggagatcgagcaggtgtacagacaggactgcgagaccttcggcatggtggtgaagatgctgatcgagaaggaccccagcctggagaagagcatccagttcgccctgagacagaacctgcacgagatcggcgagagatgcgtggaggagctgaagcacttcatcgccgagtacgacaccagcacccaggacttcggcgagcccttctag

SEQ ID NO: 92779 - DNA, 486 bp, synthetic construct
  misc_feature 1..486: note = Description of Artificial Sequence: Synthetic coding sequence
  source 1..486: mol_type = other DNA
atggcctacagaagagacgagatgtggagcgagggcagatacgagtacgagagaatccccagagagagagccccccccagaagccaccccagcgacggctacaacagactggtgaacatcgtgcccaagaagccccccctgctggacagacccggcgagggcagctacaacagatactacagccacgtggactacagagactacgacgagggcagaagcttcagccacgacagaagaagcggccccccccacagaggcgacgagagcggctacagatggaccagagacgaccacagcgccagcagacagcccgagtacagagacatgagagacggcttcagaagaaagagcttctacagcagccactacgccagagagagaagcccctacaagagagacaacaccttcttcagagagagccccgtgggcagaaaggacagcccccacagcagaagcggcagcagcgtgagcagcagaagctactag

SEQ ID NO: 92780 - DNA, 507 bp, synthetic construct
  misc_feature 1..507: note = Description of Artificial Sequence: Synthetic coding sequence
  source 1..507: mol_type = other DNA
atgtggagcgagggcagatacgagtacgagagaatccccagagagagagccccccccagaagccaccccagcgacggctacaacagactggtgaacatcgtgcccaagaagccccccctgctggacagacccggcgagggcagctacaacagatactacagccacgtggactacagagactacgacgagggcagaagcttcagccacgacagaagaagcggccccccccacagaggcgacgagagcggctacagatggaccagagacgaccacagcgccagcagacagcccgagtacagagacatgagagacggcttcagaagaaagagcttctacagcagccactacgccagagagagaagcccctacaagagagacaacaccttcttcagagagagccccgtgggcagaaaggacagcccccacagcagaagcggcagcagcgtgagcagcagaagctacagccccgagagaagcaagagctacagcttccaccagagccagtag

SEQ ID NO: 92781 - DNA, 960 bp, synthetic construct
  misc_feature 1..960: note = Description of Artificial Sequence: Synthetic coding sequence
  source 1..960: mol_type = other DNA
atggcctacagaagagacgagatgtggagcgagggcagatacgagtacgagagaatccccagagagagagccccccccagaagccaccccagcgacgagagcggctacagatggaccagagacgaccacagcgccagcagacagcccgagtacagagacatgagagacggcttcagaagaaagagcttctacagcagccactacgccagagagagaagcccctacaagagagacaacaccttcttcagagagagccccgtgggcagaaaggacagcccccacagcagaagcggcagcagcgtgagcagcagaagctacagccccgagagaagcaagagctacagcttccaccagagccagcacagaaagagcgtgagacccggcgccagctacaagagacagaacgagggcaaccccgagagagacaaggagagacccgtgcagagcctgaagaccagcagagacaccagccccagcagcggcagcgccgtgagcagcagcaaggtgctggacaagcccagcagactgaccgagaaggagctggccgaggccgccagcaagtgggccgccgagaagctggagaagagcgacgagagcaacctgcccgagatcagcgagtacgaggccggcagcaccgcccccctgttcaccgaccagcccgaggagcccgagagcaacaccacccacggcatcgagctgttcgaggacagccagctgaccaccagaagcaaggccatcgccagcaagaccaaggagatcgagcaggtgtacagacaggactgcgagaccttcggcatggtggtgaagatgctgatcgagaaggaccccagcctggagaagagcatccagttcgccctgagacagaacctgcacgagatcggcgagagatgcgtggaggagctgaagcacttcatcgccgagtacgacaccagcacccaggacttcggcgagcccttctag

SEQ ID NO: 92782 - DNA, 5271 bp, synthetic construct
  misc_feature 1..5271: note = Description of Artificial Sequence: Synthetic coding sequence
  source 1..5271: mol_type = other DNA
atgaacagcctgttcagaaagagaaacaagggcaagtacagccccaccgtgcagaccagaagcatcagcaacaaggagctgagcgagctgatcgagcagctgcagaagaacgccgaccaggtggagaagaacatcgtggacaccgaggccaagatgcagagcgacctggccagactgcaggagggcagacagcccgagcacagagacgtgaccctgcagaaggtgctggacagcgagaagctgctgtacgtgctggaggccgacgccgccatcgccaagcacatgaagcacccccagggcgacatgatcgccgaggacatcagacagctgaaggagagagtgaccaacctgagaggcaagcacaagcagatctacagactggccgtgaaggaggtggacccccaggtgaactgggccgccctggtggaggagaagctggacaagctgaacaaccagagcttcggcaccgacctgcccctggtggaccaccaggtggaggagcacaacatcttccacaacgaggtgaaggccatcggcccccacctggccaaggacggcgacaaggagcagaacagcgagctgagagccaagtaccagaagctgctggccgccagccaggccagacagcagcacctgagcagcctgcaggactacatgcagagatgcaccaacgagctgtactggctggaccagcaggccaagggcagaatgcagtacgactggagcgacagaaacctggactaccccagcagaagaagacagtacgagaacttcatcaacagaaacctggaggccaaggaggagagaatcaacaagctgcacagcgagggcgaccagctgctggccgccgagcaccccggcagaaacagcatcgaggcccacatggaggccgtgcacgccgactggaaggagtacctgaacctgctgatctgcgaggagagccacctgaagtacatggaggactaccaccagttccacgaggacgtgaaggacgcccaggagctgctgagaaaggtggacagcgacctgaaccagaagtacggccccgacttcaaggacagataccagatcgagctgctgctgagagagctggacgaccaggagaaggtgctggacaagtacgaggacgtggtgcagggcctgcagaagagaggccagcaggtggtgcccctgaagtacagaagagagacccccctgaagcccatccccgtggaggccctgtgcgacttcgagggcgagcagggcctgatcagcagaggctacagctacaccctgcagaagaacaacggcgagagctgggagctgatggacagcgccggcaacaagctgatcgcccccgccgtgtgcttcgtgatcccccccaccgaccccgaggccctggccctggccgacagcctgggcagccagtacagaagcgtgagacagaaggccgccggcagcaagagaaccctgcagcagagatacgaggtgctgaagaccgagaaccccggcgacgccagcgacctgcagggcagacagctgctggccggcctggacaaggtggccagcgacctggacagacaggagaaggccatcaccggcatcctgagaccccccctggagcagggcagagccgtgcaggacagcgccgagagagccaaggacctgaagaacatcaccaacgagctgctgagaatcgagcccgagaagaccagaagcaccgccgagggcgaggccttcatccaggccctgcccggcagcggcaccacccccctgctgagaaccagagtggaggacaccaacagaaagtacgagcacctgctgcagctgctggacctggcccaggagaaggtggacgtggccaacagactggagaagagcctgcagcagagctgggagctgctggccacccacgagaaccacctgaaccaggacgacaccgtgcccgagagcagcagagtgctggacagcaagggccaggagctggccgccatggcctgcgagctgcaggcccagaagagcctgctgggcgaggtggagcagaacctgcaggccgccaagcagtgcagcagcaccctggccagcagattccaggagcactgccccgacctggagagacaggaggccgaggtgcacaagctgggccagagattcaacaacctgagacagcaggtggagagaagagcccagagcctgcagagcgccaaggccgcctacgagcacttccacagaggccacgaccacgtgctgcagttcctggtgagcatccccagctacgagccccaggagaccgacagcctgagccagatggagaccaagctgaagaaccagaagaacctgctggacgagatcgccagcagagagcaggaggtgcagaagatctgcgccaacagccagcagtaccagcaggccgtgaaggactacgagctggaggccgagaagctgagaagcctgctggacctggagaacggcagaagaagccacgtgagcaagagagccagactgcagagccccgccaccaaggtgaaggaggaggaggccgccctggccgccaagttcaccgaggtgtacgccatcaacagacagagactgcagaacctggagttcgccctgaacctgctgagacagcagcccgaggtggaggtgacccacgagaccctgcagagaaacagacccgacagcggcgtggaggaggcctggaagatcagaaaggagctggacgaggagaccgagagaagaagacagctggagaacgaggtgaagagcacccaggaggagatctggaccctgagaaaccagggcccccaggagagcgtggtgagaaaggaggtgctgaagaaggtgcccgaccccgtgctggaggagagcttccagcagctgcagagaaccctggccgaggagcagcacaagaaccagctgctgcaggaggagctggaggccctgcagctgcagctgagagccctggagcaggagaccagagacggcggccaggagtacgtggtgaaggaggtgctgagaatcgagcccgacagagcccaggccgacgaggtgctgcagctgagagaggagctggaggccctgagaagacagaagggcgccagagaggccgaggtgctgctgctgcagcagagagtggccgccctggccgaggagaagagcagagcccaggagaaggtgaccgagaaggaggtggtgaagctgcagaacgacccccagctggaggccgagtaccagcagctgcaggaggaccaccagagacaggaccagctgagagagaagcaggaggaggagctgagcttcctgcaggacaagctgaagagactggagaaggagagagccatggccgagggcaagatcaccgtgaaggaggtgctgaaggtggagaaggacgccgccaccgagagagaggtgagcgacctgaccagacagtacgaggacgaggccgccaaggccagagccagccagagagagaagaccgagctgctgagaaagatctgggccctggaggaggagaacgccaaggtggtggtgcaggagaaggtgagagagatcgtgagacccgaccccaaggccgagagcgaggtggccaacctgagactggagctggtggagcaggagagaaagtacagaggcgccgaggagcagctgagaagctaccagagcgagctggaggccctgagaagaagaggcccccaggtggaggtgaaggaggtgaccaaggaggtgatcaagtacaagaccgaccccgagatggagaaggagctgcagagactgagagaggagatcgtggacaagaccagactgatcgagagatgcgacctggagatctaccagctgaagaaggagatccaggccctgaaggacaccaagccccaggtgcagaccaaggaggtggtgcaggagatcctgcagttccaggaggacccccagaccaaggaggaggtggccagcctgagagccaagctgagcgaggagcagaagaagcaggtggacctggagagagagagagccagccaggaggagcagatcgccagaaaggaggaggagctgagcagagtgaaggagagagtggtgcagcaggaggtggtgagatacgaggaggagcccggcctgagagccgaggccagcgccttcgccgagagcatcgacgtggagctgagacagatcgacaagctgagagccgagctgagaagactgcagagaagaagaaccgagctggagagacagctggaggagctggagagagagagacaggccagaagagaggccgagagagaggtgcagagactgcagcagagactggccgccctggagcaggaggaggccgaggccagagagaaggtgacccacacccagaaggtggtgctgcagcaggacccccagcaggccagagagcacgccctgctgagactgcagctggaggaggagcagcacagaagacagctgctggagggcgagctggagaccctgagaagaaagctggccgccctggagaaggccgaggtgaaggagaaggtggtgctgagcgagagcgtgcaggtggagaagggcgacaccgagcaggagatccagagactgaagagcagcctggaggaggagagcagaagcaagagagagctggacgtggaggtgagcagactggaggccagactgagcgagctggagttccacaacagcaagagcagcaaggagctggacttcctgagagaggagaaccacaagctgcagctggagagacagaacctgcagctggagaccagaagactgcagagcgagatcaacatggccgccaccgagaccagagacctgagaaacatgaccgtggccgacagcggcaccaaccacgacagcagactgtggagcctggagagagagctggacgacctgaagagactgagcaaggacaaggacctggagatcgacgagctgcagaagagactgggcagcgtggccgtgaagagagagcagagagagaaccacctgagaagaagcatcgtggtgatccaccccgacaccggcagagagctgagccccgaggaggcccacagagccggcctgatcgactggaacatgttcgtgaagctgagaagccaggagtgcgactgggaggagatcagcgtgaagggccccaacggcgagagcagcgtgatccacgacagaaagagcggcaagaagttcagcatcgaggaggccctgcagagcggcagactgacccccgcccagtacgacagatacgtgaacaaggacatgagcatccaggagctggccgtgctggtgagcggccagaagtag

SEQ ID NO: 92783 - DNA, 4440 bp, synthetic construct
  misc_feature 1..4440: note = Description of Artificial Sequence: Synthetic coding sequence
  source 1..4440: mol_type = other DNA
atggccaagagaagcagaggccccggcagaagatgcctgctggccctggtgctgttctgcgcctggggcaccctggccgtggtggcccagaagcccggcgccggctgccccagcagatgcctgtgcttcagaaccaccgtgagatgcatgcacctgctgctggaggccgtgcccgccgtggccccccagaccagcatcctggacctgagattcaacagaatcagagagatccagcccggcgccttcagaagactgagaaacctgaacaccctgctgctgaacaacaaccagatcaagagaatccccagcggcgccttcgaggacctggagaacctgaagtacctgtacctgtacaagaacgagatccagagcatcgacagacaggccttcaagggcctggccagcctggagcagctgtacctgcacttcaaccagatcgagaccctggaccccgacagcttccagcacctgcccaagctggagagactgttcctgcacaacaacagaatcacccacctggtgcccggcaccttcaaccacctggagagcatgaagagactgagactggacagcaacaccctgcactgcgactgcgagatcctgtggctggccgacctgctgaagacctacgccgagagcggcaacgcccaggccgccgccatctgcgagtaccccagaagaatccagggcagaagcgtggccaccatcacccccgaggagctgaactgcgagagacccagaatcaccagcgagccccaggacgccgacgtgaccagcggcaacaccgtgtacttcacctgcagagccgagggcaaccccaagcccgagatcatctggctgagaaacaacaacgagctgagcatgaagaccgacagcagactgaacctgctggacgacggcaccctgatgatccagaacacccaggagaccgaccagggcatctaccagtgcatggccaagaacgtggccggcgaggtgaagacccaggaggtgaccctgagatacttcggcagccccgccagacccaccttcgtgatccagccccagaacaccgaggtgctggtgggcgagagcgtgaccctggagtgcagcgccaccggccaccccccccccagaatcagctggaccagaggcgacagaacccccctgcccgtggaccccagagtgaacatcacccccagcggcggcctgtacatccagaacgtggtgcagggcgacagcggcgagtacgcctgcagcgccaccaacaacatcgacagcgtgcacgccaccgccttcatcatcgtgcaggccctgccccagttcaccgtgaccccccaggacagagtggtgatcgagggccagaccgtggacttccagtgcgaggccaagggcaaccccccccccgtgatcgcctggaccaagggcggcagccagctgagcgtggacagaagacacctggtgctgagcagcggcaccctgagaatcagcggcgtggccctgcacgaccagggccagtacgagtgccaggccgtgaacatcatcggcagccagaaggtggtggcccacctgaccgtgcagcccagagtgacccccgtgttcgccagcatccccagcgacaccaccgtggaggtgggcgccaacgtgcagctgccctgcagcagccagggcgagcccgagcccgccatcacctggaacaaggacggcgtgcaggtgaccgagagcggcaagttccacatcagccccgagggcttcctgaccatcaacgacgtgggccccgccgacgccggcagatacgagtgcgtggccagaaacaccatcggcagcgccagcgtgagcatggtgctgagcgtgaacgtgcccgacgtgagcagaaacggcgaccccttcgtggccaccagcatcgtggaggccatcgccaccgtggacagagccatcaacagcaccagaacccacctgttcgacagcagacccagaagccccaacgacctgctggccctgttcagataccccagagacccctacaccgtggagcaggccagagccggcgagatcttcgagagaaccctgcagctgatccaggagcacgtgcagcacggcctgatggtggacctgaacggcaccagctaccactacaacgacctggtgagcccccagtacctgaacctgatcgccaacctgagcggctgcaccgcccacagaagagtgaacaactgcagcgacatgtgcttccaccagaagtacagaacccacgacggcacctgcaacaacctgcagcaccccatgtggggcgccagcctgaccgccttcgagagactgctgaagagcgtgtacgagaacggcttcaacacccccagaggcatcaacccccacagactgtacaacggccacgccctgcccatgcccagactggtgagcaccaccctgatcggcaccgagaccgtgacccccgacgagcagttcacccacatgctgatgcagtggggccagttcctggaccacgacctggacagcaccgtggtggccctgagccaggccagattcagcgacggccagcactgcagcaacgtgtgcagcaacgaccccccctgcttcagcgtgatgatcccccccaacgacagcagagccagaagcggcgccagatgcatgttcttcgtgagaagcagccccgtgtgcggcagcggcatgaccagcctgctgatgaacagcgtgtaccccagagagcagatcaaccagctgaccagctacatcgacgccagcaacgtgtacggcagcaccgagcacgaggccagaagcatcagagacctggccagccacagaggcctgctgagacagggcatcgtgcagagaagcggcaagcccctgctgcccttcgccaccggcccccccaccgagtgcatgagagacgagaacgagagccccatcccctgcttcctggccggcgaccacagagccaacgagcagctgggcctgaccagcatgcacaccctgtggttcagagagcacaacagaatcgccaccgagctgctgaagctgaacccccactgggacggcgacaccatctactacgagaccagaaagatcgtgggcgccgagatccagcacatcacctaccagcactggctgcccaagatcctgggcgaggtgggcatgagaaccctgggcgagtaccacggctacgaccccggcatcaacgccggcatcttcaacgccttcgccaccgccgccttcagattcggccacaccctggtgaaccccctgctgtacagactggacgagaacttccagcccatcgcccaggaccacctgcccctgcacaaggccttcttcagccccttcagaatcgtgaacgagggcggcatcgaccccctgctgagaggcctgttcggcgtggccggcaagatgagagtgcccagccagctgctgaacaccgagctgaccgagagactgttcagcatggcccacaccgtggccctggacctggccgccatcaacatccagagaggcagagaccacggcatccccccctaccacgactacagagtgtactgcaacctgagcgccgcccacaccttcgaggacctgaagaacgagatcaagaaccccgagatcagagagaagctgaagagactgtacggcagcaccctgaacatcgacctgttccccgccctggtggtggaggacctggtgcccggcagcagactgggccccaccctgatgtgcctgctgagcacccagttcaagagactgagagacggcgacagactgtggtacgagaaccccggcgtgttcagccccgcccagctgacccagatcaagcagaccagcctggccagaatcctgtgcgacaacgccgacaacatcaccagagtgcagagcgacgtgttcagagtggccgagttcccccacggctacggcagctgcgacgagatccccagagtggacctgagagtgtggcaggactgctgcgaggactgcagaaccagaggccagttcaacgccttcagctaccacttcagaggcagaagaagcctggagttcagctaccaggaggacaagcccaccaagaagaccagacccagaaagatccccagcgtgggcagacagggcgagcacctgagcaacagcaccagcgccttcagcaccagaagcgacgccagcggcaccaacgacttcagagagttcgtgctggagatgcagaagaccatcaccgacctgagaacccagatcaagaagctggagagcagactgagcaccaccgagtgcgtggacgccggcggcgagagccacgccaacaacaccaagtggaagaaggacgcctgcaccatctgcgagtgcaaggacggccaggtgacctgcttcgtggaggcctgcccccccgccacctgcgccgtgcccgtgaacatccccggcgcctgctgccccgtgtgcctgcagaagagagccgaggagaagccctag

SEQ ID NO: 92784 - DNA, 2172 bp, synthetic construct
  misc_feature 1..2172: note = Description of Artificial Sequence: Synthetic coding sequence
  source 1..2172: mol_type = other DNA
tgaagaggccccggcagaagatgcctgctggccctggtgctgttctgcgcctggggcaccctggccgtggtggcccagaagcccggcgccggctgccccagcagatgcctgtgcttcagaaccaccgtgagatgcatgcacctgctgctggaggccgtgcccgccgtggccccccagaccagcatcctggacctgagattcaacagaatcagagagatccagcccggcgccttcagaagactgagaaacctgaacaccctgctgctgaacaacaaccagatcaagagaatccccagcggcgccttcgaggacctggagaacctgaagtacctgtacctgtacaagaacgagatccagagcatcgacagacaggccttcaagggcctggccagcctggagcagctgtacctgcacttcaaccagatcgagaccctggaccccgacagcttccagcacctgcccaagctggagagactgttcctgcacaacaacagaatcacccacctggtgcccggcaccttcaaccacctggagagcatgaagagactgagactggacagcaacaccctgcactgcgactgcgagatcctgtggctggccgacctgctgaagacctacgccgagagcggcaacgcccaggccgccgccatctgcgagtaccccagaagaatccagggcagaagcgtggccaccatcacccccgaggagctgaactgcgagagacccagaatcaccagcgagccccaggacgccgacgtgaccagcggcaacaccgtgtacttcacctgcagagccgagggcaaccccaagcccgagatcatctggctgagaaacaacaacgagctgagcatgaagaccgacagcagactgaacctgctggacgacggcaccctgatgatccagaacacccaggagaccgaccagggcatctaccagtgcatggccaagaacgtggccggcgaggtgaagacccaggaggtgaccctgagatacttcggcagccccgccagacccaccttcgtgatccagccccagaacaccgaggtgctggtgggcgagagcgtgaccctggagtgcagcgccaccggccaccccccccccagaatcagctggaccagaggcgacagaacccccctgcccgtggaccccagagtgaacatcacccccagcggcggcctgtacatccagaacgtggtgcagggcgacagcggcgagtacgcctgcagcgccaccaacaacatcgacagcgtgcacgccaccgccttcatcatcgtgcaggccctgccccagttcaccgtgaccccccaggacagagtggtgatcgagggccagaccgtggacttccagtgcgaggccaagggcaaccccccccccgtgatcgcctggaccaagggcggcagccagctgagcgtggacagaagacacctggtgctgagcagcggcaccctgagaatcagcggcgtggccctgcacgaccagggccagtacgagtgccaggccgtgaacatcatcggcagccagaaggtggtggcccacctgaccgtgcagcccagagtgacccccgtgttcgccagcatccccagcgacaccaccgtggaggtgggcgccaacgtgcagctgccctgcagcagccagggcgagcccgagcccgccatcacctggaacaaggacggcgtgcaggtgaccgagagcggcaagttccacatcagccccgagggcttcctgaccatcaacgacgtgggccccgccgacgccggcagatacgagtgcgtggccagaaacaccatcggcagcgccagcgtgagcatggtgctgagcgtgaacgtgcccgacgtgagcagaaacggcgaccccttcgtggccaccagcatcgtggaggccatcgccaccgtggacagagccatcaacagcaccagaacccacctgttcgacagcagacccagaagccccaacgacctgctggccctgttcagataccccagagacccctacaccgtggagcaggccagagccggcgagatcttcgagagaaccctgcagctgatccaggagcacgtgcagcacggcctgatggtggacctgaacggcaccagccagtgccagagcctgttcttcctgctgcacggcctgagcaacggcgtggagcacgccagcgtgaagagccacagctag

SEQ ID NO: 92785 - DNA, 771 bp, synthetic construct
  misc_feature 1..771: note = Description of Artificial Sequence: Synthetic coding sequence
  source 1..771: mol_type = other DNA
atggccgccgccgtgggcagactgctgagagccagcgtggccagacacgtgagcgccatcccctggggcatcagcgccaccgccgccctgagacccgccgcctgcggcagaaccagcctgaccaacctgctgtgcagcggcagcagccaggccaagctgttcagcaccagcagcagctgccacgcccccgccgtgacccagcacgccccctacttcaagggcaccgccgtggtgaacggcgagttcaaggacctgagcctggacgacttcaagggcaagtacctggtgctgttcttctaccccctggacttcaccttcgtgtgccccaccgagatcgtggccttcagcgacaaggccaacgagttccacgacgtgaactgcgaggtggtggccgtgagcgtggacagccacttcagccacctggcctggatcaacacccccagaaagaacggcggcctgggccacatgaacatcgccctgctgagcgacctgaccaagcagatcagcagagactacggcgtgctgctggagggcagcggcctggccctgagaggcctgttcatcatcgaccccaacggcgtgatcaagcacctgagcgtgaacgacctgcccgtgggcagaagcgtggaggagaccctgagactggtgaaggccttccagtacgtggagacccacggcgaggtgtgccccgccaactggacccccgacagccccaccatcaagcccagccccgccgccagcaaggagtacttccagaaggtgaaccagtag

SEQ ID NO: 92786 - DNA, 717 bp, synthetic construct
  misc_feature 1..717: note = Description of Artificial Sequence: Synthetic coding sequence
  source 1..717: mol_type = other DNA
atggccgccgccgtgggcagactgctgagagccagcgtggccagacacgtgagcgccatcccctggggcatcagcgccaccgccgccctgagacccgccgcctgcggcagaaccagcctgaccaacctgctgtgcagcggcagcagccaggccccctacttcaagggcaccgccgtggtgaacggcgagttcaaggacctgagcctggacgacttcaagggcaagtacctggtgctgttcttctaccccctggacttcaccttcgtgtgccccaccgagatcgtggccttcagcgacaaggccaacgagttccacgacgtgaactgcgaggtggtggccgtgagcgtggacagccacttcagccacctggcctggatcaacacccccagaaagaacggcggcctgggccacatgaacatcgccctgctgagcgacctgaccaagcagatcagcagagactacggcgtgctgctggagggcagcggcctggccctgagaggcctgttcatcatcgaccccaacggcgtgatcaagcacctgagcgtgaacgacctgcccgtgggcagaagcgtggaggagaccctgagactggtgaaggccttccagtacgtggagacccacggcgaggtgtgccccgccaactggacccccgacagccccaccatcaagcccagccccgccgccagcaaggagtacttccagaaggtgaaccagtag

SEQ ID NO: 92787 - DNA, 645 bp, synthetic construct
  misc_feature 1..645: note = Description of Artificial Sequence: Synthetic coding sequence
  source 1..645: mol_type = other DNA
atgggcctggccggcgtgtgcgccctgagaagaagcgccggctacatcctggtgggcggcgccggcggccagagcgccgccgccgccgccagaagatacagcgagggcgagtgggccagcggcggcgtgagaagcttcagcagagccgccgccgccatggcccccatcaaggtgggcgacgccatccccgccgtggaggtgttcgagggcgagcccggcaacaaggtgaacctggccgagctgttcaagggcaagaagggcgtgctgttcggcgtgcccggcgccttcacccccggctgcagcaagacccacctgcccggcttcgtggagcaggccgaggccctgaaggccaagggcgtgcaggtggtggcctgcctgagcgtgaacgacgccttcgtgaccggcgagtggggcagagcccacaaggccgagggcaaggtgagactgctggccgaccccaccggcgccttcggcaaggagaccgacctgctgctggacgacagcctggtgagcatcttcggcaacagaagactgaagagattcagcatggtggtgcaggacggcatcgtgaaggccctgaacgtggagcccgacggcaccggcctgacctgcagcctggcccccaacatcatcagccagctgtag

SEQ ID NO: 92788 - DNA, 378 bp, synthetic construct
  misc_feature 1..378: note = Description of Artificial Sequence: Synthetic coding sequence
  source 1..378: mol_type = other DNA
atgggcctggccggcgtgtgcgccctgagaagaagcgccggctacatcctggtgggcggcgccggcggccagagcgccgccgccgccgccagaagatacagcgagggcgagtgggccagcggcggcgtgagaagcttcagcagagccgccgccgccatggcccccatcaaggtgagactgctggccgaccccaccggcgccttcggcaaggagaccgacctgctgctggacgacagcctggtgagcatcttcggcaacagaagactgaagagattcagcatggtggtgcaggacggcatcgtgaaggccctgaacgtggagcccgacggcaccggcctgacctgcagcctggcccccaacatcatcagccagctgtag

SEQ ID NO: 92789 - DNA, 513 bp, synthetic construct
  misc_feature 1..513: note = Description of Artificial Sequence: Synthetic coding sequence
  source 1..513: mol_type = other DNA
atgggcctggccggcgtgtgcgccctgagaagaagcgccggctacatcctggtgggcggcgccggcggccagagcgccgccgccgccgccagaagatacagcgagggcgagtgggccagcggcggcgtgagaagcttcagcagagccgccgccgccatggcccccatcaaggtgggcgacgccatccccgccgtggaggtgttcgagggcgagcccggcaacaaggtgaacctggccgagctgttcaagggcaagaagggcgtgctgttcggcgtgcccggcgccttcacccccggctgcagcaaggtgagactgctggccgaccccaccggcgccttcggcaaggagaccgacctgctgctggacgacagcctggtgagcatcttcggcaacagaagactgaagagattcagcatggtggtgcaggacggcatcgtgaaggccctgaacgtggagcccgacggcaccggcctgacctgcagcctggcccccaacatcatcagccagctgtag

SEQ ID NO: 92790 - DNA, 675 bp, synthetic construct
  misc_feature 1..675: note = Description of Artificial Sequence: Synthetic coding sequence
  source 1..675: mol_type = other DNA
atgcccggcggcctgctgctgggcgacgtggcccccaacttcgaggccaacaccaccgtgggcagaatcagattccacgacttcctgggcgacagctggggcatcctgttcagccaccccagagacttcacccccgtgtgcaccaccgagctgggcagagccgccaagctggcccccgagttcgccaagagaaacgtgaagctgatcgccctgagcatcgacagcgtggaggaccacctggcctggagcaaggacatcaacgcctacaactgcgaggagcccaccgagaagctgcccttccccatcatcgacgacagaaacagagagctggccatcctgctgggcatgctggaccccgccgagaaggacgagaagggcatgcccgtgaccgccagagtggtgttcgtgttcggccccgacaagaagctgaagctgagcatcctgtaccccgccaccaccggcagaaacttcgacgagatcctgagagtggtgatcagcctgcagctgaccgccgagaagagagtggccacccccgtggactggaaggacggcgacagcgtgatggtgctgcccaccatccccgaggaggaggccaagaagctgttccccaagggcgtgttcaccaaggagctgcccagcggcaagaagtacctgagatacaccccccagccctag

SEQ ID NO: 92791 - DNA, 3852 bp, synthetic construct
  misc_feature 1..3852: note = Description of Artificial Sequence: Synthetic coding sequence
  source 1..3852: mol_type = other DNA
atgtggggcagcgacagactggccggcgccggcggcggcggcgccgccgtgaccgtggccttcaccaacgccagagactgcttcctgcacctgcccagaagactggtggcccagctgcacctgctgcagaaccaggccatcgaggtggtgtggagccaccagcccgccttcctgagctgggtggagggcagacacttcagcgaccagggcgagaacgtggccgagatcaacagacaggtgggccagaagctgggcctgagcaacggcggccaggtgttcctgaagccctgcagccacgtggtgagctgccagcaggtggaggtggagcccctgagcgccgacgactgggagatcctggagctgcacgccgtgagcctggagcagcacctgctggaccagatcagaatcgtgttccccaaggccatcttccccgtgtgggtggaccagcagacctacatcttcatccagatcgtggccctgatccccgccgccagctacggcagactggagaccgacaccaagctgctgatccagcccaagaccagaagagccaaggagaacaccttcagcaaggccgacgccgagtacaagaagctgcacagctacggcagagaccagaagggcatgatgaaggagctgcagaccaagcagctgcagagcaacaccgtgggcatcaccgagagcaacgagaacgagagcgagatccccgtggacagcagcagcgtggccagcctgtggaccatgatcggcagcatcttcagcttccagagcgagaagaagcaggagaccagctggggcctgaccgagatcaacgccttcaagaacatgcagagcaaggtggtgcccctggacaacatcttcagagtgtgcaagagccagccccccagcatctacaacgccagcgccaccagcgtgttccacaagcactgcgccatccacgtgttcccctgggaccaggagtacttcgacgtggagcccagcttcaccgtgacctacggcaagctggtgaagctgctgagccccaagcagcagcagagcaagaccaagcagaacgtgctgagccccgagaaggagaagcagatgagcgagcccctggaccagaagaagatcagaagcgaccacaacgaggaggacgagaaggcctgcgtgctgcaggtggtgtggaacggcctggaggagctgaacaacgccatcaagtacaccaagaacgtggaggtgctgcacctgggcaaggtgtggatccccgacgacctgagaaagagactgaacatcgagatgcacgccgtggtgagaatcacccccgtggaggtgacccccaagatccccagaagcctgaagctgcagcccagagagaacctgcccaaggacatcagcgaggaggacatcaagaccgtgttctacagctggctgcagcagagcaccaccaccatgctgcccctggtgatcagcgaggaggagttcatcaagctggagaccaaggacggcctgaaggagttcagcctgagcatcgtgcacagctgggagaaggagaaggacaagaacatcttcctgctgagccccaacctgctgcagaagaccaccatccaggtgctgctggaccccatggtgaaggaggagaacagcgaggagatcgacttcatcctgcccttcctgaagctgagcagcctgggcggcgtgaacagcctgggcgtgagcagcctggagcacatcacccacagcctgctgggcagacccctgagcagacagctgatgagcctggtggccggcctgagaaacggcgccctgctgctgaccggcggcaagggcagcggcaagagcaccctggccaaggccatctgcaaggaggccttcgacaagctggacgcccacgtggagagagtggactgcaaggccctgagaggcaagagactggagaacatccagaagaccctggaggtggccttcagcgaggccgtgtggatgcagcccagcgtggtgctgctggacgacctggacctgatcgccggcctgcccgccgtgcccgagcacgagcacagccccgacgccgtgcagagccagagactggcccacgccctgaacgacatgatcaaggagttcatcagcatgggcagcctggtggccctgatcgccaccagccagagccagcagagcctgcaccccctgctggtgagcgcccagggcgtgcacatcttccagtgcgtgcagcacatccagccccccaaccaggagcagagatgcgagatcctgtgcaacgtgatcaagaacaagctggactgcgacatcaacaagttcaccgacctggacctgcagcacgtggccaaggagaccggcggcttcgtggccagagacttcaccgtgctggtggacagagccatccacagcagactgagcagacagagcatcagcaccagagagaagctggtgctgaccaccctggacttccagaaggccctgagaggcttcctgcccgccagcctgagaagcgtgaacctgcacaagcccagagacctgggctgggacaagatcggcggcctgcacgaggtgagacagatcctgatggacaccatccagctgcccgccaagtaccccgagctgttcgccaacctgcccatcagacagagaaccggcatcctgctgtacggcccccccggcaccggcaagaccctgctggccggcgtgatcgccagagagagcagaatgaacttcatcagcgtgaagggccccgagctgctgagcaagtacatcggcgccagcgagcaggccgtgagagacatcttcatcagagcccaggccgccaagccctgcatcctgttcttcgacgagttcgagagcatcgcccccagaagaggccacgacaacaccggcgtgaccgacagagtggtgaaccagctgctgacccagctggacggcgtggagggcctgcagggcgtgtacgtgctggccgccaccagcagacccgacctgatcgaccccgccctgctgagacccggcagactggacaagtgcgtgtactgccccccccccgaccaggtgagcagactggagatcctgaacgtgctgagcgacagcctgcccctggccgacgacgtggacctgcagcacgtggccagcgtgaccgacagcttcaccggcgccgacctgaaggccctgctgtacaacgcccagctggaggccctgcacggcatgctgctgagcagcggcctgcaggacggcagcagcagcagcgacagcgacctgagcctgagcagcatggtgttcctgaaccacagcagcggcagcgacgacagcgccggcgacggcgagtgcggcctggaccagagcctggtgagcctggagatgagcgagatcctgcccgacgagagcaagttcaacatgtacagactgtacttcggcagcagctacgagagcgagctgggcaacggcaccagcagcgacctgagcagccagtgcctgagcgcccccagcagcatgacccaggacctgcccggcgtgcccggcaaggaccagctgttcagccagccccccgtgctgagaaccgccagccaggagggctgccaggagctgacccaggagcagagagaccagctgagagccgacatcagcatcatcaagggcagatacagaagccagagcggcgaggacgagagcatgaaccagcccggccccatcaagaccagactggccatcagccagagccacctgatgaccgccctgggccacaccagacccagcatcagcgaggacgactggaagaacttcgccgagctgtacgagagcttccagaaccccaagagaagaaagaaccagagcggcaccatgttcagacccggccagaaggtgaccctggcctag

SEQ ID NO: 92792 - DNA, 3681 bp, synthetic construct
  misc_feature 1..3681: note = Description of Artificial Sequence: Synthetic coding sequence
  source 1..3681: mol_type = other DNA
atgtggggcagcgacagactggccggcgccggcggcggcggcgccgccgtgaccgtggccttcaccaacgccagagactgcttcctgcacctgcccagaagactggtggcccagctgcacctgctgcagaaccaggccatcgaggtggtgtggagccaccagcccgccttcctgagctgggtggagggcagacacttcagcgaccagggcgagaacgtggccgagatcaacagacaggtgggccagaagctgggcctgagcaacggcggccaggtgttcctgaagccctgcagccacgtggtgagctgccagcaggtggaggtggagcccctgagcgccgacgactgggagatcctggagctgcacgccgtgagcctggagcagcacctgctggaccagatcagaatcgtgttccccaaggccatcttccccgtgtgggtggaccagcagacctacatcttcatccagatcgtggccctgatccccgccgccagctacggcagactggagaccgacaccaagctgctgatccagcccaagaccagaagagccaaggagaacaccttcagcaaggccgacgccgagtacaagaagctgcacagctacggcagagaccagaagggcatgatgaaggagctgcagaccaagcagctgcagagcaacaccgtgggcatcaccgagagcaacgagaacgagagcgagatccccgtggacagcagcagcgtggccagcctgtggaccatgatcggcagcatcttcagcttccagagcgagaagaagcaggagaccagctggggcctgaccgagatcaacgccttcaagaacatgcagagcaaggtggtgcccctggacaacatcttcagagtgtgcaagagccagccccccagcatctacaacgccagcgccaccagcgtgttccacaagcactgcgccatccacgtgttcccctgggaccaggagtacttcgacgtggagcccagcttcaccgtgacctacggcaagctggtgaagctgctgagccccaagcagcagcagagcaagaccaagcagaacgtgctgagccccgagaaggagaagcagatgagcgagcccctggaccagaagaagatcagaagcgaccacaacgaggaggacgagaaggcctgcgtgctgcaggtggtgtggaacggcctggaggagctgaacaacgccatcaagtacaccaagaacgtggaggtgctgcacctgggcaaggtgtggatccccgacgacctgagaaagagactgaacatcgagatgcacgccgtggtgagaatcacccccgtggaggtgacccccaagatccccagaagcctgaagctgcagcccagagagaacctgcccaaggacatcagcgaggaggacatcaagaccgtgttctacagctggctgcagcagagcaccaccaccatgctgcccctggtgatcagcgaggaggagttcatcaagctggagaccaaggacggcctgaaggagttcagcctgagcatcgtgcacagctgggagaaggagaaggacaagaacatcttcctgctgagccccaacctgctgcagaagaccaccatccaggtgctgctggaccccatggtgaaggaggagaacagcgaggagatcgacttcatcctgcccttcctgaagctgagcagcctgggcggcgtgaacagcctgggcgtgagcagcctggagcacatcacccacagcctgctgggcagacccctgagcagacagctgatgagcctggtggccggcctgagaaacggcgccctgctgctgaccggcggcaagggcagcggcaagagcaccctggccaaggccatctgcaaggaggccttcgacaagctggacgcccacgtggagagagtggactgcaaggccctgagagccctgaacgacatgatcaaggagttcatcagcatgggcagcctggtggccctgatcgccaccagccagagccagcagagcctgcaccccctgctggtgagcgcccagggcgtgcacatcttccagtgcgtgcagcacatccagccccccaaccaggagcagagatgcgagatcctgtgcaacgtgatcaagaacaagctggactgcgacatcaacaagttcaccgacctggacctgcagcacgtggccaaggagaccggcggcttcgtggccagagacttcaccgtgctggtggacagagccatccacagcagactgagcagacagagcatcagcaccagagagaagctggtgctgaccaccctggacttccagaaggccctgagaggcttcctgcccgccagcctgagaagcgtgaacctgcacaagcccagagacctgggctgggacaagatcggcggcctgcacgaggtgagacagatcctgatggacaccatccagctgcccgccaagtaccccgagctgttcgccaacctgcccatcagacagagaaccggcatcctgctgtacggcccccccggcaccggcaagaccctgctggccggcgtgatcgccagagagagcagaatgaacttcatcagcgtgaagggccccgagctgctgagcaagtacatcggcgccagcgagcaggccgtgagagacatcttcatcagagcccaggccgccaagccctgcatcctgttcttcgacgagttcgagagcatcgcccccagaagaggccacgacaacaccggcgtgaccgacagagtggtgaaccagctgctgacccagctggacggcgtggagggcctgcagggcgtgtacgtgctggccgccaccagcagacccgacctgatcgaccccgccctgctgagacccggcagactggacaagtgcgtgtactgccccccccccgaccaggtgagcagactggagatcctgaacgtgctgagcgacagcctgcccctggccgacgacgtggacctgcagcacgtggccagcgtgaccgacagcttcaccggcgccgacctgaaggccctgctgtacaacgcccagctggaggccctgcacggcatgctgctgagcagcggcctgcaggacggcagcagcagcagcgacagcgacctgagcctgagcagcatggtgttcctgaaccacagcagcggcagcgacgacagcgccggcgacggcgagtgcggcctggaccagagcctggtgagcctggagatgagcgagatcctgcccgacgagagcaagttcaacatgtacagactgtacttcggcagcagctacgagagcgagctgggcaacggcaccagcagcgacctgagcagccagtgcctgagcgcccccagcagcatgacccaggacctgcccggcgtgcccggcaaggaccagctgttcagccagccccccgtgctgagaaccgccagccaggagggctgccaggagctgacccaggagcagagagaccagctgagagccgacatcagcatcatcaagggcagatacagaagccagagcggcgaggacgagagcatgaaccagcccggccccatcaagaccagactggccatcagccagagccacctgatgaccgccctgggccacaccagacccagcatcagcgaggacgactggaagaacttcgccgagctgtacgagagcttccagaaccccaagagaagaaagaaccagagcggcaccatgttcagacccggccagaaggtgaccctggcctag

SEQ ID NO: 92793 - DNA, 483 bp, synthetic construct
  misc_feature 1..483: note = Description of Artificial Sequence: Synthetic coding sequence
  source 1..483: mol_type = other DNA
atgagcctggtggccggcctgagaaacggcgccctgctgctgaccggcggcaagggcagcggcaagagcaccctggccaaggccatctgcaaggaggccttcgacaagctggacgcccacgtggagagagtggactgcaaggccctgagaggcaagagactggagaacatccagaagaccctggaggtggccttcagcgaggccgtgtggatgcagcccagcgtggtgctgctggacgacctggacctgatcgccggcctgcccgccgtgcccgagcacgagcacagccccgacgccgtgcagagccagagactggcccacgccctgaacgacatgatcaaggagttcatcagcatgggcagcctggtggccctgatcgccaccagccagagccagcagagcctgcaccccctgctggtgagcgcccagggcgtgcacatcttccagtgcgtgcagcacatccagccccccaaccagaactag

SEQ ID NO: 92794 - DNA, 1899 bp, synthetic construct
  misc_feature 1..1899: note = Description of Artificial Sequence: Synthetic coding sequence
  source 1..1899: mol_type = other DNA
atgtggggcagcgacagactggccggcgccggcggcggcggcgccgccgtgaccgtggccttcaccaacgccagagactgcttcctgcacctgcccagaagactggtggcccagctgcacctgctgcagaaccaggccatcgaggtggtgtggagccaccagcccgccttcctgagctgggtggagggcagacacttcagcgaccagggcgagaacgtggccgagatcaacagacaggtgggccagaagctgggcctgagcaacggcggccaggtgttcctgaagccctgcagccacgtggtgagctgccagcaggtggaggtggagcccctgagcgccgacgactgggagatcctggagctgcacgccgtgagcctggagcagcacctgctggaccagatcagaatcgtgttccccaaggccatcttccccgtgtgggtggaccagcagacctacatcttcatccagatcgtggccctgatccccgccgccagctacggcagactggagaccgacaccaagctgctgatccagcccaagaccagaagagccaaggagaacaccttcagcaaggccgacgccgagtacaagaagctgcacagctacggcagagaccagaagggcatgatgaaggagctgcagaccaagcagctgcagagcaacaccgtgggcatcaccgagagcaacgagaacgagagcgagatccccgtggacagcagcagcgtggccagcctgtggaccatgatcggcagcatcttcagcttccagagcgagaagaagcaggagaccagctggggcctgaccgagatcaacgccttcaagaacatgcagagcaaggtggtgcccctggacaacatcttcagagtgtgcaagagccagccccccagcatctacaacgccagcgccaccagcgtgttccacaagcactgcgccatccacgtgttcccctgggaccaggagtacttcgacgtggagcccagcttcaccgtgacctacggcaagctggtgaagctgctgagccccaagcagcagcagagcaagaccaagcagaacgtgctgagccccgagaaggagaagcagatgagcgagcccctggaccagaagaagatcagaagcgaccacaacgaggaggacgagaaggcctgcgtgctgcaggtggtgtggaacggcctggaggagctgaacaacgccatcaagtacaccaagaacgtggaggtgctgcacctgggcaaggtgtggatccccgacgacctgagaaagagactgaacatcgagatgcacgccgtggtgagaatcacccccgtggaggtgacccccaagatccccagaagcctgaagctgcagcccagagagaacctgcccaaggacatcagcgaggaggacatcaagaccgtgttctacagctggctgcagcagagcaccaccaccatgctgcccctggtgatcagcgaggaggagttcatcaagctggagaccaaggacggcctgaaggagttcagcctgagcatcgtgcacagctgggagaaggagaaggacaagaacatcttcctgctgagccccaacctgctgcagaagaccaccatccaggtgctgctggaccccatggtgaaggaggagaacagcgaggagatcgacttcatcctgcccttcctgaagctgagcagcctgggcggcgtgaacagcctgggcgtgagcagcctggagcacatcacccacagcctgctgggcagacccctgagcagacagctgatgagcctggtggccggcctgagaaacggcgccctgctgctgaccggcggcaagggcagcggcaagagcaccctggccaaggccatctgcaaggaggccttcgacaagctggacgcccacgtggagagagtggactgcaaggccctgtag

SEQ ID NO: 92795 - DNA, 1041 bp, synthetic construct
  misc_feature 1..1041: note = Description of Artificial Sequence: Synthetic coding sequence
  source 1..1041: mol_type = other DNA
atggcccccgccgccgccagcccccccgaggtgatcagagccgcccagaaggacgagtactacagaggcggcctgagaagcgccgccggcggcgccctgcacagcctggccggcgccagaaagtggctggagtggagaaaggaggtggagctgctgagcgacgtggcctacttcggcctgaccaccctggccggctaccagaccctgggcgaggagtacgtgagcatcatccaggtggaccccagcagaatccacgtgcccagcagcctgagaagaggcgtgctggtgaccctgcacgccgtgctgccctacctgctggacaaggccctgctgcccctggagcaggagctgcaggccgaccccgacagcggcagacccctgcagggcagcctgggccccggcggcagaggctgcagcggcgccagaagatggatgagacaccacaccgccaccctgaccgagcagcagagaagagccctgctgagagccgtgttcgtgctgagacagggcctggcctgcctgcagagactgcacgtggcctggttctacatccacggcgtgttctaccacctggccaagagactgaccggcatcacctaccaggccctgagacccgaccccctgagagtgctgatgagcgtggcccccagcgccctgcagctgagagtgagaagcctgcccggcgaggacctgagagccagagtgagctacagactgctgggcgtgatcagcctgctgcacctggtgctgagcatgggcctgcagctgtacggcttcagacagagacagagagccagaaaggagtggagactgcacagaggcctgagccacagaagagccagcctggaggagagagccgtgagcagaaaccccctgtgcaccctgtgcctggaggagagaagacaccccaccgccaccccctgcggccacctgttctgctgggagtgcatcaccgcctggtgcagcagcaaggccgagtgccccctgtgcagagagaagttccccccccagaagctgatctacctgagacactacagatag

SEQ ID NO: 92796 - DNA, 981 bp, synthetic construct
  misc_feature 1..981: note = Description of Artificial Sequence: Synthetic coding sequence
  source 1..981: mol_type = other DNA
atggcccccgccgccgccagcccccccgaggtgatcagagccgcccagaaggacgagtactacagaggcggcctgagaagcgccgccggcggcgccctgcacagcctggccggcgccagaaagtggctggagtggagaaaggaggtggagctgctgagcgacgtggcctacttcggcctgaccaccctggccggctaccagaccctgggcgaggagtacgtgagcatcatccaggtggaccccagcagaatccacgtgcccagcagcctgagaagaggcgtgctggtgaccctgcacgccgtgctgccctacctgctggacaaggccctgctgcccctggagcaggagctgcaggccgaccccgacagcggcagacccctgcagggcagcctgggccccggcggcagaggctgcagcggcgccagaagatggatgagacaccacaccgccaccctgaccgagcagcagagaagagccctgctgagagccgtgttcgtgctgagacagggcctggcctgcctgcagagactgcacgtggcctggttctacatccacggcgtgttctaccacctggccaagagactgaccggcatcacctacctgagagtgagaagcctgcccggcgaggacctgagagccagagtgagctacagactgctgggcgtgatcagcctgctgcacctggtgctgagcatgggcctgcagctgtacggcttcagacagagacagagagccagaaaggagtggagactgcacagaggcctgagccacagaagagccagcctggaggagagagccgtgagcagaaaccccctgtgcaccctgtgcctggaggagagaagacaccccaccgccaccccctgcggccacctgttctgctgggagtgcatcaccgcctggtgcagcagcaaggccgagtgccccctgtgcagagagaagttccccccccagaagctgatctacctgagacactacagatag

SEQ ID NO: 92797 - DNA, 744 bp, synthetic construct
  misc_feature 1..744: note = Description of Artificial Sequence: Synthetic coding sequence
  source 1..744: mol_type = other DNA
atggacgccttcaccagattcaccaaccagacccagggcagagacagactgttcagagccacccagtacacctgcatgctgctgagatacctgctggagcccaaggccggcaaggagaaggtggtgatgaagctgaagaagctggagagcagcgtgagcaccggcagaaagtggttcagactgggcaacgtggtgcacgccatccaggccaccgagcagagcatccacgccaccgacctggtgcccagactgtgcctgaccctggccaacctgaacagagtgatctacttcatctgcgacaccatcctgtgggtgagaagcgtgggcctgaccagcggcatcaacaaggagaagtggagaaccagagccgcccaccactactactacagcctgctgctgagcctggtgagagacctgtacgagatcagcctgcagatgaagagagtgacctgcgacagagccaagaaggagaagagcgccagccaggaccccctgtggttcagcgtggccgaggaggagaccgagtggctgcagagcttcctgctgctgctgttcagaagcctgaagcagcacccccccctgctgctggacaccgtgaagaacctgtgcgacatcctgaaccccctggaccagctgggcatctacaagagcaaccccggcatcatcggcctgggcggcctggtgagcagcatcgccggcatgatcaccgtggcctacccccagatgaagctgaagaccagatag

SEQ ID NO: 92798 - DNA, 1209 bp, synthetic construct
  misc_feature 1..1209: note = Description of Artificial Sequence: Synthetic coding sequence
  source 1..1209: mol_type = other DNA
atgccctggaagctgtggagaggcagcgtgggctgccccggcgacctgagcagcgacggcctgctgttcagactgggcccccccaagccccccaccgagctggagcccgagcccgagatcgagggcctgctgacccccgtgctggaggccggcgacgtggacgagggccccgtggccagacccctgagccccaccagactgcagcccgccctgccccccgaggcccagagcgtgcccgagctggaggaggtggccagagtgctggccgagatccccagacccctgaagagaagaggcagcatggagcaggcccccgccgtggccctgccccccacccacaagaagcagtaccagcagatcatcagcagactgttccacagacacggcggccccggccccggcggccccgagcccgagctgagccccatcaccgagggcagcgaggccagagccggcccccccgcccccgccccccccgcccccatccccccccccgcccccagccagagcagcccccccgagcagccccagagcatggagatgagaagcgtgctgagaaaggccggcagccccagaaaggccagaagagccagactgaaccccctggtgctgctgctggacgccgccctgaccggcgagctggaggtggtgcagcaggccgtgaaggagatgaacgaccccagccagcccaacgaggagggcatcaccgccctgcacaacgccatctgcggcgccaactacagcatcgtggacttcctgatcaccgccggcgccaacgtgaacagccccgacagccacggctggacccccctgcactgcgccgccagctgcaacgacaccgtgatctgcatggccctggtgcagcacggcgccgccatcttcgccaccaccctgagcgacggcgccaccgccttcgagaagtgcgacccctacagagagggctacgccgactgcgccacctacctggccgacgtggagcagagcatgggcctgatgaacagcggcgccgtgtacgccctgtgggactacagcgccgagttcggcgacgagctgagcttcagagagggcgagagcgtgaccgtgctgagaagagacggccccgaggagaccgactggtggtgggccgccctgcacggccaggagggctacgtgcccagaaactacttcggcctgttccccagagtgaagccccagagaagcaaggtgtag

SEQ ID NO: 92799 - DNA, 507 bp, synthetic construct
  misc_feature 1..507: note = Description of Artificial Sequence: Synthetic coding sequence
  source 1..507: mol_type = other DNA
tgatacagaggcagagacagactgatcagagtgctgggctactgctgccagctggtgggcggcgtgctggtggagcagtgccccgccagaagcgaggtgggcaccagactgctggtggtgagcacccagctgagccactgcagaaccatcctgagactgttcgacgacctggccatgttcgtgtacaccaagcagtacggcctgggcgcccaggaggaggacgccttcgtgagatgcgtgagcgtgctgggcaacctggccgaccagctgtactacccctgcgagcacgtggcctgggccgccgacgccagagtgctgcacgtggacagcagcagatggtggaccctgagcaccaccctgtgggccctgagcctgctgctgggcgtggccagaagcctgtggatgctgctgaagctgagacagagactgagaagccccaccgcccccttcaccagcatgtaccaggccgccagagccggcggccaggccgaggccaccaccccctag

SEQ ID NO: 92800 - DNA, 1212 bp, synthetic construct
  misc_feature 1..1212: note = Description of Artificial Sequence: Synthetic coding sequence
  source 1..1212: mol_type = other DNA
atggccagccagcccccccccccccccaagccctgggagaccagaagaatccccggcgccggccccggccccggccccggccccaccttccagagcgccgacctgggccccaccctgatgaccagacccggccagcccgccctgaccagagtgcccccccccatcctgcccagacccagccagcagaccggcagcagcagcgtgaacaccttcagacccgcctacagcagcttcagcagcggctacggcgcctacggcaacagcttctacggcggctacagcccctacagctacggctacaacggcctgggctacaacagactgagagtggacgacctgccccccagcagattcgtgcagcaggccgaggagagcagcagaggcgccttccagagcatcgagagcatcgtgcacgccttcgccagcgtgagcatgatgatggacgccaccttcagcgccgtgtacaacagcttcagagccgtgctggacgtggccaaccacttcagcagactgaagatccacttcaccaaggtgttcagcgccttcgccctggtgagaaccatcagatacctgtacagaagactgcagagaatgctgggcctgagaagaggcagcgagaacgaggacctgtgggccgagagcgagggcaccgtggcctgcctgggcgccgaggacagagccgccaccagcgccaagagctggcccatcttcctgttcttcgccgtgatcctgggcggcccctacctgatctggaagctgctgagcacccacagcgacgaggtgaccgacagcatcaactgggccagcggcgaggacgaccacgtggtggccagagccgagtacgacttcgccgccgtgagcgaggaggagatcagcttcagagccggcgacatgctgaacctggccctgaaggagcagcagcccaaggtgagaggctggctgctggccagcctggacggccagaccaccggcctgatccccgccaactacgtgaagatcctgggcaagagaaagggcagaaagaccgtggagagcagcaaggtgagcaagcagcagcagagcttcaccaaccccaccctgaccaagggcgccaccgtggccgacagcctggacgagcaggaggccgccttcgagagcgtgttcgtggagaccaacaaggtgcccgtggcccccgacagcatcggcaaggacggcgagaagcaggacctgtag

SEQ ID NO: 92801 - DNA, 1134 bp, synthetic construct
  misc_feature 1..1134: note = Description of Artificial Sequence: Synthetic coding sequence
  source 1..1134: mol_type = other DNA
atggccagcagcgagcaggccgagcagcccagccagcccagcagcacccccggcagcgagaacgtgctgcccagagagcccctgatcgccaccgccgtgaagttcctgcagaacagcagagtgagacagagccccctggccaccagaagagccttcctgaagaagaagggcctgaccgacgaggagatcgacatggccttccagcagagcggcaccgccgccgacgagcccagcagcctgggccccgccacccaggtggtgcccgtgcagcccccccacctgatcagccagccctacagccccgccggcagcagatggagagactacggcgccctggccatcatcatggccggcatcgccttcggcttccaccagctgtacaagaagtacctgctgcccctgatcctgggcggcagagaggacagaaagcagctggagagaatggaggccggcctgagcgagctgagcggcagcgtggcccagaccgtgacccagctgcagaccaccctggccagcgtgcaggagctgctgatccagcagcagcagaagatccaggagctggcccacgagctggccgccgccaaggccaccaccagcaccaactggatcctggagagccagaacatcaacgagctgaagagcgagatcaacagcctgaagggcctgctgctgaacagaagacagttcccccccagccccagcgcccccaagatccccagctggcagatccccgtgaagagccccagccccagcagccccgccgccgtgaaccaccacagcagcagcgacatcagccccgtgagcaacgagagcaccagcagcagccccggcaaggagggccacagccccgagggcagcaccgtgacctaccacctgctgggcccccaggaggagggcgagggcgtggtggacgtgaagggccaggtgagaatggaggtgcagggcgaggaggagaagagagaggacaaggaggacgaggaggacgaggaggacgacgacgtgagccacgtggacgaggaggactgcctgggcgtgcagagagaggacagaagaggcggcgacggccagatcaacgagcaggtggagaagctgagaagacccgagggcgccagcaacgagagcgagagagactag

SEQ ID NO: 92802 - DNA, 942 bp, synthetic construct
  misc_feature 1..942: note = Description of Artificial Sequence: Synthetic coding sequence
  source 1..942: mol_type = other DNA
atggccttccagcagagcggcaccgccgccgacgagcccagcagcctgggccccgccacccaggtggtgcccgtgcagcccccccacctgatcagccagccctacagccccgccggcagcagatggagagactacggcgccctggccatcatcatggccggcatcgccttcggcttccaccagctgtacaagaagtacctgctgcccctgatcctgggcggcagagaggacagaaagcagctggagagaatggaggccggcctgagcgagctgagcggcagcgtggcccagaccgtgacccagctgcagaccaccctggccagcgtgcaggagctgctgatccagcagcagcagaagatccaggagctggcccacgagctggccgccgccaaggccaccaccagcaccaactggatcctggagagccagaacatcaacgagctgaagagcgagatcaacagcctgaagggcctgctgctgaacagaagacagttcccccccagccccagcgcccccaagatccccagctggcagatccccgtgaagagccccagccccagcagccccgccgccgtgaaccaccacagcagcagcgacatcagccccgtgagcaacgagagcaccagcagcagccccggcaaggagggccacagccccgagggcagcaccgtgacctaccacctgctgggcccccaggaggagggcgagggcgtggtggacgtgaagggccaggtgagaatggaggtgcagggcgaggaggagaagagagaggacaaggaggacgaggaggacgaggaggacgacgacgtgagccacgtggacgaggaggactgcctgggcgtgcagagagaggacagaagaggcggcgacggccagatcaacgagcaggtggagaagctgagaagacccgagggcgccagcaacgagagcgagagagactag

SEQ ID NO: 92803 - DNA, 1041 bp, synthetic construct
  misc_feature 1..1041: note = Description of Artificial Sequence: Synthetic coding sequence
  source 1..1041: mol_type = other DNA
atggagaagctgagactgctgggcctgagataccaggagtacgtgaccagacaccccgccgccaccgcccagctggagaccgccgtgagaggcttcagctacctgctggccggcagattcgccgacagccacgagctgagcgagctggtgtacagcgccagcaacctgctggtgctgctgaacgacggcatcctgagaaaggagctgagaaagaagctgcccgtgagcctgagccagcagaagctgctgacctggctgagcgtgctggagtgcgtggaggtgttcatggagatgggcgccgccaaggtgtggggcgaggtgggcagatggctggtgatcgccctggtgcagctggccaaggccgtgctgagaatgctgctgctgctgtggttcaaggccggcctgcagaccagcccccccatcgtgcccctggacagagagacccaggcccagccccccgacggcgaccacagccccggcaaccacgagcagagctacgtgggcaagagaagcaacagagtggtgagaaccctgcagaacacccccagcctgcacagcagacactggggcgccccccagcagagagagggcagacagcagcagcaccacgaggagctgagcgccacccccacccccctgggcctgcaggagaccatcgccgagttcctgtacatcgccagacccctgctgcacctgctgagcctgggcctgtggggccagagaagctggaagccctggctgctggccggcgtggtggacgtgaccagcctgagcctgctgagcgacagaaagggcctgaccagaagagagagaagagagctgagaagaagaaccatcctgctgctgtactacctgctgagaagccccttctacgacagattcagcgaggccagaatcctgttcctgctgcagctgctggccgaccacgtgcccggcgtgggcctggtgaccaccagccagagagccgccagcccctgcctgcccgccagaccccacacccagccctggagcccccccgccttcctgcccggccacccctag

SEQ ID NO: 92804 - DNA, 1011 bp, synthetic construct
  misc_feature 1..1011: note = Description of Artificial Sequence: Synthetic coding sequence
  source 1..1011: mol_type = other DNA
atggagaagctgagactgctgggcctgagataccaggagtacgtgaccagacaccccgccgccaccgcccagctggagaccgccgtgagaggcttcagctacctgctggccggcagattcgccgacagccacgagctgagcgagctggtgtacagcgccagcaacctgctggtgctgctgaacgacggcatcctgagaaaggagctgagaaagaagctgcccgtgagcctgagccagcagaagctgctgacctggctgagcgtgctggagtgcgtggaggtgttcatggagatgggcgccgccaaggtgtggggcgaggtgggcagatggctggtgatcgccctggtgcagctggccaaggccgtgctgagaatgctgctgctgctgtggttcaaggccggcctgcagaccagcccccccatcgtgcccctggacagagagacccaggcccagccccccgacggcgaccacagccccggcaaccacgagcagagctacgtgggcaagagaagcaacagagtggtgagaaccctgcagaacacccccagcctgcacagcagacactggggcgccccccagcagagagagggcagacagcagcagcaccacgaggagctgagcgccacccccacccccctgggcctgcaggagaccatcgccgagttcctgtacatcgccagacccctgctgcacctgctgagcctgggcctgtggggccagagaagctggaagccctggctgctggccggcgtggtggacgtgaccagcctgagcctgctgagcgacagaaagggcctgaccagaagagagagaagagagctgagaagaagaaccatcctgctgctgtactacctgctgagaagccccttctacgacagattcagcgaggccagaatcctgttcctgctgcagctgctggccgaccacgtgcccggcgtgggcctggtgaccagacccctgatggactacctgcccacctggcagaagatctacttctacagctggggctag

SEQ ID NO: 92805 - DNA, 900 bp, synthetic construct
  misc_feature 1..900: note = Description of Artificial Sequence: Synthetic coding sequence
  source 1..900: mol_type = other DNA
atggccgccgccgaggagggctgcagcgtgggcgccgaggccgacagagagctggaggagctgctggagagcgccctggacgacttcgacaaggccaagcccagccccgccccccccagcaccaccaccgcccccgacgccagcggcccccagaagagaagccccggcgacaccgccaaggacgccctgttcgccagccaggagaagttcttccaggagctgttcgacagcgagctggccagccaggccaccgccgagttcgagaaggccatgaaggagctggccgaggaggagccccacctggtggagcagttccagaagctgagcgaggccgccggcagagtgggcagcgacatgaccagccagcaggagttcaccagctgcctgaaggagaccctgagcggcctggccaagaacgccaccgacctgcagaacagcagcatgagcgaggaggagctgaccaaggccatggagggcctgggcatggacgagggcgacggcgagggcaacatcctgcccatcatgcagagcatcatgcagaacctgctgagcaaggacgtgctgtaccccagcctgaaggagatcaccgagaagtaccccgagtggctgcagagccacagagagagcctgccccccgagcagttcgagaagtaccaggagcagcacagcgtgatgtgcaagatctgcgagcagttcgaggccgagacccccaccgacagcgagaccacccagaaggccagattcgagatggtgctggacctgatgcagcagctgcaggacctgggccacccccccaaggagctggccggcgagatgccccccggcctgaacttcgacctggacgccctgaacctgagcggcccccccggcgccagcggcgagcagtgcctgatcatgtag

SEQ ID NO: 92806 - DNA, 708 bp, synthetic construct
  misc_feature 1..708: note = Description of Artificial Sequence: Synthetic coding sequence
  source 1..708: mol_type = other DNA
atggagagcggcgccctggacgacttcgacaaggccaagcccagccccgccccccccagcaccaccaccgcccccgacgccagcggcccccagaagagaagccccggcgacaccgccaaggacgccctgttcgccagccaggagaagttcttccaggagctgttcgacagcgagctggccagccaggccaccgccgagttcgagaaggccatgaaggagctggccgaggaggagccccacctggtggagcagttccagaagctgagcgaggccgccggcagagtgggcagcgacatgaccagccagcaggagttcaccagctgcctgaaggagaccctgagcggcctggccaagaacgccaccgacctgcagaacagcagcatgagcgaggaggagctgaccaaggccatggagggcctgggcatggacgagggcgacggcgagggcaacatcctgcccatcatgcagagcatcatgcagaacctgctgagcaaggacgtgctgtaccccagcctgaaggagatcaccgagaagtaccccgagtggctgcagagccacagagagagcctgccccccgagcagttcgagaagtaccaggagcagcacagcgtgatgtgcaagatctgcgagcagttcgaggccgagacccccaccgacagcgagaccacccagaaggccagattcgagatggtgctggacctgatgtag

SEQ ID NO: 92807 - DNA, 840 bp, synthetic construct
  misc_feature 1..840: note = Description of Artificial Sequence: Synthetic coding sequence
  source 1..840: mol_type = other DNA
atggagagcggcgccctggacgacttcgacaaggccaagcccagccccgccccccccagcaccaccaccgcccccgacgccagcggcccccagaagagaagccccggcgacaccgccaaggacgccctgttcgccagccaggagaagttcttccaggagctgttcgacagcgagctggccagccaggccaccgccgagttcgagaaggccatgaaggagctggccgaggaggagccccacctggtggagcagttccagaagctgagcgaggccgccggcagagtgggcagcgacatgaccagccagcaggagttcaccagctgcctgaaggagaccctgagcggcctggccaagaacgccaccgacctgcagaacagcagcatgagcgaggaggagctgaccaaggccatggagggcctgggcatggacgagggcgacggcgagggcaacatcctgcccatcatgcagagcatcatgcagaacctgctgagcaaggacgtgctgtaccccagcctgaaggagatcaccgagaagtaccccgagtggctgcagagccacagagagagcctgccccccgagcagttcgagaagtaccaggagcagcacagcgtgatgtgcaagatctgcgagcagttcgaggccgagacccccaccgacagcgagaccacccagaaggccagattcgagatggtgctggacctgatgcagcagctgcaggacctgggccacccccccaaggagctggccggcgagatgccccccggcctgaacttcgacctggacgccctgaacctgagcggcccccccggcgccagcggcgagcagtgcctgatcatgtag

SEQ ID NO: 92808 - DNA, 630 bp, synthetic construct
  misc_feature 1..630: note = Description of Artificial Sequence: Synthetic coding sequence
  source 1..630: mol_type = other DNA
atgaaggagctggccgaggaggagccccacctggtggagcagttccagaagctgagcgaggccgccggcagagtgggcagcgacatgaccagccagcaggagttcaccagctgcctgaaggagaccctgagcggcctggccaagaacgccaccgacctgcagaacagcagcatgagcgaggaggagctgaccaaggccatggagggcctgggcatggacgagggcgacggcgagggcaacatcctgcccatcatgcagagcatcatgcagaacctgctgagcaaggacgtgctgtaccccagcctgaaggagatcaccgagaagtaccccgagtggctgcagagccacagagagagcctgccccccgagcagttcgagaagtaccaggagcagcacagcgtgatgtgcaagatctgcgagcagttcgaggccgagacccccaccgacagcgagaccacccagaaggccagattcgagatggtgctggacctgatgcagcagctgcaggacctgggccacccccccaaggagctggccggcgagatgccccccggcctgaacttcgacctggacgccctgaacctgagcggcccccccggcgccagcggcgagcagtgcctgatcatgtag

SEQ ID NO: 92809 - DNA, 561 bp, synthetic construct
  misc_feature 1..561: note = Description of Artificial Sequence: Synthetic coding sequence
  source 1..561: mol_type = other DNA
atggccgccgccgaggagggctgcagcgtgggcgccgaggccgacagagagctggaggagctgctggagagcgccctggacgacttcgacaaggccaagcccagccccgccccccccagcaccaccaccgcccccgacgccagcggcccccagaagagaagccccggcgacaccgccaaggacgccctgttcgccagccaggagaagttcttccaggagctgttcgacagcgagctggccagccaggccaccgccgagttcgagaaggccatgaaggagctggccgaggaggagccccacctggtggagcagttccagaagctgagcgaggccgccggcagagtggagctgcagcacgtgggcagaagagccgaccagggccacggcggcgccagacacggcagaagaggctggggcagagagcaccccccccaccacgccgagtactacgccgagcccaccctgcagggctgcgccgtgcccatcaccgagggcgaccacagaaaggtgagcagaatggtggccgagagcagcggcatcagcaccagcagagccgtgtag

SEQ ID NO: 92810 - DNA, 918 bp, synthetic construct
  misc_feature 1..918: note = Description of Artificial Sequence: Synthetic coding sequence
  source 1..918: mol_type = other DNA
atggccagcagaaaggagaacgccaagagcgccaacagagtgctgagaatcagccagctggacgccctggagctgaacaaggccctggagcagctggtgtggagccagttcacccagtgcttccacggcttcaagcccggcctgctggccagattcgagcccgaggtgaaggcctgcctgtgggtgttcctgtggagattcaccatctacagcaagaacgccaccgtgggccagagcgtgctgaacatcaagtacaagaacgacttcagccccaacctgagataccagccccccagcaagaaccagaagatctggtacgccgtgtgcaccatcggcggcagatggctggaggagagatgctacgacctgttcagaaaccaccacctggccagcttcggcaaggtgaagcagtgcgtgaacttcgtgatcggcctgctgaagctgggcggcctgatcaacttcctgatcttcctgcagagaggcaagttcgccaccctgaccgagagactgctgggcatccacagcgtgttctgcaagccccagaacatctgcgaggtgggcttcgagtacatgaacagagagctgctgtggcacggcttcgccgagttcctgatcttcctgctgcccctgatcaacgtgcagaagctgaaggccaagctgagcagctggtgcatccccctgaccggcgcccccaacagcgacaacaccctggccaccagcggcaaggagtgcgccctgtgcggcgagtggcccaccatgccccacaccatcggctgcgagcacatcttctgctacttctgcgccaagagcagcttcctgttcgacgtgtacttcacctgccccaagtgcggcaccgaggtgcacagcctgcagcccctgaagagcggcatcgagatgagcgaggtgaacgccctgtag

SEQ ID NO: 92811 - DNA, 918 bp, synthetic construct; identical to SEQ ID NO: 92810
  misc_feature 1..918: note = Description of Artificial Sequence: Synthetic coding sequence
  source 1..918: mol_type = other DNA

SEQ ID NO: 92812 - DNA, 543 bp, synthetic construct
  misc_feature 1..543: note = Description of Artificial Sequence: Synthetic coding sequence
  source 1..543: mol_type = other DNA
atggccagcagaaaggagaacgccaagagcgccaacagagtgctgagaatcagccagctggacgccctggagctgaacaaggccctggagcagctggtgtggagccagttcacccagtgcttccacggcttcaagcccggcctgctggccagattcgagcccgaggtgaaggcctgcctgtgggtgttcctgtggagattcaccatctacagcaagaacgccaccgtgggccagagcgtgctgaacatcaagtacaagaacgacttcagccccaacctgagataccagccccccagcaagaaccagaagatctggtacgccgtgtgcaccatcggcggcagatggctggaggagagatgctacgacctgttcagaaaccaccacctggccagcttcggcaaggtgaagcagtgcgtgaacttcgtgatcggcctgctgaagctgggcggcctgatcaacttcctgatcttcctgcagagaggcaagttcgccaccctgaccgagagactgctgggcatccacagcgtgttctgcaagccctag

SEQ ID NO: 92813 - DNA, 12 bp, synthetic construct
  misc_feature 1..12: note = Description of Artificial Sequence: Synthetic coding sequence
  source 1..12: mol_type = other DNA
atggccagctag

SEQ ID NO: 92814 - DNA, 918 bp, synthetic construct; identical to SEQ ID NO: 92810
  misc_feature 1..918: note = Description of Artificial Sequence: Synthetic coding sequence
  source 1..918: mol_type = other DNA

SEQ ID NO: 92815 - DNA, 918 bp, synthetic construct; identical to SEQ ID NO: 92810
  misc_feature 1..918: note = Description of Artificial Sequence: Synthetic coding sequence
  source 1..918: mol_type = other DNA

SEQ ID NO: 92816 - DNA, 918 bp, synthetic construct
  misc_feature 1..918: note = Description of Artificial Sequence: Synthetic coding sequence
  source 1..918: mol_type = other DNA
atgaagagcgacagcagcaccagcgccgcccccctgagaggcctgggcggccccctgagaagcagcgagcccgtgagagccgtgcccgccagagcccccgccgtggacctgctggaggaggccgccgacctgctggtggtgcacctggacttcagagccgccctggagacctgcgagagagcctggcagagcctggccaaccacgccgtggccgaggagcccgccggcaccagcctggaggtgaagtgcagcctgtgcgtggtgggcatccaggccctggccgagatggacagatggcaggaggtgctgagctgggtgctgcagtactaccaggtgcccgagaagctgccccccaaggtgctggagctgtgcatcctgctgtacagcaagatgcaggagcccggcgccgtgctggacgtggtgggcgcctggctgcaggaccccgccaaccagaacctgcccgagtacggcgccctggccgagttccacgtgcagagagtgctgctgcccctgggctgcctgagcgaggccgaggagctggtggtgggcagcgccgccttcggcgaggagagaagactggacgtgctgcaggccatccacaccgccagacagcagcagaagcaggagcacagcggcagcgaggaggcccagaagcccaacctggagggcagcgtgagccacaagttcctgagcctgcccatgctggtgagacagctgtgggacagcgccgtgagccacttcttcagcctgcccttcaagaagagcctgctggccgccctgatcctgtgcctgctggtggtgagattcgaccccgccagccccagcagcctgcacttcctgtacaagctggcccagctgttcagatggatcagaaaggccgccttcagcagactgtaccagctgagaatcagagactag

SEQ ID NO: 92817 - DNA, 918 bp, synthetic construct; identical to SEQ ID NO: 92816
  misc_feature 1..918: note = Description of Artificial Sequence: Synthetic coding sequence
  source 1..918: mol_type = other DNA

SEQ ID NO: 92818 - DNA, 1098 bp, synthetic construct
  misc_feature 1..1098: note = Description of Artificial Sequence: Synthetic coding sequence
  source 1..1098: mol_type = other DNA
atgaagagcgacagcagcaccagcgccgcccccctgagaggcctgggcggccccctgagaagcagcgagcccgtgagagccgtgcccgccagagcccccgccgtggacctgctggaggaggccgccgacctgctggtggtgcacctggacttcagagccgccctggagacctgcgagagagcctggcagagcctggccaaccacgccgtggccgaggagcccgccggcaccagcctggaggtgaagtgcagcctgtgcgtggtgggcatccaggccctggccgagatggacagatggcaggaggtgctgagctgggtgctgcagtactaccaggtgcccgagaagctgccccccaaggtgctggagctgtgcatcctgctgtacagcaagatgcaggagcccggcgccgtgctggacgtggtgggcgcctggctgcaggaccccgccaaccagaacctgcccgagtacggcgccctggccgagttccacgtgcagagagtgctgctgcccctgggctgcctgagcgaggccgaggagctggtggtgggcagcgccgccttcggcgaggagagaagactggacgtgctgcaggccatccacaccgccagacagcagcagaagcaggagcacagcggcagcgaggaggcccagaagcccaacctggagggcagcgtgagccacaagttcctgagcctgcccatgctggtgagacagctgtgggacagcgccgtgagccacttcttcagcctgcccttcaagaagagcctgctggccgccctgatcctgtgcctgctggtggtgagattcgaccccgccagccccagcagcctgcacttcctgtacaagctggcccagctgttcgccggcagcggcagactgcacttcctggccagcaccagcagcgccagcgtgaccgagggcccctgcgccccccagcccctgtgcagcagcagaccctggccccagaagcagagcgacagagccacccacccccaggcccccctgggcaagtgggaccagcccaacctggccgagtgcaccgtgagctgctgcctgggcgccctgagcttcgccccctacttcggctggagcagatag

SEQ ID NO: 92819 - DNA, 771 bp, synthetic construct
  misc_feature 1..771: note = Description of Artificial Sequence: Synthetic coding sequence
  source 1..771: mol_type = other DNA
atgaagagcgacagcagcaccagcgccgcccccctgagaggcctgggcggccccctgagaagcagcgagcccgtgagagccgtgcccgccagagcccccgccgtggacctgctggaggaggccgccgacctgctggtggtgcacctggacttcagagccgccctggagacctgcgagagagcctggcagagcctggccaaccacgccgtggccgaggagcccgccggcaccagcctggaggtgaagtgcagcctgtgcgtggtgggcatccaggccctggccgagatggacagatggcaggaggtgctgagctgggtgctgcagtactaccaggtgcccgagaagctgccccccaaggtgctggagctgtgcatcctgctgtacagcaagatgcaggagcccggcgccgtgctggacgtggtgggcgcctggctgcaggaccccgccaaccagaacctgcccgagtacggcgccctggccgagttccacgtgcagagagtgctgctgcccctgggctgcctgagcgaggccgaggagctggtggtgggcagcgccgccttcggcgaggagagaagactggacgtgctgcaggccatccacaccgccagacagcagcagaagcaggagcacagcggcagcgaggaggcccagaagcccaacctggaggccagccccagcagcctgcacttcctgtacaagctggcccagctgttcagatggatcagaaaggccgccttcagcagactgtaccagctgagaatcagagactag

SEQ ID NO: 92820 - DNA, 549 bp, synthetic construct
  misc_feature 1..549: note = Description of Artificial Sequence: Synthetic coding sequence
  source 1..549: mol_type = other DNA
atgctgagaagcgtgtggaacttcctgaagagacacaagaagaagtgcatcttcctgggcaccgtgctgggcgtgctgagcatgctgcccaccctgagagaggccctgatgcagcagctgaacagcgagagcctgaccgccctgctgaagaacagacccagcaacaagctggagatctgggaggacctgaagatcatcagcttcaccagaagcaccgtggccgtgtacagcacctgcatgctggtggtgctgctgagagtgcagctgaacatcatcggcggctacatctacctggacaacgccgccgtgggcaagaacggcaccaccatcctggccccccccgacgtgcagcagcagtacctgagcagcatccagcacctgctgggcgacggcctgaccgagctgatcaccgtgatcaagcaggccgtgcagaaggtgctgggcagcgtgagcctgaagcacagcctgagcctgctggacctggagcagaagctgaaggagatcagaaacctggtggagcagcacaagagcagcagctggatcaactag

SEQ ID NO: 92821 - DNA, 1122 bp, synthetic construct
  misc_feature 1..1122: note = Description of Artificial Sequence: Synthetic coding sequence
  source 1..1122: mol_type = other DNA
atgctgagaagcgtgtggaacttcctgaagagacacaagaagaagtgcatcttcctgggcaccgtgctgggcggcgtgtacatcctgggcaagtacggccagaagaagatcagagagatccaggagagagaggccgccgagtacatcgcccaggccagaagacagtaccacttcgagagcaaccagagaacctgcaacatgaccgtgctgagcatgctgcccaccctgagagaggccctgatgcagcagctgaacagcgagagcctgaccgccctgctgaagaacagacccagcaacaagctggagatctgggaggacctgaagatcatcagcttcaccagaagcaccgtggccgtgtacagcacctgcatgctggtggtgctgctgagagtgcagctgaacatcatcggcggctacatctacctggacaacgccgccgtgggcaagaacggcaccaccatcctggccccccccgacgtgcagcagcagtacctgagcagcatccagcacctgctgggcgacggcctgaccgagctgatcaccgtgatcaagcaggccgtgcagaaggtgctgggcagcgtgagcctgaagcacagcctgagcctgctggacctggagcagaagctgaaggagatcagaaacctggtggagcagcacaagagcagcagctggatcaacaaggacggcagcaagcccctgctgtgccactacatgatgcccgacgaggagacccccctggccgtgcaggcctgcggcctgagccccagagacatcaccaccatcaagctgctgaacgagaccagagacatgctggagagccccgacttcagcaccgtgctgaacacctgcctgaacagaggcttcagcagactgctggacaacatggccgagttcttcagacccaccgagcaggacctgcagcacggcaacagcatgaacagcctgagcagcgtgagcctgcccctggccaagatcatccccatcgtgaacggccagatccacagcgtgtgcagcgagacccccagccacttcgtgcaggacctgctgaccatggagcaggtgaaggacttcgccgccaacgtgtacgaggccttcagcaccccccagcagctggagaagtag

SEQ ID NO: 92822 - DNA, 549 bp, synthetic construct; identical to SEQ ID NO: 92820
  misc_feature 1..549: note = Description of Artificial Sequence: Synthetic coding sequence
  source 1..549: mol_type = other DNA

SEQ ID NO: 92823 - DNA, 1809 bp, synthetic construct
  misc_feature 1..1809: note = Description of Artificial Sequence: Synthetic coding sequence
  source 1..1809: mol_type = other DNA
atggccatgagagagctggtggaggccgagtgcggcggcgccaaccccctgatgaagctggccggccacttcacccaggacaaggccctgagacaggagggcctgagacccggcccctggccccccggcgcccccgccagcgaggccgccagcaagcccctgggcgtggccagcgaggacgagctggtggccgagttcctgcaggaccagaacgcccccctggtgagcagagccccccagaccttcaagatggacgacctgctggccgagatgcagcagatcgagcagagcaacttcagacaggccccccagagagcccccggcgtggccgacctggccctgagcgagaactgggcccaggagttcctggccgccggcgacgccgtggacgtgacccaggactacaacgagaccgactggagccaggagttcatcagcgaggtgaccgaccccctgagcgtgagccccgccagatgggccgaggagtacctggagcagagcgaggagaagctgtggctgggcgagcccgagggcaccgccaccgacagatggtacgacgagtaccaccccgaggaggacctgcagcacaccgccagcgacttcgtggccaaggtggacgaccccaagctggccaacagcgagggcaccagcgacgcctgggtggaccagttcaccagacccgtgaacaccagcgccctggacatggagttcgagagagccaagagcgccatcgagagcgacgtggacttctgggacaagctgcaggccgagctggaggagatggccaagagagacgccgaggcccacccctggctgagcgactacgacgacctgaccagcgccacctacgacaagggctaccagttcgaggaggagaaccccctgagagaccacccccagcccttcgaggagggcctgagaagactgcaggagggcgacctgcccaacgccgtgctgctgttcgaggccgccgtgcagcaggaccccaagcacatggaggcctggcagtacctgggcaccacccaggccgagaacgagcaggagctgctggccatcagcgccctgagaagatgcctggagctgaagcccgacaaccagaccgccctgatggccctggccgtgagcttcaccaacgagagcctgcagagacaggcctgcgagaccctgagagactggctgagatacacccccgcctacgcccacctggtgacccccgccgaggagggcgccggcggcgccggcctgggccccagcaagagaatcctgggcagcctgctgagcgacagcctgttcctggaggtgaaggagctgttcctggccgccgtgagactggaccccaccagcatcgaccccgacgtgcagtgcggcctgggcgtgctgttcaacctgagcggcgagtacgacaaggccgtggactgcttcaccgccgccctgagcgtgagacccaacgactacctgctgtggaacaagctgggcgccaccctggccaacggcaaccagagcgaggaggccgtggccgcctacagaagagccctggagctgcagcccggctacatcagaagcagatacaacctgggcatcagctgcatcaacctgggcgcccacagagaggccgtggagcacttcctggaggccctgaacatgcagagaaagagcagaggccccagaggcgagggcggcgccatgagcgagaacatctggagcaccctgagactggccctgagcatgctgggccagagcgacgcctacggcgccgccgacgccagagacctgagcaccctgctgaccatgttcggcctgccccagtag

SEQ ID NO: 92824 - DNA, 1896 bp, synthetic construct
  misc_feature 1..1896: note = Description of Artificial Sequence: Synthetic coding sequence
  source 1..1896: mol_type = other DNA
atggccatgagagagctggtggaggccgagtgcggcggcgccaaccccctgatgaagctggccggccacttcacccaggacaaggccctgagacaggagggcctgagacccggcccctggccccccggcgcccccgccagcgaggccgccagcaagcccctgggcgtggccagcgaggacgagctggtggccgagttcctgcaggaccagaacgcccccctggtgagcagagccccccagaccttcaagatggacgacctgctggccgagatgcagcagatcgagcagagcaacttcagacaggccccccagagagcccccggcgtggccgacctggccctgagcgagaactgggcccaggagttcctggccgccggcgacgccgtggacgtgacccaggactacaacgagaccgactggagccaggagttcatcagcgaggtgaccgaccccctgagcgtgagccccgccagatgggccgaggagtacctggagcagagcgaggagaagctgtggctgggcgagcccgagggcaccgccaccgacagatggtacgacgagtaccaccccgaggaggacctgcagcacaccgccagcgacttcgtggccaaggtggacgaccccaagctggccaacagcgagttcctgaagttcgtgagacagatcggcgagggccaggtgagcctggagagcggcgccggcagcggcagagcccaggccgagcagtgggccgccgagttcatccagcagcagggcaccagcgacgcctgggtggaccagttcaccagacccgtgaacaccagcgccctggacatggagttcgagagagccaagagcgccatcgagctgcaggccgagctggaggagatggccaagagagacgccgaggcccacccctggctgagcgactacgacgacctgaccagcgccacctacgacaagggctaccagttcgaggaggagaaccccctgagagaccacccccagcccttcgaggagggcctgagaagactgcaggagggcgacctgcccaacgccgtgctgctgttcgaggccgccgtgcagcaggaccccaagcacatggaggcctggcagtacctgggcaccacccaggccgagaacgagcaggagctgctggccatcagcgccctgagaagatgcctggagctgaagcccgacaaccagaccgccctgatggccctggccgtgagcttcaccaacgagagcctgcagagacaggcctgcgagaccctgagagactggctgagatacacccccgcctacgcccacctggtgacccccgccgaggagggcgccggcggcgccggcctgggccccagcaagagaatcctgggcagcctgctgagcgacagcctgttcctggaggtgaaggagctgttcctggccgccgtgagactggaccccaccagcatcgaccccgacgtgcagtgcggcctgggcgtgctgttcaacctgagcggcgagtacgacaaggccgtggactgcttcaccgccgccctgagcgtgagacccaacgactacctgctgtggaacaagctgggcgccaccctggccaacggcaaccagagcgaggaggccgtggccgcctacagaagagccctggagctgcagcccggctacatcagaagcagatacaacctgggcatcagctgcatcaacctgggcgcccacagagaggccgtggagcacttcctggaggccctgaacatgcagagaaagagcagaggccccagaggcgagggcggcgccatgagcgagaacatctggagcaccctgagactggccctgagcatgctgggccagagcgacgcctacggcgccgccgacgccagagacctgagcaccctgctgaccatgttcggcctgccccagtag

SEQ ID NO: 92825 - DNA, 1233 bp, synthetic construct
  misc_feature 1..1233: note = Description of Artificial Sequence: Synthetic coding sequence
  source 1..1233: mol_type = other DNA
atggccatgagagagctggtggaggccgagtgcggcggcgccaaccccctgatgaagctggccggccacttcacccaggacaaggccctgagacaggagggcctgagacccggcccctggccccccggcgcccccgccagcgaggccgtgagcgtgctggaggtggagagccccggcgccgccagcgaggccgccagcaagcccctgggcgtggccagcgaggacgagctggtggccgagttcctgcaggaccagaacgcccccctggtgagcagagccccccagaccttcaagatggacgacctgctggccgagatgcagcagatcgagcagagcaacttcagacaggccccccagagagcccccggcgtggccgacctggccctgagcgagaactgggcccaggagttcctggccgccggcgacgccgtggacgtgacccaggactacaacgagaccgactggagccaggagttcatcagcgaggtgaccgaccccctgagcgtgagccccgccagatgggccgaggagtacctggagcagagcgaggagaagctgtggctgggcgagcccgagggcaccgccaccgacagatggtacgacgagtaccaccccgaggaggacctgcagcacaccgccagcgacttcgtggccaaggtggacgaccccaagctggccaacagcgagggcaccagcgacgcctgggtggaccagttcaccagacccgtgaacaccagcgccctggacatggagttcgagagagccaagagcgccatcgagctgcaggccgagctggaggagatggccaagagagacgccgaggcccacccctggctgagcgactacgacgacctgaccagcgccacctacgacaagggctaccagttcgaggaggagaaccccctgagagaccacccccagcccttcgaggagggcctgagaagactgcaggagggcgacctgcccaacgccgtgctgctgttcgaggccgccgtgcagcaggaccccaagcacatggaggcctggcagtacctgggcaccacccaggccgagaacgagcaggagctgctggccatcagcgccctgagaagatgcctggagctgaagcccgacaaccagaccgccctgatggccctggccgtgagcttcaccaacgagagcctgcagagacaggcctgcgagaccctgagagactggctgagatacacccccgcctacgcccacctggtgtag

SEQ ID NO: 92826 - DNA, 1983 bp, synthetic construct
  misc_feature 1..1983: note = Description of Artificial Sequence: Synthetic coding sequence
  source 1..1983: mol_type = other DNA
atgctgctgtgcagagcccacagagtgctgggcctgagaggcgccagagagctggccgtgaccatggccatgagagagctggtggaggccgagtgcggcggcgccaaccccctgatgaagctggccggccacttcacccaggacaaggccctgagacaggagggcctgagacccggcccctggccccccggcgcccccgccagcgaggccgccagcaagcccctgggcgtggccagcgaggacgagctggtggccgagttcctgcaggaccagaacgcccccctggtgagcagagccccccagaccttcaagatggacgacctgctggccgagatgcagcagatcgagcagagcaacttcagacaggccccccagagagcccccggcgtggccgacctggccctgagcgagaactgggcccaggagttcctggccgccggcgacgccgtggacgtgacccaggactacaacgagaccgactggagccaggagttcatcagcgaggtgaccgaccccctgagcgtgagccccgccagatgggccgaggagtacctggagcagagcgaggagaagctgtggctgggcgagcccgagggcaccgccaccgacagatggtacgacgagtaccaccccgaggaggacctgcagcacaccgccagcgacttcgtggccaaggtggacgaccccaagctggccaacagcgagttcctgaagttcgtgagacagatcggcgagggccaggtgagcctggagagcggcgccggcagcggcagagcccaggccgagcagtgggccgccgagttcatccagcagcagggcaccagcgacgcctgggtggaccagttcaccagacccgtgaacaccagcgccctggacatggagttcgagagagccaagagcgccatcgagagcgacgtggacttctgggacaagctgcaggccgagctggaggagatggccaagagagacgccgaggcccacccctggctgagcgactacgacgacctgaccagcgccacctacgacaagggctaccagttcgaggaggagaaccccctgagagaccacccccagcccttcgaggagggcctgagaagactgcaggagggcgacctgcccaacgccgtgctgctgttcgaggccgccgtgcagcaggaccccaagcacatggaggcctggcagtacctgggcaccacccaggccgagaacgagcaggagctgctggccatcagcgccctgagaagatgcctggagctgaagcccgacaaccagaccgccctgatggccctggccgtgagcttcaccaacgagagcctgcagagacaggcctgcgagaccctgagagactggctgagatacacccccgcctacgcccacctggtgacccccgccgaggagggcgccggcggcgccggcctgggccccagcaagagaatcctgggcagcctgctgagcgacagcctgttcctggaggtgaaggagctgttcctggccgccgtgagactggaccccaccagcatcgaccccgacgtgcagtgcggcctgggcgtgctgttcaacctgagcggcgagtacgacaaggccgtggactgcttcaccgccgccctgagcgtgagacccaacgactacctgctgtggaacaagctgggcgccaccctggccaacggcaaccagagcgaggaggccgtggccgcctacagaagagccctggagctgcagcccggctacatcagaagcagatacaacctgggcatcagctgcatcaacctgggcgcccacagagaggccgtggagcacttcctggaggccctgaacatgcagagaaagagcagaggccccagaggcgagggcggcgccatgagcgagaacatctggagcaccctgagactggccctgagcatgctgggccagagcgacgcctacggcgccgccgacgccagagacctgagcaccctgctgaccatgttcggcctgccccagtag

SEQ ID NO: 92827 - DNA, 1920 bp, synthetic construct
  misc_feature 1..1920: note = Description of Artificial Sequence: Synthetic coding sequence
  source 1..1920: mol_type = other DNA
atggccatgagagagctggtggaggccgagtgcggcggcgccaaccccctgatgaagctggccggccacttcacccaggacaaggccctgagacaggagggcctgagacccggcccctggccccccggcgcccccgccagcgaggccgccagcaagcccctgggcgtggccagcgaggacgagctggtggccgagttcctgcaggaccagaacgcccccctggtgagcagagccccccagaccttcaagatggacgacctgctggccgagatgcagcagatcgagcagagcaacttcagacaggccccccagagagcccccggcgtggccgacctggccctgagcgagaactgggcccaggagttcctggccgccggcgacgccgtggacgtgacccaggactacaacgagaccgactggagccaggagttcatcagcgaggtgaccgaccccctgagcgtgagccccgccagatgggccgaggagtacctggagcagagcgaggagaagctgtggctgggcgagcccgagggcaccgccaccgacagatggtacgacgagtaccaccccgaggaggacctgcagcacaccgccagcgacttcgtggccaaggtggacgaccccaagctggccaacagcgagttcctgaagttcgtgagacagatcggcgagggccaggtgagcctggagagcggcgccggcagcggcagagcccaggccgagcagtgggccgccgagttcatccagcagcagggcaccagcgacgcctgggtggaccagttcaccagacccgtgaacaccagcgccctggacatggagttcgagagagccaagagcgccatcgagagcgacgtggacttctgggacaagctgcaggccgagctggaggagatggccaagagagacgccgaggcccacccctggctgagcgactacgacgacctgaccagcgccacctacgacaagggctaccagttcgaggaggagaaccccctgagagaccacccccagcccttcgaggagggcctgagaagactgcaggagggcgacctgcccaacgccgtgctgctgttcgaggccgccgtgcagcaggaccccaagcacatggaggcctggcagtacctgggcaccacccaggccgagaacgagcaggagctgctggccatcagcgccctgagaagatgcctggagctgaagcccgacaaccagaccgccctgatggccctggccgtgagcttcaccaacgagagcctgcagagacaggcctgcgagaccctgagagactggctgagatacacccccgcctacgcccacctggtgacccccgccgaggagggcgccggcggcgccggcctgggccccagcaagagaatcctgggcagcctgctgagcgacagcctgttcctggaggtgaaggagctgttcctggccgccgtgagactggaccccaccagcatcgaccccgacgtgcagtgcggcctgggcgtgctgttcaacctgagcggcgagtacgacaaggccgtggactgcttcaccgccgccctgagcgtgagacccaacgactacctgctgtggaacaagctgggcgccaccctggccaacggcaaccagagcgaggaggccgtggccgcctacagaagagccctggagctgcagcccggctacatcagaagcagatacaacctgggcatcagctgcatcaacctgggcgcccacagagaggccgtggagcacttcctggaggccctgaacatgcagagaaagagcagaggccccagaggcgagggcggcgccatgagcgagaacatctggagcaccctgagactggccctgagcatgctgggccagagcgacgcctacggcgccgccgacgccagagacctgagcaccctgctgaccatgttcggcctgccccagtag

SEQ ID NO: 92828 - DNA, 1965 bp, synthetic construct
  misc_feature 1..1965: note = Description of Artificial Sequence: Synthetic coding sequence
  source 1..1965: mol_type = other DNA
atggccatgagagagctggtggaggccgagtgcggcggcgccaaccccctgatgaagctggccggccacttcacccaggacaaggccctgagacaggagggcctgagacccggcccctggccccccggcgcccccgccagcgaggccgtgagcgtgctggaggtggagagccccggcgccgccagcgaggccgccagcaagcccctgggcgtggccagcgaggacgagctggtggccgagttcctgcaggaccagaacgcccccctggtgagcagagccccccagaccttcaagatggacgacctgctggccgagatgcagcagatcgagcagagcaacttcagacaggccccccagagagcccccggcgtggccgacctggccctgagcgagaactgggcccaggagttcctggccgccggcgacgccgtggacgtgacccaggactacaacgagaccgactggagccaggagttcatcagcgaggtgaccgaccccctgagcgtgagccccgccagatgggccgaggagtacctggagcagagcgaggagaagctgtggctgggcgagcccgagggcaccgccaccgacagatggtacgacgagtaccaccccgaggaggacctgcagcacaccgccagcgacttcgtggccaaggtggacgaccccaagctggccaacagcgagttcctgaagttcgtgagacagatcggcgagggccaggtgagcctggagagcggcgccggcagcggcagagcccaggccgagcagtgggccgccgagttcatccagcagcagggcaccagcgacgcctgggtggaccagttcaccagacccgtgaacaccagcgccctggacatggagttcgagagagccaagagcgccatcgagagcgacgtggacttctgggacaagctgcaggccgagctggaggagatggccaagagagacgccgaggcccacccctggctgagcgactacgacgacctgaccagcgccacctacgacaagggctaccagttcgaggaggagaaccccctgagagaccacccccagcccttcgaggagggcctgagaagactgcaggagggcgacctgcccaacgccgtgctgctgttcgaggccgccgtgcagcaggaccccaagcacatggaggcctggcagtacctgggcaccacccaggccgagaacgagcaggagctgctggccatcagcgccctgagaagatgcctggagctgaagcccgacaaccagaccgccctgatggccctggccgtgagcttcaccaacgagagcctgcagagacaggcctgcgagaccctgagagactggctgagatacacccccgcctacgcccacctggtgacccccgccgaggagggcgccggcggcgccggcctgggccccagcaagagaatcctgggcagcctgctgagcgacagcctgttcctggaggtgaaggagctgttcctggccgccgtgagactggaccccaccagcatcgaccccgacgtgcagtgcggcctgggcgtgctgttcaacctgagcggcgagtacgacaaggccgtggactgcttcaccgccgccctgagcgtgagacccaacgactacctgctgtggaacaagctgggcgccaccctggccaacggcaaccagagcgaggaggccgtggccgcctacagaagagccctggagctgcagcccggctacatcagaagcagatacaacctgggcatcagctgcatcaacctgggcgcccacagagaggccgtggagcacttcctggaggccctgaacatgcagagaaagagcagaggccccagaggcgagggcggcgccatgagcgagaacatctggagcaccctgagactggccctgagcatgctgggccagagcgacgcctacggcgccgccgacgccagagacctgagcaccctgctgaccatgttcggcctgccccagtag

SEQ ID NO: 92829 - DNA, 1920 bp, synthetic construct; identical to SEQ ID NO: 92827
  misc_feature 1..1920: note = Description of Artificial Sequence: Synthetic coding sequence
  source 1..1920: mol_type = other DNA

SEQ ID NO: 92830 - DNA, 345 bp, synthetic construct
  misc_feature 1..345: note = Description of Artificial Sequence: Synthetic coding sequence
  source 1..345: mol_type = other DNA
atggccatgagagagctggtggaggccgagtgcggcggcgccaaccccctgatgaagctggccggccacttcacccaggacaaggccctgagacaggagggcctgagacccggcccctggccccccggcgcccccgccagcgaggccgccagcaagcccctgggcgtggccagcgaggacgagctggtggccgagttcctgcaggaccagaacgcccccctggtgagcagagccccccagaccttcaagatggacgacctgctggccgagatgcagcagatcgagcagagcaacttcagacaggccccccagagagcccccggcgtggccgacctggccctgtag

SEQ ID NO: 92831 - DNA, 309 bp, synthetic construct
  misc_feature 1..309: note = Description of Artificial Sequence: Synthetic coding sequence
  source 1..309: mol_type = other DNA
atggccatgagagagctggtggaggccgagtgcggcggcgccaaccccctgatgaagctggccggccacttcacccaggacaaggccctgagacaggagggcctgagacccggcccctggccccccggcgcccccgccagcgaggccgccagcaagcccctgggcgtggccagcgaggacgagctggtggccgagttcctgcaggaccagaacgcccccctggtgagcagagccccccagaccttcaagatggacgacctgctggccgagatgcagcagatcgagcagagcaacttcagacaggcctag

SEQ ID NO: 92832 - DNA, 747 bp, synthetic construct
  misc_feature 1..747: note = Description of Artificial Sequence: Synthetic coding sequence
  source 1..747: mol_type = other DNA
atggccatgagagagctggtggaggccgagtgcggcggcgccaaccccctgatgaagctggccggccacttcacccaggacaaggccctgagacaggagggcctgagacccggcccctggccccccggcgcccccgccagcgaggccgccagcaagcccctgggcgtggccagcgaggacgagctggtggccgagttcctgcaggaccagaacgcccccctggtgagcagagccccccagaccttcaagatggacgacctgctggccgagatgcagcagatcgagcagagcaacttcagacaggccccccagagagcccccggcgtggccgacctggccctgagcgagaactgggcccaggagttcctggccgccggcgacgccgtggacgtgacccaggactacaacgagaccgactggagccaggagttcatcagcgaggtgaccgaccccctgagcgtgagccccgccagatgggccgaggagtacctggagcagagcgaggagaagctgtggctgggcgagcccgagggcaccgccaccgacagatggtacgacgagtaccaccccgaggaggacctgcagcacaccgccagcgacttcgtggccaaggtggacgaccccaagctggccaacagcgagttcctgaagttcgtgagacagatcggcgagggccaggtgagcctggagagcggcgccggcagcggcagagcccaggccgagcagtgggccgccgagttcatctag

SEQ ID NO: 92833 - DNA, 315 bp, synthetic construct
  misc_feature 1..315: note = Description of Artificial Sequence: Synthetic coding sequence
  source 1..315: mol_type = other DNA
atggccatgagagagctggtggaggccgagtgcggcggcgccaaccccctgatgaagctggccggccacttcacccaggacaaggccctgagacaggagggcctgagacccggcccctggccccccggcgcccccgccagcgaggccgccagcaagcccctgggcgtggccagcgaggacgagctggtggccgagttcctgcaggaccagaacgcccccctggtgagcagagccccccagaccttcaagatggacgacctgctggccgagatgcagcagatcgagcagagcaacttcagacaggccccccagtag

SEQ ID NO: 92834 - DNA, 1875 bp, synthetic construct
  misc_feature 1..1875: note = Description of Artificial Sequence: Synthetic coding sequence
  source 1..1875: mol_type = other DNA
atgtaccagggccacatgcaggtggtgggcgtgaccctgaagaagaagtggcactgcctgcagaagagcgacctgaccctggccctgggcaagggcagcagagccgccgacaaggccgtggccatggtgatgaaggagatccccagagaggagagcgccgaggagaagcccctgctgaccatgaccagccagctggtgaacgagcagcaggagagcagacccctgctgagccccagcatcgacgacttcctgtgcgagaccaagagcgaggccatcgccagacccgtgaccagcaacaccgccgtgctgaccaccggcctggacctgctggacctgagcgagcccgtgagccagacccagaccaaggccaagaagagcgagcccagcagcaagaccagcagcctgaagaagaaggccgacggcagcgacctgatcagcaccgacgccgagcagagaggccagcccctgagagtgcccgagaccagcagcctggacctggacatccagacccagctggagaagtgggacgacgtgaagttccacggcgacagaaacaccaagggccaccccatggccgagagaaagagcagcagcagcagaaccggcagcaaggagctgctgtggagcagcgagcacagaagccagcccgagctgagcggcggcaagagcgccctgaacagcgagagcgccagcgagctggagctggtggcccccacccaggccagactgaccaaggagcacagatggggcagcgccctgctgagcagaaaccacagcctggaggaggagttcgagagagccaaggccgccgtggagagcgacaccgagttctgggacaagatgcaggccgagtgggaggagatggccagaagaaactggatcagcgagaaccaggaggcccagaaccaggtgaccatcagcgccagcgagaagggctactacttccacaccgagaaccccttcaaggactggcccggcgccttcgaggagggcctgaagagactgaaggagggcgacctgcccgtgaccatcctgttcatggaggccgccatcctgcaggaccccggcgacgccgaggcctggcagttcctgggcatcacccaggccgagaacgagaacgagcaggccgccatcgtggccctgcagagatgcctggagctgcagcccaacaacctgaaggccctgatggccctggccgtgagctacaccaacaccggccaccagcaggacgcctgcgacgccctgaagaactggatcaagcagaaccccaagtacaagtacctggtgaagagcaagaagggcagccccggcctgaccagaagaatgagcaagagccccgtggacagcagcgtgctggagggcgtgaaggagctgtacctggaggccgcccaccagaacggcgacatgatcgaccccgacctgcagaccggcctgggcgtgctgttccacctgagcggcgagttcaacagagccatcgacgccttcaacgccgccctgaccgtgagacccgaggactacagcctgtggaacagactgggcgccaccctggccaacggcgacagaagcgaggaggccgtggaggcctacaccagagccctggagatccagcccggcttcatcagaagcagatacaacctgggcatcagctgcatcaacctgggcgcctacagagaggccgtgagcaacttcctgaccgccctgagcctgcagagaaagagcagaaaccagcagcaggtgccccaccccgccatcagcggcaacatctgggccgccctgagaatcgccctgagcctgatggaccagcccgagctgttccaggccgccaacctgggcgacctggacgtgctgctgagagccttcaacctggacccctag

SEQ ID NO: 92835 - DNA, 1875 bp, synthetic construct
  misc_feature 1..1875: note = Description of Artificial Sequence: Synthetic coding sequence
  source 1..1875: mol_type = other DNA
atgcaccagaacggcagccaggtggtgggcgtgaccctgaagaagaagtggcactgcctgcagaagagcgacctgaccctggccctgggcaagggcagcagagccgccgacaaggccgtggccatggtgatgaaggagatccccagagaggagagcgccgaggagaagcccctgctgaccatgaccagccagctggtgaacgagcagcaggagagcagacccctgctgagccccagcatcgacgacttcctgtgcgagaccaagagcgaggccatcgccagacccgtgaccagcaacaccgccgtgctgaccaccggcctggacctgctggacctgagcgagcccgtgagccagacccagaccaaggccaagaagagcgagcccagcagcaagaccagcagcctgaagaagaaggccgacggcagcgacctgatcagcaccgacgccgagcagagaggccagcccctgagagtgcccgagaccagcagcctggacctggacatccagacccagctggagaagtgggacgacgtgaagttccacggcgacagaaacaccaagggccaccccatggccgagagaaagagcagcagcagcagaaccggcagcaaggagctgctgtggagcagcgagcacagaagccagcccgagctgagcggcggcaagagcgccctgaacagcgagagcgccagcgagctggagctggtggcccccacccaggccagactgaccaaggagcacagatggggcagcgccctgctgagcagaaaccacagcctggaggaggagttcgagagagccaaggccgccgtggagagcgacaccgagttctgggacaagatgcaggccgagtgggaggagatggccagaagaaactggatcagcgagaaccaggaggcccagaaccaggtgaccatcagcgccagcgagaagggctactacttccacaccgagaaccccttcaaggactggcccggcgccttcgaggagggcctgaagagactgaaggagggcgacctgcccgtgaccatcctgttcatggaggccgccatcctgcaggaccccggcgacgccgaggcctggcagttcctgggcatcacccaggccgagaacgagaacgagcaggccgccatcgtggccctgcagagatgcctggagctgcagcccaacaacctgaaggccctgatggccctggccgtgagctacaccaacaccggccaccagcaggacgcctgcgacgccctgaagaactggatcaagcagaaccccaagtacaagtacctggtgaagagcaagaagggcagccccggcctgaccagaagaatgagcaagagccccgtggacagcagcgtgctggagggcgtgaaggagctgtacctggaggccgcccaccagaacggcgacatgatcgaccccgacctgcagaccggcctgggcgtgctgttccacctgagcggcgagttcaacagagccatcgacgccttcaacgccgccctgaccgtgagacccgaggactacagcctgtggaacagactgggcgccaccctggccaacggcgacagaagcgaggaggccgtggaggcctacaccagagccctggagatccagcccggcttcatcagaagcagatacaacctgggcatcagctgcatcaacctgggcgcctacagagaggccgtgagcaacttcctgaccgccctgagcctgcagagaaagagcagaaaccagcagcaggtgccccaccccgccatcagcggcaacatctgggccgccctgagaatcgccctgagcctgatggaccagcccgagctgttccaggccgccaacctgggcgacctggacgtgctgctgagagccttcaacctggacccctag

SEQ ID NO: 92836 - DNA, 1557 bp, synthetic construct
  misc_feature 1..1557: note = Description of Artificial Sequence: Synthetic coding sequence
  source 1..1557: mol_type = other DNA
atggtgatgaaggagatccccagagaggagagcgccgaggagaagcccctgctgaccatgaccagccagctggtgaacgagcagcaggagagcagacccctgctgagccccagcatcgacgacttcctgtgcgagaccaagagcgaggccatcgccagacccgtgaccagcaacaccgccgacatccagacccagctggagaagtgggacgacgtgaagttccacggcgacagaaacaccaagggccaccccatggccgagagaaagagcagcagcagcagaaccggcagcaaggagctgctgtggagcagcgagcacagaagccagcccgagctgagcggcggcaagagcgccctgaacagcgagagcgccagcgagctggagctggtggcccccacccaggccagactgaccaaggagcacagatggggcagcgccctgctgagcagaaaccacagcctggaggaggagttcgagagagccaaggccgccgtggagagcgacaccgagttctgggacaagatgcaggccgagtgggaggagatggccagaagaaactggatcagcgagaaccaggaggcccagaaccaggtgaccatcagcgccagcgagaagggctactacttccacaccgagaaccccttcaaggactggcccggcgccttcgaggagggcctgaagagactgaaggagggcgacctgcccgtgaccatcctgttcatggaggccgccatcctgcaggaccccggcgacgccgaggcctggcagttcctgggcatcacccaggccgagaacgagaacgagcaggccgccatcgtggccctgcagagatgcctggagctgcagcccaacaacctgaaggccctgatggccctggccgtgagctacaccaacaccggccaccagcaggacgcctgcgacgccctgaagaactggatcaagcagaaccccaagtacaagtacctggtgaagagcaagaagggcagccccggcctgaccagaagaatgagcaagagccccgtggacagcagcgtgctggagggcgtgaaggagctgtacctggaggccgcccaccagaacggcgacatgatcgaccccgacctgcagaccggcctgggcgtgctgttccacctgagcggcgagttcaacagagccatcgacgccttcaacgccgccctgaccgtgagacccgaggactacagcctgtggaacagactgggcgccaccctggccaacggcgacagaagcgaggaggccgtggaggcctacaccagagccctggagatccagcccggcttcatcagaagcagatacaacctgggcatcagctgcatcaacctgggcgcctacagagaggccgtgagcaacttcctgaccgccctgagcctgcagagaaagagcagaaaccagcagcaggtgccccaccccgccatcagcggcaacatctgggccgccctgagaatcgccctgagcctgatggaccagcccgagctgttccaggccgccaacctgggcgacctggacgtgctgctgagagccttcaacctggacccctag

SEQ ID NO: 92837 - DNA, 1809 bp, synthetic construct
  misc_feature 1..1809: note = Description of Artificial Sequence: Synthetic coding sequence
  source 1..1809: mol_type = other DNA
atgtaccagggccacatgcagggcaagggcagcagagccgccgacaaggccgtggccatggtgatgaaggagatccccagagaggagagcgccgaggagaagcccctgctgaccatgaccagccagctggtgaacgagcagcaggagagcagacccctgctgagccccagcatcgacgacttcctgtgcgagaccaagagcgaggccatcgccagacccgtgaccagcaacaccgccgtgctgaccaccggcctggacctgctggacctgagcgagcccgtgagccagacccagaccaaggccaagaagagcgagcccagcagcaagaccagcagcctgaagaagaaggccgacggcagcgacctgatcagcaccgacgccgagcagagaggccagcccctgagagtgcccgagaccagcagcctggacctggacatccagacccagctggagaagtgggacgacgtgaagttccacggcgacagaaacaccaagggccaccccatggccgagagaaagagcagcagcagcagaaccggcagcaaggagctgctgtggagcagcgagcacagaagccagcccgagctgagcggcggcaagagcgccctgaacagcgagagcgccagcgagctggagctggtggcccccacccaggccagactgaccaaggagcacagatggggcagcgccctgctgagcagaaaccacagcctggaggaggagttcgagagagccaaggccgccgtggagagcgacaccgagttctgggacaagatgcaggccgagtgggaggagatggccagaagaaactggatcagcgagaaccaggaggcccagaaccaggtgaccatcagcgccagcgagaagggctactacttccacaccgagaaccccttcaaggactggcccggcgccttcgaggagggcctgaagagactgaaggagggcgacctgcccgtgaccatcctgttcatggaggccgccatcctgcaggaccccggcgacgccgaggcctggcagttcctgggcatcacccaggccgagaacgagaacgagcaggccgccatcgtggccctgcagagatgcctggagctgcagcccaacaacctgaaggccctgatggccctggccgtgagctacaccaacaccggccaccagcaggacgcctgcgacgccctgaagaactggatcaagcagaaccccaagtacaagtacctggtgaagagcaagaagggcagccccggcctgaccagaagaatgagcaagagccccgtggacagcagcgtgctggagggcgtgaaggagctgtacctggaggccgcccaccagaacggcgacatgatcgaccccgacctgcagaccggcctgggcgtgctgttccacctgagcggcgagttcaacagagccatcgacgccttcaacgccgccctgaccgtgagacccgaggactacagcctgtggaacagactgggcgccaccctggccaacggcgacagaagcgaggaggccgtggaggcctacaccagagccctggagatccagcccggcttcatcagaagcagatacaacctgggcatcagctgcatcaacctgggcgcctacagagaggccgtgagcaacttcctgaccgccctgagcctgcagagaaagagcagaaaccagcagcaggtgccccaccccgccatcagcggcaacatctgggccgccctgagaatcgccctgagcctgatggaccagcccgagctgttccaggccgccaacctgggcgacctggacgtgctgctgagagccttcaacctggacccctag

SEQ ID NO: 92838 - DNA, 1545 bp, synthetic construct
  misc_feature 1..1545: note = Description of Artificial Sequence: Synthetic coding sequence
  source 1..1545: mol_type = other DNA
atgagcagcctgagcctgaagcccctggtgcaggtgagcgtgggcgccttcgtgcagctggtgaacgagcagcaggagagcagacccctgctgagccccagcatcgacgacttcctgtgcgagaccaagagcgaggccatcgccagacccgtgaccagcaacaccgccgacatccagacccagctggagaagtgggacgacgtgaagttccacggcgacagaaacaccaagggccaccccatggccgagagaaagagcagcagcagcagaaccggcagcaaggagctgctgtggagcagcgagcacagaagccagcccgagctgagcggcggcaagagcgccctgaacagcgagagcgccagcgagctggagctggtggcccccacccaggccagactgaccaaggagcacagatggggcagcgccctgctgagcagaaaccacagcctggaggaggagttcgagagagccaaggccgccgtggagagcgacaccgagttctgggacaagatgcaggccgagtgggaggagatggccagaagaaactggatcagcgagaaccaggaggcccagaaccaggtgaccatcagcgccagcgagaagggctactacttccacaccgagaaccccttcaaggactggcccggcgccttcgaggagggcctgaagagactgaaggagggcgacctgcccgtgaccatcctgttcatggaggccgccatcctgcaggaccccggcgacgccgaggcctggcagttcctgggcatcacccaggccgagaacgagaacgagcaggccgccatcgtggccctgcagagatgcctggagctgcagcccaacaacctgaaggccctgatggccctggccgtgagctacaccaacaccggccaccagcaggacgcctgcgacgccctgaagaactggatcaagcagaaccccaagtacaagtacctggtgaagagcaagaagggcagccccggcctgaccagaagaatgagcaagagccccgtggacagcagcgtgctggagggcgtgaaggagctgtacctggaggccgcccaccagaacggcgacatgatcgaccccgacctgcagaccggcctgggcgtgctgttccacctgagcggcgagttcaacagagccatcgacgccttcaacgccgccctgaccgtgagacccgaggactacagcctgtggaacagactgggcgccaccctggccaacggcgacagaagcgaggaggccgtggaggcctacaccagagccctggagatccagcccggcttcatcagaagcagatacaacctgggcatcagctgcatcaacctgggcgcctacagagaggccgtgagcaacttcctgaccgccctgagcctgcagagaaagagcagaaaccagcagcaggtgccccaccccgccatcagcggcaacatctgggccgccctgagaatcgccctgagcctgatggaccagcccgagctgttccaggccgccaacctgggcgacctggacgtgctgctgagagccttcaacctggacccctag

SEQ ID NO: 92839 - DNA, 1881 bp, synthetic construct
  misc_feature 1..1881: note = Description of Artificial Sequence: Synthetic coding sequence
  source 1..1881: mol_type = other DNA
atgtaccagggccacatgcagaagagcaaggagcagggctacggcaagctgagcagcgacgaggacctggagatcatcgtggaccagaagcagggcaagggcagcagagccgccgacaaggccgtggccatggtgatgaaggagatccccagagaggagagcgccgaggagaagcccctgctgaccatgaccagccagctggtgaacgagcagcaggagagcagacccctgctgagccccagcatcgacgacttcctgtgcgagaccaagagcgaggccatcgccagacccgtgaccagcaacaccgccgtgctgaccaccggcctggacctgctggacctgagcgagcccgtgagccagacccagaccaaggccaagaagagcgagcccagcagcaagaccagcagcctgaagaagaaggccgacggcagcgacctgatcagcaccgacgccgagcagagaggccagcccctgagagtgcccgagaccagcagcctggacctggacatccagacccagctggagaagtgggacgacgtgaagttccacggcgacagaaacaccaagggccaccccatggccgagagaaagagcagcagcagcagaaccggcagcaaggagctgctgtggagcagcgagcacagaagccagcccgagctgagcggcggcaagagcgccctgaacagcgagagcgccagcgagctggagctggtggcccccacccaggccagactgaccaaggagcacagatggggcagcgccctgctgagcagaaaccacagcctggaggaggagttcgagagagccaaggccgccgtggagagcgacaccgagttctgggacaagatgcaggccgagtgggaggagatggccagaagaaactggatcagcgagaaccaggaggcccagaaccaggtgaccatcagcgccagcgagaagggctactacttccacaccgagaaccccttcaaggactggcccggcgccttcgaggagggcctgaagagactgaaggagggcgacctgcccgtgaccatcctgttcatggaggccgccatcctgcaggaccccggcgacgccgaggcctggcagttcctgggcatcacccaggccgagaacgagaacgagcaggccgccatcgtggccctgcagagatgcctggagctgcagcccaacaacctgaaggccctgatggccctggccgtgagctacaccaacaccggccaccagcaggacgcctgcgacgccctgaagaactggatcaagcagaaccccaagtacaagtacctggtgaagagcaagaagggcagccccggcctgaccagaagaatgagcaagagccccgtggacagcagcgtgctggagggcgtgaaggagctgtacctggaggccgcccaccagaacggcgacatgatcgaccccgacctgcagaccggcctgggcgtgctgttccacctgagcggcgagttcaacagagccatcgacgccttcaacgccgccctgaccgtgagacccgaggactacagcctgtggaacagactgggcgccaccctggccaacggcgacagaagcgaggaggccgtggaggcctacaccagagccctggagatccagcccggcttcatcagaagcagatacaacctgggcatcagctgcatcaacctgggcgcctacagagaggccgtgagcaacttcctgaccgccctgagcctgcagagaaagagcagaaaccagcagcaggtgccccaccccgccatcagcggcaacatctgggccgccctgagaatcgccctgagcctgatggaccagcccgagctgttccaggccgccaacctgggcgacctggacgtgctgctgagagccttcaacctggacccctag

SEQ ID NO: 92840 - DNA, 1752 bp, synthetic construct
  misc_feature 1..1752: note = Description of Artificial Sequence: Synthetic coding sequence
  source 1..1752: mol_type = other DNA
atggtgatgaaggagatccccagagaggagagcgccgaggagaagcccctgctgaccatgaccagccagctggtgaacgagcagcaggagagcagacccctgctgagccccagcatcgacgacttcctgtgcgagaccaagagcgaggccatcgccagacccgtgaccagcaacaccgccgtgctgaccaccggcctggacctgctggacctgagcgagcccgtgagccagacccagaccaaggccaagaagagcgagcccagcagcaagaccagcagcctgaagaagaaggccgacggcagcgacctgatcagcaccgacgccgagcagagaggccagcccctgagagtgcccgagaccagcagcctggacctggacatccagacccagctggagaagtgggacgacgtgaagttccacggcgacagaaacaccaagggccaccccatggccgagagaaagagcagcagcagcagaaccggcagcaaggagctgctgtggagcagcgagcacagaagccagcccgagctgagcggcggcaagagcgccctgaacagcgagagcgccagcgagctggagctggtggcccccacccaggccagactgaccaaggagcacagatggggcagcgccctgctgagcagaaaccacagcctggaggaggagttcgagagagccaaggccgccgtggagagcgacaccgagttctgggacaagatgcaggccgagtgggaggagatggccagaagaaactggatcagcgagaaccaggaggcccagaaccaggtgaccatcagcgccagcgagaagggctactacttccacaccgagaaccccttcaaggactggcccggcgccttcgaggagggcctgaagagactgaaggagggcgacctgcccgtgaccatcctgttcatggaggccgccatcctgcaggaccccggcgacgccgaggcctggcagttcctgggcatcacccaggccgagaacgagaacgagcaggccgccatcgtggccctgcagagatgcctggagctgcagcccaacaacctgaaggccctgatggccctggccgtgagctacaccaacaccggccaccagcaggacgcctgcgacgccctgaagaactggatcaagcagaaccccaagtacaagtacctggtgaagagcaagaagggcagccccggcctgaccagaagaatgagcaagagccccgtggacagcagcgtgctggagggcgtgaaggagctgtacctggaggccgcccaccagaacggcgacatgatcgaccccgacctgcagaccggcctgggcgtgctgttccacctgagcggcgagttcaacagagccatcgacgccttcaacgccgccctgaccgtgagacccgaggactacagcctgtggaacagactgggcgccaccctggccaacggcgacagaagcgaggaggccgtggaggcctacaccagagccctggagatccagcccggcttcatcagaagcagatacaacctgggcatcagctgcatcaacctgggcgcctacagagaggccgtgagcaacttcctgaccgccctgagcctgcagagaaagagcagaaaccagcagcaggtgccccaccccgccatcagcggcaacatctgggccgccctgagaatcgccctgagcctgatggaccagcccgagctgttccaggccgccaacctgggcgacctggacgtgctgctgagagccttcaacctggacccctag

SEQ ID NO: 92841 - DNA, 1776 bp, synthetic construct
  misc_feature 1..1776: note = Description of Artificial Sequence: Synthetic coding sequence
  source 1..1776: mol_type = other DNA
atgtaccagggccacatgcagaagagcaaggagcagggctacggcaagctgagcagcgacgaggacctggagatcatcgtggaccagaagcagctggtgaacgagcagcaggagagcagacccctgctgagccccagcatcgacgacttcctgtgcgagaccaagagcgaggccatcgccagacccgtgaccagcaacaccgccgtgctgaccaccggcctggacctgctggacctgagcgagcccgtgagccagacccagaccaaggccaagaagagcgagcccagcagcaagaccagcagcctgaagaagaaggccgacggcagcgacctgatcagcaccgacgccgagcagagaggccagcccctgagagtgcccgagaccagcagcctggacctggacatccagacccagctggagaagtgggacgacgtgaagttccacggcgacagaaacaccaagggccaccccatggccgagagaaagagcagcagcagcagaaccggcagcaaggagctgctgtggagcagcgagcacagaagccagcccgagctgagcggcggcaagagcgccctgaacagcgagagcgccagcgagctggagctggtggcccccacccaggccagactgaccaaggagcacagatggggcagcgccctgctgagcagaaaccacagcctggaggaggagttcgagagagccaaggccgccgtggagagcgacaccgagttctgggacaagatgcaggccgagtgggaggagatggccagaagaaactggatcagcgagaaccaggaggcccagaaccaggtgaccatcagcgccagcgagaagggctactacttccacaccgagaaccccttcaaggactggcccggcgccttcgaggagggcctgaagagactgaaggagggcgacctgcccgtgaccatcctgttcatggaggccgccatcctgcaggaccccggcgacgccgaggcctggcagttcctgggcatcacccaggccgagaacgagaacgagcaggccgccatcgtggccctgcagagatgcctggagctgcagcccaacaacctgaaggccctgatggccctggccgtgagctacaccaacaccggccaccagcaggacgcctgcgacgccctgaagaactggatcaagcagaaccccaagtacaagtacctggtgaagagcaagaagggcagccccggcctgaccagaagaatgagcaagagccccgtggacagcagcgtgctggagggcgtgaaggagctgtacctggaggccgcccaccagaacggcgacatgatcgaccccgacctgcagaccggcctgggcgtgctgttccacctgagcggcgagttcaacagagccatcgacgccttcaacgccgccctgaccgtgagacccgaggactacagcctgtggaacagactgggcgccaccctggccaacggcgacagaagcgaggaggccgtggaggcctacaccagagccctggagatccagcccggcttcatcagaagcagatacaacctgggcatcagctgcatcaacctgggcgcctacagagaggccgtgagcaacttcctgaccgccctgagcctgcagagaaagagcagaaaccagcagcaggtgccccaccccgccatcagcggcaacatctgggccgccctgagaatcgccctgagcctgatggaccagcccgagctgttccaggccgccaacctgggcgacctggacgtgctgctgagagccttcaacctggacccctag

SEQ ID NO: 92842 - DNA, 2217 bp, synthetic construct
  misc_feature 1..2217: note = Description of Artificial Sequence: Synthetic coding sequence
  source 1..2217: mol_type = other DNA
atggccctggccgtgctgagagtgctggagcccttccccaccgagaccccccccctggccgtgctgctgccccccggcggcccctggcccgccgccgagctgggcctggtgctggccctgagacccgccggcgagagccccgccggccccgccctgctggtggccgccctggagggccccgacgccggcaccgaggagcagggccccggccccccccagctgctggtgagcagagccctgctgagactgctggccctgggcagcggcgcctgggtgagagccagagccgtgagaagaccccccgccctgggctgggccctgctgggcaccagcctgggccccggcctgggccccagagtgggccccctgctggtgagaagaggcgagaccctgcccgtgcccggccccagagtgctggagaccagacccgccctgcagggcctgctgggccccggcaccagactggccgtgaccgagctgagaggcagagccagactgtgccccgagagcggcgacagcagcagacccccccccccccccgtggtgagcagcttcgccgtgagcggcaccgtgagaagactgcagggcgtgctgggcggcaccggcgacagcctgggcgtgagcagaagctgcctgagaggcctgggcctgttccagggcgagtgggtgtgggtggcccaggccagagagagcagcaacaccagccagccccacctggccagagtgcaggtgctggagcccagatgggacctgagcgacagactgggccccggcagcggccccctgggcgagcccctggccgacggcctggccctggtgcccgccaccctggccttcaacctgggctgcgaccccctggagatgggcgagctgagaatccagagatacctggagggcagcatcgcccccgaggacaagggcagctgcagcctgctgcccggcccccccttcgccagagagctgcacatcgagatcgtgagcagcccccactacagcaccaacggcaactacgacggcgtgctgtacagacacttccagatccccagagtggtgcaggagggcgacgtgctgtgcgtgcccaccatcggccaggtggagatcctggagggcagccccgagaagctgcccagatggagagagatgttcttcaaggtgaagaagaccgtgggcgaggcccccgacggccccgccagcgcctacctggccgacaccacccacaccagcctgtacatggtgggcagcaccctgagccccgtgccctggctgcccagcgaggagagcaccctgtggagcagcctgagcccccccggcctggaggccctggtgagcgagctgtgcgccgtgctgaagcccagactgcagcccggcggcgccctgctgaccggcaccagcagcgtgctgctgagaggcccccccggctgcggcaagaccaccgtggtggccgccgcctgcagccacctgggcctgcacctgctgaaggtgccctgcagcagcctgtgcgccgagagcagcggcgccgtggagaccaagctgcaggccatcttcagcagagccagaagatgcagacccgccgtgctgctgctgaccgccgtggacctgctgggcagagacagagacggcctgggcgaggacgccagagtgatggccgtgctgagacacctgctgctgaacgaggaccccctgaacagctgcccccccctgatggtggtggccaccaccagcagagcccaggacctgcccgccgacgtgcagaccgccttcccccacgagctggaggtgcccgccctgagcgagggccagagactgagcatcctgagagccctgaccgcccacctgcccctgggccaggaggtgaacctggcccagctggccagaagatgcgccggcttcgtggtgggcgacctgtacgccctgctgacccacagcagcagagccgcctgcaccagaatcaagaacagcggcctggccggcggcctgaccgaggaggacgagggcgagctgtgcgccgccggcttccccctgctggccgaggacttcggccaggccctggagcagctgcagaccgcccacagccaggccgtgggcgcccccaaggtggagaccaagagcctggagtgcctgcccggccccggcctgcagctgcacgccctgagcagcctgatgaactggaccctgtggccccaggccggcggcgaggtggagatcctggaggagtag

SEQ ID NO: 92843 - DNA, 2943 bp, synthetic construct
  misc_feature 1..2943: note = Description of Artificial Sequence: Synthetic coding sequence
  source 1..2943: mol_type = other DNA
atggccctggccgtgctgagagtgctggagcccttccccaccgagaccccccccctggccgtgctgctgccccccggcggcccctggcccgccgccgagctgggcctggtgctggccctgagacccgccggcgagagccccgccggccccgccctgctggtggccgccctggagggccccgacgccggcaccgaggagcagggccccggccccccccagctgctggtgagcagagccctgctgagactgctggccctgggcagcggcgcctgggtgagagccagagccgtgagaagaccccccgccctgggctgggccctgctgggcaccagcctgggccccggcctgggccccagagtgggccccctgctggtgagaagaggcgagaccctgcccgtgcccggccccagagtgctggagaccagacccgccctgcagggcctgctgggccccggcaccagactggccgtgaccgagctgagaggcagagccagactgtgccccgagagcggcgacagcagcagacccccccccccccccgtggtgagcagcttcgccgtgagcggcaccgtgagaagactgcagggcgtgctgggcggcaccggcgacagcctgggcgtgagcagaagctgcctgagaggcctgggcctgttccagggcgagtgggtgtgggtggcccaggccagagagagcagcaacaccagccagccccacctggccagagtgcaggtgctggagcccagatgggacctgagcgacagactgggccccggcagcggccccctgggcgagcccctggccgacggcctggccctggtgcccgccaccctggccttcaacctgggctgcgaccccctggagatgggcgagctgagaatccagagatacctggagggcagcatcgcccccgaggacaagggcagctgcagcctgctgcccggcccccccttcgccagagagctgcacatcgagatcgtgagcagcccccactacagcaccaacggcaactacgacggcgtgctgtacagacacttccagatccccagagtggtgcaggagggcgacgtgctgtgcgtgcccaccatcggccaggtggagatcctggagggcagccccgagaagctgcccagatggagagagatgttcttcaaggtgaagaagaccgtgggcgaggcccccgacggccccgccagcgcctacctggccgacaccacccacaccagcctgtacatggtgggcagcaccctgagccccgtgccctggctgcccagcgaggagagcaccctgtggagcagcctgagcccccccggcctggaggccctggtgagcgagctgtgcgccgtgctgaagcccagactgcagcccggcggcgccctgctgaccggcaccagcagcgtgctgctgagaggcccccccggctgcggcaagaccaccgtggtggccgccgcctgcagccacctgggcctgcacctgctgaaggtgccctgcagcagcctgtgcgccgagagcagcggcgccgtggagaccaagctgcaggccatcttcagcagagccagaagatgcagacccgccgtgctgctgctgaccgccgtggacctgctgggcagagacagagacggcctgggcgaggacgccagagtgatggccgtgctgagacacctgctgctgaacgaggaccccctgaacagctgcccccccctgatggtggtggccaccaccagcagagcccaggacctgcccgccgacgtgcagaccgccttcccccacgagctggaggtgcccgccctgagcgagggccagagactgagcatcctgagagccctgaccgcccacctgcccctgggccaggaggtgaacctggcccagctggccagaagatgcgccggcttcgtggtgggcgacctgtacgccctgctgacccacagcagcagagccgcctgcaccagaatcaagaacagcggcctggccggcggcctgaccgaggaggacgagggcgagctgtgcgccgccggcttccccctgctggccgaggacttcggccaggccctggagcagctgcagaccgcccacagccaggccgtgggcgcccccaagatccccagcgtgagctggcacgacgtgggcggcctgcaggaggtgaagaaggagatcctggagaccatccagctgcccctggagcaccccgagctgctgagcctgggcctgagaagaagcggcctgctgctgcacggcccccccggcaccggcaagaccctgctggccaaggccgtggccaccgagtgcagcctgaccttcctgagcgtgaagggccccgagctgatcaacatgtacgtgggccagagcgaggagaacgtgagagaggtgttcgccagagccagagccgccgccccctgcatcatcttcttcgacgagctggacagcctggcccccagcagaggcagaagcggcgacagcggcggcgtgatggacagagtggtgagccagctgctggccgagctggacggcctgcacagcacccaggacgtgttcgtgatcggcgccaccaacagacccgacctgctggaccccgccctgctgagacccggcagattcgacaagctggtgttcgtgggcgccaacgaggacagagccagccagctgagagtgctgagcgccatcaccagaaagttcaagctggagcccagcgtgagcctggtgaacgtgctggactgctgccccccccagctgaccggcgccgacctgtacagcctgtgcagcgacgccatgaccgccgccctgaagagaagagtgcacgacctggaggagggcctggagcccggcagcagcgccctgatgctgaccatggaggacctgctgcaggccgccgccagactgcagcccagcgtgagcgagcaggagctgctgagatacaagagaatccagagaaagttcgccgcctgctag

SEQ ID NO: 92844 - DNA, 972 bp, synthetic construct
  misc_feature 1..972: note = Description of Artificial Sequence: Synthetic coding sequence
  source 1..972: mol_type = other DNA
atgagcgccgtgtgcggcggcgccgccagaatgctgagaacccccggcagacacggctacgccgccgagttcagcccctacctgcccggcagactggcctgcgccaccgcccagcactacggcatcgccggctgcggcaccctgctgatcctggaccccgacgaggccggcctgagactgttcagaagcttcgactggaacgacggcctgttcgacgtgacctggagcgagaacaacgagcacgtgctgatcacctgcagcggcgacggcagcctgcagctgtgggacaccgccaaggccgccggccccctgcaggtgtacaaggagcacgcccaggaggtgtacagcgtggactggagccagaccagaggcgagcagctggtggtgagcggcagctgggaccagaccgtgaagctgtgggaccccaccgtgggcaagagcctgtgcaccttcagaggccacgagagcatcatctacagcaccatctggagcccccacatccccggctgcttcgccagcgccagcggcgaccagaccctgagaatctgggacgtgaaggccgccggcgtgagaatcgtgatccccgcccaccaggccgagatcctgagctgcgactggtgcaagtacaacgagaacctgctggtgaccggcgccgtggactgcagcctgagaggctgggacctgagaaacgtgagacagcccgtgttcgagctgctgggccacacctacgccatcagaagagtgaagttcagccccttccacgccagcgtgctggccagctgcagctacgacttcaccgtgagattctggaacttcagcaagcccgacagcctgctggagaccgtggagcaccacaccgagttcacctgcggcctggacttcagcctgcagagccccacccaggtggccgactgcagctgggacgagaccatcaagatctacgaccccgcctgcctgaccatccccgcctag

SEQ ID NO: 92845 - DNA, 369 bp, synthetic construct
  misc_feature 1..369: note = Description of Artificial Sequence: Synthetic coding sequence
  source 1..369: mol_type = other DNA
atgagcgccgtgtgcggcggcgccgccagaatgctgagaacccccggcagacacggctacgccgccgagttcagcccctacctgcccggcagactggcctgcgccaccgcccagcactacggcatcgccggctgcggcaccctgctgatcctggaccccgacgaggccggcctgagactgttcagaagcttcgactggaacgacggcctgttcgacgtgacctggagcgagaacaacgagcacgtgctgatcacctgcagcggcgacggcagcctgcagctgtgggacaccgccaaggccgccggccccctgcaggtgtacaaggagcacgcccaggagtacgtgcagggcagctgcgtggtgaagtag

SEQ ID NO: 92846 - DNA, 843 bp, synthetic construct
  misc_feature 1..843: note = Description of Artificial Sequence: Synthetic coding sequence
  source 1..843: mol_type = other DNA
atgagcgccgtgtgcggcggcgccgccagaatgctgagaacccccggcagacacggctacgccgccgagttcagcccctacctgcccggcagactggcctgcgccaccgcccagcactacggcatcgccggctgcggcaccctgctgatcctggaccccgacgaggccggcctgagactgttcagaagcttcgactggaacgacggcctgttcgacgtgacctggagcgagaacaacgagcacgtgctgatcacctgcagcggcgacggcagcctgcagctgtgggacaccgccaaggccgccggccccctgcaggtgtacaaggagcacgcccaggaggtgtacagcgtggactggagccagaccagaggcgagcagctggtggtgagcggcagctgggaccagaccgtgaagctgtgggaccccaccgtgggcaagagcctgtgcaccttcagaggccacgagagcatcatctacagcaccatctggagcccccacatccccggctgcttcgccagcgccagcggcgaccagaccctgagaatctgggacgtgaaggccgccggcgtgagaatcgtgatccccgcccaccaggccgagatcctgagctgcgactggtgcaagtacaacgagaacctgctggtgaccggcgccgtggactgcagcctgagaggctgggacctgagaaacgtgagacagcccgtgttcgagctgctgggccacacctacgccatcagaagagtgaagatggagagctgccccgtgacccagaccagaagccagctgaccgccaccagcgccttctgggtgcaggccgtgctgctgccccagcccaccgagtag

SEQ ID NO: 92847 - DNA, 912 bp, synthetic construct
  misc_feature 1..912: note = Description of Artificial Sequence: Synthetic coding sequence
  source 1..912: mol_type = other DNA
atggccagctgggccaagggcagaagctacctggcccccggcctgctgcagggccaggtggccatcgtgaccggcggcgccaccggcatcggcaaggccatcgtgaaggagctgctggagctgggcagcaacgtggtgatcgccagcagaaagctggagagactgaagagcgccgccgacgagctgcaggccaacctgccccccaccaagcaggccagagtgatccccatccagtgcaacatcagaaacgaggaggaggtgaacaacctggtgaagagcaccctggacaccttcggcaagatcaacttcctggtgaacaacggcggcggccagttcctgagccccgccgagcacatcagcagcaagggctggcacgccgtgctggagaccaacctgaccggcaccttctacatgtgcaaggccgtgtacagcagctggatgaaggagcacggcggcagcatcgtgaacatcatcgtgcccaccaaggccggcttccccctggccgtgcacagcggcgccgccagagccggcgtgtacaacctgaccaagagcctggccctggagtgggcctgcagcggcatcagaatcaactgcgtggcccccggcgtgatctacagccagaccgccgtggagaactacggcagctggggccagagcttcttcgagggcagcttccagaagatccccgccaagagaatcggcgtgcccgaggaggtgagcagcgtggtgtgcttcctgctgagccccgccgccagcttcatcaccggccagagcgtggacgtggacggcggcagaagcctgtacacccacagctacgaggtgcccgaccacgacaactggcccaagggcgccggcgacctgagcgtggtgaagaagatgaaggagaccttcaaggagaaggccaagctgtag

SEQ ID NO: 92848 - DNA, 1407 bp, synthetic construct
  misc_feature 1..1407: note = Description of Artificial Sequence: Synthetic coding sequence
  source 1..1407: mol_type = other DNA
atggtggacaccgagagccccctgtgccccctgagccccctggaggccggcgacctggagagccccctgagcgaggagttcctgcaggagatgggcaacatccaggagatcagccagagcatcggcgaggacagcagcggcagcttcggcttcaccgagtaccagtacctgggcagctgccccggcagcgacggcagcgtgatcaccgacaccctgagccccgccagcagccccagcagcgtgacctaccccgtggtgcccggcagcgtggacgagagccccagcggcgccctgaacatcgagtgcagaatctgcggcgacaaggccagcggctaccactacggcgtgcacgcctgcgagggctgcaagggcttcttcagaagaaccatcagactgaagctggtgtacgacaagtgcgacagaagctgcaagatccagaagaagaacagaaacaagtgccagtactgcagattccacaagtgcctgagcgtgggcatgagccacaacgccatcagattcggcagaatgcccagaagcgagaaggccaagctgaaggccgagatcctgacctgcgagcacgacatcgaggacagcgagaccgccgacctgaagagcctggccaagagaatctacgaggcctacctgaagaacttcaacatgaacaaggtgaaggccagagtgatcctgagcggcaaggccagcaacaacccccccttcgtgatccacgacatggagaccctgtgcatggccgagaagaccctggtggccaagctggtggccaacggcatccagaacaaggaggccgaggtgagaatcttccactgctgccagtgcaccagcgtggagaccgtgaccgagctgaccgagttcgccaaggccatccccggcttcgccaacctggacctgaacgaccaggtgaccctgctgaagtacggcgtgtacgaggccatcttcgccatgctgagcagcgtgatgaacaaggacggcatgctggtggcctacggcaacggcttcatcaccagagagttcctgaagagcctgagaaagcccttctgcgacatcatggagcccaagttcgacttcgccatgaagttcaacgccctggagctggacgacagcgacatcagcctgttcgtggccgccatcatctgctgcggcgacagacccggcctgctgaacgtgggccacatcgagaagatgcaggagggcatcgtgcacgtgctgagactgcacctgcagagcaaccaccccgacgacatcttcctgttccccaagctgctgcagaagatggccgacctgagacagctggtgaccgagcacgcccagctggtgcagatcatcaagaagaccgagagcgacgccgccctgcaccccctgctgcaggagatctacagagacatgtactag

SEQ ID NO: 92849 - DNA, 1407 bp, synthetic construct; identical to SEQ ID NO: 92848
  misc_feature 1..1407: note = Description of Artificial Sequence: Synthetic coding sequence
  source 1..1407: mol_type = other DNA

SEQ ID NO: 92850 - DNA, 1407 bp, synthetic construct; identical to SEQ ID NO: 92848
  misc_feature 1..1407: note = Description of Artificial Sequence: Synthetic coding sequence
  source 1..1407: mol_type = other DNA

SEQ ID NO: 92851 - DNA, 1407 bp, synthetic construct; identical to SEQ ID NO: 92848
  misc_feature 1..1407: note = Description of Artificial Sequence: Synthetic coding sequence
  source 1..1407: mol_type = other DNA

SEQ ID NO: 92852 - DNA, 210 bp, synthetic construct
  misc_feature 1..210: note = Description of Artificial Sequence: Synthetic coding sequence
  source 1..210: mol_type = other DNA
atggtggacaccgagagccccctgtgccccctgagccccctggaggccggcgacctggagagccccctgagcgaggagttcctgcaggagatgggcaacatccaggagatcagccagagcatcggcgaggacagcagcggcagcttcggcttcaccgagtaccagtacctgggcagctgccccggcagcgacggcagcgtgatcacctag

SEQ ID NO: 92853 - DNA, 402 bp, synthetic construct
  misc_feature 1..402: note = Description of Artificial Sequence: Synthetic coding sequence
  source 1..402: mol_type = other DNA
atggtggacaccgagagccccctgtgccccctgagccccctggaggccggcgacctggagagccccctgagcgaggagttcctgcaggagatgggcaacatccaggagatcagccagagcatcggcgaggacagcagcggcagcttcggcttcaccgagtaccagtacctgggcagctgccccggcagcgacggcagcgtgatcaccgacaccctgagccccgccagcagccccagcagcgtgacctaccccgtggtgcccggcagcgtggacgagagccccagcggcgccctgaacatcgagtgcagaatctgcggcgacaaggccagcggctaccactacggcgtgcacgcctgcgagggctgcaaggtggagggcagctggaacagagcctggtggtag

SEQ ID NO: 92854 - DNA, 525 bp, synthetic construct
  misc_feature 1..525: note = Description of Artificial Sequence: Synthetic coding sequence
  source 1..525: mol_type = other DNA
atggtggacaccgagagccccctgtgccccctgagccccctggaggccggcgacctggagagccccctgagcgaggagttcctgcaggagatgggcaacatccaggagatcagccagagcatcggcgaggacagcagcggcagcttcggcttcaccgagtaccagtacctgggcagctgccccggcagcgacggcagcgtgatcaccgacaccctgagccccgccagcagccccagcagcgtgacctaccccgtggtgcccggcagcgtggacgagagccccagcggcgccctgaacatcgagtgcagaatctgcggcgacaaggccagcggctaccactacggcgtgcacgcctgcgagggctgcaagggcttcttcagaagaaccatcagactgaagctggtgtacgacaagtgcgacagaagctgcaagatccagaagaagaacagaaacaagtgccagtactgcagattccacaagtgcctgagcgtgggcatgagccacaacgccttctgccacacctag

SEQ ID NO: 92855 - DNA, 30 bp, synthetic construct
  misc_feature 1..30: note = Description of Artificial Sequence: Synthetic coding sequence
  source 1..30: mol_type = other DNA
atggtggacaccgagagccccctgtgctag

SEQ ID NO: 92856 - DNA, 489 bp, synthetic construct
  misc_feature 1..489: note = Description of Artificial Sequence: Synthetic coding sequence
  source 1..489: mol_type = other DNA
atgaacaaggtgaaggccagagtgatcctgagcggcaaggccagcaacaacccccccttcgtgatccacgacatggagaccctgtgcatggccgagaagaccctggtggccaagctggtggccaacggcatccagaacaaggaggccgaggtgagaatcttccactgctgccagtgcaccagcgtggagaccgtgaccgagctgaccgagttcgccaaggccatccccggcttcgccaacctggacctgaacgaccaggtgaccctgctgaagtacggcgtgtacgaggccatcttcgccatgctgagcagcgtgatgaacaaggacggcatgctggtggcctacggcaacggcttcatcaccagagagttcctgaagagcctgagaaagcccttctgcgacatcatggagcccaagttcgacttcgccatgaagttcaacgccctggagctggacgacagcgacatcagcctgttcgtggccgcctag

SEQ ID NO: 92857 - DNA, 1326 bp, synthetic construct
  misc_feature 1..1326: note = Description of Artificial Sequence: Synthetic coding sequence
  source 1..1326: mol_type = other DNA
atggagcagccccaggaggaggcccccgaggtgagagaggaggaggagaaggaggaggtggccgaggccgagggcgcccccgagctgaacggcggcccccagcacgccctgcccagcagcagctacaccgacctgagcagaagcagcagcccccccagcctgctggaccagctgcagatgggctgcgacggcgccagctgcggcagcctgaacatggagtgcagagtgtgcggcgacaaggccagcggcttccactacggcgtgcacgcctgcgagggctgcaagggcttcttcagaagaaccatcagaatgaagctggagtacgagaagtgcgagagaagctgcaagatccagaagaagaacagaaacaagtgccagtactgcagattccagaagtgcctggccctgggcatgagccacaacgccatcagattcggcagaatgcccgaggccgagaagagaaagctggtggccggcctgaccgccaacgagggcagccagtacaacccccaggtggccgacctgaaggccttcagcaagcacatctacaacgcctacctgaagaacttcaacatgaccaagaagaaggccagaagcatcctgaccggcaaggccagccacaccgcccccttcgtgatccacgacatcgagaccctgtggcaggccgagaagggcctggtgtggaagcagctggtgaacggcctgcccccctacaaggagatcagcgtgcacgtgttctacagatgccagtgcaccaccgtggagaccgtgagagagctgaccgagttcgccaagagcatccccagcttcagcagcctgttcctgaacgaccaggtgaccctgctgaagtacggcgtgcacgaggccatcttcgccatgctggccagcatcgtgaacaaggacggcctgctggtggccaacggcagcggcttcgtgaccagagagttcctgagaagcctgagaaagcccttcagcgacatcatcgagcccaagttcgagttcgccgtgaagttcaacgccctggagctggacgacagcgacctggccctgttcatcgccgccatcatcctgtgcggcgacagacccggcctgatgaacgtgcccagagtggaggccatccaggacaccatcctgagagccctggagttccacctgcaggccaaccaccccgacgcccagtacctgttccccaagctgctgcagaagatggccgacctgagacagctggtgaccgagcacgcccagatgatgcagagaatcaagaagaccgagaccgagaccagcctgcaccccctgctgcaggagatctacaaggacatgtactag

SEQ ID NO: 92858 - DNA, 1086 bp, synthetic construct
  misc_feature 1..1086: note = Description of Artificial Sequence: Synthetic coding sequence
  source 1..1086: mol_type = other DNA
atggagcagccccaggaggaggcccccgaggtgagagaggaggaggagaaggaggaggtggccgaggccgagggcgcccccgagctgaacggcggcccccagcacgccctgcccagcagcagctacaccgacctgagcagaagcagcagcccccccagcctgctggaccagctgcagatgggctgcgacggcgccagctgcggcagcctgaacatggagtgcagagtgtgcggcgacaaggccagcggcttccactacggcgtgcacgcctgcgagggctgcaagggcttcttcagaagaaccatcagaatgaagctggagtacgagaagtgcgagagaagctgcaagatccagaagaagaacagaaacaagtgccagtactgcagattccagaagtgcctggccctgggcatgagccacaacgccatcagattcggcagaatgcccgaggccgagaagagaaagctggtggccggcctgaccgccaacgagggcagccagtacaacccccaggtggccgacctgaaggccttcagcaagcacatctacaacgcctacctgaagaacttcaacatgaccaagaagaaggccagaagcatcctgaccggcaaggccagccacaccgcccccttcgtgatccacgacatcgagaccctgtggcaggccgagaagggcctggtgtggaagcagctggtgaacggcctgcccccctacaaggagatcagcgtgcacgtgttctacagatgccagtgcaccaccgtggagaccgtgagagagctgaccgagttcgccaagagcatccccagcttcagcagcctgttcctgaacgaccaggtgaccctgctgaagtacggcgtgcacgaggccatcttcgccatgctggccagcatcgtgaacaaggacggcctgctggtggccaacggcagcggcttcgtgaccagagagttcctgagaagcctgagaaagcccttcagcgacatcatcgagcccaagttcgagttcgccgtgaagttcaacgccctggagctggacgacagcgacctggccctgttcatcgccgccatcatcctgtgcggcggcgagtag

SEQ ID NO: 92859 - DNA, 1326 bp, synthetic construct; identical to SEQ ID NO: 92857
  misc_feature 1..1326: note = Description of Artificial Sequence: Synthetic coding sequence
  source 1..1326: mol_type = other DNA

SEQ ID NO: 92860 - DNA, 1032 bp, synthetic construct
  misc_feature 1..1032: note = Description of Artificial Sequence: Synthetic coding sequence
  source 1..1032: mol_type = other DNA
atggagcagccccaggaggaggcccccgaggtgagagaggaggaggagaaggaggaggtggccgaggccgagggcgcccccgagctgaacggcggcccccagcacgccctgcccagcagcagctacaccgccatcagattcggcagaatgcccgaggccgagaagagaaagctggtggccggcctgaccgccaacgagggcagccagtacaacccccaggtggccgacctgaaggccttcagcaagcacatctacaacgcctacctgaagaacttcaacatgaccaagaagaaggccagaagcatcctgaccggcaaggccagccacaccgcccccttcgtgatccacgacatcgagaccctgtggcaggccgagaagggcctggtgtggaagcagctggtgaacggcctgcccccctacaaggagatcagcgtgcacgtgttctacagatgccagtgcaccaccgtggagaccgtgagagagctgaccgagttcgccaagagcatccccagcttcagcagcctgttcctgaacgaccaggtgaccctgctgaagtacggcgtgcacgaggccatcttcgccatgctggccagcatcgtgaacaaggacggcctgctggtggccaacggcagcggcttcgtgaccagagagttcctgagaagcctgagaaagcccttcagcgacatcatcgagcccaagttcgagttcgccgtgaagttcaacgccctggagctggacgacagcgacctggccctgttcatcgccgccatcatcctgtgcggcgacagacccggcctgatgaacgtgcccagagtggaggccatccaggacaccatcctgagagccctggagttccacctgcaggccaaccaccccgacgcccagtacctgttccccaagctgctgcagaagatggccgacctgagacagctggtgaccgagcacgcccagatgatgcagagaatcaagaagaccgagaccgagaccagcctgcaccccctgctgcaggagatctacaaggacatgtactag

SEQ ID NO: 92861 - DNA, 1086 bp, synthetic construct; identical to SEQ ID NO: 92858
  misc_feature 1..1086: note = Description of Artificial Sequence: Synthetic coding sequence
  source 1..1086: mol_type = other DNA

SEQ ID NO: 92862 - DNA, 1209 bp, synthetic construct
  misc_feature 1..1209: note = Description of Artificial Sequence: Synthetic coding sequence
  source 1..1209: mol_type = other DNA
atgcaccagagagacctgagcagaagcagcagcccccccagcctgctggaccagctgcagatgggctgcgacggcgccagctgcggcagcctgaacatggagtgcagagtgtgcggcgacaaggccagcggcttccactacggcgtgcacgcctgcgagggctgcaagggcttcttcagaagaaccatcagaatgaagctggagtacgagaagtgcgagagaagctgcaagatccagaagaagaacagaaacaagtgccagtactgcagattccagaagtgcctggccctgggcatgagccacaacgccatcagattcggcagaatgcccgaggccgagaagagaaagctggtggccggcctgaccgccaacgagggcagccagtacaacccccaggtggccgacctgaaggccttcagcaagcacatctacaacgcctacctgaagaacttcaacatgaccaagaagaaggccagaagcatcctgaccggcaaggccagccacaccgcccccttcgtgatccacgacatcgagaccctgtggcaggccgagaagggcctggtgtggaagcagctggtgaacggcctgcccccctacaaggagatcagcgtgcacgtgttctacagatgccagtgcaccaccgtggagaccgtgagagagctgaccgagttcgccaagagcatccccagcttcagcagcctgttcctgaacgaccaggtgaccctgctgaagtacggcgtgcacgaggccatcttcgccatgctggccagcatcgtgaacaaggacggcctgctggtggccaacggcagcggcttcgtgaccagagagttcctgagaagcctgagaaagcccttcagcgacatcatcgagcccaagttcgagttcgccgtgaagttcaacgccctggagctggacgacagcgacctggccctgttcatcgccgccatcatcctgtgcggcgacagacccggcctgatgaacgtgcccagagtggaggccatccaggacaccatcctgagagccctggagttccacctgcaggccaaccaccccgacgcccagtacctgttccccaagctgctgcagaagatggccgacctgagacagctggtgaccgagcacgcccagatgatgcagagaatcaagaagaccgagaccgagaccagcctgcaccccctgctgcaggagatctacaaggacatgtactag

SEQ ID NO: 92863 - DNA, 1017 bp, synthetic construct
  misc_feature 1..1017: note = Description of Artificial Sequence: Synthetic coding sequence
  source 1..1017: mol_type = other DNA
atgaagctggagtacgagaagtgcgagagaagctgcaagatccagaagaagaacagaaacaagtgccagtactgcagattccagaagtgcctggccctgggcatgagccacaacgccatcagattcggcagaatgcccgaggccgagaagagaaagctggtggccggcctgaccgccaacgagggcagccagtacaacccccaggtggccgacctgaaggccttcagcaagcacatctacaacgcctacctgaagaacttcaacatgaccaagaagaaggccagaagcatcctgaccggcaaggccagccacaccgcccccttcgtgatccacgacatcgagaccctgtggcaggccgagaagggcctggtgtggaagcagctggtgaacggcctgcccccctacaaggagatcagcgtgcacgtgttctacagatgccagtgcaccaccgtggagaccgtgagagagctgaccgagttcgccaagagcatccccagcttcagcagcctgttcctgaacgaccaggtgaccctgctgaagtacggcgtgcacgaggccatcttcgccatgctggccagcatcgtgaacaaggacggcctgctggtggccaacggcagcggcttcgtgaccagagagttcctgagaagcctgagaaagcccttcagcgacatcatcgagcccaagttcgagttcgccgtgaagttcaacgccctggagctggacgacagcgacctggccctgttcatcgccgccatcatcctgtgcggcgacagacccggcctgatgaacgtgcccagagtggaggccatccaggacaccatcctgagagccctggagttccacctgcaggccaaccaccccgacgcccagtacctgttccccaagctgctgcagaagatggccgacctgagacagctggtgaccgagcacgcccagatgatgcagagaatcaagaagaccgagaccgagaccagcctgcaccccctgctgcaggagatctacaaggacatgtactag

SEQ ID NO: 92864 - DNA, 1518 bp, synthetic construct
  misc_feature 1..1518: note = Description of Artificial Sequence: Synthetic coding sequence
  source 1..1518: mol_type = other DNA
atgggcgagaccctgggcgacagccccatcgaccccgagagcgacagcttcaccgacaccctgagcgccaacatcagccaggagatgaccatggtggacaccgagatgcccttctggcccaccaacttcggcatcagcagcgtggacctgagcgtgatggaggaccacagccacagcttcgacatcaagcccttcaccaccgtggacttcagcagcatcagcaccccccactacgaggacatccccttcaccagaaccgaccccgtggtggccgactacaagtacgacctgaagctgcaggagtaccagagcgccatcaaggtggagcccgccagccccccctactacagcgagaagacccagctgtacaacaagccccacgaggagcccagcaacagcctgatggccatcgagtgcagagtgtgcggcgacaaggccagcggcttccactacggcgtgcacgcctgcgagggctgcaagggcttcttcagaagaaccatcagactgaagctgatctacgacagatgcgacctgaactgcagaatccacaagaagagcagaaacaagtgccagtactgcagattccagaagtgcctggccgtgggcatgagccacaacgccatcagattcggcagaatgccccaggccgagaaggagaagctgctggccgagatcagcagcgacatcgaccagctgaaccccgagagcgccgacctgagagccctggccaagcacctgtacgacagctacatcaagagcttccccctgaccaaggccaaggccagagccatcctgaccggcaagaccaccgacaagagccccttcgtgatctacgacatgaacagcctgatgatgggcgaggacaagatcaagttcaagcacatcacccccctgcaggagcagagcaaggaggtggccatcagaatcttccagggctgccagttcagaagcgtggaggccgtgcaggagatcaccgagtacgccaagagcatccccggcttcgtgaacctggacctgaacgaccaggtgaccctgctgaagtacggcgtgcacgagatcatctacaccatgctggccagcctgatgaacaaggacggcgtgctgatcagcgagggccagggcttcatgaccagagagttcctgaagagcctgagaaagcccttcggcgacttcatggagcccaagttcgagttcgccgtgaagttcaacgccctggagctggacgacagcgacctggccatcttcatcgccgtgatcatcctgagcggcgacagacccggcctgctgaacgtgaagcccatcgaggacatccaggacaacctgctgcaggccctggagctgcagctgaagctgaaccaccccgagagcagccagctgttcgccaagctgctgcagaagatgaccgacctgagacagatcgtgaccgagcacgtgcagctgctgcaggtgatcaagaagaccgagaccgacatgagcctgcaccccctgctgcaggagatctacaaggacctgtactag

SEQ ID NO: 92865 - DNA, 1434 bp, synthetic construct
  misc_feature 1..1434: note = Description of Artificial Sequence: Synthetic coding sequence
  source 1..1434: mol_type = other DNA
atgaccatggtggacaccgagatgcccttctggcccaccaacttcggcatcagcagcgtggacctgagcgtgatggaggaccacagccacagcttcgacatcaagcccttcaccaccgtggacttcagcagcatcagcaccccccactacgaggacatccccttcaccagaaccgaccccgtggtggccgactacaagtacgacctgaagctgcaggagtaccagagcgccatcaaggtggagcccgccagccccccctactacagcgagaagacccagctgtacaacaagccccacgaggagcccagcaacagcctgatggccatcgagtgcagagtgtgcggcgacaaggccagcggcttccactacggcgtgcacgcctgcgagggctgcaagggcttcttcagaagaaccatcagactgaagctgatctacgacagatgcgacctgaactgcagaatccacaagaagagcagaaacaagtgccagtactgcagattccagaagtgcctggccgtgggcatgagccacaacgccatcagattcggcagaatgccccaggccgagaaggagaagctgctggccgagatcagcagcgacatcgaccagctgaaccccgagagcgccgacctgagagccctggccaagcacctgtacgacagctacatcaagagcttccccctgaccaaggccaaggccagagccatcctgaccggcaagaccaccgacaagagccccttcgtgatctacgacatgaacagcctgatgatgggcgaggacaagatcaagttcaagcacatcacccccctgcaggagcagagcaaggaggtggccatcagaatcttccagggctgccagttcagaagcgtggaggccgtgcaggagatcaccgagtacgccaagagcatccccggcttcgtgaacctggacctgaacgaccaggtgaccctgctgaagtacggcgtgcacgagatcatctacaccatgctggccagcctgatgaacaaggacggcgtgctgatcagcgagggccagggcttcatgaccagagagttcctgaagagcctgagaaagcccttcggcgacttcatggagcccaagttcgagttcgccgtgaagttcaacgccctggagctggacgacagcgacctggccatcttcatcgccgtgatcatcctgagcggcgacagacccggcctgctgaacgtgaagcccatcgaggacatccaggacaacctgctgcaggccctggagctgcagctgaagctgaaccaccccgagagcagccagctgttcgccaagctgctgcagaagatgaccgacctgagacagatcgtgaccgagcacgtgcagctgctgcaggtgatcaagaagaccgagaccgacatgagcctgcaccccctgctgcaggagatctacaaggacctgtactag

SEQ ID NO: 92866 - DNA, 753 bp, synthetic construct
  misc_feature 1..753: note = Description of Artificial Sequence: Synthetic coding sequence
  source 1..753: mol_type = other DNA
atgaccatggtggacaccgagatgcccttctggcccaccaacttcggcatcagcagcgtggacctgagcgtgatggaggaccacagccacagcttcgacatcaagcccttcaccaccgtggacttcagcagcatcagcaccccccactacgaggacatccccttcaccagaaccgaccccgtggtggccgactacaagtacgacctgaagctgcaggagtaccagagcgccatcaaggtggagcccgccagccccccctactacagcgagaagacccagctgtacaacaagccccacgaggagcccagcaacagcctgatggccatcgagtgcagagtgtgcggcgacaaggccagcggcttccactacggcgtgcacgcctgcgagggctgcaagggcttcttcagaagaaccatcagactgaagctgatctacgacagatgcgacctgaactgcagaatccacaagaagagcagaaacaagtgccagtactgcagattccagaagtgcctggccgtgggcatgagccacaacgccatcagattcggcagaatgccccaggccgagaaggagaagctgctggccgagatcagcagcgacatcgaccagctgaaccccgagagcgccgacctgagagccctggccaagcacctgtacgacagctacatcaagagcttccccctgaccaaggccaaggccagagccatcctgaccggcaagaccaccgacaagagcaccgcccaggtgtgctag

SEQ ID NO: 92867 - DNA, 1434 bp, synthetic construct; identical to SEQ ID NO: 92865
  misc_feature 1..1434: note = Description of Artificial Sequence: Synthetic coding sequence
  source 1..1434: mol_type = other DNA

SEQ ID NO: 92868 - DNA, 1434 bp, synthetic construct; identical to SEQ ID NO: 92865
  misc_feature 1..1434: note = Description of Artificial Sequence: Synthetic coding sequence
  source 1..1434: mol_type = other DNA

SEQ ID NO: 92869 - DNA, 1434 bp, synthetic construct; identical to SEQ ID NO: 92865
  misc_feature 1..1434: note = Description of Artificial Sequence: Synthetic coding sequence
  source 1..1434: mol_type = other DNA

SEQ ID NO: 92870 - DNA, 1452 bp, synthetic construct
  misc_feature 1..1452: note = Description of Artificial Sequence: Synthetic coding sequence
  source 1..1452: mol_type = other DNA
atgaagggcttcagcgagatgaccatggtggacaccgagatgcccttctggcccaccaacttcggcatcagcagcgtggacctgagcgtgatggaggaccacagccacagcttcgacatcaagcccttcaccaccgtggacttcagcagcatcagcaccccccactacgaggacatccccttcaccagaaccgaccccgtggtggccgactacaagtacgacctgaagctgcaggagtaccagagcgccatcaaggtggagcccgccagccccccctactacagcgagaagacccagctgtacaacaagccccacgaggagcccagcaacagcctgatggccatcgagtgcagagtgtgcggcgacaaggccagcggcttccactacggcgtgcacgcctgcgagggctgcaagggcttcttcagaagaaccatcagactgaagctgatctacgacagatgcgacctgaactgcagaatccacaagaagagcagaaacaagtgccagtactgcagattccagaagtgcctggccgtgggcatgagccacaacgccatcagattcggcagaatgccccaggccgagaaggagaagctgctggccgagatcagcagcgacatcgaccagctgaaccccgagagcgccgacctgagagccctggccaagcacctgtacgacagctacatcaagagcttccccctgaccaaggccaaggccagagccatcctgaccggcaagaccaccgacaagagccccttcgtgatctacgacatgaacagcctgatgatgggcgaggacaagatcaagttcaagcacatcacccccctgcaggagcagagcaaggaggtggccatcagaatcttccagggctgccagttcagaagcgtggaggccgtgcaggagatcaccgagtacgccaagagcatccccggcttcgtgaacctggacctgaacgaccaggtgaccctgctgaagtacggcgtgcacgagatcatctacaccatgctggccagcctgatgaacaaggacggcgtgctgatcagcgagggccagggcttcatgaccagagagttcctgaagagcctgagaaagcccttcggcgacttcatggagcccaagttcgagttcgccgtgaagttcaacgccctggagctggacgacagcgacctggccatcttcatcgccgtgatcatcctgagcggcgacagacccggcctgctgaacgtgaagcccatcgaggacatccaggacaacctgctgcaggccctggagctgcagctgaagctgaaccaccccgagagcagccagctgttcgccaagctgctgcagaagatgaccgacctgagacagatcgtgaccgagcacgtgcagctgctgcaggtgatcaagaagaccgagaccgacatgagcctgcaccccctgctgcaggagatctacaaggacctgtactag

SEQ ID NO: 92871 - DNA, 399 bp, synthetic construct
  misc_feature 1..399: note = Description of Artificial Sequence: Synthetic coding sequence
  source 1..399: mol_type = other DNA
atgaccatggtggacaccgagatgcccttctggcccaccaacttcggcatcagcagcgtggacctgagcgtgatggaggaccacagccacagcttcgacatcaagcccttcaccaccgtggacttcagcagcatcagcaccccccactacgaggacatccccttcaccagaaccgaccccgtggtggccgactacaagtacgacctgaagctgcaggagtaccagagcgccatcaaggtggagcccgccagccccccctactacagcgagaagacccagctgtacaacaagccccacgaggagcccagcaacagcctgatggccatcgagtgcagagtgtgcggcgacaaggccagcggcttccactacggcgtgcacgcctgcgagggctgcaagtag

SEQ ID NO: 92872 - DNA, 300 bp, synthetic construct
  misc_feature 1..300: note = Description of Artificial Sequence: Synthetic coding sequence
  source 1..300: mol_type = other DNA
atgaccatggtggacaccgagatgcccttctggcccaccaacttcggcatcagcagcgtggacctgagcgtgatggaggaccacagccacagcttcgacatcaagcccttcaccaccgtggacttcagcagcatcagcaccccccactacgaggacatccccttcaccagaaccgaccccgtggtggccgactacaagtacgacctgaagctgcaggagtaccagagcgccatcaaggtggagcccgccagccccccctactacagcgagaagacccagctgtacaacaagccccactag

SEQ ID NO: 92873 - DNA, 132 bp, synthetic construct
  misc_feature 1..132: note = Description of Artificial Sequence: Synthetic coding sequence
  source 1..132: mol_type = other DNA
atgaccatggtggacaccgagatgcccttctggcccaccaacttcggcatcagcagcgtggacctgagcgtgatggaggaccacagccacagcttcgacatcaagcccttcaccaccgtggacttcagctag

SEQ ID NO: 92874 - DNA, 747 bp, synthetic construct
  misc_feature 1..747: note = Description of Artificial Sequence: Synthetic coding sequence
  source 1..747: mol_type = other DNA
atggtggacaccgagatgcccttctggcccaccaacttcggcatcagcagcgtggacctgagcgtgatggaggaccacagccacagcttcgacatcaagcccttcaccaccgtggacttcagcagcatcagcaccccccactacgaggacatccccttcaccagaaccgaccccgtggtggccgactacaagtacgacctgaagctgcaggagtaccagagcgccatcaaggtggagcccgccagccccccctactacagcgagaagacccagctgtacaacaagccccacgaggagcccagcaacagcctgatggccatcgagtgcagagtgtgcggcgacaaggccagcggcttccactacggcgtgcacgcctgcgagggctgcaagggcttcttcagaagaaccatcagactgaagctgatctacgacagatgcgacctgaactgcagaatccacaagaagagcagaaacaagtgccagtactgcagattccagaagtgcctggccgtgggcatgagccacaacgccatcagattcggcagaatgccccaggccgagaaggagaagctgctggccgagatcagcagcgacatcgaccagctgaaccccgagagcgccgacctgagagccctggccaagcacctgtacgacagctacatcaagagcttccccctgaccaaggccaaggccagagccatcctgaccggcaagaccaccgacaagagcaccgcccaggtgtgctag

SEQ ID NO: 92875 - DNA, 2955 bp, synthetic construct
  misc_feature 1..2955: note = Description of Artificial Sequence: Synthetic coding sequence
  source 1..2955: mol_type = other DNA
atggccggcaacgactgcggcgccctgctggacgaggagctgagcagcttcttcctgaactacctggccgacacccagggcggcggcagcggcgaggagcagctgtacgccgacttccccgagctggacctgagccagctggacgccagcgacttcgacagcgccacctgcttcggcgagctgcagtggtgccccgagaacagcgagaccgagcccaaccagtacagccccgacgacagcgagctgttccagatcgacagcgagaacgaggccctgctggccgagctgaccaagaccctggacgacatccccgaggacgacgtgggcctggccgccttccccgccctggacggcggcgacgccctgagctgcaccagcgccagccccgcccccagcagcgccccccccagccccgcccccgagaagcccagcgcccccgcccccgaggtggacgagctgagcctggccgacagcacccaggacaagaaggcccccatgatgcagagccagagcagaagctgcaccgagctgcacaagcacctgaccagcgcccagtgctgcctgcaggacagaggcctgcagcccccctgcctgcagagccccagactgcccgccaaggaggacaaggagcccggcgaggactgccccagcccccagcccgcccccgccagccccagagacagcctggccctgggcagagccgaccccggcgcccccgtgagccaggaggacatgcaggccatggtgcagctgatcagatacatgcacacctactgcctgccccagagaaagctgcccccccagacccccgagcccctgcccaaggcctgcagcaaccccagccagcaggtgagaagcagaccctggagcagacaccacagcaaggccagctgggccgagttcagcatcctgagagagctgctggcccaggacgtgctgtgcgacgtgagcaagccctacagactggccacccccgtgtacgccagcctgacccccagaagcagacccagaccccccaaggacagccaggccagccccggcagacccagcagcgtggaggaggtgagaatcgccgccagccccaagagcaccggccccagacccagcctgagacccctgagactggaggtgaagagagaggtgagaagacccgccagactgcagcagcaggaggaggaggacgaggaggaggaggaggaggaggaggaggaggagaaggaggaggaggaggagtggggcagaaagagacccggcagaggcctgccctggaccaagctgggcagaaagctggagagcagcgtgtgccccgtgagaagaagcagaagactgaaccccgagctgggcccctggctgaccttcgccgacgagcccctggtgcccagcgagccccagggcgccctgcccagcctgtgcctggcccccaaggcctacgacgtggagagagagctgggcagccccaccgacgaggacagcggccaggaccagcagctgctgagaggcccccagatccccgccctggagagcccctgcgagagcggctgcggcgacatggacgaggaccccagctgcccccagctgccccccagagacagccccagatgcctgatgctggccctgagccagagcgaccccaccttcggcaagaagagcttcgagcagaccctgaccgtggagctgtgcggcaccgccggcctgaccccccccaccacccccccctacaagcccaccgaggaggaccccttcaagcccgacatcaagcacagcctgggcaaggagatcgccctgagcctgcccagccccgagggcctgagcctgaaggccacccccggcgccgcccacaagctgcccaagaagcaccccgagagaagcgagctgctgagccacctgagacacgccaccgcccagcccgccagccaggccggccagaagagacccttcagctgcagcttcggcgaccacgactactgccaggtgctgagacccgagggcgtgctgcagagaaaggtgctgagaagctgggagcccagcggcgtgcacctggaggactggccccagcagggcgccccctgggccgaggcccaggcccccggcagagaggaggacagaagctgcgacgccggcgccccccccaaggacagcaccctgctgagagaccacgagatcagagccagcctgaccaagcacttcggcctgctggagaccgccctggaggaggaggacctggccagctgcaagagccccgagtacgacaccgtgttcgaggacagcagcagcagcagcggcgagagcagcttcctgcccgaggaggaggaggaggagggcgaggaggaggaggaggacgacgaggaggaggacagcggcgtgagccccacctgcagcgaccactgcccctaccagagcccccccagcaaggccaacagacagctgtgcagcagaagcagaagcagcagcggcagcagcccctgccacagctggagccccgccaccagaagaaacttcagatgcgagagcagaggcccctgcagcgacagaacccccagcatcagacacgccagaaagagaagagagaaggccatcggcgagggcagagtggtgtacatccagaacctgagcagcgacatgagcagcagagagctgaagagaagattcgaggtgttcggcgagatcgaggagtgcgaggtgctgaccagaaacagaagaggcgagaagtacggcttcatcacctacagatgcagcgagcacgccgccctgagcctgaccaagggcgccgccctgagaaagagaaacgagcccagcttccagctgagctacggcggcctgagacacttctgctggcccagatacaccgactacgacagcaacagcgaggaggccctgcccgccagcggcaagagcaagtacgaggccatggacttcgacagcctgctgaaggaggcccagcagagcctgcactag

SEQ ID NO: 92876 - DNA, 2880 bp, synthetic construct
  misc_feature 1..2880: note = Description of Artificial Sequence: Synthetic coding sequence
  source 1..2880: mol_type = other DNA
atgggcggcggcagcggcgaggagcagctgtacgccgacttccccgagctggacctgagccagctggacgccagcgacttcgacagcgccacctgcttcggcgagctgcagtggtgccccgagaacagcgagaccgagcccaaccagtacagccccgacgacagcgagctgttccagatcgacagcgagaacgaggccctgctggccgagctgaccaagaccctggacgacatccccgaggacgacgtgggcctggccgccttccccgccctggacggcggcgacgccctgagctgcaccagcgccagccccgcccccagcagcgccccccccagccccgcccccgagaagcccagcgcccccgcccccgaggtggacgagctgagcctggccgacagcacccaggacaagaaggcccccatgatgcagagccagagcagaagctgcaccgagctgcacaagcacctgaccagcgcccagtgctgcctgcaggacagaggcctgcagcccccctgcctgcagagccccagactgcccgccaaggaggacaaggagcccggcgaggactgccccagcccccagcccgcccccgccagccccagagacagcctggccctgggcagagccgaccccggcgcccccgtgagccaggaggacatgcaggccatggtgcagctgatcagatacatgcacacctactgcctgccccagagaaagctgcccccccagacccccgagcccctgcccaaggcctgcagcaaccccagccagcaggtgagaagcagaccctggagcagacaccacagcaaggccagctgggccgagttcagcatcctgagagagctgctggcccaggacgtgctgtgcgacgtgagcaagccctacagactggccacccccgtgtacgccagcctgacccccagaagcagacccagaccccccaaggacagccaggccagccccggcagacccagcagcgtggaggaggtgagaatcgccgccagccccaagagcaccggccccagacccagcctgagacccctgagactggaggtgaagagagaggtgagaagacccgccagactgcagcagcaggaggaggaggacgaggaggaggaggaggaggaggaggaggaggagaaggaggaggaggaggagtggggcagaaagagacccggcagaggcctgccctggaccaagctgggcagaaagctggagagcagcgtgtgccccgtgagaagaagcagaagactgaaccccgagctgggcccctggctgaccttcgccgacgagcccctggtgcccagcgagccccagggcgccctgcccagcctgtgcctggcccccaaggcctacgacgtggagagagagctgggcagccccaccgacgaggacagcggccaggaccagcagctgctgagaggcccccagatccccgccctggagagcccctgcgagagcggctgcggcgacatggacgaggaccccagctgcccccagctgccccccagagacagccccagatgcctgatgctggccctgagccagagcgaccccaccttcggcaagaagagcttcgagcagaccctgaccgtggagctgtgcggcaccgccggcctgaccccccccaccacccccccctacaagcccaccgaggaggaccccttcaagcccgacatcaagcacagcctgggcaaggagatcgccctgagcctgcccagccccgagggcctgagcctgaaggccacccccggcgccgcccacaagctgcccaagaagcaccccgagagaagcgagctgctgagccacctgagacacgccaccgcccagcccgccagccaggccggccagaagagacccttcagctgcagcttcggcgaccacgactactgccaggtgctgagacccgagggcgtgctgcagagaaaggtgctgagaagctgggagcccagcggcgtgcacctggaggactggccccagcagggcgccccctgggccgaggcccaggcccccggcagagaggaggacagaagctgcgacgccggcgccccccccaaggacagcaccctgctgagagaccacgagatcagagccagcctgaccaagcacttcggcctgctggagaccgccctggaggaggaggacctggccagctgcaagagccccgagtacgacaccgtgttcgaggacagcagcagcagcagcggcgagagcagcttcctgcccgaggaggaggaggaggagggcgaggaggaggaggaggacgacgaggaggaggacagcggcgtgagccccacctgcagcgaccactgcccctaccagagcccccccagcaaggccaacagacagctgtgcagcagaagcagaagcagcagcggcagcagcccctgccacagctggagccccgccaccagaagaaacttcagatgcgagagcagaggcccctgcagcgacagaacccccagcatcagacacgccagaaagagaagagagaaggccatcggcgagggcagagtggtgtacatccagaacctgagcagcgacatgagcagcagagagctgaagagaagattcgaggtgttcggcgagatcgaggagtgcgaggtgctgaccagaaacagaagaggcgagaagtacggcttcatcacctacagatgcagcgagcacgccgccctgagcctgaccaagggcgccgccctgagaaagagaaacgagcccagcttccagctgagctacggcggcctgagacacttctgctggcccagatacaccgactacgacagcaacagcgaggaggccctgcccgccagcggcaagagcaagtacgaggccatggacttcgacagcctgctgaaggaggcccagcagagcctgcactag

SEQ ID NO: 92877 - DNA, 2397 bp, synthetic construct
  misc_feature 1..2397: note = Description of Artificial Sequence: Synthetic coding sequence
  source 1..2397: mol_type = other DNA
atggcctgggacatgtgcaaccaggacagcgagagcgtgtggagcgacatcgagtgcgccgccctggtgggcgaggaccagcccctgtgccccgacctgcccgagctggacctgagcgagctggacgtgaacgacctggacaccgacagcttcctgggcggcctgaagtggtgcagcgaccagagcgagatcatcagcaaccagtacaacaacgagcccagcaacatcttcgagaagatcgacgaggagaacgaggccaacctgctggccgtgctgaccgagaccctggacagcctgcccgtggacgaggacggcctgcccagcttcgacgccctgaccgacggcgacgtgaccaccgacaacgaggccagccccagcagcatgcccgacggcaccccccccccccaggaggccgaggagcccagcctgctgaagaagctgctgctggcccccgccaacacccagctgagctacaacgagtgcagcggcctgagcacccagaaccacgccaaccacaaccacagaatcagaaccaaccccgccatcgtgaagaccgagaacagctggagcaacaaggccaagagcatctgccagcagcagaagccccagagaagaccctgcagcgagctgctgaagtacctgaccaccaacgacgaccccccccacaccaagcccaccgagaacagaaacagcagcagagacaagtgcaccagcaagaagaagagccacacccagagccagagccagcacctgcaggccaagcccaccaccctgagcctgcccctgacccccgagagccccaacgaccccaagggcagccccttcgagaacaagaccatcgagagaaccctgagcgtggagctgagcggcaccgccggcctgaccccccccaccacccccccccacaaggccaaccaggacaaccccttcagagccagccccaagctgaagagcagctgcaagaccgtggtgcccccccccagcaagaagcccagatacagcgagagcagcggcacccagggcaacaacagcaccaagaagggccccgagcagagcgagctgtacgcccagctgagcaagagcagcgtgctgaccggcggccacgaggagagaaagaccaagagacccagcctgagactgttcggcgaccacgactactgccagagcatcaacagcaagaccgagatcctgatcaacatcagccaggagctgcaggacagcagacagctggagaacaaggacgtgagcagcgactggcagggccagatctgcagcagcaccgacagcgaccagtgctacctgagagagaccctggaggccagcaagcaggtgagcccctgcagcaccagaaagcagctgcaggaccaggagatcagagccgagctgaacaagcacttcggccaccccagccaggccgtgttcgacgacgaggccgacaagaccggcgagctgagagacagcgacttcagcaacgagcagttcagcaagctgcccatgttcatcaacagcggcctggccatggacggcctgttcgacgacagcgaggacgagagcgacaagctgagctacccctgggacggcacccagagctacagcctgttcaacgtgagccccagctgcagcagcttcaacagcccctgcagagacagcgtgagcccccccaagagcctgttcagccagagaccccagagaatgagaagcagaagcagaagcttcagcagacacagaagctgcagcagaagcccctacagcagaagcagaagcagaagccccggcagcagaagcagcagcagaagctgctactactacgagagcagccactacagacacagaacccacagaaacagccccctgtacgtgagaagcagaagcagaagcccctacagcagaagacccagatacgacagctacgaggagtaccagcacgagagactgaagagagaggagtacagaagagagtacgagaagagagagagcgagagagccaagcagagagagagacagagacagaaggccatcgaggagagaagagtgatctacgtgggcaagatcagacccgacaccaccagaaccgagctgagagacagattcgaggtgttcggcgagatcgaggagtgcaccgtgaacctgagagacgacggcgacagctacggcttcatcacctacagatacacctgcgacgccttcgccgccctggagaacggctacaccctgagaagaagcaacgagaccgacttcgagctgtacttctgcggcagaaagcagttcttcaagagcaactacgccgacctggacagcaacagcgacgacttcgaccccgccagcaccaagagcaagtacgacagcctggacttcgacagcctgctgaaggaggcccagagaagcctgagaagatag

SEQ ID NO: 92878 - DNA, 3072 bp, synthetic construct
  misc_feature 1..3072: note = Description of Artificial Sequence: Synthetic coding sequence
  source 1..3072: mol_type = other DNA
atggccggcaacgactgcggcgccctgctggacgaggagctgagcagcttcttcctgaactacctggccgacacccagggcggcggcagcggcgaggagcagctgtacgccgacttccccgagctggacctgagccagctggacgccagcgacttcgacagcgccacctgcttcggcgagctgcagtggtgccccgagaacagcgagaccgagcccaaccagtacagccccgacgacagcgagctgttccagatcgacagcgagaacgaggccctgctggccgagctgaccaagaccctggacgacatccccgaggacgacgtgggcctggccgccttccccgccctggacggcggcgacgccctgagctgcaccagcgccagccccgcccccagcagcgccccccccagccccgcccccgagaagcccagcgcccccgcccccgaggtggacgagctgagcctgctgcagaagctgctgctggccaccagctaccccaccagcagcagcgacacccagaaggagggcaccgcctggagacaggccggcctgagaagcaagagccagagaccctgcgtgaaggccgacagcacccaggacaagaaggcccccatgatgcagagccagagcagaagctgcaccgagctgcacaagcacctgaccagcgcccagtgctgcctgcaggacagaggcctgcagcccccctgcctgcagagccccagactgcccgccaaggaggacaaggagcccggcgaggactgccccagcccccagcccgcccccgccagccccagagacagcctggccctgggcagagccgaccccggcgcccccgtgagccaggaggacatgcaggccatggtgcagctgatcagatacatgcacacctactgcctgccccagagaaagctgcccccccagacccccgagcccctgcccaaggcctgcagcaaccccagccagcaggtgagaagcagaccctggagcagacaccacagcaaggccagctgggccgagttcagcatcctgagagagctgctggcccaggacgtgctgtgcgacgtgagcaagccctacagactggccacccccgtgtacgccagcctgacccccagaagcagacccagaccccccaaggacagccaggccagccccggcagacccagcagcgtggaggaggtgagaatcgccgccagccccaagagcaccggccccagacccagcctgagacccctgagactggaggtgaagagagaggtgagaagacccgccagactgcagcagcaggaggaggaggacgaggaggaggaggaggaggaggaggaggaggagaaggaggaggaggaggagtggggcagaaagagacccggcagaggcctgccctggaccaagctgggcagaaagctggagagcagcgtgtgccccgtgagaagaagcagaagactgaaccccgagctgggcccctggctgaccttcgccgacgagcccctggtgcccagcgagccccagggcgccctgcccagcctgtgcctggcccccaaggcctacgacgtggagagagagctgggcagccccaccgacgaggacagcggccaggaccagcagctgctgagaggcccccagatccccgccctggagagcccctgcgagagcggctgcggcgacatggacgaggaccccagctgcccccagctgccccccagagacagccccagatgcctgatgctggccctgagccagagcgaccccaccttcggcaagaagagcttcgagcagaccctgaccgtggagctgtgcggcaccgccggcctgaccccccccaccacccccccctacaagcccaccgaggaggaccccttcaagcccgacatcaagcacagcctgggcaaggagatcgccctgagcctgcccagccccgagggcctgagcctgaaggccacccccggcgccgcccacaagctgcccaagaagcaccccgagagaagcgagctgctgagccacctgagacacgccaccgcccagcccgccagccaggccggccagaagagacccttcagctgcagcttcggcgaccacgactactgccaggtgctgagacccgagggcgtgctgcagagaaaggtgctgagaagctgggagcccagcggcgtgcacctggaggactggccccagcagggcgccccctgggccgaggcccaggcccccggcagagaggaggacagaagctgcgacgccggcgccccccccaaggacagcaccctgctgagagaccacgagatcagagccagcctgaccaagcacttcggcctgctggagaccgccctggaggaggaggacctggccagctgcaagagccccgagtacgacaccgtgttcgaggacagcagcagcagcagcggcgagagcagcttcctgcccgaggaggaggaggaggagggcgaggaggaggaggaggacgacgaggaggaggacagcggcgtgagccccacctgcagcgaccactgcccctaccagagcccccccagcaaggccaacagacagctgtgcagcagaagcagaagcagcagcggcagcagcccctgccacagctggagccccgccaccagaagaaacttcagatgcgagagcagaggcccctgcagcgacagaacccccagcatcagacacgccagaaagagaagagagaaggccatcggcgagggcagagtggtgtacatccagaacctgagcagcgacatgagcagcagagagctgaagagaagattcgaggtgttcggcgagatcgaggagtgcgaggtgctgaccagaaacagaagaggcgagaagtacggcttcatcacctacagatgcagcgagcacgccgccctgagcctgaccaagggcgccgccctgagaaagagaaacgagcccagcttccagctgagctacggcggcctgagacacttctgctggcccagatacaccgactacgacagcaacagcgaggaggccctgcccgccagcggcaagagcaagtacgaggccatggacttcgacagcctgctgaaggaggcccagcagagcctgcactag

SEQ ID NO: 92879 - DNA, 3054 bp, synthetic construct
  misc_feature 1..3054: note = Description of Artificial Sequence: Synthetic coding sequence
  source 1..3054: mol_type = other DNA
atggccggcaacgactgcggcgccctgctggacgaggagctgagcagcttcttcctgaactacctggccgacacccagggcggcggcagcggcgaggagcagctgtacgccgacttccccgagctggacctgagccagctggacgccagcgacttcgacagcgccacctgcttcggcgagctgcagtggtgccccgagaacagcgagaccgagcccaaccagtacagccccgacgacagcgagctgttccagatcgacagcgagaacgaggccctgctggccgagctgaccaagaccctggacgacatccccgaggacgacgtgggcctggccgccttccccgccctggacggcggcgacgccctgagctgcaccagcgccagccccgcccccagcagcgccccccccagccccgcccccgagaagcccagcgcccccgcccccgaggtggacgagctgagcctgctgcagaagctgctgctggccaccagctaccccaccagcagcagcgacacccagaaggagggcaccgcctggagacaggccggcctgagaagcaagagccagagaccctgcgtgaaggccgacagcacccaggacaagaaggcccccatgatgcagagccagagcagaagctgcaccgagctgcacaagcacctgaccagcgcccagtgctgcctgcaggacagaggcctgcagcccccctgcctgcagagccccagactgcccgccaaggaggacaaggagcccggcgaggactgccccagcccccagcccgcccccgccagccccagagacagcctggccctgggcagagccgaccccggcgcccccgtgagccaggaggacatgcaggccatggtgcagctgatcagatacatgcacacctactgcctgccccagagaaagctgcccccccagacccccgagcccctgcccaaggcctgcagcaaccccagccagcaggtgagaagcagaccctggagcagacaccacagcaaggccagctgggccgagttcagcatcctgagagagctgctggcccaggacgtgctgtgcgacgtgagcaagccctacagactggccacccccgtgtacgccagcctgacccccagaagcagacccagaccccccaaggacagccaggccagccccggcagacccagcagcgtggaggaggtgagaatcgccgccagccccaagagcaccggccccagacccagcctgagacccctgagactggaggtgaagagagaggtgagaagacccgccagactgcagcagcaggaggaggaggacgaggaggaggaggaggaggaggaggaggaggagaaggaggaggaggaggagtggggcagaaagagacccggcagaggcctgccctggaccaagctgggcagaaagctggagagcagcgtgtgccccgtgagaagaagcagaagactgaaccccgagctgggcccctggctgaccttcgccgacgagcccctggtgcccagcgagccccagggcgccctgcccagcctgtgcctggcccccaaggcctacgacgtggagagagagctgggcagccccaccgacgaggacagcggccaggaccagcagctgctgagaggcccccagatccccgccctggagagcccctgcgagagcggctgcggcgacatggacgaggaccccagctgcccccagctgccccccagagacagccccagatgcctgatgctggccctgagccagagcgaccccaccttcggcaagaagagcttcgagcagaccctgaccgtggagctgtgcggcaccgccggcctgaccccccccaccacccccccctacaagcccaccgaggaggaccccttcaagcccgacatcaagcacagcctgggcaaggagatcgccctgagcctgcccagccccgagggcctgagcctgaaggccacccccggcgccgcccacaagctgcccaagaagcaccccgagagaagcgagctgctgagccacctgagacacgccaccgcccagcccgccagccaggccggccagaagagacccttcagctgcagcttcggcgaccacgactactgccaggtgctgagacccgagggcgtgctgcagagaaaggtgctgagaagctgggagcccagcggcgtgcacctggaggactggccccagcagggcgccccctgggccgaggcccaggcccccggcagagaggaggacagaagctgcgacgccggcgccccccccaaggacagcaccctgctgagagaccacgagatcagagccagcctgaccaagcacttcggcctgctggagaccgccctggaggaggaggacctggccagctgcaagagccccgagtacgacaccgtgttcgaggacagcagcagcagcagcggcgagagcagcttcctgcccgaggaggaggaggaggagggcgaggaggaggaggaggacgacgaggaggaggacagcggcgtgagccccacctgcagcgaccactgcccctaccagagcccccccagcaaggccaacagacagctgtgcagcagaagcagaagcagcagcggcagcagcccctgccacagctggagccccgccaccagaagaaacttcagatgcgagagcagaggcccctgcagcgacagaacccccagcatcagacacgccagaaagagaagagagaaggccatcggcgagggcagagtggtgtacatccagaacctgagcagcgacatgagcagcagagagctgaagagaagattcgaggtgttcggcgagatcgaggagtgcgaggtgctgaccagaaacagaagaggcgagaagtacggcttcatcacctacagatgcagcgagcacgccgccctgagcctgaccaagggcgccgccctgagaaagagaaacgagcccagcttccagctgagctacggcggcctgagacacttctgctggcccagatacaccgactacggcaagcccctgaagcccagccacagcctggtgagactgaaggcctgggaggccgtgcccagcctgaacaagacccagagctag

SEQ ID NO: 92880 - DNA, 471 bp, synthetic construct
  misc_feature 1..471: note = Description of Artificial Sequence: Synthetic coding sequence
  source 1..471: mol_type = other DNA
atggccgtgggcaagttcctgctgggcagcctgctgctgctgagcctgcagctgggccagggctggggccccgacgccagaggcgtgcccgtggccgacggcgagttcagcagcgagcaggtggccaaggccggcggcacctggctgggcacccacagacccctggccagactgagaagagccctgagcggcccctgccagctgtggagcctgaccctgagcgtggccgagctgggcctgggctacgccagcgaggagaaggtgatcttcagatactgcgccggcagctgccccagaggcgccagaacccagcacggcctggccctggccagactgcagggccagggcagagcccacggcggcccctgctgcagacccaccagatacaccgacgtggccttcctggacgacagacacagatggcagagactgccccagctgagcgccgccgcctgcggctgcggcggctag

SEQ ID NO: 92881 - DNA, 1422 bp, synthetic construct
  misc_feature 1..1422: note = Description of Artificial Sequence: Synthetic coding sequence
  source 1..1422: mol_type = other DNA
atgggccagagcggcagaagcagacaccagaagagagccagagcccaggcccagctgagaaacctggaggcctacgccgccaacccccacagcttcgtgttcaccagaggctgcaccggcagaaacatcagacagctgagcctggacgtgagaagagtgatggagcccctgaccgccagcagactgcaggtgagaaagaagaacagcctgaaggactgcgtggccgtggccggccccctgggcgtgacccacttcctgatcctgagcaagaccgagaccaacgtgtacttcaagctgatgagactgcccggcggccccaccctgaccttccaggtgaagaagtacagcctggtgagagacgtggtgagcagcctgagaagacacagaatgcacgagcagcagttcgcccacccccccctgctggtgctgaacagcttcggcccccacggcatgcacgtgaagctgatggccaccatgttccagaacctgttccccagcatcaacgtgcacaaggtgaacctgaacaccatcaagagatgcctgctgatcgactacaaccccgacagccaggagctggacttcagacactacagcatcaaggtggtgcccgtgggcgccagcagaggcatgaagaagctgctgcaggagaagttccccaacatgagcagactgcaggacatcagcgagctgctggccaccggcgccggcctgagcgagagcgaggccgagcccgacggcgaccacaacatcaccgagctgccccaggccgtggccggcagaggcaacatgagagcccagcagagcgccgtgagactgaccgagatcggccccagaatgaccctgcagctgatcaaggtgcaggagggcgtgggcgagggcaaggtgatgttccacagcttcgtgagcaagaccgaggaggagctgcaggccatcctggaggccaaggagaagaagctgagactgaaggcccagagacaggcccagcaggcccagaacgtgcagagaaagcaggagcagagagaggcccacagaaagaagagcctggagggcatgaagaaggccagagtgggcggcagcgacgaggaggccagcggcatccccagcagaaccgccagcctggagctgggcgaggacgacgacgagcaggaggacgacgacatcgagtacttctgccaggccgtgggcgaggcccccagcgaggacctgttccccgaggccaagcagaagagactggccaagagccccggcagaaagagaaagagatgggagatggacagaggcagaggcagactgtgcgaccagaagttccccaagaccaaggacaagagccagggcgcccaggccagaagaggccccagaggcgccagcagagacggcggcagaggcagaggcagaggcagacccggcaagagagtggcctag

SEQ ID NO: 92882 - DNA, 1383 bp, synthetic construct
  misc_feature 1..1383: note = Description of Artificial Sequence: Synthetic coding sequence
  source 1..1383: mol_type = other DNA
atgggccagagcggcagaagcagacaccagaagagagccagagcccaggcccagctgagaaacctggaggcctacgccgccaacccccacagcttcgtgttcaccagaggctgcaccggcagaaacatcagacagctgagcctggacgtgagaagagtgatggagcccctgaccgccagcagactgcaggtgagaaagaagaacagcctgaaggactgcgtggccgtggccggccccctgggcgtgacccacttcctgatcctgagcaagaccgagaccaacgtgtacttcaagctgatgagactgcccggcggccccaccctgaccttccaggtgaagaagtacagcctggtgagagacgtggtgagcagcctgagaagacacagaatgcacgagcagcagttcgcccacccccccctgctggtgctgaacagcttcggcccccacggcatgcacgtgaagctgatggccaccatgttccagaacctgttccccagcatcaacgtgcacaaggtgaacctgaacaccatcaagagatgcctgctgatcgactacaaccccgacagccaggagctggacttcagacactacagcatcaaggtggtgcccgtgggcgccagcagaggcatgaagaagctgctgcaggagaagttccccaacatgagcagactgcaggacatcagcgagctgctggccaccggcgccggcctgagcgagagcgaggccgagcccgacggcgaccacaacatcaccgagctgccccaggccgtggccggcagaggcaacatgagagcccagcagagcgccgtgagactgaccgagatcggccccagaatgaccctgcagctgatcaaggtgcaggagggcgtgggcgagggcaaggtgatgttccacagcttcgtgagcaagaccgaggaggagctgcaggccatcctggaggccaaggagaagaagctgagactgaaggcccagagacaggcccagcaggcccagaacgtgcagagaaagcaggagcagagagaggcccacagaaagaagagcctggagggcatgaagaaggccagagtgggcggcagcgacgaggaggccagcggcatccccagcagaaccgccagcctggagctgggcgaggacgacgacgagcaggaggacgacgacatcgagtacttctgccaggccgtgggcgaggcccccagcgaggacctgttccccgaggccaagcagaagagactggccaagagccccggcagaaagagaaagagatgggagatggacagaggcagaggcagactgtgcgaccagaagttccccaagaccaaggacaagagccaggacggcggcagaggcagaggcagaggcagacccggcaagagagtggcctag

SEQ ID NO: 92883 - DNA, 2385 bp, synthetic construct
  misc_feature 1..2385: note = Description of Artificial Sequence: Synthetic coding sequence
  source 1..2385: mol_type = other DNA
atgggccagagcggcagaagcagacaccagaagagagccagagcccaggcccagctgagaaacctggaggcctacgccgccaacccccacagcttcgtgttcaccagaggctgcaccggcagaaacatcagacagctgagcctggacgtgagaagagtgatggagcccctgaccgccagcagactgcaggtgagaaagaagaacagcctgaaggactgcgtggccgtggccggccccctgggcgtgacccacttcctgatcctgagcaagaccgagaccaacgtgtacttcaagctgatgagactgcccggcggccccaccctgaccttccaggtgaagaagtacagcctggtgagagacgtggtgagcagcctgagaagacacagaatgcacgagcagcagttcgcccacccccccctgctggtgctgaacagcttcggcccccacggcatgcacgtgaagctgatggccaccatgttccagaacctgttccccagcatcaacgtgcacaaggtgaacctgaacaccatcaagagatgcctgctgatcgactacaaccccgacagccaggagctggacttcagacactacagcatcaaggtggtgcccgtgggcgccagcagaggcatgaagaagctgctgcaggagaagttccccaacatgagcagactgcaggacatcagcgagctgctggccaccggcgccggcctgagcgagagcgaggccgagcccgacggcgaccacaacatcaccgagctgccccaggccgtggccggcagaggcaacatgagagcccagcagagcgccgtgagactgaccgagatcggccccagaatgaccctgcagctgatcaaggtgcaggagggcgtgggcgagggcaaggtgatgttccacagcttcgtgagcaagaccgaggaggagctgcaggccatcctggaggccaaggagaagaagctgagactgaaggcccagagacaggcccagcaggcccagaacgtgcagagaaagcaggagcagagagaggcccacagaaagaagagcctggagggcatgaagaaggccagagtgggcggcagcgacgaggaggccagcggcatccccagcagaaccgccagcctggagctgggcgaggacgacgacgagcaggaggacgacgacatcgagtacttctgccaggccgtgggcgaggcccccagcgaggacctgttccccgaggccaagcagaagagactggccaagagccccggcagaaagagaaagagatgggagatggacagaggcgccaagagctgccccgccaacttcctggccgccgccgacgacaagctgagcggcttccagggcgacttcctgtggcccatcctggtggtggagttcctggtggccgtggccagcaacggcctggccctgtacagattcagcatcagaaagcagagaccctggcaccccgccgtggtgttcagcgtgcagctggccgtgagcgacctgctgtgcgccctgaccctgccccccctggccgcctacctgtacccccccaagcactggagatacggcgaggccgcctgcagactggagagattcctgttcacctgcaacctgctgggcagcgtgatcttcatcacctgcatcagcctgaacagatacctgggcatcgtgcaccccttcttcgccagaagccacctgagacccaagcacgcctgggccgtgagcgccgccggctgggtgctggccgccctgctggccatgcccaccctgagcttcagccacctgaagagaccccagcagggcgccggcaactgcagcgtggccagacccgaggcctgcatcaagtgcctgggcaccgccgaccacggcctggccgcctacagagcctacagcctggtgctggccggcctgggctgcggcctgcccctgctgctgaccctggccgcctacggcgccctgggcagagccgtgctgagaagccccggcatgaccgtggccgagaagctgagagtggccgccctggtggccagcggcgtggccctgtacgccagcagctacgtgccctaccacatcatgagagtgctgaacgtggacgccagaagaagatggagcaccagatgccccagcttcgccgacatcgcccaggccaccgccgccctggagctgggcccctacgtgggctaccaggtgatgagaggcctgatgcccctggccttctgcgtgcaccccctgctgtacatggccgccgtgcccagcctgggctgctgctgcagacactgccccggctacagagacagctggaaccccgaggacgccaagagcaccggccaggccctgcccctgaacgccaccgccgcccccaagcccagcgagccccagagcagagagctgagccagtag

SEQ ID NO: 92884 - DNA, 1374 bp, synthetic construct
  misc_feature 1..1374: note = Description of Artificial Sequence: Synthetic coding sequence
  source 1..1374: mol_type = other DNA
atggcccagccccccagactgagcagaagcggcgccagcagcctgtgggaccccgccagccccgcccccaccagcggccccagacccagactgtgggagggccaggacgtgctggccagatggaccgacggcctgctgtacctgggcaccatcaagaaggtggacagcgccagagaggtgtgcctggtgcagttcgaggacgacagccagttcctggtgctgtggaaggacatcagccccgccgccctgcccggcgaggagctgctgtgctgcgtgtgcagaagcgagaccgtggtgcccggcaacagactggtgagctgcgagaagtgcagacacgcctaccaccaggactgccacgtgcccagagcccccgcccccggcgagggcgagggcaccagctgggtgtgcagacagtgcgtgttcgccatcgccaccaagagaggcggcgccctgaagaagggcccctacgccagagccatgctgggcatgaagctgagcctgccctacggcctgaagggcctggactgggacgccggccacctgagcaacagacagcagagctactgctactgcggcggccccggcgagtggaacctgaagatgctgcagtgcagaagctgcctgcagtggttccacgaggcctgcacccagtgcctgagcaagcccctgctgtacggcgacagattctacgagttcgagtgctgcgtgtgcagaggcggccccgagaaggtgagaagactgcagctgagatgggtggacgtggcccacctggtgctgtaccacctgagcgtgtgctgcaagaagaagtacttcgacttcgacagagagatcctgcccttcaccagcgagaactgggacagcctgctgctgggcgagctgagcgacacccccaagggcgagagaagcagcagactgctgagcgccctgaacagccacaaggacagattcatcagcggcagagagatcaagaagagaaagtgcctgttcggcctgcacgccagaatgcccccccccgtggagccccccaccggcgacggcgccctgaccagagccggcccctggggcagaggcctgaccagccccggcgaggcccccgaggccggcgccagagcccccgaggaggaggccgagggcgagagcggcggcgccggcgccaccctgagcagcgcccagagcgccagagcccccggcgccgagggcgccggcagcagcgccgagggcaccgccgccgcccccagcggctgcctgctgcccagcaccctgctgcccgccccccagggccccctgggcaccgtggacccccagaccggccacccctggaacttcaccctggtgagcccccagaccagcctgaaggtgccccccaccagatag

SEQ ID NO: 92885 - DNA, 1704 bp, synthetic construct
  misc_feature 1..1704: note = Description of Artificial Sequence: Synthetic coding sequence
  source 1..1704: mol_type = other DNA
atggcccagccccccagactgagcagaagcggcgccagcagcctgtgggaccccgccagccccgcccccaccagcggccccagacccagactgtgggagggccaggacgtgctggccagatggaccgacggcctgctgtacctgggcaccatcaagaaggtggacagcgccagagaggtgtgcctggtgcagttcgaggacgacagccagttcctggtgctgtggaaggacatcagccccgccgccctgcccggcgaggagctgctgtgctgcgtgtgcagaagcgagaccgtggtgcccggcaacagactggtgagctgcgagaagtgcagacacgcctaccaccaggactgccacgtgcccagagcccccgcccccggcgagggcgagggcaccagctgggtgtgcagacagtgcgtgttcgccatcgccaccaagagaggcggcgccctgaagaagggcccctacgccagagccatgctgggcatgaagctgagcctgccctacggcctgaagggcctggactgggacgccggccacctgagcaacagacagcagagctactgctactgcggcggccccggcgagtggaacctgaagatgctgcagtgcagaagctgcctgcagtggttccacgaggcctgcacccagtgcctgagcaagcccctgctgtacggcgacagattctacgagttcgagtgctgcgtgtgcagaggcggccccgagaaggtgagaagactgcagctgagatgggtggacgtggcccacctggtgctgtaccacctgagcgtgtgctgcaagaagaagtacttcgacttcgacagagagatcctgcccttcaccagcgagaactgggacagcctgctgctgggcgagctgagcgacacccccaagggcgagagaagcagcagactgctgagcgccctgaacagccacaaggacagattcatcagcggcagagagatcaagaagagaaagtgcctgttcggcctgcacgccagaatgcccccccccgtggagccccccaccggcgacggcgccctgaccagcttccccagcggccagggccccggcggcggcgtgagcagacccctgggcaagagaagaagacccgagcccgagcccctgagaagaagacagaagggcaaggtggaggagctgggcccccccagcgccgtgagaaaccagcccgagccccaggagcagagagagagagcccacctgcagagagccctgcaggccagcgtgagcccccccagccccagccccaaccagagctaccagggcagcagcggctacaacttcagacccaccgacgccagatgcctgcccagcagccccatcagaatgttcgccagcttccaccccagcgccagcaccgccggcaccagcggcgacagcggcccccccgacagaagccccctggagctgcacatcggcttccccaccgacatccccaagagcgccccccacagcatgaccgccagcagcagcagcgtgagcagccccagccccggcctgcccagaagaagcgccccccccagccccctgtgcagaagcctgagccccggcaccggcggcggcgtgagaggcggcgtgggctacctgagcagaggcgaccccgtgagagtgctggccagaagagtgagacccgacggcagcgtgcagtacctggtggagtggggcggcggcggcatcttctag

SEQ ID NO: 92886 - DNA, 732 bp, synthetic construct
  misc_feature 1..732: note = Description of Artificial Sequence: Synthetic coding sequence
  source 1..732: mol_type = other DNA
tgaagcctgctgctgaccgccaccagaaccgtgagcttccagggcgagagactgagaagaggcaacgtgtgcctggtgagcatgctgggctgcctgcccctgtggagccccctgctggagatggagcacagccccggccagggccccggcggcggcgtgagcagacccctgggcaagagaagaagacccgagcccgagcccctgagaagaagacagaagggcaaggtggaggagctgggcccccccagcgccgtgagaaaccagcccgagccccaggagcagagagagagagcccacctgcagagagccctgcaggccagcgtgagcccccccagccccagccccaaccagagctaccagggcagcagcggctacaacttcagacccaccgacgccagatgcctgcccagccccatcagaatgttcgccagcttccaccccagcgccagcaccgccggcaccagcggcgacagcggcccccccgacagaagccccctggagctgcacatcggcttccccaccgacatccccaagagcgccccccacagcatgaccgccagcagcagcagcgtgagcagccccagccccggcctgcccagaagaagcgccccccccagccccctgtgcagaagcctgagccccggcaccggcggcggcgtgagaggcggcgtgggctacctgagcagaggcgaccccgtgagagtgctggccagaagagtgagacccgactag

SEQ ID NO: 92887 - DNA, 438 bp, synthetic construct
  misc_feature 1..438: note = Description of Artificial Sequence: Synthetic coding sequence
  source 1..438: mol_type = other DNA
atggcccagccccccagactgagcagaagcggcgccagcagcctgtgggaccccgccagccccgcccccaccagcggccccagacccagactgtgggagggccaggacgtgctggccagatggaccgacggcctgctgtacctgggcaccatcaagaaggtggacagcgccagagaggtgtgcctggtgcagttcgaggacgacagccagttcctggtgctgtggaaggacatcagccccgccgccctgcccggcgaggagctgctgtgctgcgtgtgcagaagcgagaccgtggtgcccggcaacagactggtgagctgcgagaagtgcagacacgcctaccaccaggactgccacgtgcccagagcccccgcccccggcgagggcgagggcaccagctgggtgtgcagacagtgcgtgttcgccatcgccacctag

SEQ ID NO: 92888 - DNA, 546 bp, synthetic construct
  misc_feature 1..546: note = Description of Artificial Sequence: Synthetic coding sequence
  source 1..546: mol_type = other DNA
tggggccacccccagcagtgcgccatcagccccagccccagaagcagaggcagcggcctgatctgcagaggccactgcagaccccagtgcctgcaccacccccccgccctgaccagagtgaccagagccgccgccgccaccaccagcggcccccagatgcccgccgcctgccccggccaccccatcagaatgttcgccagcttccaccccagcgccagcaccgccggcaccagcggcgacagcggcccccccgacagaagccccctggagctgcacatcggcttccccaccgacatccccaagagcgccccccacagcatgaccgccagcagcagcagcgtgagcagccccagccccggcctgcccagaagaagcgccccccccagccccctgtgcagaagcctgagccccggcaccggcggcggcgtgagaggcggcgtgggctacctgagcagaggcgaccccgtgagagtgctggccagaagagtgagacccgacggcagcgtgcagtacctggtggagtggggcggcggcggcatcttctag

SEQ ID NO: 92889 - DNA, 438 bp, synthetic construct; identical to SEQ ID NO: 92887
  misc_feature 1..438: note = Description of Artificial Sequence: Synthetic coding sequence
  source 1..438: mol_type = other DNA

SEQ ID NO: 92890 - DNA, 1704 bp, synthetic construct
  misc_feature 1..1704: note = Description of Artificial Sequence: Synthetic coding sequence
  source 1..1704: mol_type = other DNA
atggcccagccccccagactgagcagaagcggcgccagcagcctgtgggaccccgccagccccgcccccaccagcggccccagacccagactgtgggagggccaggacgtgctggccagatggaccgacggcctgctgtacctgggcaccatcaagaaggtggacagcgccagagaggtgtgcctggtgcagttcgaggacgacagccagttcctggtgctgtggaaggacatcagccccgccgccctgcccggcgaggagctgctgtgctgcgtgtgcagaagcgagaccgtggtgcccggcaacagactggtgagctgcgagaagtgcagacacgcctaccaccaggactgccacgtgcccagagcccccgcccccggcgagggcgagggcaccagctgggtgtgcagacagtgcgtgttcgccatcgccaccaagagaggcggcgccctgaagaagggcccctacgccagagccatgctgggcatgaagctgagcctgccctacggcctgaagggcctggactgggacgccggccacctgagcaacagacagcagagctactgctactgcggcggccccggcgagtggaacctgaagatgctgcagtgcagaagctgcctgcagtggttccacgaggcctgcacccagtgcctgagcaagcccctgctgtacggcgacagattctacgagttcgagtgctgcgtgtgcagaggcggccccgagaaggtgagaagactgcagctgagatgggtggacgtggcccacctggtgctgtaccacctgagcgtgtgctgcaagaagaagtacttcgacttcgacagagagatcctgcccttcaccagcgagaactgggacagcctgctgctgggcgagctgagcgacacccccaagggcgagagaagcagcaagctgctgagcgccctgaacagccacaaggacagattcatcagcggcagagagatcaagaagagaaagtgcctgttcggcctgcacgccagaatgcccccccccgtggagccccccaccggcgacggcgccctgaccagcttccccagcggccagggccccggcggcggcgtgagcagacccctgggcaagagaagaagacccgagcccgagcccctgagaagaagacagaagggcaaggtggaggagctgggcccccccagcgccgtgagaaaccagcccgagccccaggagcagagagagagagcccacctgcagagagccctgcaggccagcgtgagcccccccagccccagccccaaccagagctaccagggcagcagcggctacaacttcagacccaccgacgccagatgcctgcccagcagccccatcagaatgttcgccagcttccaccccagcgccagcaccgccggcaccagcggcgacagcggcccccccgacagaagccccctggagctgcacatcggcttccccaccgacatccccaagagcgccccccacagcatgaccgccagcagcagcagcgtgagcagccccagccccggcctgcccagaagaagcgccccccccagccccctgtgcagaagcctgagccccggcaccggcggcggcgtgagaggcggcgtgggctacctgagcagaggcgaccccgtgagagtgctggccagaagagtgagacccgacggcagcgtgcagtacctggtggagtggggcggcggcggcatcttctag

SEQ ID NO: 92891 - DNA, 684 bp, synthetic construct
  misc_feature 1..684: note = Description of Artificial Sequence: Synthetic coding sequence
  source 1..684: mol_type = other DNA
atggcccagccccccagactgagcagaagcggcgccagcagcctgtgggaccccgccagccccgcccccaccagcggccccagacccagactgtgggagggccaggacgtgctggccagatggaccgacggcctgctgtacctgggcaccatcaagaaggtggacagcgccagagaggtgtgcctggtgcagttcgaggacgacagccagttcctggtgctgtggaaggacatcagccccgccgccctgcccggcgaggagctgctgtgctgcgtgtgcagaagcgagaccgtggtgcccggcaacagactggtgagctgcgagaagtgcagacacgcctaccaccaggactgccacgtgcccagagcccccgcccccggcgagggcgagggcaccagctgggtgtgcagacagtgcgtgttcgccatcgccaccaagagaggcggcgccctgaagaagggcccctacgccagagccatgctgggcatgaagctgagcctgccctacggcctgaagggcctggactgggacgccggccacctgagcaacagacagcagagctactgctactgcggcggccccggcgagtggaacctgaagatgctgcagtgcagaagctgcctgcagtggttccacgaggcctgcacccagtgcctgagcaagcccctgctgtacggcgactag

SEQ ID NO: 92892 - DNA, 684 bp, synthetic construct; identical to SEQ ID NO: 92891
  misc_feature 1..684: note = Description of Artificial Sequence: Synthetic coding sequence
  source 1..684: mol_type = other DNA

SEQ ID NO: 92893 - DNA, 1374 bp, synthetic construct
  misc_feature 1..1374: note = Description of Artificial Sequence: Synthetic coding sequence
  source 1..1374: mol_type = other DNA
atggcccagccccccagactgagcagaagcggcgccagcagcctgtgggaccccgccagccccgcccccaccagcggccccagacccagactgtgggagggccaggacgtgctggccagatggaccgacggcctgctgtacctgggcaccatcaagaaggtggacagcgccagagaggtgtgcctggtgcagttcgaggacgacagccagttcctggtgctgtggaaggacatcagccccgccgccctgcccggcgaggagctgctgtgctgcgtgtgcagaagcgagaccgtggtgcccggcaacagactggtgagctgcgagaagtgcagacacgcctaccaccaggactgccacgtgcccagagcccccgcccccggcgagggcgagggcaccagctgggtgtgcagacagtgcgtgttcgccatcgccaccaagagaggcggcgccctgaagaagggcccctacgccagagccatgctgggcatgaagctgagcctgccctacggcctgaagggcctggactgggacgccggccacctgagcaacagacagcagagctactgctactgcggcggccccggcgagtggaacctgaagatgctgcagtgcagaagctgcctgcagtggttccacgaggcctgcacccagtgcctgagcaagcccctgctgtacggcgacagattctacgagttcgagtgctgcgtgtgcagaggcggccccgagaaggtgagaagactgcagctgagatgggtggacgtggcccacctggtgctgtaccacctgagcgtgtgctgcaagaagaagtacttcgacttcgacagagagatcctgcccttcaccagcgagaactgggacagcctgctgctgggcgagctgagcgacacccccaagggcgagagaagcagcaagctgctgagcgccctgaacagccacaaggacagattcatcagcggcagagagatcaagaagagaaagtgcctgttcggcctgcacgccagaatgcccccccccgtggagccccccaccggcgacggcgccctgaccagagccggcccctggggcagaggcctgaccagccccggcgaggcccccgaggccggcgccagagcccccgaggaggaggccgagggcgagagcggcggcgccggcgccaccctgagcagcgcccagagcgccagagcccccggcgccgagggcgccggcagcagcgccgagggcaccgccgccgcccccagcggctgcctgctgcccagcaccctgctgcccgccccccagggccccctgggcaccgtggacccccagaccggccacccctggaacttcaccctggtgagcccccagaccagcctgaaggtgccccccaccagatag

SEQ ID NO: 92894 - DNA, 1497 bp, synthetic construct
  misc_feature 1..1497: note = Description of Artificial Sequence: Synthetic coding sequence
  source 1..1497: mol_type = other DNA
atggccgccgccgccggccccggcgccgccctgagccccagaccctgcgacagcgaccccgccacccccggcgcccagagccccaaggacgacaacgaggacaacagcaacgacggcacccagcccagcaagagaagaagaatgggcagcggcgacagcagcagaagctgcgagaccagcagccaggacctgggcttcagctactaccccgccgagaacctgatcgagtacaagtggccccccgacgagaccggcgagtactacatgctgcaggagcaggtgagcgagtacctgggcgtgaccagcttcaagagaaagtaccccgacctggagagaagagacctgagccacaaggagaagctgtacctgagagagctgaacgtgatcaccgagacccagtgcaccctgggcctgaccgccctgagaagcgacgaggtgatcgacctgatgatcaaggagtaccccgccaagcacgccgagtacagcgtgatcctgcaggagaaggagagacagagaatcaccgaccactacaaggagtacagccagatgcagcagcagaacacccagaaggtggaggccagcaaggtgcccgagtacatcaagaaggccgccaagaaggccgccgagttcaacagcaacctgaacagagagagaatggaggagagaagagcctacttcgacctgcagacccacgtgatccaggtgccccagggcaagtacaaggtgctgcccaccgagagaaccaaggtgagcagctaccccgtggccctgatccccggccagttccaggagtactacaagagatacagccccgacgagctgagatacctgcccctgaacaccgccctgtacgagccccccctggaccccgagctgcccgccctggacagcgacggcgacagcgacgacggcgaggacggcagaggcgacgagaagagaaagaacaagggcaccagcgacagcagcagcggcaacgtgagcgagggcgagagcccccccgacagccaggaggacagcttccagggcagacagaagagcaaggacaaggccgccacccccagaaaggacggccccaagagaagcgtgctgagcaagagcgtgcccggctacaagcccaaggtgatccccaacgccatctgcggcatctgcctgaagggcaaggagagcaacaagaagggcaaggccgagagcctgatccactgcagccagtgcgagaacagcggccaccccagctgcctggacatgaccatggagctggtgagcatgatcaagacctacccctggcagtgcatggagtgcaagacctgcatcatctgcggccagccccaccacgaggaggagatgatgttctgcgacatgtgcgacagaggctaccacaccttctgcgtgggcctgggcgccatccccagcggcagatggatctgcgactgctgccagagagccccccccacccccagaaaggtgggcagaagaggcaagaacagcaaggagggctag

SEQ ID NO: 92895 - DNA, 1491 bp, synthetic construct
  misc_feature 1..1491: note = Description of Artificial Sequence: Synthetic coding sequence
  source 1..1491: mol_type = other DNA
atggccgccgccgccggccccggcgccgccctgagccccagaccctgcgacagcgaccccgccacccccggcgcccagagccccaaggacgacaacgaggacaacagcaacgacggcacccagcccagcaagagaagaagaatgggcagcggcgacagcagcagaagctgcgagaccagcagccaggacctgggcttcagctactaccccgccgagaacctgatcgagtacaagtggccccccgacgagaccggcgagtactacatgctgcaggagcaggtgagcgagtacctgggcgtgaccagcttcaagagaaagtaccccgagagaagagacctgagccacaaggagaagctgtacctgagagagctgaacgtgatcaccgagacccagtgcaccctgggcctgaccgccctgagaagcgacgaggtgatcgacctgatgatcaaggagtaccccgccaagcacgccgagtacagcgtgatcctgcaggagaaggagagacagagaatcaccgaccactacaaggagtacagccagatgcagcagcagaacacccagaaggtggaggccagcaaggtgcccgagtacatcaagaaggccgccaagaaggccgccgagttcaacagcaacctgaacagagagagaatggaggagagaagagcctacttcgacctgcagacccacgtgatccaggtgccccagggcaagtacaaggtgctgcccaccgagagaaccaaggtgagcagctaccccgtggccctgatccccggccagttccaggagtactacaagagatacagccccgacgagctgagatacctgcccctgaacaccgccctgtacgagccccccctggaccccgagctgcccgccctggacagcgacggcgacagcgacgacggcgaggacggcagaggcgacgagaagagaaagaacaagggcaccagcgacagcagcagcggcaacgtgagcgagggcgagagcccccccgacagccaggaggacagcttccagggcagacagaagagcaaggacaaggccgccacccccagaaaggacggccccaagagaagcgtgctgagcaagagcgtgcccggctacaagcccaaggtgatccccaacgccatctgcggcatctgcctgaagggcaaggagagcaacaagaagggcaaggccgagagcctgatccactgcagccagtgcgagaacagcggccaccccagctgcctggacatgaccatggagctggtgagcatgatcaagacctacccctggcagtgcatggagtgcaagacctgcatcatctgcggccagccccaccacgaggaggagatgatgttctgcgacatgtgcgacagaggctaccacaccttctgcgtgggcctgggcgccatccccagcggcagatggatctgcgactgctgccagagagccccccccacccccagaaaggtgggcagaagaggcaagaacagcaaggagggctag

SEQ ID NO: 92896 - DNA, 879 bp, synthetic construct
  misc_feature 1..879: note = Description of Artificial Sequence: Synthetic coding sequence
  source 1..879: mol_type = other DNA
atggagaagagaacctgcgccctgtgccccaaggacgtggagtacaacgtgctgtacttcgcccagagcgagaacatcgccgcccacgagaactgcctgctgtacagcagcggcctggtggagtgcgaggaccaggaccccctgaaccccgacagaagcttcgacgtggagagcgtgaagaaggagatccagagaggcagaaagctgaagtgcaagttctgccacaagagaggcgccaccgtgggctgcgacctgaagaactgcaacaagaactaccacttcttctgcgccaagaaggacgacgccgtgccccagagcgacggcgtgagaggcatctacaagctgctgtgccagcagcacgcccagttccccatcatcgcccagagcgccaagttcagcggcgtgaagagaaagagaggcagaaagaagcccctgagcggcaaccacgtgcagccccccgagaccatgaagtgcaacaccttcatcagacaggtgaaggaggagcacggcagacacaccgacgccaccgtgaaggtgcccttcctgaagaagtgcaaggaggccggcctgctgaactacctgctggaggagatcctggacaaggtgcacagcatccccgagaagctgatggacgagaccaccagcgagagcgactacgaggagatcggcagcgccctgttcgactgcagactgttcgaggacaccttcgtgaacttccaggccgccatcgagaagaagatccacgccagccagcagagatggcagcagctgaaggaggagatcgagctgctgcaggacctgaagcagaccctgtgcagcttccaggagaacagagacctgatgagcagcagcaccagcatcagcagcctgagctactag

SEQ ID NO: 92897 - DNA, 996 bp, synthetic construct
  misc_feature 1..996: note = Description of Artificial Sequence: Synthetic coding sequence
  source 1..996: mol_type = other DNA
atggcccaggccagcccccccagacccgagagagtgctgggcgccagcagccccgaggccagacccgcccaggaggccctgctgctgcccaccggcgtgttccaggtggccgagaagatggagaagagaacctgcgccctgtgccccaaggacgtggagtacaacgtgctgtacttcgcccagagcgagaacatcgccgcccacgagaactgcctgctgtacagcagcggcctggtggagtgcgaggaccaggaccccctgaaccccgacagaagcttcgacgtggagagcgtgaagaaggagatccagagaggcagaaagctgaagtgcaagttctgccacaagagaggcgccaccgtgggctgcgacctgaagaactgcaacaagaactaccacttcttctgcgccaagaaggacgacgccgtgccccagagcgacggcgtgagaggcatctacaagctgctgtgccagcagcacgcccagttccccatcatcgcccagagcgccaagttcagcggcgtgaagagaaagagaggcagaaagaagcccctgagcggcaaccacgtgcagccccccgagaccatgaagtgcaacaccttcatcagacaggtgaaggaggagcacggcagacacaccgacgccaccgtgaaggtgcccttcctgaagaagtgcaaggaggccggcctgctgaactacctgctggaggagatcctggacaaggtgcacagcatccccgagaagctgatggacgagaccaccagcgagagcgactacgaggagatcggcagcgccctgttcgactgcagactgttcgaggacaccttcgtgaacttccaggccgccatcgagaagaagatccacgccagccagcagagatggcagcagctgaaggaggagatcgagctgctgcaggacctgaagcagaccctgtgcagcttccaggagaacagagacctgatgagcagcagcaccagcatcagcagcctgagctactag

SEQ ID NO: 92898 - DNA, 861 bp, synthetic construct
  misc_feature 1..861: note = Description of Artificial Sequence: Synthetic coding sequence
  source 1..861: mol_type = other DNA
tgaagacccggccccagaggctgcagcgcccccgccgccagaagacccggccccagaagaagaagaagcagcttcccccccctgtacagcagcggcctggtggagtgcgaggaccaggaccccctgaaccccgacagaagcttcgacgtggagagcgtgaagaaggagatccagagaggcagaaagctgaagtgcaagttctgccacaagagaggcgccaccgtgggctgcgacctgaagaactgcaacaagaactaccacttcttctgcgccaagaaggacgacgccgtgccccagagcgacggcgtgagaggcatctacaagctgctgtgccagcagcacgcccagttccccatcatcgcccagagcgccaagttcagcggcgtgaagagaaagagaggcagaaagaagcccctgagcggcaaccacgtgcagccccccgagaccatgaagtgcaacaccttcatcagacaggtgaaggaggagcacggcagacacaccgacgccaccgtgaaggtgcccttcctgaagaagtgcaaggaggccggcctgctgaactacctgctggaggagatcctggacaaggtgcacagcatccccgagaagctgatggacgagaccaccagcgagagcgactacgaggagatcggcagcgccctgttcgactgcagactgttcgaggacaccttcgtgaacttccaggccgccatcgagaagaagatccacgccagccagcagagatggcagcagctgaaggaggagatcgagctgctgcaggacctgaagcagaccctgtgcagcttccaggagaacagagacctgatgagcagcagcaccagcatcagcagcctgagctactag

SEQ ID NO: 92899 - DNA, 507 bp, synthetic construct
  misc_feature 1..507: note = Description of Artificial Sequence: Synthetic coding sequence
  source 1..507: mol_type = other DNA
atggagaagagaacctgcgccctgtgccccaaggacgtggagtacaacgtgctgtacttcgcccagagcgagaacatcgccgcccacgagaactgcctgctgtacagcagcggcctggtggagtgcgaggaccaggaccccctgaaccccgacagaagcttcgacgtggagagcgtgaagaaggagatccagagaggcagaaagctgaagtgcaagttctgccacaagagaggcgccaccgtgggctgcgacctgaagaactgcaacaagaactaccacttcttctgcgccaagaaggacgacgccgtgccccagagcgacggcgtgagaggcatctacaagctgctgtgccagcagcacgcccagttccccatcatcgcccagagcgccaagttcagcggcgtgaagagaaagagaggcagaaagaagcccctgagcggcaaccacgtgcagccccccgagaccatgaagtgcaacaccttcatcagacaggtgaaggaggagtag

SEQ ID NO: 92900 - DNA, 297 bp, synthetic construct
  misc_feature 1..297: note = Description of Artificial Sequence: Synthetic coding sequence
  source 1..297: mol_type = other DNA
atggagaagagaacctgcgccctgtgccccaaggacgtggagtacaacgtgctgtacttcgcccagagcgagaacatcgccgcccacgagaactgcctgctgtacagcagcggcctggtggagtgcgaggaccaggaccccctgaaccccgacagaagcttcgacgtggagagcgtgaagaaggagatccagagaggcagaaagctgaagtgcaagttctgccacaagagaggcgccaccgtgggctgcgacctgaagaactgcaacaagaactaccacttcttctgcgccaagtag

SEQ ID NO: 92901 - DNA, 879 bp, synthetic construct; identical to SEQ ID NO: 92896
  misc_feature 1..879: note = Description of Artificial Sequence: Synthetic coding sequence
  source 1..879: mol_type = other DNA

SEQ ID NO: 92902 - DNA, 624 bp, synthetic construct
  misc_feature 1..624: note = Description of Artificial Sequence: Synthetic coding sequence
  source 1..624: mol_type = other DNA
atggagaacagagccctggaccccggcaccagagacagctacggcgccaccagccacctgcccaacaagggcgccctggccaaggtgaagaacaacttcaaggacctgatgagcaagctgaccgagggccagtacgtgctgtgcagatggaccgacggcctgtactacctgggcaagatcaagagagtgagcagcagcaagcagagctgcctggtgaccttcgaggacaacagcaagtactgggtgctgtggaaggacatccagcacgccggcgtgcccggcgaggagcccaagtgcaacatctgcctgggcaagaccagcggccccctgaacgagatcctgatctgcggcaagtgcggcctgggctaccaccagcagtgccacatccccatcgccggcagcgccgaccagcccctgctgaccccctggttctgcagaagatgcatcttcgccctggccgtgagagtgagcctgcccagcagccccgtgcccgccagccccgccagcagcagcggcgccgaccagagactgcccagccagagcctgagcagcaagcagaagggccacacctgggccctggagaccgacagcgccagcgccaccgtgctgggccaggacctgtag

SEQ ID NO: 92903 - DNA, 1743 bp, synthetic construct
  misc_feature 1..1743: note = Description of Artificial Sequence: Synthetic coding sequence
  source 1..1743: mol_type = other DNA
atggagaacagagccctggaccccggcaccagagacagctacggcgccaccagccacctgcccaacaagggcgccctggccaaggtgaagaacaacttcaaggacctgatgagcaagctgaccgagggccagtacgtgctgtgcagatggaccgacggcctgtactacctgggcaagatcaagagagtgagcagcagcaagcagagctgcctggtgaccttcgaggacaacagcaagtactgggtgctgtggaaggacatccagcacgccggcgtgcccggcgaggagcccaagtgcaacatctgcctgggcaagaccagcggccccctgaacgagatcctgatctgcggcaagtgcggcctgggctaccaccagcagtgccacatccccatcgccggcagcgccgaccagcccctgctgaccccctggttctgcagaagatgcatcttcgccctggccgtgagaaagggcggcgccctgaagaagggcgccatcgccagaaccctgcaggccgtgaagatggtgctgagctaccagcccgaggagctggagtgggacagcccccacagaaccaaccagcagcagtgctactgctactgcggcggccccggcgagtggtacctgagaatgctgcagtgctacagatgcagacagtggttccacgaggcctgcacccagtgcctgaacgagcccatgatgttcggcgacagattctacctgttcttctgcagcgtgtgcaaccagggccccgagtacatcgagagactgcccctgagatgggtggacgtggtgcacctggccctgtacaacctgggcgtgcagagcaagaagaagtacttcgacttcgaggagatcctggccttcgtgaaccaccactgggagctgctgcagctgggcaagctgaccagcacccccgtgaccgacagaggcccccacctgctgaacgccctgaacagctacaagagcagattcctgtgcggcaaggagatcaagaagaagaagtgcatcttcagactgagaatcagagtgccccccaacccccccggcaagctgctgcccgacaagggcctgctgcccaacgagaacagcgccagcagcgagctgagaaagagaggcaagagcaagcccggcctgctgccccacgagttccagcagcagaagagaagagtgtacagaagaaagagaagcaagttcctgctggaggacgccatccccagcagcgacttcaccagcgcctggagcaccaaccaccacctggccagcatcttcgacttcaccctggacgagatccagagcctgaagagcgccagcagcggccagaccttcttcagcgacgtggacagcaccgacgccgccagcaccagcggcagcgccagcaccagcctgagctacgacagcagatggaccgtgggcagcagaaagagaaagctggccgccaaggcctacatgcccctgagagccaagagatgggccgccgagctggacggcagatgccccagcgacagcagcgccgagggcgccagcgtgcccgagagacccgacgagggcatcgacagccacaccttcgagagcatcagcgaggacgacagcagcctgagccacctgaagagcagcatcaccaactacttcggcgccgccggcagactggcctgcggcgagaagtaccaggtgctggccagaagagtgacccccgagggcaaggtgcagtacctggtggagtgggagggcaccaccccctactag

SEQ ID NO: 92904 - DNA, 1116 bp, synthetic construct
  misc_feature 1..1116: note = Description of Artificial Sequence: Synthetic coding sequence
  source 1..1116: mol_type = other DNA
atgctgcagtgctacagatgcagacagtggttccacgaggcctgcacccagtgcctgaacgagcccatgatgttcggcgacagattctacctgttcttctgcagcgtgtgcaaccagggccccgagtacatcgagagactgcccctgagatgggtggacgtggtgcacctggccctgtacaacctgggcgtgcagagcaagaagaagtacttcgacttcgaggagatcctggccttcgtgaaccaccactgggagctgctgcagctgggcaagctgaccagcacccccgtgaccgacagaggcccccacctgctgaacgccctgaacagctacaagagcagattcctgtgcggcaaggagatcaagaagaagaagtgcatcttcagactgagaatcagagtgccccccaacccccccggcaagctgctgcccgacaagggcctgctgcccaacgagaacagcgccagcagcgagctgagaaagagaggcaagagcaagcccggcctgctgccccacgagttccagcagcagaagagaagagtgtacagaagaaagagaagcaagttcctgctggaggacgccatccccagcagcgacttcaccagcgcctggagcaccaaccaccacctggccagcatcttcgacttcaccctggacgagatccagagcctgaagagcgccagcagcggccagaccttcttcagcgacgtggacagcaccgacgccgccagcaccagcggcagcgccagcaccagcctgagctacgacagcagatggaccgtgggcagcagaaagagaaagctggccgccaaggcctacatgcccctgagagccaagagatgggccgccgagctggacggcagatgccccagcgacagcagcgccgagggcgccagcgtgcccgagagacccgacgagggcatcgacagccacaccttcgagagcatcagcgaggacgacagcagcctgagccacctgaagagcagcatcaccaactacttcggcgccgccggcagactggcctgcggcgagaagtaccaggtgctggccagaagagtgacccccgagggcaaggtgcagtacctggtggagtgggagggcaccaccccctactag

SEQ ID NO: 92905 - DNA, 501 bp, synthetic construct
  misc_feature 1..501: note = Description of Artificial Sequence: Synthetic coding sequence
  source 1..501: mol_type = other DNA
atggagaacagagccctggaccccggcaccagagacagctacggcgccaccagccacctgcccaacaagggcgccctggccaaggtgaagaacaacttcaaggacctgatgagcaagctgaccgagggccagtacgtgctgtgcagatggaccgacggcctgtactacctgggcaagatcaagagagtgagcagcagcaagcagagctgcctggtgaccttcgaggacaacagcaagtactgggtgctgtggaaggacatccagcacgccggcgtgcccggcgaggagcccaagtgcaacatctgcctgggcaagaccagcggccccctgaacgagatcctgatctgcggcaagtgcggcctgggctaccaccagcagtgccacatccccatcgccggcagcgccgaccagcccctgctgaccccctggttctgcagaagatgcatcttcgccctggccgtgagaaagggcggcgccctgaagaagggcgccatcgcctag

SEQ ID NO: 92906 - DNA, 324 bp, synthetic construct
  misc_feature 1..324: note = Description of Artificial Sequence: Synthetic coding sequence
  source 1..324: mol_type = other DNA
atggagaacagagccctggaccccggcaccagagacagctacggcgccaccagccacctgcccaacaagggcgccctggccaaggtgaagaacaacttcaaggacctgatgagcaagctgaccgagggccagtacgtgctgtgcagatggaccgacggcctgtactacctgggcaagatcaagagagtgagcagcagcaagcagagctgcctggtgaccttcgaggacaacagcaagtactgggtgctgtggaaggacatccagcacgccggcgtgcccggcgaggagcccaagtgcaacatctgcctgggcaagaccagctag

SEQ ID NO: 92907 - DNA, 1692 bp, synthetic construct
  misc_feature 1..1692: note = Description of Artificial Sequence: Synthetic coding sequence
  source 1..1692: mol_type = other DNA
atggagaacagagccctggaccccggcaccagagacagctacggcgccaccagccacctgcccaacaagggcgccctggccaaggtgaagaacaacttcaaggacctgatgagcaagctgaccgagggccagtacgtgctgtgcagatggaccgacggcctgtactacctgggcaagatcaagagagtgagcagcagcaagcagagctgcctggtgaccttcgaggacaacagcaagtactgggtgctgtggaaggacatccagcacgccggcgtgcccggcgaggagcccaagtgcaacatctgcctgggcaagaccagcggccccctgaacgagatcctgatctgcggcaagtgcggcctgggctaccaccagcagtgccacatccccatcgccggcagcgccgaccagcccctgctgaccccctggttctgcagaagatgcatcttcgccctggccgtgagaaagggcggcgccctgaagaagggcgccatcgccagaaccctgcaggccgtgaagatggtgctgagctaccagcccgaggagctggagtgggacagcccccacagaaccaaccagcagcagtgctactgctactgcggcggccccggcgagtggtacctgagaatgctgcagtgctacagatgcagacagtggttccacgaggcctgcacccagtgcctgaacgagcccatgatgttcggcgacagattctacctgttcttctgcagcgtgtgcaaccagggccccgagtacatcgagagactgcccctgagatgggtggacgtggtgcacctggccctgtacaacctgggcgtgcagagcaagaagaagtacttcgacttcgaggagatcctggccttcgtgaaccaccactgggagctgctgcagctgggcaagctgaccagcacccccgtgaccgacagaggcccccacctgctgaacgccctgaacagctacaagagcagattcctgtgcggcaaggagatcaagaagaagaagtgcatcttcagactgagaatcagagtgccccccaacccccccggcaagctgctgcccgacaagggcctgctgcccaacgagaacagcgccagcagcgagctgagaaagagaggcaagagcaagcccggcctgctgccccacgagttccagcagcagaagagaagagtgtacagaagaaagagaagcaagttcctgctggaggacgccatccccagcagcgacttcaccagcgcctggagcaccaaccaccacctggccagcatcttcgacttcaccctggacgagatccagagcctgaagagcgccagcagcggccagaccttcttcagcgacgtggacagcaccgacgccgccagcaccagcggcagcgccagcaccagcctgagctacgacagcagatggaccgtgggcagcagaaagagaaagctggccgccaaggcctacatgcccctgagagccaagagatgggccgccgagctggacggcagatgccccagcgacagcagcgccgagggcgccagcgtgcccgagagacccgacgagggcatcgacagccacaccttcgagagcatcagcgaggacgacagcagcctgagccacctgaagagcagcatcaccaactacttcggcgccgccggcagactggcctggggcgaggtgcccggcgtgggcagcgagggccacacctag

SEQ ID NO: 92908 - DNA, 3291 bp, synthetic construct
  misc_feature 1..3291: note = Description of Artificial Sequence: Synthetic coding sequence
  source 1..3291: mol_type = other DNA
atggccaccgtgcccgtgtactgcgtgtgcagactgccctacgacgtgaccagattcatgatcgagtgcgacgcctgcaaggactggttccacggcagctgcgtgggcgtggaggaggaggaggcccccgacatcgacatctaccactgccccaactgcgagaagacccacggcaagagcaccctgaagaagaagagaacctggcacaagcacggccccggccaggcccccgacgtgaagcccgtgcagaacggcagccagctgttcatcaaggagctgagaagcagaaccttccccagcgccgaggacgtggtggccagagtgcccggcagccagctgaccctgggctacatggaggagcacggcttcaccgagcccatcctggtgcccaagaaggacggcctgggcctggccgtgcccgcccccaccttctacgtgagcgacgtggagaactacgtgggccccgagagaagcgtggacgtgaccgacgtgaccaagcagaaggactgcaagatgaagctgaaggagttcgtggactactactacagcaccaacagaaagagagtgctgaacgtgaccaacctggagttcagcgacaccagaatgagcagcttcgtggagccccccgacatcgtgaagaagctgagctgggtggagaactactggcccgacgacgccctgctggccaagcccaaggtgaccaagtactgcctgatctgcgtgaaggacagctacaccgacttccacatcgacagcggcggcgccagcgcctggtaccacgtgctgaagggcgagaagaccttctacctgatcagacccgccagcgccaacatcagcctgtacgagagatggagaagcgccagcaaccacagcgagatgttcttcgccgaccaggtggacaagtgctacaagtgcatcgtgaagcagggccagaccctgttcatccccagcggctggatctacgccaccctgacccccgtggactgcctggccttcgccggccacttcctgcacagcctgagcgtggagatgcagatgagagcctacgaggtggagagaagactgaagctgggcagcctgacccagttccccaacttcgagaccgcctgctggtacatgggcaagcacctgctggaggccttcaagggcagccacaagagcggcaagcagctgcccccccacctggtgcagggcgccaagatcctgaacggcgccttcagaagctggaccaagaagcaggccctggccgagcacgaggacgagctgcccgagcacttcaagcccagccagctgatcaaggacctggccaaggagatcagactgagcgagaacgccagcaaggccgtgagacccgaggtgaacaccgtggccagcagcgacgaggtgtgcgacggcgacagagagaaggaggagccccccagccccatcgaggccacccccccccagagcctgctggagaaggtgagcaagaagaagacccccaagaccgtgaagatgcccaagcccagcaagatccccaagccccccaagccccccaagccccccagaccccccaagaccctgaagctgaaggacggcggcaagaagaagggcaagaagagcagagagagcgccagccccaccatccccaacctggacctgctggaggcccacaccaaggaggccctgaccaagatggagccccccaagaagggcaaggccaccaagagcgtgctgagcgtgcccaacaaggacgtggtgcacatgcagaacgacgtggagagactggagatcagagagcagaccaagagcaagagcgaggccaagtggaagtacaagaacagcaagcccgacagcctgctgaagatggaggaggagcagaagctggagaagagccccctggccggcaacaaggacaacaagttcagcttcagcttcagcaacaagaagctgctgggcagcaaggccctgagaccccccaccagccccggcgtgttcggcgccctgcagaacttcaaggaggacaagcccaagcccgtgagagacgagtacgagtacgtgagcgacgacggcgagctgaagatcgacgagttccccatcagaagaaagaagaacgcccccaagagagacctgagcttcctgctggacaagaaggccgtgctgcccacccccgtgaccaagcccaagctggacagcgccgcctacaagagcgacgacagcagcgacgagggcagcctgcacatcgacaccgacaccaagcccggcagaaacgccagagtgaagaaggagagcggcagcagcgccgccggcatcctggacctgctgcaggccagcgaggaggtgggcgccctggagtacaaccccagcagccagccccccgccagccccagcacccaggaggccatccagggcatgctgagcatggccaacctgcaggccagcgacagctgcctgcagaccacctggggcgccggccaggccaagggcagcagcctggccgcccacggcgccagaaagaacggcggcggcagcggcaagagcgccggcaagagactgctgaagagagccgccaagaacagcgtggacctggacgactacgaggaggagcaggaccacctggacgcctgcttcaaggacagcgactacgtgtaccccagcctggagagcgacgaggacaaccccatcttcaagagcagaagcaagaagagaaagggcagcgacgacgccccctacagccccaccgccagagtgggccccagcgtgcccagacaggacagacccgtgagagagggcaccagagtggccagcatcgagaccggcctggccgccgccgccgccaagctgagccagcaggaggagcagaagagcaagaagaagaagagcgccaagagaaagctgacccccaacaccaccagccccagcaccagcaccagcatcagcgccggcaccaccagcaccagcaccacccccgccagcaccacccccgccagcaccacccccgccagcaccagcaccgccagcagccaggccagccaggagggcagcagccccgagcccccccccgagagccacagcagcagcctggccgaccacgagtacaccgccgccggcaccttcaccggcgcccaggccggcagaaccagccagcccatggcccccggcgtgttcctgacccagagaagacccagcgccagcagccccaacaacaacaccgccgccaagggcaagagaaccaagaagggcatggccaccgccaagcagagactgggcaagatcctgaagatccacagaaacggcaagctgctgctgtag

SEQ ID NO: 92909 - DNA, 984 bp, synthetic construct
  misc_feature 1..984: note = Description of Artificial Sequence: Synthetic coding sequence
  source 1..984: mol_type = other DNA
atggccaccgtgcccgtgtactgcgtgtgcagactgccctacgacgtgaccagattcatgatcgagtgcgacgcctgcaaggactggttccacggcagctgcgtgggcgtggaggaggaggaggcccccgacatcgacatctaccactgccccaactgcgagaagacccacggcaagagcaccctgaagaagaagagaacctggcacaagcacggccccggccaggcccccgacgtgaagcccaagaacagcgtggacctggacgactacgaggaggagcaggaccacctggacgcctgcttcaaggacagcgactacgtgtaccccagcctggagagcgacgaggacaaccccatcttcaagagcagaagcaagaagagaaagggcagcgacgacgccccctacagccccaccgccagagtgggccccagcgtgcccagacaggacagacccgtgagagagggcaccagagtggccagcatcgagaccggcctggccgccgccgccgccaagctgagccagcaggaggagcagaagagcaagaagaagaagagcgccaagagaaagctgacccccaacaccaccagccccagcaccagcaccagcatcagcgccggcaccaccagcaccagcaccacccccgccagcaccacccccgccagcaccacccccgccagcaccagcaccgccagcagccaggccagccaggagggcagcagccccgagcccccccccgagagccacagcagcagcctggccgaccacgagtacaccgccgccggcaccttcaccggcgcccaggccggcagaaccagccagcccatggcccccggcgtgttcctgacccagagaagacccagcgccagcagccccaacaacaacaccgccgccaagggcaagagaaccaagaagggcatggccaccgccaagcagagactgggcaagatcctgaagatccacagaaacggcaagctgctgctgtag

SEQ ID NO: 92910 - DNA, 2046 bp, synthetic construct
  misc_feature 1..2046: note = Description of Artificial Sequence: Synthetic coding sequence
  source 1..2046: mol_type = other DNA
atggagctgcagaccctgcaggaggccctgaaggtggagatccaggtgcaccagaagctggtggcccagatgaagcaggacccccagaacgccgacctgaagaagcagctgcacgagctgcaggccaagatcaccgccctgagcgagaagcagaagagagtggtggagcagctgagaaagaacctgatcgtgaagcaggagcagcccgacaagttccagatccagcccctgccccagagcgagaacaagctgcagaccgcccagcagcagcccctgcagcagctgcagcagcagcagcagtaccaccaccaccacgcccagcagagcgccgccgccagccccaacctgaccgccagccagaagaccgtgaccaccgccagcatgatcaccaccaagaccctgcccctggtgctgaaggccgccaccgccaccatgcccgccagcgtggtgggccagagacccaccatcgccatggtgaccgccatcaacagccagaaggccgtgctgagcaccgacgtgcagaacacccccgtgaacctgcagaccagcagcaaggtgaccggccccggcgccgaggccgtgcagatcgtggccaagaacaccgtgaccctgcaggtgcaggccacccccccccagcccatcaaggtgccccagttcatccccccccccagactgacccccagacccaacttcctgccccaggtgagacccaagcccgtggcccagaacaacatccccatcgcccccgcccccccccccatgctggccgccccccagctgatccagagacccgtgatgctgaccaagttcacccccaccaccctgcccaccagccagaacagcatccaccccgtgagagtggtgaacggccagaccgccaccatcgccaagaccttccccatggcccagctgaccagcatcgtgatcgccacccccggcaccagactggccggcccccagaccgtgcagctgagcaagcccagcctggagaagcagaccgtgaagagccacaccgagaccgacgagaagcagaccgagagcagaaccatcaccccccccgccgcccccaagcccaagagagaggagaacccccagaagctggccttcatggtgagcctgggcctggtgacccacgaccacctggaggagatccagagcaagagacaggagagaaagagaagaaccaccgccaaccccgtgtacagcggcgccgtgttcgagcccgagagaaagaagagcgccgtgacctacctgaacagcaccatgcaccccggcaccagaaagagaggcagaccccccaagtacaacgccgtgctgggcttcggcgccctgacccccaccagcccccagagcagccaccccgacagccccgagaacgagaagaccgagaccaccttcaccttccccgcccccgtgcagcccgtgagcctgcccagccccaccagcaccgacggcgacatccacgaggacttctgcagcgtgtgcagaaagagcggccagctgctgatgtgcgacacctgcagcagagtgtaccacctggactgcctggacccccccctgaagaccatccccaagggcatgtggatctgccccagatgccaggaccagatgctgaagaaggaggaggccatcccctggcccggcaccctggccatcgtgcacagctacatcgcctacaaggccgccaaggaggaggagaagcagaagctgctgaagtggagcagcgacctgaagcaggagagagagcagctggagcagaaggtgaagcagctgagcaacagcatcagcaagtgcatggagatgaagaacaccatcctggccagacagaaggagatgcacagcagcctggagaaggtgaagcagctgatcagactgatccacggcatcgacctgagcaagcccgtggacagcgaggccaccgtgggcgccatcagcaacggccccgactgcaccccccccgccaacgccgccaccagcacccccgcccccagccccagcagccagagctgcaccgccaactgcaaccagggcgaggagaccaagtag

SEQ ID NO: 92911 - DNA, 1905 bp, synthetic construct
  misc_feature 1..1905: note = Description of Artificial Sequence: Synthetic coding sequence
  source 1..1905: mol_type = other DNA
atggagctgcagaccctgcaggaggccctgaaggtggagatccaggtgcaccagaagctggtggcccagatgaagcaggacccccagaacgccgacctgaagaagcagctgcacgagctgcaggccaagatcaccgccctgagcgagaagcagaagagagtggtggagcagctgagaaagaacctgatcgtgaagcaggagcagcccgacaagttccagatccagcccctgccccagagcgagaacaagctgcagaccgcccagcagcagcccctgcagcagctgcagcagcagcagcagtaccaccaccaccacgcccagcagagcgccgccgccagccccaacctgaccgccagccagaagaccgtgaccaccgccagcatgatcaccaccaagaccctgcccctggtgctgaaggccgccaccgccaccatgcccgccagcgtggtgggccagagacccaccatcgccatggtgaccgccatcaacagccagaaggccgtgctgagcaccgacgtgcagaacacccccgtgaacctgcagaccagcagcaaggtgaccggccccggcgccgaggccgtgcagatcgtggccaagaacaccgtgaccctgcaggtgcaggccacccccccccagcccatcaaggtgccccagttcatccccccccccagactgacccccagacccaacttcctgccccaggtgagacccaagcccgtggcccagaacaacatccccatcgcccccgcccccccccccatgctggccgccccccagctgatccagagacccgtgatgctgaccaagttcacccccaccaccctgcccaccagccagaacagcatccaccccgtgagagtggtgaacggccagaccgccaccatcgccaagaccttccccatggcccagctgaccagcatcgtgatcgccacccccggcaccagactggccggcccccagaccgtgcagctgagcaagcccagcctggagaagcagaccgtgaagagccacaccgagaccgacgagaagcagaccgagagcagaaccatcaccccccccgccgcccccaagcccaagagagaggagaacccccagaagctggccttcatggtgagcctgggcctggtgacccacgaccacctggaggagatccagagcaagagacaggagagaaagagaagaaccaccgccaaccccgtgtacagcggcgccgtgttcgagcccgagagaaagaagagcgccgtgacctacctgaacagcaccatgcaccccggcaccagaaagagagccaacgaggagcactggcccaagggcgacatccacgaggacttctgcagcgtgtgcagaaagagcggccagctgctgatgtgcgacacctgcagcagagtgtaccacctggactgcctggacccccccctgaagaccatccccaagggcatgtggatctgccccagatgccaggaccagatgctgaagaaggaggaggccatcccctggcccggcaccctggccatcgtgcacagctacatcgcctacaaggccgccaaggaggaggagaagcagaagctgctgaagtggagcagcgacctgaagcaggagagagagcagctggagcagaaggtgaagcagctgagcaacagcatcagcaagtgcatggagatgaagaacaccatcctggccagacagaaggagatgcacagcagcctggagaaggtgaagcagctgatcagactgatccacggcatcgacctgagcaagcccgtggacagcgaggccaccgtgggcgccatcagcaacggccccgactgcaccccccccgccaacgccgccaccagcacccccgcccccagccccagcagccagagctgcaccgccaactgcaaccagggcgaggagaccaagtag

SEQ ID NO: 92912 - DNA, 2043 bp, synthetic construct
  misc_feature 1..2043: note = Description of Artificial Sequence: Synthetic coding sequence
  source 1..2043: mol_type = other DNA
atggagctgcagaccctgcaggaggccctgaaggtggagatccaggtgcaccagaagctggtggcccagatgaagcaggacccccagaacgccgacctgaagaagcagctgcacgagctgcaggccaagatcaccgccctgagcgagaagcagaagagagtggtggagcagctgagaaagaacctgatcgtgaagcaggagcagcccgacaagttccagatccagcccctgccccagagcgagaacaagctgcagaccgcccagcagcagcccctgcagcagctgcagcagcagcagcagtaccaccaccaccacgcccagcagagcgccgccgccagccccaacctgaccgccagccagaagaccgtgaccaccgccagcatgatcaccaccaagaccctgcccctggtgctgaaggccgccaccgccaccatgcccgccagcgtggtgggccagagacccaccatcgccatggtgaccgccatcaacagccagaaggccgtgctgagcaccgacgtgcagaacacccccgtgaacctgcagaccagcagcaaggtgaccggccccggcgccgaggccgtgcagatcgtggccaagaacaccgtgaccctggtgcaggccacccccccccagcccatcaaggtgccccagttcatccccccccccagactgacccccagacccaacttcctgccccaggtgagacccaagcccgtggcccagaacaacatccccatcgcccccgcccccccccccatgctggccgccccccagctgatccagagacccgtgatgctgaccaagttcacccccaccaccctgcccaccagccagaacagcatccaccccgtgagagtggtgaacggccagaccgccaccatcgccaagaccttccccatggcccagctgaccagcatcgtgatcgccacccccggcaccagactggccggcccccagaccgtgcagctgagcaagcccagcctggagaagcagaccgtgaagagccacaccgagaccgacgagaagcagaccgagagcagaaccatcaccccccccgccgcccccaagcccaagagagaggagaacccccagaagctggccttcatggtgagcctgggcctggtgacccacgaccacctggaggagatccagagcaagagacaggagagaaagagaagaaccaccgccaaccccgtgtacagcggcgccgtgttcgagcccgagagaaagaagagcgccgtgacctacctgaacagcaccatgcaccccggcaccagaaagagaggcagaccccccaagtacaacgccgtgctgggcttcggcgccctgacccccaccagcccccagagcagccaccccgacagccccgagaacgagaagaccgagaccaccttcaccttccccgcccccgtgcagcccgtgagcctgcccagccccaccagcaccgacggcgacatccacgaggacttctgcagcgtgtgcagaaagagcggccagctgctgatgtgcgacacctgcagcagagtgtaccacctggactgcctggacccccccctgaagaccatccccaagggcatgtggatctgccccagatgccaggaccagatgctgaagaaggaggaggccatcccctggcccggcaccctggccatcgtgcacagctacatcgcctacaaggccgccaaggaggaggagaagcagaagctgctgaagtggagcagcgacctgaagcaggagagagagcagctggagcagaaggtgaagcagctgagcaacagcatcagcaagtgcatggagatgaagaacaccatcctggccagacagaaggagatgcacagcagcctggagaaggtgaagcagctgatcagactgatccacggcatcgacctgagcaagcccgtggacagcgaggccaccgtgggcgccatcagcaacggccccgactgcaccccccccgccaacgccgccaccagcacccccgcccccagccccagcagccagagctgcaccgccaactgcaaccagggcgaggagaccaagtag

SEQ ID NO: 92913 - DNA, 81 bp, synthetic construct
  misc_feature 1..81: note = Description of Artificial Sequence: Synthetic coding sequence
  source 1..81: mol_type = other DNA
atggagctgcagaccctgcaggaggccctgaaggtggagatccaggtgcaccagaagctggtggcccagatgaagcagtag

SEQ ID NO: 92914 - DNA, 36 bp, synthetic construct
  misc_feature 1..36: note = Description of Artificial Sequence: Synthetic coding sequence
  source 1..36: mol_type = other DNA
atggagctgcagaccctgcaggaggccctgaagtag

SEQ ID NO: 92915 - DNA, 306 bp, synthetic construct
  misc_feature 1..306: note = Description of Artificial Sequence: Synthetic coding sequence
  source 1..306: mol_type = other DNA
atggagctgcagaccctgcaggaggccctgaaggtggagatccaggtgcaccagaagctggtggcccagatgaagcaggacccccagaacgccgacctgaagaagcagctgcacgagctgcaggccaagatcaccgccctgagcgagaagcagaagagagtggtggagcagctgagaaagaacctgatcgtgaagcaggagcagcccgacaagttccagatccagcccctgccccagagcgagaacaagctgcagaccgcccagcagcagcccctgcagcagctgcagcagcagcagcagtactag

SEQ ID NO: 92916 - DNA, 30 bp, synthetic construct
  misc_feature 1..30: note = Description of Artificial Sequence: Synthetic coding sequence
  source 1..30: mol_type = other DNA
atggagctgcagaccctgcaggaggcctag

SEQ ID NO: 92917 - DNA, 156 bp, synthetic construct
  misc_feature 1..156: note = Description of Artificial Sequence: Synthetic coding sequence
  source 1..156: mol_type = other DNA
atggagctgcagaccctgcaggaggccctgaaggtggagatccaggtgcaccagaagctggtggcccagatgaagcaggacccccagaacgccgacctgaagaagcagctgcacgagctgcaggccaagatcaccgccctgagcgagaagcagtag

SEQ ID NO: 92918 - DNA, 477 bp, synthetic construct
  misc_feature 1..477: note = Description of Artificial Sequence: Synthetic coding sequence
  source 1..477: mol_type = other DNA
atgctggaggccatggccgagcccagccccgaggaccccccccccaccctgaagcccgagacccagccccccgagaagagaagaagaaccatcgaggacttcaacaagttctgcagcttcgtgctggcctacgccggctacatcccccccagcaaggaggagagcgactggcccgccagcggcagcagcagccccctgagaggcgagagcgccgccgacagcgacggctgggacagcgcccccagcgacctgagaaccatccagaccttcgtgaagaaggccaagagcagcaagagaagagccgcccaggccggccccacccagcccggcccccccagaagcaccttcagcagactgcaggcccccgacagcgccaccctgctggagaagatgaagctgaaggacagcctgttcgacctggacggccccaaggtggccagccccctgagccccccctgcgccgccaacaccccctag

SEQ ID NO: 92919 - DNA, 1212 bp, synthetic construct
  misc_feature 1..1212: note = Description of Artificial Sequence: Synthetic coding sequence
  source 1..1212: mol_type = other DNA
atgctggaggccatggccgagcccagccccgaggaccccccccccaccctgaagcccgagacccagccccccgagaagagaagaagaaccatcgaggacttcaacaagttctgcagcttcgtgctggcctacgccggctacatcccccccagcaaggaggagagcgactggcccgccagcggcagcagcagccccctgagaggcgagagcgccgccgacagcgacggctgggacagcgcccccagcgacctgagaaccatccagaccttcgtgaagaaggccaagagcagcaagagaagagccgcccaggccggccccacccagcccggcccccccagaagcaccttcagcagactgcaggcccccgacagcgccaccctgctggagaagatgaagctgaaggacagcctgttcgacctggacggccccaaggtggccagccccctgagccccaccagcctgacccacaccagcagaccccccgccgccctgacccccgtgcccctgagccagggcgacctgagccacccccccagaaagaaggacagaaagaacagaaagctgggccccggcgccggcgccggcttcggcgtgctgagaagacccagacccacccccggcgacggcgagaagagaagcagaatcaagaagagcaagaagagaaagctgaagaaggccgagagaggcgacagactgcccccccccggccccccccaggccccccccagcgacaccgacagcgaggaggaggaggaggaggaggaggaggaggaggaggaggagatggccaccgtggtgggcggcgaggcccccgtgcccgtgctgcccaccccccccgaggcccccagaccccccgccaccgtgcaccccgagggcgtgccccccgccgacagcgagagcaaggaggtgggcagcaccgagaccagccaggacggcgacgccagcagcagcgagggcgagatgagagtgatggacgaggacatcatggtggagagcggcgacgacagctgggacctgatcacctgctactgcagaaagcccttcgccggcagacccatgatcgagtgcagcctgtgcggcacctggatccacctgagctgcgccaagatcaagaagaccaacgtgcccgacttcttctactgccagaagtgcaaggagctgagacccgaggccagaagactgggcggcccccccaagagcggcgagccctag

SEQ ID NO: 92920 - DNA, 1200 bp, synthetic construct
  misc_feature 1..1200: note = Description of Artificial Sequence: Synthetic coding sequence
  source 1..1200: mol_type = other DNA
atgcccggcgactgcagaagagaccccccccccaccctgaagcccgagacccagccccccgagaagagaagaagaaccatcgaggacttcaacaagttctgcagcttcgtgctggcctacgccggctacatcccccccagcaaggaggagagcgactggcccgccagcggcagcagcagccccctgagaggcgagagcgccgccgacagcgacggctgggacagcgcccccagcgacctgagaaccatccagaccttcgtgaagaaggccaagagcagcaagagaagagccgcccaggccggccccacccagcccggcccccccagaagcaccttcagcagactgcaggcccccgacagcgccaccctgctggagaagatgaagctgaaggacagcctgttcgacctggacggccccaaggtggccagccccctgagccccaccagcctgacccacaccagcagaccccccgccgccctgacccccgtgcccctgagccagggcgacctgagccacccccccagaaagaaggacagaaagaacagaaagctgggccccggcgccggcgccggcttcggcgtgctgagaagacccagacccacccccggcgacggcgagaagagaagcagaatcaagaagagcaagaagagaaagctgaagaaggccgagagaggcgacagactgcccccccccggccccccccaggccccccccagcgacaccgacagcgaggaggaggaggaggaggaggaggaggaggaggaggaggagatggccaccgtggtgggcggcgaggcccccgtgcccgtgctgcccaccccccccgaggcccccagaccccccgccaccgtgcaccccgagggcgtgccccccgccgacagcgagagcaaggaggtgggcagcaccgagaccagccaggacggcgacgccagcagcagcgagggcgagatgagagtgatggacgaggacatcatggtggagagcggcgacgacagctgggacctgatcacctgctactgcagaaagcccttcgccggcagacccatgatcgagtgcagcctgtgcggcacctggatccacctgagctgcgccaagatcaagaagaccaacgtgcccgacttcttctactgccagaagtgcaaggagctgagacccgaggccagaagactgggcggcccccccaagagcggcgagccctag

SEQ ID NO: 92921 - DNA, 6120 bp, synthetic construct
  misc_feature 1..6120: note = Description of Artificial Sequence: Synthetic coding sequence
  source 1..6120: mol_type = other DNA
atggacatcgtggacaccttcaaccacctgatccccaccgagcacctggacgacgccctgttcctgggcagcaacctggagaacgaggtgtgcgaggacttcagcgccagccagaacgtgctggaggacagcctgaagaacatgctgagcgacaaggaccccatgctgggcagcgccagcaaccagttctgcctgcccgtgctggacagcaacgaccccaacttccagatgccctgcagcaccgtggtgggcctggacgacatcatggacgagggcgtggtgaaggagagcggcaacgacaccatcgacgaggaggagctgatcctgcccaacagaaacctgagagacaaggtggaggagaacagcgtgagaagccccagaaagagccccagactgatggcccaggagcaggtgagaagcctgagacagagcaccatcgccaagagaagcaacgccgcccccctgagcaacaccaagaaggccagcggcaagaccgtgagcaccgccaaggccggcgtgaagcagcccgagagaagccaggtgaaggaggaggtgtgcatgagcctgaagcccgagtaccacaaggagaacagaagatgcagcagaaacagcggccagatcgaggtggtgcccgaggtgagcgtgagcagcagccacagcagcgtgagcagctgcctggagatgaaggacgaggacggcctggacagcaagcacaagtgcaacaaccccggcgagatcgacgtgcccagccacgagctgaactgcagcctgctgagcgagacctgcgtgaccatcggcgagaagaagaacgaggccctgatggagtgcaaggccaagcccgtgggcagccccctgttcaagttcagcgacaaggaggagcacgagcagaacgacagcatcagcggcaagaccggcgagaccgtggtggaggagatgatcgccaccagaaaggtggagcaggacagcaaggagaccgtgaagctgagccacgaggacgaccacatcctggaggacgccggcagcagcgacatcagcagcgacgccgcctgcaccaaccccaacaagaccgagaacagcctggtgggcctgcccagctgcgtggacgaggtgaccgagtgcaacctggagctgaaggacaccatgggcatcgccgacaagaccgagaacaccctggagagaaacaagatcgagcccctgggctactgcgaggacgccgagagcaacagacagctggagagcaccgagttcaacaagagcaacctggaggtggtggacaccagcaccttcggccccgagagcaacatcctggagaacgccatctgcgacgtgcccgaccagaacagcaagcagctgaacgccatcgagagcaccaagatcgagagccacgagaccgccaacctgcaggacgacagaaacagccagagcagcagcgtgagctacctggagagcaagagcgtgaagagcaagcacaccaagcccgtgatccacagcaagcagaacatgaccaccgacgcccccaagaagatcgtggccgccaagtacgaggtgatccacagcaagaccaaggtgaacgtgaagagcgtgaagagaaacaccgacgtgcccgagagccagcagaacttccacagacccgtgaaggtgagaaagaagcagatcgacaaggagcccaagatccagagctgcaacagcggcgtgaagagcgtgaagaaccaggcccacagcgtgctgaagaagaccctgcaggaccagaccctggtgcagatcttcaagcccctgacccacagcctgagcgacaagagccacgcccaccccggctgcctgaaggagccccaccaccccgcccagaccggccacgtgagccacagcagccagaagcagtgccacaagccccagcagcaggcccccgccatgaagaccaacagccacgtgaaggaggagctggagcaccccggcgtggagcacttcaaggaggaggacaagctgaagctgaagaagcccgagaagaacctgcagcccagacagagaagaagcagcaagagcttcagcctggacgagccccccctgttcatccccgacaacatcgccaccatcagaagagagggcagcgaccacagcagcagcttcgagagcaagtacatgtggacccccagcaagcagtgcggcttctgcaagaagccccacggcaacagattcatggtgggctgcggcagatgcgacgactggttccacggcgactgcgtgggcctgagcctgagccaggcccagcagatgggcgaggaggacaaggagtacgtgtgcgtgaagtgctgcgccgaggaggacaagaagaccgagatcctggaccccgacaccctggagaaccaggccaccgtggagttccacagcggcgacaagaccatggagtgcgagaagctgggcctgagcaagcacaccaccaacgacagaaccaagtacatcgacgacaccgtgaagcacaaggtgaagatcctgaagagagagagcggcgagggcagaaacagcagcgactgcagagacaacgagatcaagaagtggcagctggcccccctgagaaagatgggccagcccgtgctgcccagaagaagcagcgaggagaagagcgagaagatccccaaggagagcaccaccgtgacctgcaccggcgagaaggccagcaagcccggcacccacgagaagcaggagatgaagaagaagaaggtggagaagggcgtgctgaacgtgcaccccgccgccagcgccagcaagcccagcgccgaccagatcagacagagcgtgagacacagcctgaaggacatcctgatgaagagactgaccgacagcaacctgaaggtgcccgaggagaaggccgccaaggtggccaccaagatcgagaaggagctgttcagcttcttcagagacaccgacgccaagtacaagaacaagtacagaagcctgatgttcaacctgaaggaccccaagaacaacatcctgttcaagaaggtgctgaagggcgaggtgacccccgaccacctgatcagaatgagccccgaggagctggccagcaaggagctggccgcctggagaagaagagagaacagacacaccatcgagatgatcgagaaggagcagagagaggtggagagaagacccatcaccaagatcacccacaagggcgagatcgagatcgagagcgacgcccccatgaaggagcaggaggccgccatggagatccaggagcccgccgccaacaagagcctggagaagcccgagggcagcgagaagcagaaggaggaggtggacagcatgagcaaggacaccaccagccagcacagacagcacctgttcgacctgaactgcaagatctgcatcggcagaatggccccccccgtggacgacctgagccccaagaaggtgaaggtggtggtgggcgtggccagaaagcacagcgacaacgaggccgagagcatcgccgacgccctgagcagcaccagcaacatcctggccagcgagttcttcgaggaggagaagcaggagagccccaagagcaccttcagccccgcccccagacccgagatgcccggcaccgtggaggtggagagcaccttcctggccagactgaacttcatctggaagggcttcatcaacatgcccagcgtggccaagttcgtgaccaaggcctaccccgtgagcggcagccccgagtacctgaccgaggacctgcccgacagcatccaggtgggcggcagaatcagcccccagaccgtgtgggactacgtggagaagatcaaggccagcggcaccaaggagatctgcgtggtgagattcacccccgtgaccgaggaggaccagatcagctacaccctgctgttcgcctacttcagcagcagaaagagatacggcgtggccgccaacaacatgaagcaggtgaaggacatgtacctgatccccctgggcgccaccgacaagatcccccaccccctggtgcccttcgacggccccggcctggagctgcacagacccaacctgctgctgggcctgatcatcagacagaagctgaagagacagcacagcgcctgcgccagcaccagccacatcgccgagacccccgagagcgccccccccatcgccctgccccccgacaagaagagcaagatcgaggtgagcaccgaggaggcccccgaggaggagaacgacttcttcaacagcttcaccaccgtgctgcacaagcagagaaacaagccccagcagaacctgcaggaggacctgcccaccgccgtggagcccctgatggaggtgaccaagcaggagccccccaagcccctgagattcctgcccggcgtgctgatcggctgggagaaccagcccaccaccctggagctggccaacaagcccctgcccgtggacgacatcctgcagagcctgctgggcaccaccggccaggtgtacgaccaggcccagagcgtgatggagcagaacaccgtgaaggagatccccttcctgaacgagcagaccaacagcaagatcgagaagaccgacaacgtggaggtgaccgacggcgagaacaaggagatcaaggtgaaggtggacaacatcagcgagagcaccgacaagagcgccgagatcgagaccagcgtggtgggcagcagcagcatcagcgccggcagcctgaccagcctgagcctgagaggcaagccccccgacgtgagcaccgaggccttcctgaccaacctgagcatccagagcaagcaggaggagaccgtggagagcaaggagaagaccctgaagagacagctgcaggaggaccaggagaacaacctgcaggacaaccagaccagcaacagcagcccctgcagaagcaacgtgggcaagggcaacatcgacggcaacgtgagctgcagcgagaacctggtggccaacaccgccagaagcccccagttcatcaacctgaagagagaccccagacaggccgccggcagaagccagcccgtgaccaccagcgagagcaaggacggcgacagctgcagaaacggcgagaagcacatgctgcccggcctgagccacaacaaggagcacctgaccgagcagatcaacgtggaggagaagctgtgcagcgccgagaagaacagctgcgtgcagcagagcgacaacctgaaggtggcccagaacagccccagcgtggagaacatccagaccagccaggccgagcaggccaagcccctgcaggaggacatcctgatgcagaacatcgagaccgtgcaccccttcagaagaggcagcgccgtggccaccagccacttcgaggtgggcaacacctgccccagcgagttccccagcaagagcatcaccttcaccagcagaagcaccagccccagaaccagcaccaacttcagccccatgagaccccagcagcccaacctgcagcacctgaagagcagcccccccggcttccccttccccggcccccccaacttccccccccagagcatgttcggcttccccccccacctgcccccccccctgctgcccccccccggcttcggcttcgcccagaaccccatggtgccctggccccccgtggtgcacctgcccggccagccccagagaatgatgggccccctgagccaggccagcagatacatcggcccccagaacttctaccaggtgaaggacatcagaagacccgagagaagacacagcgacccctggggcagacaggaccagcagcagctggacagacccttcaacagaggcaagggcgacagacagagattctacagcgacagccaccacctgaagagagagagacacgagaaggagtgggagcaggagagcgagagacacagaagaagagacagaagccaggacaaggacagagacagaaagagcagagaggagggccacaaggacaaggagagagccagactgagccacggcgacagaggcaccgacggcaaggccagcagagacagcagaaacgtggacaagaagcccgacaagcccaagagcgaggactacgagaaggacaaggagagagagaagagcaagcacagagagggcgagaaggacagagacagataccacaaggacagagaccacaccgacagaaccaagagcaagagatag

SEQ ID NO: 92922 - DNA, 6120 bp, synthetic construct; identical to SEQ ID NO: 92921
  misc_feature 1..6120: note = Description of Artificial Sequence: Synthetic coding sequence
  source 1..6120: mol_type = other DNA

SEQ ID NO: 92923 - DNA, 1098 bp, synthetic construct
  misc_feature 1..1098: note = Description of Artificial Sequence: Synthetic coding sequence
  source 1..1098: mol_type = other DNA
atgagcagcagcgtggagcagaagaagggccccaccagacagagaaagtgcggcttctgcaagagcaacagagacaaggagtgcggccagctgctgatcagcgagaaccagaaggtggccgcccaccacaagtgcatgctgttcagcagcgccctggtgagcagccacagcgacaacgagagcctgggcggcttcagcatcgaggacgtgcagaaggagatcaagagaggcaccaagctgatgtgcagcctgtgccactgccccggcgccaccatcggctgcgacgtgaagacctgccacagaacctaccactaccactgcgccctgcacgacaaggcccagatcagagagaagcccagccagggcatctacatggtgtactgcagaaagcacaagaagaccgcccacaacagcgaggccgacctggaggagagcttcaacgagcacgagctggagcccagcagccccaagagcaagaagaagagcagaaagggcagacccagaaagaccaacttcaagggcctgagcgaggacaccagaagcaccagcagccacggcaccgacgagatggagagcagcagctacagagacagaagcccccacagaagcagccccagcgacaccagacccaagtgcggcttctgccacgtgggcgaggaggagaacgaggccagaggcaagctgcacatcttcaacgccaagaaggccgccgcccactacaagtgcatgctgttcagcagcggcaccgtgcagctgaccaccaccagcagagccgagttcggcgacttcgacatcaagaccgtgctgcaggagatcaagagaggcaagagaatgaagtgcaccctgtgcagccagcccggcgccaccatcggctgcgagatcaaggcctgcgtgaagacctaccactaccactgcggcgtgcaggacaaggccaagtacatcgagaacatgagcagaggcatctacaagctgtactgcaagaaccacagcggcaacgacgagagagacgaggaggacgaggagagagagagcaagagcagaggcaaggtggagatcgaccagcagcagctgacccagcagcagctgaacggcaactag

SEQ ID NO: 92924 - DNA, 975 bp, synthetic construct
  misc_feature 1..975: note = Description of Artificial Sequence: Synthetic coding sequence
  source 1..975: mol_type = other DNA
atgagcagcagcgtggagcagaagaagggccccaccagacagagaaagtgcggcttctgcaagagcaacagagacaaggagtgcggccagctgctgatcagcgagaaccagaaggtggccgcccaccacaagtgcatgctgttcagcagcgccctggtgagcagccacagcgacaacgagagcctgggcggcttcagcatcgaggacgtgcagaaggagatcaagagaggcaccaagctgatgtgcagcctgtgccactgccccggcgccaccatcggctgcgacgtgaagacctgccacagaacctaccactaccactgcgccctgcacgacaaggcccagatcagagagaagcccagccagggcatctacatggtgtactgcagaaagcacaagaagaccgcccacaacagcgaggccgccgacctggaggagagcttcaacgagcacgagctggagcccagcagccccaagagcaagaagaagagcagaaagggcagacccagaaagaccaacttcaagggcctgagcgaggacaccagaagcaccagcagccacggcaccgacgagatggagagcagcagctacagagacagaagcccccacagaagcagccccagcgacaccagacccaagtgcggcttctgccacgtgggcgaggaggagaacgaggccagaggcaagctgcacatcttcaacgccaagaaggccgccgcccactacaagtgcatgctgttcagcagcggcaccgtgcagctgaccaccaccagcagagccgagttcggcgacttcgacatcaagaccgtgctgcaggagatcaagagaggcaagagaatgaagtgcaccctgtgcagccagcccggcgccaccatcggctgcgagatcaaggcctgcgtgaagacctaccactaccactgcggcgtgcaggacaaggccaagtacatcgagaacatgagcagaggcatctacaagtag

SEQ ID NO: 92925 - DNA, 939 bp, synthetic construct
  misc_feature 1..939: note = Description of Artificial Sequence: Synthetic coding sequence
  source 1..939: mol_type = other DNA
atgagcagcagcgtggagcagaagaagggccccaccagacagagaaagtgcggcttctgcaagagcaacagagacaaggagtgcggccagctgctgatcagcgagaaccagaaggtggccgcccaccacaagtgcatgctgttcagcagcgccctggtgagcagccacagcgacaacgagagcctgggcggcttcagcatcgaggacgtgcagaaggagatcaagagaggcaccaagctgatgtgcagcctgtgccactgccccggcgccaccatcggctgcgacgtgaagacctgccacagaacctaccactaccactgcgccctgcacgacaaggcccagatcagagagaagcccagccagggcatctacatggtgtactgcagaaagcacaagaagaccgcccacaacagcgaggccgccgacctggaggagagcttcaacgagcacgagctggagcccagcagccccaagagcaagaagaagagcagaaagggcagacccagaaagaccaacttcaagggcctgagcgaggacaccagaagcaccagcagccacggcaccgacgagatggagagcagcagctacagagacagaagcccccacagaagcagccccagcgacaccagacccaagtgcggcttctgccacgtgggcgaggaggagaacgaggccagaggcaagctgcacatcttcaacgccaagaaggccgccgcccactacaagtgcatgctgttcagcagcggcaccgtgcagctgaccaccaccagcagagccgagttcggcgacttcgacatcaagaccgtgctgcaggagatcaagagaggcaagagaatggtgtgcagcttctacatctgctacgccaccctgcacctgatctgctgcttcaagttcagagtgcaccccaagttcatccagagcagcgagaacctgaagtag

SEQ ID NO: 92926 - DNA, 1098 bp, synthetic construct; identical to SEQ ID NO: 92923
  misc_feature 1..1098: note = Description of Artificial Sequence: Synthetic coding sequence
  source 1..1098: mol_type = other DNA

SEQ ID NO: 92927 - DNA, 1101 bp, synthetic construct
  misc_feature 1..1101: note = Description of Artificial Sequence: Synthetic coding sequence
  source 1..1101: mol_type = other DNA
atgagcagcagcgtggagcagaagaagggccccaccagacagagaaagtgcggcttctgcaagagcaacagagacaaggagtgcggccagctgctgatcagcgagaaccagaaggtggccgcccaccacaagtgcatgctgttcagcagcgccctggtgagcagccacagcgacaacgagagcctgggcggcttcagcatcgaggacgtgcagaaggagatcaagagaggcaccaagctgatgtgcagcctgtgccactgccccggcgccaccatcggctgcgacgtgaagacctgccacagaacctaccactaccactgcgccctgcacgacaaggcccagatcagagagaagcccagccagggcatctacatggtgtactgcagaaagcacaagaagaccgcccacaacagcgaggccgccgacctggaggagagcttcaacgagcacgagctggagcccagcagccccaagagcaagaagaagagcagaaagggcagacccagaaagaccaacttcaagggcctgagcgaggacaccagaagcaccagcagccacggcaccgacgagatggagagcagcagctacagagacagaagcccccacagaagcagccccagcgacaccagacccaagtgcggcttctgccacgtgggcgaggaggagaacgaggccagaggcaagctgcacatcttcaacgccaagaaggccgccgcccactacaagtgcatgctgttcagcagcggcaccgtgcagctgaccaccaccagcagagccgagttcggcgacttcgacatcaagaccgtgctgcaggagatcaagagaggcaagagaatgaagtgcaccctgtgcagccagcccggcgccaccatcggctgcgagatcaaggcctgcgtgaagacctaccactaccactgcggcgtgcaggacaaggccaagtacatcgagaacatgagcagaggcatctacaagctgtactgcaagaaccacagcggcaacgacgagagagacgaggaggacgaggagagagagagcaagagcagaggcaaggtggagatcgaccagcagcagctgacccagcagcagctgaacggcaactag

SEQ ID NO: 92928 - DNA, 996 bp, synthetic construct
  misc_feature 1..996: note = Description of Artificial Sequence: Synthetic coding sequence
  source 1..996: mol_type = other DNA
atgagcagcagcgtggagcagaagaagggccccaccagacagagaaagtgcggcttctgcaagagcaacagagacaaggagtgcggccagctgctgatcagcgagaaccagaaggtggccgcccaccacaagtgcatgatgtgcagcctgtgccactgccccggcgccaccatcggctgcgacgtgaagacctgccacagaacctaccactaccactgcgccctgcacgacaaggcccagatcagagagaagcccagccagggcatctacatggtgtactgcagaaagcacaagaagaccgcccacaacagcgaggccgacctggaggagagcttcaacgagcacgagctggagcccagcagccccaagagcaagaagaagagcagaaagggcagacccagaaagaccaacttcaagggcctgagcgaggacaccagaagcaccagcagccacggcaccgacgagatggagagcagcagctacagagacagaagcccccacagaagcagccccagcgacaccagacccaagtgcggcttctgccacgtgggcgaggaggagaacgaggccagaggcaagctgcacatcttcaacgccaagaaggccgccgcccactacaagtgcatgctgttcagcagcggcaccgtgcagctgaccaccaccagcagagccgagttcggcgacttcgacatcaagaccgtgctgcaggagatcaagagaggcaagagaatgaagtgcaccctgtgcagccagcccggcgccaccatcggctgcgagatcaaggcctgcgtgaagacctaccactaccactgcggcgtgcaggacaaggccaagtacatcgagaacatgagcagaggcatctacaagctgtactgcaagaaccacagcggcaacgacgagagagacgaggaggacgaggagagagagagcaagagcagaggcaaggtggagatcgaccagcagcagctgacccagcagcagctgaacggcaactag

SEQ ID NO: 92929 - DNA, 3075 bp, synthetic construct
  misc_feature 1..3075: note = Description of Artificial Sequence: Synthetic coding sequence
  source 1..3075: mol_type = other DNA
atggccagcgtgcccgtgtactgcctgtgcagactgccctacgacgtgaccagattcatgatcgagtgcgacatgtgccaggactggttccacggcagctgcgtgggcgtggaggaggagaaggccgccgacatcgacctgtaccactgccccaactgcgaggtgctgcacggccccagcatcatgaagaagagaagaggcagcagcaagggccacgacacccacaagggcaagcccgtgaagaccggcagccccaccttcgtgagagagctgagaagcagaaccttcgacagcagcgacgaggtgatcctgaagcccaccggcaaccagctgaccgtggagttcctggaggagaacagcttcagcgtgcccatcctggtgctgaagaaggacggcctgggcatgaccctgcccagccccagcttcaccgtgagagacgtggagcactacgtgggcagcgacaaggagatcgacgtgatcgacgtgaccagacaggccgactgcaagatgaagctgggcgacttcgtgaagtactactacagcggcaagagagagaaggtgctgaacgtgatcagcctggagttcagcgacaccagactgagcaacctggtggagacccccaagatcgtgagaaagctgagctgggtggagaacctgtggcccgaggagtgcgtgttcgagagacccaacgtgcagaagtactgcctgatgagcgtgagagacagctacaccgacttccacatcgacttcggcggcaccagcgtgtggtaccacgtgctgaagggcgagaagatcttctacctgatcagacccaccaacgccaacctgaccctgttcgagtgctggagcagcagcagcaaccagaacgagatgttcttcggcgaccaggtggacaagtgctacaagtgcagcgtgaagcagggccagaccctgttcatccccaccggctggatccacgccgtgctgacccccgtggactgcctggccttcggcggcaacttcctgcacagcctgaacatcgagatgcagctgaaggcctacgagatcgagaagagactgagcaccgccgacctgttcagattccccaacttcgagaccatctgctggtacgtgggcaagcacatcctggacatcttcagaggcctgagagagaacagaagacaccccgccagctacctggtgcacggcggcaaggccctgaacctggccttcagagcctggaccagaaaggaggccctgcccgaccacgaggacgagatccccgagaccgtgagaaccgtgcagctgatcaaggacctggccagagagatcagactggtggaggacatcttccagcagaacgtgggcaagaccagcaacatcttcggcctgcagagaatcttccccgccggcagcatccccctgaccagacccgcccacagcaccagcgtgagcatgagcagactgagcctgcccagcaagaacggcagcaagaagaagggcctgaagcccaaggagctgttcaagaaggccgagagaaagggcaaggagagcagcgccctgggccccgccggccagctgagctacaacctgatggacacctacagccaccaggccctgaagaccggcagcttccagaaggccaagttcaacatcaccggcgcctgcctgaacgacagcgacgacgacagccccgacctggacctggacggcaacgagagccccctggccctgctgatgagcaacggcagcaccaagagagtgaagagcctgagcaagagcagaagaaccaagatcgccaagaaggtggacaaggccagactgatggccgagcaggtgatggaggacgagttcgacctggacagcgacgacgagctgcagatcgacgagagactgggcaaggagaaggccaccctgatcatcagacccaagttccccagaaagctgcccagagccaagccctgcagcgaccccaacagagtgagagagcccggcgaggtggagttcgacatcgaggaggactacaccaccgacgaggacatggtggagggcgtggagggcaagctgggcaacggcagcggcgccggcggcatcctggacctgctgaaggccagcagacaggtgggcggccccgactacgccgccctgaccgaggcccccgccagccccagcacccaggaggccatccagggcatgctgtgcatggccaacctgcagagcagcagcagcagccccgccaccagcagcctgcaggcctggtggaccggcggccaggacagaagcagcggcagcagcagcagcggcctgggcaccgtgagcaacagccccgccagccagagaacccccggcaagagacccatcaagagacccgcctactggagaaccgagagcgaggaggaggaggagaacgccagcctggacgagcaggacagcctgggcgcctgcttcaaggacgccgagtacatctaccccagcctggagagcgacgacgacgaccccgccctgaagagcagacccaagaagaagaagaacagcgacgacgccccctggagccccaaggccagagtgacccccaccctgcccaagcaggacagacccgtgagagagggcaccagagtggccagcatcgagaccggcctggccgccgccgccgccaagctggcccagcaggagctgcagaaggcccagaagaagaagtacatcaagaagaagcccctgctgaaggaggtggagcagcccagaccccaggacagcaacctgagcctgaccgtgcccgcccccaccgtggccgccaccccccagctggtgaccagcagcagccccctgcccccccccgagcccaagcaggaggccctgagcggcagcctggccgaccacgagtacaccgccagacccaacgccttcggcatggcccaggccaacagaagcaccacccccatggcccccggcgtgttcctgacccagagaagacccagcgtgggcagccagagcaaccaggccggccagggcaagagacccaagaagggcctggccaccgccaagcagagactgggcagaatcctgaagatccacagaaacggcaagctgctgctgtag

SEQ ID NO: 92930 - DNA, 2847 bp, synthetic construct
  misc_feature 1..2847: note = Description of Artificial Sequence: Synthetic coding sequence
  source 1..2847: mol_type = other DNA
atggccagcgtgcccgtgtactgcctgtgcagactgccctacgacgtgaccagattcatgatcgagtgcgacatgtgccaggactggttccacggcagctgcgtgggcgtggaggaggagaaggccgccgacatcgacctgtaccactgccccaactgcgaggtgctgcacggccccagcatcatgaagaagagaagaggcagcagcaagggccacgacacccacaagggcaagcccgtgaagaccggcagccccaccttcgtgagagagctgagaagcagaaccttcgacagcagcgacgaggtgatcctgaagcccaccggcaaccagctgaccgtggagttcctggaggagaacagcttcagcgtgcccatcctggtgctgaagaaggacggcctgggcatgaccctgcccagccccagcttcaccgtgagagacgtggagcactacgtgggcagcgacaaggagatcgacgtgatcgacgtgaccagacaggccgactgcaagatgaagctgggcgacttcgtgaagtactactacagcggcaagagagagaaggtgctgaacgtgatcagcctggagttcagcgacaccagactgagcaacctggtggagacccccaagatcgtgagaaagctgagctgggtggagaacctgtggcccgaggagtgcgtgttcgagagacccaacgtgcagaagtactgcctgatgagcgtgagagacagctacaccgacttccacatcgacttcggcggcaccagcgtgtggtaccacgtgctgaagggcgagaagatcttctacctgatcagacccaccaacgccaacctgaccctgttcgagtgctggagcagcagcagcaaccagaacgagatgttcttcggcgaccaggtggacaagtgctacaagtgcagcgtgaagcagggccagaccctgttcatccccaccggctggatccacgccgtgctgacccccgtggactgcctggccttcggcggcaacttcctgcacagcctgaacatcgagatgcagctgaaggcctacgagatcgagaagagactgagcaccgccgacctgttcagattccccaacttcgagaccatctgctggtacgtgggcaagcacatcctggacatcttcagaggcctgagagagaacagaagacaccccgccagctacctggtgcacggcggcaaggccctgaacctggccttcagagcctggaccagaaaggaggccctgcccgaccacgaggacgagatccccgagaccgtgagaaccgtgcagctgatcaaggacctggccagagagatcagactggtggagttcaacatcaccggcgcctgcctgaacgacagcgacgacgacagccccgacctggacctggacggcaacgagagccccctggccctgctgatgagcaacggcagcaccaagagagtgaagagcctgagcaagagcagaagaaccaagatcgccaagaaggtggacaaggccagactgatggccgagcaggtgatggaggacgagttcgacctggacagcgacgacgagctgcagatcgacgagagactgggcaaggagaaggccaccctgatcatcagacccaagttccccagaaagctgcccagagccaagccctgcagcgaccccaacagagtgagagagcccggcgaggtggagttcgacatcgaggaggactacaccaccgacgaggacatggtggagggcgtggagggcaagctgggcaacggcagcggcgccggcggcatcctggacctgctgaaggccagcagacaggtgggcggccccgactacgccgccctgaccgaggcccccgccagccccagcacccaggaggccatccagggcatgctgtgcatggccaacctgcagagcagcagcagcagccccgccaccagcagcctgcaggcctggtggaccggcggccaggacagaagcagcggcagcagcagcagcggcctgggcaccgtgagcaacagccccgccagccagagaacccccggcaagagacccatcaagagacccgcctactggagaaccgagagcgaggaggaggaggagaacgccagcctggacgagcaggacagcctgggcgcctgcttcaaggacgccgagtacatctaccccagcctggagagcgacgacgacgaccccgccctgaagagcagacccaagaagaagaagaacagcgacgacgccccctggagccccaaggccagagtgacccccaccctgcccaagcaggacagacccgtgagagagggcaccagagtggccagcatcgagaccggcctggccgccgccgccgccaagctggcccagcaggagctgcagaaggcccagaagaagaagtacatcaagaagaagcccctgctgaaggaggtggagcagcccagaccccaggacagcaacctgagcctgaccgtgcccgcccccaccgtggccgccaccccccagctggtgaccagcagcagccccctgcccccccccgagcccaagcaggaggccctgagcggcagcctggccgaccacgagtacaccgccagacccaacgccttcggcatggcccaggccaacagaagcaccacccccatggcccccggcgtgttcctgacccagagaagacccagcgtgggcagccagagcaaccaggccggccagggcaagagacccaagaagggcctggccaccgccaagcagagactgggcagaatcctgaagatccacagaaacggcaagctgctgctgagacaggtgatcgtgcaggccgagtgcagacaggccatccacgagcccaagctgaagagaagagacgcccacccctag

SEQ ID NO: 92931 - DNA, 3183 bp, synthetic construct
  misc_feature 1..3183: note = Description of Artificial Sequence: Synthetic coding sequence
  source 1..3183: mol_type = other DNA
atgaacagaagcagagccatcgtgcagagaggcagagtgctgcccccccccgcccccctggacaccaccaacctggccggcagaagaaccctgcagggcagagccaagatggccagcgtgcccgtgtactgcctgtgcagactgccctacgacgtgaccagattcatgatcgagtgcgacatgtgccaggactggttccacggcagctgcgtgggcgtggaggaggagaaggccgccgacatcgacctgtaccactgccccaactgcgaggtgctgcacggccccagcatcatgaagaagagaagaggcagcagcaagggccacgacacccacaagggcaagcccgtgaagaccggcagccccaccttcgtgagagagctgagaagcagaaccttcgacagcagcgacgaggtgatcctgaagcccaccggcaaccagctgaccgtggagttcctggaggagaacagcttcagcgtgcccatcctggtgctgaagaaggacggcctgggcatgaccctgcccagccccagcttcaccgtgagagacgtggagcactacgtgggcagcgacaaggagatcgacgtgatcgacgtgaccagacaggccgactgcaagatgaagctgggcgacttcgtgaagtactactacagcggcaagagagagaaggtgctgaacgtgatcagcctggagttcagcgacaccagactgagcaacctggtggagacccccaagatcgtgagaaagctgagctgggtggagaacctgtggcccgaggagtgcgtgttcgagagacccaacgtgcagaagtactgcctgatgagcgtgagagacagctacaccgacttccacatcgacttcggcggcaccagcgtgtggtaccacgtgctgaagggcgagaagatcttctacctgatcagacccaccaacgccaacctgaccctgttcgagtgctggagcagcagcagcaaccagaacgagatgttcttcggcgaccaggtggacaagtgctacaagtgcagcgtgaagcagggccagaccctgttcatccccaccggctggatccacgccgtgctgacccccgtggactgcctggccttcggcggcaacttcctgcacagcctgaacatcgagatgcagctgaaggcctacgagatcgagaagagactgagcaccgccgacctgttcagattccccaacttcgagaccatctgctggtacgtgggcaagcacatcctggacatcttcagaggcctgagagagaacagaagacaccccgccagctacctggtgcacggcggcaaggccctgaacctggccttcagagcctggaccagaaaggaggccctgcccgaccacgaggacgagatccccgagaccgtgagaaccgtgcagctgatcaaggacctggccagagagatcagactggtggaggacatcttccagcagaacgtgggcaagaccagcaacatcttcggcctgcagagaatcttccccgccggcagcatccccctgaccagacccgcccacagcaccagcgtgagcatgagcagactgagcctgcccagcaagaacggcagcaagaagaagggcctgaagcccaaggagctgttcaagaaggccgagagaaagggcaaggagagcagcgccctgggccccgccggccagctgagctacaacctgatggacacctacagccaccaggccctgaagaccggcagcttccagaaggccaagttcaacatcaccggcgcctgcctgaacgacagcgacgacgacagccccgacctggacctggacggcaacgagagccccctggccctgctgatgagcaacggcagcaccaagagagtgaagagcctgagcaagagcagaagaaccaagatcgccaagaaggtggacaaggccagactgatggccgagcaggtgatggaggacgagttcgacctggacagcgacgacgagctgcagatcgacgagagactgggcaaggagaaggccaccctgatcatcagacccaagttccccagaaagctgcccagagccaagccctgcagcgaccccaacagagtgagagagcccggcgaggtggagttcgacatcgaggaggactacaccaccgacgaggacatggtggagggcgtggagggcaagctgggcaacggcagcggcgccggcggcatcctggacctgctgaaggccagcagacaggtgggcggccccgactacgccgccctgaccgaggcccccgccagccccagcacccaggaggccatccagggcatgctgtgcatggccaacctgcagagcagcagcagcagccccgccaccagcagcctgcaggcctggtggaccggcggccaggacagaagcagcggcagcagcagcagcggcctgggcaccgtgagcaacagccccgccagccagagaacccccggcaagagacccatcaagagacccgcctactggagaaccgagagcgaggaggaggaggagaacgccagcctggacgagcaggacagcctgggcgcctgcttcaaggacgccgagtacatctaccccagcctggagagcgacgacgacgaccccgccctgaagagcagacccaagaagaagaagaacagcgacgacgccccctggagccccaaggccagagtgacccccaccctgcccaagcaggacagacccgtgagagagggcaccagagtggccagcatcgagaccggcctggccgccgccgccgccaagctggcccagcaggagctgcagaaggcccagaagaagaagtacatcaagaagaagcccctgctgaaggaggtggagcagcccagaccccaggacagcaacctgagcctgaccgtgcccgcccccaccgtggccgccaccccccagctggtgaccagcagcagccccctgcccccccccgagcccaagcaggaggccctgagcggcagcctggccgaccacgagtacaccgccagacccaacgccttcggcatggcccaggccaacagaagcaccacccccatggcccccggcgtgttcctgacccagagaagacccagcgtgggcagccagagcaaccaggccggccagggcaagagacccaagaagggcctggccaccgccaagcagagactgggcagaatcctgaagatccacagaaacggcaagctgctgctgtag

SEQ ID NO: 92932 - DNA, 912 bp, synthetic construct
  misc_feature 1..912: note = Description of Artificial Sequence: Synthetic coding sequence
  source 1..912: mol_type = other DNA
atggacacctacagccaccaggccctgaagaccggcagcttccagaaggccaagttcaacatcaccggcgcctgcctgaacgacagcgacgacgacagccccgacctggacctggacggcaacgagagccccctggccctgctgatgagcaacggcagcaccaagagagtgaagagcctgagcaagagcagaagaaccaagatcgccaagaaggtggacaaggccagactgatggccgagcaggtgatggaggacgagttcgacctggacagcgacgacgagctgcagatcgacgagagactgggcaaggagaaggccaccctgatcatcagacccaagttccccagaaagctgcccagagccagcctggccctgacccccaccgagttcgtgaaccaggagaagctgagcctgaccctgagaagaaccatccagcagatgagaacctggtggaagggcctgaaggccagcctgggcatggtggtggccctggtggccttcctgatctgcagcagacccgccggcagatggggcgacctgaccatgctgcccagccccagaccccagctgctgcccgccctgagaagacccagcagagcctgctgcgcctggcccacctgcagcccccacagaccccacagactgcccctggcctgcagacccggcggcctgggcgacagaatcgaggccgtgggcgcccccgccgtgggctgggcccagtgcctgaccgtgctgctgcccagcgccccccagggcagcggccccagcagcggccagcacaccggcgagcccagagccagaagaagaagaagaacccccgtgtggatgaacagaaccgcctgggagagagccagcagaatgcagagcatcagcatcctgcactggagcctgatgatgatgaccctgctgtag

SEQ ID NO: 92933 - DNA, 2862 bp, synthetic construct
  misc_feature 1..2862: note = Description of Artificial Sequence: Synthetic coding sequence
  source 1..2862: mol_type = other DNA
atcgtgcagagaggcagagtgctgcccccccccgcccccctggacaccaccaacctggccggcagaagaaccctgcagggcagagccaagatggccagcgtgcccgtgtactgcctgtgcagactgccctacgacgtgaccagattcatgatcgagtgcgacatgtgccaggactggttccacggcagctgcgtgggcgtggaggaggagaaggccgccgacatcgacctgtaccactgccccaactgcgaggtgctgcacggccccagcatcatgaagaagagaagaggcagcagcaagggccacgacacccacaagggcaagcccgtgaagaccggcagccccaccttcgtgagagagctgagaagcagaaccttcgacagcagcgacgaggtgatcctgaagcccaccggcaaccagctgaccgtggagttcctggaggagaacagcttcagcgtgcccatcctggtgctgaagaaggacggcctgggcatgaccctgcccagccccagcttcaccgtgagagacgtggagcactacgtgggcagcgacaaggagatcgacgtgatcgacgtgaccagacaggccgactgcaagatgaagctgggcgacttcgtgaagtactactacagcggcaagagagagaaggtgctgaacgtgatcagcctggagttcagcgacaccagactgagcaacctggtggagacccccaagatcgtgagaaagctgagctgggtggagaacctgtggcccgaggagtgcgtgttcgagagacccaacgtgcagaagtactgcctgatgagcgtgagagacagctacaccgacttccacatcgacttcggcggcaccagcgtgtggtaccacgtgctgaagggcgagaagatcttctacctgatcagacccaccaacgccaacctgaccctgttcgagtgctggagcagcagcagcaaccagaacgagatgttcttcggcgaccaggtggacaagtgctacaagtgcagcgtgaagcagggccagaccctgttcatccccaccggctggatccacgccgtgctgacccccgtggactgcctggccttcggcggcaacttcctgcacagcctgaacatcgagatgcagctgaaggcctacgagatcgagaagagactgagcaccgccgacctgttcagattccccaacttcgagaccatctgctggtacgtgggcaagcacatcctggacatcttcagaggcctgagagagaacagaagacaccccgccagctacctggtgcacggcggcaaggccctgaacctggccttcagagcctggaccagaaaggaggccctgcccgaccacgaggacgagatccccgagaccgtgagaaccgtgcagctgatcaaggacctggccagagagatcagactggtggagttcaacatcaccggcgcctgcctgaacgacagcgacgacgacagccccgacctggacctggacggcaacgagagccccctggccctgctgatgagcaacggcagcaccaagagagtgaagagcctgagcaagagcagaagaaccaagatcgccaagaaggtggacaaggccagactgatggccgagcaggtgatggaggacgagttcgacctggacagcgacgacgagctgcagatcgacgagagactgggcaaggagaaggccaccctgatcatcagacccaagttccccagaaagctgcccagagccaagccctgcagcgaccccaacagagtgagagagcccggcgaggtggagttcgacatcgaggaggactacaccaccgacgaggacatggtggagggcgtggagggcaagctgggcaacggcagcggcgccggcggcatcctggacctgctgaaggccagcagacaggtgggcggccccgactacgccgccctgaccgaggcccccgccagccccagcacccaggaggccatccagggcatgctgtgcatggccaacctgcagagcagcagcagcagccccgccaccagcagcctgcaggcctggtggaccggcggccaggacagaagcagcggcagcagcagcagcggcctgggcaccgtgagcaacagccccgccagccagagaacccccggcaagagacccatcaagagacccgcctactggagaaccgagagcgaggaggaggaggagaacgccagcctggacgagcaggacagcctgggcgcctgcttcaaggacgccgagtacatctaccccagcctggagagcgacgacgacgaccccgccctgaagagcagacccaagaagaagaagaacagcgacgacgccccctggagccccaaggccagagtgacccccaccctgcccaagcaggacagacccgtgagagagggcaccagagtggccagcatcgagaccggcctggccgccgccgccgccaagctggcccagcaggagctgcagaaggcccagaagaagaagtacatcaagaagaagcccctgctgaaggaggtggagcagcccagaccccaggacagcaacctgagcctgaccgtgcccgcccccaccgtggccgccaccccccagctggtgaccagcagcagccccctgcccccccccgagcccaagcaggaggccctgagcggcagcctggccgaccacgagtacaccgccagacccaacgccttcggcatggcccaggccaacagaagcaccacccccatggcccccggcgtgttcctgacccagagaagacccagcgtgggcagccagagcaaccaggccggccagggcaagagacccaagaagggcctggccaccgccaagcagagactgggcagaatcctgaagatccacagaaacggcaagctgctgctgtag

SEQ ID NO: 92934 - DNA, 345 bp, synthetic construct
  misc_feature 1..345: note = Description of Artificial Sequence: Synthetic coding sequence
  source 1..345: mol_type = other DNA
atggccagcgtgcccgtgtactgcctgtgcagactgccctacgacgtgaccagattcatgatcgagtgcgacatgtgccaggactggttccacggcagctgcgtgggcgtggaggaggagaaggccgccgacatcgacctgtaccactgccccaactgcgaggtgctgcacggccccagcatcatgaagaagagaagaggcagcagcaagggccacgacacccacaagggcaagcccgtgaagaccggcagccccaccttcgtgagagagctgagaagcagaaccttcgacagcagcgacgaggtgatcctgaagcccaccggcaaccagctgaccgtggagtag

SEQ ID NO: 92935 - DNA, 381 bp, synthetic construct
  misc_feature 1..381: note = Description of Artificial Sequence: Synthetic coding sequence
  source 1..381: mol_type = other DNA
atggccagcgtgcccgtgtactgcctgtgcagactgccctacgacgtgaccagattcatgatcgagtgcgacatgtgccaggactggttccacggcagctgcgtgggcgtggaggaggagaaggccgccgacatcgacctgtaccactgccccaactgcgaggtgctgcacggccccagcatcatgaagaagagaagaggcagcagcaagggccacgacacccacaagggcaagcccgtgaagaccggcagccccaccttcgtgagagagctgagaagcagaaccttcgacagcagcgacgaggtgatcctgaagcccaccggcaaccagctgaccgtggagttcctggaggagaacagcttcagcgtgcccatcctgtag

SEQ ID NO: 92936 - DNA, 294 bp, synthetic construct
  misc_feature 1..294: note = Description of Artificial Sequence: Synthetic coding sequence
  source 1..294: mol_type = other DNA
atggccagcgtgcccgtgtactgcctgtgcagactgccctacgacgtgaccagattcatgatcgagtgcgacatgtgccaggactggttccacggcagctgcgtgggcgtggaggaggagaaggccgccgacatcgacctgtaccactgccccaactgcgaggtgctgcacggccccagcatcatgaagaagagaagaggcagcagcaagggccacgacacccacaagggcaagcccgtgaagaccggcagccccaccttcgtgagagagctgagaagcagaaccttcgactag

SEQ ID NO: 92937 - DNA, 348 bp, synthetic construct
  misc_feature 1..348: note = Description of Artificial Sequence: Synthetic coding sequence
  source 1..348: mol_type = other DNA
atggccagcgtgcccgtgtactgcctgtgcagactgccctacgacgtgaccagattcatgatcgagtgcgacatgtgccaggactggttccacggcagctgcgtgggcgtggaggaggagaaggccgccgacatcgacctgtaccactgccccaactgcgaggtgctgcacggccccagcatcatgaagaagagaagaggcagcagcaagggccacgacacccacaagggcaagcccgtgaagaccggcagccccaccttcgtgagagagctgagaagcagaaccttcgacagcagcgacgaggtgatcctgaagcccaccggcaaccagctgaccgtggagttctag

SEQ ID NO: 92938 - DNA, 294 bp, synthetic construct; identical to SEQ ID NO: 92936
  misc_feature 1..294: note = Description of Artificial Sequence: Synthetic coding sequence
  source 1..294: mol_type = other DNA

SEQ ID NO: 92939 - DNA, 447 bp, synthetic construct
  misc_feature 1..447: note = Description of Artificial Sequence: Synthetic coding sequence
  source 1..447: mol_type = other DNA
atgaacagaagcagagccatcgtgcagagaggcagagtgctgcccccccccgcccccctggacaccaccaacctggccggcagaagaaccctgcagggcagagccaagatggccagcgtgcccgtgtactgcctgtgcagactgccctacgacgtgaccagattcatgatcgagtgcgacatgtgccaggactggttccacggcagctgcgtgggcgtggaggaggagaaggccgccgacatcgacctgtaccactgccccaactgcgaggtgctgcacggccccagcatcatgaagaagagaagaggcagcagcaagggccacgacacccacaagggcaagcccgtgaagaccggcagccccaccttcgtgagagagctgagaagcagaaccttcgacagcagcgacgaggtgatcctgaagcccaccggcaaccagctgacctag

SEQ ID NO: 92940 - DNA, 2637 bp, synthetic construct
  misc_feature 1..2637: note = Description of Artificial Sequence: Synthetic coding sequence
  source 1..2637: mol_type = other DNA
atggccagcgtgcccgtgtactgcctgtgcagactgccctacgacgtgaccagattcatgatcgagtgcgacatgtgccaggactggttccacggcagctgcgtgggcgtggaggaggagaaggccgccgacatcgacctgtaccactgccccaactgcgaggtgctgcacggccccagcatcatgaagaagagaagaggcagcagcaagggccacgacacccacaagggcaagcccgtgaagaccggcagccccaccttcgtgagagagctgagaagcagaaccttcgacagcagcgacgaggtgatcctgaagcccaccggcaaccagctgaccgtggagttcctggaggagaacagcttcagcgtgcccatcctggtgctgaagaaggacggcctgggcatgaccctgcccagccccagcttcaccgtgagagacgtggagcactacgtgggcagcgacaaggagatcgacgtgatcgacgtgaccagacaggccgactgcaagatgaagctgggcgacttcgtgaagtactactacagcggcaagagagagaaggtgctgaacgtgatcagcctggagttcagcgacaccagactgagcaacctggtggagacccccaagatcgtgagaaagctgagctgggtggagaacctgtggcccgaggagtgcgtgttcgagagacccaacgtgcagaagtactgcctgatgagcgtgagagacagctacaccgacttccacatcgacttcggcggcaccagcgtgtggtaccacgtgctgaagggcgagaagatcttctacctgatcagacccaccaacgccaacctgaccctgttcgagtgctggagcagcagcagcaaccagaacgagatgttcttcggcgaccaggtggacaagtgctacaagtgcagcgtgaagcagggccagaccctgttcatccccaccggctggatccacgccgtgctgacccccgtggactgcctggccttcggcggcaacttcctgcacagcctgaacatcgagatgcagctgaaggcctacgagatcgagaagagactgagcaccgccgacctgttcagattccccaacttcgagaccatctgctggtacgtgggcaagcacatcctggacatcttcagaggcctgagagagaacagaagacaccccgccagctacctggtgcacggcggcaaggccctgaacctggccttcagagcctggaccagaaaggaggccctgcccgaccacgaggacgagatccccgagaccgtgagaaccgtgcagctgatcaaggacctggccagagagatcagactggtggaggacatcttccagcagaacgtgggcaagaccagcaacatcttcggcctgcagagaatcttccccgccggcagcatccccctgaccagacccgcccacagcaccagcgtgagcatgagcagactgagcctgcccagcaagaacggcagcaagaagaagggcctgaagcccaaggagctgttcaagaaggccgagagaaagggcaaggagagcagcgccctgggccccgccggccagctgagctacaacctgatggacacctacagccaccaggccctgaagaccggcagcttccagaaggccaagttcaacatcaccggcgcctgcctgaacgacagcgacgacgacagccccgacctggacctggacggcaacgagagccccctggccctgctgatgagcaacggcagcaccaagagagtgaagagcctgagcaagagcagaagaaccaagatcgccaagaaggtggacaaggccagactgatggccgagcaggtgatggaggacgagttcgacctggacagcgacgacgagctgcagatcgacgagagactgggcaaggagaaggccaccctgatcatcagacccaagttccccagaaagctgcccagagccaagccctgcagcgaccccaacagagtgagagagcccggcgaggtggagttcgacatcgaggaggactacaccaccgacgaggacatggtggagggcgtggagggctaccagaccgccacccccgcccccgcccagggcgccagcgaggcccccgccagccccagcacccaggaggccatccagggcatgctgtgcatggccaacctgcagagcagcagcagcagccccgccaccagcagcctgcaggcctggtggaccggcggccaggacagaagcagcggcagcagcagcagcggcctgggcaccgtgagcaacagccccgccagccagagaacccccggcaagagacccatcaagagacccgcctactggagaaccgagagcgaggaggaggaggagaacgccagcctggacgagcaggacagcctgggcgcctgcttcaaggacgccgagtacatctaccccagcctggagagcgacgacgacgaccccgccctgaagagcagacccaagaagaagaagaacagcgacgacgccccctggagccccaaggccagagtgacccccaccctgcccaagcaggacagacccgtgagagagggcaccagagtggccagcatcgagaccggcctggccgccgccgccgccaagctggcccagcaggtgaagaagatgaagctgagcctgaccgacagcggctag

SEQ ID NO: 92941 - DNA, 417 bp, synthetic construct
  misc_feature 1..417: note = Description of Artificial Sequence: Synthetic coding sequence
  source 1..417: mol_type = other DNA
atgaagctgcccatcttcatcgccgacgccttcaccgccagagccttcagaggcaaccccgccgccgtgtgcctgctggagaacgagctggacgaggacatgcaccagaagatcgccagagagatgaacctgagcgagaccgccttcatcagaaagctgcaccccaccgacaacttcgcccagaagaacatgaacagcaccctgaccttcgtgaccctgagcggcgagctgagagccagaagagccgaggacggcatcgtgctggacctgcccctgtaccccgcccacccccaggacttccacgaggtggaggacctgatcaagaccgccatcggcaacaccctggtgcaggacatctgctacagccccgacacccagaagctgctggtgagactgagcgacgtgtacaacagatag

SEQ ID NO: 92942 - DNA, 867 bp, synthetic construct
  misc_feature 1..867: note = Description of Artificial Sequence: Synthetic coding sequence
  source 1..867: mol_type = other DNA
atgaagctgcccatcttcatcgccgacgccttcaccgccagagccttcagaggcaaccccgccgccgtgtgcctgctggagaacgagctggacgaggacatgcaccagaagatcgccagagagatgaacctgagcgagaccgccttcatcagaaagctgcaccccaccgacaacttcgcccagagcagctgcttcggcctgagatggttcacccccgccagcgaggtgcccctgtgcggccacgccaccctggccagcgccgccgtgctgttccacaagatcaagaacatgaacagcaccctgaccttcgtgaccctgagcggcgagctgagagccagaagagccgaggacggcatcgtgctggacctgcccctgtaccccgcccacccccaggacttccacgaggtggaggacctgatcaagaccgccatcggcaacaccctggtgcaggacatctgctacagccccgacacccagaagctgctggtgagactgagcgacgtgtacaacagaagcttcctggagaacctgaaggtgaacaccgagaacctgctgcaggtggagaacaccggcaaggtgaagggcctgatcctgaccctgaagggcgagcccggcggccagacccaggccttcgacttctacagcagatacttcgccccctgggtgggcgtggccgaggaccccgtgaccggcagcgcccacgccgtgctgagcagctactggagccagcacctgggcaagaaggagatgcacgccttccagtgcagccacagaggcggcgagctgggcatcagcctgagacccgacggcagagtggacatcagaggcggcgccgccgtggtgctggagggcaccctgaccgcctag

SEQ ID NO: 92943 - DNA, 768 bp, synthetic construct
  misc_feature 1..768: note = Description of Artificial Sequence: Synthetic coding sequence
  source 1..768: mol_type = other DNA
atgcaccagaagatcgccagagagatgaacctgagcgagaccgccttcatcagaaagctgcaccccaccgacaacttcgcccagagcagctgcttcggcctgagatggttcacccccgccagcgaggtgcccctgtgcggccacgccaccctggccagcgccgccgtgctgttccacaagatcaagaacatgaacagcaccctgaccttcgtgaccctgagcggcgagctgagagccagaagagccgaggacggcatcgtgctggacctgcccctgtaccccgcccacccccaggacttccacgaggtggaggacctgatcaagaccgccatcggcaacaccctggtgcaggacatctgctacagccccgacacccagaagctgctggtgagactgagcgacgtgtacaacagaagcttcctggagaacctgaaggtgaacaccgagaacctgctgcaggtggagaacaccggcaaggtgaagggcctgatcctgaccctgaagggcgagcccggcggccagacccaggccttcgacttctacagcagatacttcgccccctgggtgggcgtggccgaggaccccgtgaccggcagcgcccacgccgtgctgagcagctactggagccagcacctgggcaagaaggagatgcacgccttccagtgcagccacagaggcggcgagctgggcatcagcctgagacccgacggcagagtggacatcagaggcggcgccgccgtggtgctggagggcaccctgaccgcctag

SEQ ID NO: 92944 - DNA, 867 bp, synthetic construct; identical to SEQ ID NO: 92942
  misc_feature 1..867: note = Description of Artificial Sequence: Synthetic coding sequence
  source 1..867: mol_type = other DNA

SEQ ID NO: 92945 - DNA, 843 bp, synthetic construct
  misc_feature 1..843: note = Description of Artificial Sequence: Synthetic coding sequence
  source 1..843: mol_type = other DNA
atgaagctgcccatcttcatcgccgacgccttcaccgccagagccttcagaggcaaccccgccgccgtgtgcctgctggagaacgagctggacgaggacatgcaccagaagatcgccagagagatgaacctgagcgagaccgccttcatcagaaagctgcaccccaccgacaacttcgcccagagcagctgcttcggcctgagatggttcacccccgccagcgaggtgcccctgtgcggccacgccaccctggccagcgccgccgtgctgttccacaagatcaagaacatgaacagcaccctgaccttcgtgaccctgagcggcgagctgagagccagaagagccgaggacggcatcgtgctggacctgcccctgtaccccgcccacccccaggacttccacgaggtggaggacctgatcaagaccgccatcggcaacaccctggtgcaggacatctgctacagccccgacacccagaagctgctggtgagactgagcgacgtgtacaacagaagcttcctggagaacctgaaggtgaacaccgagaacctgctgcaggtggagaacaccggcaaggtgaagggcctgatcctgaccctgaagggcgagcccggcggccagacccaggccttcgacttctacagcagatacttcgccccctgggtgggcgtggccgaggaccccgtgaccggcagcgcccacgccgtgctgagcagctactggagccagcacctgggcaagaaggagatgcacggcagaaccgccctgtaccagttcctgttctacctgcccaacagcaagctggtgttcctgctgatctgcaccatccccctgaagatgtag

SEQ ID NO: 92946 - DNA, 1356 bp, synthetic construct
  misc_feature 1..1356: note = Description of Artificial Sequence: Synthetic coding sequence
  source 1..1356: mol_type = other DNA
atggtgggcagcgccctgagaagaggcgcccacgcctacgtgtacctggtgagcaaggccagccacatcagcagaggccaccagcaccaggcctggggcagcagaccccccgccgccgagtgcgccacccagagagcccccggcagcgtggtggagctgctgggcaagagctacccccaggacgaccacagcaacctgaccagaaaggtgctgaccagagtgggcagaaacctgcacaaccagcagcaccaccccctgtggctgatcaaggagagagtgaaggagcacttctacaagcagtacgtgggcagattcggcacccccctgttcagcgtgtacgacaacctgagccccgtggtgaccacctggcagaacttcgacagcctgctgatccccgccgaccaccccagcagaaagaagggcgacaactactacctgaacagaacccacatgctgagagcccacaccagcgcccaccagtgggacctgctgcacgccggcctggacgccttcctggtggtgggcgacgtgtacagaagagaccagatcgacagccagcactaccccatcttccaccagctggaggccgtgagactgttcagcaagcacgagctgttcgccggcatcaaggacggcgagagcctgcagctgttcgagcagagcagcagaagcgcccacaagcaggagacccacaccatggaggccgtgaagctggtggagttcgacctgaagcagaccctgaccagactgatggcccacctgttcggcgacgagctggagatcagatgggtggactgctacttccccttcacccaccccagcttcgagatggagatcaacttccacggcgagtggctggaggtgctgggctgcggcgtgatggagcagcagctggtgaacagcgccggcgcccaggacagaatcggctgggccttcggcctgggcctggagagactggccatgatcctgtacgacatccccgacatcagactgttctggtgcgaggacgagagattcctgaagcagttctgcgtgagcaacatcaaccagaaggtgaagttccagcccctgagcaagtaccccgccgtgatcaacgacatcagcttctggctgcccagcgagaactacgccgagaacgacttctacgacctggtgagaaccatcggcggcgacctggtggagaaggtggacctgatcgacaagttcgtgcaccccaagacccacaagaccagccactgctacagaatcacctacagacacatggagagaaccctgagccagagagaggtgagacacatccaccaggccctgcaggaggccgccgtgcagctgctgggcgtggagggcagattctag

SEQ ID NO: 92947 - DNA, 1356 bp, synthetic construct; identical to SEQ ID NO: 92946
  misc_feature 1..1356: note = Description of Artificial Sequence: Synthetic coding sequence
  source 1..1356: mol_type = other DNA

SEQ ID NO: 92948 - DNA, 468 bp, synthetic construct
  misc_feature 1..468: note = Description of Artificial Sequence: Synthetic coding sequence
  source 1..468: mol_type = other DNA
atgctgagagcccacaccagcgcccaccagtgggacctgctgcacgccggcctggacgccttcctggtggtgggcgacgtgtacagaagagaccagatcgacagccagcactaccccatcttccaccagctggaggccgtgagactgttcagcaagcacgagctgttcgccggcatcaaggacggcgagagcctgcagctgttcgagcagagcagcagaagcgcccacaagcaggagacccacaccatggaggccgtgaagctggtggagttcgacctgaagcagaccctgaccagactgatggcccacctgttcggcgacgagctggagatcagatgggtggactgctacttccccttcacccaccccagcttcgagatggagatcaacttccacggcgagtggctggaggtgctgggctgcggcgtgatggagcagcagctggtgaacagcggcggcgccacctag

SEQ ID NO: 92949 - DNA, 306 bp, synthetic construct
  misc_feature 1..306: note = Description of Artificial Sequence: Synthetic coding sequence
  source 1..306: mol_type = other DNA
ctgttcgccggcatcaaggacggcgagagcctgcagctgttcgagcagagcagcagaagcgcccacaagcaggagacccacaccatggaggccgtgaagctggtggagttcgacctgaagcagaccctgaccagactgatggcccacctgttcggcgacgagctggagatcagatgggtggactgctacttccccttcacccaccccagcttcgagatggagatcaacttccacggcgagtggctggaggtgctgggctgcggcgtgatggagcagcagctggtgaacagcggcggcgccacctag

SEQ ID NO: 92950 - DNA, 849 bp, synthetic construct
  misc_feature 1..849: note = Description of Artificial Sequence: Synthetic coding sequence
  source 1..849: mol_type = other DNA
atgagcggcgccgacagaagccccaacgccggcgccgcccccgacagcgcccccggccaggccgccgtggccagcgcctaccagagattcgagcccagagcctacctgagaaacaactacgccccccccagaggcgacctgtgcaaccccaacggcgtgggcccctggaagctgagatgcctggcccagaccttcgccaccggcgaggtgagcggcagaaccctgatcgacatcggcagcggccccaccgtgtaccagctgctgagcgcctgcagccacttcgaggacatcaccatgaccgacttcctggaggtgaacagacaggagctgggcagatggctgcaggaggagcccggcgccttcaactggagcatgtacagccagcacgcctgcctgatcgagggcaagggcgagtgctggcaggacaaggagagacagctgagagccagagtgaagagagtgctgcccatcgacgtgcaccagccccagcccctgggcgccggcagccccgcccccctgcccgccgacgccctggtgagcgccttctgcctggaggccgtgagccccgacctggccagcttccagagagccctggaccacatcaccaccctgctgagacccggcggccacctgctgctgatcggcgccctggaggagagctggtacctggccggcgaggccagactgaccgtggtgcccgtgagcgaggaggaggtgagagaggccctggtgagaagcggctacaaggtgagagacctgagaacctacatcatgcccgcccacctgcagaccggcgtggacgacgtgaagggcgtgttcttcgcctgggcccagaaggtgggcctgtag

SEQ ID NO: 92951 - DNA, 555 bp, synthetic construct
  misc_feature 1..555: note = Description of Artificial Sequence: Synthetic coding sequence
  source 1..555: mol_type = other DNA
atgaccgacttcctggaggtgaacagacaggagctgggcagatggctgcaggaggagcccggcgccttcaactggagcatgtacagccagcacgcctgcctgatcgagggcaagggcgagtgctggcaggacaaggagagacagctgagagccagagtgaagagagtgctgcccatcgacgtgcaccagccccagcccctgggcgccggcagccccgcccccctgcccgccgacgccctggtgagcgccttctgcctggaggccgtgagccccgacctggccagcttccagagagccctggaccacatcaccaccctgctgagacccggcggccacctgctgctgatcggcgccctggaggagagctggtacctggccggcgaggccagactgaccgtggtgcccgtgagcgaggaggaggtgagagaggccctggtgagaagcggctacaaggtgagagacctgagaacctacatcatgcccgcccacctgcagaccggcgtggacgacgtgaagggcgtgttcttcgcctgggcccagaaggtgggcctgtag

SEQ ID NO: 92952 - DNA, 741 bp, synthetic construct
  misc_feature 1..741: note = Description of Artificial Sequence: Synthetic coding sequence
  source 1..741: mol_type = other DNA
atggaggaggccaagagccagagcctggaggaggacttcgagggccaggccacccacaccggccccaagggcgtgatcaacgactggagaaagttcaagctggagagccaggacagcgacagcatcccccccagcaagaaggagatcctgagacagatgagcagcccccagagcagaaacggcaaggacagcaaggagagagtgagcagaaagatgagcatccaggagtacgagctgatccacaaggagaaggaggacgagaactgcctgagaaagtacagaagacagtgcatgcaggacatgcaccagaagctgagcttcggccccagatacggcttcgtgtacgagctggagaccggcaagcagttcctggagaccatcgagaaggagctgaagatcaccaccatcgtggtgcacatctacgaggacggcatcaagggctgcgacgccctgaacagcagcctgacctgcctggccgccgagtaccccatcgtgaagttctgcaagatcaaggccagcaacaccggcgccggcgacagattcagcctggacgtgctgcccaccctgctgatctacaagggcggcgagctgatcagcaacttcatcagcgtggccgagcagttcgccgaggagttcttcgccggcgacgtggagagcttcctgaacgagtacggcctgctgcccgagagagaggtgcacgtgctggagcacaccaagatcgaggaggaggacgtggagtag

SEQ ID NO: 92953 - DNA, 741 bp, synthetic construct; identical to SEQ ID NO: 92952
  misc_feature 1..741: note = Description of Artificial Sequence: Synthetic coding sequence
  source 1..741: mol_type = other DNA

SEQ ID NO: 92954 - DNA, 585 bp, synthetic construct
  misc_feature 1..585: note = Description of Artificial Sequence: Synthetic coding sequence
  source 1..585: mol_type = other DNA
atgagcagcccccagagcagaaacggcaaggacagcaaggagagagtgagcagaaagatgagcatccaggagtacgagctgatccacaaggagaaggaggacgagaactgcctgagaaagtacagaagacagtgcatgcaggacatgcaccagaagctgagcttcggccccagatacggcttcgtgtacgagctggagaccggcaagcagttcctggagaccatcgagaaggagctgaagatcaccaccatcgtggtgcacatctacgaggacggcatcaagggctgcgacgccctgaacagcagcctgacctgcctggccgccgagtaccccatcgtgaagttctgcaagatcaaggccagcaacaccggcgccggcgacagattcagcctggacgtgctgcccaccctgctgatctacaagggcggcgagctgatcagcaacttcatcagcgtggccgagcagttcgccgaggagttcttcgccggcgacgtggagagcttcctgaacgagtacggcctgctgcccgagagagaggtgcacgtgctggagcacaccaagatcgaggaggaggacgtggagtag

SEQ ID NO: 92955 - DNA, 585 bp, synthetic construct; identical to SEQ ID NO: 92954
  misc_feature 1..585: note = Description of Artificial Sequence: Synthetic coding sequence
  source 1..585: mol_type = other DNA

SEQ ID NO: 92956 - DNA, 906 bp, synthetic construct
  misc_feature 1..906: note = Description of Artificial Sequence: Synthetic coding sequence
  source 1..906: mol_type = other DNA
atgaccaccctggacgacaagctgctgggcgagaagctgcagtactactacagcagcagcgaggacgaggacagcgaccacgaggacaaggacagaggcagatgcgcccccgccagcagcagcgtgcccgccgaggccgagctggccggcgagggcatcagcgtgaacaccggccccaagggcgtgatcaacgactggagaagattcaagcagctggagaccgagcagagagaggagcagtgcagagagatggagagactgatcaagaagctgagcatgacctgcagaagccacctggacgaggaggaggagcagcagaagcagaaggacctgcaggagaagatcagcggcaagatgaccctgaaggagttcgccatcatgaacgaggaccaggacgacgaggagttcctgcagcagtacagaaagcagagaatggaggagatgagacagcagctgcacaagggcccccagttcaagcaggtgttcgagatcagcagcggcgagggcttcctggacatgatcgacaaggagcagaagagcatcgtgatcatggtgcacatctacgaggacggcatccccggcaccgaggccatgaacggctgcatgatctgcctggccgccgagtaccccgccgtgaagttctgcaaggtgaagagcagcgtgatcggcgccagcagccagttcaccagaaacgccctgcccgccctgctgatctacaagggcggcgagctgatcggcaacttcgtgagagtgaccgaccagctgggcgacgacttcttcgccgtggacctggaggccttcctgcaggagttcggcctgctgcccgagaaggaggtgctggtgctgaccagcgtgagaaacagcgccacctgccacagcgaggacagcgacctggagatcgactag

SEQ ID NO: 92957 - DNA, 330 bp, synthetic construct
  misc_feature 1..330: note = Description of Artificial Sequence: Synthetic coding sequence
  source 1..330: mol_type = other DNA
tgactgcagtactactacagcagcagcgaggacgaggacagcgaccacgaggacaaggacagaggcagatgcgcccccgccagcagcagcgtgcccgccgaggccgagctggccggcgagggcatcagcgtgaacaccggccccaagggcgtgatcaacgactggagaagattcaagcagctggagaccgagcagagagaggagcagtgcagagagatggagagactgatcaagaagctgagcatgacctgcagaagccacctggacgaggaggaggagcagcagaagcagaaggacctgcaggagaagatcagcggcaaggagagatag

SEQ ID NO: 92958 - DNA, 276 bp, synthetic construct
  misc_feature 1..276: note = Description of Artificial Sequence: Synthetic coding sequence
  source 1..276: mol_type = other DNA
tgatgcgcccccgccagcagcagcgtgcccgccgaggccgagctggccggcgagggcatcagcgtgaacaccggccccaagggcgtgatcaacgactggagaagattcaagcagctggagaccgagcagagagaggagcagtgcagagagatggagagactgatcaagaagctgagcatgacctgcagaagccacctggacgaggaggaggagcagcagaagcagaaggacctgcaggagaagatcagcggcaagaagagctgggccatcctgtag

SEQ ID NO: 92959 - DNA, 726 bp, synthetic construct
  misc_feature 1..726: note = Description of Artificial Sequence: Synthetic coding sequence
  source 1..726: mol_type = other DNA
atgcaggaccccaacgaggacaccgagtggaacgacatcctgagagacttcggcatcctgccccccaaggaggagagcaaggacgagatcgaggagatggtgctgagactgcagaaggaggccatggtgaagcccttcgagaagatgaccctggcccagctgaaggaggccgaggacgagttcgacgaggaggacatgcaggccgtggagacctacagaaagaagagactgcaggagtggaaggccctgaagaagaagcagaagttcggcgagctgagagagatcagcggcaaccagtacgtgaacgaggtgaccaacgccgaggaggacgtgtgggtgatcatccacctgtacagaagcagcatccccatgtgcctgctggtgaaccagcacctgagcctgctggccagaaagttccccgagaccaagttcgtgaaggccatcgtgaacagctgcatccagcactaccacgacaactgcctgcccaccatcttcgtgtacaagaacggccagatcgaggccaagttcatcggcatcatcgagtgcggcggcatcaacctgaagctggaggagctggagtggaagctggccgaggtgggcgccatccagaccgacctggaggagaaccccagaaaggacatggtggacatgatggtgagcagcatcagaaacaccagcatccacgacgacagcgacagcagcaacagcgacaacgacaccaagtag

SEQ ID NO: 92960 - DNA, 720 bp, synthetic construct
  misc_feature 1..720: note = Description of Artificial Sequence: Synthetic coding sequence
  source 1..720: mol_type = other DNA
atgcaggaccccaacgccgacaccgagtggaacgacatcctgagaaagaagggcatcctgccccccaaggagagcctgaaggagctggaggaggaggccgaggaggagcagagaatcctgcagcagagcgtggtgaagacctacgaggacatgaccctggaggagctggaggaccacgaggacgagttcaacgaggaggacgagagagccatcgagatgtacagaagaagaagactggccgagtggaaggccaccaagctgaagaacaagttcggcgaggtgctggagatcagcggcaaggactacgtgcaggaggtgaccaaggccggcgagggcctgtgggtgatcctgcacctgtacaagcagggcatccccctgtgcgccctgatcaaccagcacctgagcggcctggccagaaagttccccgacgtgaagttcatcaaggccatcagcaccacctgcatccccaactaccccgacagaaacctgcccaccatcttcgtgtacctggagggcgacatcaaggcccagttcatcggccccctggtgttcggcggcatgaacctgaccagagacgagctggagtggaagctgagcgagagcggcgccatcatgaccgacctggaggagaaccccaagaagcccatcgaggacgtgctgctgagcagcgtgagaagaagcgtgctgatgaagagagacagcgacagcgagggcgactag

SEQ ID NO: 92961 - DNA, 1104 bp, synthetic construct
  misc_feature 1..1104: note = Description of Artificial Sequence: Synthetic coding sequence
  source 1..1104: mol_type = other DNA
atggacgcccagtgcagcgccaaggtgaacgccagaaagagaagaaaggaggcccccggccccaacggcgccaccgaggaggacggcgtgcccagcaaggtgcagagatgcgccgtgggcctgagacagcccgcccccttcagcgacgagatcgaggtggacttcagcaagccctacgtgagagtgaccatggaggaggccagcagaggcaccccctgcgagagacccgtgagagtgtacgccgacggcatcttcgacctgttccacagcggccacgccagagccctgatgcaggccaagaacctgttccccaacacctacctgatcgtgggcgtgtgcagcgacgagctgacccacaacttcaagggcttcaccgtgatgaacgagaacgagagatacgacgccgtgcagcactgcagatacgtggacgaggtggtgagaaacgccccctggaccctgacccccgagttcctggccgagcacagaatcgacttcgtggcccacgacgacatcccctacagcagcgccggcagcgacgacgtgtacaagcacatcaaggaggccggcatgttcgcccccacccagagaaccgagggcatcagcaccagcgacatcatcaccagaatcgtgagagactacgacgtgtacgccagaagaaacctgcagagaggctacaccgccaaggagctgaacgtgagcttcatcaacgagaagaagtaccacctgcaggagagagtggacaaggtgaagaagaaggtgaaggacgtggaggagaagagcaaggagttcgtgcagaaggtggaggagaagagcatcgacctgatccagaagtgggaggagaagagcagagagttcatcggcagcttcctggagatgttcggccccgagggcgccctgaagcacatgctgaaggagggcaagggcagaatgctgcaggccatcagccccaagcagagccccagcagcagccccaccagagagagaagccccagccccagcttcagatggcccttcagcggcaagaccagccccccctgcagccccgccaacctgagcagacacaaggccgccgcctacgacatcagcgaggacgaggaggactag

SEQ ID NO: 92962 - DNA, 882 bp, synthetic construct
  misc_feature 1..882: note = Description of Artificial Sequence: Synthetic coding sequence
  source 1..882: mol_type = other DNA
atggacgcccagtgcagcgccaaggtgaacgccagaaagagaagaaaggaggcccccggccccaacggcgccaccgaggaggacggcgtgcccagcaaggtgcagagatgcgccgtgggcctgagacagcccgcccccttcagcgacgagatcgaggtggacttcagcaagccctacgtgagagtgaccatggaggaggccagcagaggcaccccctgcgagagacccgtgagagtgtacgccgacggcatcttcgacctgttccacagcggccacgccagagccctgatgcaggccaagaacctgttccccaacacctacctgatcgtgggcgtgtgcagcgacgagctgacccacaacttcaagggcttcaccgtgatgaacgagaacgagagatacgacgccgtgcagcactgcagatacgtggacgaggtggtgagaaacgccccctggaccctgacccccgagttcctggccgagcacagaatcgacttcgtggcccacgacgacatcccctacagcagcgccggcagcgacgacgtgtacaagcacatcaaggaggccggcatgttcgcccccacccagagaaccgagggcatcagcaccagcgacatcatcaccagaatcgtgagagactacgacgtgtacgccagaagaaacctgcagagaggctacaccgccaaggagctgaacgtgagcttcatcaacgagaagaagtaccacctgcaggagagagtggacaaggtgaagaagaaggtgaaggacgtggaggagaagagcaaggagttcgtgcagaaggtggaggagaagagcatcgacctgatccagaagtgggaggagaagagcagagagttcatcggcagcttcctggagatgttctag

SEQ ID NO: 92963 - DNA, 402 bp, synthetic construct
  misc_feature 1..402: note = Description of Artificial Sequence: Synthetic coding sequence
  source 1..402: mol_type = other DNA
atggacgcccagtgcagcgccaaggtgaacgccagaaagagaagaaaggaggcccccggccccaacggcgccaccgaggaggacggcgtgcccagcaaggtgcagagatgcgccgtgggcctgagacagcccgcccccttcagcgacgagatcgaggtggacttcagcaagccctacgtgagagtgaccatggaggaggccagcagaggcaccccctgcgagagacccgtgagagtgtacgccgacggcatcttcgacctgttccacagcggccacgccagagccctgatgcaggccaagaacctgttccccaacacctacctgatcgtgggcgtgtgcagcgacgagctgacccacaacttcaagggcttcaccgtgatgaacgagaacgagagatactag

SEQ ID NO: 92964 - DNA, 987 bp, synthetic construct
  misc_feature 1..987: note = Description of Artificial Sequence: Synthetic coding sequence
  source 1..987: mol_type = other DNA
atggacgcccagtgcagcgccaaggtgaacgccagaaagagaagaaaggaggcccccggccccaacggcgccaccgaggaggccagcagaggcaccccctgcgagagacccgtgagagtgtacgccgacggcatcttcgacctgttccacagcggccacgccagagccctgatgcaggccaagaacctgttccccaacacctacctgatcgtgggcgtgtgcagcgacgagctgacccacaacttcaagggcttcaccgtgatgaacgagaacgagagatacgacgccgtgcagcactgcagatacgtggacgaggtggtgagaaacgccccctggaccctgacccccgagttcctggccgagcacagaatcgacttcgtggcccacgacgacatcccctacagcagcgccggcagcgacgacgtgtacaagcacatcaaggaggccggcatgttcgcccccacccagagaaccgagggcatcagcaccagcgacatcatcaccagaatcgtgagagactacgacgtgtacgccagaagaaacctgcagagaggctacaccgccaaggagctgaacgtgagcttcatcaacgagaagaagtaccacctgcaggagagagtggacaaggtgaagaagaaggtgaaggacgtggaggagaagagcaaggagttcgtgcagaaggtggaggagaagagcatcgacctgatccagaagtgggaggagaagagcagagagttcatcggcagcttcctggagatgttcggccccgagggcgccctgaagcacatgctgaaggagggcaagggcagaatgctgcaggccatcagccccaagcagagccccagcagcagccccaccagagagagaagccccagccccagcttcagatggcccttcagcggcaagaccagccccccctgcagccccgccaacctgagcagacacaaggccgccgcctacgacatcagcgaggacgaggaggactag

SEQ ID NO: 92965 - DNA, 1104 bp, synthetic construct; identical to SEQ ID NO: 92961
  misc_feature 1..1104: note = Description of Artificial Sequence: Synthetic coding sequence
  source 1..1104: mol_type = other DNA

SEQ ID NO: 92966 - DNA, 348 bp, synthetic construct
  misc_feature 1..348: note = Description of Artificial Sequence: Synthetic coding sequence
  source 1..348: mol_type = other DNA
atggacgcccagtgcagcgccaaggtgaacgccagaaagagaagaaaggaggcccccggccccaacggcgccaccgaggaggacggcgtgcccagcaaggtgcagagatgcgccgtgggcctgagacagcccgcccccttcagcgacgagatcgaggtggacttcagcaagccctacgtgagagtgaccatggaggaggccagcagaggcaccccctgcgagagacccgtgagagtgtacgccgacggcatcttcgacctgttccacagcggccacgccagagccctgatgcaggccaagaacctgttccccaacacctacctgatcgtgggcgtgtgcagcgactag

SEQ ID NO: 92967 - DNA, 2250 bp, synthetic construct
  misc_feature 1..2250: note = Description of Artificial Sequence: Synthetic coding sequence
  source 1..2250: mol_type = other DNA
atggaggccgagaccggcagcagcgtggagaccggcaagaaggccaacagaggcaccagaatcgccctggtggtgttcgtgggcggcaccctggtgctgggcaccatcctgttcctggtgagccagggcctgctgagcctgcaggccaagcaggagtactgcctgaagcccgagtgcatcgaggccgccgccgccatcctgagcaaggtgaacctgagcgtggacccctgcgacaacttcttcagattcgcctgcgacggctggatcagcaacaaccccatccccgaggacatgcccagctacggcgtgtacccctggctgagacacaacgtggacctgaagctgaaggagctgctggagaagagcatcagcagaagaagagacaccgaggccatccagaaggccaagatcctgtacagcagctgcatgaacgagaaggccatcgagaaggccgacgccaagcccctgctgcacatcctgagacacagccccttcagatggcccgtgctggagagcaacatcggccccgagggcgtgtggagcgagagaaagttcagcctgctgcagaccctggccaccttcagaggccagtacagcaacagcgtgttcatcagactgtacgtgagccccgacgacaaggccagcaacgagcacatcctgaagctggaccaggccaccctgagcctggccgtgagagaggactacctggacaacagcaccgaggccaagagctacagagacgccctgtacaagttcatggtggacaccgccgtgctgctgggcgccaacagcagcagagccgagcacgacatgaagagcgtgctgagactggagatcaagatcgccgagatcatgatcccccacgagaacagaaccagcgaggccatgtacaacaagatgaacatcagcgagctgagcgccatgatcccccagttcgactggctgggctacatcaagaaggtgatcgacaccagactgtacccccacctgaaggacatcagccccagcgagaacgtggtggtgagagtgccccagtacttcaaggacctgttcagaatcctgggcagcgagagaaagaagaccatcgccaactacctggtgtggagaatggtgtacagcagaatccccaacctgagcagaagattccagtacagatggctggagttcagcagagtgatccagggcaccaccaccctgctgccccagtgggacaagtgcgtgaacttcatcgagagcgccctgccctacgtggtgggcaagatgttcgtggacgtgtacttccaggaggacaagaaggagatgatggaggagctggtggagggcgtgagatgggccttcatcgacatgctggagaaggagaacgagtggatggacgccggcaccaagagaaaggccaaggagaaggccagagccgtgctggccaaggtgggctaccccgagttcatcatgaacgacacccacgtgaacgaggacctgaaggccatcaagttcagcgaggccgactacttcggcaacgtgctgcagaccagaaagtacctggcccagagcgacttcttctggctgagaaaggccgtgcccaagaccgagtggttcaccaaccccaccaccgtgaacgccttctacagcgccagcaccaaccagatcagattccccgccggcgagctgcagaagcccttcttctggggcaccgagtaccccagaagcctgagctacggcgccatcggcgtgatcgtgggccacgagttcacccacggcttcgacaacaacggcagaaagtacgacaagaacggcaacctggacccctggtggagcaccgagagcgaggagaagttcaaggagaagaccaagtgcatgatcaaccagtacagcaactactactggaagaaggccggcctgaacgtgaagggcaagagaaccctgggcgagaacatcgccgacaacggcggcctgagagaggccttcagagcctacagaaagtggatcaacgacagaagacagggcctggaggagcccctgctgcccggcatcaccttcaccaacaaccagctgttcttcctgagctacgcccacgtgagatgcaacagctacagacccgaggccgccagagagcaggtgcagatcggcgcccacagccccccccagttcagagtgaacggcgccatcagcaacttcgaggagttccagaaggccttcaactgcccccccaacagcaccatgaacagaggcatggacagctgcagactgtggtag

SEQ ID NO: 92968 - DNA, 1359 bp, synthetic construct
  misc_feature 1..1359: note = Description of Artificial Sequence: Synthetic coding sequence
  source 1..1359: mol_type = other DNA
atgatccacctgcccagaccccccaaggtgctgggcctgcagttcgactggctgggctacatcaagaaggtgatcgacaccagactgtacccccacctgaaggacatcagccccagcgagaacgtggtggtgagagtgccccagtacttcaaggacctgttcagaatcctgggcagcgagagaaagaagaccatcgccaactacctggtgtggagaatggtgtacagcagaatccccaacctgagcagaagattccagtacagatggctggagttcagcagagtgatccagggcaccaccaccctgctgccccagtgggacaagtgcgtgaacttcatcgagagcgccctgccctacgtggtgggcaagatgttcgtggacgtgtacttccaggaggacaagaaggagatgatggaggagctggtggagggcgtgagatgggccttcatcgacatgctggagaaggagaacgagtggatggacgccggcaccaagagaaaggccaaggagaaggccagagccgtgctggccaaggtgggctaccccgagttcatcatgaacgacacccacgtgaacgaggacctgaaggccatcaagttcagcgaggccgactacttcggcaacgtgctgcagaccagaaagtacctggcccagagcgacttcttctggctgagaaaggccgtgcccaagaccgagtggttcaccaaccccaccaccgtgaacgccttctacagcgccagcaccaaccagatcagattccccgccggcgagctgcagaagcccttcttctggggcaccgagtaccccagaagcctgagctacggcgccatcggcgtgatcgtgggccacgagttcacccacggcttcgacaacaacggcagaaagtacgacaagaacggcaacctggacccctggtggagcaccgagagcgaggagaagttcaaggagaagaccaagtgcatgatcaaccagtacagcaactactactggaagaaggccggcctgaacgtgaagggcaagagaaccctgggcgagaacatcgccgacaacggcggcctgagagaggccttcagagcctacagaaagtggatcaacgacagaagacagggcctggaggagcccctgctgcccggcatcaccttcaccaacaaccagctgttcttcctgagctacgcccacgtgagatgcaacagctacagacccgaggccgccagagagcaggtgcagatcggcgcccacagccccccccagttcagagtgaacggcgccatcagcaacttcgaggagttccagaaggccttcaactgcccccccaacagcaccatgaacagaggcatggacagctgcagactgtggtag

SEQ ID NO: 92969 - DNA, 1959 bp, synthetic construct
  misc_feature 1..1959: note = Description of Artificial Sequence: Synthetic coding sequence
  source 1..1959: mol_type = other DNA
atgcccagctacggcgtgtacccctggctgagacacaacgtggacctgaagctgaaggagctgctggagaagagcatcagcagaagaagagacaccgaggccatccagaaggccaagatcctgtacagcagctgcatgaacgagaaggccatcgagaaggccgacgccaagcccctgctgcacatcctgagacacagccccttcagatggcccgtgctggagagcaacatcggccccgagggcgtgtggagcgagagaaagttcagcctgctgcagaccctggccaccttcagaggccagtacagcaacagcgtgttcatcagactgtacgtgagccccgacgacaaggccagcaacgagcacatcctgaagctggaccaggccaccctgagcctggccgtgagagaggactacctggacaacagcaccgaggccaagagctacagagacgccctgtacaagttcatggtggacaccgccgtgctgctgggcgccaacagcagcagagccgagcacgacatgaagagcgtgctgagactggagatcaagatcgccgagatcatgatcccccacgagaacagaaccagcgaggccatgtacaacaagatgaacatcagcgagctgagcgccatgatcccccagttcgactggctgggctacatcaagaaggtgatcgacaccagactgtacccccacctgaaggacatcagccccagcgagaacgtggtggtgagagtgccccagtacttcaaggacctgttcagaatcctgggcagcgagagaaagaagaccatcgccaactacctggtgtggagaatggtgtacagcagaatccccaacctgagcagaagattccagtacagatggctggagttcagcagagtgatccagggcaccaccaccctgctgccccagtgggacaagtgcgtgaacttcatcgagagcgccctgccctacgtggtgggcaagatgttcgtggacgtgtacttccaggaggacaagaaggagatgatggaggagctggtggagggcgtgagatgggccttcatcgacatgctggagaaggagaacgagtggatggacgccggcaccaagagaaaggccaaggagaaggccagagccgtgctggccaaggtgggctaccccgagttcatcatgaacgacacccacgtgaacgaggacctgaaggccatcaagttcagcgaggccgactacttcggcaacgtgctgcagaccagaaagtacctggcccagagcgacttcttctggctgagaaaggccgtgcccaagaccgagtggttcaccaaccccaccaccgtgaacgccttctacagcgccagcaccaaccagatcagattccccgccggcgagctgcagaagcccttcttctggggcaccgagtaccccagaagcctgagctacggcgccatcggcgtgatcgtgggccacgagttcacccacggcttcgacaacaacggcagaaagtacgacaagaacggcaacctggacccctggtggagcaccgagagcgaggagaagttcaaggagaagaccaagtgcatgatcaaccagtacagcaactactactggaagaaggccggcctgaacgtgaagggcaagagaaccctgggcgagaacatcgccgacaacggcggcctgagagaggccttcagagcctacagaaagtggatcaacgacagaagacagggcctggaggagcccctgctgcccggcatcaccttcaccaacaaccagctgttcttcctgagctacgcccacgtgagatgcaacagctacagacccgaggccgccagagagcaggtgcagatcggcgcccacagccccccccagttcagagtgaacggcgccatcagcaacttcgaggagttccagaaggccttcaactgcccccccaacagcaccatgaacagaggcatggacagctgcagactgtggtag

SEQ ID NO: 92970 - DNA, 2088 bp, synthetic construct
  misc_feature 1..2088: note = Description of Artificial Sequence: Synthetic coding sequence
  source 1..2088: mol_type = other DNA
atggaggccgagaccggcagcagcgtggagaccggcaagaaggccaacagaggcaccagaatcgccctggtggtgttcgtgggcggcaccctggtgctgggcaccatcctgttcctggtgagccagggcctgctgagcctgcaggccaagcaggagtactgcctgaagcccgagtgcatcgaggccgccgccgccatcctgagcaaggtgaacctgagcgtggacccctgcgacaacttcttcagattcgcctgcgacggctggatcagcaacaaccccatccccgaggacatgcccagctacggcgtgtacccctggctgagacacaacgtggacctgaagctgaaggagctgctggagaagagcatcagcagaagaagagacaccgaggccatccagaaggccaagatcctgtacagcagctgcatgaacgagaaggccatcgagaaggccgacgccaagcccctgctgcacatcctgagacacagccccttcagatggcccgtgctggagagcaacatcggccccgagggcgtgtggagcgagagaaagttcagcctgctgcagaccctggccaccttcagaggccagtacagcaacagcgtgttcatcagactgtacgtgagccccgacgacaaggccagcaacgagcacatcctgaagctggaccaggccaccctgagcctggccgtgagagaggactacctggacaacagcaccgaggccaagagctacagagacgccctgtacaagttcatggtggacaccgccgtgctgctgggcgccaacagcagcagagccgagcacgacatgaagagcgtgctgagactggagatcaagatcgccgagatcatgatcccccacgagaacagaaccagcgaggccatgtacaacaagatgaacatcagcgagctgagcgccatgatcccccagttcgactggctgggctacatcaagaaggtgatcgacaccagactgtacccccacctgaaggacatcagccccagcgagaacgtggtggtgagagtgccccagtacttcaaggacctgttcagaatcctgggcagcgagagaaagaagaccatcgccaactacctggtgtggagaatggtgtacagcagaatccccaacctgagcagaagattccagtacagatggctggagttcagcagagtgatccagggcaccaccaccctgctgccccagtgggacaagtgcgtgaacttcatcgagagcgccctgccctacgtggtgggcaagatgttcgtggacgtgtacttccaggaggacaagaaggagatgatggaggagctggtggagggcgtgagatgggccttcatcgacatgctggagaaggagaacgagtggatggacgccggcaccaagagaaaggccaaggagaaggccagagccgtgctggccaaggtgggctaccccgagttcatcatgaacgacacccacgtgaacgaggacctgaaggccatcaagttcagcgaggccgactacttcggcaacgtgctgcagaccagaaagtacctggcccagagcgacttcttctggctgagaaaggccgtgcccaagaccgagtggttcaccaaccccaccaccgtgaacgccttctacagcgccagcaccaaccagatcagattccccgccggcgagctgcagaagcccttcttctggggcaccgagtaccccagaagcctgagctacggcgccatcggcgtgatcgtgggccacgagttcacccacggcttcgacaacaacggcagaaagtacgacaagaacggcaacctggacccctggtggagcaccgagagcgaggagaagttcaaggagaagaccaagtgcatgatcaaccagtacagcaactactactggaagaaggccggcctgaacgtgaagggcaagagaaccctgggcgagaacatcgccgacaacggcggcctgagagaggccttcagagcctacagaaagtggatcaacgacagaagacagggcctggaggagcccctgctgcccggcatcaccttcaccaacaaccagctgttcttcctgagctacgcccacggccagtggtgcaactag

SEQ ID NO: 92971 - DNA, 888 bp, synthetic construct
  misc_feature 1..888: note = Description of Artificial Sequence: Synthetic coding sequence
  source 1..888: mol_type = other DNA
atgcccagccccagaagaagcatggagggcagacccctgggcgtgagcgccagcagcagcagcagcagccccggcagccccgcccacggcggcggcggcggcggcagcagattcgagttccagagcctgctgagcagcagagccaccgccgtggaccccacctgcgccagactgagagccagcgagagccccgtgcacagaagaggcagcttccccctggccgccgccggccccagccagagccccgccccccccctgcccgaggaggacagaatggacctgaaccccagcttcctgggcatcgccctgagaagcctgctggccatcgacctgtggctgagcaagaagctgggcgtgtgcgccggcgagagcagcagctggggcagcgtgagacccctgatgaagctgctggagatcagcggccacggcatcccctggctgctgggcaccctgtactgcctgtgcagaagcgacagctgggccggcagagaggtgctgatgaacctgctgttcgccctgctgctggacctgctgctggtggccctgatcaagggcctggtgagaagaagaagacccgcccacaaccagatggacatgttcgtgaccctgagcgtggacaagtacagcttccccagcggccacgccaccagagccgccctgatgagcagattcatcctgaaccacctggtgctggccatccccctgagagtgctggtggtgctgtgggccttcgtgctgggcctgagcagagtgatgctgggcagacacaacgtgaccgacgtggccttcggcttcttcctgggctacatgcagtacagcatcgtggactactgctggctgagcccccacaacgcccccgtgctgttcctgctgtggagccagagatag

SEQ ID NO: 92972 - DNA, 615 bp, synthetic construct
  misc_feature 1..615: note = Description of Artificial Sequence: Synthetic coding sequence
  source 1..615: mol_type = other DNA
atggacctgaaccccagcttcctgggcatcgccctgagaagcctgctggccatcgacctgtggctgagcaagaagctgggcgtgtgcgccggcgagagcagcagctggggcagcgtgagacccctgatgaagctgctggagatcagcggccacggcatcccctggctgctgggcaccctgtactgcctgtgcagaagcgacagctgggccggcagagaggtgctgatgaacctgctgttcgccctgctgctggacctgctgctggtggccctgatcaagggcctggtgagaagaagaagacccgcccacaaccagatggacatgttcgtgaccctgagcgtggacaagtacagcttccccagcggccacgccaccagagccgccctgatgagcagattcatcctgaaccacctggtgctggccatccccctgagagtgctggtggtgctgtgggccttcgtgctgggcctgagcagagtgatgctgggcagacacaacgtgaccgacgtggccttcggcttcttcctgggctacatgcagtacagcatcgtggactactgctggctgagcccccacaacgcccccgtgctgttcctgctgtggagccagagatag

SEQ ID NO: 92973 - DNA, 645 bp, synthetic construct
  misc_feature 1..645: note = Description of Artificial Sequence: Synthetic coding sequence
  source 1..645: mol_type = other DNA
atggagctggccgccggcagcttcagcgaggagcagttctgggaggcctgcgccgagctgcagcagcccgccctggccggcgccgactggcagctgctggtggagaccagcggcatcagcatctacagactgctggacaagaagaccggcctgtacgagtacaaggtgttcggcgtgctggaggactgcagccccaccctgctggccgacatctacatggacagcgactacagaaagcagtgggaccagtacgtgaaggagctgtacgagcaggagtgcaacggcgagaccgtggtgtactgggaggtgaagtaccccttccccatgagcaacagagactacgtgtacctgagacagagaagagacctggacatggagggcagaaagatccacgtgatcctggccagaagcaccagcatgccccagctgggcgagagaagcggcgtgatcagagtgaagcagtacaagcagagcctggccatcgagagcgacggcaagaagggcagcaaggtgttcatgtactacttcgacaaccccggcggccagatccccagctggctgatcaactgggccgccaagaacggcgtgcccaacttcctgaaggacatggccagagcctgccagaactacctgaagaagacctag

SEQ ID NO: 92974 - DNA, 582 bp, synthetic construct
  misc_feature 1..582: note = Description of Artificial Sequence: Synthetic coding sequence
  source 1..582: mol_type = other DNA
ctggcccagggcagatgcctgcaggtgaccgccgtgcagatccagggcagctggaaggtgaccggcgtgcagccccagaagaccggcctgtacgagtacaaggtgttcggcgtgctggaggactgcagccccaccctgctggccgacatctacatggacagcgactacagaaagcagtgggaccagtacgtgaaggagctgtacgagcaggagtgcaacggcgagaccgtggtgtactgggaggtgaagtaccccttccccatgagcaacagagactacgtgtacctgagacagagaagagacctggacatggagggcagaaagatccacgtgatcctggccagaagcaccagcatgccccagctgggcgagagaagcggcgtgatcagagtgaagcagtacaagcagagcctggccatcgagagcgacggcaagaagggcagcaaggtgttcatgtactacttcgacaaccccggcggccagatccccagctggctgatcaactgggccgccaagaacggcgtgcccaacttcctgaaggacatggccagagcctgccagaactacctgaagaagacctag

SEQ ID NO: 92975 - DNA, 429 bp, synthetic construct
  misc_feature 1..429: note = Description of Artificial Sequence: Synthetic coding sequence
  source 1..429: mol_type = other DNA
atggacagcgactacagaaagcagtgggaccagtacgtgaaggagctgtacgagcaggagtgcaacggcgagaccgtggtgtactgggaggtgaagtaccccttccccatgagcaacagagactacgtgtacctgagacagagaagagacctggacatggagggcagaaagatccacgtgatcctggccagaagcaccagcatgccccagctgggcgagagaagcggcgtgatcagagtgaagcagtacaagcagagcctggccatcgagagcgacggcaagaagggcagcaaggtgttcatgtactacttcgacaaccccggcggccagatccccagctggctgatcaactgggccgccaagaacggcgtgcccaacttcctgaaggacatggccagagcctgccagaactacctgaagaagacctag

SEQ ID NO: 92976 - DNA, 564 bp, synthetic construct
  misc_feature 1..564: note = Description of Artificial Sequence: Synthetic coding sequence
  source 1..564: mol_type = other DNA
atgcccgtggacctgagcaagtggagcggccccctgagcctgcaggaggtggacgagcagccccagcaccccctgcacgtgacctacgccggcgccgccgtggacgagctgggcaaggtgctgacccccacccaggtgaagaacagacccaccagcatcagctgggacggcctggacagcggcaagctgtacaccctggtgctgaccgaccccgacgcccccagcagaaaggaccccaagtacagagagtggcaccacttcctggtggtgaacatgaagggcaacgacatcagcagcggcaccgtgctgagcgactacgtgggcagcggcccccccaagggcaccggcctgcacagatacgtgtggctggtgtacgagcaggacagacccctgaagtgcgacgagcccatcctgagcaacagaagcggcgaccacagaggcaagttcaaggtggccagcttcagaaagaagtacgagctgagagcccccgtggccggcacctgctaccaggccgagtgggacgactacgtgcccaagctgtacgagcagctgagcggcaagtag

SEQ ID NO: 92977 - DNA, 468 bp, synthetic construct
  misc_feature 1..468: note = Description of Artificial Sequence: Synthetic coding sequence
  source 1..468: mol_type = other DNA
atgcccgtggacctgagcaagtggagcggccccctgagcctgcaggaggtggacgagcagccccagcaccccctgcacgtgacctacgccggcgccgccgtggacgagctgggcaaggtgctgacccccacccaggtgaagaacagacccaccagcatcagctgggacggcctggacagcggcaagctgtacaccctggtgctgaccgaccccgacgcccccagcagaaaggaccccaagtacagagagtggcaccacttcctggtggtgaacatgaagggcaacgacatcagcagcggcaccgtgctgagcgactacgtgggcagcggcccccccaagggcaccggcctgcacagatacgtgtggctggtgtacgagcaggacagacccctgaagtgcgacttcagctgctgcctggccttcatcatcctgctgacccacagcgacctgtgcttcgaccagatctag

SEQ ID NO: 92978 - DNA, 6135 bp, synthetic construct
  misc_feature 1..6135: note = Description of Artificial Sequence: Synthetic coding sequence
  source 1..6135: mol_type = other DNA
atgtgccccgtggacttccacggcatcttccagctggacgagagaagaagagacgccgtgatcgccctgggcatcttcctgatcgagagcgacctgcagcacaaggactgcgtggtgccctacctgctgagactgctgaagggcctgcccaaggtgtactgggtggaggagagcaccgccagaaagggcagaggcgccctgcccgtggccgagagcttcagcttctgcctggtgaccctgctgagcgacgtggcctacagagaccccagcctgagagacgagatcctggaggtgctgctgcaggtgctgcacgtgctgctgggcatgtgccaggccctggagatccaggacaaggagtacctgtgcaagtacgccatcccctgcctgatcggcatcagcagagccttcggcagatacagcaacatggaggagagcctgctgagcaagctgttccccaagatccccccccacagcctgagagtgctggaggagctggagggcgtgagaagaagaagcttcaacgacttcagaagcatcctgcccagcaacctgctgaccgtgtgccaggagggcaccctgaagagaaagaccagcagcgtgagcagcatcagccaggtgagccccgagagaggcatgcccccccccagcagccccggcggcagcgccttccactacttcgaggccagctgcctgcccgacggcaccgccctggagcccgagtactacttcagcaccatcagcagcagcttcagcgtgagccccctgttcaacggcgtgacctacaaggagttcaacatccccctggagatgctgagagagctgctgaacctggtgaagaagatcgtggaggaggccgtgctgaagagcctggacgccatcgtggccagcgtgatggaggccaaccccagcgccgacctgtactacaccagcttcagcgaccccctgtacctgaccatgttcaagatgctgagagacaccctgtactacatgaaggacctgcccaccagcttcgtgaaggagatccacgacttcgtgctggagcagttcaacaccagccagggcgagctgcagaagatcctgcacgacgccgacagaatccacaacgagctgagccccctgaagctgagatgccaggccaacgccgcctgcgtggacctgatggtgtgggccgtgaaggacgagcagggcgccgagaacctgtgcatcaagctgagcgagaagctgcagagcaagaccagcagcaaggtgatcatcgcccacctgcccctgctgatctgctgcctgcagggcctgggcagactgtgcgagagattccccgtggtggtgcacagcgtgacccccagcctgagagacttcctggtgatccccagccccgtgctggtgaagctgtacaagtaccacagccagtaccacaccgtggccggcaacgacatcaagatcagcgtgaccaacgagcacagcgagagcaccctgaacgtgatgagcggcaagaagagccagcccagcatgtacgagcagctgagagacatcgccatcgacaacatctgcagatgcctgaaggccggcctgaccgtggaccccgtgatcgtggaggccttcctggccagcctgagcaacagactgtacatcagccaggagagcgacaaggacgcccacctgatccccgaccacaccatcagagccctgggccacatcgccgtggccctgagagacacccccaaggtgatggagcccatcctgcagatcctgcagcagaagttctgccagccccccagccccctggacgtgctgatcatcgaccagctgggctgcctggtgatcaccggcaaccagtacatctaccaggaggtgtggaacctgttccagcagatcagcgtgaaggccagcagcgtggtgtacagcgccaccaaggactacaaggaccacggctacagacactgcagcctggccgtgatcaacgccctggccaacatcgccgccaacatccaggacgagcacctggtggacgagctgctgatgaacctgctggagctgttcgtgcagctgggcctggagggcaagagagccagcgagagagccagcgagaagggccccgccctgaaggccagcagcagcgccggcaacctgggcgtgctgatccccgtgatcgccgtgctgaccagaagactgccccccatcaaggaggccaagcccagactgcagaagctgttcagagacttctggctgtacagcgtgctgatgggcttcgccgtggagggcagcggcctgtggcccgaggagtggtacgagggcgtgtgcgagatcgccaccaagagccccctgctgaccttccccagcaaggagcccctgagaagcgtgctgcagtacaacagcgccatgaagaacgacaccgtgacccccgccgagctgagcgagctgagaagcaccatcatcaacctgctggaccccccccccgaggtgagcgccctgatcaacaagctggacttcgccatgagcacctacctgctgagcgtgtacagactggagtacatgagagtgctgagaagcaccgaccccgacagattccaggtgatgttctgctacttcgaggacaaggccatccagaaggacaagagcggcatgatgcagtgcgtgatcgccgtggccgacaaggtgttcgacgccttcctgaacatgatggccgacaaggccaagaccaaggagaacgaggaggagctggagagacacgcccagttcctgctggtgaacttcaaccacatccacaagagaatcagaagagtggccgacaagtacctgagcggcctggtggacaagttcccccacctgctgtggagcggcaccgtgctgaagaccatgctggacatcctgcagaccctgagcctgagcctgagcgccgacatccacaaggaccagccctactacgacatccccgacgccccctacagaatcaccgtgcccgacacctacgaggccagagagagcatcgtgaaggacttcgccgccagatgcggcatgatcctgcaggaggccatgaagtgggcccccaccgtgaccaagagccacctgcaggagtacctgaacaagcaccagaactgggtgagcggcctgagccagcacaccggcctggccatggccaccgagagcatcctgcacttcgccggctacaacaagcagaacaccaccctgggcgccacccagctgagcgagagacccgcctgcgtgaagaaggactacagcaacttcatggccagcctgaacctgagaaacagatacgccggcgaggtgtacggcatgatcagattcagcggcaccaccggccagatgagcgacctgaacaagatgatggtgcaggacctgcacagcgccctggacagaagccacccccagcactacacccaggccatgttcaagctgaccgccatgctgatcagcagcaaggactgcgacccccagctgctgcaccacctgtgctggggccccctgagaatgttcaacgagcacggcatggagaccgccctggcctgctgggagtggctgctggccggcaaggacggcgtggaggtgcccttcatgagagagatggccggcgcctggcacatgaccgtggagcagaagttcggcctgttcagcgccgagatcaaggaggccgaccccctggccgccagcgaggccagccagcccaagccctgcccccccgaggtgaccccccactacatctggatcgacttcctggtgcagagattcgagatcgccaagtactgcagcagcgaccaggtggagatcttcagcagcctgctgcagagaagcatgagcctgaacatcggcggcgccaagggcagcatgaacagacacgtggccgccatcggccccagattcaagctgctgaccctgggcctgagcctgctgcacgccgacgtggtgcccaacgccaccatcagaaacgtgctgagagagaagatctacagcaccgccttcgactacttcagctgcccccccaagttccccacccagggcgagaagagactgagagaggacatcagcatcatgatcaagttctggaccgccatgttcagcgacaagaagtacctgaccgccagccagctggtgccccccgacaaccaggacaccagaagcaacctggacatcaccgtgggcagcagacagcaggccacccagggctggatcaacacctaccccctgagcagcggcatgagcaccatcagcaagaagagcggcatgagcaagaagaccaacagaggcagccagctgcacaagtactacatgaagagaagaaccctgctgctgagcctgctggccaccgagatcgagagactgatcacctggtacaaccccctgagcgcccccgagctggagctggaccaggccggcgagaacagcgtggccaactggagaagcaagtacatcagcctgagcgagaagcagtggaaggacaacgtgaacctggcctggagcatcagcccctacctggccgtgcagctgcccgccagattcaagaacaccgaggccatcggcaacgaggtgaccagactggtgagactggaccccggcgccgtgagcgacgtgcccgaggccatcaagttcctggtgacctggcacaccatcgacgccgacgcccccgagctgagccacgtgctgtgctgggcccccaccgacccccccaccggcctgagctacttcagcagcatgtaccccccccaccccctgaccgcccagtacggcgtgaaggtgctgagaagcttcccccccgacgccatcctgttctacatcccccagatcgtgcaggccctgagatacgacaagatgggctacgtgagagagtacatcctgtgggccgccagcaagagccagctgctggcccaccagttcatctggaacatgaagaccaacatctacctggacgaggagggccaccagaaggaccccgacatcggcgacctgctggaccagctggtggaggagatcaccggcagcctgagcggccccgccaaggacttctaccagagagagttcgacttcttcaacaagatcaccaacgtgagcgccatcatcaagccctaccccaagggcgacgagagaaagaaggcctgcctgagcgccctgagcgaggtgaaggtgcagcccggctgctacctgcccagcaaccccgaggccatcgtgctggacatcgactacaagagcggcacccccatgcagagcgccgccaaggccccctacctggccaagttcaaggtgaagagatgcggcgtgagcgagctggagaaggagggcctgagatgcagaagcgacagcgaggacgagtgcagcacccaggaggccgacggccagaagatcagctggcaggccgccatcttcaaggtgggcgacgactgcagacaggacatgctggccctgcagatcatcgacctgttcaagaacatcttccagctggtgggcctggacctgttcgtgttcccctacagagtggtggccaccgcccccggctgcggcgtgatcgagtgcatccccgactgcaccagcagagaccagctgggcagacagaccgacttcggcatgtacgactacttcaccagacagtacggcgacgagagcaccctggccttccagcaggccagatacaacttcatcagaagcatggccgcctacagcctgctgctgttcctgctgcagatcaaggacagacacaacggcaacatcatgctggacaagaagggccacatcatccacatcgacttcggcttcatgttcgagagcagccccggcggcaacctgggctgggagcccgacatcaagctgaccgacgagatggtgatgatcatgggcggcaagatggaggccacccccttcaagtggttcatggagatgtgcgtgagaggctacctggccgtgagaccctacatggacgccgtggtgagcctggtgaccctgatgctggacaccggcctgccctgcttcagaggccagaccatcaagctgctgaagcacagattcagccccaacatgaccgagagagaggccgccaacttcatcatgaaggtgatccagagctgcttcctgagcaacagaagcagaacctacgacatgatccagtactaccagaacgacatcccctactag

SEQ ID NO: 92979 - DNA, 1440 bp, synthetic construct
  misc_feature 1..1440: note = Description of Artificial Sequence: Synthetic coding sequence
  source 1..1440: mol_type = other DNA
atggacgagaccagccccctggtgagccccgagagagcccagccccccgactacaccttccccagcggcagcggcgcccacttcccccaggtgcccggcggcgccgtgagagtggccgccgccgccggcagcggccccagcccccccggcagccccggccacgacagagagagacagcccctgctggacagagccagaggcgccgccgcccagggccagacccagaccgtggccgcccaggcccaggccctggccgcccaggccgccgccgccgcccacgccgcccaggcccacagagagagaaacgagttccccgaggaccccgagttcgaggccgtggtgagacaggccgagctggccatcgagagatgcatcttccccgagagaatctaccagggcagcagcggcagctacttcgtgaaggacccccagggcagaatcatcgccgtgttcaagcccaagaacgaggagccctacggccacctgaaccccaagtggaccaagtggctgcagaagctgtgctgcccctgctgcttcggcagagactgcctggtgctgaaccagggctacctgagcgaggccggcgccagcctggtggaccagaagctggagctgaacatcgtgcccagaaccaaggtggtgtacctggccagcgagaccttcaactacagcgccatcgacagagtgaagagcagaggcaagagactggccctggagaaggtgcccaaggtgggccagagattcaacagaatcggcctgccccccaaggtgggcagcttccagctgttcgtggagggctacaaggacgccgactactggctgagaagattcgaggccgagcccctgcccgagaacaccaacagacagctgctgctgcagttcgagagactggtggtgctggactacatcatcagaaacaccgacagaggcaacgacaactggctgatcaagtacgactgccccatggacagcagcagcagcagagacaccgactgggtggtggtgaaggagcccgtgatcaaggtggccgccatcgacaacggcctggccttccccctgaagcaccccgacagctggagagcctaccccttctactgggcctggctgccccaggccaaggtgcccttcagccaggagatcaaggacctgatcctgcccaagatcagcgaccccaacttcgtgaaggacctggaggaggacctgtacgagctgttcaagaaggaccccggcttcgacagaggccagttccacaagcagatcgccgtgatgagaggccagatcctgaacctgacccaggccctgaaggacaacaagagccccctgcacctggtgcagatgccccccgtgatcgtggagaccgccagaagccaccagagaagcagcagcgagagctacacccagagcttccagagcagaaagcccttcttcagctggtggtag

SEQ ID NO: 92980 - DNA, 1350 bp, synthetic construct
  misc_feature 1..1350: note = Description of Artificial Sequence: Synthetic coding sequence
  source 1..1350: mol_type = other DNA
atgctgggcccccaggtgtggagcagcgtgagacagggcctgagcagaagcctgagcagaaacgtgggcgtgtgggccagcggcgagggcaagaaggtggacatcgccggcatctacccccccgtgaccacccccttcaccgccaccgccgaggtggactacggcaagctggaggagaacctgcacaagctgggcaccttccccttcagaggcgccgtgggcggcgtgtgcgccctggccaacgtgctgggcgcccaggtgtgccagctggagagactgtgctgcaccggccagtgggaggacgcccagaagctgcagcacagactgatcgagcccaacgccgccagaatcatcgccgtgttcaagcccaagaacgaggagccctacggccacctgaaccccaagtggaccaagtggctgcagaagctgtgctgcccctgctgcttcggcagagactgcctggtgctgaaccagggctacctgagcgaggccggcgccagcctggtggaccagaagctggagctgaacatcgtgcccagaaccaaggtggtgtacctggccagcgagaccttcaactacagcgccatcgacagagtgaagagcagaggcaagagactggccctggagaaggtgcccaaggtgggccagagattcaacagaatcggcctgccccccaaggtgggcagcttccagctgttcgtggagggctacaaggacgccgactactggctgagaagattcgaggccgagcccctgcccgagaacaccaacagacagctgctgctgcagttcgagagactggtggtgctggactacatcatcagaaacaccgacagaggcaacgacaactggctgatcaagtacgactgccccatggacagcagcagcagcagagacaccgactgggtggtggtgaaggagcccgtgatcaaggtggccgccatcgacaacggcctggccttccccctgaagcaccccgacagctggagagcctaccccttctactgggcctggctgccccaggccaaggtgcccttcagccaggagatcaaggacctgatcctgcccaagatcagcgaccccaacttcgtgaaggacctggaggaggacctgtacgagctgttcaagaaggaccccggcttcgacagaggccagttccacaagcagatcgccgtgatgagaggccagatcctgaacctgacccaggccctgaaggacaacaagagccccctgcacctggtgcagatgccccccgtgatcgtggagaccgccagaagccaccagagaagcagcagcgagagctacacccagagcttccagagcagaaagcccttcttcagctggtggtag

SEQ ID NO: 92981 - DNA, 1446 bp, synthetic construct
  misc_feature 1..1446: note = Description of Artificial Sequence: Synthetic coding sequence
  source 1..1446: mol_type = other DNA
atggaggaccccagcgagcccgacagactggccagcgccgacggcggcagccccgaggaggaggaggacggcgagagagagcccctgctgcccagaatcgcctgggcccaccccagaagaggcgcccccggcagcgccgtgagactgctggacgccgccggcgaggagggcgaggccggcgacgaggagctgcccctgccccccggcgacgtgggcgtgagcagaagcagcagcgccgagctggacagaagcagacccgccgtgagcgtgaccatcggcaccagcgagatgaacgccttcctggacgaccccgagttcgccgacatcatgctgagagccgagcaggccatcgaggtgggcatcttccccgagagaatcagccagggcagcagcggcagctacttcgtgaaggaccccaagagaaagatcatcggcgtgttcaagcccaagagcgaggagccctacggccagctgaaccccaagtggaccaagtacgtgcacaaggtgtgctgcccctgctgcttcggcagaggctgcctgatccccaaccagggctacctgagcgaggccggcgcctacctggtggacaacaagctgcacctgagcatcgtgcccaagaccaaggtggtgtggctggtgagcgagaccttcaactacaacgccatcgacagagccaagagcagaggcaagaagtacgccctggagaaggtgcccaaggtgggcagaaagttccacagaatcggcctgccccccaagatcggcagcttccagctgttcgtggagggctacaaggaggccgagtactggctgagaaagttcgaggccgaccccctgcccgagaacatcagaaagcagttccagagccagttcgagagactggtgatcctggactacatcatcagaaacaccgacagaggcaacgacaactggctggtgagatacgagaagcagaagtgcgagaaggagatcgaccacaaggagagcaagtggatcgacgacgaggagttcctgatcaagatcgccgccatcgacaacggcctggccttccccttcaagcaccccgacgagtggagagcctaccccttccactgggcctggctgccccaggccaaggtgcccttcagcgaggagatcagaaacctgatcctgccctacatcagcgacatgaacttcgtgcaggacctgtgcgaggacctgtacgagctgttcaagaccgacaagggcttcgacaaggccaccttcgagagccagatgagcgtgatgagaggccagatcctgaacctgacccaggccctgagagacggcaagagccccttccagctggtgcagatcccctgcgtgatcgtggagagaagccagggcggcagccagggcagaatcgtgcacctgagcaacagcttcacccagaccgtgaactgcagaaagcccttcttcagcagctggtag

SEQ ID NO: 92982 - DNA, 1353 bp, synthetic construct
  misc_feature 1..1353: note = Description of Artificial Sequence: Synthetic coding sequence
  source 1..1353: mol_type = other DNA
atggaggaccccagcgagcccgacagactggccagcgccgacggcggcagccccgaggaggaggaggacggcgagagagagcccctgctgcccagaatcgcctgggcccaccccagaagaggcgcccccggcagcgccgtgagactgctggacagaagcagacccgccgtgagcgtgaccatcggcaccagcgagatgaacgccttcctggacgaccccgagttcgccgacatcatgctgagagccgagcaggccatcgaggtgggcatcttccccgagagaatcagccagggcagcagcggcagctacttcgtgaaggaccccaagagaaagatcatcggcgtgttcaagcccaagagcgaggagccctacggccagctgaaccccaagtggaccaagtacgtgcacaaggtgtgctgcccctgctgcttcggcagaggctgcctgatccccaaccagggctacctgagcgaggccggcgcctacctggtggacaacaagctgcacctgagcatcgtgcccaagaccaaggtggtgtggctggtgagcgagaccttcaactacaacgccatcgacagagccaagagcagaggcaagaagtacgccctggagaaggtgcccaaggtgggcagaaagttccacagaatcggcctgccccccaagatcggcagcttccagctgttcgtggagggctacaaggaggccgagtactggctgagaaagttcgaggccgaccccctgcccgagaacatcagaaagcagttccagagccagttcgagagactggtgatcctggactacatcatcagaaacaccgacagaggcaacgacaactggctggtgagatacgagaagcagaagtgcgagaaggagatcgaccacaaggagagcaagtggatcgacgacgaggagttcctgatcaagatcgccgccatcgacaacggcctggccttccccttcaagcaccccgacgagtggagagcctaccccttccactgggcctggctgccccaggccaaggtgcccttcagcgaggagatcagaaacctgatcctgccctacatcagcgacatgaacttcgtgcaggacctgtgcgaggacctgtacgagctgttcaagaccgacaagggcttcgacaaggccaccttcgagagccagatgagcgtgatgagaggccagatcctgaacctgacccaggccctgagagacggcaagagccccttccagctggtgcagatcccctgcgtgatcgtggagagaagccagggcggcagccagggcagaatcgtgcacctgagcaacagcttcacccagaccgtgaactgcagaaagcccttcttcagcagctggtag

SEQ ID NO: 92983 - DNA, 6135 bp, synthetic construct; identical to SEQ ID NO: 92978
  misc_feature 1..6135: note = Description of Artificial Sequence: Synthetic coding sequence
  source 1..6135: mol_type = other DNA

SEQ ID NO: 92984 - DNA, 2565 bp, synthetic construct
  misc_feature 1..2565: note = Description of Artificial Sequence: Synthetic coding sequence
  source 1..2565: mol_type = other DNA
atgagagagatggccggcgcctggcacatgaccgtggagcagaagttcggcctgttcagcgccgagatcaaggaggccgaccccctggccgccagcgaggccagccagcccaagccctgcccccccgaggtgaccccccactacatctggatcgacttcctggtgcagagattcgagatcgccaagtactgcagcagcgaccaggtggagatcttcagcagcctgctgcagagaagcatgagcctgaacatcggcggcgccaagggcagcatgaacagacacgtggccgccatcggccccagattcaagctgctgaccctgggcctgagcctgctgcacgccgacgtggtgcccaacgccaccatcagaaacgtgctgagagagaagatctacagcaccgccttcgactacttcagctgcccccccaagttccccacccagggcgagaagagactgagagaggacatcagcatcatgatcaagttctggaccgccatgttcagcgacaagaagtacctgaccgccagccagctggtgccccccgacaaccaggacaccagaagcaacctggacatcaccgtgggcagcagacagcaggccacccagggctggatcaacacctaccccctgagcagcggcatgagcaccatcagcaagaagagcggcatgagcaagaagaccaacagaggcagccagctgcacaagtactacatgaagagaagaaccctgctgctgagcctgctggccaccgagatcgagagactgatcacctggtacaaccccctgagcgcccccgagctggagctggaccaggccggcgagaacagcgtggccaactggagaagcaagtacatcagcctgagcgagaagcagtggaaggacaacgtgaacctggcctggagcatcagcccctacctggccgtgcagctgcccgccagattcaagaacaccgaggccatcggcaacgaggtgaccagactggtgagactggaccccggcgccgtgagcgacgtgcccgaggccatcaagttcctggtgacctggcacaccatcgacgccgacgcccccgagctgagccacgtgctgtgctgggcccccaccgacccccccaccggcctgagctacttcagcagcatgtaccccccccaccccctgaccgcccagtacggcgtgaaggtgctgagaagcttcccccccgacgccatcctgttctacatcccccagatcgtgcaggccctgagatacgacaagatgggctacgtgagagagtacatcctgtgggccgccagcaagagccagctgctggcccaccagttcatctggaacatgaagaccaacatctacctggacgaggagggccaccagaaggaccccgacatcggcgacctgctggaccagctggtggaggagatcaccggcagcctgagcggccccgccaaggacttctaccagagagagttcgacttcttcaacaagatcaccaacgtgagcgccatcatcaagccctaccccaagggcgacgagagaaagaaggcctgcctgagcgccctgagcgaggtgaaggtgcagcccggctgctacctgcccagcaaccccgaggccatcgtgctggacatcgactacaagagcggcacccccatgcagagcgccgccaaggccccctacctggccaagttcaaggtgaagagatgcggcgtgagcgagctggagaaggagggcctgagatgcagaagcgacagcgaggacgagtgcagcacccaggaggccgacggccagaagatcagctggcaggccgccatcttcaaggtgggcgacgactgcagacaggacatgctggccctgcagatcatcgacctgttcaagaacatcttccagctggtgggcctggacctgttcgtgttcccctacagagtggtggccaccgcccccggctgcggcgtgatcgagtgcatccccgactgcaccagcagagaccagctgggcagacagaccgacttcggcatgtacgactacttcaccagacagtacggcgacgagagcaccctggccttccagcaggccagatacaacttcatcagaagcatggccgcctacagcctgctgctgttcctgctgcagatcaaggacagacacaacggcaacatcatgctggacaagaagggccacatcatccacatcgacttcggcttcatgttcgagagcagccccggcggcaacctgggctgggagcccgacatcaagctgaccgacgagatggtgatgatcatgggcggcaagatggaggccacccccttcaagtggttcatggagatgtgcgtgagaggctacctggccgtgagaccctacatggacgccgtggtgagcctggtgaccctgatgctggacaccggcctgccctgcttcagaggccagaccatcaagctgctgaagcacagattcagccccaacatgaccgagagagaggccgccaacttcatcatgaaggtgatccagagctgcttcctgagcaacagaagcagaacctacgacatgatccagtactaccagaacgacatcccctactag

SEQ ID NO: 92985 - DNA, 264 bp, synthetic construct
  misc_feature 1..264: note = Description of Artificial Sequence: Synthetic coding sequence
  source 1..264: mol_type = other DNA
atgtgccccgtggacttccacggcatcttccagctggacgagagaagaagagacgccgtgatcgccctgggcatcttcctgatcgagagcgacctgcagcacaaggactgcgtggtgccctacctgctgagactgctgaagggcctgcccaaggtgtactgggtggaggagagcaccgccagaaagggcagaggcgccctgcccgtggccgagagcttcagcttctgcctggtgaccctgctgagcgacgtggcctacagatag

SEQ ID NO: 92986 - DNA, 1959 bp, synthetic construct
  misc_feature 1..1959: note = Description of Artificial Sequence: Synthetic coding sequence
  source 1..1959: mol_type = other DNA
atgagcggccagagcctgaccgacagaatcaccgccgcccagcacagcgtgaccggcagcgccgtgagcaagaccgtgtgcaaggccaccacccacgagatcatgggccccaagaagaagcacctggactacctgatccagtgcaccaacgagatgaacgtgaacatcccccagctggccgacagcctgttcgagagaaccaccaacagcagctgggtggtggtgttcaagagcctgatcaccacccaccacctgatggtgtacggcaacgagagattcatccagtacctggccagcagaaacaccctgttcaacctgagcaacttcctggacaagagcggcctgcagggctacgacatgagcaccttcatcagaagatacagcagatacctgaacgagaaggccgtgagctacagacaggtggccttcgacttcaccaaggtgaagagaggcgccgacggcgtgatgagaaccatgaacaccgagaagctgctgaagaccgtgcccatcatccagaaccagatggacgccctgctggacttcaacgtgaacagcaacgagctgaccaacggcgtgatcaacgccgccttcatgctgctgttcaaggacgccatcagactgttcgccgcctacaacgagggcatcatcaacctgctggagaagtacttcgacatgaagaagaaccagtgcaaggagggcctggacatctacaagaagttcctgaccagaatgaccagaatcagcgagttcctgaaggtggccgagcaggtgggcatcgacagaggcgacatccccgacctgagccaggcccccagcagcctgctggacgccctggagcagcacctggccagcctggagggcaagaagatcaaggacagcaccgccgccagcagagccaccaccctgagcaacgccgtgagcagcctggccagcaccggcctgagcctgaccaaggtggacgagagagagaagcaggccgccctggaggaggagcaggccagactgaaggccctgaaggagcagagactgaaggagctggccaagaagccccacaccagcctgaccaccgccgccagccccgtgagcaccagcgccggcggcatcatgaccgcccccgccatcgacatcttcagcacccccagcagcagcaacagcaccagcaagctgcccaacgacctgctggacctgcagcagcccaccttccaccccagcgtgcaccccatgagcaccgccagccaggtggccagcacctggggcgaccccttcagcgccaccgtggacgccgtggacgacgccatccccagcctgaaccccttcctgaccaagagcagcggcgacgtgcacctgagcatcagcagcgacgtgagcaccttcaccaccagaacccccacccacgagatgttcgtgggcttcacccccagccccgtggcccagccccaccccagcgccggcctgaacgtggacttcgagagcgtgttcggcaacaagagcaccaacgtgatcgtggacagcggcggcttcgacgagctgggcggcctgctgaagcccaccgtggccagccagaaccagaacctgcccgtggccaagctgccccccagcaagctggtgagcgacgacctggacagcagcctggccaacctggtgggcaacctgggcatcggcaacggcaccaccaagaacgacgtgaactggagccagcccggcgagaagaagctgaccggcggcagcaactggcagcccaaggtggcccccaccaccgcctggaacgccgccaccatggccccccccgtgatggcctaccccgccaccacccccaccggcatgatcggctacggcatccccccccagatgggcagcgtgcccgtgatgacccagcccaccctgatctacagccagcccgtgatgagaccccccaaccccttcggccccgtgagcggcgcccagatccagttcatgtag

SEQ ID NO: 92987 - DNA, 1959 bp, synthetic construct; identical to SEQ ID NO: 92986
  misc_feature 1..1959: note = Description of Artificial Sequence: Synthetic coding sequence
  source 1..1959: mol_type = other DNA

SEQ ID NO: 92988 - DNA, 1938 bp, synthetic construct
  misc_feature 1..1938: note = Description of Artificial Sequence: Synthetic coding sequence
  source 1..1938: mol_type = other DNA
atgagcggccagagcctgaccgacagaatcaccgccgcccagcacagcgtgaccggcagcgccgtgagcaagaccgtgtgcaaggccaccacccacgagatcatgggccccaagaagaagcacctggactacctgatccagtgcaccaacgagatgaacgtgaacatcccccagctggccgacagcctgttcgagagaaccaccaacagcagctgggtggtggtgttcaagagcctgatcaccacccaccacctgatggtgtacggcaacgagagattcatccagtacctggccagcagaaacaccctgttcaacctgagcaacttcctggacaagagcggcctgcagggctacgacatgagcaccttcatcagaagatacagcagatacctgaacgagaaggccgtgagctacagacaggtggccttcgacttcaccaaggtgaagagaggcgccgacggcgtgatgagaaccatgaacaccgagaagctgctgaagaccgtgcccatcatccagaaccagatggacgccctgctggacttcaacgtgaacagcaacgagctgaccaacggcgtgatcaacgccgccttcatgctgctgttcaaggacgccatcagactgttcgccgcctacaacgagggcatcatcaacctgctggagaagtacttcgacatgaagaagaaccagtgcaaggagggcctggacatctacaagaagttcctgaccagaatgaccagaatcagcgagttcctgaaggtggccgagcaggtgggcatcgacagaggcgacatccccgacctgagccaggcccccagcagcctgctggacgccctggagcagcacctggccagcctggagggcaagaagatcaaggacagcaccgccgccagcagagccaccaccctgagcaacgccgtgagcagcctggccagcaccggcctgagcctgaccaaggtggacgagagagagaagcaggccgccctggaggaggagcaggccagactgaaggccctgaaggagcagagactgaaggagctggccaagaagccccacaccagcctgaccaccgccgccagccccgtgagcaccagcgccggcggcatcatgaccgcccccgccatcgacatcttcagcacccccagcagcagcaacagcaccagcaagctgcccaacgacctgctggacctgcagcagcccaccttccaccccagcgtgcaccccatgagcaccgccagccaggtggccagcacctggggcgacgccgtggacgacgccatccccagcctgaaccccttcctgaccaagagcagcggcgacgtgcacctgagcatcagcagcgacgtgagcaccttcaccaccagaacccccacccacgagatgttcgtgggcttcacccccagccccgtggcccagccccaccccagcgccggcctgaacgtggacttcgagagcgtgttcggcaacaagagcaccaacgtgatcgtggacagcggcggcttcgacgagctgggcggcctgctgaagcccaccgtggccagccagaaccagaacctgcccgtggccaagctgccccccagcaagctggtgagcgacgacctggacagcagcctggccaacctggtgggcaacctgggcatcggcaacggcaccaccaagaacgacgtgaactggagccagcccggcgagaagaagctgaccggcggcagcaactggcagcccaaggtggcccccaccaccgcctggaacgccgccaccatggccccccccgtgatggcctaccccgccaccacccccaccggcatgatcggctacggcatccccccccagatgggcagcgtgcccgtgatgacccagcccaccctgatctacagccagcccgtgatgagaccccccaaccccttcggccccgtgagcggcgcccagatccagttcatgtag

SEQ ID NO: 92989 - DNA, 1833 bp, synthetic construct
  misc_feature 1..1833: note = Description of Artificial Sequence: Synthetic coding sequence
  source 1..1833: mol_type = other DNA
atgagcggccagagcctgaccgacagaatcaccgccgcccagcacagcgtgaccggcagcgccgtgagcaagaccgtgtgcaaggccaccacccacgagatcatgggccccaagaagaagcacctggactacctgatccagtgcaccaacgagatgaacgtgaacatcccccagctggccgacagcctgttcgagagaaccaccaacagcagctgggtggtggtgttcaagagcctgatcaccacccaccacctgatggtgtacggcaacgagagattcatccagtacctggccagcagaaacaccctgttcaacctgagcaacttcctggacaagagcggcctgcagggctacgacatgagcaccttcatcagaagatacagcagatacctgaacgagaaggccgtgagctacagacaggtggccttcgacttcaccaaggtgaagagaggcgccgacggcgtgatgagaaccatgaacaccgagaagctgctgaagaccgtgcccatcatccagaaccagatggacgccctgctggacttcaacgtgaacagcaacgagctgaccaacggcgtgatcaacgccgccttcatgctgctgttcaaggacgccatcagactgttcgccgcctacaacgagggcatcatcaacctgctggagaagtacttcgacatgaagaagaaccagtgcaaggagggcctggacatctacaagaagttcctgaccagaatgaccagaatcagcgagttcctgaaggtggccgagcaggtgggcatcgacagaggcgacatccccgacctgagccaggcccccagcagcctgctggacgccctggagcagcacctggccagcctggagggcaagaagatcaaggacagcaccgccgccagcagagccaccaccctgagcaacgccgtgagcagcctggccagcaccggcctgagcctgaccaaggtggacgagagagagaagcaggccgccctggaggaggagcaggccagactgaaggccctgaaggagcagagactgaaggagctggccaagaagccccacaccagcctgaccaccgccgccagccccgtgagcaccagcgccggcggcatcatgaccgcccccgccatcgacatcttcagcacccccagcagcagcaacagcaccagcaagctgcccaacgacctgctggacctgcagcagcccaccttccaccccagcgtgcaccccatgagcaccgccagccaggtggccagcacctggggcggcttcacccccagccccgtggcccagccccaccccagcgccggcctgaacgtggacttcgagagcgtgttcggcaacaagagcaccaacgtgatcgtggacagcggcggcttcgacgagctgggcggcctgctgaagcccaccgtggccagccagaaccagaacctgcccgtggccaagctgccccccagcaagctggtgagcgacgacctggacagcagcctggccaacctggtgggcaacctgggcatcggcaacggcaccaccaagaacgacgtgaactggagccagcccggcgagaagaagctgaccggcggcagcaactggcagcccaaggtggcccccaccaccgcctggaacgccgccaccatgaacggcatgcacttcccccagtacgccccccccgtgatggcctaccccgccaccacccccaccggcatgatcggctacggcatccccccccagatgggcagcgtgcccgtgatgacccagcccaccctgatctacagccagcccgtgatgagaccccccaaccccttcggccccgtgagcggcgcccagatccagttcatgtag

SEQ ID NO: 92990 - DNA, 1656 bp, synthetic construct
  misc_feature 1..1656: note = Description of Artificial Sequence: Synthetic coding sequence
  source 1..1656: mol_type = other DNA
atgaacgtgaacatcccccagctggccgacagcctgttcgagagaaccaccaacagcagctgggtggtggtgttcaagagcctgatcaccacccaccacctgatggtgtacggcaacgagagattcatccagtacctggccagcagaaacaccctgttcaacctgagcaacttcctggacaagagcggcctgcagggctacgacatgagcaccttcatcagaagatacagcagatacctgaacgagaaggccgtgagctacagacaggtggccttcgacttcaccaaggtgaagagaggcgccgacggcgtgatgagaaccatgaacaccgagaagctgctgaagaccgtgcccatcatccagaaccagatggacgccctgctggacttcaacgtgaacagcaacgagctgaccaacggcgtgatcaacgccgccttcatgctgctgttcaaggacgccatcagactgttcgccgcctacaacgagggcatcatcaacctgctggagaagtacttcgacatgaagaagaaccagtgcaaggagggcctggacatctacaagaagttcctgaccagaatgaccagaatcagcgagttcctgaaggtggccgagcaggtgggcatcgacagaggcgacatccccgacctgagccaggcccccagcagcctgctggacgccctggagcagcacctggccagcctggagggcaagaagatcaaggacagcaccgccgccagcagagccaccaccctgagcaacgccgtgagcagcctggccagcaccggcctgagcctgaccaaggtggacgagagagagaagcaggccgccctggaggaggagcaggccagactgaaggccctgaaggagcagagactgaaggagctggccaagaagccccacaccagcctgaccaccgccgccagccccgtgagcaccagcgccggcggcatcatgaccgcccccgccatcgacatcttcagcacccccagcagcagcaacagcaccagcaagctgcccaacgacctgctggacctgcagcagcccaccttccaccccagcgtgcaccccatgagcaccgccagccaggtggccagcacctggggcggcttcacccccagccccgtggcccagccccaccccagcgccggcctgaacgtggacttcgagagcgtgttcggcaacaagagcaccaacgtgatcgtggacagcggcggcttcgacgagctgggcggcctgctgaagcccaccgtggccagccagaaccagaacctgcccgtggccaagctgccccccagcaagctggtgagcgacgacctggacagcagcctggccaacctggtgggcaacctgggcatcggcaacggcaccaccaagaacgacgtgaactggagccagcccggcgagaagaagctgaccggcggcagcaactggcagcccaaggtggcccccaccaccgcctggaacgccgccaccatggccccccccgtgatggcctaccccgccaccacccccaccggcatgatcggctacggcatccccccccagatgggcagcgtgcccgtgatgacccagcccaccctgatctacagccagcccgtgatgagaccccccaaccccttcggccccgtgagcggcgcccagatccagttcatgtag

SEQ ID NO: 92991 - DNA, 1455 bp, synthetic construct
  misc_feature 1..1455: note = Description of Artificial Sequence: Synthetic coding sequence
  source 1..1455: mol_type = other DNA
atggcctgcagaggcggcgccggcaacggccacagagccagcgccaccctgagcagagtgagccccggcagcctgtacacctgcagaaccagaacccacaacatctgcatggtgagcgacttcttctaccccaacatgggcggcgtggagagccacatctaccagctgagccagtgcctgatcgagagaggccacaaggtgatcatcgtgacccacgcctacggcaacagaaagggcatcagatacctgaccagcggcctgaaggtgtactacctgcccctgaaggtgatgtacaaccagagcaccgccaccaccctgttccacagcctgcccctgctgagatacatcttcgtgagagagagagtgaccatcatccacagccacagcagcttcagcgccatggcccacgacgccctgttccacgccaagaccatgggcctgcagaccgtgttcaccgaccacagcctgttcggcttcgccgacgtgagcagcgtgctgaccaacaagctgctgaccgtgagcctgtgcgacaccaaccacatcatctgcgtgagctacaccagcaaggagaacaccgtgctgagagccgccctgaaccccgagatcgtgagcgtgatccccaacgccgtggaccccaccgacttcacccccgaccccttcagaagacacgacagcatcaccatcgtggtggtgagcagactggtgtacagaaagggcatcgacctgctgagcggcatcatccccgagctgtgccagaagtaccccgacctgaacttcatcatcggcggcgagggccccaagagaatcatcctggaggaggtgagagagagataccagctgcacgacagagtgagactgctgggcgccctggagcacaaggacgtgagaaacgtgctggtgcagggccacatcttcctgaacaccagcctgaccgaggccttctgcatggccatcgtggaggccgccagctgcggcctgcaggtggtgagcaccagagtgggcggcatccccgaggtgctgcccgagaacctgatcatcctgtgcgagcccagcgtgaagagcctgtgcgagggcctggagaaggccatcttccagctgaagagcggcaccctgcccgcccccgagaacatccacaacatcgtgaagaccttctacacctggagaaacgtggccgagagaaccgagaaggtgtacgacagagtgagcgtggaggccgtgctgcccatggacaagagactggacagactgatcagccactgcggccccgtgaccggctacatcttcgccctgctggccgtgttcaacttcctgttcctgatcttcctgagatggatgacccccgacagcatcatcgacgtggccatcgacgccaccggccccagaggcgcctggaccaacaactacagccacagcaagagaggcggcgagaacaacgagatcagcgagaccagatag

SEQ ID NO: 92992 - DNA, 510 bp, synthetic construct
  misc_feature 1..510: note = Description of Artificial Sequence: Synthetic coding sequence
  source 1..510: mol_type = other DNA
atggccatcgtggaggccgccagctgcggcctgcaggtggtgagcaccagagtgggcggcatccccgaggtgctgcccgagaacctgatcatcctgtgcgagcccagcgtgaagagcctgtgcgagggcctggagaaggccatcttccagctgaagagcggcaccctgcccgcccccgagaacatccacaacatcgtgaagaccttctacacctggagaaacgtggccgagagaaccgagaaggtgtacgacagagtgagcgtggaggccgtgctgcccatggacaagagactggacagactgatcagccactgcggccccgtgaccggctacatcttcgccctgctggccgtgttcaacttcctgttcctgatcttcctgagatggatgacccccgacagcatcatcgacgtggccatcgacgccaccggccccagaggcgcctggaccaacaactacagccacagcaagagaggcggcgagaacaacgagatcagcgagaccagatag

SEQ ID NO: 92993 - DNA, 753 bp, synthetic construct
  misc_feature 1..753: note = Description of Artificial Sequence: Synthetic coding sequence
  source 1..753: mol_type = other DNA
atggagctgaccggcatcgacctgctgagcggcatcatccccgagctgtgccagaagtaccccgacctgaacttcatcatcggcggcgagggccccaagagaatcatcctggaggaggtgagagagagataccagctgcacgacagagtgagactgctgggcgccctggagcacaaggacgtgagaaacgtgctggtgcagggccacatcttcctgaacaccagcctgaccgaggccttctgcatggccatcgtggaggccgccagctgcggcctgcaggtggtgagcaccagagtgggcggcatccccgaggtgctgcccgagaacctgatcatcctgtgcgagcccagcgtgaagagcctgtgcgagggcctggagaaggccatcttccagctgaagagcggcaccctgcccgcccccgagaacatccacaacatcgtgaagaccttctacacctggagaaacgtggccgagagaaccgagaaggtgtacgacagagtgagcgtggaggccgtgctgcccatggacaagagactggacagactgatcagccactgcggccccgtgaccggctacatcttcgccctgctggccgtgttcaacttcctgttcctgatcttcctgagatggatgacccccgacagcatcatcgacgtggccatcgacgccaccggccccagaggcgcctggaccaacaactacagccacagcaagagaggcggcgagaacaacgagatcagcgagaccagatag

SEQ ID NO: 92994 - DNA, 1665 bp, synthetic construct
  misc_feature 1..1665: note = Description of Artificial Sequence: Synthetic coding sequence
  source 1..1665: mol_type = other DNA
atgagaagacccctgagcaagtgcggcatggagcccggcggcggcgacgccagcctgaccctgcacggcctgcagaacagaagccacggcaagatcaagctgagaaagagaaagagcaccctgtacttcaacacccaggagaagagcgccagaagaagaggcgacctgctgggcgagaacatctacctgctgctgttcaccatcgccctgagaatcctgaactgcttcctggtgcagaccagcttcgtgcccgacgagtactggcagagcctggaggtgagccaccacatggtgttcaactacggctacctgacctgggagtggaccgagagactgagaagctacacctaccccctgatcttcgccagcatctacaagatcctgcacctgctgggcaaggacagcgtgcagctgctgatctggatccccagactggcccaggccctgctgagcgccgtggccgacgtgagactgtacagcctgatgaagcagctggagaaccaggaggtggccagatgggtgttcttctgccagctgtgcagctggttcacctggtactgctgcaccagaaccctgaccaacaccatggagaccgtgctgaccatcatcgccctgttctactaccccctggagggcagcaagagcatgaacagcgtgaagtacagcagcctggtggccctggccttcatcatcagacccaccgccgtgatcctgtggacccccctgctgttcagacacttctgccaggagcccagaaagctggacctgatcctgcaccacttcctgcccgtgggcttcgtgaccctgagcctgagcctgatgatcgacagaatcttcttcggccagtggaccctggtgcagttcaacttcctgaagttcaacgtgctgcagaactggggcaccttctacggcagccacccctggcactggtacttcagccagggcttccccgtgatcctgggcacccacctgcccttcttcatccacggctgctacctggcccccaagagatacagaatcctgctggtgaccgtgctgtggaccctgctggtgtacagcatgctgagccacaaggagttcagattcatctaccccgtgctgcccttctgcatggtgttctgcggctacagcctgacccacctgaagacctggaagaagcccgccctgagcttcctgttcctgagcaacctgttcctggccctgtacaccggcctggtgcaccagagaggcaccctggacgtgatgagccacatccagaaggtgtgctacaacaaccccaacaagagcagcgccagcatcttcatcatgatgccctgccacagcaccccctactacagccacgtgcactgccccctgcccatgagattcctgcagtgcccccccgacctgaccggcaagagccactacctggacgaggccgacgtgttctacctgaaccccctgaactggctgcacagagagttccacgacgacgccagcctgcccacccacctgatcaccttcagcatcctggaggaggagatcagcgccttcctgatcagcagcaactacaagagaaccgccgtgttcttccacacccacctgcccgagggcagaatcggcagccacatctacgtgtacgagagaaagctgaagggcaagttcaacatgaagatgaagttctag

SEQ ID NO: 92995 - DNA, 1080 bp, synthetic construct
  misc_feature 1..1080: note = Description of Artificial Sequence: Synthetic coding sequence
  source 1..1080: mol_type = other DNA
atggagaccgtgctgaccatcatcgccctgttctactaccccctggagggcagcaagagcatgaacagcgtgaagtacagcagcctggtggccctggccttcatcatcagacccaccgccgtgatcctgtggacccccctgctgttcagacacttctgccaggagcccagaaagctggacctgatcctgcaccacttcctgcccgtgggcttcgtgaccctgagcctgagcctgatgatcgacagaatcttcttcggccagtggaccctggtgcagttcaacttcctgaagttcaacgtgctgcagaactggggcaccttctacggcagccacccctggcactggtacttcagccagggcttccccgtgatcctgggcacccacctgcccttcttcatccacggctgctacctggcccccaagagatacagaatcctgctggtgaccgtgctgtggaccctgctggtgtacagcatgctgagccacaaggagttcagattcatctaccccgtgctgcccttctgcatggtgttctgcggctacagcctgacccacctgaagacctggaagaagcccgccctgagcttcctgttcctgagcaacctgttcctggccctgtacaccggcctggtgcaccagagaggcaccctggacgtgatgagccacatccagaaggtgtgctacaacaaccccaacaagagcagcgccagcatcttcatcatgatgccctgccacagcaccccctactacagccacgtgcactgccccctgcccatgagattcctgcagtgcccccccgacctgaccggcaagagccactacctggacgaggccgacgtgttctacctgaaccccctgaactggctgcacagagagttccacgacgacgccagcctgcccacccacctgatcaccttcagcatcctggaggaggagatcagcgccttcctgatcagcagcaactacaagagaaccgccgtgttcttccacacccacctgcccgagggcagaatcggcagccacatctacgtgtacgagagaaagctgaagggcaagttcaacatgaagatgaagttctag

SEQ ID NO: 92996 - DNA, 894 bp, synthetic construct
  misc_feature 1..894: note = Description of Artificial Sequence: Synthetic coding sequence
  source 1..894: mol_type = other DNA
atgtacgcccagcccgtgaccaacaccaaggaggtgaagtggcagaaggtgctgtacgagagacagcccttccccgacaactacgtggacagaagattcctggaggagctgagaaagaacatccacgccagaaagtaccagtactgggccgtggtgttcgagagcagcgtggtgatccagcagctgtgcagcgtgtgcgtgttcgtggtgatctggtggtacatggacgagggcctgctggccccccactggctgctgggcaccggcctggccagcagcctgatcggctacgtgctgttcgacctgatcgacggcggcgagggcagaaagaagagcggccagaccagatgggccgacctgaagagcgccctggtgttcatcaccttcacctacggcttcagccccgtgctgaagaccctgaccgagagcgtgagcaccgacaccatctacgccatgagcgtgttcatgctgctgggccacctgatcttcttcgactacggcgccaacgccgccatcgtgagcagcaccctgagcctgaacatggccatcttcgccagcgtgtgcctggccagcagactgcccagaagcctgcacgccttcatcatggtgaccttcgccatccagatcttcgccctgtggcccatgctgcagaagaagctgaaggcctgcacccccagaagctacgtgggcgtgaccctgctgttcgccttcagcgccgtgggcggcctgctgagcatcagcgccgtgggcgccgtgctgttcgccctgctgctgatgagcatcagctgcctgtgccccttctacctgatcagactgcagctgttcaaggagaacatccacggcccctgggacgaggccgagatcaaggaggacctgagcagattcctgagctag

SEQ ID NO: 92997 - DNA, 894 bp, synthetic construct; identical to SEQ ID NO: 92996
  misc_feature 1..894: note = Description of Artificial Sequence: Synthetic coding sequence
  source 1..894: mol_type = other DNA

SEQ ID NO: 92998 - DNA, 894 bp, synthetic construct; identical to SEQ ID NO: 92996
  misc_feature 1..894: note = Description of Artificial Sequence: Synthetic coding sequence
  source 1..894: mol_type = other DNA

SEQ ID NO: 92999 - DNA, 660 bp, synthetic construct
  misc_feature 1..660: note = Description of Artificial Sequence: Synthetic coding sequence
  source 1..660: mol_type = other DNA
atgaaggacaacgacatcaagagactgctgtacacccacctgctgtgcatcttcagcatcatcctgagcgtgttcatccccagcctgttcctggagaacttcagcatcctggagacccacctgacctggctgtgcatctgcagcggcttcgtgaccgccgtgaacctggtgctgtacctggtggtgaagcccaacaccagcagcaagagaagcagcctgagccacaaggtgaccggcttcctgaagtgctgcatctacttcctgatgagctgcttcagcttccacgtgatcttcgtgctgtacggcgcccccctgatcgagctggccctggagaccttcctgttcgccgtgatcctgagcaccttcaccaccgtgccctgcctgtgcctgctgggccccaacctgaaggcctggctgagagtgttcagcagaaacggcgtgaccagcatctgggagaacagcctgcagatcaccaccatcagcagcttcgtgggcgcctggctgggcgccctgcccatccccctggactgggagagaccctggcaggtgtggcccatcagctgcaccctgggcgccaccttcggctacgtggccggcctggtgatcagccccctgtggatctactggaacagaaagcagctgacctacaagaacaactag

SEQ ID NO: 93000 - DNA, 621 bp, synthetic construct
  misc_feature 1..621: note = Description of Artificial Sequence: Synthetic coding sequence
  source 1..621: mol_type = other DNA
atgaaggacaacgacatcaagagactgctgtacacccacctgctgtgcatcttcagcatcatcctgagcgtgttcatccccagcctgttcctggagaacttcagcatcctggagacccacctgacctggctgtgcatctgcagcggcttcgtgaccgccgtgaacctggtgctgtacctggtggtgaagcccaacaccagcagcaagagaagcagcctgagccacaaggtgaccggcttcctgaagtgctgcatctacttcctgatgagctgcttcagcttccacgtgatcttcgtgctgtacggcgcccccctgatcgagctggccctggagaccttcctgttcgccgtgatcctgagcaccttcaccaccgtgccctgcctgtgcctgctgggccccaacctgaaggcctggctgagagtgttcagcagaaacggcgtgaccagcatctgggagaacagcctgcagatcaccaccatcagcagcttcgtgggcgcctggctgggcgccctgcccatccccctggactgggagagaccctggcagatgaccgtggagagaaagagaagcacctacagaagcctgcacgtgccctgcagaggcctgggcaccgtgaagtag

SEQ ID NO: 93001 - DNA, 150 bp, synthetic construct
  misc_feature 1..150: note = Description of Artificial Sequence: Synthetic coding sequence
  source 1..150: mol_type = other DNA
atgaaggacaacgacatcaagagactgctgtacacccacctgctgtgcatcttcagcatcatcctgagcgtgttcatccccagcctgttcctggagaacttcagcatcctggagacccacctgacctggctgtgcatctgcagcggctag

SEQ ID NO: 93002 - DNA, 999 bp, synthetic construct
  misc_feature 1..999: note = Description of Artificial Sequence: Synthetic coding sequence
  source 1..999: mol_type = other DNA
atggccgtgaccgacagcctgagcagagccgccaccgtgctggccaccgtgctgctgctgagcttcggcagcgtggccgccagccacatcgaggaccaggccgagcagttcttcagaagcggccacaccaacaactgggccgtgctggtgtgcaccagcagattctggttcaactacagacacgtggccaacaccctgagcgtgtacagaagcgtgaagagactgggcatccccgacagccacatcgtgctgatgctggccgacgacatggcctgcaaccccagaaaccccaagcccgccaccgtgttcagccacaagaacatggagctgaacgtgtacggcgacgacgtggaggtggactacagaagctacgaggtgaccgtggagaacttcctgagagtgctgaccggcagaatcccccccagcacccccagaagcaagagactgctgagcgacgacagaagcaacatcctgatctacatgaccggccacggcggcaacggcttcctgaagttccaggacagcgaggagatcaccaacatcgagctggccgacgccttcgagcagatgtggcagaagagaagatacaacgagctgctgttcatcatcgacacctgccagggcgccagcatgtacgagagattctacagccccaacatcatggccctggccagcagccaggtgggcgaggacagcctgagccaccagcccgaccccgccatcggcgtgcacctgatggacagatacaccttctacgtgctggagttcctggaggagatcaaccccgccagccagaccaacatgaacgacctgttccaggtgtgccccaagagcctgtgcgtgagcacccccggccacagaaccgacctgttccagagagaccccaagaacgtgctgatcaccgacttcttcggcagcgtgagaaaggtggagatcaccaccgagaccatcaagctgcagcaggacagcgagatcatggagagcagatacagcagctag

SEQ ID NO: 93003 - DNA, 1188 bp, synthetic construct
  misc_feature 1..1188: note = Description of Artificial Sequence: Synthetic coding sequence
  source 1..1188: mol_type = other DNA
atggccgtgaccgacagcctgagcagagccgccaccgtgctggccaccgtgctgctgctgagcttcggcagcgtggccgccagccacatcgaggaccaggccgagcagttcttcagaagcggccacaccaacaactgggccgtgctggtgtgcaccagcagattctggttcaactacagacacgtggccaacaccctgagcgtgtacagaagcgtgaagagactgggcatccccgacagccacatcgtgctgatgctggccgacgacatggcctgcaaccccagaaaccccaagcccgccaccgtgttcagccacaagaacatggagctgaacgtgtacggcgacgacgtggaggtggactacagaagctacgaggtgaccgtggagaacttcctgagagtgctgaccggcagaatcccccccagcacccccagaagcaagagactgctgagcgacgacagaagcaacatcctgatctacatgaccggccacggcggcaacggcttcctgaagttccaggacagcgaggagatcaccaacatcgagctggccgacgccttcgagcagatgtggcagaagagaagatacaacgagctgctgttcatcatcgacacctgccagggcgccagcatgtacgagagattctacagccccaacatcatggccctggccagcagccaggtgggcgaggacagcctgagccaccagcccgaccccgccatcggcgtgcacctgatggacagatacaccttctacgtgctggagttcctggaggagatcaaccccgccagccagaccaacatgaacgacctgttccaggtgtgccccaagagcctgtgcgtgagcacccccggccacagaaccgacctgttccagagagaccccaagaacgtgctgatcaccgacttcttcggcagcgtgagaaaggtggagatcaccaccgagaccatcaagctgcagcaggacagcgagatcatggagagcagctacaaggaggaccagatggacgagaagctgatggagcccctgaagtacgccgagcagctgcccgtggcccagatcatccaccagaagcccaagctgaaggactggcacccccccggcggcttcatcctgggcctgtgggccctgatcatcatggtgttcttcaagacctacggcatcaagcacatgaagttcatcttctag

SEQ ID NO: 93004 - DNA, 960 bp, synthetic construct
  misc_feature 1..960: note = Description of Artificial Sequence: Synthetic coding sequence
  source 1..960: mol_type = other DNA
atggccgtgaccgacagcctgagcagagccgccaccgtgctggccaccgtgctgctgctgagcttcggcagcgtggccgccagccacatcgaggaccaggccgagcagttcttcagaagcggccacaccaacaactgggccgtgctggtgaccgtggagaacttcctgagagtgctgaccggcagaatcccccccagcacccccagaagcaagagactgctgagcgacgacagaagcaacatcctgatctacatgaccggccacggcggcaacggcttcctgaagttccaggacagcgaggagatcaccaacatcgagctggccgacgccttcgagcagatgtggcagaagagaagatacaacgagctgctgttcatcatcgacacctgccagggcgccagcatgtacgagagattctacagccccaacatcatggccctggccagcagccaggtgggcgaggacagcctgagccaccagcccgaccccgccatcggcgtgcacctgatggacagatacaccttctacgtgctggagttcctggaggagatcaaccccgccagccagaccaacatgaacgacctgttccaggtgtgccccaagagcctgtgcgtgagcacccccggccacagaaccgacctgttccagagagaccccaagaacgtgctgatcaccgacttcttcggcagcgtgagaaaggtggagatcaccaccgagaccatcaagctgcagcaggacagcgagatcatggagagcagctacaaggaggaccagatggacgagaagctgatggagcccctgaagtacgccgagcagctgcccgtggcccagatcatccaccagaagcccaagctgaaggactggcacccccccggcggcttcatcctgggcctgtgggccctgatcatcatggtgttcttcaagacctacggcatcaagcacatgaagttcatcttctag

SEQ ID NO: 93005 - DNA, 906 bp, synthetic construct
  misc_feature 1..906: note = Description of Artificial Sequence: Synthetic coding sequence
  source 1..906: mol_type = other DNA
atggccgtgaccgacagcctgagcagagccgccaccgtgctggccaccgtgctgctgctgagcttcggcagcgtggccgccagccacatcgaggtgaccgtggagaacttcctgagagtgctgaccggcagaatcccccccagcacccccagaagcaagagactgctgagcgacgacagaagcaacatcctgatctacatgaccggccacggcggcaacggcttcctgaagttccaggacagcgaggagatcaccaacatcgagctggccgacgccttcgagcagatgtggcagaagagaagatacaacgagctgctgttcatcatcgacacctgccagggcgccagcatgtacgagagattctacagccccaacatcatggccctggccagcagccaggtgggcgaggacagcctgagccaccagcccgaccccgccatcggcgtgcacctgatggacagatacaccttctacgtgctggagttcctggaggagatcaaccccgccagccagaccaacatgaacgacctgttccaggtgtgccccaagagcctgtgcgtgagcacccccggccacagaaccgacctgttccagagagaccccaagaacgtgctgatcaccgacttcttcggcagcgtgagaaaggtggagatcaccaccgagaccatcaagctgcagcaggacagcgagatcatggagagcagctacaaggaggaccagatggacgagaagctgatggagcccctgaagtacgccgagcagctgcccgtggcccagatcatccaccagaagcccaagctgaaggactggcacccccccggcggcttcatcctgggcctgtgggccctgatcatcatggtgttcttcaagacctacggcatcaagcacatgaagttcatcttctag

SEQ ID NO: 93006 - DNA, 558 bp, synthetic construct
  misc_feature 1..558: note = Description of Artificial Sequence: Synthetic coding sequence
  source 1..558: mol_type = other DNA
atgggcaagaagcagaacaagaagaaggtggaggaggtgctggaggaggaggaggaggagtacgtggtggagaaggtgctggacagaagagtggtgaagggcaaggtggagtacctgctgaagtggaagggcttcagcgacgaggacaacacctgggagcccgaggagaacctggactgccccgacctgatcgccgagttcctgcagagccagaagaccgcccacgagaccgacaagagcgagggcggcaagagaaaggccgacagcgacagcgaggacaagggcgaggagagcaagcccaagaagaagaaggaggagagcgagaagcccagaggcttcgccagaggcctggagcccgagagaatcatcggcgccaccgacagcagcggcgagctgatgttcctgatgaagtggaagaacagcgacgaggccgacctggtgcccgccaaggaggccaacgtgaagtgcccccaggtggtgatcagcttctacgaggagagactgacctggcacagctaccccagcgaggacgacgacaagaaggacgacaagaactag

SEQ ID NO: 93007 - DNA, 735 bp, synthetic construct
  misc_feature 1..735: note = Description of Artificial Sequence: Synthetic coding sequence
  source 1..735: mol_type = other DNA
atggaggccatgtggctgctgtgcgtggccctggccgtgctggcctggggcttcctgtgggtgtgggacagcagcgagagaatgaagagcagagagcagggcggcagactgggcgccgagagcagaaccctgctggtgatcgcccaccccgacgacgaggccatgttcttcgcccccaccgtgctgggcctggccagactgagacactgggtgtacctgctgtgcttcagcgccggcaactactacaaccagggcgagaccagaaagaaggagctgctgcagagctgcgacgtgctgggcatccccctgagcagcgtgatgatcatcgacaacagagacttccccgacgaccccggcatgcagtgggacaccgagcacgtggccagagtgctgctgcagcacatcgaggtgaacggcatcaacctggtggtgaccttcgacgccggcggcgtgagcggccacagcaaccacatcgccctgtacgccgccgtgagagtgctgtgcgcccacgccagcgtgtgcgagtgcgccgcccaggtgcacctgcccagcggcagcgccctggtgagcgccagctacgccggctgccccctgagagcccagcagcagagaagcggcaccggccaggagagccacgtgctgcccccccagcccgcccccctggtgcccccccccctgcactacctgctgcccgtgcacgagaaccagctgaccgagctgcccctgaagccctag

SEQ ID NO: 93008 - DNA, 1272 bp, synthetic construct
  misc_feature 1..1272: note = Description of Artificial Sequence: Synthetic coding sequence
  source 1..1272: mol_type = other DNA
atgggcagcaccaagcactggggcgagtggctgctgaacctgaaggtggcccccgccggcgtgttcggcgtggccttcctggccagagtggccctggtgttctacggcgtgttccaggacagaaccctgcacgtgagatacaccgacatcgactaccaggtgttcaccgacgccgccagattcgtgaccgagggcagaagcccctacctgagagccacctacagatacacccccctgctgggctggctgctgacccccaacatctacctgagcgagctgttcggcaagttcctgttcatcagctgcgacctgctgaccgccttcctgctgtacagactgctgctgctgaagggcctgggcagaagacaggcctgcggctactgcgtgttctggctgctgaaccccctgcccatggccgtgagcagcagaggcaacgccgacagcatcgtggccagcctggtgctgatggtgctgtacctgatcaagaagagactggtggcctgcgccgccgtgttctacggcttcgccgtgcacatgaagatctaccccgtgacctacatcctgcccatcaccctgcacctgctgcccgacagagacaacgacaagagcctgagacagttcagatacaccttccaggcctgcctgtacgagctgctgaagagactgtgcaacagagccgtgctgctgttcgtggccgtggccggcctgaccttcttcgccctgagcttcggcttctactacgagtacggctgggagttcctggagcacacctacttctaccacctgaccagaagagacatcagacacaacttcagcccctacttctacatgctgtacctgaccgccgagagcaagtggagcttcagcctgggcatcgccgccttcctgccccagctgatcctgctgagcgccgtgagcttcgcctactacagagacctggtgttctgctgcttcctgcacaccagcatcttcgtgaccttcaacaaggtgtgcaccagccagtacttcctgtggtacctgtgcctgctgcccctggtgatgcccctggtgagaatgccctggaagagagccgtggtgctgctgatgctgtggttcatcggccaggccatgtggctggcccccgcctacgtgctggagttccagggcaagaacaccttcctgttcatctggctggccggcctgttcttcctgctgatcaactgcagcatcctgatccagatcatcagccactacaaggaggagcccctgaccgagagaatcaagtacgactag

SEQ ID NO: 93009 - DNA, 2796 bp, synthetic construct
  misc_feature 1..2796: note = Description of Artificial Sequence: Synthetic coding sequence
  source 1..2796: mol_type = other DNA
atgctgctgttcttcaccctgggcctgctgatccacttcgtgttcttcgccagcatcttcgacatctacttcaccagccccctggtgcacggcatgaccccccagttcacccccctgcccccccccgccagaagactggtgctgttcgtggccgacggcctgagagccgacgccctgtacgagctggacgagaacggcaacagcagagcccccttcatcagaaacatcatcatgcacgagggcagctggggcatcagccacaccagagtgcccaccgagagcagacccggccacgtggccctgatcgccggcttctacgaggacgtgagcgccgtggccaagggctggaaggagaaccccgtggagttcgacagcctgttcaacgagagcaagtacacctggagctggggcagccccgacatcctgcccatgttcgccaagggcgccagcggcgaccacgtgtacacctacagctacgacgccaagagagaggacttcggcgcccaggacgccaccaagctggacacctgggtgttcgacaacgtgaaggacttcttccaccacgccagaaacaaccagagcctgttcagcaagatcaacgaggagaagatcgtgttcttcctgcacctgctgggcatcgacaccaacggccacgcccacagacccagcagcagagactacaagcacaacatcaagaaggtggacgacggcgtgaaggagatcgtgagcatgttcaaccacttctacggcaacgacggcaagaccaccttcatcttcaccagcgaccacggcatgaccgactggggcagccacggcgccggccaccccagcgagaccctgacccccctggtgacctggggcgccggcatcaagtacccccagagagtgagcgcccagcagttcgacgacgccttcctgaaggagtggagactggagaactggaagagactggacgtgaaccaggccgacatcgcccccctgatgaccagcctgatcggcgtgcccttccccctgaacagcgtgggcatcctgcccgtggactacctgaacaacaccgacctgttcaaggccgagagcatgttcaccaacgccgtgcagatcctggagcagttcaaggtgaagatgacccagaagaaggaggtgaccctgcccttcctgttcacccccttcaagctgctgagcgacagcaagcagttcaacatcctgagaaaggccagaagctacatcaagcacagaaagttcgacgaggtggtgagcctgtgcaaggagctgatccacctggccctgaagggcctgagctactaccacacctacgacagattcttcctgggcgtgaacgtggtgatcggcttcgtgggctggatcagctacgccagcctgctgatcatcaagagccacagcaacctgatcaagggcgtgagcaaggaggtgaagaagcccagccacctgctgccctgcagcttcgtggccatcggcatcctggtggccttcttcctgctgatccaggcctgcccctggacctactacgtgtacggcctgctgcccctgcccatctggtacgccgtgctgagagagttccaggtgatccaggacctggtggtgagcgtgctgacctaccccctgagccacttcgtgggctacctgctggccttcaccctgggcatcgaggtgctggtgctgagcttcttctacagatacatgctgaccgccggcctgaccgccttcgccgcctggcccttcctgaccagactgtggaccagagccaagatgaccagcctgagctggaccttcttcagcctgctgctggccgtgttccccctgatgcccgtggtgggcagaaagcccgacatcagcctggtgatgggcgccggcctgctggtgctgctgctgagcctgtgcgtggtgaccagcctgatgaagagaaaggacagcttcatcaaggaggagctgctggtgcacctgctgcaggtgctgagcaccgtgctgagcatgtacgtggtgtacagcacccagagcagcctgctgagaaagcagggcctgcccctgatgaaccagatcatcagctgggccaccctggccagcagcctggtggtgcccctgctgagcagccccgtgctgttccagagactgttcagcatcctgctgagcctgatgagcacctacctgctgctgagcaccggctacgaggccctgttccccctggtgctgagctgcctgatgttcgtgtggatcaacatcgagcaggagaccctgcagcagagcggcgtgtgctgcaagcagaagctgaccagcatccagttcagctacaacaccgacatcacccagttcagacagctgtacctggacgacatcagaagagccttcttcctggtgttcttcctggtgaccgccttcttcggcaccggcaacatcgccagcatcaacagcttcgacctggccagcgtgtactgcttcctgaccgtgttcagccccttcatgatgggcgccctgatgatgtggaagatcctgatccccttcgtgctggtgatgtgcgccttcgaggccgtgcagctgaccacccagctgagcagcaagagcctgttcctgatcgtgctggtgatcagcgacatcatggccctgcacttcttcttcctggtgaaggactacggcagctggctggacatcggcaccagcatcagccactacgtgatcgtgatgagcatgaccatcttcctggtgttcctgaacggcctggcccagctgctgaccaccaagaagctgagactgtgcggcaagcccaagagccacttcatgtag

SEQ ID NO: 93010 - DNA, 2796 bp, synthetic construct; identical to SEQ ID NO: 93009
  misc_feature 1..2796: note = Description of Artificial Sequence: Synthetic coding sequence
  source 1..2796: mol_type = other DNA

SEQ ID NO: 93011 - DNA, 405 bp, synthetic construct
  misc_feature 1..405: note = Description of Artificial Sequence: Synthetic coding sequence
  source 1..405: mol_type = other DNA
atggtggagaacagccccagccccctgcccgagagagccatctacggcttcgtgctgttcctgagcagccagttcggcttcatcctgtacctggtgtgggccttcatccccgagagctggctgaacagcctgggcctgacctactggccccagaagtactgggccgtggccctgcccgtgtacctgctgatcgccatcgtgatcggctacgtgctgctgttcggcatcaacatgatgagcaccagccccctggacagcatccacaccatcaccgacaactacgccaagaaccagcagcagaagaagtaccaggaggaggccatccccgccctgagagacatcagcatcagcgaggtgaaccagatgttcttcctggccgccaaggagctgtacaccaagaactag

SEQ ID NO: 93012 - DNA, 327 bp, synthetic construct
  misc_feature 1..327: note = Description of Artificial Sequence: Synthetic coding sequence
  source 1..327: mol_type = other DNA
atggtgctgtacctggtgtgggccttcatccccgagagctggctgaacagcctgggcctgacctactggccccagaagtactgggccgtggccctgcccgtgtacctgctgatcgccatcgtgatcggctacgtgctgctgttcggcatcaacatgatgagcaccagccccctggacagcatccacaccatcaccgacaactacgccaagaaccagcagcagaagaagtaccaggaggaggccatccccgccctgagagacatcagcatcagcgaggtgaaccagatgttcttcctggccgccaaggagctgtacaccaagaactag

SEQ ID NO: 93013 - DNA, 405 bp, synthetic construct; identical to SEQ ID NO: 93011
  misc_feature 1..405: note = Description of Artificial Sequence: Synthetic coding sequence
  source 1..405: mol_type = other DNA

SEQ ID NO: 93014 - DNA, 405 bp, synthetic construct; identical to SEQ ID NO: 93011
  misc_feature 1..405: note = Description of Artificial Sequence: Synthetic coding sequence
  source 1..405: mol_type = other DNA

SEQ ID NO: 93015 - DNA, 78 bp, synthetic construct
  misc_feature 1..78: note = Description of Artificial Sequence: Synthetic coding sequence
  source 1..78: mol_type = other DNA
atggtgctgtacctggtgtgggccttcatccccgagagctggctgaacagcctgggcctgacctactggccccagtag

SEQ ID NO: 93016 - DNA, 477 bp, synthetic construct
  misc_feature 1..477: note = Description of Artificial Sequence: Synthetic coding sequence
  source 1..477: mol_type = other DNA
atggtgcccagaagcaccagcctggccctgatcgtgttcctgttccacagactgagcaaggcccccggcaagatggtggagaacagccccagccccctgcccgagagagccatctacggcttcgtgctgttcctgagcagccagttcggcttcatcctgtacctggtgtgggccttcatccccgagagctggctgaacagcctgggcctgacctactggccccagaagtactgggccgtggccctgcccgtgtacctgctgatcgccatcgtgatcggctacgtgctgctgttcggcatcaacatgatgagcaccagccccctggacagcatccacaccatcaccgacaactacgccaagaaccagcagcagaagaagtaccaggaggaggccatccccgccctgagagacatcagcatcagcgaggtgaaccagatgttcttcctggccgccaaggagctgtacaccaagaactag

SEQ ID NO: 93017 - DNA, 1848 bp, synthetic construct
  misc_feature 1..1848: note = Description of Artificial Sequence: Synthetic coding sequence
  source 1..1848: mol_type = other DNA
atggccagagcctgcctgatccagagactgcccatcaagagagactgcacccccgtgttcgtgagaggcctgagcagccccagcgccgccatggccctgctgagcgagggcctggacgaggtgcccgccgcctgcctgagcccctgcggcccccccaaccccaccgagctgttcagcgagagcagaagactggccctggaggagctggtggccggcggccccgaggccttcgccgccttcctgagaagagagagactggccagattcctgaaccccgacgaggtgcacgccatcctgagagccgccgagagacccggcgaggagggcgccgccgccgccgccgccgccgaggacagcttcggcagcagccacgactgcagcagcggcacctacttccccgagcagagcgacctggagccccccctgctggagctgggctggcccgccttctaccagggcgcctacagaggcgccaccagagtggagacccacttccagcccagaggcgccggcgagggcggcccctacggctgcaaggacgccctgagacagcagctgagaagcgccagagaggtgatcgccgtggtgatggacgtgttcaccgacatcgacatcttcagagacctgcaggagatctgcagaaagcagggcgtggccgtgtacatcctgctggaccaggccctgctgagccagttcctggacatgtgcatggacctgaaggtgcaccccgagcaggagaagctgatgaccgtgagaaccatcaccggcaacatctactacgccagaagcggcaccaagatcatcggcaaggtgcacgagaagttcaccctgatcgacggcatcagagtggccaccggcagctacagcttcacctggaccgacggcaagctgaacagcagcaacctggtgatcctgagcggccaggtggtggagcacttcgacctggagttcagaatcctgtacgcccagagcaagcccatcagccccaagctgctgagccacttccagagcagcaacaagttcgaccacctgaccaacagaaagccccagagcaaggagctgaccctgggcaacctgctgagaatgagactggccagactgagcagcacccccagaaaggccgacctggaccccgagatgcccgccgagggcaaggccgagagaaagccccacgactgcgagagcagcaccgtgagcgaggaggactacttcagcagccacagagacgagctgcagagcagaaaggccatcgacgccgccacccagaccgagcccggcgaggagatgcccggcctgagcgtgagcgaggtgggcacccagaccagcatcaccaccgcctgcgccggcacccagaccgccgtgatcaccagaatcgccagcagccagaccaccatctggagcagaagcaccaccacccagaccgacatggacgagaacatcctgttccccagaggcacccagagcaccgagggcagccccgtgagcaagatgagcgtgagcagaagcagcagcctgaagagcagcagcagcgtgagcagccagggcagcgtggccagcagcaccggcagccccgccagcatcagaaccaccgacttccacaaccccggctaccccaagtacctgggcaccccccacctggagctgtacctgagcgacagcctgagaaacctgaacaaggagagacagttccacttcgccggcatcagaagcagactgaaccacatgctggccatgctgagcagaagaaccctgttcaccgagaaccacctgggcctgcacagcggcaacttcagcagagtgaacctgctggccgtgagagacgtggccctgtaccccagctaccagtag

SEQ ID NO: 93018 - DNA, 1248 bp, synthetic construct
  misc_feature 1..1248: note = Description of Artificial Sequence: Synthetic coding sequence
  source 1..1248: mol_type = other DNA
atggccgcccccctggtgctggtgctggtggtggccgtgaccgtgagagccgccctgttcagaagcagcctggccgagttcatcagcgagagagtggaggtggtgagccccctgagcagctggaagagagtggtggagggcctgagcctgctggacctgggcgtgagcccctacagcggcgccgtgttccacgagatcaccgacgccctgaccgccatcgccctgtacttcgccatccaggacttcaacaaggtggtgttcaagaagcagaagctgctgctggagctggaccagtacgcccccgacgtggccgagctgatcagaacccccatggagatgagatacatccccctgaaggtggccctgttctacctgctgaacccctacaccatcctgagctgcgtggccaagagcacctgcgccatcaacaacaccctgatcgccttcttcatcctgaccaccatcaagggcagcgccttcctgagcgccatcttcctggccctggccacctaccagagcctgtaccccctgaccctgttcgtgcccggcctgctgtacctgctgcagagacagtacatccccgtgaagatgaagagcaaggccttctggatcttcagctgggagtacgccatgatgtacgtgggcagcctggtggtgatcatctgcctgagcttcttcctgctgagcagctgggacttcatccccgccgtgtacggcttcatcctgagcgtgcccgacctgacccccaacatcggcctgttctggtacttcttcgccgagatgttcgagcacttcagcctgttcttcgtgtgcgtgttccagatcaacgtgttcttctacaccatccccctggccatcaagctgaaggagcaccccatcttcttcatgttcatccagatcgccgtgatcgccatcttcaagagctaccccaccgtgggcgacgtggccctgtacatggccttcttccccgtgtggaaccacctgtacagattcctgagaaacatcttcgtgctgacctgcatcatcatcgtgtgcagcctgctgttccccgtgctgtggcacctgtggatctacgccggcagcgccaacagcaacttcttctacgccatcaccctgaccttcaacgtgggccagatcctgctgatcagcgactacttctacgccttcctgagaagagagtactacctgacccacggcctgtacctgaccgccaaggacggcaccgaggccatgctggtgctgaagtag

SEQ ID NO: 93019 - DNA, 513 bp, synthetic construct
  misc_feature 1..513: note = Description of Artificial Sequence: Synthetic coding sequence
  source 1..513: mol_type = other DNA
gtgagcgtgcccacccacctggtgtgccccagaacccccctgagcccccccgccgccgtgcacacctgcgagaacgaggagcagagcctgctggacctgttcctgggcgtgtgccacgacatcaacgtgttcttctacaccatccccctggccatcaagctgaaggagcaccccatcttcttcatgttcatccagatcgccgtgatcgccatcttcaagagctaccccaccgtgggcgacgtggccctgtacatggccttcttccccgtgtggaaccacctgtacagattcctgagaaacatcttcgtgctgacctgcatcatcatcgtgtgcagcctgctgttccccgtgctgtggcacctgtggatctacgccggcagcgccaacagcaacttcttctacgccatcaccctgaccttcaacgtgggccagatcctgctgatcagcgactacttctacgccttcctgagaagagagtactacctgacccacggcctgtacctgaccgcctag

SEQ ID NO: 93020 - DNA, 1272 bp, synthetic construct
  misc_feature 1..1272: note = Description of Artificial Sequence: Synthetic coding sequence
  source 1..1272: mol_type = other DNA
atggccgcccccctggtgctggtgctggtggtggccgtgaccgtgagagccgccctgttcagaagcagcctggccgagttcatcagcgagagagtggaggtggtgagccccctgagcagctggaagagagtggtggagggcctgagcctgctggacctgggcgtgagcccctacagcggcgccgtgttccacgagacccccctgatcatctacctgttccacttcctgatcgactacgccgagctggtgttcatgatcaccgacgccctgaccgccatcgccctgtacttcgccatccaggacttcaacaaggtggtgttcaagaagcagaagctgctgctggagctggaccagtacgcccccgacgtggccgagctgatcagaacccccatggagatgagatacatccccctgaaggtggccctgttctacctgctgaacccctacaccatcctgagctgcgtggccaagagcacctgcgccatcaacaacaccctgatcgccttcttcatcctgaccaccatcaagggcagcgccttcctgagcgccatcttcctggccctggccacctaccagagcctgtaccccctgaccctgttcgtgcccggcctgctgtacctgctgcagagacagtacatccccgtgaagatgaagagcaaggccttctggatcttcagctgggagtacgccatgatgtacgtgggcagcctggtggtgatcatctgcctgagcttcttcctgctgagcagctgggacttcatccccgccgtgtacggcttcatcctgagcgtgcccgacctgacccccaacatcggcctgttctggtacttcttcgccgagatgttcgagcacttcagcctgttcttcgtgtgcgtgttccagatcaacgtgttcttctacaccatccccctggccatcaagctgaaggagcaccccatcttcttcatgttcatccagatcgccgtgatcgccatcttcaagagctaccccaccgtgggcgacgtggccctgtacatggccttcttccccgtgtggaaccacctgtacagattcctgagaaacatcttcgtgctgacctgcatcatcatcgtgtgcagcctgctgttccccgtgctgtggcacctgtggatctacgccggcagcgccaacagcaacttcttctacgccatcaccctgaccttcaacgtgggccagatgggcttctgcggcgacagaatggccggcacctgccccgaggccatcagagccgccggcgacagaacccccagctag

SEQ ID NO: 93021 - DNA, 1482 bp, synthetic construct
  misc_feature 1..1482: note = Description of Artificial Sequence: Synthetic coding sequence
  source 1..1482: mol_type = other DNA
atgtggccccaggaccccagcagaaaggaggtgctgagattcgccgtgagctgcagaatcctgaccctgatgctgcaggccctgttcaacgccatcatccccgaccaccacgccgaggccttcagcccccccagactggcccccagcggcttcgtggaccagctggtggagggcctgctgggcggcctgagccactgggacgccgagcacttcctgttcatcgccgagcacggctacctgtacgagcacaacttcgccttcttccccggcttccccctggccctgctggtgggcaccgagctgctgagacccctgagaggcctgctgagcctgagaagctgcctgctgatcagcgtggccagcctgaacttcctgttcttcatgctggccgccgtggccctgcacgacctgggctgcctggtgctgcactgcccccaccagagcttctacgccgccctgctgttctgcctgagccccgccaacgtgttcctggccgccggctacagcgaggccctgttcgccctgctgaccttcagcgccatgggccagctggagagaggcagagtgtggaccagcgtgctgctgttcgccttcgccaccggcgtgagaagcaacggcctggtgagcgtgggcttcctgatgcacagccagtgccagggcttcttcagcagcctgaccatgctgaaccccctgagacagctgttcaagctgatggccagcctgttcctgagcgtgttcaccctgggcctgcccttcgccctgttccagtactacgcctacacccagttctgcctgcccggcagcgccagacccatccccgagcccctggtgcagctggccgtggacaagggctacagaatcgccgagggcaacgagcccccctggtgcttctgggacgtgcccctgatctacagctacatccaggacgtgtactggaacgtgggcttcctgaagtactacgagctgaagcaggtgcccaacttcctgctggccgcccccgtggccatcctggtggcctgggccacctggacctacgtgaccacccacccctggctgtgcctgaccctgggcctgcagagaagcaagaacaacaagaccctggagaagcccgacctgggcttcctgagcccccaggtgttcgtgtacgtggtgcacgccgccgtgctgctgctgttcggcggcctgtgcatgcacgtgcaggtgctgaccagattcctgggcagcagcacccccatcatgtactggttccccgcccacctgctgcaggaccaggagcccctgctgagaagcctgaagaccgtgccctggaagcccctggccgaggacagcccccccggccagaaggtgcccagaaaccccatcatgggcctgctgtaccactggaagacctgcagccccgtgaccagatacatcctgggctacttcctgacctactggctgctgggcctgctgctgcactgcaacttcctgccctggacctag

SEQ ID NO: 93022 - DNA, 1482 bp, synthetic construct; identical to SEQ ID NO: 93021
  misc_feature 1..1482: note = Description of Artificial Sequence: Synthetic coding sequence
  source 1..1482: mol_type = other DNA

SEQ ID NO: 93023 - DNA, 219 bp, synthetic construct
  misc_feature 1..219: note = Description of Artificial Sequence: Synthetic coding sequence
  source 1..219: mol_type = other DNA
atgtggccccaggaccccagcagaaaggaggtgctgagattcgccgtgagctgcagaatcctgaccctgatgctgcaggccctgttcaacgccatcatccccgaccaccacgccgaggccttcagcccccccagactggcccccagcggcttcgtggaccagctggtggagggcctgctgggcggcctgagccactgggacgccgagcacttcctgtag

SEQ ID NO: 93024 - DNA, 366 bp, synthetic construct
  misc_feature 1..366: note = Description of Artificial Sequence: Synthetic coding sequence
  source 1..366: mol_type = other DNA
atgtggccccaggaccccagcagaaaggaggtgctgagattcgccgtgagctgcagaatcctgaccctgatgctgcaggccctgttcaacgccatcatccccgaccaccacgccgaggccttcagcccccccagactggcccccagcggcttcgtggaccagctggtggagggcctgctgggcggcctgagccactgggacgccgagcacttcctgttcatcgccgagcacggctacctgtacgagcacaacttcgccttcttccccggcttccccctggccctgctggtgggcaccgagctgctgagacccctgagaggcctgctgagcctgagaagctgcctgctgatcagcgtggccagctag

SEQ ID NO: 93025 - DNA, 798 bp, synthetic construct
  misc_feature 1..798: note = Description of Artificial Sequence: Synthetic coding sequence
  source 1..798: mol_type = other DNA
atgcccagcagccagatcaccatgcagaagcccagcctgctgctggcctggcccccccaggccctgtggaccaacagctggaagtactacgcctacacccagttctgcctgcccggcagcgccagacccatccccgagcccctggtgcagctggccgtggacaagggctacagaatcgccgagggcaacgagcccccctggtgcttctgggacgtgcccctgatctacagctacatccaggacgtgtactggaacgtgggcttcctgaagtactacgagctgaagcaggtgcccaacttcctgctggccgcccccgtggccatcctggtggcctgggccacctggacctacgtgaccacccacccctggctgtgcctgaccctgggcctgcagagaagcaagaacaacaagaccctggagaagcccgacctgggcttcctgagcccccaggtgttcgtgtacgtggtgcacgccgccgtgctgctgctgttcggcggcctgtgcatgcacgtgcaggtgctgaccagattcctgggcagcagcacccccatcatgtactggttccccgcccacctgctgcaggaccaggagcccctgctgagaagcctgaagaccgtgccctggaagcccctggccgaggacagcccccccggccagaaggtgcccagaaaccccatcatgggcctgctgtaccactggaagacctgcagccccgtgaccagatacatcctgggctacttcctgacctactggctgctgggcctgctgctgcactgcaacttcctgccctggacctag

SEQ ID NO: 93026 - DNA, 549 bp, synthetic construct
  misc_feature 1..549: note = Description of Artificial Sequence: Synthetic coding sequence
  source 1..549: mol_type = other DNA
atgtggccccaggaccccagcagaaaggaggtgctgagattcgccgtgagctgcagaatcctgaccctgatgctgcaggccctgttcaacgccatcatccccgaccaccacgccgaggccttcagcccccccagactggcccccagcggcttcgtggaccagctggtggagggcctgctgggcggcctgagccactgggacgccgagcacttcctgttcatcgccgagcacggctacctgtacgagcacaacttcgccttcttccccggcttccccctggccctgctggtgggcaccgagctgctgagacccctgagaggcctgctgagcctgagaagctgcctgctgatcagcgtggccagcctgaacttcctgttcttcatgctggccgccgtggccctgcacgacctgggctgcctggtgctgcactgcccccaccagagcttctacgccgccctgctgttctgcctgagccccgccaacgtgttcctggccgccggctacagcgaggccctgttcgccctgctgaccttcagcgccatgggctag

SEQ ID NO: 93027 - DNA, 1515 bp, synthetic construct
  misc_feature 1..1515: note = Description of Artificial Sequence: Synthetic coding sequence
  source 1..1515: mol_type = other DNA
atgagcgagaagcagatgaaggaggccttcgtgagcaacctgaacggcaccaccgtgctggagatcacccagggcctgtgcttccccgccttctgcatcctgtgcagaggcttcctgatcatcttcagccagtacctgtgcagcttcagccccacctggaagaccagattcctgaccgacttcgtggtgctgatcgtgcccatggtggccaccctgaccatctgggccagcttcatcctgctggagctgctgggcgtgatcatcttcggcgccggcctgctgtaccagatctacagaagaagaacctgctacgccagactgcccttcctgaagatcctggagaagttcctgaacatcagcctggagagcgagtacaaccccgccatcagctgcttcagagtgatcaccagcgccttcaccgccatcgccatcctggccgtggacttccccctgttccccagaagattcgccaagaccgagctgtacggcaccggcgccatggacttcggcgtgggcggcttcgtgttcggcagcgccatggtgtgcctggaggtgagaagaagaaagtacatggagggcagcaagctgcactacttcaccaacagcctgtacagcgtgtggcccctggtgttcctgggcatcggcagactggccatcatcaagagcatcggctaccaggagcacctgaccgagtacggcgtgcactggaacttcttcttcaccatcatcgtggtgaagctgatcacccccctgctgctgatcatcttccccctgaacaagagctggatcatcgccctgggcatcaccgtgctgtaccagctggccctggacttcaccagcctgaagagactgatcctgtacggcaccgacggcagcggcaccagagtgggcctgctgaacgccaacagagagggcatcatcagcaccctgggctacgtggccatccacatggccggcgtgcagaccggcctgtacatgcacaagaacagaagccacatcaaggacctgatcaaggtggcctgcttcctgctgctggccgccatcagcctgttcatcagcctgtacgtggtgcaggtgaacgtggaggccgtgagcagaagaatggccaacctggccttctgcatctggatcgtggccagcagcctgatcctgctgagcagcctgctgctgggcgacatcatcctgagcttcgccaagttcctgatcaagggcgccctggtgccctgcagctggaagctgatccagagccccgtgaccaacaagaagcacagcgagagcctggtgcccgaggccgagagaatggagcccagcctgtgcctgatcaccgccctgaacagaaagcagctgatcttcttcctgctgagcaacatcaccaccggcctgatcaacctgatggtggacaccctgcacagcagcaccctgtgggccctgttcgtggtgaacctgtacatgttcagcaactgcctgatcgtgtacgtgctgtacctgcaggacaagaccgtgcagttctggtag

SEQ ID NO: 93028 - DNA, 318 bp, synthetic construct
  misc_feature 1..318: note = Description of Artificial Sequence: Synthetic coding sequence
  source 1..318: mol_type = other DNA
atgagcgagaagcagatgaaggaggccttcgtgagcaacctgaacggcaccaccgtgctggagatcacccagggcctgtgcttccccgccttctgcatcctgtgcagaggcttcctgatcatcttcagccagtacctgtgcagcttcagccccacctggaagaccagattcctgaccgacttcgtggtgctgatcgtgcccatggtggccaccctgaccatctgggccagcttcatcctgctggagctgctgggcgtgatcatcttcggcgccggcctgctgtaccagatctacagaagaagaacctgctacgcctag

SEQ ID NO: 93029 - DNA, 831 bp, synthetic construct
  misc_feature 1..831: note = Description of Artificial Sequence: Synthetic coding sequence
  source 1..831: mol_type = other DNA
ctggccgccagagtggccgccgtgagagccgccgcctggctgctgctgggcgccgccaccggcctgaccagaggccccgccgccgccttcaccgccgccagaagcgacgccggcatcagagccatgtgcagcgagatcatcctgagacaggaggtgctgaaggacggcttccacagagacctgctgatcaaggtgaagttcggcgagagcatcgaggacctgcacacctgcagactgctgatcaagcaggacatccccgccggcctgtacgtggacccctacgagctggccagcctgagagagagaaacatcaccgaggccgtgatggtgagcgagaacttcgacatcgaggcccccaactacctgagcaaggagagcgaggtgctgatctacgccagaagagacagccagtgcatcgactgcttccaggccttcctgcccgtgcactgcagataccacagaccccacagcgaggacggcgaggccagcatcgtggtgaacaaccccgacctgctgatgttctgcgaccaggccggcagcagaagaatgatcagattcagattcgacagcttcgacaagaccatcgagttccccatcctgaagtgctgggcccacagcgaggtggccgccccctgcgccctggagaacgaggacatctgccagtggaacaagatgaagtacaagagcgtgtacaagaacgtgatcctgcaggtgcccgtgggcctgaccgtgcacaccagcctggtgtgcagcgtgaccctgctgatcaccatcctgtgcagcaccctgatcctggtggccgtgttcaagtacggccacttcagcctgtag

SEQ ID NO: 93030 - DNA, 654 bp, synthetic construct
  misc_feature 1..654: note = Description of Artificial Sequence: Synthetic coding sequence
  source 1..654: mol_type = other DNA
atgtgcagcgagatcatcctgagacaggaggtgctgaaggacggcttccacagagacctgctgatcaaggtgaagttcggcgagagcatcgaggacctgcacacctgcagactgctgatcaagcaggacatccccgccggcctgtacgtggacccctacgagctggccagcctgagagagagaaacatcaccgaggccgtgatggtgagcgagaacttcgacatcgaggcccccaactacctgagcaaggagagcgaggtgctgatctacgccagaagagacagccagtgcatcgactgcttccaggccttcctgcccgtgcactgcagataccacagaccccacagcgaggacggcgaggccagcatcgtggtgaacaaccccgacctgctgatgttctgcgaccaggagttccccatcctgaagtgctgggcccacagcgaggtggccgccccctgcgccctggagaacgaggacatctgccagtggaacaagatgaagtacaagagcgtgtacaagaacgtgatcctgcaggtgcccgtgggcctgaccgtgcacaccagcctggtgtgcagcgtgaccctgctgatcaccatcctgtgcagcaccctgatcctggtggccgtgttcaagtacggccacttcagcctgtag

SEQ ID NO: 93031 - DNA, 777 bp, synthetic construct
  misc_feature 1..777: note = Description of Artificial Sequence: Synthetic coding sequence
  source 1..777: mol_type = other DNA
ctggccgccagagtggccgccgtgagagccgccgcctggctgctgctgggcgccgccaccggcctgaccagaggccccgccgccgccttcaccgccgccagaagcgacgccggcatcagagccatgtgcagcgagatcatcctgagacaggaggtgctgaaggacggcttccacagagacctgctgatcaaggtgaagttcggcgagagcatcgaggacctgcacacctgcagactgctgatcaagcaggacatccccgccggcctgtacgtggacccctacgagctggccagcctgagagagagaaacatcaccgaggccgtgatggtgagcgagaacttcgacatcgaggcccccaactacctgagcaaggagagcgaggtgctgatctacgccagaagagacagccagtgcatcgactgcttccaggccttcctgcccgtgcactgcagataccacagaccccacagcgaggacggcgaggccagcatcgtggtgaacaaccccgacctgctgatgttctgcgaccaggagttccccatcctgaagtgctgggcccacagcgaggtggccgccccctgcgccctggagaacgaggacatctgccagtggaacaagatgaagtacaagagcgtgtacaagaacgtgatcctgcaggtgcccgtgggcctgaccgtgcacaccagcctggtgtgcagcgtgaccctgctgatcaccatcctgtgcagcaccctgatcctggtggccgtgttcaagtacggccacttcagcctgtag

SEQ ID NO: 93032 - DNA, 507 bp, synthetic construct
  misc_feature 1..507: note = Description of Artificial Sequence: Synthetic coding sequence
  source 1..507: mol_type = other DNA
atggtgagcgagaacttcgacatcgaggcccccaactacctgagcaaggagagcgaggtgctgatctacgccagaagagacagccagtgcatcgactgcttccaggccttcctgcccgtgcactgcagataccacagaccccacagcgaggacggcgaggccagcatcgtggtgaacaaccccgacctgctgatgttctgcgaccaggccggcagcagaagaatgatcagattcagattcgacagcttcgacaagaccatcgagttccccatcctgaagtgctgggcccacagcgaggtggccgccccctgcgccctggagaacgaggacatctgccagtggaacaagatgaagtacaagagcgtgtacaagaacgtgatcctgcaggtgcccgtgggcctgaccgtgcacaccagcctggtgtgcagcgtgaccctgctgatcaccatcctgtgcagcaccctgatcctggtggccgtgttcaagtacggccacttcagcctgtag

SEQ ID NO: 93033 - DNA, 1740 bp, synthetic construct
  misc_feature 1..1740: note = Description of Artificial Sequence: Synthetic coding sequence
  source 1..1740: mol_type = other DNA
atgcagatctgcggcagcagcgtggccagcgtggccgccggcaccagcttccaggtgctgggccccgtgtgctggcagcagctggacctgaagatggccgtgagagtgctgtggggcggcctgagcctgctgagagtgctgtggtgcctgctgccccagaccggctacgtgcaccccgacgagttcttccagagccccgaggtgatggccgaggacatcctgggcgtgcaggccgccagaccctgggagttctaccccagcagcagctgcagaagcgtgctgttccccctgctgatcagcggcagcaccttctggctgctgagactgtgggaggagctgggcccctggcccggcctggtgagcggctacgccctgctggtgggccccagactgctgctgaccgccctgagcttcgccctggacggcgccgtgtaccacctggccccccccatgggcgccgacagatggaacgccctggccctgctgagcggcagctacgtgaccctggtgttctacaccagaaccttcagcaacaccatcgagggcctgctgttcacctggctgctggtgctggtgagcagccacgtgacctggggccccaccagaaaggagcccgcccccggccccagatggagaagctggctgctgggcggcatcgtggccgccggcttcttcaacagacccaccttcctggccttcgccgtggtgcccctgtacctgtggggcaccagaggcgccaccaaccccggcctgaagagcctgaccagagaggccctggtgctgctgcccggcgccgccctgaccgccgccgtgttcgtggccaccgacagctggtacttcagcagccccgccaccagcagaaacctggtgctgacccccgtgaacttcctgcactacaacctgaacccccagaacctggccagacacggcacccacgccagactgacccacctggccgtgaacggcttcctgctgttcggcgtgctgcacgcccaggccctgcaggccgcctggcagagactgcaggtgggcctgcaggccagcgcccagatgggcctgctgagagccctgggcgccagaagcctgctgagcagccccagaagctacctgctgctgctgtacttcatgcccctggccctgctgagcgccttcagccaccaggaggccagattcctgatccccctgctggtgcccctggtgctgctgtgcagcccccagacccagcccgtgccctggaagggcaccgtggtgctgttcaacgccctgggcgccctgctgttcggctgcctgcaccagggcggcctggtgcccggcctggagtacctggagcaggtggtgcacgcccccgtgctgcccagcacccccacccactacaccctgctgttcacccacacctacatgccccccagacacctgctgcacctgcccggcctgggcgcccccgtggaggtggtggacatgggcggcaccgaggactgggccctgtgccagaccctgaagagcttcaccagacagcccgcctgccaggtggccggcggcccctggctgtgcagactgttcgtggtgacccccggcaccaccagaagagccgtggagaagtgcagcttccccttcaagaacgagaccctgctgttcccccacctgaccctggaggacccccccgccctgagcagcctgctgagcggcgcctggagagaccacctgagcctgcacatcgtggagctgggcgaggagacctag

SEQ ID NO: 93034 - DNA, 813 bp, synthetic construct
  misc_feature 1..813: note = Description of Artificial Sequence: Synthetic coding sequence
  source 1..813: mol_type = other DNA
atggtgctgctgaaggagtacagagtgatcctgcccgtgagcgtggacgagtaccaggtgggccagctgtacagcgtggccgaggccagcaagaacgagaccggcggcggcgagggcgtggaggtgctggtgaacgagccctacgagaaggacggcgagaagggccagtacacccacaagatctaccacctgcagagcaaggtgcccaccttcgtgagaatgctggcccccgagggcgccctgaacatccacgagaaggcctggaacgcctacccctactgcagaaccgtgatcaccaacgagtacatgaaggaggacttcctgatcaagatcgagacctggcacaagcccgacctgggcacccaggagaacgtgcacaagctggagcccgaggcctggaagcacgtggaggccgtgtacatcgacatcgccgacagaagccaggtgctgagcaaggactacaaggccgaggaggaccccgccaagttcaagagcatcaagaccggcagaggccccctgggccccaactggaagcaggagctggtgaaccagaaggactgcccctacatgtgcgcctacaagctggtgaccgtgaagttcaagtggtggggcctgcagaacaaggtggagaacttcatccacaagcaggagagaagactgttcaccaacttccacagacagctgttctgctggctggacaagtgggtggacctgaccatggacgacatcagaagaatggaggaggagaccaagagacagctggacgagatgagacagaaggaccccgtgaagggcatgaccgccgacgactag

SEQ ID NO: 93035 - DNA, 813 bp, synthetic construct
  misc_feature 1..813: note = Description of Artificial Sequence: Synthetic coding sequence
  source 1..813: mol_type = other DNA
atggtgctgctgaaggagtacagagtgatcctgcccgtgagcgtggacgagtaccaggtgggccagctgtacagcgtggccgaggccagcaagaacgagaccggcggcggcgagggcgtggaggtgctggtgaacgagccctacgagaaggacggcgagaagggccagtacacccacaagatctaccacctgcagagcaaggtgcccaccttcgtgagaatgctggcccccgagggcgccctgaacatccacgagaaggcctggaacgcctacccctactgcagaaccgtgctgcccaacgagtacatgaaggaggacttcctgatcaagatcgagacctggcacaagcccgacctgggcacccaggagaacgtgcacaagctggagcccgaggcctggaagcacgtggaggccgtgtacatcgacatcgccgacagaagccaggtgctgagcaaggactacaaggccgaggaggaccccgccaagttcaagagcatcaagaccggcagaggccccctgggccccaactggaagcaggagctggtgaaccagaaggactgcccctacatgtgcgcctacaagctggtgaccgtgaagttcaagtggtggggcctgcagaacaaggtggagaacttcatccacaagcaggagagaagactgttcaccaacttccacagacagctgttctgctggctggacaagtgggtggacctgaccatggacgacatcagaagaatggaggaggagaccaagagacagctggacgagatgagacagaaggaccccgtgaagggcatgaccgccgacgactag

SEQ ID NO: 93036 - DNA, 594 bp, synthetic construct
  misc_feature 1..594: note = Description of Artificial Sequence: Synthetic coding sequence
  source 1..594: mol_type = other DNA
atgctggcccccgagggcgccctgaacatccacgagaaggcctggaacgcctacccctactgcagaaccgtgctgcccaacgagtacatgaaggaggacttcctgatcaagatcgagacctggcacaagcccgacctgggcacccaggagaacgtgcacaagctggagcccgaggcctggaagcacgtggaggccgtgtacatcgacatcgccgacagaagccaggtgctgagcaaggactacaaggccgaggaggaccccgccaagttcaagagcatcaagaccggcagaggccccctgggccccaactggaagcaggagctggtgaaccagaaggactgcccctacatgtgcgcctacaagctggtgaccgtgaagttcaagtggtggggcctgcagaacaaggtggagaacttcatccacaagcaggagagaagactgttcaccaacttccacagacagctgttctgctggctggacaagtgggtggacctgaccatggacgacatcagaagaatggaggaggagaccaagagacagctggacgagatgagacagaaggaccccgtgaagggcatgaccgccgacgactag

SEQ ID NO: 93037 - DNA, 819 bp, synthetic construct
  misc_feature 1..819: note = Description of Artificial Sequence: Synthetic coding sequence
  source 1..819: mol_type = other DNA
atggtgctgatcaaggagttcagagtggtgctgccctgcagcgtgcaggagtaccaggtgggccagctgtacagcgtggccgaggccagcaagaacgagaccggcggcggcgagggcatcgaggtgctgaagaacgagccctacgagaaggacggcgagaagggccagtacacccacaagatctaccacctgaagagcaaggtgcccgccttcgtgagaatgatcgcccccgagggcagcctggtgttccacgagaaggcctggaacgcctacccctactgcagaaccatcgtgaccaacgagtacatgaaggacgacttcttcatcaagatcgagacctggcacaagcccgacctgggcaccctggagaacgtgcacggcctggaccccaacacctggaagaccgtggagatcgtgcacatcgacatcgccgacagaagccaggtggagcccgccgactacaaggccgacgaggaccccgccctgttccagagcgtgaagaccaagagaggccccctgggccccaactggaagaaggagctggccaacagccccgactgcccccagatgtgcgcctacaagctggtgaccatcaagttcaagtggtggggcctgcagagcaaggtggagaacttcatccagaagcaggagaagagaatcttcaccaacttccacagacagctgttctgctggatcgacaagtggatcgacctgaccatggaggacatcagaagaatggaggacgagacccagaaggagctggagaccctgagaaaccagggccaggtgagaggcaccagcgccgccagcgacgagtag

SEQ ID NO: 93038 - DNA, 816 bp, synthetic construct
  misc_feature 1..816: note = Description of Artificial Sequence: Synthetic coding sequence
  source 1..816: mol_type = other DNA
atggtgctgatcaaggagttcagagtggtgctgccctgcagcgtgcaggagtaccaggtgggccagctgtacagcgtggccgaggccagcaagaacgagaccggcggcggcgagggcatcgaggtgctgaagaacgagccctacgagaaggacggcgagaagggccagtacacccacaagatctaccacctgaagagcaaggtgcccgccttcgtgagaatgatcgcccccgagggcagcctggtgttccacgagaaggcctggaacgcctacccctactgcagaaccatcgtgaccaacgagtacatgaaggacgacttcttcatcaagatcgagacctggcacaagcccgacctgggcaccctggagaacgtgcacggcctggaccccaacacctggaagaccgtggagatcgtgcacatcgacatcgccgacagaagccaggtggagcccgccgactacaaggccgacgaggaccccgccctgttccagagcgtgaagaccaagagaggccccctgggccccaactggaagaaggagctggccaacagccccgactgcccccagatgtgcgcctacaagctggtgaccatcaagttcaagtggtggggcctgcagagcaaggtggagaacttcatccagaagcaggagaagagaatcttcaccaacttccacagacagctgttctgctggatcgacaagtggatcgacctgaccatggaggacatcagaagaatggaggacgagacccagaaggagctggagaccatgagaaagagaggcagcgtgagaggcaccagcgccgccgacgtgtag

SEQ ID NO: 93039 - DNA, 363 bp, synthetic construct
  misc_feature 1..363: note = Description of Artificial Sequence: Synthetic coding sequence
  source 1..363: mol_type = other DNA
atgatcgcccccgagggcagcctggtgttccacgagaaggcctggaacgcctacccctactgcagaaccatcgtgaccaacgagtacatgaaggacgacttcttcatcaagatcgagacctggcacaagcccgacctgggcaccctggagaacgtgcacggcctggaccccaacacctggaagaccgtggagatcgtgcacatcgacatcgccgacagaagccaggtggagcccgccgactacaaggccgacgaggaccccgccctgttccagagcgtgaagaccaagagaggccccctgggccccaactggaagaaggagctggccaacagccccgactgcccccagatgtgcgcctactag

SEQ ID NO: 93040 - DNA, 507 bp, synthetic construct
  misc_feature 1..507: note = Description of Artificial Sequence: Synthetic coding sequence
  source 1..507: mol_type = other DNA
atgggcgacctgctgatggagaagtgcagagtggtgctgccctgcagcgtgcaggagtaccaggtgggccagctgtacagcgtggccgaggccagcaagaacgagaccggcggcggcgagggcatcgaggtgctgaagaacgagccctacgagaaggacggcgagaagggccagtacacccacaagatctaccacctgaagagcaaggtgcccgccttcgtgagaatgatcgcccccgagggcagcctggtgttccacgagaaggcctggaacgcctacccctactgcagaaccatcgtgaccaacgagtacatgaaggacgacttcttcatcaagatcgagacctggcacaagcccgacctgggcaccctggagaacgtgcacggcctggaccccaacacctggaagaccgtggagatcgtgcacatcgacatcgccgacagaagccaggtggagcccgccgactacaaggccgacgaggaccccgccctgttccagagcgtgtag

SEQ ID NO: 93041 - DNA, 822 bp, synthetic construct
  misc_feature 1..822: note = Description of Artificial Sequence: Synthetic coding sequence
  source 1..822: mol_type = other DNA
atgggcgacctgctgatggagaagtgcagagtggtgctgccctgcagcgtgcaggagtaccaggtgggccagctgtacagcgtggccgaggccagcaagaacgagaccggcggcggcgagggcatcgaggtgctgaagaacgagccctacgagaaggacggcgagaagggccagtacacccacaagatctaccacctgaagagcaaggtgcccgccttcgtgagaatgatcgcccccgagggcagcctggtgttccacgagaaggcctggaacgcctacccctactgcagaaccatcgtgaccaacgagtacatgaaggacgacttcttcatcaagatcgagacctggcacaagcccgacctgggcaccctggagaacgtgcacggcctggaccccaacacctggaagaccgtggagatcgtgcacatcgacatcgccgacagaagccaggtggagcccgccgactacaaggccgacgaggaccccgccctgttccagagcgtgaagaccaagagaggccccctgggccccaactggaagaaggagctggccaacagccccgactgcccccagatgtgcgcctacaagctggtgaccatcaagttcaagtggtggggcctgcagagcaaggtggagaacttcatccagaagcaggagaagagaatcttcaccaacttccacagacagctgttctgctggatcgacaagtggatcgacctgaccatggaggacatcagaagaatggaggacgagacccagaaggagctggagaccatgagaaagagaggcagcgtgagaggcaccagcgccgccgacgtgtag

SEQ ID NO: 93042 - DNA, 4980 bp, synthetic construct
  misc_feature 1..4980: note = Description of Artificial Sequence: Synthetic coding sequence
  source 1..4980: mol_type = other DNA
atggaggcccccagcggcagcgagcccggcggcgacggcgccggcgactgcgcccaccccgaccccagagcccccggcgccgccgcccccagcagcggccccggcccctgcgccgccgccagagagagcgagagacagctgagactgagactgtgcgtgctgaacgagatcctgggcaccgagagagactacgtgggcaccctgagattcctgcagagcgccttcctgcacagaatcagacagaacgtggccgacagcgtggagaagggcctgaccgaggagaacgtgaaggtgctgttcagcaacatcgaggacatcctggaggtgcacaaggacttcctggccgccctggagtactgcctgcaccccgagccccagagccagcacgagctgggcaacgtgttcctgaagttcaaggacaagttctgcgtgtacgaggagtactgcagcaaccacgagaaggccctgagactgctggtggagctgaacaagatccccaccgtgagagccttcctgctgagctgcatgctgctgggcggcagaaagaccaccgacatccccctggagggctacctgctgagccccatccagagaatctgcaagtaccccctgctgctgaaggagctggccaagagaacccccggcaagcaccccgaccaccccgccgtgcagagcgccctgcaggccatgaagaccgtgtgcagcaacatcaacgagaccaagagacagatggagaagctggaggccctggagcagctgcagagccacatcgagggctgggagggcagcaacctgaccgacatctgcacccagctgctgctgcagggcaccctgctgaagatcagcgccggcaacatccaggagagagccttcttcctgttcgacaacctgctggtgtactgcaagagaaagagcagagtgaccggcagcaagaagagcaccaagagaaccaagagcatcaacggcagcctgtacatcttcagaggcagaatcaacaccgaggtgatggaggtggagaacgtggaggacggcaccgccgactaccacagcaacggctacaccgtgaccaacggctggaagatccacaacaccgccaagaacaagtggttcgtgtgcatggccaagaccgccgaggagaagcagaagtggctggacgccatcatcagagagagagagcagagagagagcctgaagctgggcatggagagagacgcctacgtgatgatcgccgagaagggcgagaagctgtaccacatgatgatgaacaagaaggtgaacctgatcaaggacagaagaagaaagctgagcaccgtgcccaagtgcttcctgggcaacgagttcgtggcctggctgctggagatcggcgagatcagcaagaccgaggagggcgtgaacctgggccaggccctgctggagaacggcatcatccaccacgtgagcgacaagcaccagttcaagaacgagcaggtgatgtacagattcagatacgacgacggcacctacaaggccagaagcgagctggaggacatcatgagcaagggcgtgagactgtactgcagactgcacagcctgtacacccccgtgatcaaggacagagactaccacctgaagacctacaagagcgtgctgcccggcagcaagctggtggactggctgctggcccagggcgactgccagaccagagaggaggccgtggccctgggcgtgggcctgtgcaacaacggcttcatgcaccacgtgctggagaagagcgagttcagagacgagagccagtacttcagattccacgccgacgaggagatggagggcaccagcagcaagaacaagcagctgagaaacgacttcaagctggtggagaacatcctggccaagagactgctgatcctgccccaggaggaggactacggcttcgacatcgaggagaagaacaaggccgtggtggtgaagagcgtgcagagaggcagcctggccgaggtggccggcctgcaggtgggcagaaagatctacagcatcaacgaggacctggtgttcctgagacccttcagcgaggtggagagcatcctgaaccagagcttctgcagcagaagacccctgagactgctggtggccaccaaggccaaggagatcatcaagatccccgaccagcccgacaccctgtgcttccagatcagaggcgccgcccccccctacgtgtacgccgtgggcagaggcagcgaggccatggccgccggcctgtgcgccggccagtgcatcctgaaggtgaacggcagcaacgtgatgaacgacggcgcccccgaggtgctggagcacttccaggccttcagaagcagaagagaggaggccctgggcctgtaccagtggatctaccacacccacgaggacgcccaggaggccagagccagccaggaggccagcaccgaggaccccagcggcgagcaggcccaggaggaggaccaggccgacagcgccttccccctgctgagcctgggccccagactgagcctgtgcgaggacagccccatggtgaccctgaccgtggacaacgtgcacctggagcacggcgtggtgtacgagtacgtgagcaccgccggcgtgagatgccacgtgctggagaagatcgtggagcccagaggctgcttcggcctgaccgccaagatcctggaggccttcgccgccaacgacagcgtgttcgtggagaactgcagaagactgatggccctgagcagcgccatcgtgaccatgccccacttcgagttcagaaacatctgcgacaccaagctggagagcatcggccagagaatcgcctgctaccaggagttcgccgcccagctgaagagcagagtgagcccccccttcaagcaggcccccctggagccccaccccctgtgcggcctggacttctgccccaccaactgccacatcaacctgatggaggtgagctaccccaagaccacccccagcgtgggcagaagcttcagcatcagattcggcagaaagcccagcctgatcggcctggaccccgagcagggccacctgaaccccatgagctacacccagcactgcatcaccaccatggccgcccccagctggaagtgcctgcccgccgccgagggcgacccccagggccagggcctgcacgacggcagcttcggccccgccagcggcaccctgggccaggaggacagaggcctgagcttcctgctgaagcaggaggacagagagatccaggacgcctacctgcagctgttcaccaagctggacgtggccctgaaggagatgaagcagtacgtgacccagatcaacagactgctgagcaccatcaccgagcccaccagcggcggcagctgcgacgccagcctggccgaggaggccagcagcctgcccctggtgagcgaggagagcgagatggacagaagcgaccacggcggcatcaagaaggtgtgcttcaaggtggccgaggaggaccaggaggacagcggccacgacaccatgagctacagagacagctacagcgagtgcaacagcaacagagacagcgtgctgagctacaccagcgtgagaagcaacagcagctacctgggcagcgacgagatgggcagcggcgacgagctgccctgcgacatgagaatccccagcgacaagcaggacaagctgcacggctgcctggagcacctgttcaaccaggtggacagcatcaacgccctgctgaagggccccgtgatgagcagagccttcgaggagaccaagcacttccccatgaaccacagcctgcaggagttcaagcagaaggaggagtgcaccatcagaggcagaagcctgatccagatcagcatccaggaggacccctggaacctgcccaacagcatcaagaccctggtggacaacatccagagatacgtggaggacggcaagaaccagctgctgctggccctgctgaagtgcaccgacaccgagctgcagctgagaagagacgccatcttctgccaggccctggtggccgccgtgtgcaccttcagcaagcagctgctggccgccctgggctacagatacaacaacaacggcgagtacgaggagagcagcagagacgccagcagaaagtggctggagcaggtggccgccaccggcgtgctgctgcactgccagagcctgctgagccccgccaccgtgaaggaggagagaaccatgctggaggacatctgggtgaccctgagcgagctggacaacgtgaccttcagcttcaagcagctggacgagaactacgtggccaacaccaacgtgttctaccacatcgagggcagcagacaggccctgaaggtgatcttctacctggacagctaccacttcagcaagctgcccagcagactggagggcggcgccagcctgagactgcacaccgccctgttcaccaaggtgctggagaacgtggagggcctgcccagccccggcagccaggccgccgaggacctgcagcaggacatcaacgcccagagcctggagaaggtgcagcagtactacagaaagctgagagccttctacctggagagaagcaacctgcccaccgacgccagcaccaccgccgtgaagatcgaccagctgatcagacccatcaacgccctggacgagctgtgcagactgatgaagagcttcgtgcaccccaagcccggcgccgccggcagcgtgggcgccggcctgatccccatcagcagcgagctgtgctacagactgggcgcctgccagatggtgatgtgcggcaccggcatgcagagaagcaccctgagcgtgagcctggagcaggccgccatcctggccagaagccacggcctgctgcccaagtgcatcatgcaggccaccgacatcatgagaaagcagggccccagagtggagatcctggccaagaacctgagagtgaaggaccagatgccccagggcgcccccagactgtacagactgtgccagccccccgtggacggcgacctgtag

SEQ ID NO: 93043 - DNA, 4686 bp, synthetic construct
  misc_feature 1..4686: note = Description of Artificial Sequence: Synthetic coding sequence
  source 1..4686: mol_type = other DNA
atggaggcccccagcggcagcgagcccggcggcgacggcgccggcgactgcgcccaccccgaccccagagcccccggcgccgccgcccccagcagcggccccggcccctgcgccgccgccagagagagcgagagacagctgagactgagactgtgcgtgctgaacgagatcctgggcaccgagagagactacgtgggcaccctgagattcctgcagagcgccttcctgcacagaatcagacagaacgtggccgacagcgtggagaagggcctgaccgaggagaacgtgaaggtgctgttcagcaacatcgaggacatcctggaggtgcacaaggacttcctggccgccctggagtactgcctgcaccccgagccccagagccagcacgagctgggcaacgtgttcctgaagttcaaggacaagttctgcgtgtacgaggagtactgcagcaaccacgagaaggccctgagactgctggtggagctgaacaagatccccaccgtgagagccttcctgctgagctgcatgctgctgggcggcagaaagaccaccgacatccccctggagggctacctgctgagccccatccagagaatctgcaagtaccccctgctgctgaaggagctggccaagagaacccccggcaagcaccccgaccaccccgccgtgcagagcgccctgcaggccatgaagaccgtgtgcagcaacatcaacgagaccaagagacagatggagaagctggaggccctggagcagctgcagagccacatcgagggctgggagggcagcaacctgaccgacatctgcacccagctgctgctgcagggcaccctgctgaagatcagcgccggcaacatccaggagagagccttcttcctgttcgacaacctgctggtgtactgcaagagaaagagcagagtgaccggcagcaagaagagcaccaagagaaccaagagcatcaacggcagcctgtacatcttcagaggcagaatcaacaccgaggtgatggaggtggagaacgtggaggacggcaccgccgactaccacagcaacggctacaccgtgaccaacggctggaagatccacaacaccgccaagaacaagtggttcgtgtgcatggccaagaccgccgaggagaagcagaagtggctggacgccatcatcagagagagagagcagagagagagcctgaagctgggcatggagagagacgcctacgtgatgatcgccgagaagggcgagaagctgtaccacatgatgatgaacaagaaggtgaacctgatcaaggacagaagaagaaagctgagcaccgtgcccaagtgcttcctgggcaacgagttcgtggcctggctgctggagatcggcgagatcagcaagaccgaggagggcgtgaacctgggccaggccctgctggagaacggcatcatccaccacgtgagcgacaagcaccagttcaagaacgagcaggtgatgtacagattcagatacgacgacggcacctacaaggccagaagcgagctggaggacatcatgagcaagggcgtgagactgtactgcagactgcacagcctgtacacccccgtgatcaaggacagagactaccacctgaagacctacaagagcgtgctgcccggcagcaagctggtggactggctgctggcccagggcgactgccagaccagagaggaggccgtggccctgggcgtgggcctgtgcaacaacggcttcatgcaccacgtgctggagaagagcgagttcagagacgagagccagtacttcagattccacgccgacgaggagatggagggcaccagcagcaagaacaagcagctgagaaacgacttcaagctggtggagaacatcctggccaagagactgctgatcctgccccaggaggaggactacggcttcgacatcgaggagaagaacaaggccgtggtggtgaagagcgtgcagagaggcagcctggccgaggtggccggcctgcaggtgggcagaaagatctacagcatcaacgaggacctggtgttcctgagacccttcagcgaggtggagagcatcctgaaccagagcttctgcagcagaagacccctgagactgctggtggccaccaaggccaaggagatcatcaagatccccgaccagcccgacaccctgtgcttccagatcagaggcgccgcccccccctacgtgtacgccgtgggcagaggcagcgaggccatggccgccggcctgtgcgccggccagtgcatcctgaaggtgaacggcagcaacgtgatgaacgacggcgcccccgaggtgctggagcacttccaggccttcagaagcagaagagaggaggccctgggcctgtaccagtggatctaccacacccacgaggacgcccaggaggccagagccagccaggaggccagcaccgaggaccccagcggcgagcaggcccaggaggaggaccaggccgacagcgccttccccctgctgagcctgggccccagactgagcctgtgcgaggacagccccatggtgaccctgaccgtggacaacgtgcacctggagcacggcgtggtgtacgagtacgtgagcaccgccggcgtgagatgccacgtgctggagaagatcgtggagcccagaggctgcttcggcctgaccgccaagatcctggaggccttcgccgccaacgacagcgtgttcgtggagaactgcagaagactgatggccctgagcagcgccatcgtgaccatgccccacttcgagttcagaaacatctgcgacaccaagctggagagcatcggccagagaatcgcctgctaccaggagttcgccgcccagctgaagagcagagtgagcccccccttcaagcaggcccccctggagccccaccccctgtgcggcctggacttctgccccaccaactgccacatcaacctgatggaggtgagctaccccaagaccacccccagcgtgggcagaagcttcagcatcagattcggcagaaagcccagcctgatcggcctggaccccgagcagggccacctgaaccccatgagctacacccagcactgcatcaccaccatggccgcccccagctggaagtgcctgcccgccgccgagggcgacccccagggccagggcctgcacgacggcagcttcggccccgccagcggcaccctgggccaggaggacagaggcctgagcttcctgctgaagcaggaggacagagagatccaggacgcctacctgcagctgttcaccaagctggacgtggccctgaaggagatgaagcagtacgtgacccagatcaacagactgctgagcaccatcaccgagcccaccagcggcggcagctgcgacgccagcctggccgaggaggccagcagcctgcccctggtgagcgaggagagcgagatggacagaagcgaccacggcggcatcaagaaggtgtgcttcaaggtggccgaggaggaccaggaggacagcggccacgacaccatgagctacagagacagctacagcgagtgcaacagcaacagagacagcgtgctgagctacaccagcgtgagaagcaacagcagctacctgggcagcgacgagatgggcagcggcgacgagctgccctgcgacatgagaatccccagcgacaagcaggacaagctgcacggctgcctggagcacctgttcaaccaggtggacagcatcaacgccctgctgaagggccccgtgatgagcagagccttcgaggagaccaagcacttccccatgaaccacagcctgcaggagttcaagcagaaggaggagtgcaccatcagaggcagaagcctgatccagatcagcatccaggaggacccctggaacctgcccaacagcatcaagaccctggtggacaacatccagagatacgtggaggacggcaagaaccagctgctgctggccctgctgaagtgcaccgacaccgagctgcagctgagaagagacgccatcttctgccaggccctggtggccgccgtgtgcaccttcagcaagcagctgctggccgccctgggctacagatacaacaacaacggcgagtacgaggagagcagcagagacgccagcagaaagtggctggagcaggtggccgccaccggcgtgctgctgcactgccagagcctgctgagccccgccaccgtgaaggaggagagaaccatgctggaggacatctgggtgaccctgagcgagctggacaacgtgaccttcagcttcaagcagctggacgagaactacgtggccaacaccaacgtgttctaccacatcgagggcagcagacaggccctgaaggtgatcttctacctggacagctaccacttcagcaagctgcccagcagactggagggcggcgccagcctgagactgcacaccgccctgttcaccaagggcgagctgcaggcctggggcagagaggaccacggcggcagagccaaggccaccaagcacaccggcagccagccccccgccagacccagacacctgcccagccagtgctggagaacctggagaggctgcctgctgcaggccgccagacccagaagaatctgcagcagaaccagcaccagaagcccctggagaaagttcagcagcatcaccgccaacagcggccacttcacctggagcggcctgacctgccccagaatgcccgcccccagaagatag

SEQ ID NO: 93044 - DNA, 4821 bp, synthetic construct
  misc_feature 1..4821: note = Description of Artificial Sequence: Synthetic coding sequence
  source 1..4821: mol_type = other DNA
atgagcgaggacagcagaggcgacagcagagccgagagcgccaaggacctggagaagcagctgagactgagagtgtgcgtgctgagcgagctgcagaagaccgagagagactacgtgggcaccctggagttcctggtgagcgccttcctgcacagaatgaaccagtgcgccgccagcaaggtggacaagaacgtgaccgaggagaccgtgaagatgctgttcagcaacatcgaggacatcctggccgtgcacaaggagttcctgaaggtggtggaggagtgcctgcaccccgagcccaacgcccagcaggaggtgggcacctgcttcctgcacttcaaggacaagttcagaatctacgacgagtactgcagcaaccacgagaaggcccagaagctgctgctggagctgaacaagatcagaaccatcagaaccttcctgctgaactgcatgctgctgggcggcagaaagaacaccgacgtgcccctggagggctacctggtgacccccatccagagaatctgcaagtaccccctgatcctgaaggagctgctgaagagaacccccagaaagcacagcgactacgccgccgtgatggaggccctgcaggccatgaaggccgtgtgcagcaacatcaacgaggccaagagacagatggagaagctggaggtgctggaggagtggcagagccacatcgagggctgggagggcagcaacatcaccgacacctgcaccgagatgctgatgtgcggcgtgctgctgaagatcagcagcggcaacatccaggagagagtgttcttcctgttcgacaacctgctggtgtactgcaagagaaagcacagaagactgaagaacagcaaggccagcaccgacggccacagatacctgttcagaggcagaatcaacaccgaggtgatggaggtggagaacgtggacgacggcaccgccgacttccacagcagcggccacatcgtggtgaacggctggaagatccacaacaccgccaagaacaagtggttcgtgtgcatggccaagacccccgaggagaagcacgagtggttcgaggccatcctgaaggagagagagagaagaaagggcctgaagctgggcatggagcaggacacctgggtgatgatcagcgagcagggcgagaagctgtacaagatgatgtgcagacagggcaacctgatcaaggacagaaagagaaagctgaccaccttccccaagtgcttcctgggcagcgagttcgtgagctggctgctggagatcggcgagatccacagacccgaggagggcgtgcacctgggccaggccctgctggagaacggcatcatccaccacgtgaccgacaagcaccagttcaagcccgagcagatgctgtacagattcagatacgacgacggcaccttctaccccagaaacgagatgcaggacgtgatcagcaagggcgtgagactgtactgcagactgcacagcctgttcacccccgtgatcagagacaaggactaccacctgagaacctacaagagcgtggtgatggccaacaagctgatcgactggctgatcgcccagggcgactgcagaaccagagaggaggccatgatcttcggcgtgggcctgtgcgacaacggcttcatgcaccacgtgctggagaagagcgagttcaaggacgagcccctgctgttcagattcttcagcgacgaggagatggagggcagcaacatgaagcacagactgatgaagcacgacctgaaggtggtggagaacgtgatcgccaagagcctgctgatcaagagcaacgagggcagctacggcttcggcctggaggacaagaacaaggtgcccatcatcaagctggtggagaagggcagcaacgccgagatggccggcatggaggtgggcaagaagatcttcgccatcaacggcgacctggtgttcatgagacccttcaacgaggtggactgcttcctgaagagctgcctgaacagcagaaagcccctgagagtgctggtgagcaccaagcccagagagaccgtgaagatccccgacagcgccgacggcctgggcttccagatcagaggcttcggccccagcgtggtgcacgccgtgggcagaggcaccgtggccgccgccgccggcctgcaccccggccagtgcatcatcaaggtgaacggcatcaacgtgagcaaggagacccacgccagcgtgatcgcccacgtgaccgcctgcagaaagtacagaagacccaccaagcaggacagcatccagtgggtgtacaacagcatcgagagcgcccaggaggacctgcagaagagccacagcaagccccccggcgacgaggccggcgacgccttcgactgcaaggtggaggaggtgatcgacaagttcaacaccatggccatcatcgacggcaagaaggagcacgtgagcctgaccgtggacaacgtgcacctggagtacggcgtggtgtacgagtacgacagcaccgccggcatcaagtgcaacgtggtggagaagatgatcgagcccaagggcttcttcagcctgaccgccaagatcctggaggccctggccaagagcgacgagcacttcgtgcagaactgcaccagcctgaacagcctgaacgaggtgatccccaccgacctgcagagcaagttcagcgccctgtgcagcgagagaatcgagcacctgtgccagagaatcagcagctacaagaagttcagcagagtgctgaagaacagagcctggcccaccttcaagcaggccaagagcaagatcagccccctgcacagcagcgacttctgccccaccaactgccacgtgaacgtgatggaggtgagctaccccaagaccagcaccagcctgggcagcgccttcggcgtgcagctggacagcagaaagcacaacagccacgacaaggagaacaagagcagcgagcagggcaagctgagccccatggtgtacatccagcacaccatcaccaccatggccgcccccagcggcctgagcctgggccagcaggacggccacggcctgagatacctgctgaaggaggaggacctggagacccaggacatctaccagaagctgctgggcaagctgcagaccgccctgaaggaggtggagatgtgcgtgtgccagatcgacgacctgctgagcagcatcacctacagccccaagctggagagaaagaccagcgagggcatcatccccaccgacagcgacaacgagaagggcgagagaaacagcaagagagtgtgcttcaacgtggccggcgacgagcaggaggacagcggccacgacaccatcagcaacagagacagctacagcgactgcaacagcaacagaaacagcatcgccagcttcaccagcatctgcagcagccagtgcagcagctacttccacagcgacgagatggacagcggcgacgagctgcccctgagcgtgagaatcagccacgacaagcaggacaagatccacagctgcctggagcacctgttcagccaggtggacagcatcaccaacctgctgaagggccaggccgtggtgagagccttcgaccagaccaagtacctgacccccggcagaggcctgcaggagttccagcaggagatggagcccaagctgagctgccccaagagactgagactgcacatcaagcaggacccctggaacctgcccagcagcgtgagaaccctggcccagaacatcagaaagttcgtggaggaggtgaagtgcagactgctgctggccctgctggagtacagcgacagcgagacccagctgagaagagacatggtgttctgccagaccctggtggccaccgtgtgcgccttcagcgagcagctgatggccgccctgaaccagatgttcgacaacagcaaggagaacgagatggagacctgggaggccagcagaagatggctggaccagatcgccaacgccggcgtgctgttccacttccagagcctgctgagccccaacctgaccgacgagcaggccatgctggaggacaccctggtggccctgttcgacctggagaaggtgagcttctacttcaagcccagcgaggaggagcccctggtggccaacgtgcccctgacctaccaggccgagggcagcagacaggccctgaaggtgtacttctacatcgacagctaccacttcgagcagctgccccagagactgaagaacggcggcggcttcaagatccaccccgtgctgttcgcccaggccctggagagcatggagggctactactacagagacaacgtgagcgtggaggagttccaggcccagatcaacgccgccagcctggagaaggtgaagcagtacaaccagaagctgagagccttctacctggacaagagcaacagcccccccaacagcaccagcaaggccgcctacgtggacaagctgatgagacccctgaacgccctggacgagctgtacagactggtggccagcttcatcagaagcaagagaaccgccgcctgcgccaacaccgcctgcagcgccagcggcgtgggcctgctgagcgtgagcagcgagctgtgcaacagactgggcgcctgccacatcatcatgtgcagcagcggcgtgcacagatgcaccctgagcgtgaccctggagcaggccatcatcctggccagaagccacggcctgccccccagatacatcatgcaggccaccgacgtgatgagaaagcagggcgccagagtgcagaacaccgccaagaacctgggcgtgagagacagaaccccccagagcgcccccagactgtacaagctgtgcgagccccccccccccgccggcgaggagtag

SEQ ID NO: 93045 - DNA, 3525 bp, synthetic construct
  misc_feature 1..3525: note = Description of Artificial Sequence: Synthetic coding sequence
  source 1..3525: mol_type = other DNA
atgagcgaggacagcagaggcgacagcagagccgagagcgccaaggacctggagaagcagctgagactgagagtgtgcgtgctgagcgagctgcagaagaccgagagagactacgtgggcaccctggagttcctggtgagcgccttcctgcacagaatgaaccagtgcgccgccagcaaggtggacaagaacgtgaccgaggagaccgtgaagatgctgttcagcaacatcgaggacatcctggccgtgcacaaggagttcctgaaggtggtggaggagtgcctgcaccccgagcccaacgcccagcaggaggtgggcacctgcttcctgcacttcaaggacaagttcagaatctacgacgagtactgcagcaaccacgagaaggcccagaagctgctgctggagctgaacaagatcagaaccatcagaaccttcctgctgaactgcatgctgctgggcggcagaaagaacaccgacgtgcccctggagggctacctggtgacccccatccagagaatctgcaagtaccccctgatcctgaaggagctgctgaagagaacccccagaaagcacagcgactacgccgccgtgatggaggccctgcaggccatgaaggccgtgtgcagcaacatcaacgaggccaagagacagatggagaagctggaggtgctggaggagtggcagagccacatcgagggctgggagggcagcaacatcaccgacacctgcaccgagatgctgatgtgcggcgtgctgctgaagatcagcagcggcaacatccaggagagagtgttcttcctgttcgacaacctgctggtgtactgcaagagaaagcacagaagactgaagaacagcaaggccagcaccgacggccacagatacctgttcagaggcagaatcaacaccgaggtgatggaggtggagaacgtggacgacggcaccgccgacttccacagcagcggccacatcgtggtgaacggctggaagatccacaacaccgccaagaacaagtggttcgtgtgcatggccaagacccccgaggagaagcacgagtggttcgaggccatcctgaaggagagagagagaagaaagggcctgaagctgggcatggagcaggacacctgggtgatgatcagcgagcagggcgagaagctgtacaagatgatgtgcagacagggcaacctgatcaaggacagaaagagaaagctgaccaccttccccaagtgcttcctgggcagcgagttcgtgagctggctgctggagatcggcgagatccacagacccgaggagggcgtgcacctgggccaggccctgctggagaacggcatcatccaccacgtgaccgacaagcaccagttcaagcccgagcagatgctgtacagattcagatacgacgacggcaccttctaccccagaaacgagatgcaggacgtgatcagcaagggcgtgagactgtactgcagactgcacagcctgttcacccccgtgatcagagacaaggactaccacctgagaacctacaagagcgtggtgatggccaacaagctgatcgactggctgatcgcccagggcgactgcagaaccagagaggaggccatgatcttcggcgtgggcctgtgcgacaacggcttcatgcaccacgtgctggagaagagcgagttcaaggacgagcccctgctgttcagattcttcagcgacgaggagatggagggcagcaacatgaagcacagactgatgaagcacgacctgaaggtggtggagaacgtgatcgccaagagcctgctgatcaagagcaacgagggcagctacggcttcggcctggaggacaagaacaaggtgcccatcatcaagctggtggagaagggcagcaacgccgagatggccggcatggaggtgggcaagaagatcttcgccatcaacggcgacctggtgttcatgagacccttcaacgaggtggactgcttcctgaagagctgcctgaacagcagaaagcccctgagagtgctggtgagcaccaagcccagagagaccgtgaagatccccgacagcgccgacggcctgggcttccagatcagaggcttcggccccagcgtggtgcacgccgtgggcagaggcaccgtggccgccgccgccggcctgcaccccggccagtgcatcatcaaggtgaacggcatcaacgtgagcaaggagacccacgccagcgtgatcgcccacgtgaccgcctgcagaaagtacagaagacccaccaagcaggacagcatccagtgggtgtacaacagcatcgagagcgcccaggaggacctgcagaagagccacagcaagccccccggcgacgaggccggcgacgccttcgactgcaaggtggaggaggtgatcgacaagttcaacaccatggccatcatcgacggcaagaaggagcacgtgagcctgaccgtggacaacgtgcacctggagtacggcgtggtgtacgagtacgacagcaccgccggcatcaagtgcaacgtggtggagaagatgatcgagcccaagggcttcttcagcctgaccgccaagatcctggaggccctggccaagagcgacgagcacttcgtgcagaactgcaccagcctgaacagcctgaacgaggtgatccccaccgacctgcagagcaagttcagcgccctgtgcagcgagagaatcgagcacctgtgccagagaatcagcagctacaagaaggtgagcgtgctgctgatcctgtacaccatcatcgtggagatgtaccacttcaccgagatgatcaccctgtacaacatcctggagctggtgagaccccccaacagcgagttcttcttcagcttcctgcccaccaagagaatgaagaccctgaaccagaagaaggtgacccacatgaagaagaccaacatccagctgcagttcagcagagtgctgaagaacagagcctggcccaccttcaagcaggccaagagcaagatcagccccctgcacagcagcgacttctgccccaccaactgccacgtgaacgtgatggaggtgagctaccccaagaccagcaccagcctgggcagcgccttcggcgtgcagtggaagctgagccccatggtgtacatccagcacaccatcaccaccatggccgcccccagcggcctgagcctgggccagcaggacggccacggcctgagatacctgctggagagaaagaccagcgagggcatcatccccaccgacagcgacaacgagaagggcgagagaaacagcaagagagtgtgcttcaacgtggccggcgacgagcaggaggacagcggccacgacaccatcagcaacagagacagctacagcttcagcgactgcaacagcaacagaaacagcatcgccagcttcaccagcatctgcagcagccagtgcagcagctacttccacagcgacgagatggacagcggcagcgacgagctgcccctgagcgtgagaatcagccacgacaagcaggacaagatccacagctgcctggagcacctgttcagccagtag

SEQ ID NO: 93046 - DNA, 1650 bp, synthetic construct
  misc_feature 1..1650: note = Description of Artificial Sequence: Synthetic coding sequence
  source 1..1650: mol_type = other DNA
atggccagcgccagcagcggccccagcagcagcgtgggcttcagcagcttcgaccccgccgtgcccagctgcaccctgagcagcgccagcggcatcaagagacccatggccagcgaggtgccctacgccagcggcatgcccatcaagaagatcggccacagaagcgtggacagcagcggcgagaccacctacaagaagaccaccagcagcgccctgaagggcgccatccagctgggcatcacccacaccgtgggcagcctgagcaccaagcccgagagagacgtgctgatgcaggacttctacgtggtggagagcatcttcttccccagcgagggcagcaacctgacccccgcccaccactacaacgacttcagattcaagacctacgcccccgtggccttcagatacttcagagagctgttcggcatcagacccgacgactacctgtacagcctgtgcagcgagcccctgatcgagctgtgcagcagcggcgccagcggcagcctgttctacgtgagcagcgacgacgagttcatcatcaagaccgtgcagcacaaggaggccgagttcctgcagaagctgctgcccggctactacatgaacctgaaccagaaccccagaaccctgctgcccaagttctacggcctgtactgcgtgcaggccggcggcaagaacatcagaatcgtggtgatgaacaacctgctgcccagaagcgtgaagatgcacatcaagtacgacctgaagggcagcacctacaagagaagagccagccagaaggagagagagaagcccctgcccaccttcaaggacctggacttcctgcaggacatccccgacggcctgttcctggacgccgacatgtacaacgccctgtgcaagaccctgcagagagactgcctggtgctgcagagcttcaagatcatggactacagcctgctgatgagcatccacaacatcgaccacgcccagagagagcccctgagcagcgagacccagtacagcgtggacaccagaagacccgccccccagaaggccctgtacagcaccgccatggagagcatccagggcgaggccagaagaggcggcaccatggagaccgacgaccacatgggcggcatccccgccagaaacagcaagggcgagagactgctgctgtacatcggcatcatcgacatcctgcagagctacagattcgtgaagaagctggagcacagctggaaggccctggtgcacgacggcgacaccgtgagcgtgcacagacccggcttctacgccgagagattccagagattcatgtgcaacaccgtgttcaagaagatccccctgaagcccagccccagcaagaagttcagaagcggcagcagcttcagcagaagagccggcagcagcggcaacagctgcatcacctaccagcccagcgtgagcggcgagcacaaggcccaggtgaccaccaaggccgaggtggagcccggcgtgcacctgggcagacccgacgtgctgccccagaccccccccctggaggagatcagcgagggcagccccatccccgaccccagcttcagccccctggtgggcgagaccctgcagatgctgaccaccagcaccaccctggagaagctggaggtggccgagagcgagttcacccactag

SEQ ID NO: 93047 - DNA, 1689 bp, synthetic construct
  misc_feature 1..1689: note = Description of Artificial Sequence: Synthetic coding sequence
  source 1..1689: mol_type = other DNA
atggccagcgccagcagcggccccagcagcagcgtgggcttcagcagcttcgaccccgccgtgcccagctgcaccctgagcagcgccgccagcggcatcaagagacccatggccagcgaggtgctggaggccagacaggacagctacatcagcctggtgccctacgccagcggcatgcccatcaagaagatcggccacagaagcgtggacagcagcggcgagaccacctacaagaagaccaccagcagcgccctgaagggcgccatccagctgggcatcacccacaccgtgggcagcctgagcaccaagcccgagagagacgtgctgatgcaggacttctacgtggtggagagcatcttcttccccagcgagggcagcaacctgacccccgcccaccactacaacgacttcagattcaagacctacgcccccgtggccttcagatacttcagagagctgttcggcatcagacccgacgactacctgtacagcctgtgcagcgagcccctgatcgagctgtgcagcagcggcgccagcggcagcctgttctacgtgagcagcgacgacgagttcatcatcaagaccgtgcagcacaaggaggccgagttcctgcagaagctgctgcccggctactacatgaacctgaaccagaaccccagaaccctgctgcccaagttctacggcctgtactgcgtgcaggccggcggcaagaacatcagaatcgtggtgatgaacaacctgctgcccagaagcgtgaagatgcacatcaagtacgacctgaagggcagcacctacaagagaagagccagccagaaggagagagagaagcccctgcccaccttcaaggacctggacttcctgcaggacatccccgacggcctgttcctggacgccgacatgtacaacgccctgtgcaagaccctgcagagagactgcctggtgctgcagagcttcaagatcatggactacagcctgctgatgagcatccacaacatcgaccacgcccagagagagcccctgagcagcgagacccagtacagcgtggacaccagaagacccgccccccagaaggccctgtacagcaccgccatggagagcatccagggcgaggccagaagaggcggcaccatggagaccgacgaccacatgggcggcatccccgccagaaacagcaagggcgagagactgctgctgtacatcggcatcatcgacatcctgcagagctacagattcgtgaagaagctggagcacagctggaaggccctggtgcacgacggcgacaccgtgagcgtgcacagacccggcttctacgccgagagattccagagattcatgtgcaacaccgtgttcaagaagatccccctgaagcccagccccagcaagaagttcagaagcggcagcagcttcagcagaagagccggcagcagcggcaacagctgcatcacctaccagcccagcgtgagcggcgagcacaaggcccaggtgaccaccaaggccgaggtggagcccggcgtgcacctgggcagacccgacgtgctgccccagaccccccccctggaggagatcagcgagggcagccccatccccgaccccagcttcagccccctggtgggcgagaccctgcagatgctgaccaccagcaccaccctggagaagctggaggtggccgagagcgagttcacccactag

SEQ ID NO: 93048 - DNA, 1503 bp, synthetic construct
  misc_feature 1..1503: note = Description of Artificial Sequence: Synthetic coding sequence
  source 1..1503: mol_type = other DNA
atggccagcgccagcagcggccccagcagcagcgtgggcttcagcagcttcgaccccgccgtgcccagctgcaccctgagcagcgccagcggcatcaagagacccatggccagcgaggtgccctacgccagcggcatgcccatcaagaagatcggccacagaagcgtggacagcagcggcgagaccacctacaagaagaccaccagcagcgccctgaagggcgccatccagctgggcatcacccacaccgtgggcagcctgagcaccaagcccgagagagacgtgctgatgcaggacttctacgtggtggagagcatcttcttccccagcgagggcagcaacctgacccccgcccaccactacaacgacttcagattcaagacctacgcccccgtggccttcagatacttcagagagctgttcggcatcagacccgacgactacctgtacagcctgtgcagcgagcccctgatcgagctgtgcagcagcggcgccagcggcagcctgttctacgtgagcagcgacgacgagttcatcatcaagaccgtgcagcacaaggaggccgagttcctgcagaagctgctgcccggctactacatgaacctgaaccagaaccccagaaccctgctgcccaagttctacggcctgtactgcgtgcaggccggcggcaagaacatcagaatcgtggtgatgaacaacctgctgcccagaagcgtgaagatgcacatcaagtacgacctgaagggcagcacctacaagagaagagccagccagaaggagagagagaagcccctgcccaccttcaaggacctggacttcctgcaggacatccccgacggcctgttcctggacgccgacatgtacaacgccctgtgcaagaccctgcagagagactgcctggtgctgcagagcttcaagatcatggactacagcctgctgatgagcatccacaacatcgaccacgcccagagagagcccctgagcagcgagacccagtacagcgtggacaccagaagacccgccccccagaaggccctgtacagcaccgccatggagagcatccagggcgaggccagaagaggcggcaccatggagaccgacgaccacatgggcggcatccccgccagaaacagcaagggcgagagactgctgctgtacatcggcatcatcgacatcctgcagagctacagattcgtgaagaagctggagcacagctggaaggccctggtgcacgacggcgacaccgtgagcgtgcacagacccggcttctacgccgagagattccagagattcatgtgcaacaccgtgttcaagaagatcccctgcgtgcacctgggcagacccgacgtgctgccccagaccccccccctggaggagatcagcgagggcagccccatccccgaccccagcttcagccccctggtgggcgagaccctgcagatgctgaccaccagcaccaccctggagaagctggaggtggccgagagcgagttcacccactag

SEQ ID NO: 93049 - DNA, 1653 bp, synthetic construct
  misc_feature 1..1653: note = Description of Artificial Sequence: Synthetic coding sequence
  source 1..1653: mol_type = other DNA
atggccagcgccagcagcggccccagcagcagcgtgggcttcagcagcttcgaccccgccgtgcccagctgcaccctgagcagcgccgccagcggcatcaagagacccatggccagcgaggtgccctacgccagcggcatgcccatcaagaagatcggccacagaagcgtggacagcagcggcgagaccacctacaagaagaccaccagcagcgccctgaagggcgccatccagctgggcatcacccacaccgtgggcagcctgagcaccaagcccgagagagacgtgctgatgcaggacttctacgtggtggagagcatcttcttccccagcgagggcagcaacctgacccccgcccaccactacaacgacttcagattcaagacctacgcccccgtggccttcagatacttcagagagctgttcggcatcagacccgacgactacctgtacagcctgtgcagcgagcccctgatcgagctgtgcagcagcggcgccagcggcagcctgttctacgtgagcagcgacgacgagttcatcatcaagaccgtgcagcacaaggaggccgagttcctgcagaagctgctgcccggctactacatgaacctgaaccagaaccccagaaccctgctgcccaagttctacggcctgtactgcgtgcaggccggcggcaagaacatcagaatcgtggtgatgaacaacctgctgcccagaagcgtgaagatgcacatcaagtacgacctgaagggcagcacctacaagagaagagccagccagaaggagagagagaagcccctgcccaccttcaaggacctggacttcctgcaggacatccccgacggcctgttcctggacgccgacatgtacaacgccctgtgcaagaccctgcagagagactgcctggtgctgcagagcttcaagatcatggactacagcctgctgatgagcatccacaacatcgaccacgcccagagagagcccctgagcagcgagacccagtacagcgtggacaccagaagacccgccccccagaaggccctgtacagcaccgccatggagagcatccagggcgaggccagaagaggcggcaccatggagaccgacgaccacatgggcggcatccccgccagaaacagcaagggcgagagactgctgctgtacatcggcatcatcgacatcctgcagagctacagattcgtgaagaagctggagcacagctggaaggccctggtgcacgacggcgacaccgtgagcgtgcacagacccggcttctacgccgagagattccagagattcatgtgcaacaccgtgttcaagaagatccccctgaagcccagccccagcaagaagttcagaagcggcagcagcttcagcagaagagccggcagcagcggcaacagctgcatcacctaccagcccagcgtgagcggcgagcacaaggcccaggtgaccaccaaggccgaggtggagcccggcgtgcacctgggcagacccgacgtgctgccccagaccccccccctggaggagatcagcgagggcagccccatccccgaccccagcttcagccccctggtgggcgagaccctgcagatgctgaccaccagcaccaccctggagaagctggaggtggccgagagcgagttcacccactag

SEQ ID NO: 93050 - DNA, 597 bp, synthetic construct
  misc_feature 1..597: note = Description of Artificial Sequence: Synthetic coding sequence
  source 1..597: mol_type = other DNA
atgtacaacgccctgtgcaagaccctgcagagagactgcctggtgctgcagagcttcaagatcatggactacagcctgctgatgagcatccacaacatcgaccacgcccagagagagcccctgagcagcgagacccagtacagcgtggacaccagaagacccgccccccagaaggccctgtacagcaccgccatggagagcatccagggcgaggccagaagaggcggcaccatggagaccgacgaccacatgggcggcatccccgccagaaacagcaagggcgagagactgctgctgtacatcggcatcatcgacatcctgcagagctacagattcgtgaagaagctggagcacagctggaaggccctggtgcacgacggcgacaccgtgagcgtgcacagacccggcttctacgccgagagattccagagattcatgtgcaacaccgtgttcaagaagatccccctgcagccctggaagagcctgaagctgcagagccagagcagccccatcaagagaaaggccagcgaggacctggagcaggacagcgccatcagcgtgatccccagatgccagcccctgccccagcagtgctag

SEQ ID NO: 93051 - DNA, 261 bp, synthetic construct
  misc_feature 1..261: note = Description of Artificial Sequence: Synthetic coding sequence
  source 1..261: mol_type = other DNA
atggccagcgaggtgctggaggccagacaggacagctacatcagcctggtgccctacgccagcggcatgcccatcaagaagatcggccacagaagcgtggacagcagcggcgagaccacctacaagaagaccaccagcagcgccctgaagggcgccatccagctgggcatcacccacaccgtgggcagcctgagcaccaagcccgagagagacgtgctgatgcaggacttctacgtggtggagagcatcttcttcccctag

SEQ ID NO: 93052 - DNA, 1569 bp, synthetic construct
  misc_feature 1..1569: note = Description of Artificial Sequence: Synthetic coding sequence
  source 1..1569: mol_type = other DNA
atggccagcgccagcagcggccccagcagcagcgtgggcttcagcagcttcgaccccgccgtgcccagctgcaccctgagcagcgccgccagcggcatcaagagacccatggccagcgaggtgccctacgccagcggcatgcccatcaagaagatcggccacagaagcgtggacagcagcggcgagaccacctacaagaagaccaccagcagcgccctgaagggcgccatccagctgggcatcacccacaccgtgggcagcctgagcaccaagcccgagagagacgtgctgatgcaggacttctacgtggtggagagcatcttcttccccagcgagggcagcaacctgacccccgcccaccactacaacgacttcagattcaagacctacgcccccgtggccttcagatacttcagagagctgttcggcatcagacccgacgactacctgtacagcctgtgcagcgagcccctgatcgagctgtgcagcagcggcgccagcggcagcctgttctacgtgagcagcgacgacgagttcatcatcaagaccgtgcagcacaaggaggccgagttcctgcagaagctgctgcccggctactacatgaacctgaaccagaaccccagaaccctgctgcccaagttctacggcctgtactgcgtgcaggccggcggcaagaacatcagaatcgtggtgatgaacaacctgctgcccagaagcgtgaagatgcacatcaagtacgacctgaagggcagcacctacaagagaagagccagccagaaggagagagagaagcccctgcccaccttcaaggacctggacttcctgcaggacatccccgacggcctgttcctggacgccgacatgtacaacgccctgtgcaagaccctgcagagagactgcctggtgctgcagagcttcaagatcatggactacagcctgctgatgagcatccacaacatcgaccacgcccagagagagcccctgagcagcgagacccagtacagcgtggacaccagaagacccgccccccagaaggccctgtacagcaccgccatggagagcatccagggcgaggccagaagaggcggcaccatggagaccgacgaccagttcgtgaagaagctggagcacagctggaaggccctggtgcacgacggcgacaccgtgagcgtgcacagacccggcttctacgccgagagattccagagattcatgtgcaacaccgtgttcaagaagatccccctgaagcccagccccagcaagaagttcagaagcggcagcagcttcagcagaagagccggcagcagcggcaacagctgcatcacctaccagcccagcgtgagcggcgagcacaaggcccaggtgaccaccaaggccgaggtggagcccggcgtgcacctgggcagacccgacgtgctgccccagaccccccccctggaggagatcagcgagggcagccccatccccgaccccagcttcagccccctggtgggcgagaccctgcagatgctgaccaccagcaccaccctggagaagctggaggtggccgagagcgagttcacccactag

SEQ ID NO: 93053 - DNA, 1623 bp, synthetic construct
  misc_feature 1..1623: note = Description of Artificial Sequence: Synthetic coding sequence
  source 1..1623: mol_type = other DNA
atgagcagcgccgccgagaacggcgaggccgcccccggcaagcagaacgaggagaagacctacaagaagaccgccagcagcgccatcaagggcgccatccagctgggcatcggctacaccgtgggcaacctgaccagcaagcccgagagagacgtgctgatgcaggacttctacgtggtggagagcgtgttcctgcccagcgagggcagcaacctgacccccgcccaccactaccccgacttcagattcaagacctacgcccccctggccttcagatacttcagagagctgttcggcatcaagcccgacgactacctgtacagcatctgcagcgagcccctgatcgagctgagcaaccccggcgccagcggcagcctgttcttcgtgaccagcgacgacgagttcatcatcaagaccgtgcagcacaaggaggccgagttcctgcagaagctgctgcccggctactacatgaacctgaaccagaaccccagaaccctgctgcccaagttctacggcctgtactgcatgcagagcggcggcatcaacatcagaatcgtggtgatgaacaacgtgctgcccagaagcatgagaatgcacttcacctacgacctgaagggcagcacctacaagagaagagccagcagaaaggagagagagaagagcaaccccaccttcaaggacctggacttcctgcaggacatgcacgagggcctgtacttcgacaccgagacctacaacgccctgatgaagaccctgcagagagactgcagagtgctggagagcttcaagatcatggactacagcctgctgctgggcatccacttcctggaccacagcctgaaggagaaggaggaggagaccccccagaacgtgcccgacgccaagagaaccggcatgcagaaggtgctgtacagcaccgccatggagagcatccagggccccggcaagagcggcgacggcatcatcaccgagaaccccgacaccatgggcggcatccccgccaagagccacagaggcgagaagctgctgctgttcatgggcatcatcgacatcctgcagagctacagactgatgaagaagctggagcacagctggaaggccctggtgtacgacggcgacaccgtgagcgtgcacagacccagcttctacgccgacagattcctgaagttcatgaacagcagagtgttcaagaagatccaggccctgaaggccagccccagcaagaagagatgcaacagcatcgccgccctgaaggccaccagccaggagatcgtgagcagcatcagccaggagtggaaggacgagaagagagacctgctgaccgagggccagagcttcagcagcctggacgaggaggccctgggcagcagacacagacccgacctggtgcccagcacccccagcctgttcgaggccgccagcctggccaccaccatcagcagcagcagcctgtacgtgaacgagcactacccccacgacagacccaccctgtacagcaacagcaagggcctgcccagcagcagcaccttcaccctggaggagggcaccatctacctgaccgccgagcccaacaccctggaggtgcaggacgacaacgccagcgtgctggacgtgtacctgtag

SEQ ID NO: 93054 - DNA, 312 bp, synthetic construct
  misc_feature 1..312: note = Description of Artificial Sequence: Synthetic coding sequence
  source 1..312: mol_type = other DNA
atgagcagcgccgccgagaacggcgaggccgcccccggcaagcagaacgaggagaagacctacaagaagaccgccagcagcgccatcaagggcgccatccagctgggcatcggctacaccgtgggcaacctgaccagcaagcccgagagagacgtgctgatgcaggacttctacgtggtggagagcgtgttcctgcccagcgagggcagcaacctgacccccgcccaccactaccccgacttcagattcaagacctacgcccccctggccttcagatacttcagagagctgttcggcatcaagcccgactag

SEQ ID NO: 93055 - DNA, 1623 bp, synthetic construct; identical to SEQ ID NO: 93053
  misc_feature 1..1623: note = Description of Artificial Sequence: Synthetic coding sequence
  source 1..1623: mol_type = other DNA

SEQ ID NO: 93056 - DNA, 1350 bp, synthetic construct
  misc_feature 1..1350: note = Description of Artificial Sequence: Synthetic coding sequence
  source 1..1350: mol_type = other DNA
atgcaggacttctacgtggtggagagcgtgttcctgcccagcgagggcagcaacctgacccccgcccaccactaccccgacttcagattcaagacctacgcccccctggccttcagatacttcagagagctgttcggcatcaagcccgacgactacctgtacagcatctgcagcgagcccctgatcgagctgagcaaccccggcgccagcggcagcctgttcttcgtgaccagcgacgacgagttcatcatcaagaccgtgcagcacaaggaggccgagttcctgcagaagctgctgcccggctactacatgaacctgaaccagaaccccagaaccctgctgcccaagttctacggcctgtactgcatgcagagcggcggcatcaacatcagaatcgtggtgatgaacaacgtgctgcccagaagcatgagaatgcacttcacctacgacctgaagggcagcacctacaagagaagagccagcagaaaggagagagagaagagcaaccccaccttcaaggacctggacttcctgcaggacatgcacgagggcctgtacttcgacaccgagacctacaacgccctgatgaagaccctgcagagagactgcagagtgctggagagcttcaagatcatggactacagcctgctgctgggcatccacttcctggaccacagcctgaaggagaaggaggaggagaccccccagaacgtgcccgacgccaagagaaccggcatgcagaaggtgctgtacagcaccgccatggagagcatccagggccccggcaagagcggcgacggcatcatcaccgagaaccccgacaccatgggcggcatccccgccaagagccacagaggcgagaagctgctgctgttcatgggcatcatcgacatcctgcagagctacagactgatgaagaagctggagcacagctggaaggccctggtgtacgacggcgacaccgtgagcgtgcacagacccagcttctacgccgacagattcctgaagttcatgaacagcagagtgttcaagaagatccaggccctgaaggccagccccagcaagaagagatgcaacagcatcgccgccctgaaggccaccagccaggagatcgtgagcagcatcagccaggagtggaaggacgagaagagagacctgctgaccgagggccagagcttcagcagcctggacgaggaggccctgggcagcagacacagacccgacctggtgcccagcacccccagcctgttcgaggccgccagcctggccaccaccatcagcagcagcagcctgtacgtgaacgagcactacccccacgacagacccaccctgtacagcaacagcaagtag

SEQ ID NO: 93057 - DNA, 489 bp, synthetic construct
  misc_feature 1..489: note = Description of Artificial Sequence: Synthetic coding sequence
  source 1..489: mol_type = other DNA
atgagcagcgccgccgagaacggcgaggccgcccccggcaagcagaacgaggagaagacctacaagaagaccgccagcagcgccatcaagggcgccatccagctgggcatcggctacaccgtgggcaacctgaccagcaagcccgagagagacgtgctgatgcaggacttctacgtggtggagagcgtgttcctgcccagcgagggcagcaacctgacccccgcccaccactaccccgacttcagattcaagacctacgcccccctggccttcagatacttcagagagctgttcggcatcaagcccgacgactacctgtacagcatctgcagcgagcccctgatcgagctgagcaaccccggcgccagcggcagcctgttcttcgtgaccagcgacgacgagttcatcatcaagaccgtgcagcacaaggaggccgagttcctgcagaagctgctgcccggctactacatgaacctgaaccagaactag

SEQ ID NO: 93058 - DNA, 474 bp, synthetic construct
  misc_feature 1..474: note = Description of Artificial Sequence: Synthetic coding sequence
  source 1..474: mol_type = other DNA
atgagcagcgccgccgagaacggcgaggccgcccccggcaagcagaacgaggagaagacctacaagaagaccgccagcagcgccatcaagggcgccatccagctgggcatcggctacaccgtgggcaacctgaccagcaagcccgagagagacgtgctgatgcaggacttctacgtggtggagagcgtgttcctgcccagcgagggcagcaacctgacccccgcccaccactaccccgacttcagattcaagacctacgcccccctggccttcagatacttcagagagctgttcggcatcaagcccgacgactacctgtacagcatctgcagcgagcccctgatcgagctgagcaaccccggcgccagcggcagcctgttcttcgtgaccagcgacgacgagttcatcatcaagaccgtgcagcacaaggaggccgagttcctgcagaagctgctgcccggctactacatgtag

SEQ ID NO: 93059 - DNA, 1509 bp, synthetic construct
  misc_feature 1..1509: note = Description of Artificial Sequence: Synthetic coding sequence
  source 1..1509: mol_type = other DNA
atgagcagcgccgccgagaacggcgaggccgcccccggcaagcagaacgaggagaagacctacaagaagaccgccagcagcgccatcaagggcgccatccagctgggcatcggctacaccgtgggcaacctgaccagcaagcccgagagagacgtgctgatgcaggacttctacgtggtggagagcgtgttcctgcccagcgagggcagcaacctgacccccgcccaccactaccccgacttcagattcaagacctacgcccccctggccttcagatacttcagagagctgttcggcatcaagcccgacgactacctgtacagcatctgcagcgagcccctgatcgagctgagcaaccccggcgccagcggcagcctgttcttcgtgaccagcgacgacgagttcatcatcaagaccgtgcagcacaaggaggccgagttcctgcagaagctgctgcccggctactacatgaacctgaaccagaaccccagaaccctgctgcccaagttctacggcctgtactgcatgcagagcggcggcatcaacatcagaatcgtggtgatgaacaacgtgctgcccagaagcatgagaatgcacttcacctacgacctgaagggcagcacctacaagagaagagccagcagaaaggagagagagaagagcaaccccaccttcaaggacctggacttcctgcaggacatgcacgagggcctgtacttcgacaccgagacctacaacgccctgatgaagaccctgcagagagactgcagagtgctggagagcttcaagatcatggactacagcctgctgctgggcatccacttcctggaccacagcctgaaggagaaggaggaggagaccccccagaacgtgcccgacgccaagagaaccggcatgcagaaggtgctgtacagcaccgccatggagagcatccagggccccggcaagagcggcgacggcatcatcaccgagaaccccgacaccatgggcggcatccccgccaagagccacagaggcgagaagctgctgctgttcatgggcatcatcgacatcctgcagagctacagactgatgaagaagctggagcacagctggaaggccctggtgtacgacggcgacaccgtgagcgtgcacagacccagcttctacgccgacagattcctgaagttcatgaacagcagagtgttcaagaagatccaggccctgaaggccagccccagcaagaagagatgcaacagcatcgccgccctgaaggccaccagccaggagatcgtgagcagcatcagccaggagtggaaggacgagaagagagacctgctgaccgagggccagagcttcagcagcctggacgaggaggccctgggcagcagacacagacccgacctggtgcccagcacccccagcctgttcgaggccgccagcctggccaccaccatcagcagcagcagcctgtacgtgaacgagcactacccccacgacagacccaccctgtacagcaacagcaagtag

SEQ ID NO: 93060 - DNA, 2007 bp, synthetic construct
  misc_feature 1..2007: note = Description of Artificial Sequence: Synthetic coding sequence
  source 1..2007: mol_type = other DNA
atggagctggaggtgcccgacgaggccgagagcgccgaggccggcgccgtgcccagcgaggccgcctgggccgccgagagcggcgccgccgccggcctggcccagaagaaggccgcccccaccgaggtgctgagcatgaccgcccagcccggccccggccacggcaagaagctgggccacagaggcgtggacgccagcggcgagaccacctacaagaagaccaccagcagcaccctgaagggcgccatccagctgggcatcggctacaccgtgggccacctgagcagcaagcccgagagagacgtgctgatgcaggacttctacgtggtggagagcatcttcttccccagcgagggcagcaacctgacccccgcccaccacttccaggacttcagattcaagacctacgcccccgtggccttcagatacttcagagagctgttcggcatcagacccgacgactacctgtacagcctgtgcaacgagcccctgatcgagctgagcaaccccggcgccagcggcagcctgttctacgtgaccagcgacgacgagttcatcatcaagaccgtgatgcacaaggaggccgagttcctgcagaagctgctgcccggctactacatgaacctgaaccagaaccccagaaccctgctgcccaagttctacggcctgtactgcgtgcagagcggcggcaagaacatcagagtggtggtgatgaacaacatcctgcccagagtggtgaagatgcacctgaagttcgacctgaagggcagcacctacaagagaagagccagcaagaaggagaaggagaagagcttccccacctacaaggacctggacttcatgcaggacatgcccgagggcctgctgctggacgccgacaccttcagcgccctggtgaagaccctgcagagagactgcctggtgctggagagcttcaagatcatggactacagcctgctgctgggcgtgcacaacatcgaccagcacgagagagagagacaggcccagggcgcccagagcaccagcgacgagaagagacccgtgggccagaaggccctgtacagcaccgccatggagagcatccagggcggcgccgccagaggcgaggccatcgagagcgacgacaccatgggcggcatccccgccgtgaacggcagaggcgagagactgctgctgcacatcggcatcatcgacatcctgcagagctacagattcatcaagaagctggagcacacctggaaggccctggtgcacgacggcgacaccgtgagcgtgcacagacccagcttctacgccgagagattcttcaagttcatgagcaacaccgtgttcagaaagaacagcagcctgaagagcagccccagcaagaagggcagaggcggcgccctgctggccgtgaagcccctgggccccaccgccgccttcagcgccagccagatccccagcgagagagaggaggcccagtacgacctgagaggcgccagaagctaccccaccctggaggacgagggcagacccgacctgctgccctgcaccccccccagcttcgaggaggccaccaccgccagcatcgccaccaccctgagcagcaccagcctgagcatccccgagagaagccccagcgagaccagcgagcagcccagatacagaagaagaacccagagcagcggccaggacggcagaccccaggaggagccccccgccgaggaggacctgcagcagatcaccgtgcaggtggagcccgcctgcagcgtggagatcgtggtgcccaaggaggaggacgccggcgtggaggccagccccgccggcgccagcgccgccgtggaggtggagaccgccagccaggccagcgacgaggagggcgcccccgccagccaggccagcgacgaggaggacgcccccgccaccgacatctacttccccaccgacgagagaagctgggtgtacagccccctgcactacagcgcccaggccccccccgccagcgacggcgagagcgacacctag

SEQ ID NO: 93061 - DNA, 2103 bp, synthetic construct
  misc_feature 1..2103: note = Description of Artificial Sequence: Synthetic coding sequence
  source 1..2103: mol_type = other DNA
atggagctggaggtgcccgacgaggccgagagcgccgaggccggcgccgtgcccagcgaggccgcctgggccgccgagagcggcgccgccgccggcctggcccagaagaaggccgcccccaccgaggtgctgagcatgaccgcccagcccggccccggccacggcaagaagctgggccacagaggcgtggacgccagcggcgagaccacctacaagaagaccaccagcagcaccctgaagggcgccatccagctgggcatcggctacaccgtgggccacctgagcagcaagcccgagagagacgtgctgatgcaggacttctacgtggtggagagcatcttcttccccagcgagggcagcaacctgacccccgcccaccacttccaggacttcagattcaagacctacgcccccgtggccttcagatacttcagagagctgttcggcatcagacccgacgactacctgtacagcctgtgcaacgagcccctgatcgagctgagcaaccccggcgccagcggcagcctgttctacgtgaccagcgacgacgagttcatcatcaagaccgtgatgcacaaggaggccgagttcctgcagaagctgctgcccggctactacatgaacctgaaccagaaccccagaaccctgctgcccaagttctacggcctgtactgcgtgcagagcggcggcaagaacatcagagtggtggtgatgaacaacatcctgcccagagtggtgaagatgcacctgaagttcgacctgaagggcagcacctacaagagaagagccagcaagaaggagaaggagaagagcttccccacctacaaggacctggacttcatgcaggacatgcccgagggcctgctgctggacgccgacaccttcagcgccctggtgaagaccctgcagagagactgcctggtgctggagagcttcaagatcatggactacagcctgctgctgggcgtgcacaacatcgaccagcacgagagagagagacaggcccagggcgcccagagcaccagcgacgagaagagacccgtgggccagaaggccctgtacagcaccgccatggagagcatccagggcggcgccgccagaggcgaggccatcgagagcgacgacaccatgggcggcatccccgccgtgaacggcagaggcgagagactgctgctgcacatcggcatcatcgacatcctgcagagctacagattcatcaagaagctggagcacacctggaaggccctggtgcacgacggcgacaccgtgagcgtgcacagacccagcttctacgccgagagattcttcaagttcatgagcaacaccgtgttcagaaagaacagcagcctgaagagcagccccagcaagaagggcagaggcggcgccctgctggccgtgaagcccctgggccccaccgccgccttcagcgccagccagatccccagcgagagagaggaggcccagtacgacctgagaggcgccagaagctaccccaccctggaggacgagggcagacccgacctgctgccctgcaccccccccagcttcgaggaggccaccaccgccagcatcgccaccaccctgagcagcaccagcctgagcatccccgagagaagccccagcgagaccagcgagcagcccagatacagaagaagaacccagagcagcggccaggacggcagaccccaggaggagccccccgccgaggaggacctgcagcagatcaccgtgcaggtggagcccgcctgcagcgtggagatcgtggtgcccaaggaggaggacgccggcgtggaggccagccccgccggcgccagcgccgccgtggaggtggagaccgccagccaggccagcgacgaggagggcgcccccgccagccaggccagcgacgaggaggacgcccccgccaccgacatctacttctggagactgtggggcccccacgcccccacctggccctggagaagagagggcagagccgcctgcctgtgcccctaccccccccacgtggtgacccccttccccggcaccggcctgtgcgccagctggagccccgacggcaccggcggcctgggcgccatgagctgctgcgtgagcgtgagctag

SEQ ID NO: 93062 - DNA, 1923 bp, synthetic construct
  misc_feature 1..1923: note = Description of Artificial Sequence: Synthetic coding sequence
  source 1..1923: mol_type = other DNA
atggagctggaggtgcccgacgaggccgagagcgccgaggccggcgccgtgcccagcgaggccgcctgggccgccgagagcggcgccgccgccggcctggcccagaagaaggccgcccccaccgaggtgctgagcatgaccgcccagcccggccccggccacggcaagaagctgggccacagaggcgtggacgccagcggcgagaccacctacaagaagaccaccagcagcaccctgaagggcgccatccagctgggcatcggctacaccgtgggccacctgagcagcaagcccgagagagacgtgctgatgcaggacttctacgtggtggagagcatcttcttccccagcgagggcagcaacctgacccccgcccaccacttccaggacttcagattcaagacctacgcccccgtggccttcagatacttcagagagctgttcggcatcagacccgacgactacctgtacagcctgtgcaacgagcccctgatcgagctgagcaaccccggcgccagcggcagcctgttctacgtgaccagcgacgacgagttcatcatcaagaccgtgatgcacaaggaggccgagttcctgcagaagctgctgcccggctactacatgaacctgaaccagaaccccagaaccctgctgcccaagttctacggcctgtactgcgtgcagagcggcggcaagaacatcagagtggtggtgatgaacaacatcctgcccagagtggtgaagatgcacctgaagttcgacctgaagggcagcacctacaagagaagagccagcaagaaggagaaggagaagagcttccccacctacaaggacctggacttcatgcaggacatgcccgagggcctgctgctggacgccgacaccttcagcgccctggtgaagaccctgcagagagactgcctggtgctggagagcttcaagatcatggactacagcctgctgctgggcgtgcacaacatcgaccagcacgagagagagagacaggcccagggcgcccagagcaccagcgacgagaagagacccgtgggccagaaggccctgtacagcaccgccatggagagcatccagggcggcgccgccagaggcgaggccatcgagagcgacgacaccatgggcggcatccccgccgtgaacggcagaggcgagagactgctgctgcacatcggcatcatcgacatcctgcagagctacagattcatcaagaagctggagcacacctggaaggccctggtgcacgacggcgacaccgtgagcgtgcacagacccagcttctacgccgagagattcttcaagttcatgagcaacaccgtgttcagaaagaacagcagcctgaagagcagccccagcaagaagggcagaggcggcgccctgctggccgtgaagcccctgggccccaccgccgccttcagcgccagccagatccccagcgagagagaggaggcccagtacgacctgagaggcgccagaagctaccccaccctggaggacgagggcagacccgacctgctgccctgcaccccccccagcttcgaggaggccaccaccgccagcatcgccaccaccctgagcagcaccagcctgagcatccccgagagaagccccagcgagaccagcgagcagcccagatacagaagaagaacccagagcagcggccaggacggcagaccccaggaggagccccccgccgaggaggacctgcagcagatcaccgtgcaggtggagcccgcctgcagcgtggagatcgtggtgcccaaggaggaggacgccggcgtggaggccagccccgccggcgccagcgccgccgtggaggtggagaccgccagccaggccagcgacgaggagggcgcccccgccagccaggccagcgacgaggaggacgcccccgccaccgacatctacttctag

SEQ ID NO: 93063 - DNA, 576 bp, synthetic construct
  misc_feature 1..576: note = Description of Artificial Sequence: Synthetic coding sequence
  source 1..576: mol_type = other DNA
atgcagagcgtgttctaccccgccggcagaatcagcgagagatacgacatcaagggctgcgaggtgagcagatgggtggaccccgcccccgagggcagccccctggtgctggtgctgaaggacctgaacttccagggcaagaccatcaacctgggcccccagagaagctggttcctgagacagatggagctggacaccaccttcctgagagagctgaacgtgctggactacagcctgctgatcgccttccagagactgcacgaggacgagagaggccccggcagcagcctgatcttcagaaccgccagaagcgtgcagggcgcccagagccccgaggagagcagagcccagaacagaagactgctgcccgacgcccccaacgccctgcacatcctggacggccccgagcagagatacttcctgggcgtggtggacctggccaccgtgtacggcctgagaaagagactggagcacctgtggaagaccctgagataccccggcagaaccttcagcaccgtgagccccgccagatacgccagaagactgtgccagtgggtggaggcccacaccgagtag

SEQ ID NO: 93064 - DNA, 1185 bp, synthetic construct
  misc_feature 1..1185: note = Description of Artificial Sequence: Synthetic coding sequence
  source 1..1185: mol_type = other DNA
atggccgcccccagccccggccccagagaggtgctggcccccagccccgaggccggctgcagagccgtgaccagcagcagaagaggcctgctgtggagactgagagacaagcagagcagactgggcctgttcgagatcagccccggccacgagctgcacggcatgacctgcatgatgcaggccggcctgtgggccgccacccaggtgagcatggaccacccccccaccggcccccccagcagagacgacttcagcgaggtgctgacccaggtgcacgagggcttcgagctgggcaccctggccggccccgccttcgcctggctgagaagaagcctgggcctggccgaggaggactaccaggccgccctgggccccggcggcccctacctgcagttcctgagcaccagcaagagcaaggccagcttcttcctgagccacgaccagagattcttcctgaagacccagggcagaagagaggtgcaggccctgctggcccacctgcccagatacgtgcagcacctgcagagacacccccacagcctgctggccagactgctgggcgtgcacagcctgagagtggacagaggcaagaagacctacttcatcgtgatgcagagcgtgttctaccccgccggcagaatcagcgagagatacgacatcaagggctgcgaggtgagcagatgggtggaccccgcccccgagggcagccccctggtgctggtgctgaaggacctgaacttccagggcaagaccatcaacctgggcccccagagaagctggttcctgagacagatggagctggacaccaccttcctgagagagctgaacgtgctggactacagcctgctgatcgccttccagagactgcacgaggacgagagaggccccggcagcagcctgatcttcagaaccgccagaagcgtgcagggcgcccagagccccgaggagagcagagcccagaacagaagactgctgcccgacgcccccaacgccctgcacatcctggacggccccgagcagagatacttcctgggcgtggtggacctggccaccgtgtacggcctgagaaagagactggagcacctgtggaagaccctgagataccccggcagaaccttcagcaccgtgagccccgccagatacgccagaagactgtgccagtgggtggaggcccacaccgagtag

SEQ ID NO: 93065 - DNA, 1128 bp, synthetic construct
  misc_feature 1..1128: note = Description of Artificial Sequence: Synthetic coding sequence
  source 1..1128: mol_type = other DNA
atgatgtgccagagcgaggccagacagggccccgagctgagagccgccaagtggctgcacttcccccagctggccctgagaagaagactgggccagctgagctgcatgagcagacccgccctgaagctgagaagctggcccctgaccgtgctgtactacctgctgcccttcggcgccctgagacccctgagcagagtgggctggagacccgtgagcagagtggccctgtacaagagcgtgcccaccagactgctgagcagagcctggggcagactgaaccaggtggagctgccccactggctgagaagacccgtgtacagcctgtacatctggaccttcggcgtgaacatgaaggaggccgccgtggaggacctgcaccactacagaaacctgagcgagttcttcagaagaaagctgaagccccaggccagacccgtgtgcggcctgcacagcgtgatcagccccagcgacggcagaatcctgaacttcggccaggtgaagaactgcgaggtggagcaggtgaagggcgtgacctacagcctggagagcttcctgggccccagaatgtgcaccgaggacctgcccttcccccccgccgccagctgcgacagcttcaagaaccagctggtgaccagagagggcaacgagctgtaccactgcgtgatctacctggcccccggcgactaccactgcttccacagccccaccgactggaccgtgagccacagaagacacttccccggcagcctgatgagcgtgaaccccggcatggccagatggatcaaggagctgttctgccacaacgagagagtggtgctgaccggcgactggaagcacggcttcttcagcctgaccgccgtgggcgccaccaacgtgggcagcatcagaatctacttcgacagagacctgcacaccaacagccccagacacagcaagggcagctacaacgacttcagcttcgtgacccacaccaacagagagggcgtgcccatgagaaagggcgagcacctgggcgagttcaacctgggcagcaccatcgtgctgatcttcgaggcccccaaggacttcaacttccagctgaagaccggccagaagatcagattcggcgaggccctgggcagcctgtag

SEQ ID NO: 93066 - DNA, 1227 bp, synthetic construct
  misc_feature 1..1227: note = Description of Artificial Sequence: Synthetic coding sequence
  source 1..1227: mol_type = other DNA
atggccaccagcgtgggccacagatgcctgggcctgctgcacggcgtggccccctggagaagcagcctgcacccctgcgagatcaccgccctgagccagagcctgcagcccctgagaaagctgcccttcagagccttcagaaccgacgccagaaagatccacaccgcccccgccagaaccatgttcctgctgagacccctgcccatcctgctggtgaccggcggcggctacgccggctacagacagtacgagaagtacagagagagagagctggagaagctgggcctggagatcccccccaagctggccggccactgggaggtggccctgtacaagagcgtgcccaccagactgctgagcagagcctggggcagactgaaccaggtggagctgccccactggctgagaagacccgtgtacagcctgtacatctggaccttcggcgtgaacatgaaggaggccgccgtggaggacctgcaccactacagaaacctgagcgagttcttcagaagaaagctgaagccccaggccagacccgtgtgcggcctgcacagcatcagccccagcgacggcagaatcctgaacttcggccaggtgaagaactgcgaggtggagcaggtgaagggcgtgacctacagcctggagagcttcctgggccccagaatgtgcaccgaggacctgcccttcccccccgccgccagctgcgacagcttcaagaaccagctggtgaccagagagggcaacgagctgtaccactgcgtgatctacctggcccccggcgactaccactgcttccacagccccaccgactggaccgtgagccacagaagacacttccccggcagcctgatgagcgtgaaccccggcatggccagatggatcaaggagctgttctgccacaacgagagagtggtgctgaccggcgactggaagcacggcttcttcagcctgaccgccgtgggcgccaccaacgtgggcagcatcagaatctacttcgacagagacctgcacaccaacagccccagacacagcaagggcagctacaacgacttcagcttcgtgacccacaccaacagagagggcgtgcccatgagaaagggcgagcacctgggcgagttcaacctgggcagcaccatcgtgctgatcttcgaggcccccaaggacttcaacttccagctgaagaccggccagaagatcagattcggcgaggccctgggcagcctgtag

SEQ ID NO: 93067 - DNA, 1128 bp, synthetic construct; identical to SEQ ID NO: 93065
  misc_feature 1..1128: note = Description of Artificial Sequence: Synthetic coding sequence
  source 1..1128: mol_type = other DNA

SEQ ID NO: 93068 - DNA, 789 bp, synthetic construct
  misc_feature 1..789: note = Description of Artificial Sequence: Synthetic coding sequence
  source 1..789: mol_type = other DNA
atgatgtgccagagcgaggccagacagggccccgagctgagagccgccaagtggctgcacttcccccagctggccctgagaagaagactgggccagctgagctgcatgagcagacccgccctgaagctgagaagctggcccctgaccgtgctgtactacctgctgcccttcggcgccctgagacccctgagcagagtgggctggagacccgtgagcagagtggccctgtacaagagcgtgcccaccagactgctgagcagagcctggggcagactgaaccaggtggagctgccccactggctgagaagacccgtgtacagcctgtacatctggaccttcggcgtgaacatgaaggaggccgccgtggaggacctgcaccactacagaaacctgagcgagttcttcagaagaaagctgaagccccaggccagacccgtgtgcggcctgcacagcgtgatcagccccagcgacggcagaatcctgaacttcggccaggtgaagaactgcgaggtggagcaggtgaagggcgtgacctacagcctggagagcttcctgggccccagaatgtgcaccgaggacctgcccttcccccccgccgccagctgcgacagcttcaagaaccagctggtgaccagagagggcaacgagctgtaccactgcgtgatctacctggcccccggcgactaccactgcttccacagccccaccgactggaccgtgagccacagaagacacttccccggccccgcccacaagcagcccaaggcccagcagggcctgctgcagtag

SEQ ID NO: 93069 - DNA, 687 bp, synthetic construct
  misc_feature 1..687: note = Description of Artificial Sequence: Synthetic coding sequence
  source 1..687: mol_type = other DNA
atgatgtgccagagcgaggccagacagggccccgagctgagagccgccaagtggctgcacttcccccagctggccctgagaagaagactgggccagctgagctgcatgagcagacccgccctgaagctgagaagctggcccctgaccgtgctgtactacctgctgcccttcggcgccctgagacccctgagcagagtgggctggagacccgtgagcagagtggccctgtacaagagcgtgcccaccagactgctgagcagagcctggggcagactgaaccaggtggagctgccccactggctgagaagacccgtgtacagcctgtacatctggaccttcggcgtgaacatgaaggaggccgccgtggaggacctgcaccactacagaaacctgagcgagttcttcagaagaaagctgaagccccaggccagacccgtgtgcggcctgcacagcgtgatcagccccagcgacggcagaatcctgaacttcggccaggtgaagaactgcgaggtggagcaggtgaagggcgtgacctacagcctggagagcttcctgggccccagaatgtgcaccgaggacctgcccttcccccccgccgccagctgcgacagcttcaagaaccagctggtgaccagagagggcaacgagctgtaccactgcgtgatctacctggcccccggcgactag

SEQ ID NO: 93070 - DNA, 222 bp, synthetic construct
  misc_feature 1..222: note = Description of Artificial Sequence: Synthetic coding sequence
  source 1..222: mol_type = other DNA
atgatgtgccagagcgaggccagacagggccccgagctgagagccgccaagtggctgcacttcccccagctggccctgagaagaagactgggccagctgagctgcatgagcagacccgccctgaagctgagaagctggcccctgaccgtgctgtactacctgctgcccttcggcgccctgagacccctgagcagagtgggctggagacccgtgagcagatag

SEQ ID NO: 93071 - DNA, 222 bp, synthetic construct; identical to SEQ ID NO: 93070
  misc_feature 1..222: note = Description of Artificial Sequence: Synthetic coding sequence
  source 1..222: mol_type = other DNA

SEQ ID NO: 93072 - DNA, 1230 bp, synthetic construct
  misc_feature 1..1230: note = Description of Artificial Sequence: Synthetic coding sequence
  source 1..1230: mol_type = other DNA
atggccaccagcgtgggccacagatgcctgggcctgctgcacggcgtggccccctggagaagcagcctgcacccctgcgagatcaccgccctgagccagagcctgcagcccctgagaaagctgcccttcagagccttcagaaccgacgccagaaagatccacaccgcccccgccagaaccatgttcctgctgagacccctgcccatcctgctggtgaccggcggcggctacgccggctacagacagtacgagaagtacagagagagagagctggagaagctgggcctggagatcccccccaagctggccggccactgggaggtggccctgtacaagagcgtgcccaccagactgctgagcagagcctggggcagactgaaccaggtggagctgccccactggctgagaagacccgtgtacagcctgtacatctggaccttcggcgtgaacatgaaggaggccgccgtggaggacctgcaccactacagaaacctgagcgagttcttcagaagaaagctgaagccccaggccagacccgtgtgcggcctgcacagcgtgatcagccccagcgacggcagaatcctgaacttcggccaggtgaagaactgcgaggtggagcaggtgaagggcgtgacctacagcctggagagcttcctgggccccagaatgtgcaccgaggacctgcccttcccccccgccgccagctgcgacagcttcaagaaccagctggtgaccagagagggcaacgagctgtaccactgcgtgatctacctggcccccggcgactaccactgcttccacagccccaccgactggaccgtgagccacagaagacacttccccggcagcctgatgagcgtgaaccccggcatggccagatggatcaaggagctgttctgccacaacgagagagtggtgctgaccggcgactggaagcacggcttcttcagcctgaccgccgtgggcgccaccaacgtgggcagcatcagaatctacttcgacagagacctgcacaccaacagccccagacacagcaagggcagctacaacgacttcagcttcgtgacccacaccaacagagagggcgtgcccatgagaaagggcgagcacctgggcgagttcaacctgggcagcaccatcgtgctgatcttcgaggcccccaaggacttcaacttccagctgaagaccggccagaagatcagattcggcgaggccctgggcagcctgtag

SEQ ID NO: 93073 - DNA, 246 bp, synthetic construct
  misc_feature 1..246: note = Description of Artificial Sequence: Synthetic coding sequence
  source 1..246: mol_type = other DNA
atgatgtgccagagcgaggccagacagggccccgagctgagagccgccaagtggctgcacttcccccagctggccctgagaagaagactgggccagctgagctgcatgagcagacccgccctgaagctgagaagctggcccctgaccgtgctgtactacctgctgcccttcggcgccctgagacccctgagcagagtgggctggagacccgtgagcagagtggccctgtacaagagcgtgccctag

SEQ ID NO: 93074 - DNA, 981 bp, synthetic construct
  misc_feature 1..981: note = Description of Artificial Sequence: Synthetic coding sequence
  source 1..981: mol_type = other DNA
atgatgtgccagagcgaggccagacagggccccgagctgagagccgccaagtggctgcacttcccccagctggccctgagaagaagactgggccagctgagctgcatgagcagacccgccctgaagctgagaagctggcccctgaccgtgctgtactacctgctgcccttcggcgccctgagacccctgagcagagtgggctggagacccgtgagcagagtggccctgtacaagagcgtgcccaccagactgctgagcagagcctggggcagactgaaccaggtggagctgccccactggctgagaagacccgtgtacagcctgtacatctggaccttcggcgtgaacatgaaggaggccgccgtggaggacctgcaccactacagaaacctgagcgagttcttcagaagaaagctgaagccccaggccagacccgtgtgcggcctgcacagcgtgatcagccccagcgacggcagaatcctgaacttcggccaggtgaagaactgcgaggtggagcaggtgaagggcgtgacctacagcctggagagcttcctgggccccagaatgtgcaccgaggacctgcccttcccccccgccgccagctgcgacagcttcaagaaccagctggtgaccagagagggcaacgagctgtaccactgcgtgatctacctggcccccggcgactaccactgcttccacagccccaccgactggaccgtgagccacagaagacacttccccggcagcctgatgagcgtgaaccccggcatggccagatggatcaaggagctgttctgccacaacgagagagtggtgctgaccggcgactggaagcacggcttcttcagcctgaccgccgtgggcgccaccaacgtgggcagcatcagaatctacttcgacagagacctgcacaccaacagccccagacacagcaagggcagctacaacgacttcagcgtggtgggcagcctgaccagatag

SEQ ID NO: 93075 - DNA, 984 bp, synthetic construct
  misc_feature 1..984: note = Description of Artificial Sequence: Synthetic coding sequence
  source 1..984: mol_type = other DNA
atggagtacgccgtgaactgccacgtgatcacctgggagagaatcatcagccacttcgacatcttcgccttcggccacttctggggctgggccatgaaggccctgctgatcagaagctacggcctgtgctggaccatcagcatcacctgggagctgaccgagctgttcttcatgcacctgctgcccaacttcgccgagtgctggtgggaccaggtgatcctggacatcctgctgtgcaacggcggcggcatctggctgggcatggtggtgtgcagattcctggagatgagaacctaccactgggccagcttcaaggacatccacaccaccaccggcaagatcaagagagccgtgctgcagttcacccccgccagctggacctacgtgagatggttcgaccccaagagcagcttccagagagtggccggcgtgtacctgttcatgatcatctggcagctgaccgagctgaacaccttcttcctgaagcacatcttcgtgttccaggccagccaccccctgagctggggcagaatcctgttcatcggcggcatcaccgcccccaccgtgagacagtactacgcctacctgaccgacacccagtgcaagagagtgggcacccagtgctgggtgttcggcgtgatcggcttcctggaggccatcgtgtgcatcaagttcggccaggacctgttcagcaagacccagatcctgtacgtggtgctgtggctgctgtgcgtggccttcaccaccttcctgtgcctgtacggcatgatctggtacgccgagcactacggccacagagagaagacctacagcgagtgcgaggacggcacctacagccccgagatcagctggcaccacagaaagggcaccaagggcagcgaggacagcccccccaagcacgccggcaacaacgagagccacagcagcagaagaagaaacagacacagcaagagcaaggtgaccaacggcgtgggcaagaagtag

SEQ ID NO: 93076 - DNA, 1422 bp, synthetic construct
  misc_feature 1..1422: note = Description of Artificial Sequence: Synthetic coding sequence
  source 1..1422: mol_type = other DNA
atggccagctgcgtgggcagcagaaccctgagcaaggacgacgtgaactacaagatgcacttcagaatgatcaacgagcagcaggtggaggacatcaccatcgacttcttctacagaccccacaccatcaccctgctgagcttcaccatcgtgagcctgatgtacttcgccttcaccagagacgacagcgtgcccgaggacaacatctggagaggcatcctgagcgtgatcttcttcttcctgatcatcagcgtgctggccttccccaacggccccttcaccagaccccaccccgccctgtggagaatggtgttcggcctgagcgtgctgtacttcctgttcctggtgttcctgctgttcctgaacttcgagcaggtgaagagcctgatgtactggctggaccccaacctgagatacgccaccagagaggccgacgtgatggagtacgccgtgaactgccacgtgatcacctgggagagaatcatcagccacttcgacatcttcgccttcggccacttctggggctgggccatgaaggccctgctgatcagaagctacggcctgtgctggaccatcagcatcacctgggagctgaccgagctgttcttcatgcacctgctgcccaacttcgccgagtgctggtgggaccaggtgatcctggacatcctgctgtgcaacggcggcggcatctggctgggcatggtggtgtgcagattcctggagatgagaacctaccactgggccagcttcaaggacatccacaccaccaccggcaagatcaagagagccgtgctgcagttcacccccgccagctggacctacgtgagatggttcgaccccaagagcagcttccagagagtggccggcgtgtacctgttcatgatcatctggcagctgaccgagctgaacaccttcttcctgaagcacatcttcgtgttccaggccagccaccccctgagctggggcagaatcctgttcatcggcggcatcaccgcccccaccgtgagacagtactacgcctacctgaccgacacccagtgcaagagagtgggcacccagtgctgggtgttcggcgtgatcggcttcctggaggccatcgtgtgcatcaagttcggccaggacctgttcagcaagacccagatcctgtacgtggtgctgtggctgctgtgcgtggccttcaccaccttcctgtgcctgtacggcatgatctggtacgccgagcactacggccacagagagaagacctacagcgagtgcgaggacggcacctacagccccgagatcagctggcaccacagaaagggcaccaagggcagcgaggacagcccccccaagcacgccggcaacaacgagagccacagcagcagaagaagaaacagacacagcaagagcaaggtgaccaacggcgtgggcaagaagtag

SEQ ID NO: 93077 - DNA, 1464 bp, synthetic construct
  misc_feature 1..1464: note = Description of Artificial Sequence: Synthetic coding sequence
  source 1..1464: mol_type = other DNA
atgagaagaggcgagagaagagacgccggcggccccagacccgagagccccgtgcccgccggcagagccagcctggaggagccccccgacggccccagcgccggccaggccaccggccccggcgagggcagaagaagcaccgagagcgaggtgtacgacgacggcaccaacaccttcttctggagagcccacaccctgaccgtgctgttcatcctgacctgcaccctgggctacgtgaccctgctggaggagaccccccaggacaccgcctacaacaccaagagaggcatcgtggccagcatcctggtgttcctgtgcttcggcgtgacccaggccaaggacggccccttcagcagaccccaccccgcctactggagattctggctgtgcgtgagcgtggtgtacgagctgttcctgatcttcatcctgttccagaccgtgcaggacggcagacagttcctgaagtacgtggaccccaagctgggcgtgcccctgcccgagagagactacggcggcaactgcctgatctacgaccccgacaacgagaccgaccccttccacaacatctgggacaagctggacggcttcgtgcccgcccacttcctgggctggtacctgaagaccctgatgatcagagactggtggatgtgcatgatcatcagcgtgatgttcgagttcctggagtacagcctggagcaccagctgcccaacttcagcgagtgctggtgggaccactggatcatggacgtgctggtgtgcaacggcctgggcatctactgcggcatgaagaccctggagtggctgagcctgaagacctacaagtggcagggcctgtggaacatccccacctacaagggcaagatgaagagaatcgccttccagttcaccccctacagctgggtgagattcgagtggaagcccgccagcagcctgagaagatggctggccgtgtgcggcatcatcctggtgttcctgctggccgagctgaacaccttctacctgaagttcgtgctgtggatgccccccgagcactacctggtgctgctgagactggtgttcttcgtgaacgtgggcggcgtggccatgagagagatctacgacttcatggacgaccccaagccccacaagaagctgggcccccaggcctggctggtggccgccatcaccgccaccgagctgctgatcgtggtgaagtacgacccccacaccctgaccctgagcctgcccttctacatcagccagtgctggaccctgggcagcgtgctggccctgacctggaccgtgtggagattcttcctgagagacatcaccctgagatacaaggagaccagatggcagaagtggcagaacaaggacgaccagggcagcaccgtgggcaacggcgaccagcaccccctgggcctggacgaggacctgctgggccccggcgtggccgagggcgagggcgcccccacccccaactag

SEQ ID NO: 93078 - DNA, 2802 bp, synthetic construct
  misc_feature 1..2802: note = Description of Artificial Sequence: Synthetic coding sequence
  source 1..2802: mol_type = other DNA
atggccgccagcagactggacttcggcgaggtggagaccttcctggacagacaccccgagctgttcgaggactacctgatgagaaagggcaagcaggagatggtggagaagtggctgcagagacacagccagggccagggcgccctgggccccagacccagcctggccggcaccagcagcctggcccacagcacctgcagaggcggcagcagcgtgggcggcggcaccggccccaacggcagcgcccacagccagcccctgcccggcggcggcgactgcggcggcgtgcccctgagccccagctgggccggcggcagcagaggcgacggcaacctgcagagaagagccagccagaaggagctgagaaagagcttcgccagaagcaaggccatccacgtgaacagaacctacgacgagcaggtgaccagcagagcccaggagcccctgagcagcgtgagaagaagagccctgctgagaaaggccagcagcctgccccccaccaccgcccacatcctgagcgccctgctggagagcagagtgaacctgcccagatacccccccaccgccatcgactacaagtgccacctgaagaagcacaacgagagacagttcttcctggagctggtgaaggacatcagcaacgacctggacctgaccagcctgagctacaagatcctgatcttcgtgtgcctgatggtggacgccgacagatgcagcctgttcctggtggagggcgccgccgccggcaagaagaccctggtgagcaagttcttcgacgtgcacgccggcacccccctgctgccctgcagcagcaccgagaacagcaacgaggtgcaggtgccctggggcaagggcatcatcggctacgtgggcgagcacggcgagaccgtgaacatccccgacgcctaccaggacagaagattcaacgacgagatcgacaagctgaccggctacaagaccaagagcctgctgtgcatgcccatcagaagcagcgacggcgagatcatcggcgtggcccaggccatcaacaagatccccgagggcgcccccttcaccgaggacgacgagaaggtgatgcagatgtacctgcccttctgcggcatcgccatcagcaacgcccagctgttcgccgccagcagaaaggagtacgagagaagcagagccctgctggaggtggtgaacgacctgttcgaggagcagaccgacctggagaagatcgtgaagaagatcatgcacagagcccagaccctgctgaagtgcgagagatgcagcgtgctgctgctggaggacatcgagagccccgtggtgaagttcaccaagagcttcgagctgatgagccccaagtgcagcgccgacgccgagaacagcttcaaggagagcatggagaagagcagctacagcgactggctgatcaacaacagcatcgccgagctggtggccagcaccggcctgcccgtgaacatcagcgacgcctaccaggaccccagattcgacgccgaggccgaccagatcagcggcttccacatcagaagcgtgctgtgcgtgcccatctggaacagcaaccaccagatcatcggcgtggcccaggtgctgaacagactggacggcaagcccttcgacgacgccgaccagagactgttcgaggccttcgtgatcttctgcggcctgggcatcaacaacaccatcatgtacgaccaggtgaagaagagctgggccaagcagagcgtggccctggacgtgctgagctaccacgccacctgcagcaaggccgaggtggacaagttcaaggccgccaacatccccctggtgagcgagctggccatcgacgacatccacttcgacgacttcagcctggacgtggacgccatgatcaccgccgccctgagaatgttcatggagctgggcatggtgcagaagttcaagatcgactacgagaccctgtgcagatggctgctgaccgtgagaaagaactacagaatggtgctgtaccacaactggagacacgccttcaacgtgtgccagctgatgttcgccatgctgaccaccgccggcttccaggacatcctgaccgaggtggagatcctggccgtgatcgtgggctgcctgtgccacgacctggaccacagaggcaccaacaacgccttccaggccaagagcggcagcgccctggcccagctgtacggcaccagcgccaccctggagcaccaccacttcaaccacgccgtgatgatcctgcagagcgagggccacaacatcttcgccaacctgagcagcaaggagtacagcgacctgatgcagctgctgaagcagagcatcctggccaccgacctgaccctgtacttcgagagaagaaccgagttcttcgagctggtgagcaagggcgagtacgactggaacatcaagaaccacagagacatcttcagaagcatgctgatgaccgcctgcgacctgggcgccgtgaccaagccctgggagatcagcagacaggtggccgagctggtgaccagcgagttcttcgagcagggcgacagagagagactggagctgaagctgacccccagcgccatcttcgacagaaacagaaaggacgagctgcccagactgcagctggagtggatcgacagcatctgcatgcccctgtaccaggccctggtgaaggtgaacgtgaagctgaagcccatgctggacagcgtggccaccaacagaagcaagtgggaggagctgcaccagaagagactgctggccagcaccgccagcagcagccccgccagcgtgatggtggccaaggaggacagaaactag

SEQ ID NO: 93079 - DNA, 2052 bp, synthetic construct
  misc_feature 1..2052: note = Description of Artificial Sequence: Synthetic coding sequence
  source 1..2052: mol_type = other DNA
atgctgaagcaggccagaagacccctgttcagaaacgtgctgagcgccacccagtggaagaaggtgaagatcaccagactggtgcagatcagcggcgccagcctggccgagaagcaggagaagcaccaggacttcctgatccagagacagaccaagaccaaggacagaagattcaacgacgagatcgacaagctgaccggctacaagaccaagagcctgctgtgcatgcccatcagaagcagcgacggcgagatcatcggcgtggcccaggccatcaacaagatccccgagggcgcccccttcaccgaggacgacgagaaggtgatgcagatgtacctgcccttctgcggcatcgccatcagcaacgcccagctgttcgccgccagcagaaaggagtacgagagaagcagagccctgctggaggtggtgaacgacctgttcgaggagcagaccgacctggagaagatcgtgaagaagatcatgcacagagcccagaccctgctgaagtgcgagagatgcagcgtgctgctgctggaggacatcgagagccccgtggtgaagttcaccaagagcttcgagctgatgagccccaagtgcagcgccgacgccgagaacagcttcaaggagagcatggagaagagcagctacagcgactggctgatcaacaacagcatcgccgagctggtggccagcaccggcctgcccgtgaacatcagcgacgcctaccaggaccccagattcgacgccgaggccgaccagatcagcggcttccacatcagaagcgtgctgtgcgtgcccatctggaacagcaaccaccagatcatcggcgtggcccaggtgctgaacagactggacggcaagcccttcgacgacgccgaccagagactgttcgaggccttcgtgatcttctgcggcctgggcatcaacaacaccatcatgtacgaccaggtgaagaagagctgggccaagcagagcgtggccctggacgtgctgagctaccacgccacctgcagcaaggccgaggtggacaagttcaaggccgccaacatccccctggtgagcgagctggccatcgacgacatccacttcgacgacttcagcctggacgtggacgccatgatcaccgccgccctgagaatgttcatggagctgggcatggtgcagaagttcaagatcgactacgagaccctgtgcagatggctgctgaccgtgagaaagaactacagaatggtgctgtaccacaactggagacacgccttcaacgtgtgccagctgatgttcgccatgctgaccaccgccggcttccaggacatcctgaccgaggtggagatcctggccgtgatcgtgggctgcctgtgccacgacctggaccacagaggcaccaacaacgccttccaggccaagagcggcagcgccctggcccagctgtacggcaccagcgccaccctggagcaccaccacttcaaccacgccgtgatgatcctgcagagcgagggccacaacatcttcgccaacctgagcagcaaggagtacagcgacctgatgcagctgctgaagcagagcatcctggccaccgacctgaccctgtacttcgagagaagaaccgagttcttcgagctggtgagcaagggcgagtacgactggaacatcaagaaccacagagacatcttcagaagcatgctgatgaccgcctgcgacctgggcgccgtgaccaagccctgggagatcagcagacaggtggccgagctggtgaccagcgagttcttcgagcagggcgacagagagagactggagctgaagctgacccccagcgccatcttcgacagaaacagaaaggacgagctgcccagactgcagctggagtggatcgacagcatctgcatgcccctgtaccaggccctggtgaaggtgaacgtgaagctgaagcccatgctggacagcgtggccaccaacagaagcaagtgggaggagctgcaccagaagagactgctggccagcaccgccagcagcagccccgccagcgtgatggtggccaaggaggacagaaactag

SEQ ID NO: 93080 - DNA, 1470 bp, synthetic construct
  misc_feature 1..1470: note = Description of Artificial Sequence: Synthetic coding sequence
  source 1..1470: mol_type = other DNA
atgagccccaagtgcagcgccgacgccgagaacagcttcaaggagagcatggagaagagcagctacagcgactggctgatcaacaacagcatcgccgagctggtggccagcaccggcctgcccgtgaacatcagcgacgcctaccaggaccccagattcgacgccgaggccgaccagatcagcggcttccacatcagaagcgtgctgtgcgtgcccatctggaacagcaaccaccagatcatcggcgtggcccaggtgctgaacagactggacggcaagcccttcgacgacgccgaccagagactgttcgaggccttcgtgatcttctgcggcctgggcatcaacaacaccatcatgtacgaccaggtgaagaagagctgggccaagcagagcgtggccctggacgtgctgagctaccacgccacctgcagcaaggccgaggtggacaagttcaaggccgccaacatccccctggtgagcgagctggccatcgacgacatccacttcgacgacttcagcctggacgtggacgccatgatcaccgccgccctgagaatgttcatggagctgggcatggtgcagaagttcaagatcgactacgagaccctgtgcagatggctgctgaccgtgagaaagaactacagaatggtgctgtaccacaactggagacacgccttcaacgtgtgccagctgatgttcgccatgctgaccaccgccggcttccaggacatcctgaccgaggtggagatcctggccgtgatcgtgggctgcctgtgccacgacctggaccacagaggcaccaacaacgccttccaggccaagagcggcagcgccctggcccagctgtacggcaccagcgccaccctggagcaccaccacttcaaccacgccgtgatgatcctgcagagcgagggccacaacatcttcgccaacctgagcagcaaggagtacagcgacctgatgcagctgctgaagcagagcatcctggccaccgacctgaccctgtacttcgagagaagaaccgagttcttcgagctggtgagcaagggcgagtacgactggaacatcaagaaccacagagacatcttcagaagcatgctgatgaccgcctgcgacctgggcgccgtgaccaagccctgggagatcagcagacaggtggccgagctggtgaccagcgagttcttcgagcagggcgacagagagagactggagctgaagctgacccccagcgccatcttcgacagaaacagaaaggacgagctgcccagactgcagctggagtggatcgacagcatctgcatgcccctgtaccaggccctggtgaaggtgaacgtgaagctgaagcccatgctggacagcgtggccaccaacagaagcaagtgggaggagctgcaccagaagagactgctggccagcaccgccagcagcagccccgccagcgtgatggtggccaaggaggacagaaactag

SEQ ID NO: 93081 - DNA, 1728 bp, synthetic construct
  misc_feature 1..1728: note = Description of Artificial Sequence: Synthetic coding sequence
  source 1..1728: mol_type = other DNA
atgcagatgtacctgcccttctgcggcatcgccatcagcaacgcccagctgttcgccgccagcagaaaggagtacgagagaagcagagccctgctggaggtggtgaacgacctgttcgaggagcagaccgacctggagaagatcgtgaagaagatcatgcacagagcccagaccctgctgaagtgcgagagatgcagcgtgctgctgctggaggacatcgagagccccgtggtgaagttcaccaagagcttcgagctgatgagccccaagtgcagcgccgacgccgagaacagcttcaaggagagcatggagaagagcagctacagcgactggctgatcaacaacagcatcgccgagctggtggccagcaccggcctgcccgtgaacatcagcgacgcctaccaggaccccagattcgacgccgaggccgaccagatcagcggcttccacatcagaagcgtgctgtgcgtgcccatctggaacagcaaccaccagatcatcggcgtggcccaggtgctgaacagactggacggcaagcccttcgacgacgccgaccagagactgttcgaggccttcgtgatcttctgcggcctgggcatcaacaacaccatcatgtacgaccaggtgaagaagagctgggccaagcagagcgtggccctggacgtgctgagctaccacgccacctgcagcaaggccgaggtggacaagttcaaggccgccaacatccccctggtgagcgagctggccatcgacgacatccacttcgacgacttcagcctggacgtggacgccatgatcaccgccgccctgagaatgttcatggagctgggcatggtgcagaagttcaagatcgactacgagaccctgtgcagatggctgctgaccgtgagaaagaactacagaatggtgctgtaccacaactggagacacgccttcaacgtgtgccagctgatgttcgccatgctgaccaccgccggcttccaggacatcctgaccgaggtggagatcctggccgtgatcgtgggctgcctgtgccacgacctggaccacagaggcaccaacaacgccttccaggccaagagcggcagcgccctggcccagctgtacggcaccagcgccaccctggagcaccaccacttcaaccacgccgtgatgatcctgcagagcgagggccacaacatcttcgccaacctgagcagcaaggagtacagcgacctgatgcagctgctgaagcagagcatcctggccaccgacctgaccctgtacttcgagagaagaaccgagttcttcgagctggtgagcaagggcgagtacgactggaacatcaagaaccacagagacatcttcagaagcatgctgatgaccgcctgcgacctgggcgccgtgaccaagccctgggagatcagcagacaggtggccgagctggtgaccagcgagttcttcgagcagggcgacagagagagactggagctgaagctgacccccagcgccatcttcgacagaaacagaaaggacgagctgcccagactgcagctggagtggatcgacagcatctgcatgcccctgtaccaggccctggtgaaggtgaacgtgaagctgaagcccatgctggacagcgtggccaccaacagaagcaagtgggaggagctgcaccagaagagactgctggccagcaccgccagcagcagccccgccagcgtgatggtggccaaggaggacagaaactag

SEQ ID NO: 93082 - DNA, 393 bp, synthetic construct
  misc_feature 1..393: note = Description of Artificial Sequence: Synthetic coding sequence
  source 1..393: mol_type = other DNA
atgcccatcagaagcagcgacggcgagatcatcggcgtggcccaggccatcaacaagatccccgagggcgcccccttcaccgaggacgacgagaaggtgatgcagatgtacctgcccttctgcggcatcgccatcagcaacgcccagctgttcgccgccagcagaaaggagtacgagagaagcagagccctgctggaggtggtgaacgacctgttcgaggagcagaccgacctggagaagatcgtgaagaagatcatgcacagagcccagaccctgctgaagtgcgagagatgcagcgtgctgctgctggaggacatcgagagccccgtggtgaagttcaccaagagcttcgagctgatgagccccaagtgcagcgccgacgccgagaactag

SEQ ID NO: 93083 - DNA, 1728 bp, synthetic construct; identical to SEQ ID NO: 93081
  misc_feature 1..1728: note = Description of Artificial Sequence: Synthetic coding sequence
  source 1..1728: mol_type = other DNA

SEQ ID NO: 93084 - DNA, 375 bp, synthetic construct
  misc_feature 1..375: note = Description of Artificial Sequence: Synthetic coding sequence
  source 1..375: mol_type = other DNA
atgctgatgaccgcctgcgacctgggcgccgtgaccaagccctgggagatcagcagacaggtggccgagctggtgaccagcgagttcttcgagcagggcgacagagagagactggagctgaagctgacccccagcgccatcttcgacagaaacagaaaggacgagctgcccagactgcagctggagtggatcgacagcatctgcatgcccctgtaccaggccctggtgaaggtgaacgtgaagctgaagcccatgctggacagcgtggccaccaacagaagcaagtgggaggagctgcaccagaagagactgctggccagcaccgccagcagcagccccgccagcgtgatggtggccaaggaggacagaaactag

SEQ ID NO: 93085 - DNA, 1638 bp, synthetic construct
  misc_feature 1..1638: note = Description of Artificial Sequence: Synthetic coding sequence
  source 1..1638: mol_type = other DNA
atgggcagcagcgccaccgagatcgaggagctggagaacaccaccttcaagtacctgaccggcgagcagaccgagaagatgtggcagagactgaagggcatcctgagatgcctggtgaagcagctggagagaggcgacgtgaacgtggtggacctgaagaagaacatcgagtacgccgccagcgtgctggaggccgtgtacatcgacgagaccagaagactgctggacaccgaggacgagctgagcgacatccagaccgacagcgtgcccagcgaggtgagagactggctggccagcaccttcaccagaaagatgggcatgaccaagaagaagcccgaggagaagcccaagttcagaagcatcgtgcacgccgtgcaggccggcatcttcgtggagagaatgtacagaaagacctaccacatggtgggcctggcctaccccgccgccgtgatcgtgaccctgaaggacgtggacaagtggagcttcgacgtgttcgccctgaacgaggccagcggcgagcacagcctgaagttcatgatctacgagctgttcaccagatacgacctgatcaacagattcaagatccccgtgagctgcctgatcaccttcgccgaggccctggaggtgggctacagcaagtacaagaacccctaccacaacctgatccacgccgccgacgtgacccagaccgtgcactacatcatgctgcacaccggcatcatgcactggctgaccgagctggagatcctggccatggtgttcgccgccgccatccacgactacgagcacaccggcaccaccaacaacttccacatccagaccagaagcgacgtggccatcctgtacaacgacagaagcgtgctggagaaccaccacgtgagcgccgcctacagactgatgcaggaggaggagatgaacatcctgatcaacctgagcaaggacgactggagagacctgagaaacctggtgatcgagatggtgctgagcaccgacatgagcggccacttccagcagatcaagaacatcagaaacagcctgcagcagcccgagggcatcgacagagccaagaccatgagcctgatcctgcacgccgccgacatcagccaccccgccaagagctggaagctgcactacagatggaccatggccctgatggaggagttcttcctgcagggcgacaaggaggccgagctgggcctgcccttcagccccctgtgcgacagaaagagcaccatggtggcccagagccagatcggcttcatcgacttcatcgtggagcccaccttcagcctgctgaccgacagcaccgagaagatcgtgatccccctgatcgaggaggccagcaaggccgagaccagcagctacgtggccagcagcagcaccaccatcgtgggcctgcacatcgccgacgccctgagaagaagcaacaccaagggcagcatgagcgacggcagctacagccccgactacagcctggccgccgtggacctgaagagcttcaagaacaacctggtggacatcatccagcagaacaaggagagatggaaggagctggccgcccagggcgagagcgacctgcacaagaacagcgaggacctggtgaacgccgaggagaagcacgacgagacccacagctag

SEQ ID NO: 93086 - DNA, 1536 bp, synthetic construct
  misc_feature 1..1536: note = Description of Artificial Sequence: Synthetic coding sequence
  source 1..1536: mol_type = other DNA
atgggcaagaagatcaacaagctgttctgcttcaacttcctggtgcagtgcttcagaggcaagagcaagcccagcaagtgccagatcagaaagaaggtgaagaaccacatcgagagactgctggacaccgaggacgagctgagcgacatccagaccgacagcgtgcccagcgaggtgagagactggctggccagcaccttcaccagaaagatgggcatgaccaagaagaagcccgaggagaagcccaagttcagaagcatcgtgcacgccgtgcaggccggcatcttcgtggagagaatgtacagaaagacctaccacatggtgggcctggcctaccccgccgccgtgatcgtgaccctgaaggacgtggacaagtggagcttcgacgtgttcgccctgaacgaggccagcggcgagcacagcctgaagttcatgatctacgagctgttcaccagatacgacctgatcaacagattcaagatccccgtgagctgcctgatcaccttcgccgaggccctggaggtgggctacagcaagtacaagaacccctaccacaacctgatccacgccgccgacgtgacccagaccgtgcactacatcatgctgcacaccggcatcatgcactggctgaccgagctggagatcctggccatggtgttcgccgccgccatccacgactacgagcacaccggcaccaccaacaacttccacatccagaccagaagcgacgtggccatcctgtacaacgacagaagcgtgctggagaaccaccacgtgagcgccgcctacagactgatgcaggaggaggagatgaacatcctgatcaacctgagcaaggacgactggagagacctgagaaacctggtgatcgagatggtgctgagcaccgacatgagcggccacttccagcagatcaagaacatcagaaacagcctgcagcagcccgagggcatcgacagagccaagaccatgagcctgatcctgcacgccgccgacatcagccaccccgccaagagctggaagctgcactacagatggaccatggccctgatggaggagttcttcctgcagggcgacaaggaggccgagctgggcctgcccttcagccccctgtgcgacagaaagagcaccatggtggcccagagccagatcggcttcatcgacttcatcgtggagcccaccttcagcctgctgaccgacagcaccgagaagatcgtgatccccctgatcgaggaggccagcaaggccgagaccagcagctacgtggccagcagcagcaccaccatcgtgggcctgcacatcgccgacgccctgagaagaagcaacaccaagggcagcatgagcgacggcagctacagccccgactacagcctggccgccgtggacctgaagagcttcaagaacaacctggtggacatcatccagcagaacaaggagagatggaaggagctggccgcccagggcgagagcgacctgcacaagaacagcgaggacctggtgaacgccgaggagaagcacgacgagacccacagctag

SEQ ID NO: 93087 - DNA, 1560 bp, synthetic construct
  misc_feature 1..1560: note = Description of Artificial Sequence: Synthetic coding sequence
  source 1..1560: mol_type = other DNA
atggacgaccacgtgaccatcagaaagaagcacctgcagagacccatcttcagactgagatgcctggtgaagcagctggagagaggcgacgtgaacgtggtggacctgaagaagaacatcgagtacgccgccagcgtgctggaggccgtgtacatcgacgagaccagaagactgctggacaccgaggacgagctgagcgacatccagaccgacagcgtgcccagcgaggtgagagactggctggccagcaccttcaccagaaagatgggcatgaccaagaagaagcccgaggagaagcccaagttcagaagcatcgtgcacgccgtgcaggccggcatcttcgtggagagaatgtacagaaagacctaccacatggtgggcctggcctaccccgccgccgtgatcgtgaccctgaaggacgtggacaagtggagcttcgacgtgttcgccctgaacgaggccagcggcgagcacagcctgaagttcatgatctacgagctgttcaccagatacgacctgatcaacagattcaagatccccgtgagctgcctgatcaccttcgccgaggccctggaggtgggctacagcaagtacaagaacccctaccacaacctgatccacgccgccgacgtgacccagaccgtgcactacatcatgctgcacaccggcatcatgcactggctgaccgagctggagatcctggccatggtgttcgccgccgccatccacgactacgagcacaccggcaccaccaacaacttccacatccagaccagaagcgacgtggccatcctgtacaacgacagaagcgtgctggagaaccaccacgtgagcgccgcctacagactgatgcaggaggaggagatgaacatcctgatcaacctgagcaaggacgactggagagacctgagaaacctggtgatcgagatggtgctgagcaccgacatgagcggccacttccagcagatcaagaacatcagaaacagcctgcagcagcccgagggcatcgacagagccaagaccatgagcctgatcctgcacgccgccgacatcagccaccccgccaagagctggaagctgcactacagatggaccatggccctgatggaggagttcttcctgcagggcgacaaggaggccgagctgggcctgcccttcagccccctgtgcgacagaaagagcaccatggtggcccagagccagatcggcttcatcgacttcatcgtggagcccaccttcagcctgctgaccgacagcaccgagaagatcgtgatccccctgatcgaggaggccagcaaggccgagaccagcagctacgtggccagcagcagcaccaccatcgtgggcctgcacatcgccgacgccctgagaagaagcaacaccaagggcagcatgagcgacggcagctacagccccgactacagcctggccgccgtggacctgaagagcttcaagaacaacctggtggacatcatccagcagaacaaggagagatggaaggagctggccgcccaggaggccagaaccagcagccagaagtgcgagttcatccaccagtag

SEQ ID NO: 93088 - DNA, 1608 bp, synthetic construct
  misc_feature 1..1608: note = Description of Artificial Sequence: Synthetic coding sequence
  source 1..1608: mol_type = other DNA
atgggcagcagcgccaccgagatcgaggagctggagaacaccaccttcaagtacctgaccggcgagcagaccgagaagatgtggcagagactgaagggcatcctgagatgcctggtgaagcagctggagagaggcgacgtgaacgtggtggacctgaagaagaacatcgagtacgccgccagcgtgctggaggccgtgtacatcgacgagaccagaagactgctggacaccgaggacgagctgagcgacatccagaccgacagcgtgcccagcgaggtgagagactggctggccagcaccttcaccagaaagatgggcatgaccaagaagaagcccgaggagaagcccaagttcagaagcatcgtgcacgccgtgcaggccggcatcttcgtggagagaatgtacagaaagacctaccacatggtgggcctggcctaccccgccgccgtgatcgtgaccctgaaggacgtggacaagtggagcttcgacgtgttcgccctgaacgaggccagcggcgagcacagcctgaagttcatgatctacgagctgttcaccagatacgacctgatcaacagattcaagatccccgtgagctgcctgatcaccttcgccgaggccctggaggtgggctacagcaagtacaagaacccctaccacaacctgatccacgccgccgacgtgacccagaccgtgcactacatcatgctgcacaccggcatcatgcactggctgaccgagctggagatcctggccatggtgttcgccgccgccatccacgactacgagcacaccggcaccaccaacaacttccacatccagaccagaagcgacgtggccatcctgtacaacgacagaagcgtgctggagaaccaccacgtgagcgccgcctacagactgatgcaggaggaggagatgaacatcctgatcaacctgagcaaggacgactggagagacctgagaaacctggtgatcgagatggtgctgagcaccgacatgagcggccacttccagcagatcaagaacatcagaaacagcctgcagcagcccgagggcatcgacagagccaagaccatgagcctgatcctgcacgccgccgacatcagccaccccgccaagagctggaagctgcactacagatggaccatggccctgatggaggagttcttcctgcagggcgacaaggaggccgagctgggcctgcccttcagccccctgtgcgacagaaagagcaccatggtggcccagagccagatcggcttcatcgacttcatcgtggagcccaccttcagcctgctgaccgacagcaccgagaagatcgtgatccccctgatcgaggaggccagcaaggccgagaccagcagctacgtggccagcagcagcaccaccatcgtgggcctgcacatcgccgacgccctgagaagaagcaacaccaagggcagcatgagcgacggcagctacagccccgactacagcctggccgccgtggacctgaagagcttcaagaacaacctggtggacatcatccagcagaacaaggagagatggaaggagctggccgcccaggaggccagaaccagcagccagaagtgcgagttcatccaccagtag

SEQ ID NO: 93089 - DNA, 1590 bp, synthetic construct
  misc_feature 1..1590: note = Description of Artificial Sequence: Synthetic coding sequence
  source 1..1590: mol_type = other DNA
atggacgaccacgtgaccatcagaaagaagcacctgcagagacccatcttcagactgagatgcctggtgaagcagctggagagaggcgacgtgaacgtggtggacctgaagaagaacatcgagtacgccgccagcgtgctggaggccgtgtacatcgacgagaccagaagactgctggacaccgaggacgagctgagcgacatccagaccgacagcgtgcccagcgaggtgagagactggctggccagcaccttcaccagaaagatgggcatgaccaagaagaagcccgaggagaagcccaagttcagaagcatcgtgcacgccgtgcaggccggcatcttcgtggagagaatgtacagaaagacctaccacatggtgggcctggcctaccccgccgccgtgatcgtgaccctgaaggacgtggacaagtggagcttcgacgtgttcgccctgaacgaggccagcggcgagcacagcctgaagttcatgatctacgagctgttcaccagatacgacctgatcaacagattcaagatccccgtgagctgcctgatcaccttcgccgaggccctggaggtgggctacagcaagtacaagaacccctaccacaacctgatccacgccgccgacgtgacccagaccgtgcactacatcatgctgcacaccggcatcatgcactggctgaccgagctggagatcctggccatggtgttcgccgccgccatccacgactacgagcacaccggcaccaccaacaacttccacatccagaccagaagcgacgtggccatcctgtacaacgacagaagcgtgctggagaaccaccacgtgagcgccgcctacagactgatgcaggaggaggagatgaacatcctgatcaacctgagcaaggacgactggagagacctgagaaacctggtgatcgagatggtgctgagcaccgacatgagcggccacttccagcagatcaagaacatcagaaacagcctgcagcagcccgagggcatcgacagagccaagaccatgagcctgatcctgcacgccgccgacatcagccaccccgccaagagctggaagctgcactacagatggaccatggccctgatggaggagttcttcctgcagggcgacaaggaggccgagctgggcctgcccttcagccccctgtgcgacagaaagagcaccatggtggcccagagccagatcggcttcatcgacttcatcgtggagcccaccttcagcctgctgaccgacagcaccgagaagatcgtgatccccctgatcgaggaggccagcaaggccgagaccagcagctacgtggccagcagcagcaccaccatcgtgggcctgcacatcgccgacgccctgagaagaagcaacaccaagggcagcatgagcgacggcagctacagccccgactacagcctggccgccgtggacctgaagagcttcaagaacaacctggtggacatcatccagcagaacaaggagagatggaaggagctggccgcccagggcgagagcgacctgcacaagaacagcgaggacctggtgaacgccgaggagaagcacgacgagacccacagctag

SEQ ID NO: 93090 - DNA, 1608 bp, synthetic construct; identical to SEQ ID NO: 93088
  misc_feature 1..1608: note = Description of Artificial Sequence: Synthetic coding sequence
  source 1..1608: mol_type = other DNA

SEQ ID NO: 93091 - DNA, 1638 bp, synthetic construct; identical to SEQ ID NO: 93085
  misc_feature 1..1638: note = Description of Artificial Sequence: Synthetic coding sequence
  source 1..1638: mol_type = other DNA

SEQ ID NO: 93092 - DNA, 1659 bp, synthetic construct
  misc_feature 1..1659: note = Description of Artificial Sequence: Synthetic coding sequence
  source 1..1659: mol_type = other DNA
atgggcagcagcgccaccgagatcgaggagctggagaacaccaccttcaagtacctgaccggcgagcagaccgagaagatgtggcagagactgaagggcatcctgagatgcctggtgaagcagctggagagaggcgacgtgaacgtggtggacctgaagaagaacatcgagtacgccgccagcgtgctggaggccgtgtacatcgacgagaccagaagactgctggacaccgaggacgagctgagcgacatccagaccgacagcgtgcccagcgaggtgagagactggctggccagcaccttcaccagaaagatgggcatgaccaagaagaagcccgaggagaagcccaagttcagaagcatcgtgcacgccgtgcaggccggcatcttcgtggagagaatgtacagaaagacctaccacatggtgggcctggcctaccccgccgccgtgatcgtgaccctgaaggacgtggacaagtggagcttcgacgtgttcgccctgaacgaggccagcggcgagcacagcctgaagttcatgatctacgagctgttcaccagatacgacctgatcaacagattcaagatccccgtgagctgcctgatcaccttcgccgaggccctggaggtgggctacagcaagtacaagaacccctaccacaacctgatccacgccgccgacgtgacccagaccgtgcactacatcatgctgcacaccggcatcatgcactggctgaccgagctggagatcctggccatggtgttcgccgccgccatccacgactacgagcacaccggcaccaccaacaacttccacatccagaccagaagcgacgtggccatcctgtacaacgacagaagcgtgctggagaaccaccacgtgagcgccgcctacagactgatgcaggaggaggagatgaacatcctgatcaacctgagcaaggacgactggagagacctgagaaacctggtgatcgagatggtgctgagcaccgacatgagcggccacttccagcagatcaagaacatcagaaacagcctgcagcagcccgagggcatcgacagagccaagaccatgagcctgatcctgcacgccgccgacatcagccaccccgccaagagctggaagctgcactacagatggaccatggccctgatggaggagttcttcctgcagggcgacaaggaggccgagctgggcctgcccttcagccccctgtgcgacagaaagagcaccatggtggcccagagccagatcggcttcatcgacttcatcgtggagcccaccttcagcctgctgaccgacagcaccgagaagatcgtgatccccctgatcgaggaggccagcaaggccgagaccagcagctacgtggccagcagcagcaccaccatcgtgggcctgcacatcgccgacgccctgagaagaagcaacaccaagggcagcatgagcgacggcagctacagccccgactacagcctggccgccgtggacctgaagagcttcaagaacaacctggtggacatcatccagcagaacaaggagagatggaaggagctggccgcccagggcagcgtggtgtacgaggccctgctgcccagcctgagcgtgttcaccagccccctgagagtgtggatcaccagcagcagattcctgctgctgtag

SEQ ID NO: 93093 - DNA, 1326 bp, synthetic construct
  misc_feature 1..1326: note = Description of Artificial Sequence: Synthetic coding sequence
  source 1..1326: mol_type = other DNA
atgggcatgaccaagaagaagcccgaggagaagcccaagttcagaagcatcgtgcacgccgtgcaggccggcatcttcgtggagagaatgtacagaaagacctaccacatggtgggcctggcctaccccgccgccgtgatcgtgaccctgaaggacgtggacaagtggagcttcgacgtgttcgccctgaacgaggccagcggcgagcacagcctgaagttcatgatctacgagctgttcaccagatacgacctgatcaacagattcaagatccccgtgagctgcctgatcaccttcgccgaggccctggaggtgggctacagcaagtacaagaacccctaccacaacctgatccacgccgccgacgtgacccagaccgtgcactacatcatgctgcacaccggcatcatgcactggctgaccgagctggagatcctggccatggtgttcgccgccgccatccacgactacgagcacaccggcaccaccaacaacttccacatccagaccagaagcgacgtggccatcctgtacaacgacagaagcgtgctggagaaccaccacgtgagcgccgcctacagactgatgcaggaggaggagatgaacatcctgatcaacctgagcaaggacgactggagagacctgagaaacctggtgatcgagatggtgctgagcaccgacatgagcggccacttccagcagatcaagaacatcagaaacagcctgcagcagcccgagggcatcgacagagccaagaccatgagcctgatcctgcacgccgccgacatcagccaccccgccaagagctggaagctgcactacagatggaccatggccctgatggaggagttcttcctgcagggcgacaaggaggccgagctgggcctgcccttcagccccctgtgcgacagaaagagcaccatggtggcccagagccagatcggcttcatcgacttcatcgtggagcccaccttcagcctgctgaccgacagcaccgagaagatcgtgatccccctgatcgaggaggccagcaaggccgagaccagcagctacgtggccagcagcagcaccaccatcgtgggcctgcacatcgccgacgccctgagaagaagcaacaccaagggcagcatgagcgacggcagctacagccccgactacagcctggccgccgtggacctgaagagcttcaagaacaacctggtggacatcatccagcagaacaaggagagatggaaggagctggccgcccagggcgagagcgacctgcacaagaacagcgaggacctggtgaacgccgaggagaagcacgacgagacccacagctag

SEQ ID NO: 93094 - DNA, 1611 bp, synthetic construct
  misc_feature 1..1611: note = Description of Artificial Sequence: Synthetic coding sequence
  source 1..1611: mol_type = other DNA
atggagctgagccccagaagcccccccgagatgctggaggagagcgactgccccagccccctggagctgaagagcgcccccagcaagaagatgtggatcaagctgagaagcctgctgagatacatggtgaagcagctggagaacggcgagatcaacatcgaggagctgaagaagaacctggagtacaccgccagcctgctggaggccgtgtacatcgacgagaccagacagatcctggacaccgaggacgagctgcaggagctgagaagcgacgccgtgcccagcgaggtgagagactggctggccagcaccttcacccagcaggccagagccaagggcagaagagccgaggagaagcccaagttcagaagcatcgtgcacgccgtgcaggccggcatcttcgtggagagaatgttcagaagaacctacaccagcgtgggccccacctacagcaccgccgtgctgaactgcctgaagaacctggacctgtggtgcttcgacgtgttcagcctgaaccaggccgccgacgaccacgccctgagaaccatcgtgttcgagctgctgaccagacacaacctgatcagcagattcaagatccccaccgtgttcctgatgagcttcctggacgccctggagaccggctacggcaagtacaagaacccctaccacaaccagatccacgccgccgacgtgacccagaccgtgcactgcttcctgctgagaaccggcatggtgcactgcctgagcgagatcgagctgctggccatcatcttcgccgccgccatccacgactacgagcacaccggcaccaccaacagcttccacatccagaccaagagcgagtgcgccatcgtgtacaacgacagaagcgtgctggagaaccaccacatcagcagcgtgttcagactgatgcaggacgacgagatgaacatcttcatcaacctgaccaaggacgagttcgtggagctgagagccctggtgatcgagatggtgctggccaccgacatgagctgccacttccagcaggtgaagaccatgaagaccgccctgcagcagctggagagaatcgacaagcccaaggccctgagcctgctgctgcacgccgccgacatcagccaccccaccaagcagtggctggtgcacagcagatggaccaaggccctgatggaggagttcttcagacagggcgacaaggaggccgagctgggcctgcccttcagccccctgtgcgacagaaccagcaccctggtggcccagagccagatcggcttcatcgacttcatcgtggagcccaccttcagcgtgctgaccgacgtggccgagaagagcgtgcagcccctggccgacgaggacagcaagagcaagaaccagcccagcttccagtggagacagcccagcctggacgtggaggtgggcgaccccaaccccgacgtggtgagcttcagaagcacctgggtgaagagaatccaggagaacaagcagaagtggaaggagagagccgccagcggcatcaccaaccagatgagcatcgacgagctgagcccctgcgaggaggaggccccccccagccccgccgaggacgagcacaaccagaacggcaacctggactag

SEQ ID NO: 93095 - DNA, 1488 bp, synthetic construct
  misc_feature 1..1488: note = Description of Artificial Sequence: Synthetic coding sequence
  source 1..1488: mol_type = other DNA
atggtgaagcagctggagaacggcgagatcaacatcgaggagctgaagaagaacctggagtacaccgccagcctgctggaggccgtgtacatcgacgagaccagacagatcctggacaccgaggacgagctgcaggagctgagaagcgacgccgtgcccagcgaggtgagagactggctggccagcaccttcacccagcaggccagagccaagggcagaagagccgaggagaagcccaagttcagaagcatcgtgcacgccgtgcaggccggcatcttcgtggagagaatgttcagaagaacctacaccagcgtgggccccacctacagcaccgccgtgctgaactgcctgaagaacctggacctgtggtgcttcgacgtgttcagcctgaaccaggccgccgacgaccacgccctgagaaccatcgtgttcgagctgctgaccagacacaacctgatcagcagattcaagatccccaccgtgttcctgatgagcttcctggacgccctggagaccggctacggcaagtacaagaacccctaccacaaccagatccacgccgccgacgtgacccagaccgtgcactgcttcctgctgagaaccggcatggtgcactgcctgagcgagatcgagctgctggccatcatcttcgccgccgccatccacgactacgagcacaccggcaccaccaacagcttccacatccagaccaagagcgagtgcgccatcgtgtacaacgacagaagcgtgctggagaaccaccacatcagcagcgtgttcagactgatgcaggacgacgagatgaacatcttcatcaacctgaccaaggacgagttcgtggagctgagagccctggtgatcgagatggtgctggccaccgacatgagctgccacttccagcaggtgaagaccatgaagaccgccctgcagcagctggagagaatcgacaagcccaaggccctgagcctgctgctgcacgccgccgacatcagccaccccaccaagcagtggctggtgcacagcagatggaccaaggccctgatggaggagttcttcagacagggcgacaaggaggccgagctgggcctgcccttcagccccctgtgcgacagaaccagcaccctggtggcccagagccagatcggcttcatcgacttcatcgtggagcccaccttcagcgtgctgaccgacgtggccgagaagagcgtgcagcccctggccgacgaggacagcaagagcaagaaccagcccagcttccagtggagacagcccagcctggacgtggaggtgggcgaccccaaccccgacgtggtgagcttcagaagcacctgggtgaagagaatccaggagaacaagcagaagtggaaggagagagccgccagcggcatcaccaaccagatgagcatcgacgagctgagcccctgcgaggaggaggccccccccagccccgccgaggacgagcacaaccagaacggcaacctggactag

SEQ ID NO: 93096 - DNA, 1551 bp, synthetic construct
  misc_feature 1..1551: note = Description of Artificial Sequence: Synthetic coding sequence
  source 1..1551: mol_type = other DNA
atggccaaccccgtgcccgtgcagagaagccacctgcagggccccatcctgagactgagatacatggtgaagcagctggagaacggcgagatcaacatcgaggagctgaagaagaacctggagtacaccgccagcctgctggaggccgtgtacatcgacgagaccagacagatcctggacaccgaggacgagctgcaggagctgagaagcgacgccgtgcccagcgaggtgagagactggctggccagcaccttcacccagcaggccagagccaagggcagaagagccgaggagaagcccaagttcagaagcatcgtgcacgccgtgcaggccggcatcttcgtggagagaatgttcagaagaacctacaccagcgtgggccccacctacagcaccgccgtgctgaactgcctgaagaacctggacctgtggtgcttcgacgtgttcagcctgaaccaggccgccgacgaccacgccctgagaaccatcgtgttcgagctgctgaccagacacaacctgatcagcagattcaagatccccaccgtgttcctgatgagcttcctggacgccctggagaccggctacggcaagtacaagaacccctaccacaaccagatccacgccgccgacgtgacccagaccgtgcactgcttcctgctgagaaccggcatggtgcactgcctgagcgagatcgagctgctggccatcatcttcgccgccgccatccacgactacgagcacaccggcaccaccaacagcttccacatccagaccaagagcgagtgcgccatcgtgtacaacgacagaagcgtgctggagaaccaccacatcagcagcgtgttcagactgatgcaggacgacgagatgaacatcttcatcaacctgaccaaggacgagttcgtggagctgagagccctggtgatcgagatggtgctggccaccgacatgagctgccacttccagcaggtgaagaccatgaagaccgccctgcagcagctggagagaatcgacaagcccaaggccctgagcctgctgctgcacgccgccgacatcagccaccccaccaagcagtggctggtgcacagcagatggaccaaggccctgatggaggagttcttcagacagggcgacaaggaggccgagctgggcctgcccttcagccccctgtgcgacagaaccagcaccctggtggcccagagccagatcggcttcatcgacttcatcgtggagcccaccttcagcgtgctgaccgacgtggccgagaagagcgtgcagcccctggccgacgaggacagcaagagcaagaaccagcccagcttccagtggagacagcccagcctggacgtggaggtgggcgaccccaaccccgacgtggtgagcttcagaagcacctgggtgaagagaatccaggagaacaagcagaagtggaaggagagagccgccagcggcatcaccaaccagatgagcatcgacgagctgagcccctgcgaggaggaggccccccccagccccgccgaggacgagcacaaccagaacggcaacctggactag

SEQ ID NO: 93097 - DNA, 2310 bp, synthetic construct
  misc_feature 1..2310: note = Description of Artificial Sequence: Synthetic coding sequence
  source 1..2310: mol_type = other DNA
atgaccgacgccggcaacagaaaggagggcttcaagaagtgcagaagcgccaccttcagcatcgacggctacagcttcaccatcgtggccaacgaggccggcgacaagaacgccagacccctggccagattcagcagaagcaagagccagaactgcctgtggaacagcctgatcgacggcctgaccggcaacgtgaaggagaagcccagacccaccatcgtgcacgaccccagaccccccgaggagatcctggccgacgagctgccccagctggacagcagcgaggtgctggtgaagaccagcttcagactgagaagcctggtgaagcagctggagagaggcgaggccagcgtggtggacctgaagaagaacctggagtacgccgccaccgtgctggagagcgtgtacatcgacgagaccagaagactgctggacaccgaggacgagctgagcgacatccagagcgacgccgtgcccagcgaggtgagagactggctggccagcaccttcaccagacagatgggcatgatgctgagaagaagcgacgagaagcccagattcaagagcatcgtgcacgccgtgcaggccggcatcttcgtggagagaatgtacagaagaaccagcaacatggtgggcctgagctacccccccgccgtgatcgaggccctgaaggacgtggacaagtggagcttcgacgtgttcagcctgaacgaggccagcggcgaccacgccctgaagttcatcttctacgagctgctgaccagatacgacctgatcagcagattcaagatccccatcagcgccctggtgagcttcgtggaggccctggaggtgggctacagcaagcacaagaacccctaccacaacctgatgcacgccgccgacgtgacccagaccgtgcactacctgctgtacaagaccggcgtggccaactggctgaccgagctggagatcttcgccatcatcttcagcgccgccatccacgactacgagcacaccggcaccaccaacaacttccacatccagaccagaagcgaccccgccatcctgtacaacgacagaagcgtgctggagaaccaccacctgagcgccgcctacagactgctgcaggacgacgaggagatgaacatcctgatcaacctgagcaaggacgactggagagagttcagaaccctggtgatcgagatggtgatggccaccgacatgagctgccacttccagcagatcaaggccatgaagaccgccctgcagcagcccgaggccatcgagaagcccaaggccctgagcctgatgctgcacaccgccgacatcagccaccccgccaaggcctgggacctgcaccacagatggaccatgagcctgctggaggagttcttcagacagggcgacagagaggccgagctgggcctgcccttcagccccctgtgcgacagaaagagcaccatggtggcccagagccaggtgggcttcatcgacttcatcgtggagcccaccttcaccgtgctgaccgacatgaccgagaagatcgtgagccccctgatcgacgagaccagccagaccggcggcaccggccagagaagaagcagcctgaacagcatcagcagcagcgacgccaagagaagcggcgtgaagaccagcggcagcgagggcagcgcccccatcaacaacagcgtgatcagcgtggactacaagagcttcaaggccacctggaccgaggtggtgcacatcaacagagagagatggagagccaaggtgcccaaggaggagaaggccaagaaggaggccgaggagaaggccagactggccgccgaggagcagcagaaggagatggaggccaagagccaggccgaggagggcgccagcggcaaggccgagaagaagaccagcggcgagaccaagaaccaggtgaacggcaccagagccaacaagagcgacaaccccagaggcaagaacagcaaggccgagaagagcagcggcgagcagcagcagaacggcgacttcaaggacggcaagaacaagaccgacaagaaggaccacagcaacatcggcaacgacagcaagaagaccgacggcaccaagcagagaagccacggcagccccgcccccagcaccagcagcacctgcagactgaccctgcccgtgatcaagccccccctgagacacttcaagagacccgcctacgccagcagcagctacgcccccagcgtgagcaagaagaccgacgagcaccccgccagatacaagatgctggaccagagaatcaagatgaagaagatccagaacatcagccacaactggaacagaaagtag

SEQ ID NO: 93098 - DNA, 2130 bp, synthetic construct
  misc_feature 1..2130: note = Description of Artificial Sequence: Synthetic coding sequence
  source 1..2130: mol_type = other DNA
atggagagccccaccaaggagatcgaggagttcgagagcaacagcctgaagtacctgcagcccgagcagatcgagaagatctggctgagactgagaggcctgagaaagtacaagaagaccagccagagactgagaagcctggtgaagcagctggagagaggcgaggccagcgtggtggacctgaagaagaacctggagtacgccgccaccgtgctggagagcgtgtacatcgacgagaccagaagactgctggacaccgaggacgagctgagcgacatccagagcgacgccgtgcccagcgaggtgagagactggctggccagcaccttcaccagacagatgggcatgatgctgagaagaagcgacgagaagcccagattcaagagcatcgtgcacgccgtgcaggccggcatcttcgtggagagaatgtacagaagaaccagcaacatggtgggcctgagctacccccccgccgtgatcgaggccctgaaggacgtggacaagtggagcttcgacgtgttcagcctgaacgaggccagcggcgaccacgccctgaagttcatcttctacgagctgctgaccagatacgacctgatcagcagattcaagatccccatcagcgccctggtgagcttcgtggaggccctggaggtgggctacagcaagcacaagaacccctaccacaacctgatgcacgccgccgacgtgacccagaccgtgcactacctgctgtacaagaccggcgtggccaactggctgaccgagctggagatcttcgccatcatcttcagcgccgccatccacgactacgagcacaccggcaccaccaacaacttccacatccagaccagaagcgaccccgccatcctgtacaacgacagaagcgtgctggagaaccaccacctgagcgccgcctacagactgctgcaggacgacgaggagatgaacatcctgatcaacctgagcaaggacgactggagagagttcagaaccctggtgatcgagatggtgatggccaccgacatgagctgccacttccagcagatcaaggccatgaagaccgccctgcagcagcccgaggccatcgagaagcccaaggccctgagcctgatgctgcacaccgccgacatcagccaccccgccaaggcctgggacctgcaccacagatggaccatgagcctgctggaggagttcttcagacagggcgacagagaggccgagctgggcctgcccttcagccccctgtgcgacagaaagagcaccatggtggcccagagccaggtgggcttcatcgacttcatcgtggagcccaccttcaccgtgctgaccgacatgaccgagaagatcgtgagccccctgatcgacgagaccagccagaccggcggcaccggccagagaagaagcagcctgaacagcatcagcagcagcgacgccaagagaagcggcgtgaagaccagcggcagcgagggcagcgcccccatcaacaacagcgtgatcagcgtggactacaagagcttcaaggccacctggaccgaggtggtgcacatcaacagagagagatggagagccaaggtgcccaaggaggagaaggccaagaaggaggccgaggagaaggccagactggccgccgaggagcagcagaaggagatggaggccaagagccaggccgaggagggcgccagcggcaaggccgagaagaagaccagcggcgagaccaagaaccaggtgaacggcaccagagccaacaagagcgacaaccccagaggcaagaacagcaaggccgagaagagcagcggcgagcagcagcagaacggcgacttcaaggacggcaagaacaagaccgacaagaaggaccacagcaacatcggcaacgacagcaagaagaccgacggcaccaagcagagaagccacggcagccccgcccccagcaccagcagcacctgcagactgaccctgcccgtgatcaagccccccctgagacacttcaagagacccgcctacgccagcagcagctacgcccccagcgtgagcaagaagaccgacgagcaccccgccagatacaagatgctggaccagagaatcaagatgaagaagatccagaacatcagccacaactggaacagaaagtag

SEQ ID NO: 93099 - DNA, 1905 bp, synthetic construct
  misc_feature 1..1905: note = Description of Artificial Sequence: Synthetic coding sequence
  source 1..1905: mol_type = other DNA
atggagagccccaccaaggagatcgaggagttcgagagcaacagcctgaagtacctgcagcccgagcagatcgagaagatctggctgagactgagaggcctgagaaagtacaagaagaccagccagagactgagaagcctggtgaagcagctggagagaggcgaggccagcgtggtggacctgaagaagaacctggagtacgccgccaccgtgctggagagcgtgtacatcgacgagaccagaagactgctggacaccgaggacgagctgagcgacatccagagcgacgccgtgcccagcgaggtgagagactggctggccagcaccttcaccagacagatgggcatgatgctgagaagaagcgacgagaagcccagattcaagagcatcgtgcacgccgtgcaggccggcatcttcgtggagagaatgtacagaagaaccagcaacatggtgggcctgagctacccccccgccgtgatcgaggccctgaaggacgtggacaagtggagcttcgacgtgttcagcctgaacgaggccagcggcgaccacgccctgaagttcatcttctacgagctgctgaccagatacgacctgatcagcagattcaagatccccatcagcgccctggtgagcttcgtggaggccctggaggtgggctacagcaagcacaagaacccctaccacaacctgatgcacgccgccgacgtgacccagaccgtgcactacctgctgtacaagaccggcgtggccaactggctgaccgagctggagatcttcgccatcatcttcagcgccgccatccacgactacgagcacaccggcaccaccaacaacttccacatccagaccagaagcgaccccgccatcctgtacaacgacagaagcgtgctggagaaccaccacctgagcgccgcctacagactgctgcaggacgacgaggagatgaacatcctgatcaacctgagcaaggacgactggagagagttcagaaccctggtgatcgagatggtgatggccaccgacatgagctgccacttccagcagatcaaggccatgaagaccgccctgcagcagcccgaggccatcgagaagcccaaggccctgagcctgatgctgcacaccgccgacatcagccaccccgccaaggcctgggacctgcaccacagatggaccatgagcctgctggaggagttcttcagacagggcgacagagaggccgagctgggcctgcccttcagccccctgtgcgacagaaagagcaccatggtggcccagagccaggtgggcttcatcgacttcatcgtggagcccaccttcaccgtgctgaccgacatgaccgagaagatcgtgagccccctgatcgacgagaccagccagaccggcggcaccggccagagaagaagcagcctgaacagcatcagcagcagcgacgccaagagaagcggcgtgaagaccagcggcagcgagggcagcgcccccatcaacaacagcgtgatcagcgtggactacaagagcttcaaggccacctggaccgaggtggtgcacatcaacagagagagatggagagccaaggtgcccaaggaggagaaggccaagaaggaggccgaggagaaggccagactggccgccgaggagcagcagaaggagatggaggccaagagccaggccgaggagggcgccagcggcaaggccgagaagaagaccagcggcgagaccaagaaccaggtgaacggcaccagagccaacaagagcgacaaccccagaggcaagaacagcaaggccgagaagagcagcggcgagcagcagcagaacggcgacttcaaggacggcaagaacaagaccgacaagaaggaccacagcaacatcggcaacgacagcaagaagaccgacgacagccaggagtag

SEQ ID NO: 93100 - DNA, 1905 bp, synthetic construct; identical to SEQ ID NO: 93099
  misc_feature 1..1905: note = Description of Artificial Sequence: Synthetic coding sequence
  source 1..1905: mol_type = other DNA

SEQ ID NO: 93101 - DNA, 141 bp, synthetic construct
  misc_feature 1..141: note = Description of Artificial Sequence: Synthetic coding sequence
  source 1..141: mol_type = other DNA
atggagagccccaccaaggagatcgaggagttcgagagcaacagcctgaagtacctgcagcccgagcagatcgagaagatctggctgagactgagaggcctgagaaagtacaagaagaccagccagagactgagaagctag

SEQ ID NO: 93102 - DNA, 2130 bp, synthetic construct; identical to SEQ ID NO: 93098
  misc_feature 1..2130: note = Description of Artificial Sequence: Synthetic coding sequence
  source 1..2130: mol_type = other DNA

SEQ ID NO: 93103 - DNA, 3339 bp, synthetic construct
  misc_feature 1..3339: note = Description of Artificial Sequence: Synthetic coding sequence
  source 1..3339: mol_type = other DNA
atgagaagagacgagagagacgccaaggccatgagaagcctgcagccccccgacggcgccggcagcccccccgagagcctgagaaacggctacgtgaagagctgcgtgagccccctgagacaggacccccccagaggcttcttcttccacctgtgcagattctgcaacgtggagctgagacccccccccgccagcccccagcagcccagaagatgcagccccttctgcagagccagactgagcctgggcgccctggccgccttcgtgctggccctgctgctgggcgccgagcccgagagctgggccgccggcgccgcctggctgagaaccctgctgagcgtgtgcagccacagcctgagccccctgttcagcatcgcctgcgccttcttcttcctgacctgcttcctgaccagaaccaagagaggccccggccccggcagaagctgcggcagctggtggctgctggccctgcccgcctgctgctacctgggcgacttcctggtgtggcagtggtggagctggccctggggcgacggcgacgccggcagcgccgccccccacaccccccccgaggccgccgccggcagactgctgctggtgctgagctgcgtgggcctgctgctgaccctggcccaccccctgagactgagacactgcgtgctggtgctgctgctggccagcttcgtgtggtgggtgagcttcaccagcctgggcagcctgcccagcgccctgagacccctgctgagcggcctggtgggcggcgccggctgcctgctggccctgggcctggaccacttcttccagatcagagaggcccccctgcaccccagactgagcagcgccgccgaggagaaggtgcccgtgatcagacccagaagaagaagcagctgcgtgagcctgggcgagaccgccgccagctactacggcagctgcaagatcttcagaagacccagcctgccctgcatcagcagagagcagatgatcctgtgggactgggacctgaagcagtggtacaagccccactaccagaacagcggcggcggcaacggcgtggacctgagcgtgctgaacgaggccagaaacatggtgagcgacctgctgaccgaccccagcctgcccccccaggtgatcagcagcctgagaagcatcagcagcctgatgggcgccttcagcggcagctgcagacccaagatcaaccccctgacccccttccccggcttctacccctgcagcgagatcgaggaccccgccgagaagggcgacagaaagctgaacaagggcctgaacagaaacagcctgcccaccccccagctgagaagaagcagcggcaccagcggcctgctgcccgtggagcagagcagcagatgggacagaaacaacggcaagagaccccaccaggagttcggcatcagcagccagggctgctacctgaacggccccttcaacagcaacctgctgaccatccccaagcagagaagcagcagcgtgagcctgacccaccacgtgggcctgagaagagccggcgtgctgagcagcctgagccccgtgaacagcagcaaccacggccccgtgagcaccggcagcctgaccaacagaagccccatcgagttccccgacaccgccgacttcctgaacaagcccagcgtgatcctgcagagaagcctgggcaacgcccccaacacccccgacttctaccagcagctgagaaacagcgacagcaacctgtgcaacagctgcggccaccagatgctgaagtacgtgagcaccagcgagagcgacggcaccgactgctgcagcggcaagagcggcgaggaggagaacatcttcagcaaggagagcttcaagctgatggagacccagcaggaggaggagaccgagaagaaggacagcagaaagctgttccaggagggcgacaagtggctgaccgaggaggcccagagcgagcagcagaccaacatcgagcaggaggtgagcctggacctgatcctggtggaggagtacgacagcctgatcgagaagatgagcaactggaacttccccatcttcgagctggtggagaagatgggcgagaagagcggcagaatcctgagccaggtgatgtacaccctgttccaggacaccggcctgctggagatcttcaagatccccacccagcagttcatgaactacttcagagccctggagaacggctacagagacatcccctaccacaacagaatccacgccaccgacgtgctgcacgccgtgtggtacctgaccaccagacccgtgcccggcctgcagcagatccacaacggctgcggcaccggcaacgagaccgacagcgacggcagaatcaaccacggcagaatcgcctacatcagcagcaagagctgcagcaaccccgacgagagctacggctgcctgagcagcaacatccccgccctggagctgatggccctgtacgtggccgccgccatgcacgactacgaccaccccggcagaaccaacgccttcctggtggccaccaacgccccccaggccgtgctgtacaacgacagaagcgtgctggagaaccaccacgccgccagcgcctggaacctgtacctgagcagacccgagtacaacttcctgctgcacctggaccacgtggagttcaagagattcagattcctggtgatcgaggccatcctggccaccgacctgaagaagcacttcgacttcctggccgagttcaacgccaaggccaacgacgtgaacagcaacggcatcgagtggagcaacgagaacgacagactgctggtgtgccaggtgtgcatcaagctggccgacatcaacggccccgccaaggtgagagacctgcacctgaagtggaccgagggcatcgtgaacgagttctacgagcagggcgacgaggaggccaacctgggcctgcccatcagccccttcatggacagaagcagcccccagctggccaagctgcaggagagcttcatcacccacatcgtgggccccctgtgcaacagctacgacgccgccggcctgctgcccggccagtggctggaggccgaggaggacaacgacaccgagagcggcgacgacgaggacggcgaggagctggacaccgaggacgaggagatggagaacaacctgaaccccaagccccccagaagaaagagcagaagaagaatcttctgccagctgatgcaccacctgaccgagaaccacaagatctggaaggagatcgtggaggaggaggagaagtgcaaggccgacggcaacaagctgcaggtggagaacagcagcctgccccaggccgacgagatccaggtgatcgaggaggccgacgaggaggagtag

SEQ ID NO: 93104 - DNA, 3186 bp, synthetic construct
  misc_feature 1..3186: note = Description of Artificial Sequence: Synthetic coding sequence
  source 1..3186: mol_type = other DNA
atgagaagagacgagagagacgccaaggccatgagaagcctgcagccccccgacggcgccggcagcccccccgagagcctgagaaacggctacgtgaagagctgcgtgagccccctgagacaggacccccccagaggcttcttcttccacctgtgcagattctgcaacgtggagctgagacccccccccgccagcccccagcagcccagaagatgcagccccttctgcagagccagactgagcctgggcgccctggccgccttcgtgctggccctgctgctgggcgccgagcccgagagctgggccgccggcgccgcctggctgagaaccctgctgagcgtgtgcagccacagcctgagccccctgttcagcatcgcctgcgccttcttcttcctgacctgcttcctgaccagaaccaagagaggccccggccccggcagaagctgcggcagctggtggctgctggccctgcccgcctgctgctacctgggcgacttcctggtgtggcagtggtggagctggccctggggcgacggcgacgccggcagcgccgccccccacaccccccccgaggccgccgccggcagactgctgctggtgctgagctgcgtgggcctgctgctgaccctggcccaccccctgagactgagacactgcgtgctggtgctgctgctggccagcttcgtgtggtgggtgagcttcaccagcctgggcagcctgcccagcgccctgagacccctgctgagcggcctggtgggcggcgccggctgcctgctggccctgggcctggaccacttcttccagatcagagaggcccccctgcaccccagactgagcagcgccgccgaggagaaggtgcccgtgatcagacccagaagaagaagcagctgcgtgagcctgggcgagaccgccgccagctactacggcagctgcaagatcttcagaagacccagcctgccctgcatcagcagagagcagatgatcctgtgggactgggacctgaagcagtggtacaagccccactaccagaacagcggcggcggcaacggcgtggacctgagcgtgctgaacgaggccagaaacatggtgagcgacctgctgaccgaccccagcctgcccccccagggcctgaacagaaacagcctgcccaccccccagctgagaagaagcagcggcaccagcggcctgctgcccgtggagcagagcagcagatgggacagaaacaacggcaagagaccccaccaggagttcggcatcagcagccagggctgctacctgaacggccccttcaacagcaacctgctgaccatccccaagcagagaagcagcagcgtgagcctgacccaccacgtgggcctgagaagagccggcgtgctgagcagcctgagccccgtgaacagcagcaaccacggccccgtgagcaccggcagcctgaccaacagaagccccatcgagttccccgacaccgccgacttcctgaacaagcccagcgtgatcctgcagagaagcctgggcaacgcccccaacacccccgacttctaccagcagctgagaaacagcgacagcaacctgtgcaacagctgcggccaccagatgctgaagtacgtgagcaccagcgagagcgacggcaccgactgctgcagcggcaagagcggcgaggaggagaacatcttcagcaaggagagcttcaagctgatggagacccagcaggaggaggagaccgagaagaaggacagcagaaagctgttccaggagggcgacaagtggctgaccgaggaggcccagagcgagcagcagaccaacatcgagcaggaggtgagcctggacctgatcctggtggaggagtacgacagcctgatcgagaagatgagcaactggaacttccccatcttcgagctggtggagaagatgggcgagaagagcggcagaatcctgagccaggtgatgtacaccctgttccaggacaccggcctgctggagatcttcaagatccccacccagcagttcatgaactacttcagagccctggagaacggctacagagacatcccctaccacaacagaatccacgccaccgacgtgctgcacgccgtgtggtacctgaccaccagacccgtgcccggcctgcagcagatccacaacggctgcggcaccggcaacgagaccgacagcgacggcagaatcaaccacggcagaatcgcctacatcagcagcaagagctgcagcaaccccgacgagagctacggctgcctgagcagcaacatccccgccctggagctgatggccctgtacgtggccgccgccatgcacgactacgaccaccccggcagaaccaacgccttcctggtggccaccaacgccccccaggccgtgctgtacaacgacagaagcgtgctggagaaccaccacgccgccagcgcctggaacctgtacctgagcagacccgagtacaacttcctgctgcacctggaccacgtggagttcaagagattcagattcctggtgatcgaggccatcctggccaccgacctgaagaagcacttcgacttcctggccgagttcaacgccaaggccaacgacgtgaacagcaacggcatcgagtggagcaacgagaacgacagactgctggtgtgccaggtgtgcatcaagctggccgacatcaacggccccgccaaggtgagagacctgcacctgaagtggaccgagggcatcgtgaacgagttctacgagcagggcgacgaggaggccaacctgggcctgcccatcagccccttcatggacagaagcagcccccagctggccaagctgcaggagagcttcatcacccacatcgtgggccccctgtgcaacagctacgacgccgccggcctgctgcccggccagtggctggaggccgaggaggacaacgacaccgagagcggcgacgacgaggacggcgaggagctggacaccgaggacgaggagatggagaacaacctgaaccccaagccccccagaagaaagagcagaagaagaatcttctgccagctgatgcaccacctgaccgagaaccacaagatctggaaggagatcgtggaggaggaggagaagtgcaaggccgacggcaacaagctgcaggtggagaacagcagcctgccccaggccgacgagatccaggtgatcgaggaggccgacgaggaggagtag

SEQ ID NO: 93105 - DNA, 2583 bp, synthetic construct
  misc_feature 1..2583: note = Description of Artificial Sequence: Synthetic coding sequence
  source 1..2583: mol_type = other DNA
atggccagacccagaggcctgggcagaatccccgagctgcagctggtggccttccccgtggccgtggccgccgaggacgaggccttcctgcccgagcccctggcccccagagcccccagaagacccagaagcccccccagcagccccgtgttcttcgccagccccagccccaccttcagaagaagactgagactgctgagaagctgccaggacctgggcagacaggcctgggccggcgccggcttcgaggccgagaacggccccacccccagccccggcagaagccccctggacagccaggccagccccggcctggtgctgcacgccggcgccgccaccagccagagaagagagagcttcctgtacagaagcgacagcgactacgacatgagccccaagaccatgagcagaaacagcagcgtgaccagcgaggcccacgccgaggacctgatcgtgacccccttcgcccaggtgctggccagcctgagaagcgtgagaagcaacttcagcctgctgaccaacgtgcccgtgcccagcaacaagagaagccccctgggcggccccacccccgtgtgcaaggccaccctgagcgaggagacctgccagcagctggccagagagaccctggaggagctggactggtgcctggagcagctggagaccatgcagacctacagaagcgtgagcgagatggccagccacaagttcaagagaatgctgaacagagagctgacccacctgagcgagatgagcagaagcggcaaccaggtgagcgagtacatcagcaccaccttcctggacaagcagaacgaggtggagatccccagccccaccatgaaggagagagagaagcagcaggcccccagacccagacccagccagcccccccccccccccgtgccccacctgcagcccatgagccagatcaccggcctgaagaagctgatgcacagcaacagcctgaacaacagcaacatccccagattcggcgtgaagaccgaccaggaggagctgctggcccaggagctggagaacctgaacaagtggggcctgaacatcttctgcgtgagcgactacgccggcggcagaagcctgacctgcatcatgtacatgatcttccaggagagagacctgctgaagaagttcagaatccccgtggacaccatggtgacctacatgctgaccctggaggaccactaccacgccgacgtggcctaccacaacagcctgcacgccgccgacgtgctgcagagcacccacgtgctgctggccacccccgccctggacgccgtgttcaccgacctggagatcctggccgccctgttcgccgccgccatccacgacgtggaccaccccggcgtgagcaaccagttcctgatcaacaccaacagcgagctggccctgatgtacaacgacgagagcgtgctggagaaccaccacctggccgtgggcttcaagctgctgcaggaggacaactgcgacatcttccagaacctgagcaagagacagagacagagcctgagaaagatggtgatcgacatggtgctggccaccgacatgagcaagcacatgaccctgctggccgacctgaagaccatggtggagaccaagaaggtgaccagcagcggcgtgctgctgctggacaactacagcgacagaatccaggtgctgagaaacatggtgcactgcgccgacctgagcaaccccaccaagcccctggagctgtacagacagtggaccgacagaatcatggccgagttcttccagcagggcgacagagagagagagagaggcatggagatcagccccatgtgcgacaagcacaccgccagcgtggagaagagccaggtgggcttcatcgactacatcgtgcaccccctgtgggagacctgggccgacctggtgcaccccgacgcccaggagatcctggacaccctggaggacaacagagactggtactacagcgccatcagacagagccccagccccccccccgaggaggagagcagaggccccggccacccccccctgcccgacaagttccagttcgagctgaccctggaggaggaggaggaggaggagatcagcatggcccagatcccctgcaccgcccaggaggccctgaccgcccagggcctgagcggcgtggaggaggccctggacgccaccatcgcctgggaggccagccccgcccaggagagcctggaggtgatggcccaggaggccagcctggaggccgagctggaggccgtgtacctgacccagcaggcccagagcaccggcagcgcccccgtggcccccgacgagttcagcagcagagaggagttcgtggtggccgtgagccacagcagccccagcgccctggccctgcagagccccctgctgcccgcctggagaaccctgagcgtgagcgagcacgcccccggcctgcccggcctgcccagcaccgccgccgaggtggaggcccagagagagcaccaggccgccaagagagcctgcagcgcctgcgccggcaccttcggcgaggacaccagcgccctgcccgcccccggcggcggcggcagcggcggcgaccccacctag

SEQ ID NO: 93106 - DNA, 1944 bp, synthetic construct
  misc_feature 1..1944: note = Description of Artificial Sequence: Synthetic coding sequence
  source 1..1944: mol_type = other DNA
atgcccctggtggacttcttctgcgagacctgcagcaagccctggctggtgggctggtgggaccagttcaagagaatgctgaacagagagctgacccacctgagcgagatgagcagaagcggcaaccaggtgagcgagtacatcagcaccaccttcctggacaagcagaacgaggtggagatccccagccccaccatgaaggagagagagaagcagcaggcccccagacccagacccagccagcccccccccccccccgtgccccacctgcagcccatgagccagatcaccggcctgaagaagctgatgcacagcaacagcctgaacaacagcaacatccccagattcggcgtgaagaccgaccaggaggagctgctggcccaggagctggagaacctgaacaagtggggcctgaacatcttctgcgtgagcgactacgccggcggcagaagcctgacctgcatcatgtacatgatcttccaggagagagacctgctgaagaagttcagaatccccgtggacaccatggtgacctacatgctgaccctggaggaccactaccacgccgacgtggcctaccacaacagcctgcacgccgccgacgtgctgcagagcacccacgtgctgctggccacccccgccctggacgccgtgttcaccgacctggagatcctggccgccctgttcgccgccgccatccacgacgtggaccaccccggcgtgagcaaccagttcctgatcaacaccaacagcgagctggccctgatgtacaacgacgagagcgtgctggagaaccaccacctggccgtgggcttcaagctgctgcaggaggacaactgcgacatcttccagaacctgagcaagagacagagacagagcctgagaaagatggtgatcgacatggtgctggccaccgacatgagcaagcacatgaccctgctggccgacctgaagaccatggtggagaccaagaaggtgaccagcagcggcgtgctgctgctggacaactacagcgacagaatccaggtgctgagaaacatggtgcactgcgccgacctgagcaaccccaccaagcccctggagctgtacagacagtggaccgacagaatcatggccgagttcttccagcagggcgacagagagagagagagaggcatggagatcagccccatgtgcgacaagcacaccgccagcgtggagaagagccaggtgggcttcatcgactacatcgtgcaccccctgtgggagacctgggccgacctggtgcaccccgacgcccaggagatcctggacaccctggaggacaacagagactggtactacagcgccatcagacagagccccagccccccccccgaggaggagagcagaggccccggccacccccccctgcccgacaagttccagttcgagctgaccctggaggaggaggaggaggaggagatcagcatggcccagatcccctgcaccgcccaggaggccctgaccgcccagggcctgagcggcgtggaggaggccctggacgccaccatcgcctgggaggccagccccgcccaggagagcctggaggtgatggcccaggaggccagcctggaggccgagctggaggccgtgtacctgacccagcaggcccagagcaccggcagcgcccccgtggcccccgacgagttcagcagcagagaggagttcgtggtggccgtgagccacagcagccccagcgccctggccctgcagagccccctgctgcccgcctggagaaccctgagcgtgagcgagcacgcccccggcctgcccggcctgcccagcaccgccgccgaggtggaggcccagagagagcaccaggccgccaagagagcctgcagcgcctgcgccggcaccttcggcgaggacaccagcgccctgcccgcccccggcggcggcggcagcggcggcgaccccacctag

SEQ ID NO: 93107 - DNA, 2661 bp, synthetic construct
  misc_feature 1..2661: note = Description of Artificial Sequence: Synthetic coding sequence
  source 1..2661: mol_type = other DNA
atggagccccccaccgtgcccagcgagagaagcctgagcctgagcctgcccggccccagagagggccaggccaccctgaagccccccccccagcacctgtggagacagcccagaacccccatcagaatccagcagagaggctacagcgacagcgccgagagagccgagagagagagacagccccacagacccatcgagagagccgacgccatggacaccagcgacagacccggcctgagaaccaccagaatgagctggcccagcagcttccacggcaccggcaccggcagcggcggcgccggcggcggcagcagcagaagattcgaggccgagaacggccccacccccagccccggcagaagccccctggacagccaggccagccccggcctggtgctgcacgccggcgccgccaccagccagagaagagagagcttcctgtacagaagcgacagcgactacgacatgagccccaagaccatgagcagaaacagcagcgtgaccagcgaggcccacgccgaggacctgatcgtgacccccttcgcccaggtgctggccagcctgagaagcgtgagaagcaacttcagcctgctgaccaacgtgcccgtgcccagcaacaagagaagccccctgggcggccccacccccgtgtgcaaggccaccctgagcgaggagacctgccagcagctggccagagagaccctggaggagctggactggtgcctggagcagctggagaccatgcagacctacagaagcgtgagcgagatggccagccacaagttcaagagaatgctgaacagagagctgacccacctgagcgagatgagcagaagcggcaaccaggtgagcgagtacatcagcaccaccttcctggacaagcagaacgaggtggagatccccagccccaccatgaaggagagagagaagcagcaggcccccagacccagacccagccagcccccccccccccccgtgccccacctgcagcccatgagccagatcaccggcctgaagaagctgatgcacagcaacagcctgaacaacagcaacatccccagattcggcgtgaagaccgaccaggaggagctgctggcccaggagctggagaacctgaacaagtggggcctgaacatcttctgcgtgagcgactacgccggcggcagaagcctgacctgcatcatgtacatgatcttccaggagagagacctgctgaagaagttcagaatccccgtggacaccatggtgacctacatgctgaccctggaggaccactaccacgccgacgtggcctaccacaacagcctgcacgccgccgacgtgctgcagagcacccacgtgctgctggccacccccgccctggacgccgtgttcaccgacctggagatcctggccgccctgttcgccgccgccatccacgacgtggaccaccccggcgtgagcaaccagttcctgatcaacaccaacagcgagctggccctgatgtacaacgacgagagcgtgctggagaaccaccacctggccgtgggcttcaagctgctgcaggaggacaactgcgacatcttccagaacctgagcaagagacagagacagagcctgagaaagatggtgatcgacatggtgctggccaccgacatgagcaagcacatgaccctgctggccgacctgaagaccatggtggagaccaagaaggtgaccagcagcggcgtgctgctgctggacaactacagcgacagaatccaggtgctgagaaacatggtgcactgcgccgacctgagcaaccccaccaagcccctggagctgtacagacagtggaccgacagaatcatggccgagttcttccagcagggcgacagagagagagagagaggcatggagatcagccccatgtgcgacaagcacaccgccagcgtggagaagagccaggtgggcttcatcgactacatcgtgcaccccctgtgggagacctgggccgacctggtgcaccccgacgcccaggagatcctggacaccctggaggacaacagagactggtactacagcgccatcagacagagccccagccccccccccgaggaggagagcagaggccccggccacccccccctgcccgacaagttccagttcgagctgaccctggaggaggaggaggaggaggagatcagcatggcccagatcccctgcaccgcccaggaggccctgaccgcccagggcctgagcggcgtggaggaggccctggacgccaccatcgcctgggaggccagccccgcccaggagagcctggaggtgatggcccaggaggccagcctggaggccgagctggaggccgtgtacctgacccagcaggcccagagcaccggcagcgcccccgtggcccccgacgagttcagcagcagagaggagttcgtggtggccgtgagccacagcagccccagcgccctggccctgcagagccccctgctgcccgcctggagaaccctgagcgtgagcgagcacgcccccggcctgcccggcctgcccagcaccgccgccgaggtggaggcccagagagagcaccaggccgccaagagagcctgcagcgcctgcgccggcaccttcggcgaggacaccagcgccctgcccgcccccggcggcggcggcagcggcggcgaccccacctag

SEQ ID NO: 93108 - DNA, 972 bp, synthetic construct
  misc_feature 1..972: note = Description of Artificial Sequence: Synthetic coding sequence
  source 1..972: mol_type = other DNA
atggtgctgcccagcgaccagggcttcaagctgctgggcaacgtgctgcagggccccgagccctacagactgctgaccagcggcctgagactgcaccaggagctggagaacctgaacaagtggggcctgaacatcttctgcgtgagcgactacgccggcggcagaagcctgacctgcatcatgtacatgatcttccaggagagagacctgctgaagaagttcagaatccccgtggacaccatggtgacctacatgctgaccctggaggaccactaccacgccgacgtggcctaccacaacagcctgcacgccgccgacgtgctgcagagcacccacgtgctgctggccacccccgccctggacgccgtgttcaccgacctggagatcctggccgccctgttcgccgccgccatccacgacgtggaccaccccggcgtgagcaaccagttcctgatcaacaccaacagcgagctggccctgatgtacaacgacgagagcgtgctggagaaccaccacctggccgtgggcttcaagctgctgcaggaggacaactgcgacatcttccagaacctgagcaagagacagagacagagcctgagaaagatggtgatcgacatggtgctggccaccgacatgagcaagcacatgaccctgctggccgacctgaagaccatggtggagaccaagaaggtgaccagcagcggcgtgctgctgctggacaactacagcgacagaatccaggtgctgagaaacatggtgcactgcgccgacctgagcaaccccaccaagcccctggagctgtacagacagtggaccgacagaatcatggccgagttcttccagcagggcgacagagagagagagagaggcatggagatcagccccatgtgcgacaagcacaccgccagcgtggagaagagccaggtgcaggccagaggcatcgacggcagagcccagggcgagttctactag

SEQ ID NO: 93109 - DNA, 2595 bp, synthetic construct
  misc_feature 1..2595: note = Description of Artificial Sequence: Synthetic coding sequence
  source 1..2595: mol_type = other DNA
atgaagagaagcagaagcgccctgagcgtggccggcaccggcgacgagagaagcagagagacccccgagagcgacagagccaacatgctgggcgccgacctgagaagacccagaagaagactgagcagcggccccggcctgggctgggcccagcccgagcccagcgaccccggcgtgcccctgccccccagacccaccaccctgcccctgctgatcccccccagaatcagcatcaccagagccgagaacgacagcttcgaggccgagaacggccccacccccagccccggcagaagccccctggacagccaggccagccccggcctggtgctgcacgccggcgccgccaccagccagagaagagagagcttcctgtacagaagcgacagcgactacgacatgagccccaagaccatgagcagaaacagcagcgtgaccagcgaggcccacgccgaggacctgatcgtgacccccttcgcccaggtgctggccagcctgagaagcgtgagaagcaacttcagcctgctgaccaacgtgcccgtgcccagcaacaagagaagccccctgggcggccccacccccgtgtgcaaggccaccctgagcgaggagacctgccagcagctggccagagagaccctggaggagctggactggtgcctggagcagctggagaccatgcagacctacagaagcgtgagcgagatggccagccacaagttcaagagaatgctgaacagagagctgacccacctgagcgagatgagcagaagcggcaaccaggtgagcgagtacatcagcaccaccttcctggacaagcagaacgaggtggagatccccagccccaccatgaaggagagagagaagcagcaggcccccagacccagacccagccagcccccccccccccccgtgccccacctgcagcccatgagccagatcaccggcctgaagaagctgatgcacagcaacagcctgaacaacagcaacatccccagattcggcgtgaagaccgaccaggaggagctgctggcccaggagctggagaacctgaacaagtggggcctgaacatcttctgcgtgagcgactacgccggcggcagaagcctgacctgcatcatgtacatgatcttccaggagagagacctgctgaagaagttcagaatccccgtggacaccatggtgacctacatgctgaccctggaggaccactaccacgccgacgtggcctaccacaacagcctgcacgccgccgacgtgctgcagagcacccacgtgctgctggccacccccgccctggacgccgtgttcaccgacctggagatcctggccgccctgttcgccgccgccatccacgacgtggaccaccccggcgtgagcaaccagttcctgatcaacaccaacagcgagctggccctgatgtacaacgacgagagcgtgctggagaaccaccacctggccgtgggcttcaagctgctgcaggaggacaactgcgacatcttccagaacctgagcaagagacagagacagagcctgagaaagatggtgatcgacatggtgctggccaccgacatgagcaagcacatgaccctgctggccgacctgaagaccatggtggagaccaagaaggtgaccagcagcggcgtgctgctgctggacaactacagcgacagaatccaggtgctgagaaacatggtgcactgcgccgacctgagcaaccccaccaagcccctggagctgtacagacagtggaccgacagaatcatggccgagttcttccagcagggcgacagagagagagagagaggcatggagatcagccccatgtgcgacaagcacaccgccagcgtggagaagagccaggtgggcttcatcgactacatcgtgcaccccctgtgggagacctgggccgacctggtgcaccccgacgcccaggagatcctggacaccctggaggacaacagagactggtactacagcgccatcagacagagccccagccccccccccgaggaggagagcagaggccccggccacccccccctgcccgacaagttccagttcgagctgaccctggaggaggaggaggaggaggagatcagcatggcccagatcccctgcaccgcccaggaggccctgaccgcccagggcctgagcggcgtggaggaggccctggacgccaccatcgcctgggaggccagccccgcccaggagagcctggaggtgatggcccaggaggccagcctggaggccgagctggaggccgtgtacctgacccagcaggcccagagcaccggcagcgcccccgtggcccccgacgagttcagcagcagagaggagttcgtggtggccgtgagccacagcagccccagcgccctggccctgcagagccccctgctgcccgcctggagaaccctgagcgtgagcgagcacgcccccggcctgcccggcctgcccagcaccgccgccgaggtggaggcccagagagagcaccaggccgccaagagagcctgcagcgcctgcgccggcaccttcggcgaggacaccagcgccctgcccgcccccggcggcggcggcagcggcggcgaccccacctag

SEQ ID NO: 93110 - DNA, 309 bp, synthetic construct
  misc_feature 1..309: note = Description of Artificial Sequence: Synthetic coding sequence
  source 1..309: mol_type = other DNA
atggtggagaccaagaaggtgaccagcagcggcgtgctgctgctggacaactacagcgacagaatccaggtgctgagaaacatggtgcactgcgccgacctgagcaaccccaccaagcccctggagctgtacagacagtggaccgacagaatcatggccgagttcttccagcagggcgacagagagagagagagaggcatggagatcagccccatgtgcgacaagcacaccgccagcgtggagaagagccaggtgggcttcatcgactacatcgtgcaccccctgtgggagacctgggccgacctgtag

SEQ ID NO: 93111 - DNA, 2478 bp, synthetic construct
  misc_feature 1..2478: note = Description of Artificial Sequence: Synthetic coding sequence
  source 1..2478: mol_type = other DNA
atgagaagcggcgccgcccccagagccagacccagaccccccgccctggccctgccccccaccggccccgagagcctgacccacttccccttcagcgacgaggacaccagaagacacccccccggcagaagcgtgagcttcgaggccgagaacggccccacccccagccccggcagaagccccctggacagccaggccagccccggcctggtgctgcacgccggcgccgccaccagccagagaagagagagcttcctgtacagaagcgacagcgactacgacatgagccccaagaccatgagcagaaacagcagcgtgaccagcgaggcccacgccgaggacctgatcgtgacccccttcgcccaggtgctggccagcctgagaagcgtgagaagcaacttcagcctgctgaccaacgtgcccgtgcccagcaacaagagaagccccctgggcggccccacccccgtgtgcaaggccaccctgagcgaggagacctgccagcagctggccagagagaccctggaggagctggactggtgcctggagcagctggagaccatgcagacctacagaagcgtgagcgagatggccagccacaagttcaagagaatgctgaacagagagctgacccacctgagcgagatgagcagaagcggcaaccaggtgagcgagtacatcagcaccaccttcctggacaagcagaacgaggtggagatccccagccccaccatgaaggagagagagaagcagcaggcccccagacccagacccagccagcccccccccccccccgtgccccacctgcagcccatgagccagatcaccggcctgaagaagctgatgcacagcaacagcctgaacaacagcaacatccccagattcggcgtgaagaccgaccaggaggagctgctggcccaggagctggagaacctgaacaagtggggcctgaacatcttctgcgtgagcgactacgccggcggcagaagcctgacctgcatcatgtacatgatcttccaggagagagacctgctgaagaagttcagaatccccgtggacaccatggtgacctacatgctgaccctggaggaccactaccacgccgacgtggcctaccacaacagcctgcacgccgccgacgtgctgcagagcacccacgtgctgctggccacccccgccctggacgccgtgttcaccgacctggagatcctggccgccctgttcgccgccgccatccacgacgtggaccaccccggcgtgagcaaccagttcctgatcaacaccaacagcgagctggccctgatgtacaacgacgagagcgtgctggagaaccaccacctggccgtgggcttcaagctgctgcaggaggacaactgcgacatcttccagaacctgagcaagagacagagacagagcctgagaaagatggtgatcgacatggtgctggccaccgacatgagcaagcacatgaccctgctggccgacctgaagaccatggtggagaccaagaaggtgaccagcagcggcgtgctgctgctggacaactacagcgacagaatccaggtgctgagaaacatggtgcactgcgccgacctgagcaaccccaccaagcccctggagctgtacagacagtggaccgacagaatcatggccgagttcttccagcagggcgacagagagagagagagaggcatggagatcagccccatgtgcgacaagcacaccgccagcgtggagaagagccaggtgggcttcatcgactacatcgtgcaccccctgtgggagacctgggccgacctggtgcaccccgacgcccaggagatcctggacaccctggaggacaacagagactggtactacagcgccatcagacagagccccagccccccccccgaggaggagagcagaggccccggccacccccccctgcccgacaagttccagttcgagctgaccctggaggaggaggaggaggaggagatcagcatggcccagatcccctgcaccgcccaggaggccctgaccgcccagggcctgagcggcgtggaggaggccctggacgccaccatcgcctgggaggccagccccgcccaggagagcctggaggtgatggcccaggaggccagcctggaggccgagctggaggccgtgtacctgacccagcaggcccagagcaccggcagcgcccccgtggcccccgacgagttcagcagcagagaggagttcgtggtggccgtgagccacagcagccccagcgccctggccctgcagagccccctgctgcccgcctggagaaccctgagcgtgagcgagcacgcccccggcctgcccggcctgcccagcaccgccgccgaggtggaggcccagagagagcaccaggccgccaagagagcctgcagcgcctgcgccggcaccttcggcgaggacaccagcgccctgcccgcccccggcggcggcggcagcggcggcgaccccacctag

SEQ ID NO: 93112 - DNA, 2211 bp, synthetic construct
  misc_feature 1..2211: note = Description of Artificial Sequence: Synthetic coding sequence
  source 1..2211: mol_type = other DNA
atgaagaagagcagaagcgtgatgaccgtgatggccgacgacaacgtgaaggactacttcgagtgcagcctgagcaagagctacagcagcagcagcaacaccctgggcatcgacctgtggagaggcagaagatgctgcagcggcaacctgcagctgccccccctgagccagagacagagcgagagagccagaacccccgagggcgacggcatcagcagacccaccaccctgcccctgaccaccctgcccagcatcgccatcaccaccgtgagccaggagtgcttcgacgtggagaacggccccagccccggcagaagccccctggacccccaggccagcagcagcgccggcctggtgctgcacgccaccttccccggccacagccagagaagagagagcttcctgtacagaagcgacagcgactacgacctgagccccaaggccatgagcagaaacagcagcctgcccagcgagcagcacggcgacgacctgatcgtgacccccttcgcccaggtgctggccagcctgagaagcgtgagaaacaacttcaccatcctgaccaacctgcacggcaccagcaacaagagaagccccgccgccagccagccccccgtgagcagagtgaacccccaggaggagagctaccagaagctggccatggagaccctggaggagctggactggtgcctggaccagctggagaccatccagacctacagaagcgtgagcgagatggccagcaacaagttcaagagaatgctgaacagagagctgacccacctgagcgagatgagcagaagcggcaaccaggtgagcgagtacatcagcaacaccttcctggacaagcagaacgacgtggagatccccagccccacccagaaggacagagagaagaagaagaagcagcagctgatgacccagatcagcggcgtgaagaagctgatgcacagcagcagcctgaacaacaccagcatcagcagattcggcgtgaacaccgagaacgaggaccacctggccaaggagctggaggacctgaacaagtggggcctgaacatcttcaacgtggccggctacagccacaacagacccctgacctgcatcatgtacgccatcttccaggagagagacctgctgaagaccttcagaatcagcagcgacaccttcatcacctacatgatgaccctggaggaccactaccacagcgacgtggcctaccacaacagcctgcacgccgccgacgtggcccagagcacccacgtgctgctgagcacccccgccctggacgccgtgttcaccgacctggagatcctggccgccatcttcgccgccgccatccacgacgtggaccaccccggcgtgagcaaccagttcctgatcaacaccaacagcgagctggccctgatgtacaacgacgagagcgtgctggagaaccaccacctggccgtgggcttcaagctgctgcaggaggagcactgcgacatcttcatgaacctgaccaagaagcagagacagaccctgagaaagatggtgatcgacatggtgctggccaccgacatgagcaagcacatgagcctgctggccgacctgaagaccatggtggagaccaagaaggtgaccagcagcggcgtgctgctgctggacaactacaccgacagaatccaggtgctgagaaacatggtgcactgcgccgacctgagcaaccccaccaagagcctggagctgtacagacagtggaccgacagaatcatggaggagttcttccagcagggcgacaaggagagagagagaggcatggagatcagccccatgtgcgacaagcacaccgccagcgtggagaagagccaggtgggcttcatcgactacatcgtgcaccccctgtgggagacctgggccgacctggtgcagcccgacgcccaggacatcctggacaccctggaggacaacagaaactggtaccagagcatgatcccccagagccccagcccccccctggacgagcagaacagagactgccagggcctgatggagaagttccagttcgagctgaccctggacgaggaggacagcgagggccccgagaaggagggcgagggccacagctacttcagcagcaccaagaccctgtgcgtgatcgaccccgagaacagagacagcctgggcgagaccgacatcgacatcgccaccgaggacaagagccccgtggacacctag

SEQ ID NO: 93113 - DNA, 2211 bp, synthetic construct; identical to SEQ ID NO: 93112
  misc_feature 1..2211: note = Description of Artificial Sequence: Synthetic coding sequence
  source 1..2211: mol_type = other DNA

SEQ ID NO: 93114 - DNA, 1695 bp, synthetic construct
  misc_feature 1..1695: note = Description of Artificial Sequence: Synthetic coding sequence
  source 1..1695: mol_type = other DNA
atgaaggagcacggcggcaccttcagcagcaccggcatcagcggcggcagcggcgacagcgccatggacagcctgcagcccctgcagcccaactacatgcccgtgtgcctgttcgccgaggagagctaccagaagctggccatggagaccctggaggagctggactggtgcctggaccagctggagaccatccagacctacagaagcgtgagcgagatggccagcaacaagttcaagagaatgctgaacagagagctgacccacctgagcgagatgagcagaagcggcaaccaggtgagcgagtacatcagcaacaccttcctggacaagcagaacgacgtggagatccccagccccacccagaaggacagagagaagaagaagaagcagcagctgatgacccagatcagcggcgtgaagaagctgatgcacagcagcagcctgaacaacaccagcatcagcagattcggcgtgaacaccgagaacgaggaccacctggccaaggagctggaggacctgaacaagtggggcctgaacatcttcaacgtggccggctacagccacaacagacccctgacctgcatcatgtacgccatcttccaggagagagacctgctgaagaccttcagaatcagcagcgacaccttcatcacctacatgatgaccctggaggaccactaccacagcgacgtggcctaccacaacagcctgcacgccgccgacgtggcccagagcacccacgtgctgctgagcacccccgccctggacgccgtgttcaccgacctggagatcctggccgccatcttcgccgccgccatccacgacgtggaccaccccggcgtgagcaaccagttcctgatcaacaccaacagcgagctggccctgatgtacaacgacgagagcgtgctggagaaccaccacctggccgtgggcttcaagctgctgcaggaggagcactgcgacatcttcatgaacctgaccaagaagcagagacagaccctgagaaagatggtgatcgacatggtgctggccaccgacatgagcaagcacatgagcctgctggccgacctgaagaccatggtggagaccaagaaggtgaccagcagcggcgtgctgctgctggacaactacaccgacagaatccaggtgctgagaaacatggtgcactgcgccgacctgagcaaccccaccaagagcctggagctgtacagacagtggaccgacagaatcatggaggagttcttccagcagggcgacaaggagagagagagaggcatggagatcagccccatgtgcgacaagcacaccgccagcgtggagaagagccaggtgggcttcatcgactacatcgtgcaccccctgtgggagacctgggccgacctggtgcagcccgacgcccaggacatcctggacaccctggaggacaacagaaactggtaccagagcatgatcccccagagccccagcccccccctggacgagcagaacagagactgccagggcctgatggagaagttccagttcgagctgaccctggacgaggaggacagcgagggccccgagaaggagggcgagggccacagctacttcagcagcaccaagaccctgtgcgtgatcgaccccgagaacagagacagcctgggcgagaccgacatcgacatcgccaccgaggacaagagccccgtggacacctag

SEQ ID NO: 93115 - DNA, 2211 bp, synthetic construct; identical to SEQ ID NO: 93112
  misc_feature 1..2211: note = Description of Artificial Sequence: Synthetic coding sequence
  source 1..2211: mol_type = other DNA

SEQ ID NO: 93116 - DNA, 2166 bp, synthetic construct
  misc_feature 1..2166: note = Description of Artificial Sequence: Synthetic coding sequence
  source 1..2166: mol_type = other DNA
atgaccgccaaggacagcagcaaggagctgaccgccagcgagcccgaggtgtgcatcaagaccttcaaggagcagatgcacctggagctggagctgcccagactgcccggcaacagacccaccagccccaagatcagccccagaagcagccccagaaacagcccctgcttcttcagaaagctgctggtgaacaagagcatcagacagagaagaagattcaccgtggcccacacctgcttcgacgtggagaacggccccagccccggcagaagccccctggacccccaggccagcagcagcgccggcctggtgctgcacgccaccttccccggccacagccagagaagagagagcttcctgtacagaagcgacagcgactacgacctgagccccaaggccatgagcagaaacagcagcctgcccagcgagcagcacggcgacgacctgatcgtgacccccttcgcccaggtgctggccagcctgagaagcgtgagaaacaacttcaccatcctgaccaacctgcacggcaccagcaacaagagaagccccgccgccagccagccccccgtgagcagagtgaacccccaggaggagagctaccagaagctggccatggagaccctggaggagctggactggtgcctggaccagctggagaccatccagacctacagaagcgtgagcgagatggccagcaacaagttcaagagaatgctgaacagagagctgacccacctgagcgagatgagcagaagcggcaaccaggtgagcgagtacatcagcaacaccttcctggacaagcagaacgacgtggagatccccagccccacccagaaggacagagagaagaagaagaagcagcagctgatgacccagatcagcggcgtgaagaagctgatgcacagcagcagcctgaacaacaccagcatcagcagattcggcgtgaacaccgagaacgaggaccacctggccaaggagctggaggacctgaacaagtggggcctgaacatcttcaacgtggccggctacagccacaacagacccctgacctgcatcatgtacgccatcttccaggagagagacctgctgaagaccttcagaatcagcagcgacaccttcatcacctacatgatgaccctggaggaccactaccacagcgacgtggcctaccacaacagcctgcacgccgccgacgtggcccagagcacccacgtgctgctgagcacccccgccctggacgccgtgttcaccgacctggagatcctggccgccatcttcgccgccgccatccacgacgtggaccaccccggcgtgagcaaccagttcctgatcaacaccaacagcgagctggccctgatgtacaacgacgagagcgtgctggagaaccaccacctggccgtgggcttcaagctgctgcaggaggagcactgcgacatcttcatgaacctgaccaagaagcagagacagaccctgagaaagatggtgatcgacatggtgctggccaccgacatgagcaagcacatgagcctgctggccgacctgaagaccatggtggagaccaagaaggtgaccagcagcggcgtgctgctgctggacaactacaccgacagaatccaggtgctgagaaacatggtgcactgcgccgacctgagcaaccccaccaagagcctggagctgtacagacagtggaccgacagaatcatggaggagttcttccagcagggcgacaaggagagagagagaggcatggagatcagccccatgtgcgacaagcacaccgccagcgtggagaagagccaggtgggcttcatcgactacatcgtgcaccccctgtgggagacctgggccgacctggtgcagcccgacgcccaggacatcctggacaccctggaggacaacagaaactggtaccagagcatgatcccccagagccccagcccccccctggacgagcagaacagagactgccagggcctgatggagaagttccagttcgagctgaccctggacgaggaggacagcgagggccccgagaaggagggcgagggccacagctacttcagcagcaccaagaccctgtgcgtgatcgaccccgagaacagagacagcctgggcgagaccgacatcgacatcgccaccgaggacaagagccccgtggacacctag

SEQ ID NO: 93117 - DNA, 2043 bp, synthetic construct
  misc_feature 1..2043: note = Description of Artificial Sequence: Synthetic coding sequence
  source 1..2043: mol_type = other DNA
atgcagggcccccccgcccccgcccccgtgcccggccccggcagccccagaggcagccccagaggcagccccggcctgttcagaaagctgctggtgaaccagagcatcagactgcagagaagattcaccgtggcccaccccctgtgcttcgacctggagaacggcctgagctgcggcagaagagccctggacccccagagcagccccggcctgggcagaatcatgcaggcccccgtgccccacagccagagaagagagagcttcctgtacagaagcgacagcgactacgagctgagccccaaggccatgagcagaaacagcagcgtggccagcgacctgcacggcgaggacatgatcgtgacccccttcgcccaggtgctggccagcctgagaaccgtgagaagcaacgtggccgccctggccagacagcagtgcctgggcgccgccaagcagggccccgtgggcaaccccagcagcagcaaccagctgccccccgccgaggacaccggccagaagctggccctggagaccctggacgagctggactggtgcctggaccagctggagaccctgcagaccagacacagcgtgggcgagatggccagcaacaagttcaagagaatcctgaacagagagctgacccacctgagcgagaccagcagaagcggcaaccaggtgagcgagtacatcagcagaaccttcctggaccagcagaccgaggtggagctgcccaaggtgaccgccgaggaggccccccagcccatgagcagaatcagcggcctgcacggcctgtgccacagcgccagcctgagcagcgccaccgtgcccagattcggcgtgcagaccgaccaggaggagcagctggccaaggagctggaggacaccaacaagtggggcctggacgtgttcaaggtggccgagctgagcggcaacagacccctgaccgccatcatcttcagcatcttccaggagagagacctgctgaagaccttccagatccccgccgacaccctggccacctacctgctgatgctggagggccactaccacgccaacgtggcctaccacaacagcctgcacgccgccgacgtggcccagagcacccacgtgctgctggccacccccgccctggaggccgtgttcaccgacctggagatcctggccgccctgttcgccagcgccatccacgacgtggaccaccccggcgtgagcaaccagttcctgatcaacaccaacagcgagctggccctgatgtacaacgacgccagcgtgctggagaaccaccacctggccgtgggcttcaagctgctgcaggccgagaactgcgacatcttccagaacctgagcgccaagcagagactgagcctgagaagaatggtgatcgacatggtgctggccaccgacatgagcaagcacatgaacctgctggccgacctgaagaccatggtggagaccaagaaggtgaccagcctgggcgtgctgctgctggacaactacagcgacagaatccaggtgctgcagaacctggtgcactgcgccgacctgagcaaccccaccaagcccctgcccctgtacagacagtggaccgacagaatcatggccgagttcttccagcagggcgacagagagagagagagcggcctggacatcagccccatgtgcgacaagcacaccgccagcgtggagaagagccaggtgggcttcatcgactacatcgcccaccccctgtgggagacctgggccgacctggtgcaccccgacgcccaggacctgctggacaccctggaggacaacagagagtggtaccagagcaagatccccagaagccccagcgacctgaccaaccccgagagagacggccccgacagattccagttcgagctgaccctggaggaggccgaggaggaggacgaggaggaggaggaggagggcgaggagaccgccctggccaaggaggccctggagctgcccgacaccgagctgctgagccccgaggccggccccgaccccggcgacctgcccctggacaaccagagaacctag

SEQ ID NO: 93118 - DNA, 1281 bp, synthetic construct
  misc_feature 1..1281: note = Description of Artificial Sequence: Synthetic coding sequence
  source 1..1281: mol_type = other DNA
atggccagcaacaagttcaagagaatcctgaacagagagctgacccacctgagcgagaccagcagaagcggcaaccaggtgagcgagtacatcagcagaaccttcctggaccagcagaccgaggtggagctgcccaaggtgaccgccgaggaggccccccagcccatgagcagaatcagcggcctgcacggcctgtgccacagcgccagcctgagcagcgccaccgtgcccagattcggcgtgcagaccgaccaggaggagcagctggccaaggagctggaggacaccaacaagtggggcctggacgtgttcaaggtggccgagctgagcggcaacagacccctgaccgccatcatcttcagcatcttccaggccgtgttcaccgacctggagatcctggccgccctgttcgccagcgccatccacgacgtggaccaccccggcgtgagcaaccagttcctgatcaacaccaacagcgagctggccctgatgtacaacgacgccagcgtgctggagaaccaccacctggccgtgggcttcaagctgctgcaggccgagaactgcgacatcttccagaacctgagcgccaagcagagactgagcctgagaagaatggtgatcgacatggtgctggccaccgacatgagcaagcacatgaacctgctggccgacctgaagaccatggtggagaccaagaaggtgaccagcctgggcgtgctgctgctggacaactacagcgacagaatccaggtgctgcagaacctggtgcactgcgccgacctgagcaaccccaccaagcccctgcccctgtacagacagtggaccgacagaatcatggccgagttcttccagcagggcgacagagagagagagagcggcctggacatcagccccatgtgcgacaagcacaccgccagcgtggagaagagccaggtgggcttcatcgactacatcgcccaccccctgtgggagacctgggccgacctggtgcaccccgacgcccaggacctgctggacaccctggaggacaacagagagtggtaccagagcaagatccccagaagccccagcgacctgaccaaccccgagagagacggccccgacagattccagttcgagctgaccctggaggaggccgaggaggaggacgaggaggaggaggaggagggcgaggagaccgccctggccaaggaggccctggagctgcccgacaccgagctgctgagccccgaggccggccccgaccccggcgacctgcccctggacaaccagagaacctag

SEQ ID NO: 93119 - DNA, 2139 bp, synthetic construct
  misc_feature 1..2139: note = Description of Artificial Sequence: Synthetic coding sequence
  source 1..2139: mol_type = other DNA
atggagaacctgggcgtgggcgagggcgccgaggcctgcagcagactgagcagaagcagaggcagacacagcatgaccagagcccccaagcacctgtggagacagcccagaagacccatcagaatccagcagagattctacagcgaccccgacaagagcgccggctgcagagagagagacctgagccccagacccgagctgagaaagagcagactgagctggcccgtgagcagctgcagaagattcgacctggagaacggcctgagctgcggcagaagagccctggacccccagagcagccccggcctgggcagaatcatgcaggcccccgtgccccacagccagagaagagagagcttcctgtacagaagcgacagcgactacgagctgagccccaaggccatgagcagaaacagcagcgtggccagcgacctgcacggcgaggacatgatcgtgacccccttcgcccaggtgctggccagcctgagaaccgtgagaagcaacgtggccgccctggccagacagcagtgcctgggcgccgccaagcagggccccgtgggcaaccccagcagcagcaaccagctgccccccgccgaggacaccggccagaagctggccctggagaccctggacgagctggactggtgcctggaccagctggagaccctgcagaccagacacagcgtgggcgagatggccagcaacaagttcaagagaatcctgaacagagagctgacccacctgagcgagaccagcagaagcggcaaccaggtgagcgagtacatcagcagaaccttcctggaccagcagaccgaggtggagctgcccaaggtgaccgccgaggaggccccccagcccatgagcagaatcagcggcctgcacggcctgtgccacagcgccagcctgagcagcgccaccgtgcccagattcggcgtgcagaccgaccaggaggagcagctggccaaggagctggaggacaccaacaagtggggcctggacgtgttcaaggtggccgagctgagcggcaacagacccctgaccgccatcatcttcagcatcttccaggagagagacctgctgaagaccttccagatccccgccgacaccctggccacctacctgctgatgctggagggccactaccacgccaacgtggcctaccacaacagcctgcacgccgccgacgtggcccagagcacccacgtgctgctggccacccccgccctggaggccgtgttcaccgacctggagatcctggccgccctgttcgccagcgccatccacgacgtggaccaccccggcgtgagcaaccagttcctgatcaacaccaacagcgagctggccctgatgtacaacgacgccagcgtgctggagaaccaccacctggccgtgggcttcaagctgctgcaggccgagaactgcgacatcttccagaacctgagcgccaagcagagactgagcctgagaagaatggtgatcgacatggtgctggccaccgacatgagcaagcacatgaacctgctggccgacctgaagaccatggtggagaccaagaaggtgaccagcctgggcgtgctgctgctggacaactacagcgacagaatccaggtgctgcagaacctggtgcactgcgccgacctgagcaaccccaccaagcccctgcccctgtacagacagtggaccgacagaatcatggccgagttcttccagcagggcgacagagagagagagagcggcctggacatcagccccatgtgcgacaagcacaccgccagcgtggagaagagccaggtgggcttcatcgactacatcgcccaccccctgtgggagacctgggccgacctggtgcaccccgacgcccaggacctgctggacaccctggaggacaacagagagtggtaccagagcaagatccccagaagccccagcgacctgaccaaccccgagagagacggccccgacagattccagttcgagctgaccctggaggaggccgaggaggaggacgaggaggaggaggaggagggcgaggagaccgccctggccaaggaggccctggagctgcccgacaccgagctgctgagccccgaggccggccccgaccccggcgacctgcccctggacaaccagagaacctag

SEQ ID NO: 93120 - DNA, 1821 bp, synthetic construct
  misc_feature 1..1821: note = Description of Artificial Sequence: Synthetic coding sequence
  source 1..1821: mol_type = other DNA
atgcaggcccccgtgccccacagccagagaagagagagcttcctgtacagaagcgacagcgactacgagctgagccccaaggccatgagcagaaacagcagcgtggccagcgacctgcacggcgaggacatgatcgtgacccccttcgcccaggtgctggccagcctgagaaccgtgagaagcaacgtggccgccctggccagacagcagtgcctgggcgccgccaagcagggccccgtgggcaaccccagcagcagcaaccagctgccccccgccgaggacaccggccagaagctggccctggagaccctggacgagctggactggtgcctggaccagctggagaccctgcagaccagacacagcgtgggcgagatggccagcaacaagttcaagagaatcctgaacagagagctgacccacctgagcgagaccagcagaagcggcaaccaggtgagcgagtacatcagcagaaccttcctggaccagcagaccgaggtggagctgcccaaggtgaccgccgaggaggccccccagcccatgagcagaatcagcggcctgcacggcctgtgccacagcgccagcctgagcagcgccaccgtgcccagattcggcgtgcagaccgaccaggaggagcagctggccaaggagctggaggacaccaacaagtggggcctggacgtgttcaaggtggccgagctgagcggcaacagacccctgaccgccatcatcttcagcatcttccaggagagagacctgctgaagaccttccagatccccgccgacaccctggccacctacctgctgatgctggagggccactaccacgccaacgtggcctaccacaacagcctgcacgccgccgacgtggcccagagcacccacgtgctgctggccacccccgccctggaggccgtgttcaccgacctggagatcctggccgccctgttcgccagcgccatccacgacgtggaccaccccggcgtgagcaaccagttcctgatcaacaccaacagcgagctggccctgatgtacaacgacgccagcgtgctggagaaccaccacctggccgtgggcttcaagctgctgcaggccgagaactgcgacatcttccagaacctgagcgccaagcagagactgagcctgagaagaatggtgatcgacatggtgctggccaccgacatgagcaagcacatgaacctgctggccgacctgaagaccatggtggagaccaagaaggtgaccagcctgggcgtgctgctgctggacaactacagcgacagaatccaggtgctgcagaacctggtgcactgcgccgacctgagcaaccccaccaagcccctgcccctgtacagacagtggaccgacagaatcatggccgagttcttccagcagggcgacagagagagagagagcggcctggacatcagccccatgtgcgacaagcacaccgccagcgtggagaagagccaggtgggcttcatcgactacatcgcccaccccctgtgggagacctgggccgacctggtgcaccccgacgcccaggacctgctggacaccctggaggacaacagagagtggtaccagagcaagatccccagaagccccagcgacctgaccaaccccgagagagacggccccgacagattccagttcgagctgaccctggaggaggccgaggaggaggacgaggaggaggaggaggagggcgaggagaccgccctggccaaggaggccctggagctgcccgacaccgagctgctgagccccgaggccggccccgaccccggcgacctgcccctggacaaccagagaacctag

SEQ ID NO: 93121 - DNA, 2376 bp, synthetic construct
  misc_feature 1..2376: note = Description of Artificial Sequence: Synthetic coding sequence
  source 1..2376: mol_type = other DNA
ggcacccaggccggcctgagaagcggcgcccccagcggccacagacagctgctgggcgtgggccccaccctgagccccagcagcaccttctacagattcagcaccagcggcgccgacagcagcagcctgagcccccccctgcccgccctgggcagaaccagagagcagaccctgctgggcgccagaagcagaggcagagtgctgctgcccgccatccccgaccccttcctgtggagaatggagaacctgggcgtgggcgagggcgccgaggcctgcagcagactgagcagaagcagaggcagacacagcatgaccagagcccccaagcacctgtggagacagcccagaagacccatcagaatccagcagagattctacagcgaccccgacaagagcgccggctgcagagagagagacctgagccccagacccgagctgagaaagagcagactgagctggcccgtgagcagctgcagaagattcgacctggagaacggcctgagctgcggcagaagagccctggacccccagagcagccccggcctgggcagaatcatgcaggcccccgtgccccacagccagagaagagagagcttcctgtacagaagcgacagcgactacgagctgagccccaaggccatgagcagaaacagcagcgtggccagcgacctgcacggcgaggacatgatcgtgacccccttcgcccaggtgctggccagcctgagaaccgtgagaagcaacgtggccgccctggccagacagcagtgcctgggcgccgccaagcagggccccgtgggcaaccccagcagcagcaaccagctgccccccgccgaggacaccggccagaagctggccctggagaccctggacgagctggactggtgcctggaccagctggagaccctgcagaccagacacagcgtgggcgagatggccagcaacaagttcaagagaatcctgaacagagagctgacccacctgagcgagaccagcagaagcggcaaccaggtgagcgagtacatcagcagaaccttcctggaccagcagaccgaggtggagctgcccaaggtgaccgccgaggaggccccccagcccatgagcagaatcagcggcctgcacggcctgtgccacagcgccagcctgagcagcgccaccgtgcccagattcggcgtgcagaccgaccaggaggagcagctggccaaggagctggaggacaccaacaagtggggcctggacgtgttcaaggtggccgagctgagcggcaacagacccctgaccgccatcatcttcagcatcttccaggagagagacctgctgaagaccttccagatccccgccgacaccctggccacctacctgctgatgctggagggccactaccacgccaacgtggcctaccacaacagcctgcacgccgccgacgtggcccagagcacccacgtgctgctggccacccccgccctggaggccgtgttcaccgacctggagatcctggccgccctgttcgccagcgccatccacgacgtggaccaccccggcgtgagcaaccagttcctgatcaacaccaacagcgagctggccctgatgtacaacgacgccagcgtgctggagaaccaccacctggccgtgggcttcaagctgctgcaggccgagaactgcgacatcttccagaacctgagcgccaagcagagactgagcctgagaagaatggtgatcgacatggtgctggccaccgacatgagcaagcacatgaacctgctggccgacctgaagaccatggtggagaccaagaaggtgaccagcctgggcgtgctgctgctggacaactacagcgacagaatccaggtgctgcagaacctggtgcactgcgccgacctgagcaaccccaccaagcccctgcccctgtacagacagtggaccgacagaatcatggccgagttcttccagcagggcgacagagagagagagagcggcctggacatcagccccatgtgcgacaagcacaccgccagcgtggagaagagccaggtgggcttcatcgactacatcgcccaccccctgtgggagacctgggccgacctggtgcaccccgacgcccaggacctgctggacaccctggaggacaacagagagtggtaccagagcaagatccccagaagccccagcgacctgaccaaccccgagagagacggccccgacagattccagttcgagctgaccctggaggaggccgaggaggaggacgaggaggaggaggaggagggcgaggagaccgccctggccaaggaggccctggagctgcccgacaccgagctgctgagccccgaggccggccccgaccccggcgacctgcccctggacaaccagagaacctag

SEQ ID NO: 93122 - DNA, 2103 bp, synthetic construct
  misc_feature 1..2103: note = Description of Artificial Sequence: Synthetic coding sequence
  source 1..2103: mol_type = other DNA
gccgtgcagaagagaagcagagccgccggcgccagaagcagcctgcacgccgtgctggccatgcagggcccccccgcccccgcccccgtgcccggccccggcagccccagaggcagccccagaggcagccccggcctgttcagaaagctgctggtgaaccagagcatcagactgcagagaagattcaccgtggcccaccccctgtgcttcgacctggagaacggcctgagctgcggcagaagagccctggacccccagagcagccccggcctgggcagaatcatgcaggcccccgtgccccacagccagagaagagagagcttcctgtacagaagcgacagcgactacgagctgagccccaaggccatgagcagaaacagcagcgtggccagcgacctgcacggcgaggacatgatcgtgacccccttcgcccaggtgctggccagcctgagaaccgtgagaagcaacgtggccgccctggccagacagcagtgcctgggcgccgccaagcagggccccgtgggcaaccccagcagcagcaaccagctgccccccgccgaggacaccggccagaagctggccctggagaccctggacgagctggactggtgcctggaccagctggagaccctgcagaccagacacagcgtgggcgagatggccagcaacaagttcaagagaatcctgaacagagagctgacccacctgagcgagaccagcagaagcggcaaccaggtgagcgagtacatcagcagaaccttcctggaccagcagaccgaggtggagctgcccaaggtgaccgccgaggaggccccccagcccatgagcagaatcagcggcctgcacggcctgtgccacagcgccagcctgagcagcgccaccgtgcccagattcggcgtgcagaccgaccaggaggagcagctggccaaggagctggaggacaccaacaagtggggcctggacgtgttcaaggtggccgagctgagcggcaacagacccctgaccgccatcatcttcagcatcttccaggagagagacctgctgaagaccttccagatccccgccgacaccctggccacctacctgctgatgctggagggccactaccacgccaacgtggcctaccacaacagcctgcacgccgccgacgtggcccagagcacccacgtgctgctggccacccccgccctggaggccgtgttcaccgacctggagatcctggccgccctgttcgccagcgccatccacgacgtggaccaccccggcgtgagcaaccagttcctgatcaacaccaacagcgagctggccctgatgtacaacgacgccagcgtgctggagaaccaccacctggccgtgggcttcaagctgctgcaggccgagaactgcgacatcttccagaacctgagcgccaagcagagactgagcctgagaagaatggtgatcgacatggtgctggccaccgacatgagcaagcacatgaacctgctggccgacctgaagaccatggtggagaccaagaaggtgaccagcctgggcgtgctgctgctggacaactacagcgacagaatccaggtgctgcagaacctggtgcactgcgccgacctgagcaaccccaccaagcccctgcccctgtacagacagtggaccgacagaatcatggccgagttcttccagcagggcgacagagagagagagagcggcctggacatcagccccatgtgcgacaagcacaccgccagcgtggagaagagccaggtgggcttcatcgactacatcgcccaccccctgtgggagacctgggccgacctggtgcaccccgacgcccaggacctgctggacaccctggaggacaacagagagtggtaccagagcaagatccccagaagccccagcgacctgaccaaccccgagagagacggccccgacagattccagttcgagctgaccctggaggaggccgaggaggaggacgaggaggaggaggaggagggcgaggagaccgccctggccaaggaggccctggagctgcccgacaccgagctgctgagccccgaggccggccccgaccccggcgacctgcccctggacaaccagagaacctag

SEQ ID NO: 93123 - DNA, 1446 bp, synthetic construct
  misc_feature 1..1446: note = Description of Artificial Sequence: Synthetic coding sequence
  source 1..1446: mol_type = other DNA
atggccagcaacaagttcaagagaatcctgaacagagagctgacccacctgagcgagaccagcagaagcggcaaccaggtgagcgagtacatcagcagaaccttcctggaccagcagaccgaggtggagctgcccaaggtgaccgccgaggaggccccccagcccatgagcagaatcagcggcctgcacggcctgtgccacagcgccagcctgagcagcgccaccgtgcccagattcggcgtgcagaccgaccaggaggagcagctggccaaggagctggaggacaccaacaagtggggcctggacgtgttcaaggtggccgagctgagcggcaacagacccctgaccgccatcatcttcagcatcttccaggagagagacctgctgaagaccttccagatccccgccgacaccctggccacctacctgctgatgctggagggccactaccacgccaacgtggcctaccacaacagcctgcacgccgccgacgtggcccagagcacccacgtgctgctggccacccccgccctggaggccgtgttcaccgacctggagatcctggccgccctgttcgccagcgccatccacgacgtggaccaccccggcgtgagcaaccagttcctgatcaacaccaacagcgagctggccctgatgtacaacgacgccagcgtgctggagaaccaccacctggccgtgggcttcaagctgctgcaggccgagaactgcgacatcttccagaacctgagcgccaagcagagactgagcctgagaagaatggtgatcgacatggtgctggccaccgacatgagcaagcacatgaacctgctggccgacctgaagaccatggtggagaccaagaaggtgaccagcctgggcgtgctgctgctggacaactacagcgacagaatccaggtgctgcagaacctggtgcactgcgccgacctgagcaaccccaccaagcccctgcccctgtacagacagtggaccgacagaatcatggccgagttcttccagcagggcgacagagagagagagagcggcctggacatcagccccatgtgcgacaagcacaccgccagcgtggagaagagccaggtgggcttcatcgactacatcgcccaccccctgtgggagacctgggccgacctggtgcaccccgacgcccaggacctgctggacaccctggaggacaacagagagtggtaccagagcaagatccccagaagccccagcgacctgaccaaccccgagagagacggccccgacagattccagttcgagctgaccctggaggaggccgaggaggaggacgaggaggaggaggaggagggcgaggagaccgccctggccaaggaggccctggagctgcccgacaccgagctgctgagccccgaggccggccccgaccccggcgacctgcccctggacaaccagagaacctag

SEQ ID NO: 93124 - DNA, 2466 bp, synthetic construct
  misc_feature 1..2466: note = Description of Artificial Sequence: Synthetic coding sequence
  source 1..2466: mol_type = other DNA
atgcagagatacagaggcagacagaccgtgttcggcgccggcgtgctgggcggcgtgagcagcgcccccagcttcaacacccccagccccagaagcagccccctgttctaccccagcgcccccagcggccacagacagctgctgggcgtgggccccaccctgagccccagcagcaccttctacagattcagcaccagcggcgccgacagcagcagcctgagcccccccctgcccgccctgggcagaaccagagagcagaccctgctgggcgccagaagcagaggcagagtgctgctgcccgccatccccgaccccttcctgtggagaatggagaacctgggcgtgggcgagggcgccgaggcctgcagcagactgagcagaagcagaggcagacacagcatgaccagagcccccaagcacctgtggagacagcccagaagacccatcagaatccagcagagattctacagcgaccccgacaagagcgccggctgcagagagagagacctgagccccagacccgagctgagaaagagcagactgagctggcccgtgagcagctgcagaagattcgacctggagaacggcctgagctgcggcagaagagccctggacccccagagcagccccggcctgggcagaatcatgcaggcccccgtgccccacagccagagaagagagagcttcctgtacagaagcgacagcgactacgagctgagccccaaggccatgagcagaaacagcagcgtggccagcgacctgcacggcgaggacatgatcgtgacccccttcgcccaggtgctggccagcctgagaaccgtgagaagcaacgtggccgccctggccagacagcagtgcctgggcgccgccaagcagggccccgtgggcaaccccagcagcagcaaccagctgccccccgccgaggacaccggccagaagctggccctggagaccctggacgagctggactggtgcctggaccagctggagaccctgcagaccagacacagcgtgggcgagatggccagcaacaagttcaagagaatcctgaacagagagctgacccacctgagcgagaccagcagaagcggcaaccaggtgagcgagtacatcagcagaaccttcctggaccagcagaccgaggtggagctgcccaaggtgaccgccgaggaggccccccagcccatgagcagaatcagcggcctgcacggcctgtgccacagcgccagcctgagcagcgccaccgtgcccagattcggcgtgcagaccgaccaggaggagcagctggccaaggagctggaggacaccaacaagtggggcctggacgtgttcaaggtggccgagctgagcggcaacagacccctgaccgccatcatcttcagcatcttccaggagagagacctgctgaagaccttccagatccccgccgacaccctggccacctacctgctgatgctggagggccactaccacgccaacgtggcctaccacaacagcctgcacgccgccgacgtggcccagagcacccacgtgctgctggccacccccgccctggaggccgtgttcaccgacctggagatcctggccgccctgttcgccagcgccatccacgacgtggaccaccccggcgtgagcaaccagttcctgatcaacaccaacagcgagctggccctgatgtacaacgacgccagcgtgctggagaaccaccacctggccgtgggcttcaagctgctgcaggccgagaactgcgacatcttccagaacctgagcgccaagcagagactgagcctgagaagaatggtgatcgacatggtgctggccaccgacatgagcaagcacatgaacctgctggccgacctgaagaccatggtggagaccaagaaggtgaccagcctgggcgtgctgctgctggacaactacagcgacagaatccaggtgctgcagaacctggtgcactgcgccgacctgagcaaccccaccaagcccctgcccctgtacagacagtggaccgacagaatcatggccgagttcttccagcagggcgacagagagagagagagcggcctggacatcagccccatgtgcgacaagcacaccgccagcgtggagaagagccaggtgggcttcatcgactacatcgcccaccccctgtgggagacctgggccgacctggtgcaccccgacgcccaggacctgctggacaccctggaggacaacagagagtggtaccagagcaagatccccagaagccccagcgacctgaccaaccccgagagagacggccccgacagattccagttcgagctgaccctggaggaggccgaggaggaggacgaggaggaggaggaggagggcgaggagaccgccctggccaaggaggccctggagctgcccgacaccgagctgctgagccccgaggccggccccgaccccggcgacctgcccctggacaaccagagaacctag

SEQ ID NO: 93125 - DNA, 1557 bp, synthetic construct
  misc_feature 1..1557: note = Description of Artificial Sequence: Synthetic coding sequence
  source 1..1557: mol_type = other DNA
cccctgagaatcagacccctgctgcccaccgcctaccacctgctgcccaccggccccggccagagcgccgacagaagcgagcagagaggcggcccctgcccccccgccatgcccagaagcagccagttcaagagaatcctgaacagagagctgacccacctgagcgagaccagcagaagcggcaaccaggtgagcgagtacatcagcagaaccttcctggaccagcagaccgaggtggagctgcccaaggtgaccgccgaggaggccccccagcccatgagcagaatcagcggcctgcacggcctgtgccacagcgccagcctgagcagcgccaccgtgcccagattcggcgtgcagaccgaccaggaggagcagctggccaaggagctggaggacaccaacaagtggggcctggacgtgttcaaggtggccgagctgagcggcaacagacccctgaccgccatcatcttcagcatcttccaggagagagacctgctgaagaccttccagatccccgccgacaccctggccacctacctgctgatgctggagggccactaccacgccaacgtggcctaccacaacagcctgcacgccgccgacgtggcccagagcacccacgtgctgctggccacccccgccctggaggccgtgttcaccgacctggagatcctggccgccctgttcgccagcgccatccacgacgtggaccaccccggcgtgagcaaccagttcctgatcaacaccaacagcgagctggccctgatgtacaacgacgccagcgtgctggagaaccaccacctggccgtgggcttcaagctgctgcaggccgagaactgcgacatcttccagaacctgagcgccaagcagagactgagcctgagaagaatggtgatcgacatggtgctggccaccgacatgagcaagcacatgaacctgctggccgacctgaagaccatggtggagaccaagaaggtgaccagcctgggcgtgctgctgctggacaactacagcgacagaatccaggtgctgcagaacctggtgcactgcgccgacctgagcaaccccaccaagcccctgcccctgtacagacagtggaccgacagaatcatggccgagttcttccagcagggcgacagagagagagagagcggcctggacatcagccccatgtgcgacaagcacaccgccagcgtggagaagagccaggtgggcttcatcgactacatcgcccaccccctgtgggagacctgggccgacctggtgcaccccgacgcccaggacctgctggacaccctggaggacaacagagagtggtaccagagcaagatccccagaagccccagcgacctgaccaaccccgagagagacggccccgacagattccagttcgagctgaccctggaggaggccgaggaggaggacgaggaggaggaggaggagggcgaggagaccgccctggccaaggaggccctggagctgcccgacaccgagctgctgagccccgaggccggccccgaccccggcgacctgcccctggacaaccagagaacctag

SEQ ID NO: 93126 - DNA, 6723 bp, synthetic construct
  misc_feature 1..6723: note = Description of Artificial Sequence: Synthetic coding sequence
  source 1..6723: mol_type = other DNA
atggagcagacctggaccagagactacttcgccgaggacgacggcgagatggtgcccagaaccagccacaccgccgccttcctgagcgacaccaaggacagaggcccccccgtgcagagccagatctggagaagcggcgagaaggtgcccttcgtgcagacctacagcctgagagccttcgagaagcccccccaggtgcagacccaggccctgagagacttcgagaagcacctgaacgacctgaagaaggagaacttcagcctgaagctgagaatctacttcctggaggagagaatgcagcagaagtacgaggccagcagagaggacatctacaagagaaacatcgagctgaaggtggaggtggagagcctgaagagagagctgcaggacaagaagcagcacctggacaagacctgggccgacgtggagaacctgaacagccagaacgaggccgagctgagaagacagttcgaggagagacagcaggagaccgagcacgtgtacgagctgctggagaacaagatccagctgctgcaggaggagagcagactggccaagaacgaggccgccagaatggccgccctggtggaggccgagaaggagtgcaacctggagctgagcgagaagctgaagggcgtgaccaagaactgggaggacgtgcccggcgaccaggtgaagcccgaccagtacaccgaggccctggcccagagagacaagagaatcgaggagctgaaccagagcctggccgcccaggagagactggtggagcagctgagcagagagaagcagcagctgctgcacctgctggaggagcccaccagcatggaggtgcagcccatgaccgaggagctgctgaagcagcagaagctgaacagccacgagaccaccatcacccagcagagcgtgagcgacagccacctggccgagctgcaggagaagatccagcagaccgaggccaccaacaagatcctgcaggagaagctgaacgagatgagctacgagctgaagtgcgcccaggagagcagccagaagcaggacggcaccatccagaacctgaaggagaccctgaagagcagagagagagagaccgaggagctgtaccaggtgatcgagggccagaacgacaccatggccaagctgagagagatgctgcaccagagccagctgggccagctgcacagcagcgagggcaccagccccgcccagcagcaggtggccctgctggacctgcagagcgccctgttctgcagccagctggagatccagaagctgcagagagtggtgagacagaaggagagacagctggccgacgccaagcagtgcgtgcagttcgtggaggccgccgcccacgagagcgagcagcagaaggaggccagctggaagcacaaccaggagctgagaaaggccctgcagcagctgcaggaggagctgcagaacaagagccagcagctgagagcctgggaggccgagaagtacaacgagatcagaacccaggagcagaacatccagcacctgaaccacagcctgagccacaaggagcagctgctgcaggagttcagagagctgctgcagtacagagacaacagcgacaagaccctggaggccaacgagatgctgctggagaagctgagacagagaatccacgacaaggccgtggccctggagagagccatcgacgagaagttcagcgccctggaggagaaggagaaggagctgagacagctgagactggccgtgagagagagagaccacgacctggagagactgagagacgtgctgagcagcaacgaggccaccatgcagagcatggagagcctgctgagagccaagggcctggaggtggagcagctgagcaccacctgccagaacctgcagtggctgaaggaggagatggagaccaagttcagcagatggcagaaggagcaggagagcatcatccagcagctgcagaccagcctgcacgacagaaacaaggaggtggaggacctgagcgccaccctgctgtgcaagctgggccccggccagagcgagatcgccgaggagctgtgccagagactgcagagaaaggagagaatgctgcaggacctgctgagcgacagaaacaagcaggtgctggagcacgagatggagatccagggcctgctgcagagcgtgagcaccagagagcaggagagccaggccgccgccgagaagctggtgcaggccctgatggagagaaacagcgagctgcaggccctgagacagtacctgggcggcagagacagcctgatgagccaggcccccatcagcaaccagcaggccgaggtgacccccaccggctgcctgggcaagcagaccgaccagggcagcatgcagatccccagcagagacgacagcaccagcctgaccgccaaggaggacgtgagcatccccagaagcaccctgggcgacctggacaccgtggccggcctggagaaggagctgagcaacgccaaggaggagctggagctgatggccaagaaggagagagagagccagatggagctgagcgccctgcagagcatgatggccgtgcaggaggaggagctgcaggtgcaggccgccgacatggagagcctgaccagaaacatccagatcaaggaggacctgatcaaggacctgcagatgcagctggtggaccccgaggacatccccgccatggagagactgacccaggaggtgctgctgctgagagagaaggtggccagcgtggagagccagggccaggagatcagcggcaacagaagacagcagctgctgctgatgctggagggcctggtggacgagagaagcagactgaacgaggccctgcaggccgagagacagctgtacagcagcctggtgaagttccacgcccaccccgagagcagcgagagagacagaaccctgcaggtggagctggagggcgcccaggtgctgagaagcagactggaggaggtgctgggcagaagcctggagagactgaacagactggagaccctggccgccatcggcggcgccgccgccggcgacgacaccgaggacaccagcaccgagttcaccgacagcatcgaggaggaggccgcccaccacagccaccagcagctggtgaaggtggccctggagaagagcctggccaccgtggagacccagaaccccagcttcagcccccccagccccatgggcggcgacagcaacagatgcctgcaggaggagatgctgcacctgagagccgagttccaccagcacctggaggagaagagaaaggccgaggaggagctgaaggagctgaaggcccagatcgaggaggccggcttcagcagcgtgagccacatcagaaacaccatgctgagcctgtgcctggagaacgccgagctgaaggagcagatgggcgaggccatgagcgacggctgggagatcgaggaggacaaggagaagggcgagctggacaaccagagccagcccagagaccccggcccccagagcgccttcagcctgcccggcagcacccagcacctgagaagccagctgagccagtgcaagcagagataccaggacctgcaggagaagctgctgctgagcgaggccaccgtgttcgcccaggccaacgagctggagaagtacagagtgatgctgaccggcgagagcctggtgaagcaggacagcaagcagatccaggtggacctgcaggacctgggctacgagacctgcggcagaagcgagaacgaggccgagagagaggagaccaccagccccgagtgcgaggagcacaacagcctgaaggagatggtgctgatggagggcctgtgcagcgagcagggcagaagaggcagcaccctggccagcagcagcgagagaaagcccctggagaaccagctgggcaagcaggaggagttcagagtgtacggcaagagcgagaacatcctggtgctgagaaaggacatcaaggacctgaaggcccagctgcagaacgccaacaaggtgatccagaacctgaagagcagagtgagaagcctgagcgtgaccagcgactacagcagcagcctggagagaccctggaagctgagagccgtgggcaccctggagggcagcagcccccacagcgtgcccgacgaggacgagggctggctgagcgacggcaccggcgccttctacagccccggcctgcaggccaagaaggacctggagagcctgatccagagagtgagccagctggaggcccagctgcccaagaacggcctggaggagaagctggccgaggagctgagaagcgccagctggcccggcaagtacgacagcctgatccaggaccaggccagagagctgagctacctgagacagaagatcagagagggcagaggcatctgctacctgatcaccagacacgccaaggacaccgtgaagagcttcgaggacctgctgagaagcaacgacatcgactactacctgggccagagcttcagagagcagctggcccagggcagccagctgaccgagagactgaccagcaagctgagcaccaaggaccacaagagcgagaaggaccaggccggcctggagcccctggccctgagactgagcagagagctgcaggagaaggagaaggtgatcgaggtgctgcaggccaagctggacgccagaagcctgacccccagcagcagccacgccctgagcgacagccacagaagccccagcagcaccagcttcctgagcgacgagctggaggcctgcagcgacatggacatcgtgagcgagtacacccactacgaggagaagaaggccagccccagccacagcgacagcatccaccacagcagccacagcgccgtgctgagcagcaagcccagcagcaccagcgccagccagggcgccaaggccgagagcaacagcaaccccatcagcctgcccaccccccagaacacccccaaggaggccaaccaggcccacagcggcgccagcaccgtgccccccgccagcaccgccaccctgctgagcaacgacctggaggccgacagcagctactacctgaacagcgcccagccccacagcccccccagaggcaccatcgagctgggcagaatcctggagcccggctacctgggcagcagcggcaagtgggacgtgatgagaccccagaagggcagcgtgagcggcgacctgagcagcggcagcagcgtgtaccagctgaacagcaagcccaccggcgccgacctgctggaggagcacctgggcgagatcagaaacctgagacagagactggaggagagcatctgcatcaacgacagactgagagagcagctggagcacagactgaccagcaccgccagaggcagaggcagcaccagcaacttctacagccagggcctggagagcatcccccagctgtgcaacgagaacagagtgctgagagaggacaacagaagactgcaggcccagctgagccacgtgagcagagagcacagccaggagaccgagagcctgagagaggccctgctgagcagcagaagccacctgcaggagctggagaaggagctggagcaccagaaggtggagagacagcagctgctggaggacctgagagagaagcagcaggaggtgctgcacttcagagaggagagactgagcctgcaggagaacgacagcagactgcagcacaagctggtgctgctgcagcagcagtgcgaggagaagcagcagctgttcgagagcctgcagagcgagctgcagatctacgaggccctgtacggcaacagcaagaagggcctgaaggcctacagcctggacgcctgccaccagatccccctgagcagcgacctgagccacctggtggccgaggtgagagccctgagaggccagctggagcagagcatccagggcaacaactgcctgagactgcagctgcagcagcagctggagagcggcgccggcaaggccagcctgagccccagcagcatcaaccagaacttccccgccagcaccgaccccggcaacaagcagctgctgctgcaggacagcgccgtgagcccccccgtgagagacgtgggcatgaacagccccgccctggtgttccccagcagcgccagcagcacccccggcagcgagacccccatcatcaacagagccaacggcctgggcctggacaccagccccgtgatgaagaccccccccaagctggagggcgacgccaccgacggcagcttcgccaacaagcacggcagacacgtgatcggccacatcgacgactacagcgccctgagacagcagatcgccgagggcaagctgctggtgaagaagatcgtgagcctggtgagaagcgcctgcagcttccccggcctggaggcccagggcaccgaggtgctgggcagcaagggcatccacgagctgagaagcagcaccagcgccctgcaccacgccctggaggagagcgccagcctgctgaccatgttctggagagccgccctgcccagcacccacatccccgtgctgcccggcaaggtgggcgagagcaccgagagagagctgctggagctgagaaccaaggtgagcaagcaggagagactgctgcagagcaccaccgagcacctgaagaacgccaaccagcagaaggagagcatggagcagttcatcgtgagccagctgaccagaacccacgacgtgctgaagaaggccagaaccaacctggaggtgaagagcctgagagccctgccctgcacccccgccctgtag

SEQ ID NO: 93127 - DNA, 3399 bp, synthetic construct
  misc_feature 1..3399: note = Description of Artificial Sequence: Synthetic coding sequence
  source 1..3399: mol_type = other DNA
atgaaggagatctgcagaatctgcgccagagagctgtgcggcaaccagagaagatggatcttccacaccgccagcaagctgaacctgcaggtgctgctgagccacgtgctgggcaaggacgtgcccagagacggcaaggccgagttcgcctgcagcaagtgcgccttcatgctggacagaatctacagattcgacaccgtgatcgccagaatcgaggccctgagcatcgagagactgcagaagctgctgctggagaaggacagactgaagttctgcatcgccagcatgtacagaaagaacaacgacgacagcggcgccgagatcaaggccggcaacggcaccgtggacatgagcgtgctgcccgacgccagatacagcgccctgctgcaggaggacttcgcctacagcggcttcgagtgctgggtggagaacgaggaccagatccaggagccccacagctgccacggcagcgagggccccggcaacagacccagaagatgcagaggctgcgccgccctgagagtggccgacagcgactacgaggccatctgcaaggtgcccagaaaggtggccagaagcatcagctgcggccccagcagcagatggagcaccagcatctgcaccgaggagcccgccctgagcgaggtgggcccccccgacctggccagcaccaaggtgccccccgacggcgagagcatggaggaggagacccccggcagcagcgtggagagcctggacgccagcgtgcaggccagccccccccagcagaaggacgaggagaccgagagaagcgccaaggagctgggcaagtgcgactgctgcagcgacgaccaggccccccagcacggctgcaaccacaagctggagctggccctgagcatgatcaagggcctggactacaagcccatccagagccccagaggcagcagactgcccatccccgtgaagagcagcctgcccggcgccaagcccggccccagcatgaccgacggcgtgagcagcggcttcctgaacagaagcctgaagcccctgtacaagacccccgtgagctaccccctggagctgagcgacctgcaggagctgtgggacgacctgtgcgaggactacctgcccctgagagtgcagcccatgaccgaggagctgctgaagcagcagaagctgaacagccacgagaccaccatcacccagcagagcgtgagcgacagccacctggccgagctgcaggagaagatccagcagaccgaggccaccaacaagatcctgcaggagaagctgaacgagatgagctacgagctgaagtgcgcccaggagagcagccagaagcaggacggcaccatccagaacctgaaggagaccctgaagagcagagagagagagaccgaggagctgtaccaggtgatcgagggccagaacgacaccatggccaagctgagagagatgctgcaccagagccagctgggccagctgcacagcagcgagggcaccagccccgcccagcagcaggtggccctgctggacctgcagagcgccctgttctgcagccagctggagatccagaagctgcagagagtggtgagacagaaggagagacagctggccgacgccaagcagtgcgtgcagttcgtggaggccgccgcccacgagagcgagcagcagaaggaggccagctggaagcacaaccaggagctgagaaaggccctgcagcagctgcaggaggagctgcagaacaagagccagcagctgagagcctgggaggccgagaagtacaacgagatcagaacccaggagcagaacatccagcacctgaaccacagcctgagccacaaggagcagctgctgcaggagttcagagagctgctgcagtacagagacaacagcgacaagaccctggaggccaacgagatgctgctggagaagctgagacagagaatccacgacaaggccgtggccctggagagagccatcgacgagaagttcagcgccctggaggagaaggagaaggagctgagacagctgagactggccgtgagagagagagaccacgacctggagagactgagagacgtgctgagcagcaacgaggccaccatgcagagcatggagagcctgctgagagccaagggcctggaggtggagcagctgagcaccacctgccagaacctgcagtggctgaaggaggagatggagaccaagttcagcagatggcagaaggagcaggagagcatcatccagcagctgcagaccagcctgcacgacagaaacaaggaggtggaggacctgagcgccaccctgctgtgcaagctgggccccggccagagcgagatcgccgaggagctgtgccagagactgcagagaaaggagagaatgctgcaggacctgctgagcgacagaaacaagcaggtgctggagcacgagatggagatccagggcctgctgcagagcgtgagcaccagagagcaggagagccaggccgccgccgagaagctggtgcaggccctgatggagagaaacagcgagctgcaggccctgagacagtacctgggcggcagagacagcctgatgagccaggcccccatcagcaaccagcaggccgaggtgacccccaccggctgcctgggcaagcagaccgaccagggcagcatgcagatccccagcagagacgacagcaccagcctgaccgccaaggaggacgtgagcatccccagaagcaccctgggcgacctggacaccgtggccggcctggagaaggagctgagcaacgccaaggaggagctggagctgatggccaagaaggagagagagagccagatggagctgagcgccctgcagagcatgatggccgtgcaggaggaggagctgcaggtgcaggccgccgacatggagagcctgaccagaaacatccagatcaaggaggacctgatcaaggacctgcagatgcagctggtggaccccgaggacatccccgccatggagagactgacccaggaggtgctgctgctgagagagaaggtggccagcgtggagagccagggccaggagatcagcggcaacagaagacagcagctgctgctgatgctggagggcctggtggacgagagaagcagactgaacgaggccctgcaggccgagagacagctgtacagcagcctggtgaagttccacgcccaccccgagagcagcgagagagacagaaccctgcaggtggagctggagggcgcccaggtgctgagaagcagactggaggaggtgctgggcagaagcctggagagactgaacagactggagaccctggccgccatcggcggcgccgccgccggcgacgacaccgaggacaccagcaccgagttcaccgacagcatcgaggaggaggccgcccaccacagccaccagcagctgtag

SEQ ID NO: 93128 - DNA, 522 bp, synthetic construct
  misc_feature 1..522: note = Description of Artificial Sequence: Synthetic coding sequence
  source 1..522: mol_type = other DNA
atgagcaacggctacagaaccctgagccagcacctgaacgacctgaagaaggagaacttcagcctgaagctgagaatctacttcctggaggagagaatgcagcagaagtacgaggccagcagagaggacatctacaagagaaacatcgagctgaaggtggaggtggagagcctgaagagagagctgcaggacaagaagcagcacctggacaagacctgggccgacgtggagaacctgaacagccagaacgaggccgagctgagaagacagttcgaggagagacagcaggagaccgagcacgtgtacgagctgctggagaacaagatccagctgctgcaggaggagagcagactggccaagaacgaggccgccagaatggccgccctggtggaggccgagaaggagtgcaacctggagctgagcgagaagctgaagggcgtgaccaagaactgggaggacgtgcccggcgaccaggtgaagcccgaccagtacaccgaggccctggcccagagagacaagtag

SEQ ID NO: 93129 - DNA, 933 bp, synthetic construct
  misc_feature 1..933: note = Description of Artificial Sequence: Synthetic coding sequence
  source 1..933: mol_type = other DNA
atgaagggcaccgacagcggcagctgctgcagaagaagatgcgacttcggctgctgctgcagagccagcagaagagcccactacaccccctacagaagcggcgacgccaccagaaccccccagagccccagacagacccccagcagagagagaagaagacccgagcccgccggcagctgggccgccgccgccgaggaggaggaggccgccgccgccgccaccccctggatgagagactacttcgccgaggacgacggcgagatggtgcccagaaccagccacaccgccgccttcctgagcgacaccaaggacagaggcccccccgtgcagagccagatctggagaagcggcgagaaggtgcccttcgtgcagacctacagcctgagagccttcgagaagcccccccaggtgcagacccaggccctgagagacttcgagaagcacctgaacgacctgaagaaggagaacttcagcctgaagctgagaatctacttcctggaggagagaatgcagcagaagtacgaggccagcagagaggacatctacaagagaaacatcgagctgaaggtggaggtggagagcctgaagagagagctgcaggacaagaagcagcacctggacaagacctgggccgacgtggagaacctgaacagccagaacgaggccgagctgagaagacagttcgaggagagacagcaggagaccgagcacgtgtacgagctgctggagaacaagatccagctgctgcaggaggagagcagactggccaagaacgaggccgccagaatggccgccctggtggaggccgagaaggagtgcaacctggagctgagcgagaagctgaagggcgtgaccaagaactgggaggacgtgcccggcgaccaggtgaagcccgaccagtacaccgaggccctggcccagagagacaagtag

SEQ ID NO: 93130 - DNA, 2910 bp, synthetic construct
  misc_feature 1..2910: note = Description of Artificial Sequence: Synthetic coding sequence
  source 1..2910: mol_type = other DNA
atgagcaacggctacagaaccctgagccagcacctgaacgacctgaagaaggagaacttcagcctgaagctgagaatctacttcctggaggagagaatgcagcagaagtacgaggccagcagagaggacatctacaagagaaacatcgagctgaaggtggaggtggagagcctgaagagagagctgcaggacaagaagcagcacctggacaagacctgggccgacgtggagaacctgaacagccagaacgaggccgagctgagaagacagttcgaggagagacagcaggagaccgagcacgtgtacgagctgctggagaacaagatccagctgctgcaggaggagagcagactggccaagaacgaggccgccagaatggccgccctggtggaggccgagaaggagtgcaacctggagctgagcgagaagctgaagggcgtgaccaagaactgggaggacgtgcccggcgaccaggtgaagcccgaccagtacaccgaggccctggcccagagagacaagagaatcgaggagctgaaccagagcctggccgcccaggagagactggtggagcagctgagcagagagaagcagcagctgctgcacctgctggaggagcccaccagcatggaggtgcagcccatgaccgaggagctgctgaagcagcagaagctgaacagccacgagaccaccatcacccagcagagcgtgagcgacagccacctggccgagctgcaggagaagatccagcagaccgaggccaccaacaagatcctgcaggagaagctgaacgagatgagctacgagctgaagtgcgcccaggagagcagccagaagcaggacggcaccatccagaacctgaaggagaccctgaagagcagagagagagagaccgaggagctgtaccaggtgatcgagggccagaacgacaccatggccaagctgagagagatgctgcaccagagccagctgggccagctgcacagcagcgagggcaccagccccgcccagcagcaggtggccctgctggacctgcagagcgccctgttctgcagccagctggagatccagaagctgcagagagtggtgagacagaaggagagacagctggccgacgccaagcagtgcgtgcagttcgtggaggccgccgcccacgagagcgagcagcagaaggaggccagctggaagcacaaccaggagctgagaaaggccctgcagcagctgcaggaggagctgcagaacaagagccagcagctgagagcctgggaggccgagaagtacaacgagatcagaacccaggagcagaacatccagcacctgaaccacagcctgagccacaaggagcagctgctgcaggagttcagagagctgctgcagtacagagacaacagcgacaagaccctggaggccaacgagatgctgctggagaagctgagacagagaatccacgacaaggccgtggccctggagagagccatcgacgagaagttcagcgccctggaggagaaggagaaggagctgagacagctgagactggccgtgagagagagagaccacgacctggagagactgagagacgtgctgagcagcaacgaggccaccatgcagagcatggagagcctgctgagagccaagggcctggaggtggagcagctgagcaccacctgccagaacctgcagtggctgaaggaggagatggagaccaagttcagcagatggcagaaggagcaggagagcatcatccagcagctgcagaccagcctgcacgacagaaacaaggaggtggaggacctgagcgccaccctgctgtgcaagctgggccccggccagagcgagatcgccgaggagctgtgccagagactgcagagaaaggagagaatgctgcaggacctgctgagcgacagaaacaagcaggtgctggagcacgagatggagatccagggcctgctgcagagcgtgagcaccagagagcaggagagccaggccgccgccgagaagctggtgcaggccctgatggagagaaacagcgagctgcaggccctgagacagtacctgggcggcagagacagcctgatgagccaggcccccatcagcaaccagcaggccgaggtgacccccaccggctgcctgggcaagcagaccgaccagggcagcatgcagatccccagcagagacgacagcaccagcctgaccgccaaggaggacgtgagcatccccagaagcaccctgggcgacctggacaccgtggccggcctggagaaggagctgagcaacgccaaggaggagctggagctgatggccaagaaggagagagagagccagatggagctgagcgccctgcagagcatgatggccgtgcaggaggaggagctgcaggtgcaggccgccgacatggagagcctgaccagaaacatccagatcaaggaggacctgatcaaggacctgcagatgcagctggtggaccccgaggacatccccgccatggagagactgacccaggaggtgctgctgctgagagagaaggtggccagcgtggagagccagggccaggagatcagcggcaacagaagacagcagctgctgctgatgctggagggcctggtggacgagagaagcagactgaacgaggccctgcaggccgagagacagctgtacagcagcctggtgaagttccacgcccaccccgagagcagcgagagagacagaaccctgcaggtggagctggagggcgcccaggtgctgagaagcagactggaggaggtgctgggcagaagcctggagagactgaacagactggagaccctggccgccatcggcggcgccgccgccggcgacgacaccgaggacaccagcaccgagttcaccgacagcatcgaggaggaggccgcccaccacagccaccagcagctgtag

SEQ ID NO: 93131 - DNA, 2967 bp, synthetic construct
  misc_feature 1..2967: note = Description of Artificial Sequence: Synthetic coding sequence
  source 1..2967: mol_type = other DNA
atgagcaacggctacagaaccctgagccagcacctgaacgacctgaagaaggagaacttcagcctgaagctgagaatctacttcctggaggagagaatgcagcagaagtacgaggccagcagagaggacatctacaagagaaacatcgagctgaaggtggaggtggagagcctgaagagagagctgcaggacaagaagcagcacctggacaagacctgggccgacgtggagaacctgaacagccagaacgaggccgagctgagaagacagttcgaggagagacagcaggagaccgagcacgtgtacgagctgctggagaacaagatccagctgctgcaggaggagagcagactggccaagaacgaggccgccagaatggccgccctggtggaggccgagaaggagtgcaacctggagctgagcgagaagctgaagggcgtgaccaagaactgggaggacgtgcccggcgaccaggtgaagcccgaccagtacaccgaggccctggcccagagagacaagagaatcgaggagctgaaccagagcctggccgcccaggagagactggtggagcagctgagcagagagaagcagcagctgctgcacctgctggaggagcccaccagcatggaggtgcagcccatgaccgaggagctgctgaagcagcagaagctgaacagccacgagaccaccatcacccagcagagcgtgagcgacagccacctggccgagctgcaggagaagatccagcagaccgaggccaccaacaagatcctgcaggagaagctgaacgagatgagctacgagctgaagtgcgcccaggagagcagccagaagcaggacggcaccatccagaacctgaaggagaccctgaagagcagagagagagagaccgaggagctgtaccaggtgatcgagggccagaacgacaccatggccaagctgagagagatgctgcaccagagccagctgggccagctgcacagcagcgagggcaccagccccgcccagcagcaggtggccctgctggacctgcagagcgccctgttctgcagccagctggagatccagaagctgcagagagtggtgagacagaaggagagacagctggccgacgccaagcagtgcgtgcagttcgtggaggccgccgcccacgagagcgagcagcagaaggaggccagctggaagcacaaccaggagctgagaaaggccctgcagcagctgcaggaggagctgcagaacaagagccagcagctgagagcctgggaggccgagaagtacaacgagatcagaacccaggagcagaacatccagcacctgaaccacagcctgagccacaaggagcagctgctgcaggagttcagagagctgctgcagtacagagacaacagcgacaagaccctggaggccaacgagatgctgctggagaagctgagacagagaatccacgacaaggccgtggccctggagagagccatcgacgagaagttcagcgccctggaggagaaggagaaggagctgagacagctgagactggccgtgagagagagagaccacgacctggagagactgagagacgtgctgagcagcaacgaggccaccatgcagagcatggagagcctgctgagagccaagggcctggaggtggagcagctgagcaccacctgccagaacctgcagtggctgaaggaggagatggagaccaagttcagcagatggcagaaggagcaggagagcatcatccagcagctgcagaccagcctgcacgacagaaacaaggaggtggaggacctgagcgccaccctgctgtgcaagctgggccccggccagagcgagatcgccgaggagctgtgccagagactgcagagaaaggagagaatgctgcaggacctgctgagcgacagaaacaagcaggtgctggagcacgagatggagatccagggcctgctgcagagcgtgagcaccagagagcaggagagccaggccgccgccgagaagctggtgcaggccctgatggagagaaacagcgagctgcaggccctgagacagtacctgggcggcagagacagcctgatgagccaggcccccatcagcaaccagcaggccgaggtgacccccaccggctgcctgggcaagcagaccgaccagggcagcatgcagatccccagcagagacgacagcaccagcctgaccgccaaggaggacgtgagcatccccagaagcaccctgggcgacctggacaccgtggccggcctggagaaggagctgagcaacgccaaggaggagctggagctgatggccaagaaggagagagagagccagatggagctgagcgccctgcagagcatgatggccgtgcaggaggaggagctgcaggtgcaggccgccgacatggagagcctgaccagaaacatccagatcaaggaggacctgatcaaggacctgcagatgcagctggtggaccccgaggacatccccgccatggagagactgacccaggaggtgctgctgctgagagagaaggtggccagcgtggagagccagggccaggagatcagcggcaacagaagacagcagctgctgctgatgctggagggcctggtggacgagagaagcagactgaacgaggccctgcaggccgagagacagctgtacagcagcctggtgaagttccacgcccaccccgagagcagcgagagagacagaaccctgcaggtggagctggagggcgcccaggtgctgagaagcagactggaggaggtgctgggcagaagcctggagagactgaacagactggagaccctggccgccatcggcggcgccgccgccggcgacgacaccgaggacaccagcaccgagttcaccgacagcatcgaggaggaggccgcccaccacagccaccagcaggtgagccagtgccagggcctgggcctgcccggctggaccgcccacagccccagcgaggtgtag

SEQ ID NO: 93132 - DNA, 3396 bp, synthetic construct
  misc_feature 1..3396: note = Description of Artificial Sequence: Synthetic coding sequence
  source 1..3396: mol_type = other DNA
atgaaggagatctgcagaatctgcgccagagagctgtgcggcaaccagagaagatggatcttccacaccgccagcaagctgaacctgcaggtgctgctgagccacgtgctgggcaaggacgtgcccagagacggcaaggccgagttcgcctgcagcaagtgcgccttcatgctggacagaatctacagattcgacaccgtgatcgccagaatcgaggccctgagcatcgagagactgcagaagctgctgctggagaaggacagactgaagttctgcatcgccagcatgtacagaaagaacaacgacgacagcggcgccgagatcaaggccggcaacggcaccgtggacatgagcgtgctgcccgacgccagatacagcgccctgctgcaggaggacttcgcctacagcggcttcgagtgctgggtggagaacgaggaccagatccaggagccccacagctgccacggcagcgagggccccggcaacagacccagaagatgcagaggctgcgccgccctgagagtggccgacagcgactacgaggccatctgcaaggtgcccagaaaggtggccagaagcatcagctgcggccccagcagcagatggagcaccagcatctgcaccgaggagcccgccctgagcgaggtgggcccccccgacctggccagcaccaaggtgccccccgacggcgagagcatggaggaggagacccccggcagcagcgtggagagcctggacgccagcgtgcaggccagccccccccagcagaaggacgaggagaccgagagaagcgccaaggagctgggcaagtgcgactgctgcagcgacgaccaggccccccagcacggctgcaaccacaagctggagctggccctgagcatgatcaagggcctggactacaagcccatccagagccccagaggcagcagactgcccatccccgtgaagagcagcctgcccggcgccaagcccggccccagcatgaccgacggcgtgagcagcggcttcctgaacagaagcctgaagcccctgtacaagacccccgtgagctaccccctggagctgagcgacctgcaggagctgtgggacgacctgtgcgaggactacctgcccctgagagtgcagcccatgaccgaggagctgctgaagcagcagaagctgaacagccacgagaccaccatcacccagcagagcgtgagcgacagccacctggccgagctgcaggagaagatccagcagaccgaggccaccaacaagatcctgcaggagaagctgaacgagatgagctacgagctgaagtgcgcccaggagagcagccagaagcaggacggcaccatccagaacctgaaggagaccctgaagagcagagagagagagaccgaggagctgtaccaggtgatcgagggccagaacgacaccatggccaagctgagagagatgctgcaccagagccagctgggccagctgcacagcagcgagggcaccagccccgcccagcagcaggtggccctgctggacctgcagagcgccctgttctgcagccagctggagatccagaagctgcagagagtggtgagacagaaggagagacagctggccgacgccaagcagtgcgtgcagttcgtggaggccgccgcccacgagagcgagcagcagaaggaggccagctggaagcacaaccaggagctgagaaaggccctgcagcagctgcaggaggagctgcagaacaagagccagcagctgagagcctgggaggccgagaagtacaacgagatcagaacccaggagcagaacatccagcacctgaaccacagcctgagccacaaggagcagctgctgcaggagttcagagagctgctgcagtacagagacaacagcgacaagaccctggaggccaacgagatgctgctggagaagctgagacagagaatccacgacaaggccgtggccctggagagagccatcgacgagaagttcagcgccctggaggagaaggagaaggagctgagacagctgagactggccgtgagagagagagaccacgacctggagagactgagagacgtgctgagcagcaacgaggccaccatgcagagcatggagagcctgctgagagccaagggcctggaggtggagcagctgagcaccacctgccagaacctgcagtggctgaaggaggagatggagaccaagttcagcagatggcagaaggagcaggagagcatcatccagcagctgcagaccagcctgcacgacagaaacaaggaggtggaggacctgagcgccaccctgctgtgcaagctgggccccggccagagcgagatcgccgaggagctgtgccagagactgcagagaaaggagagaatgctgcaggacctgctgagcgacagaaacaagcaggtgctggagcacgagatggagatccagggcctgctgcagagcgtgagcaccagagagcaggagagccaggccgccgccgagaagctggtgcaggccctgatggagagaaacagcgagctgcaggccctgagacagtacctgggcggcagagacagcctgatgagccaggcccccatcagcaaccagcaggccgaggtgacccccaccggctgcctgggcaagcagaccgaccagggcagcatgcagatccccagcagagacgacagcaccagcctgaccgccaaggaggacgtgagcatccccagaagcaccctgggcgacctggacaccgtggccggcctggagaaggagctgagcaacgccaaggaggagctggagctgatggccaagaaggagagagagagccagatggagctgagcgccctgcagagcatgatggccgtgcaggaggaggagctgcaggtgcaggccgccgacatggagagcctgaccagaaacatccagatcaaggaggacctgatcaaggacctgcagatgcagctggtggaccccgaggacatccccgccatggagagactgacccaggaggtgctgctgctgagagagaaggtggccagcgtggagagccagggccaggagatcagcggcaacagaagacagcagctgctgctgatgctggagggcctggtggacgagagaagcagactgaacgaggccctgcaggccgagagacagctgtacagcagcctggtgaagttccacgcccaccccgagagcagcgagagagacagaaccctgcaggtggagctggagggcgcccaggtgctgagaagcagactggaggaggtgctgggcagaagcctggagagactgaacagactggagaccctggccgccatcggcggcgccgccgccggcgacgacaccgaggacaccagcaccgagttcaccgacagcatcgaggaggaggccgcccaccacagccaccagcagtag

SEQ ID NO: 93133 - DNA, 7041 bp, synthetic construct
  misc_feature 1..7041: note = Description of Artificial Sequence: Synthetic coding sequence
  source 1..7041: mol_type = other DNA
atgagcaacggctacagaaccctgagccagcacctgaacgacctgaagaaggagaacttcagcctgaagctgagaatctacttcctggaggagagaatgcagcagaagtacgaggccagcagagaggacatctacaagagaaacatcgagctgaaggtggaggtggagagcctgaagagagagctgcaggacaagaagcagcacctggacaagacctgggccgacgtggagaacctgaacagccagaacgaggccgagctgagaagacagttcgaggagagacagcaggagaccgagcacgtgtacgagctgctggagaacaagatccagctgctgcaggaggagagcagactggccaagaacgaggccgccagaatggccgccctggtggaggccgagaaggagtgcaacctggagctgagcgagaagctgaagggcgtgaccaagaactgggaggacgtgcccggcgaccaggtgaagcccgaccagtacaccgaggccctggcccagagagacaagagaatcgaggagctgaaccagagcctggccgcccaggagagactggtggagcagctgagcagagagaagcagcagctgctgcacctgctggaggagcccaccagcatggaggtgcagcccatgaccgaggagctgctgaagcagcagaagctgaacagccacgagaccaccatcacccagcagagcgtgagcgacagccacctggccgagctgcaggagaagatccagcagaccgaggccaccaacaagatcctgcaggagaagctgaacgagatgagctacgagctgaagtgcgcccaggagagcagccagaagcaggacggcaccatccagaacctgaaggagaccctgaagagcagagagagagagaccgaggagctgtaccaggtgatcgagggccagaacgacaccatggccaagctgagagagatgctgcaccagagccagctgggccagctgcacagcagcgagggcaccagccccgcccagcagcaggtggccctgctggacctgcagagcgccctgttctgcagccagctggagatccagaagctgcagagagtggtgagacagaaggagagacagctggccgacgccaagcagtgcgtgcagttcgtggaggccgccgcccacgagagcgagcagcagaaggaggccagctggaagcacaaccaggagctgagaaaggccctgcagcagctgcaggaggagctgcagaacaagagccagcagctgagagcctgggaggccgagaagtacaacgagatcagaacccaggagcagaacatccagcacctgaaccacagcctgagccacaaggagcagctgctgcaggagttcagagagctgctgcagtacagagacaacagcgacaagaccctggaggccaacgagatgctgctggagaagctgagacagagaatccacgacaaggccgtggccctggagagagccatcgacgagaagttcagcgccctggaggagaaggagaaggagctgagacagctgagactggccgtgagagagagagaccacgacctggagagactgagagacgtgctgagcagcaacgaggccaccatgcagagcatggagagcctgctgagagccaagggcctggaggtggagcagctgagcaccacctgccagaacctgcagtggctgaaggaggagatggagaccaagttcagcagatggcagaaggagcaggagagcatcatccagcagctgcagaccagcctgcacgacagaaacaaggaggtggaggacctgagcgccaccctgctgtgcaagctgggccccggccagagcgagatcgccgaggagctgtgccagagactgcagagaaaggagagaatgctgcaggacctgctgagcgacagaaacaagcaggtgctggagcacgagatggagatccagggcctgctgcagagcgtgagcaccagagagcaggagagccaggccgccgccgagaagctggtgcaggccctgatggagagaaacagcgagctgcaggccctgagacagtacctgggcggcagagacagcctgatgagccaggcccccatcagcaaccagcaggccgaggtgacccccaccggctgcctgggcaagcagaccgaccagggcagcatgcagatccccagcagagacgacagcaccagcctgaccgccaaggaggacgtgagcatccccagaagcaccctgggcgacctggacaccgtggccggcctggagaaggagctgagcaacgccaaggaggagctggagctgatggccaagaaggagagagagagccagatggagctgagcgccctgcagagcatgatggccgtgcaggaggaggagctgcaggtgcaggccgccgacatggagagcctgaccagaaacatccagatcaaggaggacctgatcaaggacctgcagatgcagctggtggaccccgaggacatccccgccatggagagactgacccaggaggtgctgctgctgagagagaaggtggccagcgtggagagccagggccaggagatcagcggcaacagaagacagcagctgctgctgatgctggagggcctggtggacgagagaagcagactgaacgaggccctgcaggccgagagacagctgtacagcagcctggtgaagttccacgcccaccccgagagcagcgagagagacagaaccctgcaggtggagctggagggcgcccaggtgctgagaagcagactggaggaggtgctgggcagaagcctggagagactgaacagactggagaccctggccgccatcggcggcgccgccgccggcgacgacaccgaggacaccagcaccgagttcaccgacagcatcgaggaggaggccgcccaccacagccaccagcagctggtgaaggtggccctggagaagagcctggccaccgtggagacccagaaccccagcttcagcccccccagccccatgggcggcgacagcaacagatgcctgcaggaggagatgctgcacctgagagccgagttccaccagcacctggaggagaagagaaaggccgaggaggagctgaaggagctgaaggcccagatcgaggaggccggcttcagcagcgtgagccacatcagaaacaccatgctgagcctgtgcctggagaacgccgagctgaaggagcagatgggcgaggccatgagcgacggctgggagatcgaggaggacaaggagaagggcgaggtgatggtggagaccgtggtgaccaaggagggcctgagcgagagcagcctgcaggccgagttcagaaagctgcagggcaagctgaagaacgcccacaacatcatcaacctgctgaaggagcagctggtgctgagcagcaaggagggcaacagcaagctgacccccgagctgctggtgcacctgaccagcaccatcgagagaatcaacaccgagctggtgggcagccccggcaagcaccagcaccaggaggagggcaacgtgaccgtgagacccttccccagaccccagagcctggacctgggcgccaccttcaccgtggacgcccaccagctggacaaccagagccagcccagagaccccggcccccagagcgccttcagcctgcccggcagcacccagcacctgagaagccagctgagccagtgcaagcagagataccaggacctgcaggagaagctgctgctgagcgaggccaccgtgttcgcccaggccaacgagctggagaagtacagagtgatgctgaccggcgagagcctggtgaagcaggacagcaagcagatccaggtggacctgcaggacctgggctacgagacctgcggcagaagcgagaacgaggccgagagagaggagaccaccagccccgagtgcgaggagcacaacagcctgaaggagatggtgctgatggagggcctgtgcagcgagcagggcagaagaggcagcaccctggccagcagcagcgagagaaagcccctggagaaccagctgggcaagcaggaggagttcagagtgtacggcaagagcgagaacatcctggtgctgagaaaggacatcaaggacctgaaggcccagctgcagaacgccaacaaggtgatccagaacctgaagagcagagtgagaagcctgagcgtgaccagcgactacagcagcagcctggagagaccctggaagctgagagccgtgggcaccctggagggcagcagcccccacagcgtgcccgacgaggacgagggctggctgagcgacggcaccggcgccttctacagccccggcctgcaggccaagaaggacctggagagcctgatccagagagtgagccagctggaggcccagctgcccaagaacggcctggaggagaagctggccgaggagctgagaagcgccagctggcccggcaagtacgacagcctgatccaggaccaggccagagagctgagctacctgagacagaagatcagagagggcagaggcatctgctacctgatcaccagacacgccaaggacaccgtgaagagcttcgaggacctgctgagaagcaacgacatcgactactacctgggccagagcttcagagagcagctggcccagggcagccagctgaccgagagactgaccagcaagctgagcaccaaggaccacaagagcgagaaggaccaggccggcctggagcccctggccctgagactgagcagagagctgcaggagaaggagaaggtgatcgaggtgctgcaggccaagctggacgccagaagcctgacccccagcagcagccacgccctgagcgacagccacagaagccccagcagcaccagcttcctgagcgacgagctggaggcctgcagcgacatggacatcgtgagcgagtacacccactacgaggagaagaaggccagccccagccacagcgacagcatccaccacagcagccacagcgccgtgctgagcagcaagcccagcagcaccagcgccagccagggcgccaaggccgagagcaacagcaaccccatcagcctgcccaccccccagaacacccccaaggaggccaaccaggcccacagcggcttccacttccacagcatccccaagctggccagcctgccccaggcccccctgcccagcgcccccagcagcttcctgcccttcagccccaccggccccctgctgctgggctgctgcgagacccccgtggtgagcctggccgaggcccagcaggagctgcagatgctgcagaagcagctgggcgagagcgccagcaccgtgccccccgccagcaccgccaccctgctgagcaacgacctggaggccgacagcagctactacctgaacagcgcccagccccacagcccccccagaggcaccatcgagctgggcagaatcctggagcccggctacctgggcagcagcggcaagtgggacgtgatgagaccccagaagggcagcgtgagcggcgacctgagcagcggcagcagcgtgtaccagctgaacagcaagcccaccggcgccgacctgctggaggagcacctgggcgagatcagaaacctgagacagagactggaggagagcatctgcatcaacgacagactgagagagcagctggagcacagactgaccagcaccgccagaggcagaggcagcaccagcaacttctacagccagggcctggagagcatcccccagctgtgcaacgagaacagagtgctgagagaggacaacagaagactgcaggcccagctgagccacgtgagcagagagcacagccaggagaccgagagcctgagagaggccctgctgagcagcagaagccacctgcaggagctggagaaggagctggagcaccagaaggtggagagacagcagctgctggaggacctgagagagaagcagcaggaggtgctgcacttcagagaggagagactgagcctgcaggagaacgacagcagactgcagcacaagctggtgctgctgcagcagcagtgcgaggagaagcagcagctgttcgagagcctgcagagcgagctgcagatctacgaggccctgtacggcaacagcaagaagggcctgaaggcctacagcctggacgcctgccaccagatccccctgagcagcgacctgagccacctggtggccgaggtgagagccctgagaggccagctggagcagagcatccagggcaacaactgcctgagactgcagctgcagcagcagctggagagcggcgccggcaaggccagcctgagccccagcagcatcaaccagaacttccccgccagcaccgaccccggcaacaagcagctgctgctgcaggacagcgccgtgagcccccccgtgagagacgtgggcatgaacagccccgccctggtgttccccagcagcgccagcagcacccccggcagcgagacccccatcatcaacagagccaacggcctgggcctggacaccagccccgtgatgaagaccccccccaagctggagggcgacgccaccgacggcagcttcgccaacaagcacggcagacacgtgatcggccacatcgacgactacagcgccctgagacagcagatcgccgagggcaagctgctggtgaagaagatcgtgagcctggtgagaagcgcctgcagcttccccggcctggaggcccagggcaccgaggtgctgggcagcaagggcatccacgagctgagaagcagcaccagcgccctgcaccacgccctggaggagagcgccagcctgctgaccatgttctggagagccgccctgcccagcacccacatccccgtgctgcccggcaaggtgggcgagagcaccgagagagagctgctggagctgagaaccaaggtgagcaagcaggagagactgctgcagagcaccaccgagcacctgaagaacgccaaccagcagaaggagagcatggagcagttcatcgtgagccagctgaccagaacccacgacgtgctgaagaaggccagaaccaacctggaggtgaagagcctgagagccctgccctgcacccccgccctgtag

SEQ ID NO: 93134 - DNA, 7089 bp, synthetic construct
  misc_feature 1..7089: note = Description of Artificial Sequence: Synthetic coding sequence
  source 1..7089: mol_type = other DNA
atgagcaacggctacagaaccctgagccagcacctgaacgacctgaagaaggagaacttcagcctgaagctgagaatctacttcctggaggagagaatgcagcagaagtacgaggccagcagagaggacatctacaagagaaacatcgagctgaaggtggaggtggagagcctgaagagagagctgcaggacaagaagcagcacctggacaagacctgggccgacgtggagaacctgaacagccagaacgaggccgagctgagaagacagttcgaggagagacagcaggagaccgagcacgtgtacgagctgctggagaacaagatccagctgctgcaggaggagagcagactggccaagaacgaggccgccagaatggccgccctggtggaggccgagaaggagtgcaacctggagctgagcgagaagctgaagggcgtgaccaagaactgggaggacgtgcccggcgaccaggtgaagcccgaccagtacaccgaggccctggcccagagagacaagagaatcgaggagctgaaccagagcctggccgcccaggagagactggtggagcagctgagcagagagaagcagcagctgctgcacctgctggaggagcccaccagcatggaggtgcagcccatgaccgaggagctgctgaagcagcagaagctgaacagccacgagaccaccatcacccagcagagcgtgagcgacagccacctggccgagctgcaggagaagatccagcagaccgaggccaccaacaagatcctgcaggagaagctgaacgagatgagctacgagctgaagtgcgcccaggagagcagccagaagcaggacggcaccatccagaacctgaaggagaccctgaagagcagagagagagagaccgaggagctgtaccaggtgatcgagggccagaacgacaccatggccaagctgagagagatgctgcaccagagccagctgggccagctgcacagcagcgagggcaccagccccgcccagcagcaggtggccctgctggacctgcagagcgccctgttctgcagccagctggagatccagaagctgcagagagtggtgagacagaaggagagacagctggccgacgccaagcagtgcgtgcagttcgtggaggccgccgcccacgagagcgagcagcagaaggaggccagctggaagcacaaccaggagctgagaaaggccctgcagcagctgcaggaggagctgcagaacaagagccagcagctgagagcctgggaggccgagaagtacaacgagatcagaacccaggagcagaacatccagcacctgaaccacagcctgagccacaaggagcagctgctgcaggagttcagagagctgctgcagtacagagacaacagcgacaagaccctggaggccaacgagatgctgctggagaagctgagacagagaatccacgacaaggccgtggccctggagagagccatcgacgagaagttcagcgccctggaggagaaggagaaggagctgagacagctgagactggccgtgagagagagagaccacgacctggagagactgagagacgtgctgagcagcaacgaggccaccatgcagagcatggagagcctgctgagagccaagggcctggaggtggagcagctgagcaccacctgccagaacctgcagtggctgaaggaggagatggagaccaagttcagcagatggcagaaggagcaggagagcatcatccagcagctgcagaccagcctgcacgacagaaacaaggaggtggaggacctgagcgccaccctgctgtgcaagctgggccccggccagagcgagatcgccgaggagctgtgccagagactgcagagaaaggagagaatgctgcaggacctgctgagcgacagaaacaagcaggtgctggagcacgagatggagatccagggcctgctgcagagcgtgagcaccagagagcaggagagccaggccgccgccgagaagctggtgcaggccctgatggagagaaacagcgagctgcaggccctgagacagtacctgggcggcagagacagcctgatgagccaggcccccatcagcaaccagcaggccgaggtgacccccaccggctgcctgggcaagcagaccgaccagggcagcatgcagatccccagcagagacgacagcaccagcctgaccgccaaggaggacgtgagcatccccagaagcaccctgggcgacctggacaccgtggccggcctggagaaggagctgagcaacgccaaggaggagctggagctgatggccaagaaggagagagagagccagatggagctgagcgccctgcagagcatgatggccgtgcaggaggaggagctgcaggtgcaggccgccgacatggagagcctgaccagaaacatccagatcaaggaggacctgatcaaggacctgcagatgcagctggtggaccccgaggacatccccgccatggagagactgacccaggaggtgctgctgctgagagagaaggtggccagcgtggagagccagggccaggagatcagcggcaacagaagacagcagctgctgctgatgctggagggcctggtggacgagagaagcagactgaacgaggccctgcaggccgagagacagctgtacagcagcctggtgaagttccacgcccaccccgagagcagcgagagagacagaaccctgcaggtggagctggagggcgcccaggtgctgagaagcagactggaggaggtgctgggcagaagcctggagagactgaacagactggagaccctggccgccatcggcggcgccgccgccggcgacgacaccgaggacaccagcaccgagttcaccgacagcatcgaggaggaggccgcccaccacagccaccagcagctggtgaaggtggccctggagaagagcctggccaccgtggagacccagaaccccagcttcagcccccccagccccatgggcggcgacagcaacagatgcctgcaggaggagatgctgcacctgagagccgagttccaccagcacctggaggagaagagaaaggccgaggaggagctgaaggagctgaaggcccagatcgaggaggccggcttcagcagcgtgagccacatcagaaacaccatgctgagcctgtgcctggagaacgccgagctgaaggagcagatgggcgaggccatgagcgacggctgggagatcgaggaggacaaggagaagggcgaggtgatggtggagaccgtggtgaccaaggagggcctgagcgagagcagcctgcaggccgagttcagaaagctgcagggcaagctgaagaacgcccacaacatcatcaacctgctgaaggagcagctggtgctgagcagcaaggagggcaacagcaagctgacccccgagctgctggtgcacctgaccagcaccatcgagagaatcaacaccgagctggtgggcagccccggcaagcaccagcaccaggaggagggcaacgtgaccgtgagacccttccccagaccccagagcctggacctgggcgccaccttcaccgtggacgcccaccagctggacaaccagagccagcccagagaccccggcccccagagcgccttcagcctgcccggcagcacccagcacctgagaagccagctgagccagtgcaagcagagataccaggacctgcaggagaagctgctgctgagcgaggccaccgtgttcgcccaggccaacgagctggagaagtacagagtgatgctgaccggcgagagcctggtgaagcaggacagcaagcagatccaggtggacctgcaggacctgggctacgagacctgcggcagaagcgagaacgaggccgagagagaggagaccaccagccccgagtgcgaggagcacaacagcctgaaggagatggtgctgatggagggcctgtgcagcgagcagggcagaagaggcagcaccctggccagcagcagcgagagaaagcccctggagaaccagctgggcaagcaggaggagttcagagtgtacggcaagagcgagaacatcctggtgctgagaaaggacatcaaggacctgaaggcccagctgcagaacgccaacaaggtgatccagaacctgaagagcagagtgagaagcctgagcgtgaccagcgactacagcagcagcctggagagaccctggaagctgagagccgtgggcaccctggagggcagcagcccccacagcgtgcccgacgaggacgagggctggctgagcgacggcaccggcgccttctacagccccggcctgcaggccaagaaggacctggagagcctgatccagagagtgagccagctggaggcccagctgcccaagaacggcctggaggagaagctggccgaggagctgagaagcgccagctggcccggcaagtacgacagcctgatccaggaccaggccagagagctgagctacctgagacagaagatcagagagggcagaggcatctgctacctgatcaccagacacgccaaggacaccgtgaagagcttcgaggacctgctgagaagcaacgacatcgactactacctgggccagagcttcagagagcagctggcccagggcagccagctgaccgagagactgaccagcaagctgagcaccaaggaccacaagagcgagaaggaccaggccggcctggagcccctggccctgagactgagcagagagctgcaggagaaggagaaggtgatcgaggtgctgcaggccaagctggacgccagaagcctgacccccagcagcagccacgccctgagcgacagccacagaagccccagcagcaccagcttcctgagcgacgagctggaggcctgcagcgacatggacatcgtgagcgagtacacccactacgaggagaagaaggccagccccagccacagcgacagcatccaccacagcagccacagcgccgtgctgagcagcaagcccagcagcaccagcgccagccagggcgccaaggccgagagcaacagcaaccccatcagcctgcccaccccccagaacacccccaaggaggccaaccaggcccacagcggcttccacttccacagcatccccaagctggccagcctgccccaggcccccctgcccagcgcccccagcagcttcctgcccttcagccccaccggccccctgctgctgggctgctgcgagacccccgtggtgagcctggccgaggcccagcaggagctgcagatgctgcagaagcagctgggcgagagcgccagcaccgtgccccccgccagcaccgccaccctgctgagcaacgacctggaggccgacagcagctactacctgaacagcgcccagccccacagcccccccagaggcaccatcgagctgggcagaatcctggagcccggctacctgggcagcagcggcaagtgggacgtgatgagaccccagaagggcagcgtgagcggcgacctgagcagcggcagcagcgtgtaccagctgaacagcaagcccaccggcgccgacctgctggaggagcacctgggcgagatcagaaacctgagacagagactggaggagagcatctgcatcaacgacagactgagagagcagctggagcacagactgaccagcaccgccagaggcagaggcagcaccagcaacttctacagccagggcctggagagcatcccccagctgtgcaacgagaacagagtgctgagagaggacaacagaagactgcaggcccagctgagccacgtgagcagagagcacagccaggagaccgagagcctgagagaggccctgctgagcagcagaagccacctgcaggagctggagaaggagctggagcaccagaaggtggagagacagcagctgctggaggacctgagagagaagcagcaggaggtgctgcacttcagagaggagagactgagcctgcaggagaacgacagcagactgcagcacaagctggtgctgctgcagcagcagtgcgaggagaagcagcagctgttcgagagcctgcagagcgagctgcagatctacgaggccctgtacggcaacagcaagaagggcctgaaggcctacagcctggacgcctgccaccagatccccctgagcagcgacctgagccacctggtggccgaggtgagagccctgagaggccagctggagcagagcatccagggcaacaactgcctgagactgcagctgcagcagcagctggagagcggcgccggcaaggccagcctgagccccagcagcatcaaccagaacttccccgccagcaccgaccccggcaacaagcagctgctgctgcaggacagcgccgtgagcccccccgtgagagacgtgggcatgaacagccccgccctggtgttccccagcagcgccagcagcacccccggcagcgagacccccatcatcaacagagccaacggcctgggcctggacaccagccccgtgatgaagaccccccccaagctggagggcgacgccaccgacggcagcttcgccaacaagcacggcagacacgtgatcggccacatcgacgactacagcgccctgagacagcagatcgccgagggcaagctgctggtgaagaagatcgtgagcctggtgagaagcgcctgcagcttccccggcctggaggcccagggcaccgaggtgctgggcagcaagggcatccacgagctgagaagcagcaccagcgccctgcaccacgccctggaggagagcgccagcctgctgaccatgttctggagagccgccctgcccagcacccacatccccgtgctgcccggcaaggtgggcgagagcaccgagagagagctgctggagctgagaaccaaggtgagcaagcaggagagactgctgcagagcaccaccgagcacctgaagaacgccaaccagcagaaggagagcatggagcagttcatcgtgagccagctgaccagaacccacgacgtgctgaagaaggccagaaccaacctggaggagccctgcaagaagagaagccaccagaagagcctgaagcagcaggagagatgggcctgcccccccttcgtgcagctgcccatctgctag

SEQ ID NO: 93135 - DNA, 1557 bp, synthetic construct
  misc_feature 1..1557: note = Description of Artificial Sequence: Synthetic coding sequence
  source 1..1557: mol_type = other DNA
atgcccgaggccaactacctgctgagcgtgagctggggctacatcaagttcaagagaatgctgaacagagagctgacccacctgagcgagatgagcagaagcggcaaccaggtgagcgagttcatcagcaacaccttcctggacaagcagcacgaggtggagatccccagccccacccagaaggagaaggagaagaagaagagacccatgagccagatcagcggcgtgaagaagctgatgcacagcagcagcctgaccaacagcagcatccccagattcggcgtgaagaccgagcaggaggacgtgctggccaaggagctggaggacgtgaacaagtggggcctgcacgtgttcagaatcgccgagctgagcggcaacagacccctgaccgtgatcatgcacaccatcttccaggagagagacctgctgaagaccttcaagatccccgtggacaccctgatcacctacctgatgaccctggaggaccactaccacgccgacgtggcctaccacaacaacatccacgccgccgacgtggtgcagagcacccacgtgctgctgagcacccccgccctggaggccgtgttcaccgacctggagatcctggccgccatcttcgccagcgccatccacgacgtggaccaccccggcgtgagcaaccagttcctgatcaacaccaacagcgagctggccctgatgtacaacgacagcagcgtgctggagaaccaccacctggccgtgggcttcaagctgctgcaggaggagaactgcgacatcttccagaacctgaccaagaagcagagacagagcctgagaaagatggtgatcgacatcgtgctggccaccgacatgagcaagcacatgaacctgctggccgacctgaagaccatggtggagaccaagaaggtgaccagcagcggcgtgctgctgctggacaactacagcgacagaatccaggtgctgcagaacatggtgcactgcgccgacctgagcaaccccaccaagcccctgcagctgtacagacagtggaccgacagaatcatggaggagttcttcagacagggcgacagagagagagagagaggcatggagatcagccccatgtgcgacaagcacaacgccagcgtggagaagagccaggtgggcttcatcgactacatcgtgcaccccctgtgggagacctgggccgacctggtgcaccccgacgcccaggacatcctggacaccctggaggacaacagagagtggtaccagagcaccatcccccagagccccagccccgcccccgacgaccccgaggagggcagacagggccagaccgagaagttccagttcgagctgaccctggaggaggacggcgagagcgacaccgagaaggacagcggcagccaggtggaggaggacaccagctgcagcgacagcaagaccctgtgcacccaggacagcgagagcaccgagatccccctggacgagcaggtggaggaggaggccgtgggcgaggaggaggagagccagcccgaggcctgcgtgatcgacgacagaagccccgacacctag

SEQ ID NO: 93136 - DNA, 2430 bp, synthetic construct
  misc_feature 1..2430: note = Description of Artificial Sequence: Synthetic coding sequence
  source 1..2430: mol_type = other DNA
atggaggccgagggcagcagcgcccccgccagagccggcagcggcgagggcagcgacagcgccggcggcgccaccctgaaggcccccaagcacctgtggagacacgagcagcaccaccagtaccccctgagacagccccagttcagactgctgcacccccaccaccacctgccccccccccccccccccagcccccagccccagccccagtgccccctgcagccccccccccccccccccctgcccccccccccccccccccccggcgccgccagaggcagatacgccagcagcggcgccaccggcagagtgagacacagaggctacagcgacaccgagagatacctgtactgcagagccatggacagaaccagctacgccgtggagaccggccacagacccggcctgaagaagagcagaatgagctggcccagcagcttccagggcctgagaagattcgacgtggacaacggcaccagcgccggcagaagccccctggaccccatgaccagccccggcagcggcctgatcctgcaggccaacttcgtgcacagccagagaagagagagcttcctgtacagaagcgacagcgactacgacctgagccccaagagcatgagcagaaacagcagcatcgccagcgacatccacggcgacgacctgatcgtgacccccttcgcccaggtgctggccagcctgagaaccgtgagaaacaacttcgccgccctgaccaacctgcaggacagagcccccagcaagagaagccccatgtgcaaccagcccagcatcaacaaggccaccatcaccgaggaggcctaccagaagctggccagcgagaccctggaggagctggactggtgcctggaccagctggagaccctgcagaccagacacagcgtgagcgagatggccagcaacaagttcaagagaatgctgaacagagagctgacccacctgagcgagatgagcagaagcggcaaccaggtgagcgagttcatcagcaacaccttcctggacaagcagcacgaggtggagatccccagccccacccagaaggagaaggagaagaagaagagacccatgagccagatcagcggcgtgaagaagctgatgcacagcagcagcctgaccaacagcagcatccccagattcggcgtgaagaccgagcaggaggacgtgctggccaaggagctggaggacgtgaacaagtggggcctgcacgtgttcagaatcgccgagctgagcggcaacagacccctgaccgtgatcatgcacaccatcttccaggagagagacctgctgaagaccttcaagatccccgtggacaccctgatcacctacctgatgaccctggaggaccactaccacgccgacgtggcctaccacaacaacatccacgccgccgacgtggtgcagagcacccacgtgctgctgagcacccccgccctggaggccgtgttcaccgacctggagatcctggccgccatcttcgccagcgccatccacgacgtggaccaccccggcgtgagcaaccagttcctgatcaacaccaacagcgagctggccctgatgtacaacgacagcagcgtgctggagaaccaccacctggccgtgggcttcaagctgctgcaggaggagaactgcgacatcttccagaacctgaccaagaagcagagacagagcctgagaaagatggtgatcgacatcgtgctggccaccgacatgagcaagcacatgaacctgctggccgacctgaagaccatggtggagaccaagaaggtgaccagcagcggcgtgctgctgctggacaactacagcgacagaatccaggtgctgcagaacatggtgcactgcgccgacctgagcaaccccaccaagcccctgcagctgtacagacagtggaccgacagaatcatggaggagttcttcagacagggcgacagagagagagagagaggcatggagatcagccccatgtgcgacaagcacaacgccagcgtggagaagagccaggtgggcttcatcgactacatcgtgcaccccctgtgggagacctgggccgacctggtgcaccccgacgcccaggacatcctggacaccctggaggacaacagagagtggtaccagagcaccatcccccagagccccagccccgcccccgacgaccccgaggagggcagacagggccagaccgagaagttccagttcgagctgaccctggaggaggacggcgagagcgacaccgagaaggacagcggcagccaggtggaggaggacaccagctgcagcgacagcaagaccctgtgcacccaggacagcgagagcaccgagatccccctggacgagcaggtggaggaggaggccgtgggcgaggaggaggagagccagcccgaggcctgcgtgatcgacgacagaagccccgacacctag

SEQ ID NO: 93137 - DNA, 2037 bp, synthetic construct
  misc_feature 1..2037: note = Description of Artificial Sequence: Synthetic coding sequence
  source 1..2037: mol_type = other DNA
atgttcatctacagcttcaacaagttcttcttcaagaccacccactgctgggccatcatcagcttcgacgtggacaacggcaccagcgccggcagaagccccctggaccccatgaccagccccggcagcggcctgatcctgcaggccaacttcgtgcacagccagagaagagagagcttcctgtacagaagcgacagcgactacgacctgagccccaagagcatgagcagaaacagcagcatcgccagcgacatccacggcgacgacctgatcgtgacccccttcgcccaggtgctggccagcctgagaaccgtgagaaacaacttcgccgccctgaccaacctgcaggacagagcccccagcaagagaagccccatgtgcaaccagcccagcatcaacaaggccaccatcaccgaggaggcctaccagaagctggccagcgagaccctggaggagctggactggtgcctggaccagctggagaccctgcagaccagacacagcgtgagcgagatggccagcaacaagttcaagagaatgctgaacagagagctgacccacctgagcgagatgagcagaagcggcaaccaggtgagcgagttcatcagcaacaccttcctggacaagcagcacgaggtggagatccccagccccacccagaaggagaaggagaagaagaagagacccatgagccagatcagcggcgtgaagaagctgatgcacagcagcagcctgaccaacagcagcatccccagattcggcgtgaagaccgagcaggaggacgtgctggccaaggagctggaggacgtgaacaagtggggcctgcacgtgttcagaatcgccgagctgagcggcaacagacccctgaccgtgatcatgcacaccatcttccaggagagagacctgctgaagaccttcaagatccccgtggacaccctgatcacctacctgatgaccctggaggaccactaccacgccgacgtggcctaccacaacaacatccacgccgccgacgtggtgcagagcacccacgtgctgctgagcacccccgccctggaggccgtgttcaccgacctggagatcctggccgccatcttcgccagcgccatccacgacgtggaccaccccggcgtgagcaaccagttcctgatcaacaccaacagcgagctggccctgatgtacaacgacagcagcgtgctggagaaccaccacctggccgtgggcttcaagctgctgcaggaggagaactgcgacatcttccagaacctgaccaagaagcagagacagagcctgagaaagatggtgatcgacatcgtgctggccaccgacatgagcaagcacatgaacctgctggccgacctgaagaccatggtggagaccaagaaggtgaccagcagcggcgtgctgctgctggacaactacagcgacagaatccaggtgctgcagaacatggtgcactgcgccgacctgagcaaccccaccaagcccctgcagctgtacagacagtggaccgacagaatcatggaggagttcttcagacagggcgacagagagagagagagaggcatggagatcagccccatgtgcgacaagcacaacgccagcgtggagaagagccaggtgggcttcatcgactacatcgtgcaccccctgtgggagacctgggccgacctggtgcaccccgacgcccaggacatcctggacaccctggaggacaacagagagtggtaccagagcaccatcccccagagccccagccccgcccccgacgaccccgaggagggcagacagggccagaccgagaagttccagttcgagctgaccctggaggaggacggcgagagcgacaccgagaaggacagcggcagccaggtggaggaggacaccagctgcagcgacagcaagaccctgtgcacccaggacagcgagagcaccgagatccccctggacgagcaggtggaggaggaggccgtgggcgaggaggaggagagccagcccgaggcctgcgtgatcgacgacagaagccccgacacctag

SEQ ID NO: 93138 - DNA, 1524 bp, synthetic construct
  misc_feature 1..1524: note = Description of Artificial Sequence: Synthetic coding sequence
  source 1..1524: mol_type = other DNA
atggccagcaacaagttcaagagaatgctgaacagagagctgacccacctgagcgagatgagcagaagcggcaaccaggtgagcgagttcatcagcaacaccttcctggacaagcagcacgaggtggagatccccagccccacccagaaggagaaggagaagaagaagagacccatgagccagatcagcggcgtgaagaagctgatgcacagcagcagcctgaccaacagcagcatccccagattcggcgtgaagaccgagcaggaggacgtgctggccaaggagctggaggacgtgaacaagtggggcctgcacgtgttcagaatcgccgagctgagcggcaacagacccctgaccgtgatcatgcacaccatcttccaggagagagacctgctgaagaccttcaagatccccgtggacaccctgatcacctacctgatgaccctggaggaccactaccacgccgacgtggcctaccacaacaacatccacgccgccgacgtggtgcagagcacccacgtgctgctgagcacccccgccctggaggccgtgttcaccgacctggagatcctggccgccatcttcgccagcgccatccacgacgtggaccaccccggcgtgagcaaccagttcctgatcaacaccaacagcgagctggccctgatgtacaacgacagcagcgtgctggagaaccaccacctggccgtgggcttcaagctgctgcaggaggagaactgcgacatcttccagaacctgaccaagaagcagagacagagcctgagaaagatggtgatcgacatcgtgctggccaccgacatgagcaagcacatgaacctgctggccgacctgaagaccatggtggagaccaagaaggtgaccagcagcggcgtgctgctgctggacaactacagcgacagaatccaggtgctgcagaacatggtgcactgcgccgacctgagcaaccccaccaagcccctgcagctgtacagacagtggaccgacagaatcatggaggagttcttcagacagggcgacagagagagagagagaggcatggagatcagccccatgtgcgacaagcacaacgccagcgtggagaagagccaggtgggcttcatcgactacatcgtgcaccccctgtgggagacctgggccgacctggtgcaccccgacgcccaggacatcctggacaccctggaggacaacagagagtggtaccagagcaccatcccccagagccccagccccgcccccgacgaccccgaggagggcagacagggccagaccgagaagttccagttcgagctgaccctggaggaggacggcgagagcgacaccgagaaggacagcggcagccaggtggaggaggacaccagctgcagcgacagcaagaccctgtgcacccaggacagcgagagcaccgagatccccctggacgagcaggtggaggaggaggccgtgggcgaggaggaggagagccagcccgaggcctgcgtgatcgacgacagaagccccgacacctag

SEQ ID NO: 93139 - DNA, 2022 bp, synthetic construct
  misc_feature 1..2022: note = Description of Artificial Sequence: Synthetic coding sequence
  source 1..2022: mol_type = other DNA
atgatgcacgtgaacaacttccccttcagaagacacagctggatctgcttcgacgtggacaacggcaccagcgccggcagaagccccctggaccccatgaccagccccggcagcggcctgatcctgcaggccaacttcgtgcacagccagagaagagagagcttcctgtacagaagcgacagcgactacgacctgagccccaagagcatgagcagaaacagcagcatcgccagcgacatccacggcgacgacctgatcgtgacccccttcgcccaggtgctggccagcctgagaaccgtgagaaacaacttcgccgccctgaccaacctgcaggacagagcccccagcaagagaagccccatgtgcaaccagcccagcatcaacaaggccaccatcaccgaggaggcctaccagaagctggccagcgagaccctggaggagctggactggtgcctggaccagctggagaccctgcagaccagacacagcgtgagcgagatggccagcaacaagttcaagagaatgctgaacagagagctgacccacctgagcgagatgagcagaagcggcaaccaggtgagcgagttcatcagcaacaccttcctggacaagcagcacgaggtggagatccccagccccacccagaaggagaaggagaagaagaagagacccatgagccagatcagcggcgtgaagaagctgatgcacagcagcagcctgaccaacagcagcatccccagattcggcgtgaagaccgagcaggaggacgtgctggccaaggagctggaggacgtgaacaagtggggcctgcacgtgttcagaatcgccgagctgagcggcaacagacccctgaccgtgatcatgcacaccatcttccaggagagagacctgctgaagaccttcaagatccccgtggacaccctgatcacctacctgatgaccctggaggaccactaccacgccgacgtggcctaccacaacaacatccacgccgccgacgtggtgcagagcacccacgtgctgctgagcacccccgccctggaggccgtgttcaccgacctggagatcctggccgccatcttcgccagcgccatccacgacgtggaccaccccggcgtgagcaaccagttcctgatcaacaccaacagcgagctggccctgatgtacaacgacagcagcgtgctggagaaccaccacctggccgtgggcttcaagctgctgcaggaggagaactgcgacatcttccagaacctgaccaagaagcagagacagagcctgagaaagatggtgatcgacatcgtgctggccaccgacatgagcaagcacatgaacctgctggccgacctgaagaccatggtggagaccaagaaggtgaccagcagcggcgtgctgctgctggacaactacagcgacagaatccaggtgctgcagaacatggtgcactgcgccgacctgagcaaccccaccaagcccctgcagctgtacagacagtggaccgacagaatcatggaggagttcttcagacagggcgacagagagagagagagaggcatggagatcagccccatgtgcgacaagcacaacgccagcgtggagaagagccaggtgggcttcatcgactacatcgtgcaccccctgtgggagacctgggccgacctggtgcaccccgacgcccaggacatcctggacaccctggaggacaacagagagtggtaccagagcaccatcccccagagccccagccccgcccccgacgaccccgaggagggcagacagggccagaccgagaagttccagttcgagctgaccctggaggaggacggcgagagcgacaccgagaaggacagcggcagccaggtggaggaggacaccagctgcagcgacagcaagaccctgtgcacccaggacagcgagagcaccgagatccccctggacgagcaggtggaggaggaggccgtgggcgaggaggaggagagccagcccgaggcctgcgtgatcgacgacagaagccccgacacctag

SEQ ID NO: 93140 - DNA, 2064 bp, synthetic construct
  misc_feature 1..2064: note = Description of Artificial Sequence: Synthetic coding sequence
  source 1..2064: mol_type = other DNA
atggccttcgtgtgggaccccctgggcgccaccgtgcccggccccagcaccagagccaagagcagactgagattcagcaagagctacagcttcgacgtggacaacggcaccagcgccggcagaagccccctggaccccatgaccagccccggcagcggcctgatcctgcaggccaacttcgtgcacagccagagaagagagagcttcctgtacagaagcgacagcgactacgacctgagccccaagagcatgagcagaaacagcagcatcgccagcgacatccacggcgacgacctgatcgtgacccccttcgcccaggtgctggccagcctgagaaccgtgagaaacaacttcgccgccctgaccaacctgcaggacagagcccccagcaagagaagccccatgtgcaaccagcccagcatcaacaaggccaccatcaccgaggaggcctaccagaagctggccagcgagaccctggaggagctggactggtgcctggaccagctggagaccctgcagaccagacacagcgtgagcgagatggccagcaacaagttcaagagaatgctgaacagagagctgacccacctgagcgagatgagcagaagcggcaaccaggtgagcgagttcatcagcaacaccttcctggacaagcagcacgaggtggagatccccagccccacccagaaggagaaggagaagaagaagagacccatgagccagatcagcggcgtgaagaagctgatgcacagcagcagcctgaccaacagcagcatccccagattcggcgtgaagaccgagcaggaggacgtgctggccaaggagctggaggacgtgaacaagtggggcctgcacgtgttcagaatcgccgagctgagcggcaacagacccctgaccgtgatcatgcacaccatcttccaggagagagacctgctgaagaccttcaagatccccgtggacaccctgatcacctacctgatgaccctggaggaccactaccacgccgacgtggcctaccacaacaacatccacgccgccgacgtggtgcagagcacccacgtgctgctgagcacccccgccctggaggccgtgttcaccgacctggagatcctggccgccatcttcgccagcgccatccacgacgtggaccaccccggcgtgagcaaccagttcctgatcaacaccaacagcgagctggccctgatgtacaacgacagcagcgtgctggagaaccaccacctggccgtgggcttcaagctgctgcaggaggagaactgcgacatcttccagaacctgaccaagaagcagagacagagcctgagaaagatggtgatcgacatcgtgctggccaccgacatgagcaagcacatgaacctgctggccgacctgaagaccatggtggagaccaagaaggtgaccagcagcggcgtgctgctgctggacaactacagcgacagaatccaggtgctgcagaacatggtgcactgcgccgacctgagcaaccccaccaagcccctgcagctgtacagacagtggaccgacagaatcatggaggagttcttcagacagggcgacagagagagagagagaggcatggagatcagccccatgtgcgacaagcacaacgccagcgtggagaagagccaggtgggcttcatcgactacatcgtgcaccccctgtgggagacctgggccgacctggtgcaccccgacgcccaggacatcctggacaccctggaggacaacagagagtggtaccagagcaccatcccccagagccccagccccgcccccgacgaccccgaggagggcagacagggccagaccgagaagttccagttcgagctgaccctggaggaggacggcgagagcgacaccgagaaggacagcggcagccaggtggaggaggacaccagctgcagcgacagcaagaccctgtgcacccaggacagcgagagcaccgagatccccctggacgagcaggtggaggaggaggccgtgggcgaggaggaggagagccagcccgaggcctgcgtgatcgacgacagaagccccgacacctag

SEQ ID NO: 93141 - DNA, 2247 bp, synthetic construct
  misc_feature 1..2247: note = Description of Artificial Sequence: Synthetic coding sequence
  source 1..2247: mol_type = other DNA
atgaagagaaacacctgcgacctgctgagcagaagcaagagcgccagcgaggagaccctgcacagcagcaacgaggaggaggaccccttcagaggcatggagccctacctggtgagaagactgagctgcagaaacatccagctgccccccctggccttcagacagctggagcaggccgacctgaagagcgagagcgagaacatccagagacccaccagcctgcccctgaagatcctgcccctgatcgccatcaccagcgccgagagcagcggcttcgacgtggacaacggcaccagcgccggcagaagccccctggaccccatgaccagccccggcagcggcctgatcctgcaggccaacttcgtgcacagccagagaagagagagcttcctgtacagaagcgacagcgactacgacctgagccccaagagcatgagcagaaacagcagcatcgccagcgacatccacggcgacgacctgatcgtgacccccttcgcccaggtgctggccagcctgagaaccgtgagaaacaacttcgccgccctgaccaacctgcaggacagagcccccagcaagagaagccccatgtgcaaccagcccagcatcaacaaggccaccatcaccgaggaggcctaccagaagctggccagcgagaccctggaggagctggactggtgcctggaccagctggagaccctgcagaccagacacagcgtgagcgagatggccagcaacaagttcaagagaatgctgaacagagagctgacccacctgagcgagatgagcagaagcggcaaccaggtgagcgagttcatcagcaacaccttcctggacaagcagcacgaggtggagatccccagccccacccagaaggagaaggagaagaagaagagacccatgagccagatcagcggcgtgaagaagctgatgcacagcagcagcctgaccaacagcagcatccccagattcggcgtgaagaccgagcaggaggacgtgctggccaaggagctggaggacgtgaacaagtggggcctgcacgtgttcagaatcgccgagctgagcggcaacagacccctgaccgtgatcatgcacaccatcttccaggagagagacctgctgaagaccttcaagatccccgtggacaccctgatcacctacctgatgaccctggaggaccactaccacgccgacgtggcctaccacaacaacatccacgccgccgacgtggtgcagagcacccacgtgctgctgagcacccccgccctggaggccgtgttcaccgacctggagatcctggccgccatcttcgccagcgccatccacgacgtggaccaccccggcgtgagcaaccagttcctgatcaacaccaacagcgagctggccctgatgtacaacgacagcagcgtgctggagaaccaccacctggccgtgggcttcaagctgctgcaggaggagaactgcgacatcttccagaacctgaccaagaagcagagacagagcctgagaaagatggtgatcgacatcgtgctggccaccgacatgagcaagcacatgaacctgctggccgacctgaagaccatggtggagaccaagaaggtgaccagcagcggcgtgctgctgctggacaactacagcgacagaatccaggtgctgcagaacatggtgcactgcgccgacctgagcaaccccaccaagcccctgcagctgtacagacagtggaccgacagaatcatggaggagttcttcagacagggcgacagagagagagagagaggcatggagatcagccccatgtgcgacaagcacaacgccagcgtggagaagagccaggtgggcttcatcgactacatcgtgcaccccctgtgggagacctgggccgacctggtgcaccccgacgcccaggacatcctggacaccctggaggacaacagagagtggtaccagagcaccatcccccagagccccagccccgcccccgacgaccccgaggagggcagacagggccagaccgagaagttccagttcgagctgaccctggaggaggacggcgagagcgacaccgagaaggacagcggcagccaggtggaggaggacaccagctgcagcgacagcaagaccctgtgcacccaggacagcgagagcaccgagatccccctggacgagcaggtggaggaggaggccgtgggcgaggaggaggagagccagcccgaggcctgcgtgatcgacgacagaagccccgacacctag

SEQ ID NO: 93142 - DNA, 660 bp, synthetic construct
  misc_feature 1..660: note = Description of Artificial Sequence: Synthetic coding sequence
  source 1..660: mol_type = other DNA
atggcccagcagaccagccccgacaccctgaccgtgcccgaggtggacaacccccactgccccaacccctggctgaacgaggacctggtgaagagcctgagagagaacctgctgcagcacgagaagagcaagaccgccagaaagagcgtgagccccaagctgagccccgtgatcagccccagaaacagccccagactgctgagaagaatgctgctgagcagcaacatccccaagcagagaagattcaccgtggcccacacctgcttcgacgtggacaacggcaccagcgccggcagaagccccctggaccccatgaccagccccggcagcggcctgatcctgcaggccaacttcgtgcacagccagagaagagagagcttcctgtacagaagcgacagcgactacgacctgagccccaagagcatgagcagaaacagcagcatcgccagcgacatccacggcgacgacctgatcgtgacccccttcgcccaggtgctggccagcctgagaaccgtgagaaacaacttcgccgccctgaccaacctgcaggacagagcccccagcaagagaagccccatgtgcaaccagcccagcatcaacaaggccaccatcaccggcagctggatggagctgaacccctacaccctgctggacatgtag

SEQ ID NO: 93143 - DNA, 2040 bp, synthetic construct
  misc_feature 1..2040: note = Description of Artificial Sequence: Synthetic coding sequence
  source 1..2040: mol_type = other DNA
atgagcatcatcatgaagcccagaagcagaagcaccagcagcctgagaaccgccgaggccgtgtgcttcgacgtggacaacggcaccagcgccggcagaagccccctggaccccatgaccagccccggcagcggcctgatcctgcaggccaacttcgtgcacagccagagaagagagagcttcctgtacagaagcgacagcgactacgacctgagccccaagagcatgagcagaaacagcagcatcgccagcgacatccacggcgacgacctgatcgtgacccccttcgcccaggtgctggccagcctgagaaccgtgagaaacaacttcgccgccctgaccaacctgcaggacagagcccccagcaagagaagccccatgtgcaaccagcccagcatcaacaaggccaccatcaccgaggaggcctaccagaagctggccagcgagaccctggaggagctggactggtgcctggaccagctggagaccctgcagaccagacacagcgtgagcgagatggccagcaacaagttcaagagaatgctgaacagagagctgacccacctgagcgagatgagcagaagcggcaaccaggtgagcgagttcatcagcaacaccttcctggacaagcagcacgaggtggagatccccagccccacccagaaggagaaggagaagaagaagagacccatgagccagatcagcggcgtgaagaagctgatgcacagcagcagcctgaccaacagcagcatccccagattcggcgtgaagaccgagcaggaggacgtgctggccaaggagctggaggacgtgaacaagtggggcctgcacgtgttcagaatcgccgagctgagcggcaacagacccctgaccgtgatcatgcacaccatcttccaggagagagacctgctgaagaccttcaagatccccgtggacaccctgatcacctacctgatgaccctggaggaccactaccacgccgacgtggcctaccacaacaacatccacgccgccgacgtggtgcagagcacccacgtgctgctgagcacccccgccctggaggccgtgttcaccgacctggagatcctggccgccatcttcgccagcgccatccacgacgtggaccaccccggcgtgagcaaccagttcctgatcaacaccaacagcgagctggccctgatgtacaacgacagcagcgtgctggagaaccaccacctggccgtgggcttcaagctgctgcaggaggagaactgcgacatcttccagaacctgaccaagaagcagagacagagcctgagaaagatggtgatcgacatcgtgctggccaccgacatgagcaagcacatgaacctgctggccgacctgaagaccatggtggagaccaagaaggtgaccagcagcggcgtgctgctgctggacaactacagcgacagaatccaggtgctgcagaacatggtgcactgcgccgacctgagcaaccccaccaagcccctgcagctgtacagacagtggaccgacagaatcatggaggagttcttcagacagggcgacagagagagagagagaggcatggagatcagccccatgtgcgacaagcacaacgccagcgtggagaagagccaggtgggcttcatcgactacatcgtgcaccccctgtgggagacctgggccgacctggtgcaccccgacgcccaggacatcctggacaccctggaggacaacagagagtggtaccagagcaccatcccccagagccccagccccgcccccgacgaccccgaggagggcagacagggccagaccgagaagttccagttcgagctgaccctggaggaggacggcgagagcgacaccgagaaggacagcggcagccaggtggaggaggacaccagctgcagcgacagcaagaccctgtgcacccaggacagcgagagcaccgagatccccctggacgagcaggtggaggaggaggccgtgggcgaggaggaggagagccagcccgaggcctgcgtgatcgacgacagaagccccgacacctag

SEQ ID NO: 93144 - DNA, 1269 bp, synthetic construct
  misc_feature 1..1269: note = Description of Artificial Sequence: Synthetic coding sequence
  source 1..1269: mol_type = other DNA
atggccagcaacaagttcaagagaatgctgaacagagagctgacccacctgagcgagatgagcagaagcggcaaccaggtgagcgagttcatcagcaacaccttcctggacaagcagcacgaggtggagatccccagccccacccagaaggagaaggagaagaagaagagacccatgagccagatcagcggcgtgaagaagctgatgcacagcagcagcctgaccaacagcagcatccccagattcggcgtgaagaccgagcaggaggacgtgctggccaaggagctggaggacgtgaacaagtggggcctgcacgtgttcagaatcgccgagctgagcggcaacagacccctgaccgtgatcatgcacaccatcttccaggagagagacctgctgaagaccttcaagatccccgtggacaccctgatcacctacctgatgaccctggaggaccactaccacgccgacgtggcctaccacaacaacatccacgccgccgacgtggtgcagagcacccacgtgctgctgagcacccccgccctggaggccgtgttcaccgacctggagatcctggccgccatcttcgccagcgccatccacgacgtggaccaccccggcgtgagcaaccagttcctgatcaacaccaacagcgagctggccctgatgtacaacgacagcagcgtgctggagaaccaccacctggccgtgggcttcaagctgctgcaggaggagaactgcgacatcttccagaacctgaccaagaagcagagacagagcctgagaaagatggtgatcgacatcgtgctggccaccgacatgagcaagcacatgaacctgctggccgacctgaagaccatggtggagaccaagaaggtgaccagcagcggcgtgctgctgctggacaactacagcgacagaatccaggtgctgcagaacatggtgcactgcgccgacctgagcaaccccaccaagcccctgcagctgtacagacagtggaccgacagaatcatggaggagttcttcagacagggcgacagagagagagagagaggcatggagatcagccccatgtgcgacaagcacaacgccagcgtggagaagagccaggtgggcttcatcgactacatcgtgcaccccctgtgggagacctgggccgacctggtgcaccccgacgcccaggacatcctggacaccctggaggacaacagagagtggtaccagagcaccatcccccagagccccagccccgcccccgacgaccccgagtag

SEQ ID NO: 93145 - DNA, 246 bp, synthetic construct
  misc_feature 1..246: note = Description of Artificial Sequence: Synthetic coding sequence
  source 1..246: mol_type = other DNA
atgaagagaaacacctgcgacctgctgagcagaagcaagagcgccagcgaggagaccctgcacagcagcaacgaggaggaggaccccttcagaggcatggagccctacctggtgagaagactgagctgcagaaacatccagctgccccccctggccttcagacagctggagcaggccgacctgaagagcgagagcgagaacatccagagacccaccagcctgcccctgaagatcctgcccctgtag

SEQ ID NO: 93146 - DNA, 2238 bp, synthetic construct
  misc_feature 1..2238: note = Description of Artificial Sequence: Synthetic coding sequence
  source 1..2238: mol_type = other DNA
atggcccagcagaccagccccgacaccctgaccgtgcccgaggtggacaacccccactgccccaacccctggctgaacgaggacctggtgaagagcctgagagagaacctgctgcagcacgagaagagcaagaccgccagaaagagcgtgagccccaagctgagccccgtgatcagccccagaaacagccccagactgctgagaagaatgctgctgagcagcaacatccccaagcagagaagattcaccgtggcccacacctgcttcgacgtggacaacggcaccagcgccggcagaagccccctggaccccatgaccagccccggcagcggcctgatcctgcaggccaacttcgtgcacagccagagaagagagagcttcctgtacagaagcgacagcgactacgacctgagccccaagagcatgagcagaaacagcagcatcgccagcgacatccacggcgacgacctgatcgtgacccccttcgcccaggtgctggccagcctgagaaccgtgagaaacaacttcgccgccctgaccaacctgcaggacagagcccccagcaagagaagccccatgtgcaaccagcccagcatcaacaaggccaccatcaccgaggaggcctaccagaagctggccagcgagaccctggaggagctggactggtgcctggaccagctggagaccctgcagaccagacacagcgtgagcgagatggccagcaacaagttcaagagaatgctgaacagagagctgacccacctgagcgagatgagcagaagcggcaaccaggtgagcgagttcatcagcaacaccttcctggacaagcagcacgaggtggagatccccagccccacccagaaggagaaggagaagaagaagagacccatgagccagatcagcggcgtgaagaagctgatgcacagcagcagcctgaccaacagcagcatccccagattcggcgtgaagaccgagcaggaggacgtgctggccaaggagctggaggacgtgaacaagtggggcctgcacgtgttcagaatcgccgagctgagcggcaacagacccctgaccgtgatcatgcacaccatcttccaggagagagacctgctgaagaccttcaagatccccgtggacaccctgatcacctacctgatgaccctggaggaccactaccacgccgacgtggcctaccacaacaacatccacgccgccgacgtggtgcagagcacccacgtgctgctgagcacccccgccctggaggccgtgttcaccgacctggagatcctggccgccatcttcgccagcgccatccacgacgtggaccaccccggcgtgagcaaccagttcctgatcaacaccaacagcgagctggccctgatgtacaacgacagcagcgtgctggagaaccaccacctggccgtgggcttcaagctgctgcaggaggagaactgcgacatcttccagaacctgaccaagaagcagagacagagcctgagaaagatggtgatcgacatcgtgctggccaccgacatgagcaagcacatgaacctgctggccgacctgaagaccatggtggagaccaagaaggtgaccagcagcggcgtgctgctgctggacaactacagcgacagaatccaggtgctgcagaacatggtgcactgcgccgacctgagcaaccccaccaagcccctgcagctgtacagacagtggaccgacagaatcatggaggagttcttcagacagggcgacagagagagagagagaggcatggagatcagccccatgtgcgacaagcacaacgccagcgtggagaagagccaggtgggcttcatcgactacatcgtgcaccccctgtgggagacctgggccgacctggtgcaccccgacgcccaggacatcctggacaccctggaggacaacagagagtggtaccagagcaccatcccccagagccccagccccgcccccgacgaccccgaggagggcagacagggccagaccgagaagttccagttcgagctgaccctggaggaggacggcgagagcgacaccgagaaggacagcggcagccaggtggaggaggacaccagctgcagcgacagcaagaccctgtgcacccaggacagcgagagcaccgagatccccctggacgagcaggtggaggaggaggccgtgggcgaggaggaggagagccagcccgaggcctgcgtgatcgacgacagaagccccgacacctag

SEQ ID NO: 93147 - DNA, 228 bp, synthetic construct
  misc_feature 1..228: note = Description of Artificial Sequence: Synthetic coding sequence
  source 1..228: mol_type = other DNA
atgaagagaaacacctgcgacctgctgagcagaagcaagagcgccagcgaggagaccctgcacagcagcaacgaggaggaggaccccttcagaggcatggagccctacctggtgagaagactgagctgcagaaacatccagctgccccccctggccttcagacagctggagcaggccgacctgaagagcgagagcgagaacatccagagacccaccagcctgccctag

SEQ ID NO: 93148 - DNA, 2247 bp, synthetic construct; identical to SEQ ID NO: 93141
  misc_feature 1..2247: note = Description of Artificial Sequence: Synthetic coding sequence
  source 1..2247: mol_type = other DNA

SEQ ID NO: 93149 - DNA, 2502 bp, synthetic construct
  misc_feature 1..2502: note = Description of Artificial Sequence: Synthetic coding sequence
  source 1..2502: mol_type = other DNA
atgctgcccttcggcgacaagaccagagagatggtgaacgcctggttcgccgagagagtgcacaccatccccgtgtgcaaggagggcatcagaggccacaccgagagctgcagctgccccctgcagcagagccccagagccgacaacagcgcccccggcacccccaccagaaagatcagcgccagcgagttcgacagacccctgagacccatcgtggtgaaggacagcgagggcaccgtgagcttcctgagcgacagcgagaagaaggagcagatgcccctgaccccccccagattcgaccacgacgagggcgaccagtgcagcagactgctggagctggtgaaggacatcagcagccacctggacgtgaccgccctgtgccacaagatcttcctgcacatccacggcctgatcagcgccgacagatacagcctgttcctggtgtgcgaggacagcagcaacgacaagttcctgatcagcagactgttcgacgtggccgagggcagcaccctggaggaggtgagcaacaactgcatcagactggagtggaacaagggcatcgtgggccacgtggccgccctgggcgagcccctgaacatcaaggacgcctacgaggaccccagattcaacgccgaggtggaccagatcaccggctacaagacccagagcatcctgtgcatgcccatcaagaaccacagagaggaggtggtgggcgtggcccaggccatcaacaagaagagcggcaacggcggcaccttcaccgagaaggacgagaaggacttcgccgcctacctggccttctgcggcatcgtgctgcacaacgcccagctgtacgagaccagcctgctggagaacaagagaaaccaggtgctgctggacctggccagcctgatcttcgaggagcagcagagcctggaggtgatcctgaagaagatcgccgccaccatcatcagcttcatgcaggtgcagaagtgcaccatcttcatcgtggacgaggactgcagcgacagcttcagcagcgtgttccacatggagtgcgaggagctggagaagagcagcgacaccctgaccagagagcacgacgccaacaagatcaactacatgtacgcccagtacgtgaagaacaccatggagcccctgaacatccccgacgtgagcaaggacaagagattcccctggaccaccgagaacaccggcaacgtgaaccagcagtgcatcagaagcctgctgtgcacccccatcaagaacggcaagaagaacaaggtgatcggcgtgtgccagctggtgaacaagatggaggagaacaccggcaaggtgaagcccttcaacagaaacgacgagcagttcctggaggccttcgtgatcttctgcggcctgggcatccagaacacccagatgtacgaggccgtggagagagccatggccaagcagatggtgaccctggaggtgctgagctaccacgccagcgccgccgaggaggagaccagagagctgcagagcctggccgccgccgtggtgcccagcgcccagaccctgaagatcaccgacttcagcttcagcgacttcgagctgagcgacctggagaccgccctgtgcaccatcagaatgttcaccgacctgaacctggtgcagaacttccagatgaagcacgaggtgctgtgcagatggatcctgagcgtgaagaagaactacagaaagaacgtggcctaccacaactggagacacgccttcaacaccgcccagtgcatgttcgccgccctgaaggccggcaagatccagaacaagctgaccgacctggagatcctggccctgctgatcgccgccctgagccacgacctggaccacagaggcgtgaacaacagctacatccagagaagcgagcaccccctggcccagctgtactgccacagcatcatggagcaccaccacttcgaccagtgcctgatgatcctgaacagccccggcaaccagatcctgagcggcctgagcatcgaggagtacaagaccaccctgaagatcatcaagcaggccatcctggccaccgacctggccctgtacatcaagagaagaggcgagttcttcgagctgatcagaaagaaccagttcaacctggaggacccccaccagaaggagctgttcctggccatgctgatgaccgcctgcgacctgagcgccatcaccaagccctggcccatccagcagagaatcgccgagctggtggccaccgagttcttcgaccagggcgacagagagagaaaggagctgaacatcgagcccaccgacctgatgaacagagagaagaagaacaagatccccagcatgcaggtgggcttcatcgacgccatctgcctgcagctgtacgaggccctgacccacgtgagcgaggactgcttccccctgctggacggctgcagaaagaacagacagaagtggcaggccctggccgagcagcaggagaagatgctgatcaacggcgagagcggccaggccaagagaaactag

SEQ ID NO: 93150 - DNA, 2628 bp, synthetic construct
  misc_feature 1..2628: note = Description of Artificial Sequence: Synthetic coding sequence
  source 1..2628: mol_type = other DNA
atggagagagccggccccagcttcggccagcagagacagcagcagcagccccagcagcagaagcagcagcagagagaccaggacagcgtggaggcctggctggacgaccactgggacttcaccttcagctacttcgtgagaaaggccaccagagagatggtgaacgcctggttcgccgagagagtgcacaccatccccgtgtgcaaggagggcatcagaggccacaccgagagctgcagctgccccctgcagcagagccccagagccgacaacagcgcccccggcacccccaccagaaagatcagcgccagcgagttcgacagacccctgagacccatcgtggtgaaggacagcgagggcaccgtgagcttcctgagcgacagcgagaagaaggagcagatgcccctgaccccccccagattcgaccacgacgagggcgaccagtgcagcagactgctggagctggtgaaggacatcagcagccacctggacgtgaccgccctgtgccacaagatcttcctgcacatccacggcctgatcagcgccgacagatacagcctgttcctggtgtgcgaggacagcagcaacgacaagttcctgatcagcagactgttcgacgtggccgagggcagcaccctggaggaggtgagcaacaactgcatcagactggagtggaacaagggcatcgtgggccacgtggccgccctgggcgagcccctgaacatcaaggacgcctacgaggaccccagattcaacgccgaggtggaccagatcaccggctacaagacccagagcatcctgtgcatgcccatcaagaaccacagagaggaggtggtgggcgtggcccaggccatcaacaagaagagcggcaacggcggcaccttcaccgagaaggacgagaaggacttcgccgcctacctggccttctgcggcatcgtgctgcacaacgcccagctgtacgagaccagcctgctggagaacaagagaaaccaggtgctgctggacctggccagcctgatcttcgaggagcagcagagcctggaggtgatcctgaagaagatcgccgccaccatcatcagcttcatgcaggtgcagaagtgcaccatcttcatcgtggacgaggactgcagcgacagcttcagcagcgtgttccacatggagtgcgaggagctggagaagagcagcgacaccctgaccagagagcacgacgccaacaagatcaactacatgtacgcccagtacgtgaagaacaccatggagcccctgaacatccccgacgtgagcaaggacaagagattcccctggaccaccgagaacaccggcaacgtgaaccagcagtgcatcagaagcctgctgtgcacccccatcaagaacggcaagaagaacaaggtgatcggcgtgtgccagctggtgaacaagatggaggagaacaccggcaaggtgaagcccttcaacagaaacgacgagcagttcctggaggccttcgtgatcttctgcggcctgggcatccagaacacccagatgtacgaggccgtggagagagccatggccaagcagatggtgaccctggaggtgctgagctaccacgccagcgccgccgaggaggagaccagagagctgcagagcctggccgccgccgtggtgcccagcgcccagaccctgaagatcaccgacttcagcttcagcgacttcgagctgagcgacctggagaccgccctgtgcaccatcagaatgttcaccgacctgaacctggtgcagaacttccagatgaagcacgaggtgctgtgcagatggatcctgagcgtgaagaagaactacagaaagaacgtggcctaccacaactggagacacgccttcaacaccgcccagtgcatgttcgccgccctgaaggccggcaagatccagaacaagctgaccgacctggagatcctggccctgctgatcgccgccctgagccacgacctggaccacagaggcgtgaacaacagctacatccagagaagcgagcaccccctggcccagctgtactgccacagcatcatggagcaccaccacttcgaccagtgcctgatgatcctgaacagccccggcaaccagatcctgagcggcctgagcatcgaggagtacaagaccaccctgaagatcatcaagcaggccatcctggccaccgacctggccctgtacatcaagagaagaggcgagttcttcgagctgatcagaaagaaccagttcaacctggaggacccccaccagaaggagctgttcctggccatgctgatgaccgcctgcgacctgagcgccatcaccaagccctggcccatccagcagagaatcgccgagctggtggccaccgagttcttcgaccagggcgacagagagagaaaggagctgaacatcgagcccaccgacctgatgaacagagagaagaagaacaagatccccagcatgcaggtgggcttcatcgacgccatctgcctgcagctgtacgaggccctgacccacgtgagcgaggactgcttccccctgctggacggctgcagaaagaacagacagaagtggcaggccctggccgagcagcaggagaagatgctgatcaacggcgagagcggccaggccaagagaaactag

SEQ ID NO: 93151 - DNA, 2472 bp, synthetic construct
  misc_feature 1..2472: note = Description of Artificial Sequence: Synthetic coding sequence
  source 1..2472: mol_type = other DNA
atggtgaacgcctggttcgccgagagagtgcacaccatccccgtgtgcaaggagggcatcagaggccacaccgagagctgcagctgccccctgcagcagagccccagagccgacaacagcgcccccggcacccccaccagaaagatcagcgccagcgagttcgacagacccctgagacccatcgtggtgaaggacagcgagggcaccgtgagcttcctgagcgacagcgagaagaaggagcagatgcccctgaccccccccagattcgaccacgacgagggcgaccagtgcagcagactgctggagctggtgaaggacatcagcagccacctggacgtgaccgccctgtgccacaagatcttcctgcacatccacggcctgatcagcgccgacagatacagcctgttcctggtgtgcgaggacagcagcaacgacaagttcctgatcagcagactgttcgacgtggccgagggcagcaccctggaggaggtgagcaacaactgcatcagactggagtggaacaagggcatcgtgggccacgtggccgccctgggcgagcccctgaacatcaaggacgcctacgaggaccccagattcaacgccgaggtggaccagatcaccggctacaagacccagagcatcctgtgcatgcccatcaagaaccacagagaggaggtggtgggcgtggcccaggccatcaacaagaagagcggcaacggcggcaccttcaccgagaaggacgagaaggacttcgccgcctacctggccttctgcggcatcgtgctgcacaacgcccagctgtacgagaccagcctgctggagaacaagagaaaccaggtgctgctggacctggccagcctgatcttcgaggagcagcagagcctggaggtgatcctgaagaagatcgccgccaccatcatcagcttcatgcaggtgcagaagtgcaccatcttcatcgtggacgaggactgcagcgacagcttcagcagcgtgttccacatggagtgcgaggagctggagaagagcagcgacaccctgaccagagagcacgacgccaacaagatcaactacatgtacgcccagtacgtgaagaacaccatggagcccctgaacatccccgacgtgagcaaggacaagagattcccctggaccaccgagaacaccggcaacgtgaaccagcagtgcatcagaagcctgctgtgcacccccatcaagaacggcaagaagaacaaggtgatcggcgtgtgccagctggtgaacaagatggaggagaacaccggcaaggtgaagcccttcaacagaaacgacgagcagttcctggaggccttcgtgatcttctgcggcctgggcatccagaacacccagatgtacgaggccgtggagagagccatggccaagcagatggtgaccctggaggtgctgagctaccacgccagcgccgccgaggaggagaccagagagctgcagagcctggccgccgccgtggtgcccagcgcccagaccctgaagatcaccgacttcagcttcagcgacttcgagctgagcgacctggagaccgccctgtgcaccatcagaatgttcaccgacctgaacctggtgcagaacttccagatgaagcacgaggtgctgtgcagatggatcctgagcgtgaagaagaactacagaaagaacgtggcctaccacaactggagacacgccttcaacaccgcccagtgcatgttcgccgccctgaaggccggcaagatccagaacaagctgaccgacctggagatcctggccctgctgatcgccgccctgagccacgacctggaccacagaggcgtgaacaacagctacatccagagaagcgagcaccccctggcccagctgtactgccacagcatcatggagcaccaccacttcgaccagtgcctgatgatcctgaacagccccggcaaccagatcctgagcggcctgagcatcgaggagtacaagaccaccctgaagatcatcaagcaggccatcctggccaccgacctggccctgtacatcaagagaagaggcgagttcttcgagctgatcagaaagaaccagttcaacctggaggacccccaccagaaggagctgttcctggccatgctgatgaccgcctgcgacctgagcgccatcaccaagccctggcccatccagcagagaatcgccgagctggtggccaccgagttcttcgaccagggcgacagagagagaaaggagctgaacatcgagcccaccgacctgatgaacagagagaagaagaacaagatccccagcatgcaggtgggcttcatcgacgccatctgcctgcagctgtacgaggccctgacccacgtgagcgaggactgcttccccctgctggacggctgcagaaagaacagacagaagtggcaggccctggccgagcagcaggagaagatgctgatcaacggcgagagcggccaggccaagagaaactag

SEQ ID NO: 93152 - DNA, 2583 bp, synthetic construct
  misc_feature 1..2583: note = Description of Artificial Sequence: Synthetic coding sequence
  source 1..2583: mol_type = other DNA
atgggcgaggtgaccgccgaggaggtggagaagttcctggacagcaacatcggcttcgccaagcagtactacaacctgcactacagagccaagctgatcagcgacctgctgggcgccaaggaggccgccgtggacttcagcaactaccacagccccagcagcatggaggagagcgagatcatcttcgacctgctgagagacttccaggagaacctgcagaccgagaagtgcatcttcaacgtgatgaagaagctgtgcttcctgctgcaggccgacagaatgagcctgttcatgtacagaaccagaaacggcatcgccgagctggccaccagactgttcaacgtgcacaaggacgccgtgctggaggactgcctggtgatgcccgaccaggagatcgtgttccccctggacatgggcatcgtgggccacgtggcccacagcaagaagatcgccaacgtgcccaacaccgaggaggacgagcacttctgcgacttcgtggacatcctgaccgagtacaagaccaagaacatcctggccagccccatcatgaacggcaaggacgtggtggccatcatcatggccgtgaacaaggtggacggcagccacttcaccaagagagacgaggagatcctgctgaagtacctgaacttcgccaacctgatcatgaaggtgtaccacctgagctacctgcacaactgcgagaccagaagaggccagatcctgctgtggagcggcagcaaggtgttcgaggagctgaccgacatcgagagacagttccacaaggccctgtacaccgtgagagccttcctgaactgcgacagatacagcgtgggcctgctggacatgaccaagcagaaggagttcttcgacgtgtggcccgtgctgatgggcgaggtgcccccctacagcggccccagaacccccgacggcagagagatcaacttctacaaggtgatcgactacatcctgcacggcaaggaggacatcaaggtgatccccaaccccccccccgaccactgggccctggtgagcggcctgcccgcctacgtggcccagaacggcctgatctgcaacatcatgaacgcccccgccgaggacttcttcgccttccagaaggagcccctggacgagagcggctggatgatcaagaacgtgctgagcatgcccatcgtgaacaagaaggaggagatcgtgggcgtggccaccttctacaacagaaaggacggcaagcccttcgacgagatggacgagaccctgatggagagcctgacccagttcctgggctggagcgtgctgaaccccgacacctacgagagcatgaacaagctggagaacagaaaggacatcttccaggacatcgtgaagtaccacgtgaagtgcgacaacgaggagatccagaagatcctgaagaccagagaggtgtacggcaaggagccctgggagtgcgaggaggaggagctggccgagatcctgcaggccgagctgcccgacgccgacaagtacgagatcaacaagttccacttcagcgacctgcccctgaccgagctggagctggtgaagtgcggcatccagatgtactacgagctgaaggtggtggacaagttccacatcccccaggaggccctggtgagattcatgtacagcctgagcaagggctacagaaagatcacctaccacaactggagacacggcttcaacgtgggccagaccatgttcagcctgctggtgaccggcaagctgaagagatacttcaccgacctggaggccctggccatggtgaccgccgccttctgccacgacatcgaccacagaggcaccaacaacctgtaccagatgaagagccagaaccccctggccaagctgcacggcagcagcatcctggagagacaccacctggagttcggcaagaccctgctgagagacgagagcctgaacatcttccagaacctgaacagaagacagcacgagcacgccatccacatgatggacatcgccatcatcgccaccgacctggccctgtacttcaagaagagaaccatgttccagaagatcgtggaccagagcaagacctacgagagcgagcaggagtggacccagtacatgatgctggagcagaccagaaaggagatcgtgatggccatgatgatgaccgcctgcgacctgagcgccatcaccaagccctgggaggtgcagagccaggtggccctgctggtggccgccgagttctgggagcagggcgacctggagagaaccgtgctgcagcagaaccccatccccatgatggacagaaacaaggccgacgagctgcccaagctgcaggtgggcttcatcgacttcgtgtgcaccttcgtgtacaaggagttcagcagattccacgaggagatcacccccatgctggacggcatcaccaacaacagaaaggagtggaaggccctggccgacgagtacgacgccaagatgaaggtgcaggaggagaagaagcagaagcagcagagcgccaagagcgccgccgccggcaaccagcccggcggcaaccccagccccggcggcgccaccaccagcaagagctgctgcatccagtag

SEQ ID NO: 93153 - DNA, 1728 bp, synthetic construct
  misc_feature 1..1728: note = Description of Artificial Sequence: Synthetic coding sequence
  source 1..1728: mol_type = other DNA
atgaccaaggagaaggagttcttcgacgtgtggagcgtgctgatgggcgagagccagccctacagcggccccagaacccccgacggcagagagatcgtgttctacaaggtgatcgactacgtgctgcacggcaaggaggagatcaaggtgatccccacccccagcgccgaccactgggccctggccagcggcctgcccagctacgtggccgagagcggcttcatctgcaacatcatgaacgccagcgccgacgagatgttcaagttccaggagggcgccctggacgacagcggctggctgatcaagaacgtgctgagcatgcccatcgtgaacaagaaggaggagatcgtgggcgtggccaccttctacaacagaaaggacggcaagcccttcgacgagcaggacgaggtgctgatggagagcctgacccagttcctgggctggagcgtgatgaacaccgacacctacgacaagatgaacaagctggagaacagaaaggacatcgcccaggacatggtgctgtaccacgtgaagtgcgacagagacgagatccagctgatcctgcccaccagagccagactgggcaaggagcccgccgactgcgacgaggacgagctgggcgagatcctgaaggaggagctgcccggccccaccaccttcgacatctacgagttccacttcagcgacctggagtgcaccgagctggacctggtgaagtgcggcatccagatgtactacgagctgggcgtggtgagaaagttccagatcccccaggaggtgctggtgagattcctgttcagcatcagcaagggctacagaagaatcacctaccacaactggagacacggcttcaacgtggcccagaccatgttcaccctgctgatgaccggcaagctgaagagctactacaccgacctggaggccttcgccatggtgaccgccggcctgtgccacgacatcgaccacagaggcaccaacaacctgtaccagatgaagagccagaaccccctggccaagctgcacggcagcagcatcctggagagacaccacctggagttcggcaagttcctgctgagcgaggagaccctgaacatctaccagaacctgaacagaagacagcacgagcacgtgatccacctgatggacatcgccatcatcgccaccgacctggccctgtacttcaagaagagagccatgttccagaagatcgtggacgagagcaagaactaccaggacaagaagagctgggtggagtacctgagcctggagaccaccagaaaggagatcgtgatggccatgatgatgaccgcctgcgacctgagcgccatcaccaagccctgggaggtgcagagcaaggtggccctgctggtggccgccgagttctgggagcagggcgacctggagagaaccgtgctggaccagcagcccatccccatgatggacagaaacaaggccgccgagctgcccaagctgcaggtgggcttcatcgacttcgtgtgcaccttcgtgtacaaggagttcagcagattccacgaggagatcctgcccatgttcgacagactgcagaacaacagaaaggagtggaaggccctggccgacgagtacgaggccaaggtgaaggccctggaggagaaggaggaggaggagagagtggccgccaagaaggtgggcaccgagatctgcaacggcggccccgcccccaagagcagcacctgctgcatcctgtag

SEQ ID NO: 93154 - DNA, 2562 bp, synthetic construct
  misc_feature 1..2562: note = Description of Artificial Sequence: Synthetic coding sequence
  source 1..2562: mol_type = other DNA
atgagcctgagcgaggagcaggccagaagcttcctggaccagaaccccgacttcgccagacagtacttcggcaagaagctgagccccgagaacgtggccgccgcctgcgaggacggctgcccccccgactgcgacagcctgagagacctgtgccaggtggaggagagcaccgccctgctggagctggtgcaggacatgcaggagagcatcaacatggagagagtggtgttcaaggtgctgagaagactgtgcaccctgctgcaggccgacagatgcagcctgttcatgtacagacagagaaacggcgtggccgagctggccaccagactgttcagcgtgcagcccgacagcgtgctggaggactgcctggtgccccccgacagcgagatcgtgttccccctggacatcggcgtggtgggccacgtggcccagaccaagaagatggtgaacgtggaggacgtggccgagtgcccccacttcagcagcttcgccgacgagctgaccgactacaagaccaagaacatgctggccacccccatcatgaacggcaaggacgtggtggccgtgatcatggccgtgaacaagctgaacggccccttcttcaccagcgaggacgaggacgtgttcctgaagtacctgaacttcgccaccctgtacctgaagatctaccacctgagctacctgcacaactgcgagaccagaagaggccaggtgctgctgtggagcgccaacaaggtgttcgaggagctgaccgacatcgagagacagttccacaaggccttctacaccgtgagagcctacctgaactgcgagagatacagcgtgggcctgctggacatgaccaaggagaaggagttcttcgacgtgtggagcgtgctgatgggcgagagccagccctacagcggccccagaacccccgacggcagagagatcgtgttctacaaggtgatcgactacgtgctgcacggcaaggaggagatcaaggtgatccccacccccagcgccgaccactgggccctggccagcggcctgcccagctacgtggccgagagcggcttcatctgcaacatcatgaacgccagcgccgacgagatgttcaagttccaggagggcgccctggacgacagcggctggctgatcaagaacgtgctgagcatgcccatcgtgaacaagaaggaggagatcgtgggcgtggccaccttctacaacagaaaggacggcaagcccttcgacgagcaggacgaggtgctgatggagagcctgacccagttcctgggctggagcgtgatgaacaccgacacctacgacaagatgaacaagctggagaacagaaaggacatcgcccaggacatggtgctgtaccacgtgaagtgcgacagagacgagatccagctgatcctgcccaccagagccagactgggcaaggagcccgccgactgcgacgaggacgagctgggcgagatcctgaaggaggagctgcccggccccaccaccttcgacatctacgagttccacttcagcgacctggagtgcaccgagctggacctggtgaagtgcggcatccagatgtactacgagctgggcgtggtgagaaagttccagatcccccaggaggtgctggtgagattcctgttcagcatcagcaagggctacagaagaatcacctaccacaactggagacacggcttcaacgtggcccagaccatgttcaccctgctgatgaccggcaagctgaagagctactacaccgacctggaggccttcgccatggtgaccgccggcctgtgccacgacatcgaccacagaggcaccaacaacctgtaccagatgaagagccagaaccccctggccaagctgcacggcagcagcatcctggagagacaccacctggagttcggcaagttcctgctgagcgaggagaccctgaacatctaccagaacctgaacagaagacagcacgagcacgtgatccacctgatggacatcgccatcatcgccaccgacctggccctgtacttcaagaagagagccatgttccagaagatcgtggacgagagcaagaactaccaggacaagaagagctgggtggagtacctgagcctggagaccaccagaaaggagatcgtgatggccatgatgatgaccgcctgcgacctgagcgccatcaccaagccctgggaggtgcagagcaaggtggccctgctggtggccgccgagttctgggagcagggcgacctggagagaaccgtgctggaccagcagcccatccccatgatggacagaaacaaggccgccgagctgcccaagctgcaggtgggcttcatcgacttcgtgtgcaccttcgtgtacaaggagttcagcagattccacgaggagatcctgcccatgttcgacagactgcagaacaacagaaaggagtggaaggccctggccgacgagtacgaggccaaggtgaaggccctggaggagaaggaggaggaggagagagtggccgccaagaagggcaccgagatctgcaacggcggccccgcccccaagagcagcacctgctgcatcctgtag

SEQ ID NO: 93155 - DNA, 2565 bp, synthetic construct
  misc_feature 1..2565: note = Description of Artificial Sequence: Synthetic coding sequence
  source 1..2565: mol_type = other DNA
atgagcctgagcgaggagcaggccagaagcttcctggaccagaaccccgacttcgccagacagtacttcggcaagaagctgagccccgagaacgtggccgccgcctgcgaggacggctgcccccccgactgcgacagcctgagagacctgtgccaggtggaggagagcaccgccctgctggagctggtgcaggacatgcaggagagcatcaacatggagagagtggtgttcaaggtgctgagaagactgtgcaccctgctgcaggccgacagatgcagcctgttcatgtacagacagagaaacggcgtggccgagctggccaccagactgttcagcgtgcagcccgacagcgtgctggaggactgcctggtgccccccgacagcgagatcgtgttccccctggacatcggcgtggtgggccacgtggcccagaccaagaagatggtgaacgtggaggacgtggccgagtgcccccacttcagcagcttcgccgacgagctgaccgactacaagaccaagaacatgctggccacccccatcatgaacggcaaggacgtggtggccgtgatcatggccgtgaacaagctgaacggccccttcttcaccagcgaggacgaggacgtgttcctgaagtacctgaacttcgccaccctgtacctgaagatctaccacctgagctacctgcacaactgcgagaccagaagaggccaggtgctgctgtggagcgccaacaaggtgttcgaggagctgaccgacatcgagagacagttccacaaggccttctacaccgtgagagcctacctgaactgcgagagatacagcgtgggcctgctggacatgaccaaggagaaggagttcttcgacgtgtggagcgtgctgatgggcgagagccagccctacagcggccccagaacccccgacggcagagagatcgtgttctacaaggtgatcgactacgtgctgcacggcaaggaggagatcaaggtgatccccacccccagcgccgaccactgggccctggccagcggcctgcccagctacgtggccgagagcggcttcatctgcaacatcatgaacgccagcgccgacgagatgttcaagttccaggagggcgccctggacgacagcggctggctgatcaagaacgtgctgagcatgcccatcgtgaacaagaaggaggagatcgtgggcgtggccaccttctacaacagaaaggacggcaagcccttcgacgagcaggacgaggtgctgatggagagcctgacccagttcctgggctggagcgtgatgaacaccgacacctacgacaagatgaacaagctggagaacagaaaggacatcgcccaggacatggtgctgtaccacgtgaagtgcgacagagacgagatccagctgatcctgcccaccagagccagactgggcaaggagcccgccgactgcgacgaggacgagctgggcgagatcctgaaggaggagctgcccggccccaccaccttcgacatctacgagttccacttcagcgacctggagtgcaccgagctggacctggtgaagtgcggcatccagatgtactacgagctgggcgtggtgagaaagttccagatcccccaggaggtgctggtgagattcctgttcagcatcagcaagggctacagaagaatcacctaccacaactggagacacggcttcaacgtggcccagaccatgttcaccctgctgatgaccggcaagctgaagagctactacaccgacctggaggccttcgccatggtgaccgccggcctgtgccacgacatcgaccacagaggcaccaacaacctgtaccagatgaagagccagaaccccctggccaagctgcacggcagcagcatcctggagagacaccacctggagttcggcaagttcctgctgagcgaggagaccctgaacatctaccagaacctgaacagaagacagcacgagcacgtgatccacctgatggacatcgccatcatcgccaccgacctggccctgtacttcaagaagagagccatgttccagaagatcgtggacgagagcaagaactaccaggacaagaagagctgggtggagtacctgagcctggagaccaccagaaaggagatcgtgatggccatgatgatgaccgcctgcgacctgagcgccatcaccaagccctgggaggtgcagagcaaggtggccctgctggtggccgccgagttctgggagcagggcgacctggagagaaccgtgctggaccagcagcccatccccatgatggacagaaacaaggccgccgagctgcccaagctgcaggtgggcttcatcgacttcgtgtgcaccttcgtgtacaaggagttcagcagattccacgaggagatcctgcccatgttcgacagactgcagaacaacagaaaggagtggaaggccctggccgacgagtacgaggccaaggtgaaggccctggaggagaaggaggaggaggagagagtggccgccaagaaggtgggcaccgagatctgcaacggcggccccgcccccaagagcagcacctgctgcatcctgtag

SEQ ID NO: 93156 - DNA, 2577 bp, synthetic construct
  misc_feature 1..2577: note = Description of Artificial Sequence: Synthetic coding sequence
  source 1..2577: mol_type = other DNA
atgggcgagatcaaccaggtggccgtggagaagtacctggaggagaacccccagttcgccaaggagtacttcgacagaaagctgagagtggaggtgctgggcgagatcttcaagaacagccaggtgcccgtgcagagcagcatgagcttcagcgagctgacccaggtggaggagagcgccctgtgcctggagctgctgtggaccgtgcaggaggagggcggcacccccgagcagggcgtgcacagagccctgcagagactggcccacctgctgcaggccgacagatgcagcatgttcctgtgcagaagcagaaacggcatccccgaggtggccagcagactgctggacgtgacccccaccagcaagttcgaggacaacctggtgggccccgacaaggaggtggtgttccccctggacatcggcatcgtgggctgggccgcccacaccaagaagacccacaacgtgcccgacgtgaagaagaacagccacttcagcgacttcatggacaagcagaccggctacgtgaccaagaacctgctggccacccccatcgtggtgggcaaggaggtgctggccgtgatcatggccgtgaacaaggtgaacgccagcgagttcagcaagcaggacgaggaggtgttcagcaagtacctgaacttcgtgagcatcatcctgagactgcaccacaccagctacatgtacaacatcgagagcagaagaagccagatcctgatgtggagcgccaacaaggtgttcgaggagctgaccgacgtggagagacagttccacaaggccctgtacaccgtgagaagctacctgaactgcgagagatacagcatcggcctgctggacatgaccaaggagaaggagttctacgacgagtggcccatcaagctgggcgaggtggagccctacaagggccccaagacccccgacggcagagaggtgaacttctacaagatcatcgactacatcctgcacggcaaggaggagatcaaggtgatccccaccccccccgccgaccactggaccctgatcagcggcctgcccacctacgtggccgagaacggcttcatctgcaacatgatgaacgcccccgccgacgagtacttcaccttccagaagggccccgtggacgagaccggctgggtgatcaagaacgtgctgagcctgcccatcgtgaacaagaaggaggacatcgtgggcgtggccaccttctacaacagaaaggacggcaagcccttcgacgagcacgacgagtacatcaccgagaccctgacccagttcctgggctggagcctgctgaacaccgacacctacgacaagatgaacaagctggagaacagaaaggacatcgcccaggagatgctgatgaaccagaccaaggccacccccgaggagatcaagagcatcctgaagttccaggagaagctgaacgtggacgtgatcgacgactgcgaggagaagcagctggtggccatcctgaaggaggacctgcccgaccccagaagcgccgagctgtacgagttcagattcagcgacttccccctgaccgagcacggcctgatcaagtgcggcatcagactgttcttcgagatcaacgtggtggagaagttcaaggtgcccgtggaggtgctgaccagatggatgtacaccgtgagaaagggctacagagccgtgacctaccacaactggagacacggcttcaacgtgggccagaccatgttcaccctgctgatgaccggcagactgaagaagtactacaccgacctggaggccttcgccatgctggccgccgccttctgccacgacatcgaccacagaggcaccaacaacctgtaccagatgaagagcaccagccccctggccagactgcacggcagcagcatcctggagagacaccacctggagtacagcaagaccctgctgcaggacgagagcctgaacatcttccagaacctgaacaagagacagttcgagaccgtgatccacctgttcgaggtggccatcatcgccaccgacctggccctgtacttcaagaagagaaccatgttccagaagatcgtggacgcctgcgagcagatgcagaccgaggaggaggccatcaagtacgtgaccgtggaccccaccaagaaggagatcatcatggccatgatgatgaccgcctgcgacctgagcgccatcaccaagccctgggaggtgcagagccaggtggccctgatggtggccaacgagttctgggagcagggcgacctggagagaaccgtgctgcagcagcagcccatccccatgatggacagaaacaagagagacgagctgcccaagctgcaggtgggcttcatcgacttcgtgtgcaccttcgtgtacaaggagttcagcagattccacaaggagatcacccccatgctgagcggcctgcagaacaacagagtggagtggaagagcctggccgacgagtacgacgccaagatgaaggtgatcgaggaggaggccaagaagcaggagggcggcgccgagaaggccgccgaggacagcggcggcggcgacgacaagaagagcaagacctgcctgatgctgtag

SEQ ID NO: 93157 - DNA, 453 bp, synthetic construct
  misc_feature 1..453: note = Description of Artificial Sequence: Synthetic coding sequence
  source 1..453: mol_type = other DNA
atgagcgccaaggacgagagagccagagagatcctgagaggcttcaagctgaactggatgaacctgagagacgccgagaccggcaagatcctgtggcagggcaccgaggacctgagcgtgcccggcgtggagcacgaggccagagtgcccaagaagatcctgaagtgcaaggccgtgagcagagagctgaacttcagcagcaccgagcagatggagaagttcagactggagcagaaggtgtacttcaagggccagtgcctggaggagtggttcttcgagttcggcttcgtgatccccaacagcaccaacacctggcagagcctgatcgaggccgcccccgagagccagatgatgcccgccagcgtgctgaccggcaacgtgatcatcgagaccaagttcttcgacgacgacctgctggtgagcaccagcagagtgagactgttctacgtgtag

SEQ ID NO: 93158 - DNA, 414 bp, synthetic construct
  misc_feature 1..414: note = Description of Artificial Sequence: Synthetic coding sequence
  source 1..414: mol_type = other DNA
atgaagcagagagacaagggcagaggctggcaccccgccgagggcggccccgccctgaccgcccagccccccgagaccagacccgccctggacagaagcagaagagagagcagaagccagggctgcagaggcgtgagcgtgagcctgaccatgaacctggagccccccaaggccgagttcagaagcgccaccagagtggccggcggccccgtgacccccagaaagggcccccccaagttcaagcagagacagaccagacagttcaagagcaagccccccaagaagggcgtgcagggcttcggcgacgacatccccggcatggagggcctgggcaccgacatcaccgtgatctgcccctgggaggccttcaaccacctggagctgcacgagctggcccagtacggcatcatctag

SEQ ID NO: 93159 - DNA, 264 bp, synthetic construct
  misc_feature 1..264: note = Description of Artificial Sequence: Synthetic coding sequence
  source 1..264: mol_type = other DNA
atgaacctggagccccccaaggccgagttcagaagcgccaccagagtggccggcggccccgtgacccccagaaagggcccccccaagttcaagcagagacagaccagacagttcaagagcaagccccccaagaagggcgtgcagggcttcggcgacgacatccccggcatggagggcctgggcaccgacatcaccgtgatctgcccctgggaggccttcaaccacctggagctgcacgagctggcccagtacggcatcatctag

SEQ ID NO: 93160 - DNA, 252 bp, synthetic construct
  misc_feature 1..252: note = Description of Artificial Sequence: Synthetic coding sequence
  source 1..252: mol_type = other DNA
atgagcgacaacaccaccctgcccgcccccgccagcaaccagggccccaccacccccagaaagggcccccccaagttcaagcagagacagaccagacagttcaagagcaagccccccaagaagggcgtgaagggcttcggcgacgacatccccggcatggagggcctgggcaccgacatcaccgtgatctgcccctgggaggccttcagccacctggagctgcacgagctggcccagttcggcatcatctag

SEQ ID NO: 93161 - DNA, 1371 bp, synthetic construct
  misc_feature 1..1371: note = Description of Artificial Sequence: Synthetic coding sequence
  source 1..1371: mol_type = other DNA
atgggcatcaccctgatctggtgcctggccctggtgctgatcaagtggatcaccagcaagagaagaggcgccatcagctacgacagcagcgaccagaccgccctgtacatcagaatgctgggcgacgtgagagtgagaagcagagccggcttcgagagcgagagaagaggcagccacccctacatcgacttcagaatcttccacagccagagcgagatcgaggtgagcgtgagcgccagaaacatcagaagactgctgagcttccagagatacctgagaagcagcagattcttcagaggcaccgccgtgagcaacagcctgaacatcctggacgacgactacaacggccaggccaagtgcatgctggagaaggtgggcaactggaacttcgacatcttcctgttcgacagactgaccaacggcaacagcctggtgagcctgaccttccacctgttcagcctgcacggcctgatcgagtacttccacctggacatgatgaagctgagaagattcctggtgatgatccaggaggactaccacagccagaacccctaccacaacgccgtgcacgccgccgacgtgacccaggccatgcactgctacctgaaggagcccaagctggccaacagcgtgaccccctgggacatcctgctgagcctgatcgccgccgccacccacgacctggaccaccccggcgtgaaccagcccttcctgatcaagaccaaccactacctggccaccctgtacaagaacaccagcgtgctggagaaccaccactggagaagcgccgtgggcctgctgagagagagcggcctgttcagccacctgcccctggagagcagacagcagatggagacccagatcggcgccctgatcctggccaccgacatcagcagacagaacgagtacctgagcctgttcagaagccacctggacagaggcgacctgtgcctggaggacaccagacacagacacctggtgctgcagatggccctgaagtgcgccgacatctgcaacccctgcagaacctgggagctgagcaagcagtggagcgagaaggtgaccgaggagttcttccaccagggcgacatcgagaagaagtaccacctgggcgtgagccccctgtgcgacagacacaccgagagcatcgccaacatccagatcggcttcatgacctacctggtggagcccctgttcaccgagtgggccagattcagcaacaccagactgagccagaccatgctgggccacgtgggcctgaacaaggccagctggaagggcctgcagagagagcagagcagcagcgaggacaccgacgccgccttcgagctgaacagccagctgctgccccaggagaacagactgagctag

SEQ ID NO: 93162 - DNA, 1275 bp, synthetic construct
  misc_feature 1..1275: note = Description of Artificial Sequence: Synthetic coding sequence
  source 1..1275: mol_type = other DNA
atggaggtgtgctaccagctgcccgtgctgcccctggacagacccgtgccccagcacgtgctgagcagaagaggcgccatcagcttcagcagcagcagcgccctgttcggctgccccaaccccagacagctgagccagagaagaggcgccatcagctacgacagcagcgaccagaccgccctgtacatcagaatgctgggcgacgtgagagtgagaagcagagccggcttcgagagcgagagaagaggcagccacccctacatcgacttcagaatcttccacagccagagcgagatcgaggtgagcgtgagcgccagaaacatcagaagactgctgagcttccagagatacctgagaagcagcagattcttcagaggcaccgccgtgagcaacagcctgaacatcctggacgacgactacaacggccaggccaagtgcatgctggagaaggtgggcaactggaacttcgacatcttcctgttcgacagactgaccaacggcaacagcctggtgagcctgaccttccacctgttcagcctgcacggcctgatcgagtacttccacctggacatgatgaagctgagaagattcctggtgatgatccaggaggactaccacagccagaacccctaccacaacgccgtgcacgccgccgacgtgacccaggccatgcactgctacctgaaggagcccaagctggccaacagcgtgaccccctgggacatcctgctgagcctgatcgccgccgccacccacgacctggaccaccccggcgtgaaccagcccttcctgatcaagaccaaccactacctggccaccctgtacaagaacaccagcgtgctggagaaccaccactggagaagcgccgtgggcctgctgagagagagcggcctgttcagccacctgcccctggagagcagacagcagatggagacccagatcggcgccctgatcctggccaccgacatcagcagacagaacgagtacctgagcctgttcagaagccacctggacagaggcgacctgtgcctggaggacaccagacacagacacctggtgctgcagatggccctgaagtgcgccgacatctgcaacccctgcagaacctgggagctgagcaagcagtggagcgagaaggtgaccgaggagttcttccaccagggcgacatcgagaagaagtaccacctgggcgtgagccccctgtgcgacagacacaccgagagcatcgccaacatccagatcggcaactacacctacctggacatcgccggctag

SEQ ID NO: 93163 - DNA, 1449 bp, synthetic construct
  misc_feature 1..1449: note = Description of Artificial Sequence: Synthetic coding sequence
  source 1..1449: mol_type = other DNA
atggaggtgtgctaccagctgcccgtgctgcccctggacagacccgtgccccagcacgtgctgagcagaagaggcgccatcagcttcagcagcagcagcgccctgttcggctgccccaaccccagacagctgagccagagaagaggcgccatcagctacgacagcagcgaccagaccgccctgtacatcagaatgctgggcgacgtgagagtgagaagcagagccggcttcgagagcgagagaagaggcagccacccctacatcgacttcagaatcttccacagccagagcgagatcgaggtgagcgtgagcgccagaaacatcagaagactgctgagcttccagagatacctgagaagcagcagattcttcagaggcaccgccgtgagcaacagcctgaacatcctggacgacgactacaacggccaggccaagtgcatgctggagaaggtgggcaactggaacttcgacatcttcctgttcgacagactgaccaacggcaacagcctggtgagcctgaccttccacctgttcagcctgcacggcctgatcgagtacttccacctggacatgatgaagctgagaagattcctggtgatgatccaggaggactaccacagccagaacccctaccacaacgccgtgcacgccgccgacgtgacccaggccatgcactgctacctgaaggagcccaagctggccaacagcgtgaccccctgggacatcctgctgagcctgatcgccgccgccacccacgacctggaccaccccggcgtgaaccagcccttcctgatcaagaccaaccactacctggccaccctgtacaagaacaccagcgtgctggagaaccaccactggagaagcgccgtgggcctgctgagagagagcggcctgttcagccacctgcccctggagagcagacagcagatggagacccagatcggcgccctgatcctggccaccgacatcagcagacagaacgagtacctgagcctgttcagaagccacctggacagaggcgacctgtgcctggaggacaccagacacagacacctggtgctgcagatggccctgaagtgcgccgacatctgcaacccctgcagaacctgggagctgagcaagcagtggagcgagaaggtgaccgaggagttcttccaccagggcgacatcgagaagaagtaccacctgggcgtgagccccctgtgcgacagacacaccgagagcatcgccaacatccagatcggcttcatgacctacctggtggagcccctgttcaccgagtgggccagattcagcaacaccagactgagccagaccatgctgggccacgtgggcctgaacaaggccagctggaagggcctgcagagagagcagagcagcagcgaggacaccgacgccgccttcgagctgaacagccagctgctgccccaggagaacagactgagctag

SEQ ID NO: 93164 - DNA, 2490 bp, synthetic construct
  misc_feature 1..2490: note = Description of Artificial Sequence: Synthetic coding sequence
  source 1..2490: mol_type = other DNA
atgggctgcgcccccagcatccacatcagcgagagactggtggccgaggacgcccccagccccgccgccccccccctgagcagcggcggccccagactgccccagggccagaagaccgccgccctgcccagaaccagaggcgccggcctgctggagagcgagctgagagacggcagcggcaagaaggtggccgtggccgacgtgcagttcggccccatgagattccaccaggaccagctgcaggtgctgctggtgttcaccaaggaggacaaccagtgcaacggcttctgcagagcctgcgagaaggccggcttcaagtgcaccgtgaccaaggaggcccaggccgtgctggcctgcttcctggacaagcaccacgacatcatcatcatcgaccacagaaaccccagacagctggacgccgaggccctgtgcagaagcatcagaagcagcaagctgagcgagaacaccgtgatcgtgggcgtggtgagaagagtggacagagaggagctgagcgtgatgcccttcatcagcgccggcttcaccagaagatacgtggagaaccccaacatcatggcctgctacaacgagctgctgcagctggagttcggcgaggtgagaagccagctgaagctgagagcctgcaacagcgtgttcaccgccctggagaacagcgaggacgccatcgagatcaccagcgaggacagattcatccagtacgccaaccccgccttcgagaccaccatgggctaccagagcggcgagctgatcggcaaggagctgggcgaggtgcccatcaacgagaagaaggccgacctgctggacaccatcaacagctgcatcagaatcggcaaggagtggcagggcatctactacgccaagaagaagaacggcgacaacatccagcagaacgtgaagatcatccccgtgatcggccagggcggcaagatcagacactacgtgagcatcatcagagtgtgcaacggcaacaacaaggccgagaagatcagcgagtgcgtgcagagcgacacccacaccgacaaccagaccggcaagcacaaggacagaagaaagggcagcctggacgtgaaggccgtggccagcagagccaccgaggtgagcagccagagaagacacagcagcatggccagaatccacagcatgaccatcgaggcccccatcaccaaggtgatcaacatcatcaacgccgcccaggagagcagccccatgcccgtgaccgaggccctggacagagtgctggagatcctgagaaccaccgagctgtacagcccccagttcggcgccaaggacgacgacccccacgccaacgacctggtgggcggcctgatgagcgacggcctgagaagactgagcggcaacgagtacgtgctgagcaccaagaacacccagatggtgagcagcaacatcatcacccccatcagcctggacgacgtgccccccagaatcgccagagccatggagaacgaggagtactgggacttcgacatcttcgagctggaggccgccacccacaacagacccctgatctacctgggcctgaagatgttcgccagattcggcatctgcgagttcctgcactgcagcgagagcaccctgagaagctggctgcagatcatcgaggccaactaccacagcagcaacccctaccacaacagcacccacagcgccgacgtgctgcacgccaccgcctacttcctgagcaaggagagaatcaaggagaccctggaccccatcgacgaggtggccgccctgatcgccgccaccatccacgacgtggaccaccccggcagaaccaacagcttcctgtgcaacgccggcagcgagctggccatcctgtacaacgacaccgccgtgctggagagccaccacgccgccctggccttccagctgaccaccggcgacgacaagtgcaacatcttcaagaacatggagagaaacgactacagaaccctgagacagggcatcatcgacatggtgctggccaccgagatgaccaagcacttcgagcacgtgaacaagttcgtgaacagcatcaacaagcccctggccaccctggaggagaacggcgagaccgacaagaaccaggaggtgatcaacaccatgctgagaacccccgagaacagaaccctgatcaagagaatgctgatcaagtgcgccgacgtgagcaacccctgcagacccctgcagtactgcatcgagtgggccgccagaatcagcgaggagtacttcagccagaccgacgaggagaagcagcagggcctgcccgtggtgatgcccgtgttcgacagaaacacctgcagcatccccaagagccagatcagcttcatcgactacttcatcaccgacatgttcgacgcctgggacgccttcgtggacctgcccgacctgatgcagcacctggacaacaacttcaagtactggaagggcctggacgagatgaagctgagaaacctgagacccccccccgagtag

SEQ ID NO: 93165 - DNA, 2352 bp, synthetic construct
  misc_feature 1..2352: note = Description of Artificial Sequence: Synthetic coding sequence
  source 1..2352: mol_type = other DNA
atgggctgcgcccccagcatccacatcagcgagagactggtggccgaggacgcccccagccccgccgccccccccctgagcagcggcggccccagactgccccagggccagaagaccgccgccctgcccagaaccagaggcgccggcctgctggagagcgagctgagagacggcagcggcaagaaggtggccgtggccgacgtgcagttcggccccatgagattccaccaggaccagctgcaggtgctgctggtgttcaccaaggaggacaaccagtgcaacggcttctgcagagcctgcgagaaggccggcttcaagtgcaccgtgaccaaggaggcccaggccgtgctggcctgcttcctggacaagcaccacgacatcatcatcatcgaccacagaaaccccagacagctggacgccgaggccctgtgcagaagcatcagaagcagcaagctgagcgagaacaccgtgatcgtgggcgtggtgagaagagtggacagagaggagctgagcgtgatgcccttcatcagcgccggcttcaccagaagatacgtggagaaccccaacatcatggcctgctacaacgagctgctgcagctggagttcggcgaggtgagaagccagctgaagctgagagcctgcaacagcgtgttcaccgccctggagaacagcgaggacgccatcgagatcaccagcgaggacagattcatccaggagtggcagggcatctactacgccaagaagaagaacggcgacaacatccagcagaacgtgaagatcatccccgtgatcggccagggcggcaagatcagacactacgtgagcatcatcagagtgtgcaacggcaacaacaaggccgagaagatcagcgagtgcgtgcagagcgacacccacaccgacaaccagaccggcaagcacaaggacagaagaaagggcagcctggacgtgaaggccgtggccagcagagccaccgaggtgagcagccagagaagacacagcagcatggccagaatccacagcatgaccatcgaggcccccatcaccaaggtgatcaacatcatcaacgccgcccaggagagcagccccatgcccgtgaccgaggccctggacagagtgctggagatcctgagaaccaccgagctgtacagcccccagttcggcgccaaggacgacgacccccacgccaacgacctggtgggcggcctgatgagcgacggcctgagaagactgagcggcaacgagtacgtgctgagcaccaagaacacccagatggtgagcagcaacatcatcacccccatcagcctggacgacgtgccccccagaatcgccagagccatggagaacgaggagtactgggacttcgacatcttcgagctggaggccgccacccacaacagacccctgatctacctgggcctgaagatgttcgccagattcggcatctgcgagttcctgcactgcagcgagagcaccctgagaagctggctgcagatcatcgaggccaactaccacagcagcaacccctaccacaacagcacccacagcgccgacgtgctgcacgccaccgcctacttcctgagcaaggagagaatcaaggagaccctggaccccatcgacgaggtggccgccctgatcgccgccaccatccacgacgtggaccaccccggcagaaccaacagcttcctgtgcaacgccggcagcgagctggccatcctgtacaacgacaccgccgtgctggagagccaccacgccgccctggccttccagctgaccaccggcgacgacaagtgcaacatcttcaagaacatggagagaaacgactacagaaccctgagacagggcatcatcgacatggtgctggccaccgagatgaccaagcacttcgagcacgtgaacaagttcgtgaacagcatcaacaagcccctggccaccctggaggagaacggcgagaccgacaagaaccaggaggtgatcaacaccatgctgagaacccccgagaacagaaccctgatcaagagaatgctgatcaagtgcgccgacgtgagcaacccctgcagacccctgcagtactgcatcgagtgggccgccagaatcagcgaggagtacttcagccagaccgacgaggagaagcagcagggcctgcccgtggtgatgcccgtgttcgacagaaacacctgcagcatccccaagagccagatcagcttcatcgactacttcatcaccgacatgttcgacgcctgggacgccttcgtggacctgcccgacctgatgcagcacctggacaacaacttcaagtactggaagggcctggacgagatgaagctgagaaacctgagacccccccccgagtag

SEQ ID NO: 93166 - DNA, 2490 bp, synthetic construct; identical to SEQ ID NO: 93164
  misc_feature 1..2490: note = Description of Artificial Sequence: Synthetic coding sequence
  source 1..2490: mol_type = other DNA

SEQ ID NO: 93167 - DNA, 2274 bp, synthetic construct
  misc_feature 1..2274: note = Description of Artificial Sequence: Synthetic coding sequence
  source 1..2274: mol_type = other DNA
atgagattccaccaggaccagctgcaggtgctgctggtgttcaccaaggaggacaaccagtgcaacggcttctgcagagcctgcgagaaggccggcttcaagtgcaccgtgaccaaggaggcccaggccgtgctggcctgcttcctggacaagcaccacgacatcatcatcatcgaccacagaaaccccagacagctggacgccgaggccctgtgcagaagcatcagaagcagcaagctgagcgagaacaccgtgatcgtgggcgtggtgagaagagtggacagagaggagctgagcgtgatgcccttcatcagcgccggcttcaccagaagatacgtggagaaccccaacatcatggcctgctacaacgagctgctgcagctggagttcggcgaggtgagaagccagctgaagctgagagcctgcaacagcgtgttcaccgccctggagaacagcgaggacgccatcgagatcaccagcgaggacagattcatccagtacgccaaccccgccttcgagaccaccatgggctaccagagcggcgagctgatcggcaaggagctgggcgaggtgcccatcaacgagaagaaggccgacctgctggacaccatcaacagctgcatcagaatcggcaaggagtggcagggcatctactacgccaagaagaagaacggcgacaacatccagcagaacgtgaagatcatccccgtgatcggccagggcggcaagatcagacactacgtgagcatcatcagagtgtgcaacggcaacaacaaggccgagaagatcagcgagtgcgtgcagagcgacacccacaccgacaaccagaccggcaagcacaaggacagaagaaagggcagcctggacgtgaaggccgtggccagcagagccaccgaggtgagcagccagagaagacacagcagcatggccagaatccacagcatgaccatcgaggcccccatcaccaaggtgatcaacatcatcaacgccgcccaggagagcagccccatgcccgtgaccgaggccctggacagagtgctggagatcctgagaaccaccgagctgtacagcccccagttcggcgccaaggacgacgacccccacgccaacgacctggtgggcggcctgatgagcgacggcctgagaagactgagcggcaacgagtacgtgctgagcaccaagaacacccagatggtgagcagcaacatcatcacccccatcagcctggacgacgtgccccccagaatcgccagagccatggagaacgaggagtactgggacttcgacatcttcgagctggaggccgccacccacaacagacccctgatctacctgggcctgaagatgttcgccagattcggcatctgcgagttcctgcactgcagcgagagcaccctgagaagctggctgcagatcatcgaggccaactaccacagcagcaacccctaccacaacagcacccacagcgccgacgtgctgcacgccaccgcctacttcctgagcaaggagagaatcaaggagaccctggaccccatcgacgaggtggccgccctgatcgccgccaccatccacgacgtggaccaccccggcagaaccaacagcttcctgtgcaacgccggcagcgagctggccatcctgtacaacgacaccgccgtgctggagagccaccacgccgccctggccttccagctgaccaccggcgacgacaagtgcaacatcttcaagaacatggagagaaacgactacagaaccctgagacagggcatcatcgacatggtgctggccaccgagatgaccaagcacttcgagcacgtgaacaagttcgtgaacagcatcaacaagcccctggccaccctggaggagaacggcgagaccgacaagaaccaggaggtgatcaacaccatgctgagaacccccgagaacagaaccctgatcaagagaatgctgatcaagtgcgccgacgtgagcaacccctgcagacccctgcagtactgcatcgagtgggccgccagaatcagcgaggagtacttcagccagaccgacgaggagaagcagcagggcctgcccgtggtgatgcccgtgttcgacagaaacacctgcagcatccccaagagccagatcagcttcatcgactacttcatcaccgacatgttcgacgcctgggacgccttcgtggacctgcccgacctgatgcagcacctggacaacaacttcaagtactggaagggcctggacgagatgaagctgagaaacctgagacccccccccgagtag

SEQ ID NO: 93168 - DNA, 2658 bp, synthetic construct
  misc_feature 1..2658: note = Description of Artificial Sequence: Synthetic coding sequence
  source 1..2658: mol_type = other DNA
atgggctgcgcccccagcatccacgtgagccagagcggcgtgatctactgcagagacagcgacgagagcagcagccccagacagaccaccagcgtgagccagggccccgccgcccccctgcccggcctgttcgtgcagaccgacgccgccgacgccatcccccccagcagagccagcggcccccccagcgtggccagagtgagaagagccagaaccgagctgggcagcggcagcagcgccggcagcgccgcccccgccgccaccaccagcagaggcagaagaagacactgctgcagcagcgccgaggccgagacccagacctgctacaccagcgtgaagcaggtgagcagcgccgaggtgagaatcggccccatgagactgacccaggaccccatccaggtgctgctgatcttcgccaaggaggacagccagagcgacggcttctggtgggcctgcgacagagccggctacagatgcaacatcgccagaacccccgagagcgccctggagtgcttcctggacaagcaccacgagatcatcgtgatcgaccacagacagacccagaacttcgacgccgaggccgtgtgcagaagcatcagagccaccaaccccagcgagcacaccgtgatcctggccgtggtgagcagagtgagcgacgaccacgaggaggccagcgtgctgcccctgctgcacgccggcttcaacagaagattcatggagaacagcagcatcatcgcctgctacaacgagctgatccagatcgagcacggcgaggtgagaagccagttcaagctgagagcctgcaacagcgtgttcaccgccctggaccactgccacgaggccatcgagatcaccagcgacgaccacgtgatccagtacgtgaaccccgccttcgagagaatgatgggctaccacaagggcgagctgctgggcaaggagctggccgacctgcccaagagcgacaagaacagagccgacctgctggacaccatcaacacctgcatcaagaagggcaaggagtggcagggcgtgtactacgccagaagaaagagcggcgacagcatccagcagcacgtgaagatcacccccgtgatcggccagggcggcaagatcagacacttcgtgagcctgaagaagctgtgctgcaccaccgacaacaacaagcagatccacaagatccacagagacagcggcgacaacagccagaccgagccccacagcttcagatacaagaacagaagaaaggagagcatcgacgtgaagagcatcagcagcagaggcagcgacgcccccagcctgcagaacagaagataccccagcatggccagaatccacagcatgaccatcgaggcccccatcaccaaggtgatcaacatcatcaacgccgcccaggagaacagccccgtgaccgtggccgaggccctggacagagtgctggagatcctgagaaccaccgagctgtacagcccccagctgggcaccaaggacgaggacccccacaccagcgacctggtgggcggcctgatgaccgacggcctgagaagactgagcggcaacgagtacgtgttcaccaagaacgtgcaccagagccacagccacctggccatgcccatcaccatcaacgacgtgcccccctgcatcagccagctgctggacaacgaggagagctgggacttcaacatcttcgagctggaggccatcacccacaagagacccctggtgtacctgggcctgaaggtgttcagcagattcggcgtgtgcgagttcctgaactgcagcgagaccaccctgagagcctggttccaggtgatcgaggccaactaccacagcagcaacgcctaccacaacagcacccacgccgccgacgtgctgcacgccaccgccttcttcctgggcaaggagagagtgaagggcagcctggaccagctggacgaggtggccgccctgatcgccgccaccgtgcacgacgtggaccaccccggcagaaccaacagcttcctgtgcaacgccggcagcgagctggccgtgctgtacaacgacaccgccgtgctggagagccaccacaccgccctggccttccagctgaccgtgaaggacaccaagtgcaacatcttcaagaacatcgacagaaaccactacagaaccctgagacaggccatcatcgacatggtgctggccaccgagatgaccaagcacttcgagcacgtgaacaagttcgtgaacagcatcaacaagcccatggccgccgagatcgagggcagcgactgcgagtgcaaccccgccggcaagaacttccccgagaaccagatcctgatcaagagaatgatgatcaagtgcgccgacgtggccaacccctgcagacccctggacctgtgcatcgagtgggccggcagaatcagcgaggagtacttcgcccagaccgacgaggagaagagacagggcctgcccgtggtgatgcccgtgttcgacagaaacacctgcagcatccccaagagccagatcagcttcatcgactacttcatcaccgacatgttcgacgcctgggacgccttcgcccacctgcccgccctgatgcagcacctggccgacaactacaagcactggaagaccctggacgacctgaagtgcaagagcctgagactgcccagcgacagctag

SEQ ID NO: 93169 - DNA, 2493 bp, synthetic construct
  misc_feature 1..2493: note = Description of Artificial Sequence: Synthetic coding sequence
  source 1..2493: mol_type = other DNA
atgggctgcgcccccagcatccacgtgagccagagcggcgtgatctactgcagagacagcgacgagagcagcagccccagacagaccaccagcgtgagccagggccccgccgcccccctgcccggcctgttcgtgcagaccgacgccgccgacgccatcccccccagcagagccagcggcccccccagcgtggccagagtgagaagagccagaaccgagctgggcagcggcagcagcgccggcagcgccgcccccgccgccaccaccagcagaggcagaagaagacactgctgcagcagcgccgaggccgagacccagacctgctacaccagcgtgaagcaggtgagcagcgccgaggtgagaatcggccccatgagactgacccaggaccccatccaggtgctgctgatcttcgccaaggaggacagccagagcgacggcttctggtgggcctgcgacagagccggctacagatgcaacatcgccagaacccccgagagcgccctggagtgcttcctggacaagcaccacgagatcatcgtgatcgaccacagacagacccagaacttcgacgccgaggccgtgtgcagaagcatcagagccaccaaccccagcgagcacaccgtgatcctggccgtggtgagcagagtgagcgacgaccacgaggaggccagcgtgctgcccctgctgcacgccggcttcaacagaagattcatggagaacagcagcatcatcgcctgctacaacgagctgatccagatcgagcacggcgaggtgagaagccagttcaagctgagagcctgcaacagcgtgttcaccgccctggaccactgccacgaggccatcgagatcaccagcgacgaccacgtgatccagtacgtgaaccccgccttcgagagaatgatgggctaccacaagggcgagctgctgggcaaggagctggccgacctgcccaagagcgacaagaacagagccgacctgctggacaccatcaacacctgcatcaagaagggcaaggagtggcagggcgtgtactacgccagaagaaagagcggcgacagcatccagcagcacgtgaagatcacccccgtgatcggccagggcggcaagatcagacacttcgtgagcctgaagaagctgtgctgcaccaccgacaacaacaagcagatccacaagatccacagagacagcggcgacaacagccagaccgagccccacagcttcagatacaagaacagaagaaaggagagcatcgacgtgaagagcatcagcagcagaggcagcgacgcccccagcctgcagaacagaagataccccagcatggccagaatccacagcatgaccatcgaggcccccatcaccaaggacggcctgagaagactgagcggcaacgagtacgtgttcaccaagaacgtgcaccagagccacagccacctggccatgcccatcaccatcaacgacgtgcccccctgcatcagccagctgctggacaacgaggagagctgggacttcaacatcttcgagctggaggccatcacccacaagagacccctggtgtacctgggcctgaaggtgttcagcagattcggcgtgtgcgagttcctgaactgcagcgagaccaccctgagagcctggttccaggtgatcgaggccaactaccacagcagcaacgcctaccacaacagcacccacgccgccgacgtgctgcacgccaccgccttcttcctgggcaaggagagagtgaagggcagcctggaccagctggacgaggtggccgccctgatcgccgccaccgtgcacgacgtggaccaccccggcagaaccaacagcttcctgtgcaacgccggcagcgagctggccgtgctgtacaacgacaccgccgtgctggagagccaccacaccgccctggccttccagctgaccgtgaaggacaccaagtgcaacatcttcaagaacatcgacagaaaccactacagaaccctgagacaggccatcatcgacatggtgctggccaccgagatgaccaagcacttcgagcacgtgaacaagttcgtgaacagcatcaacaagcccatggccgccgagatcgagggcagcgactgcgagtgcaaccccgccggcaagaacttccccgagaaccagatcctgatcaagagaatgatgatcaagtgcgccgacgtggccaacccctgcagacccctggacctgtgcatcgagtgggccggcagaatcagcgaggagtacttcgcccagaccgacgaggagaagagacagggcctgcccgtggtgatgcccgtgttcgacagaaacacctgcagcatccccaagagccagatcagcttcatcgactacttcatcaccgacatgttcgacgcctgggacgccttcgcccacctgcccgccctgatgcagcacctggccgacaactacaagcactggaagaccctggacgacctgaagtgcaagagcctgagactgcccagcgacagctag

SEQ ID NO: 93170 - DNA, 2517 bp, synthetic construct
  misc_feature 1..2517: note = Description of Artificial Sequence: Synthetic coding sequence
  source 1..2517: mol_type = other DNA
atgggctgcgcccccagcatccacgtgagccagagcggcgtgatctactgcagagacagcgacgagagcagcagccccagacagaccaccagcgtgagccagggccccgccgcccccctgcccggcctgttcgtgcagaccgacgccgccgacgccatcccccccagcagagccagcggcccccccagcgtggccagagtgagaagagccagaaccgagctgggcagcggcagcagcgccggcagcgccgcccccgccgccaccaccagcagaggcagaagaagacactgctgcagcagcgccgaggccgagacccagacctgctacaccagcgtgaagcaggtgagcagcgccgaggtgagaatcggccccatgagactgacccaggaccccatccaggtgctgctgatcttcgccaaggaggacagccagagcgacggcttctggtgggcctgcgacagagccggctacagatgcaacatcgccagaacccccgagagcgccctggagtgcttcctggacaagcaccacgagatcatcgtgatcgaccacagacagacccagaacttcgacgccgaggccgtgtgcagaagcatcagagccaccaaccccagcgagcacaccgtgatcctggccgtggtgagcagagtgagcgacgaccacgaggaggccagcgtgctgcccctgctgcacgccggcttcaacagaagattcatggagaacagcagcatcatcgcctgctacaacgagctgatccagatcgagcacggcgaggtgagaagccagttcaagctgagagcctgcaacagcgtgttcaccgccctggaccactgccacgaggccatcgagatcaccagcgacgaccacgtgatccaggagtggcagggcgtgtactacgccagaagaaagagcggcgacagcatccagcagcacgtgaagatcacccccgtgatcggccagggcggcaagatcagacacttcgtgagcctgaagaagctgtgctgcaccaccgacaacaacaagcagatccacaagatccacagagacagcggcgacaacagccagaccgagccccacagcttcagatacaagaacagaagaaaggagagcatcgacgtgaagagcatcagcagcagaggcagcgacgcccccagcctgcagaacagaagataccccagcatggccagaatccacagcatgaccatcgaggcccccatcaccaaggtgatcaacatcatcaacgccgcccaggagaacagccccgtgaccgtggccgaggccctggacagagtgctggagatcctgagaaccaccgagctgtacagcccccagctgggcaccaaggacgaggacccccacaccagcgacctggtgggcggcctgatgaccgacggcctgagaagactgagcggcaacgagtacgtgttcaccaagaacgtgcaccagagccacagccacctggccatgcccatcaccatcaacgacgtgcccccctgcatcagccagctgctggacaacgaggagagctgggacttcaacatcttcgagctggaggccatcacccacaagagacccctggtgtacctgggcctgaaggtgttcagcagattcggcgtgtgcgagttcctgaactgcagcgagaccaccctgagagcctggttccaggtgatcgaggccaactaccacagcagcaacgcctaccacaacagcacccacgccgccgacgtgctgcacgccaccgccttcttcctgggcaaggagagagtgaagggcagcctggaccagctggacgaggtggccgccctgatcgccgccaccgtgcacgacgtggaccaccccggcagaaccaacagcttcctgtgcaacgccggcagcgagctggccgtgctgtacaacgacaccgccgtgctggagagccaccacaccgccctggccttccagctgaccgtgaaggacaccaagtgcaacatcttcaagaacatcgacagaaaccactacagaaccctgagacaggccatcatcgacatggtgctggccaccgagatgaccaagcacttcgagcacgtgaacaagttcgtgaacagcatcaacaagcccatggccgccgagatcgagggcagcgactgcgagtgcaaccccgccggcaagaacttccccgagaaccagatcctgatcaagagaatgatgatcaagtgcgccgacgtggccaacccctgcagacccctggacctgtgcatcgagtgggccggcagaatcagcgaggagtacttcgcccagaccgacgaggagaagagacagggcctgcccgtggtgatgcccgtgttcgacagaaacacctgcagcatccccaagagccagatcagcttcatcgactacttcatcaccgacatgttcgacgcctgggacgccttcgcccacctgcccgccctgatgcagcacctggccgacaactacaagcactggaagaccctggacgacctgaagtgcaagagcctgagactgcccagcgacagctag

SEQ ID NO: 93171 - DNA, 2598 bp, synthetic construct
  misc_feature 1..2598: note = Description of Artificial Sequence: Synthetic coding sequence
  source 1..2598: mol_type = other DNA
atgggctgcgcccccagcatccacgtgagccagagcggcgtgatctactgcagagacagcgacgagagcagcagccccagacagaccaccagcgtgagccagggccccgccgcccccctgcccggcctgttcgtgcagaccgacgccgccgacgccatcccccccagcagagccagcggcccccccagcgtggccagagtgagaagagccagaaccgagctgggcagcggcagcagcgccggcagcgccgcccccgccgccaccaccagcagaggcagaagaagacactgctgcagcagcgccgaggccgagacccagacctgctacaccagcgtgaaggtgctgctgatcttcgccaaggaggacagccagagcgacggcttctggtgggcctgcgacagagccggctacagatgcaacatcgccagaacccccgagagcgccctggagtgcttcctggacaagcaccacgagatcatcgtgatcgaccacagacagacccagaacttcgacgccgaggccgtgtgcagaagcatcagagccaccaaccccagcgagcacaccgtgatcctggccgtggtgagcagagtgagcgacgaccacgaggaggccagcgtgctgcccctgctgcacgccggcttcaacagaagattcatggagaacagcagcatcatcgcctgctacaacgagctgatccagatcgagcacggcgaggtgagaagccagttcaagctgagagcctgcaacagcgtgttcaccgccctggaccactgccacgaggccatcgagatcaccagcgacgaccacgtgatccagtacgtgaaccccgccttcgagagaatgatgggctaccacaagggcgagctgctgggcaaggagctggccgacctgcccaagagcgacaagaacagagccgacctgctggacaccatcaacacctgcatcaagaagggcaaggagtggcagggcgtgtactacgccagaagaaagagcggcgacagcatccagcagcacgtgaagatcacccccgtgatcggccagggcggcaagatcagacacttcgtgagcctgaagaagctgtgctgcaccaccgacaacaacaagcagatccacaagatccacagagacagcggcgacaacagccagaccgagccccacagcttcagatacaagaacagaagaaaggagagcatcgacgtgaagagcatcagcagcagaggcagcgacgcccccagcctgcagaacagaagataccccagcatggccagaatccacagcatgaccatcgaggcccccatcaccaaggtgatcaacatcatcaacgccgcccaggagaacagccccgtgaccgtggccgaggccctggacagagtgctggagatcctgagaaccaccgagctgtacagcccccagctgggcaccaaggacgaggacccccacaccagcgacctggtgggcggcctgatgaccgacggcctgagaagactgagcggcaacgagtacgtgttcaccaagaacgtgcaccagagccacagccacctggccatgcccatcaccatcaacgacgtgcccccctgcatcagccagctgctggacaacgaggagagctgggacttcaacatcttcgagctggaggccatcacccacaagagacccctggtgtacctgggcctgaaggtgttcagcagattcggcgtgtgcgagttcctgaactgcagcgagaccaccctgagagcctggttccaggtgatcgaggccaactaccacagcagcaacgcctaccacaacagcacccacgccgccgacgtgctgcacgccaccgccttcttcctgggcaaggagagagtgaagggcagcctggaccagctggacgaggtggccgccctgatcgccgccaccgtgcacgacgtggaccaccccggcagaaccaacagcttcctgtgcaacgccggcagcgagctggccgtgctgtacaacgacaccgccgtgctggagagccaccacaccgccctggccttccagctgaccgtgaaggacaccaagtgcaacatcttcaagaacatcgacagaaaccactacagaaccctgagacaggccatcatcgacatggtgctggccaccgagatgaccaagcacttcgagcacgtgaacaagttcgtgaacagcatcaacaagcccatggccgccgagatcgagggcagcgactgcgagtgcaaccccgccggcaagaacttccccgagaaccagatcctgatcaagagaatgatgatcaagtgcgccgacgtggccaacccctgcagacccctggacctgtgcatcgagtgggccggcagaatcagcgaggagtacttcgcccagaccgacgaggagaagagacagggcctgcccgtggtgatgcccgtgttcgacagaaacacctgcagcatccccaagagccagatcagcttcatcgactacttcatcaccgacatgttcgacgcctgggacgccttcgcccacctgcccgccctgatgcagcacctggccgacaactacaagcactggaagaccctggacgacctgaagtgcaagagcctgagactgcccagcgacagctag

SEQ ID NO: 93172 - DNA, 2367 bp, synthetic construct
  misc_feature 1..2367: note = Description of Artificial Sequence: Synthetic coding sequence
  source 1..2367: mol_type = other DNA
atgggctgcgcccccagcatccacgtgagccagagcggcgtgatctactgcagagacagcgacgagagcagcagccccagacagaccaccagcgtgagccagggccccgccgcccccctgcccggcctgttcgtgcagaccgacgccgccgacgccatcccccccagcagagccagcggcccccccagcgtggccagagtgagaagagccagaaccgagctgggcagcggcagcagcgccggcagcgccgcccccgccgccaccaccagcagaggcagaagaagacactgctgcagcagcgccgaggccgagacccagacctgctacaccagcgtgaagcaggtgagcagcgccgaggtgagaatcggccccatgagactgacccaggaccccatccaggtgctgctgatcttcgccaaggaggacagccagagcgacggcttctggtgggcctgcgacagagccggctacagatgcaacatcgccagaacccccgagagcgccctggagtgcttcctggacaagcaccacgagatcatcgtgatcgaccacagacagacccagaacttcgacgccgaggccgtgtgcagaagcatcagagccaccaaccccagcgagcacaccgtgatcctggccgtggtgagcagagtgagcgacgaccacgaggaggccagcgtgctgcccctgctgcacgccggcttcaacagaagattcatggagaacagcagcatcatcgcctgctacaacgagctgatccagatcgagcacggcgaggtgagaagccagttcaagctgagagcctgcaacagcgtgttcaccgccctggaccactgccacgaggccatcgagatcaccagcgacgaccacgtgatccagatccacaagatccacagagacagcggcgacaacagccagaccgagccccacagcttcagatacaagaacagaagaaaggagagcatcgacgtgaagagcatcagcagcagaggcagcgacgcccccagcctgcagaacagaagataccccagcatggccagaatccacagcatgaccatcgaggcccccatcaccaaggtgatcaacatcatcaacgccgcccaggagaacagccccgtgaccgtggccgaggccctggacagagtgctggagatcctgagaaccaccgagctgtacagcccccagctgggcaccaaggacgaggacccccacaccagcgacctggtgggcggcctgatgaccgacggcctgagaagactgagcggcaacgagtacgtgttcaccaagaacgtgcaccagagccacagccacctggccatgcccatcaccatcaacgacgtgcccccctgcatcagccagctgctggacaacgaggagagctgggacttcaacatcttcgagctggaggccatcacccacaagagacccctggtgtacctgggcctgaaggtgttcagcagattcggcgtgtgcgagttcctgaactgcagcgagaccaccctgagagcctggttccaggtgatcgaggccaactaccacagcagcaacgcctaccacaacagcacccacgccgccgacgtgctgcacgccaccgccttcttcctgggcaaggagagagtgaagggcagcctggaccagctggacgaggtggccgccctgatcgccgccaccgtgcacgacgtggaccaccccggcagaaccaacagcttcctgtgcaacgccggcagcgagctggccgtgctgtacaacgacaccgccgtgctggagagccaccacaccgccctggccttccagctgaccgtgaaggacaccaagtgcaacatcttcaagaacatcgacagaaaccactacagaaccctgagacaggccatcatcgacatggtgctggccaccgagatgaccaagcacttcgagcacgtgaacaagttcgtgaacagcatcaacaagcccatggccgccgagatcgagggcagcgactgcgagtgcaaccccgccggcaagaacttccccgagaaccagatcctgatcaagagaatgatgatcaagtgcgccgacgtggccaacccctgcagacccctggacctgtgcatcgagtgggccggcagaatcagcgaggagtacttcgcccagaccgacgaggagaagagacagggcctgcccgtggtgatgcccgtgttcgacagaaacacctgcagcatccccaagagccagatcagcttcatcgactacttcatcaccgacatgttcgacgcctgggacgccttcgcccacctgcccgccctgatgcagcacctggccgacaactacaagcactggaagaccctggacgacctgaagtgcaagagcctgagactgcccagcgacagctag

SEQ ID NO: 93173 - DNA, 1053 bp, synthetic construct
  misc_feature 1..1053: note = Description of Artificial Sequence: Synthetic coding sequence
  source 1..1053: mol_type = other DNA
atgcccatcaccatcaacgacgtgcccccctgcatcagccagctgctggacaacgaggagagctgggacttcaacatcttcgagctggaggccatcacccacaagagacccctggtgtacctgggcctgaaggtgttcagcagattcggcgtgtgcgagttcctgaactgcagcgagaccaccctgagagcctggttccaggtgatcgaggccaactaccacagcagcaacgcctaccacaacagcacccacgccgccgacgtgctgcacgccaccgccttcttcctgggcaaggagagagtgaagggcagcctggaccagctggacgaggtggccgccctgatcgccgccaccgtgcacgacgtggaccaccccggcagaaccaacagcttcctgtgcaacgccggcagcgagctggccgtgctgtacaacgacaccgccgtgctggagagccaccacaccgccctggccttccagctgaccgtgaaggacaccaagtgcaacatcttcaagaacatcgacagaaaccactacagaaccctgagacaggccatcatcgacatggtgctggccaccgagatgaccaagcacttcgagcacgtgaacaagttcgtgaacagcatcaacaagcccatggccgccgagatcgagggcagcgactgcgagtgcaaccccgccggcaagaacttccccgagaaccagatcctgatcaagagaatgatgatcaagtgcgccgacgtggccaacccctgcagacccctggacctgtgcatcgagtgggccggcagaatcagcgaggagtacttcgcccagaccgacgaggagaagagacagggcctgcccgtggtgatgcccgtgttcgacagaaacacctgcagcatccccaagagccagatcagcttcatcgactacttcatcaccgacatgttcgacgcctgggacgccttcgcccacctgcccgccctgatgcagcacctggccgacaactacaagcactggaagaccctggacgacctgaagtgcaagagcctgagactgcccagcgacagctag

SEQ ID NO: 93174 - DNA, 1782 bp, synthetic construct
  misc_feature 1..1782: note = Description of Artificial Sequence: Synthetic coding sequence
  source 1..1782: mol_type = other DNA
atgggcagcggcagcagcagctacagacccaaggccatctacctggacatcgacggcagaatccagaaggtgatcttcagcaagtactgcaacagcagcgacatcatggacctgttctgcatcgccaccggcctgcccagaaacaccaccatcagcctgctgaccaccgacgacgccatggtgagcatcgaccccaccatgcccgccaacagcgagagaaccccctacaaggtgagacccgtggccatcaagcagctgagcgccggcgtggaggacaagagaaccaccagcagaggccagagcgccgagagacccctgagagacagaagagtggtgggcctggagcagcccagaagagagggcgccttcgagagcggccaggtggagcccagacccagagagccccagggctgctaccaggagggccagagaatcccccccgagagagaggagctgatccagagcgtgctggcccaggtggccgagcagttcagcagagccttcaagatcaacgagctgaaggccgaggtggccaaccacctggccgtgctggagaagagagtggagctggagggcctgaaggtggtggagatcgagaagtgcaagagcgacatcaagaagatgagagaggagctggccgccagaagcagcagaaccaactgcccctgcaagtacagcttcctggacaaccacaagaagctgacccccagaagagacgtgcccacctaccccaagtacctgctgagccccgagaccatcgaggccctgagaaagcccaccttcgacgtgtggctgtgggagcccaacgagatgctgagctgcctggagcacatgtaccacgacctgggcctggtgagagacttcagcatcaaccccgtgaccctgagaagatggctgttctgcgtgcacgacaactacagaaacaaccccttccacaacttcagacactgcttctgcgtggcccagatgatgtacagcatggtgtggctgtgcagcctgcaggagaagttcagccagaccgacatcctgatcctgatgaccgccgccatctgccacgacctggaccaccccggctacaacaacacctaccagatcaacgccagaaccgagctggccgtgagatacaacgacatcagccccctggagaaccaccactgcgccgtggccttccagatcctggccgagcccgagtgcaacatcttcagcaacatcccccccgacggcttcaagcagatcagacagggcatgatcaccctgatcctggccaccgacatggccagacacgccgagatcatggacagcttcaaggagaagatggagaacttcgactacagcaacgaggagcacatgaccctgctgaagatgatcctgatcaagtgctgcgacatcagcaacgaggtgagacccatggaggtggccgagccctgggtggactgcctgctggaggagtacttcatgcagagcgacagagagaagagcgagggcctgcccgtggcccccttcatggacagagacaaggtgaccaaggccaccgcccagatcggcttcatcaagttcgtgctgatccccatgttcgagaccgtgaccaagctgttccccatggtggaggagatcatgctgcagcccctgtgggagagcagagacagatacgaggagctgaagagaatcgacgacgccatgaaggagctgcagaagaagaccgacagcctgaccagcggcgccaccgagaagagcagagagagaagcagagacgtgaagaacagcgagggcgactgcgcctag

SEQ ID NO: 93175 - DNA, 1704 bp, synthetic construct
  misc_feature 1..1704: note = Description of Artificial Sequence: Synthetic coding sequence
  source 1..1704: mol_type = other DNA
atgggcagcggcagcagcagctacagacccaaggccatctacctggacatcgacggcagaatccagaaggtgatcttcagcaagtactgcaacagcagcgacatcatggacctgttctgcatcgccaccggcctgcccagaaccccctacaaggtgagacccgtggccatcaagcagctgagcgccggcgtggaggacaagagaaccaccagcagaggccagagcgccgagagacccctgagagacagaagagtggtgggcctggagcagcccagaagagagggcgccttcgagagcggccaggtggagcccagacccagagagccccagggctgctaccaggagggccagagaatcccccccgagagagaggagctgatccagagcgtgctggcccaggtggccgagcagttcagcagagccttcaagatcaacgagctgaaggccgaggtggccaaccacctggccgtgctggagaagagagtggagctggagggcctgaaggtggtggagatcgagaagtgcaagagcgacatcaagaagatgagagaggagctggccgccagaagcagcagaaccaactgcccctgcaagtacagcttcctggacaaccacaagaagctgacccccagaagagacgtgcccacctaccccaagtacctgctgagccccgagaccatcgaggccctgagaaagcccaccttcgacgtgtggctgtgggagcccaacgagatgctgagctgcctggagcacatgtaccacgacctgggcctggtgagagacttcagcatcaaccccgtgaccctgagaagatggctgttctgcgtgcacgacaactacagaaacaaccccttccacaacttcagacactgcttctgcgtggcccagatgatgtacagcatggtgtggctgtgcagcctgcaggagaagttcagccagaccgacatcctgatcctgatgaccgccgccatctgccacgacctggaccaccccggctacaacaacacctaccagatcaacgccagaaccgagctggccgtgagatacaacgacatcagccccctggagaaccaccactgcgccgtggccttccagatcctggccgagcccgagtgcaacatcttcagcaacatcccccccgacggcttcaagcagatcagacagggcatgatcaccctgatcctggccaccgacatggccagacacgccgagatcatggacagcttcaaggagaagatggagaacttcgactacagcaacgaggagcacatgaccctgctgaagatgatcctgatcaagtgctgcgacatcagcaacgaggtgagacccatggaggtggccgagccctgggtggactgcctgctggaggagtacttcatgcagagcgacagagagaagagcgagggcctgcccgtggcccccttcatggacagagacaaggtgaccaaggccaccgcccagatcggcttcatcaagttcgtgctgatccccatgttcgagaccgtgaccaagctgttccccatggtggaggagatcatgctgcagcccctgtgggagagcagagacagatacgaggagctgaagagaatcgacgacgccatgaaggagctgcagaagaagaccgacagcctgaccagcggcgccaccgagaagagcagagagagaagcagagacgtgaagaacagcgagggcgactgcgcctag

SEQ ID NO: 93176 - DNA, 1476 bp, synthetic construct
  misc_feature 1..1476: note = Description of Artificial Sequence: Synthetic coding sequence
  source 1..1476: mol_type = other DNA
atgggcagcggcagcagcagctacagacccaaggccatctacctggacatcgacggcagaatccagaaggagcacgaccacctgcccgccgaccacagaagaagacacggcctgcacagaccccaccacgccagagagttcagaacccacagcgtgcagagcgagacctgcggccaccaggccaccctgagagccttcaagatcaacgagctgaaggccgaggtggccaaccacctggccgtgctggagaagagagtggagctggagggcctgaaggtggtggagatcgagaagtgcaagagcgacatcaagaagatgagagaggagctggccgccagaagcagcagaaccaactgcccctgcaagtacagcttcctggacaaccacaagaagctgacccccagaagagacgtgcccacctaccccaagtacctgctgagccccgagaccatcgaggccctgagaaagcccaccttcgacgtgtggctgtgggagcccaacgagatgctgagctgcctggagcacatgtaccacgacctgggcctggtgagagacttcagcatcaaccccgtgaccctgagaagatggctgttctgcgtgcacgacaactacagaaacaaccccttccacaacttcagacactgcttctgcgtggcccagatgatgtacagcatggtgtggctgtgcagcctgcaggagaagttcagccagaccgacatcctgatcctgatgaccgccgccatctgccacgacctggaccaccccggctacaacaacacctaccagatcaacgccagaaccgagctggccgtgagatacaacgacatcagccccctggagaaccaccactgcgccgtggccttccagatcctggccgagcccgagtgcaacatcttcagcaacatcccccccgacggcttcaagcagatcagacagggcatgatcaccctgatcctggccaccgacatggccagacacgccgagatcatggacagcttcaaggagaagatggagaacttcgactacagcaacgaggagcacatgaccctgctgaagatgatcctgatcaagtgctgcgacatcagcaacgaggtgagacccatggaggtggccgagccctgggtggactgcctgctggaggagtacttcatgcagagcgacagagagaagagcgagggcctgcccgtggcccccttcatggacagagacaaggtgaccaaggccaccgcccagatcggcttcatcaagttcgtgctgatccccatgttcgagaccgtgaccaagctgttccccatggtggaggagatcatgctgcagcccctgtgggagagcagagacagatacgaggagctgaagagaatcgacgacgccatgaaggagctgcagaagaagaccgacagcctgaccagcggcgccaccgagaagagcagagagagaagcagagacgtgaagaacagcgagggcgactgcgcctag

SEQ ID NO: 93177 - DNA, 1602 bp, synthetic construct
  misc_feature 1..1602: note = Description of Artificial Sequence: Synthetic coding sequence
  source 1..1602: mol_type = other DNA
atgggcagcggcagcagcagctacagacccaaggccatctacctggacatcgacggcagaatccagaaggtgatcttcagcaagtactgcaacagcagcgacatcatggacctgttctgcatcgccaccggcctgcccagaaacaccaccatcagcctgctgaccaccgacgacgccatggtgagcatcgaccccaccatgcccgccaacagcgagagaaccccctacaaggtgagacccgtggccatcaagcagctgagcgagagagaggagctgatccagagcgtgctggcccaggtggccgagcagttcagcagagccttcaagatcaacgagctgaaggccgaggtggccaaccacctggccgtgctggagaagagagtggagctggagggcctgaaggtggtggagatcgagaagtgcaagagcgacatcaagaagatgagagaggagctggccgccagaagcagcagaaccaactgcccctgcaagtacagcttcctggacaaccacaagaagctgacccccagaagagacgtgcccacctaccccaagtacctgctgagccccgagaccatcgaggccctgagaaagcccaccttcgacgtgtggctgtgggagcccaacgagatgctgagctgcctggagcacatgtaccacgacctgggcctggtgagagacttcagcatcaaccccgtgaccctgagaagatggctgttctgcgtgcacgacaactacagaaacaaccccttccacaacttcagacactgcttctgcgtggcccagatgatgtacagcatggtgtggctgtgcagcctgcaggagaagttcagccagaccgacatcctgatcctgatgaccgccgccatctgccacgacctggaccaccccggctacaacaacacctaccagatcaacgccagaaccgagctggccgtgagatacaacgacatcagccccctggagaaccaccactgcgccgtggccttccagatcctggccgagcccgagtgcaacatcttcagcaacatcccccccgacggcttcaagcagatcagacagggcatgatcaccctgatcctggccaccgacatggccagacacgccgagatcatggacagcttcaaggagaagatggagaacttcgactacagcaacgaggagcacatgaccctgctgaagatgatcctgatcaagtgctgcgacatcagcaacgaggtgagacccatggaggtggccgagccctgggtggactgcctgctggaggagtacttcatgcagagcgacagagagaagagcgagggcctgcccgtggcccccttcatggacagagacaaggtgaccaaggccaccgcccagatcggcttcatcaagttcgtgctgatccccatgttcgagaccgtgaccaagctgttccccatggtggaggagatcatgctgcagcccctgtgggagagcagagacagatacgaggagctgaagagaatcgacgacgccatgaaggagctgcagaagaagaccgacagcctgaccagcggcgccaccgagaagagcagagagagaagcagagacgtgaagaacagcgagggcgactgcgcctag

SEQ ID NO: 93178 - DNA, 1398 bp, synthetic construct
  misc_feature 1..1398: note = Description of Artificial Sequence: Synthetic coding sequence
  source 1..1398: mol_type = other DNA
atgggcagcggcagcagcagctacagacccaaggccatctacctggacatcgacggcagaatccagaagcacagcgtgcagagcgagacctgcggccaccaggccaccctgagagccttcaagatcaacgagctgaaggccgaggtggccaaccacctggccgtgctggagaagagagtggagctggagggcctgaaggtggtggagatcgagaagtgcaagagcgacatcaagaagatgagagaggagctggccgccagaagcagcagaaccaactgcccctgcaagtacagcttcctggacaaccacaagaagctgacccccagaagagacgtgcccacctaccccaagtacctgctgagccccgagaccatcgaggccctgagaaagcccaccttcgacgtgtggctgtgggagcccaacgagatgctgagctgcctggagcacatgtaccacgacctgggcctggtgagagacttcagcatcaaccccgtgaccctgagaagatggctgttctgcgtgcacgacaactacagaaacaaccccttccacaacttcagacactgcttctgcgtggcccagatgatgtacagcatggtgtggctgtgcagcctgcaggagaagttcagccagaccgacatcctgatcctgatgaccgccgccatctgccacgacctggaccaccccggctacaacaacacctaccagatcaacgccagaaccgagctggccgtgagatacaacgacatcagccccctggagaaccaccactgcgccgtggccttccagatcctggccgagcccgagtgcaacatcttcagcaacatcccccccgacggcttcaagcagatcagacagggcatgatcaccctgatcctggccaccgacatggccagacacgccgagatcatggacagcttcaaggagaagatggagaacttcgactacagcaacgaggagcacatgaccctgctgaagatgatcctgatcaagtgctgcgacatcagcaacgaggtgagacccatggaggtggccgagccctgggtggactgcctgctggaggagtacttcatgcagagcgacagagagaagagcgagggcctgcccgtggcccccttcatggacagagacaaggtgaccaaggccaccgcccagatcggcttcatcaagttcgtgctgatccccatgttcgagaccgtgaccaagctgttccccatggtggaggagatcatgctgcagcccctgtgggagagcagagacagatacgaggagctgaagagaatcgacgacgccatgaaggagctgcagaagaagaccgacagcctgaccagcggcgccaccgagaagagcagagagagaagcagagacgtgaagaacagcgagggcgactgcgcctag

SEQ ID NO: 93179 - DNA, 1623 bp, synthetic construct
  misc_feature 1..1623: note = Description of Artificial Sequence: Synthetic coding sequence
  source 1..1623: mol_type = other DNA
atgggcagcggcagcagcagctacagacccaaggccatctacctggacatcgacggcagaatccagaaggtgatcttcagcaagtactgcaacagcagcgacatcatggacctgttctgcatcgccaccggcctgcccagaaacaccaccatcagcctgctgaccaccgacgacgccatggtgagcatcgaccccaccatgcccgccaacagcgagagaaacgagctgatcctgtacaccagcctgagaaacctgctgttcctgcccagcaaggagagctgggccagccaccagcacagcgtgcagagcgagacctgcggccaccaggccaccctgagagccttcaagatcaacgagctgaaggccgaggtggccaaccacctggccgtgctggagaagagagtggagctggagggcctgaaggtggtggagatcgagaagtgcaagagcgacatcaagaagatgagagaggagctggccgccagaagcagcagaaccaactgcccctgcaagtacagcttcctggacaaccacaagaagctgacccccagaagagacgtgcccacctaccccaagtacctgctgagccccgagaccatcgaggccctgagaaagcccaccttcgacgtgtggctgtgggagcccaacgagatgctgagctgcctggagcacatgtaccacgacctgggcctggtgagagacttcagcatcaaccccgtgaccctgagaagatggctgttctgcgtgcacgacaactacagaaacaaccccttccacaacttcagacactgcttctgcgtggcccagatgatgtacagcatggtgtggctgtgcagcctgcaggagaagttcagccagaccgacatcctgatcctgatgaccgccgccatctgccacgacctggaccaccccggctacaacaacacctaccagatcaacgccagaaccgagctggccgtgagatacaacgacatcagccccctggagaaccaccactgcgccgtggccttccagatcctggccgagcccgagtgcaacatcttcagcaacatcccccccgacggcttcaagcagatcagacagggcatgatcaccctgatcctggccaccgacatggccagacacgccgagatcatggacagcttcaaggagaagatggagaacttcgactacagcaacgaggagcacatgaccctgctgaagatgatcctgatcaagtgctgcgacatcagcaacgaggtgagacccatggaggtggccgagccctgggtggactgcctgctggaggagtacttcatgcagagcgacagagagaagagcgagggcctgcccgtggcccccttcatggacagagacaaggtgaccaaggccaccgcccagatcggcttcatcaagttcgtgctgatccccatgttcgagaccgtgaccaagctgttccccatggtggaggagatcatgctgcagcccctgtgggagagcagagacagatacgaggagctgaagagaatcgacgacgccatgaaggagctgcagaagaagaccgacagcctgaccagcggcgccaccgagaagagcagagagagaagcagagacgtgaagaacagcgagggcgactgcgcctag

SEQ ID NO: 93180 - DNA, 1401 bp, synthetic construct
  misc_feature 1..1401: note = Description of Artificial Sequence: Synthetic coding sequence
  source 1..1401: mol_type = other DNA
atggacgccttcagaagcaccccctacaaggtgagacccgtggccatcaagcagctgagcgagagagaggagctgatccagagcgtgctggcccaggtggccgagcagttcagcagagccttcaagatcaacgagctgaaggccgaggtggccaaccacctggccgtgctggagaagagagtggagctggagggcctgaaggtggtggagatcgagaagtgcaagagcgacatcaagaagatgagagaggagctggccgccagaagcagcagaaccaactgcccctgcaagtacagcttcctggacaaccacaagaagctgacccccagaagagacgtgcccacctaccccaagtacctgctgagccccgagaccatcgaggccctgagaaagcccaccttcgacgtgtggctgtgggagcccaacgagatgctgagctgcctggagcacatgtaccacgacctgggcctggtgagagacttcagcatcaaccccgtgaccctgagaagatggctgttctgcgtgcacgacaactacagaaacaaccccttccacaacttcagacactgcttctgcgtggcccagatgatgtacagcatggtgtggctgtgcagcctgcaggagaagttcagccagaccgacatcctgatcctgatgaccgccgccatctgccacgacctggaccaccccggctacaacaacacctaccagatcaacgccagaaccgagctggccgtgagatacaacgacatcagccccctggagaaccaccactgcgccgtggccttccagatcctggccgagcccgagtgcaacatcttcagcaacatcccccccgacggcttcaagcagatcagacagggcatgatcaccctgatcctggccaccgacatggccagacacgccgagatcatggacagcttcaaggagaagatggagaacttcgactacagcaacgaggagcacatgaccctgctgaagatgatcctgatcaagtgctgcgacatcagcaacgaggtgagacccatggaggtggccgagccctgggtggactgcctgctggaggagtacttcatgcagagcgacagagagaagagcgagggcctgcccgtggcccccttcatggacagagacaaggtgaccaaggccaccgcccagatcggcttcatcaagttcgtgctgatccccatgttcgagaccgtgaccaagctgttccccatggtggaggagatcatgctgcagcccctgtgggagagcagagacagatacgaggagctgaagagaatcgacgacgccatgaaggagctgcagaagaagaccgacagcctgaccagcggcgccaccgagaagagcagagagagaagcagagacgtgaagaacagcgagggcgactgcgcctag

SEQ ID NO: 93181 - DNA, 1659 bp, synthetic construct
  misc_feature 1..1659: note = Description of Artificial Sequence: Synthetic coding sequence
  source 1..1659: mol_type = other DNA
atggacgccttcagaagaaacaccaccatcagcctgctgaccaccgacgacgccatggtgagcatcgaccccaccatgcccgccaacagcgagagaaccccctacaaggtgagacccgtggccatcaagcagctgagcgccggcgtggaggacaagagaaccaccagcagaggccagagcgccgagagacccctgagagacagaagagtggtgggcctggagcagcccagaagagagggcgccttcgagagcggccaggtggagcccagacccagagagccccagggctgctaccaggagggccagagaatcccccccgagagagaggagctgatccagagcgtgctggcccaggtggccgagcagttcagcagagccttcaagatcaacgagctgaaggccgaggtggccaaccacctggccgtgctggagaagagagtggagctggagggcctgaaggtggtggagatcgagaagtgcaagagcgacatcaagaagatgagagaggagctggccgccagaagcagcagaaccaactgcccctgcaagtacagcttcctggacaaccacaagaagctgacccccagaagagacgtgcccacctaccccaagtacctgctgagccccgagaccatcgaggccctgagaaagcccaccttcgacgtgtggctgtgggagcccaacgagatgctgagctgcctggagcacatgtaccacgacctgggcctggtgagagacttcagcatcaaccccgtgaccctgagaagatggctgttctgcgtgcacgacaactacagaaacaaccccttccacaacttcagacactgcttctgcgtggcccagatgatgtacagcatggtgtggctgtgcagcctgcaggagaagttcagccagaccgacatcctgatcctgatgaccgccgccatctgccacgacctggaccaccccggctacaacaacacctaccagatcaacgccagaaccgagctggccgtgagatacaacgacatcagccccctggagaaccaccactgcgccgtggccttccagatcctggccgagcccgagtgcaacatcttcagcaacatcccccccgacggcttcaagcagatcagacagggcatgatcaccctgatcctggccaccgacatggccagacacgccgagatcatggacagcttcaaggagaagatggagaacttcgactacagcaacgaggagcacatgaccctgctgaagatgatcctgatcaagtgctgcgacatcagcaacgaggtgagacccatggaggtggccgagccctgggtggactgcctgctggaggagtacttcatgcagagcgacagagagaagagcgagggcctgcccgtggcccccttcatggacagagacaaggtgaccaaggccaccgcccagatcggcttcatcaagttcgtgctgatccccatgttcgagaccgtgaccaagctgttccccatggtggaggagatcatgctgcagcccctgtgggagagcagagacagatacgaggagctgaagagaatcgacgacgccatgaaggagctgcagaagaagaccgacagcctgaccagcggcgccaccgagaagagcagagagagaagcagagacgtgaagaacagcgagggcgactgcgcctag

SEQ ID NO: 93182 - DNA, 1302 bp, synthetic construct
  misc_feature 1..1302: note = Description of Artificial Sequence: Synthetic coding sequence
  source 1..1302: mol_type = other DNA
atggacgccttcagaagagccttcaagatcaacgagctgaaggccgaggtggccaaccacctggccgtgctggagaagagagtggagctggagggcctgaaggtggtggagatcgagaagtgcaagagcgacatcaagaagatgagagaggagctggccgccagaagcagcagaaccaactgcccctgcaagtacagcttcctggacaaccacaagaagctgacccccagaagagacgtgcccacctaccccaagtacctgctgagccccgagaccatcgaggccctgagaaagcccaccttcgacgtgtggctgtgggagcccaacgagatgctgagctgcctggagcacatgtaccacgacctgggcctggtgagagacttcagcatcaaccccgtgaccctgagaagatggctgttctgcgtgcacgacaactacagaaacaaccccttccacaacttcagacactgcttctgcgtggcccagatgatgtacagcatggtgtggctgtgcagcctgcaggagaagttcagccagaccgacatcctgatcctgatgaccgccgccatctgccacgacctggaccaccccggctacaacaacacctaccagatcaacgccagaaccgagctggccgtgagatacaacgacatcagccccctggagaaccaccactgcgccgtggccttccagatcctggccgagcccgagtgcaacatcttcagcaacatcccccccgacggcttcaagcagatcagacagggcatgatcaccctgatcctggccaccgacatggccagacacgccgagatcatggacagcttcaaggagaagatggagaacttcgactacagcaacgaggagcacatgaccctgctgaagatgatcctgatcaagtgctgcgacatcagcaacgaggtgagacccatggaggtggccgagccctgggtggactgcctgctggaggagtacttcatgcagagcgacagagagaagagcgagggcctgcccgtggcccccttcatggacagagacaaggtgaccaaggccaccgcccagatcggcttcatcaagttcgtgctgatccccatgttcgagaccgtgaccaagctgttccccatggtggaggagatcatgctgcagcccctgtgggagagcagagacagatacgaggagctgaagagaatcgacgacgccatgaaggagctgcagaagaagaccgacagcctgaccagcggcgccaccgagaagagcagagagagaagcagagacgtgaagaacagcgagggcgactgcgcctag

SEQ ID NO: 93183 - DNA, 1380 bp, synthetic construct
  misc_feature 1..1380: note = Description of Artificial Sequence: Synthetic coding sequence
  source 1..1380: mol_type = other DNA
atggacgccttcagaagaaacaccaccatcagcctgctgaccaccgacgacgccatggtgagcatcgaccccaccatgcccgccaacagcgagagagccttcaagatcaacgagctgaaggccgaggtggccaaccacctggccgtgctggagaagagagtggagctggagggcctgaaggtggtggagatcgagaagtgcaagagcgacatcaagaagatgagagaggagctggccgccagaagcagcagaaccaactgcccctgcaagtacagcttcctggacaaccacaagaagctgacccccagaagagacgtgcccacctaccccaagtacctgctgagccccgagaccatcgaggccctgagaaagcccaccttcgacgtgtggctgtgggagcccaacgagatgctgagctgcctggagcacatgtaccacgacctgggcctggtgagagacttcagcatcaaccccgtgaccctgagaagatggctgttctgcgtgcacgacaactacagaaacaaccccttccacaacttcagacactgcttctgcgtggcccagatgatgtacagcatggtgtggctgtgcagcctgcaggagaagttcagccagaccgacatcctgatcctgatgaccgccgccatctgccacgacctggaccaccccggctacaacaacacctaccagatcaacgccagaaccgagctggccgtgagatacaacgacatcagccccctggagaaccaccactgcgccgtggccttccagatcctggccgagcccgagtgcaacatcttcagcaacatcccccccgacggcttcaagcagatcagacagggcatgatcaccctgatcctggccaccgacatggccagacacgccgagatcatggacagcttcaaggagaagatggagaacttcgactacagcaacgaggagcacatgaccctgctgaagatgatcctgatcaagtgctgcgacatcagcaacgaggtgagacccatggaggtggccgagccctgggtggactgcctgctggaggagtacttcatgcagagcgacagagagaagagcgagggcctgcccgtggcccccttcatggacagagacaaggtgaccaaggccaccgcccagatcggcttcatcaagttcgtgctgatccccatgttcgagaccgtgaccaagctgttccccatggtggaggagatcatgctgcagcccctgtgggagagcagagacagatacgaggagctgaagagaatcgacgacgccatgaaggagctgcagaagaagaccgacagcctgaccagcggcgccaccgagaagagcagagagagaagcagagacgtgaagaacagcgagggcgactgcgcctag

SEQ ID NO: 93184 - DNA, 1581 bp, synthetic construct
  misc_feature 1..1581: note = Description of Artificial Sequence: Synthetic coding sequence
  source 1..1581: mol_type = other DNA
atggacgccttcagaagcaccccctacaaggtgagacccgtggccatcaagcagctgagcgccggcgtggaggacaagagaaccaccagcagaggccagagcgccgagagacccctgagagacagaagagtggtgggcctggagcagcccagaagagagggcgccttcgagagcggccaggtggagcccagacccagagagccccagggctgctaccaggagggccagagaatcccccccgagagagaggagctgatccagagcgtgctggcccaggtggccgagcagttcagcagagccttcaagatcaacgagctgaaggccgaggtggccaaccacctggccgtgctggagaagagagtggagctggagggcctgaaggtggtggagatcgagaagtgcaagagcgacatcaagaagatgagagaggagctggccgccagaagcagcagaaccaactgcccctgcaagtacagcttcctggacaaccacaagaagctgacccccagaagagacgtgcccacctaccccaagtacctgctgagccccgagaccatcgaggccctgagaaagcccaccttcgacgtgtggctgtgggagcccaacgagatgctgagctgcctggagcacatgtaccacgacctgggcctggtgagagacttcagcatcaaccccgtgaccctgagaagatggctgttctgcgtgcacgacaactacagaaacaaccccttccacaacttcagacactgcttctgcgtggcccagatgatgtacagcatggtgtggctgtgcagcctgcaggagaagttcagccagaccgacatcctgatcctgatgaccgccgccatctgccacgacctggaccaccccggctacaacaacacctaccagatcaacgccagaaccgagctggccgtgagatacaacgacatcagccccctggagaaccaccactgcgccgtggccttccagatcctggccgagcccgagtgcaacatcttcagcaacatcccccccgacggcttcaagcagatcagacagggcatgatcaccctgatcctggccaccgacatggccagacacgccgagatcatggacagcttcaaggagaagatggagaacttcgactacagcaacgaggagcacatgaccctgctgaagatgatcctgatcaagtgctgcgacatcagcaacgaggtgagacccatggaggtggccgagccctgggtggactgcctgctggaggagtacttcatgcagagcgacagagagaagagcgagggcctgcccgtggcccccttcatggacagagacaaggtgaccaaggccaccgcccagatcggcttcatcaagttcgtgctgatccccatgttcgagaccgtgaccaagctgttccccatggtggaggagatcatgctgcagcccctgtgggagagcagagacagatacgaggagctgaagagaatcgacgacgccatgaaggagctgcagaagaagaccgacagcctgaccagcggcgccaccgagaagagcagagagagaagcagagacgtgaagaacagcgagggcgactgcgcctag

SEQ ID NO: 93185 - DNA, 1479 bp, synthetic construct
  misc_feature 1..1479: note = Description of Artificial Sequence: Synthetic coding sequence
  source 1..1479: mol_type = other DNA
atggacgccttcagaagaaacaccaccatcagcctgctgaccaccgacgacgccatggtgagcatcgaccccaccatgcccgccaacagcgagagaaccccctacaaggtgagacccgtggccatcaagcagctgagcgagagagaggagctgatccagagcgtgctggcccaggtggccgagcagttcagcagagccttcaagatcaacgagctgaaggccgaggtggccaaccacctggccgtgctggagaagagagtggagctggagggcctgaaggtggtggagatcgagaagtgcaagagcgacatcaagaagatgagagaggagctggccgccagaagcagcagaaccaactgcccctgcaagtacagcttcctggacaaccacaagaagctgacccccagaagagacgtgcccacctaccccaagtacctgctgagccccgagaccatcgaggccctgagaaagcccaccttcgacgtgtggctgtgggagcccaacgagatgctgagctgcctggagcacatgtaccacgacctgggcctggtgagagacttcagcatcaaccccgtgaccctgagaagatggctgttctgcgtgcacgacaactacagaaacaaccccttccacaacttcagacactgcttctgcgtggcccagatgatgtacagcatggtgtggctgtgcagcctgcaggagaagttcagccagaccgacatcctgatcctgatgaccgccgccatctgccacgacctggaccaccccggctacaacaacacctaccagatcaacgccagaaccgagctggccgtgagatacaacgacatcagccccctggagaaccaccactgcgccgtggccttccagatcctggccgagcccgagtgcaacatcttcagcaacatcccccccgacggcttcaagcagatcagacagggcatgatcaccctgatcctggccaccgacatggccagacacgccgagatcatggacagcttcaaggagaagatggagaacttcgactacagcaacgaggagcacatgaccctgctgaagatgatcctgatcaagtgctgcgacatcagcaacgaggtgagacccatggaggtggccgagccctgggtggactgcctgctggaggagtacttcatgcagagcgacagagagaagagcgagggcctgcccgtggcccccttcatggacagagacaaggtgaccaaggccaccgcccagatcggcttcatcaagttcgtgctgatccccatgttcgagaccgtgaccaagctgttccccatggtggaggagatcatgctgcagcccctgtgggagagcagagacagatacgaggagctgaagagaatcgacgacgccatgaaggagctgcagaagaagaccgacagcctgaccagcggcgccaccgagaagagcagagagagaagcagagacgtgaagaacagcgagggcgactgcgcctag

SEQ ID NO: 93186 - DNA, 1524 bp, synthetic construct
  misc_feature 1..1524: note = Description of Artificial Sequence: Synthetic coding sequence
  source 1..1524: mol_type = other DNA
atgggcagcggcagcagcagctacagacccaaggccatctacctggacatcgacggcagaatccagaaggtgatcttcagcaagtactgcaacagcagcgacatcatggacctgttctgcatcgccaccggcctgcccagaaccccctacaaggtgagacccgtggccatcaagcagctgagcgagagagaggagctgatccagagcgtgctggcccaggtggccgagcagttcagcagagccttcaagatcaacgagctgaaggccgaggtggccaaccacctggccgtgctggagaagagagtggagctggagggcctgaaggtggtggagatcgagaagtgcaagagcgacatcaagaagatgagagaggagctggccgccagaagcagcagaaccaactgcccctgcaagtacagcttcctggacaaccacaagaagctgacccccagaagagacgtgcccacctaccccaagtacctgctgagccccgagaccatcgaggccctgagaaagcccaccttcgacgtgtggctgtgggagcccaacgagatgctgagctgcctggagcacatgtaccacgacctgggcctggtgagagacttcagcatcaaccccgtgaccctgagaagatggctgttctgcgtgcacgacaactacagaaacaaccccttccacaacttcagacactgcttctgcgtggcccagatgatgtacagcatggtgtggctgtgcagcctgcaggagaagttcagccagaccgacatcctgatcctgatgaccgccgccatctgccacgacctggaccaccccggctacaacaacacctaccagatcaacgccagaaccgagctggccgtgagatacaacgacatcagccccctggagaaccaccactgcgccgtggccttccagatcctggccgagcccgagtgcaacatcttcagcaacatcccccccgacggcttcaagcagatcagacagggcatgatcaccctgatcctggccaccgacatggccagacacgccgagatcatggacagcttcaaggagaagatggagaacttcgactacagcaacgaggagcacatgaccctgctgaagatgatcctgatcaagtgctgcgacatcagcaacgaggtgagacccatggaggtggccgagccctgggtggactgcctgctggaggagtacttcatgcagagcgacagagagaagagcgagggcctgcccgtggcccccttcatggacagagacaaggtgaccaaggccaccgcccagatcggcttcatcaagttcgtgctgatccccatgttcgagaccgtgaccaagctgttccccatggtggaggagatcatgctgcagcccctgtgggagagcagagacagatacgaggagctgaagagaatcgacgacgccatgaaggagctgcagaagaagaccgacagcctgaccagcggcgccaccgagaagagcagagagagaagcagagacgtgaagaacagcgagggcgactgcgcctag

SEQ ID NO: 93187 - DNA, 1398 bp, synthetic construct
  misc_feature 1..1398: note = Description of Artificial Sequence: Synthetic coding sequence
  source 1..1398: mol_type = other DNA
atggacctgttctgcatcgccaccggcctgcccagaaacaccaccatcagcctgctgaccaccgacgacgccatggtgagcatcgaccccaccatgcccgccaacagcgagagagccttcaagatcaacgagctgaaggccgaggtggccaaccacctggccgtgctggagaagagagtggagctggagggcctgaaggtggtggagatcgagaagtgcaagagcgacatcaagaagatgagagaggagctggccgccagaagcagcagaaccaactgcccctgcaagtacagcttcctggacaaccacaagaagctgacccccagaagagacgtgcccacctaccccaagtacctgctgagccccgagaccatcgaggccctgagaaagcccaccttcgacgtgtggctgtgggagcccaacgagatgctgagctgcctggagcacatgtaccacgacctgggcctggtgagagacttcagcatcaaccccgtgaccctgagaagatggctgttctgcgtgcacgacaactacagaaacaaccccttccacaacttcagacactgcttctgcgtggcccagatgatgtacagcatggtgtggctgtgcagcctgcaggagaagttcagccagaccgacatcctgatcctgatgaccgccgccatctgccacgacctggaccaccccggctacaacaacacctaccagatcaacgccagaaccgagctggccgtgagatacaacgacatcagccccctggagaaccaccactgcgccgtggccttccagatcctggccgagcccgagtgcaacatcttcagcaacatcccccccgacggcttcaagcagatcagacagggcatgatcaccctgatcctggccaccgacatggccagacacgccgagatcatggacagcttcaaggagaagatggagaacttcgactacagcaacgaggagcacatgaccctgctgaagatgatcctgatcaagtgctgcgacatcagcaacgaggtgagacccatggaggtggccgagccctgggtggactgcctgctggaggagtacttcatgcagagcgacagagagaagagcgagggcctgcccgtggcccccttcatggacagagacaaggtgaccaaggccaccgcccagatcggcttcatcaagttcgtgctgatccccatgttcgagaccgtgaccaagctgttccccatggtggaggagatcatgctgcagcccctgtgggagagcagagacagatacgaggagctgaagagaatcgacgacgccatgaaggagctgcagaagaagaccgacagcctgaccagcggcgccaccgagaagagcagagagagaagcagagacgtgaagaacagcgagggcgactgcgcctag

SEQ ID NO: 93188 - DNA, 1869 bp, synthetic construct
  misc_feature 1..1869: note = Description of Artificial Sequence: Synthetic coding sequence
  source 1..1869: mol_type = other DNA
atgcccccccagctgcagaacggcctgaacctgagcgccaaggtggtgcagggcagcctggacagcctgccccaggccgtgagagagttcctggagaacaacgccgagctgtgccagcccgaccacatccacatctgcgacggcagcgaggaggagaacggcagactgctgggccagatggaggaggagggcatcctgagaagactgaagaagtacgacaactgctggctggccctgaccgaccccagagacgtggccagaatcgagagcaagaccgtgatcgtgacccaggagcagagagacaccgtgcccatccccaagaccggcctgagccagctgggcagatggatgagcgaggaggacttcgagaaggccttcaacgccagattccccggctgcatgaagggcagaaccatgtacgtgatccccttcagcatgggccccctgggcagccccctgagcaagatcggcatcgagctgaccgacagcccctacgtggtggccagcatgagaatcatgaccagaatgggcacccccgtgctggaggccgtgggcgacggcgagttcgtgaagtgcctgcacagcgtgggctgccccctgcccctgcagaagcccctggtgaacaactggccctgcaaccccgagctgaccctgatcgcccacctgcccgacagaagagagatcatcagcttcggcagcggctacggcggcaacagcctgctgggcaagaagtgcttcgccctgagaatggccagcagactggccaaggaggagggctggctggccgagcacatgctgatcctgggcatcaccaaccccgagggcgagaagaagtacctggccgccgccttccccagcgcctgcggcaagaccaacctggccatgatgaaccccagcctgcccggctggaaggtggagtgcgtgggcgacgacatcgcctggatgaagttcgacgcccagggccacctgagagccatcaaccccgagaacggcttcttcggcgtggcccccggcaccagcgtgaagaccaaccccaacgccatcaagaccatccagaagaacaccatcttcaccaacgtggccgagaccagcgacggcggcgtgtactgggagggcatcgacgagcccctggccagcggcgtgaccatcaccagctggaagaacaaggagtggagcagcgaggacggcgagccctgcgcccaccccaacagcagattctgcacccccgccagccagtgccccatcatcgacgccgcctgggagagccccgagggcgtgcccatcgagggcatcatcttcggcggcagaagacccgccggcgtgcccctggtgtacgaggccctgagctggcagcacggcgtgttcgtgggcgccgccatgagaagcgaggccaccgccgccgccgagcacaagggcaagatcatcatgcacgaccccttcgccatgagacccttcttcggctacaacttcggcaagtacctggcccactggctgagcatggcccagcaccccgccgccaagctgcccaagatcttccacgtgaactggttcagaaaggacaaggagggcaagttcctgtggcccggcttcggcgagaacagcagagtgctggagtggatgttcaacagaatcgacggcaaggccagcaccaagctgacccccatcggctacatccccaaggaggacgccctgaacctgaagggcctgggccacatcaacatgatggagctgttcagcatcagcaaggagttctgggagaaggaggtggaggacatcgagaagtacctggaggaccaggtgaacgccgacctgccctgcgagatcgagagagagatcctggccctgaagcagagaatcagccagatgtag

SEQ ID NO: 93189 - DNA, 942 bp, synthetic construct
  misc_feature 1..942: note = Description of Artificial Sequence: Synthetic coding sequence
  source 1..942: mol_type = other DNA
atgaccaccggcagaaccatgtacgtgatccccttcagcatgggccccctgggcagccccctgagcaagatcggcatcgagctgaccgacagcccctacgtggtggccagcatgagaatcatgaccagaatgggcacccccgtgctggaggccgtgggcgacggcgagttcgtgaagtgcctgcacagcgtgggctgccccctgcccctgcagaagcccctggtgaacaactggccctgcaaccccgagctgaccctgatcgcccacctgcccgacagaagagagatcatcagcttcggcagcggctacggcggcaacagcctgctgggcaagaagtgcttcgccctgagaatggccagcagactggccaaggaggagggctggctggccgagcacatgctgatcctgggcatcaccaaccccgagggcgagaagaagtacctggccgccgccttccccagcgcctgcggcaagaccaacctggccatgatgaaccccagcctgcccggctggaaggtggagtgcgtgggcgacgacatcgcctggatgaagttcgacgcccagggccacctgagagccatcaaccccgagaacggcttcttcggcgtggcccccggcaccagcgtgaagaccaaccccaacgccatcaagaccatccagaagaacaccatcttcaccaacgtggccgagaccagcgacggcggcgtgtactgggagggcatcgacgagcccctggccagcggcgtgaccatcaccagctggaagaacaaggagtggagcagcgaggacggcgtgagcctgcccgaggccctggtgtgcagagccgccggcaccgcctgcctgagccaggccctgaccagcctgagcctgagctacagaggcaccctgtgccccccccagctggaggtgctgcacccctgccagcccgtgccccaccactag

SEQ ID NO: 93190 - DNA, 915 bp, synthetic construct
  misc_feature 1..915: note = Description of Artificial Sequence: Synthetic coding sequence
  source 1..915: mol_type = other DNA
accaccggccacctgagagccatcaaccccgagaacggcttcttcggcgtggcccccggcaccagcgtgaagaccaaccccaacgccatcaagaccatccagaagaacaccatcttcaccaacgtggccgagaccagcgacggcggcgtgtactgggagggcatcgacgagcccctggccagcggcgtgaccatcaccagctggaagaacaaggagtggagcagcgaggacggcgagccctgcgcccaccccaacagcagattctgcacccccgccagccagtgccccatcatcgacgccgcctgggagagccccgagggcgtgcccatcgagggcatcatcttcggcggcagaagacccgccggcgtgcccctggtgtacgaggccctgagctggcagcacggcgtgttcgtgggcgccgccatgagaagcgaggccaccgccgccgccgagcacaagggcaagatcatcatgcacgaccccttcgccatgagacccttcttcggctacaacttcggcaagtacctggcccactggctgagcatggcccagcaccccgccgccaagctgcccaagatcttccacgtgaactggttcagaaaggacaaggagggcaagttcctgtggcccggcttcggcgagaacagcagagtgctggagtggatgttcaacagaatcgacggcaaggccagcaccaagctgacccccatcggctacatccccaaggaggacgccctgaacctgaagggcctgggccacatcaacatgatggagctgttcagcatcagcaaggagttctgggagaaggaggtggaggacatcgagaagtacctggaggaccaggtgaacgccgacctgccctgcgagatcgagagagagatcctggccctgaagcagagaatcagccagatgtag

SEQ ID NO: 93191 - DNA, 918 bp, synthetic construct
  misc_feature 1..918: note = Description of Artificial Sequence: Synthetic coding sequence
  source 1..918: mol_type = other DNA
atgaccaccggccacctgagagccatcaaccccgagaacggcttcttcggcgtggcccccggcaccagcgtgaagaccaaccccaacgccatcaagaccatccagaagaacaccatcttcaccaacgtggccgagaccagcgacggcggcgtgtactgggagggcatcgacgagcccctggccagcggcgtgaccatcaccagctggaagaacaaggagtggagcagcgaggacggcgagccctgcgcccaccccaacagcagattctgcacccccgccagccagtgccccatcatcgacgccgcctgggagagccccgagggcgtgcccatcgagggcatcatcttcggcggcagaagacccgccggcgtgcccctggtgtacgaggccctgagctggcagcacggcgtgttcgtgggcgccgccatgagaagcgaggccaccgccgccgccgagcacaagggcaagatcatcatgcacgaccccttcgccatgagacccttcttcggctacaacttcggcaagtacctggcccactggctgagcatggcccagcaccccgccgccaagctgcccaagatcttccacgtgaactggttcagaaaggacaaggagggcaagttcctgtggcccggcttcggcgagaacagcagagtgctggagtggatgttcaacagaatcgacggcaaggccagcaccaagctgacccccatcggctacatccccaaggaggacgccctgaacctgaagggcctgggccacatcaacatgatggagctgttcagcatcagcaaggagttctgggagaaggaggtggaggacatcgagaagtacctggaggaccaggtgaacgccgacctgccctgcgagatcgagagagagatcctggccctgaagcagagaatcagccagatgtag

SEQ ID NO: 93192 - DNA, 1674 bp, synthetic construct; identical to SEQ ID NO: 77629
  misc_feature 1..1674: note = Description of Artificial Sequence: Synthetic coding sequence
  source 1..1674: mol_type = other DNA

SEQ ID NO: 93193 - DNA, 1326 bp, synthetic construct
  misc_feature 1..1326: note = Description of Artificial Sequence: Synthetic coding sequence
  source 1..1326: mol_type = other DNA
atggccgccctgtacagacccggcctgagactgaactggcacggcctgagccccctgggctggcccagctgcagaagcatccagaccctgagagtgctgagcggcgacctgggccagctgcccaccggcatcagagacttcgtggagcacagcgccagactgtgccagcccgagggcatccacatctgcgacggcaccgaggccgagaacaccgccaccctgaccctgctggagcagcagggcctgatcagaaagctgcccaagtacaacaactgctggctggccagaaccgaccccaaggacgtggccagagtggagagcaagaccgtgatcgtgacccccagccagagagacaccgtgcagctgccccccggcggcgccagaggccagctgggcaactggatgagccccgccgacttccagagagccgtggacgagagattccccggctgcatgcagggcagaaccatgtacgtgctgcccttcagcatgggccccgtgggcagccccctgagcagaatcggcgtgcagctgaccgacagcgcctacgtggtggccagcatgagaatcatgaccagactgggcacccccgtgctgcaggccctgggcgacggcgacttcgtgaagtgcctgcacagcgtgggccagcccctgaccggccagggcgagcccgtgagccagtggccctgcaaccccgagaagaccctgatcggccacgtgcccgaccagagagagatcatcagcttcggcagcggctacggcggcaacagcctgctgggcaagaagtgcttcgccctgagaatcgccagcagactggccagagacgagggctggctggccgagcacatgctgatcctgggcatcaccagccccgccggcaagaagagatacgtggccgccgccttccccagcgcctgcggcaagaccaacctggccatgatgagacccgccctgcccggctggaaggtggagtgcgtgggcgacgacatcgcctggatgagattcgacagcgagggcagactgagagccatcaaccccgagaacggcttcttcggcgtggcccccggcaccagcgccaccaccaaccccaacgccatggccaccatccagagcaacaccatcttcaccaacgtggccgagaccagcgacggcggcgtgtactgggagggcatcgaccagcccctgccccccggcgtgaccgtgaccagctggctgggcaagccctggaagcccggcatgtgcggcggcgagggcgtggcccagccccccggcctgagcaccctgatggtggagaagctgagcccccagccccccaccatcttctag

SEQ ID NO: 93194 - DNA, 1521 bp, synthetic construct
  misc_feature 1..1521: note = Description of Artificial Sequence: Synthetic coding sequence
  source 1..1521: mol_type = other DNA
atgagccccgccgacttccagagagccgtggacgagagattccccggctgcatgcagggcagaaccatgtacgtgctgcccttcagcatgggccccgtgggcagccccctgagcagaatcggcgtgcagctgaccgacagcgcctacgtggtggccagcatgagaatcatgaccagactgggcacccccgtgctgcaggccctgggcgacggcgacttcgtgaagtgcctgcacagcgtgggccagcccctgaccggccagggcgagcccgtgagccagtggccctgcaaccccgagaagaccctgatcggccacgtgcccgaccagagagagatcatcagcttcggcagcggctacggcggcaacagcctgctgggcaagaagtgcttcgccctgagaatcgccagcagactggccagagacgagggctggctggccgagcacatgctgatcctgggcatcaccagccccgccggcaagaagagatacgtggccgccgccttccccagcgcctgcggcaagaccaacctggccatgatgagacccgccctgcccggctggaaggtggagtgcgtgggcgacgacatcgcctggatgagattcgacagcgagggcagactgagagccatcaaccccgagaacggcttcttcggcgtggcccccggcaccagcgccaccaccaaccccaacgccatggccaccatccagagcaacaccatcttcaccaacgtggccgagaccagcgacggcggcgtgtactgggagggcatcgaccagcccctgccccccggcgtgaccgtgaccagctggctgggcaagccctggaagcccggcgacaaggagccctgcgcccaccccaacagcagattctgcgcccccgccagacagtgccccatcatggaccccgcctgggaggcccccgagggcgtgcccatcgacgccatcatcttcggcggcagaagacccaagggcgtgcccctggtgtacgaggccttcaactggagacacggcgtgttcgtgggcagcgccatgagaagcgagagcaccgccgccgccgagcacaagggcaagatcatcatgcacgaccccttcgccatgagacccttcttcggctacaacttcggccactacctggagcactggctgagcatggagggcagaaagggcgcccagctgcccagaatcttccacgtgaactggttcagaagagacgaggccggccacttcctgtggcccggcttcggcgagaacgccagagtgctggactggatctgcagaagactggagggcgaggacagcgccagagagacccccatcggcctggtgcccaaggagggcgccctggacctgagcggcctgagagccatcgacaccacccagctgttcagcctgcccaaggacttctgggagcaggaggtgagagacatcagaagctacctgaccgagcaggtgaaccaggacctgcccaaggaggtgctggccgagctggaggccctggagagaagagtgcacaagatgtag

SEQ ID NO: 93195 - DNA, 1521 bp, synthetic construct; identical to SEQ ID NO: 93194
  misc_feature 1..1521: note = Description of Artificial Sequence: Synthetic coding sequence
  source 1..1521: mol_type = other DNA

SEQ ID NO: 93196 - DNA, 2343 bp, synthetic construct
  misc_feature 1..2343: note = Description of Artificial Sequence: Synthetic coding sequence
  source 1..2343: mol_type = other DNA
atggccgccgtggacctggagaagctgagagccagcggcgccggcaaggccatcggcgtgctgaccagcggcggcgacgcccagggcatgaacgccgccgtgagagccgtgaccagaatgggcatctacgtgggcgccaaggtgttcctgatctacgagggctacgagggcctggtggagggcggcgagaacatcaagcaggccaactggctgagcgtgagcaacatcatccagctgggcggcaccatcatcggcagcgccagatgcaaggccttcaccaccagagagggcagaagagccgccgcctacaacctggtgcagcacggcatcaccaacctgtgcgtgatcggcggcgacggcagcctgaccggcgccaacatcttcagaagcgagtggggcagcctgctggaggagctggtggccgagggcaagatcagcgagaccaccgccagaacctacagccacctgaacatcgccggcctggtgggcagcatcgacaacgacttctgcggcaccgacatgaccatcggcaccgacagcgccctgcacagaatcatggaggtgatcgacgccatcaccaccaccgcccagagccaccagagaaccttcgtgctggaggtgatgggcagacactgcggctacctggccctggtgagcgccctggccagcggcgccgactggctgttcatccccgaggccccccccgaggacggctgggagaacttcatgtgcgagagactgggcgagaccagaagcagaggcagcagactgaacatcatcatcatcgccgagggcgccatcgacagaaacggcaagcccatcagcagcagctacgtgaaggacctggtggtgcagagactgggcttcgacaccagagtgaccgtgctgggccacgtgcagagaggcggcacccccagcgccttcgacagaatcctgagcagcaagatgggcatggaggccgtgatggccctgctggaggccacccccgacacccccgcctgcgtggtgaccctgagcggcaaccagagcgtgagactgcccctgatggagtgcgtgcagatgaccaaggaggtgcagaaggccatggacgacaagagattcgacgaggccacccagctgagaggcggcagcttcgagaacaactggaacatctacaagctgctggcccaccagaagccccccaaggagaagagcaacttcagcctggccatcctgaacgtgggcgcccccgccgccggcatgaacgccgccgtgagaagcgccgtgagaaccggcatcagccacggccacaccgtgtacgtggtgcacgacggcttcgagggcctggccaagggccaggtgcaggaggtgggctggcacgacgtggccggctggctgggcagaggcggcagcatgctgggcaccaagagaaccctgcccaagggccagctggagagcatcgtggagaacatcagaatctacggcatccacgccctgctggtggtgggcggcttcgaggcctacgagggcgtgctgcagctggtggaggccagaggcagatacgaggagctgtgcatcgtgatgtgcgtgatccccgccaccatcagcaacaacgtgcccggcaccgacttcagcctgggcagcgacaccgccgtgaacgccgccatggagagctgcgacagaatcaagcagagcgccagcggcaccaagagaagagtgttcatcgtggagaccatgggcggctactgcggctacctggccaccgtgaccggcatcgccgtgggcgccgacgccgcctacgtgttcgaggaccccttcaacatccacgacctgaaggtgaacgtggagcacatgaccgagaagatgaagaccgacatccagagaggcctggtgctgagaaacgagaagtgccacgactactacaccaccgagttcctgtacaacctgtacagcagcgagggcaagggcgtgttcgactgcagaaccaacgtgctgggccacctgcagcagggcggcgcccccacccccttcgacagaaactacggcaccaagctgggcgtgaaggccatgctgtggctgagcgagaagctgagagaggtgtacagaaagggcagagtgttcgccaacgcccccgacagcgcctgcgtgatcggcctgaagaagaaggccgtggccttcagccccgtgaccgagctgaagaaggacaccgacttcgagcacagaatgcccagagagcagtggtggctgagcctgagactgatgctgaagatgctggcccagtacagaatcagcatggccgcctacgtgagcggcgagctggagcacgtgaccagaagaaccctgagcatggacaagggcttctag

SEQ ID NO: 93197 - DNA, 762 bp, synthetic construct
  misc_feature 1..762: note = Description of Artificial Sequence: Synthetic coding sequence
  source 1..762: mol_type = other DNA
atgagaagcatgtgcaaccagggcagaggcagagagagcagcagaggcggcctgcacgtgcagggcagctgcagaggcctgagcagaagcccccagcaggagaccggcttcgccaaggcccccgccggcaccgactgcttcttccactgcagccccggcagcagaggccagggcgacagaaaggaggaggtgaccagcgagcccggcggcaccagcatcatgagcagactgggcggcatgaacgccgccgtgagagccgtgaccagaatgggcatctacgtgggcgccaaggtgttcctgatctacgagggctacgagggcctggtggagggcggcgagaacatcaagcaggccaactggctgagcgtgagcaacatcatccagctgggcggcaccatcatcggcagcgccagatgcaaggccttcaccaccagagagggcagaagagccgccgcctacaacctggtgcagcacggcatcaccaacctgtgcgtgatcggcggcgacggcagcctgaccggcgccaacatcttcagaagcgagtggggcagcctgctggaggagctggtggccgagggcaagatcagcgagaccaccgccagaacctacagccacctgaacatcgccggcctggtgggcagcatcgacaacgacttctgcggcaccgacatgaccatcggcaccgacagcgccctgcacagaatcatggaggtgatcgacgccatcaccaccagaggcagactgggcgagctgcacgtgtag

SEQ ID NO: 93198 - DNA, 2484 bp, synthetic construct
  misc_feature 1..2484: note = Description of Artificial Sequence: Synthetic coding sequence
  source 1..2484: mol_type = other DNA
atgtgcaaccagggcagaggcagagagagcagcagaggcggcctgcacgtgcagggcagctgcagaggcctgagcagaagcccccagcaggagaccggcttcgccaaggcccccgccggcaccgactgcttcttccactgcagccccggcagcagaggccagggcgacagaaaggaggaggtgaccagcgagcccggcggcaccagcatcatgagcagactgggcggcatgaacgccgccgtgagagccgtgaccagaatgggcatctacgtgggcgccaaggtgttcctgatctacgagggctacgagggcctggtggagggcggcgagaacatcaagcaggccaactggctgagcgtgagcaacatcatccagctgggcggcaccatcatcggcagcgccagatgcaaggccttcaccaccagagagggcagaagagccgccgcctacaacctggtgcagcacggcatcaccaacctgtgcgtgatcggcggcgacggcagcctgaccggcgccaacatcttcagaagcgagtggggcagcctgctggaggagctggtggccgagggcaagatcagcgagaccaccgccagaacctacagccacctgaacatcgccggcctggtgggcagcatcgacaacgacttctgcggcaccgacatgaccatcggcaccgacagcgccctgcacagaatcatggaggtgatcgacgccatcaccaccaccgcccagagccaccagagaaccttcgtgctggaggtgatgggcagacactgcggctacctggccctggtgagcgccctggccagcggcgccgactggctgttcatccccgaggccccccccgaggacggctgggagaacttcatgtgcgagagactgggcgagaccagaagcagaggcagcagactgaacatcatcatcatcgccgagggcgccatcgacagaaacggcaagcccatcagcagcagctacgtgaaggacctggtggtgcagagactgggcttcgacaccagagtgaccgtgctgggccacgtgcagagaggcggcacccccagcgccttcgacagaatcctgagcagcaagatgggcatggaggccgtgatggccctgctggaggccacccccgacacccccgcctgcgtggtgaccctgagcggcaaccagagcgtgagactgcccctgatggagtgcgtgcagatgaccaaggaggtgcagaaggccatggacgacaagagattcgacgaggccacccagctgagaggcggcagcttcgagaacaactggaacatctacaagctgctggcccaccagaagccccccaaggagaagagcaacttcagcctggccatcctgaacgtgggcgcccccgccgccggcatgaacgccgccgtgagaagcgccgtgagaaccggcatcagccacggccacaccgtgtacgtggtgcacgacggcttcgagggcctggccaagggccaggtgcaggaggtgggctggcacgacgtggccggctggctgggcagaggcggcagcatgctgggcaccaagagaaccctgcccaagggccagctggagagcatcgtggagaacatcagaatctacggcatccacgccctgctggtggtgggcggcttcgaggcctacgagggcgtgctgcagctggtggaggccagaggcagatacgaggagctgtgcatcgtgatgtgcgtgatccccgccaccatcagcaacaacgtgcccggcaccgacttcagcctgggcagcgacaccgccgtgaacgccgccatggagagctgcgacagaatcaagcagagcgccagcggcaccaagagaagagtgttcatcgtggagaccatgggcggctactgcggctacctggccaccgtgaccggcatcgccgtgggcgccgacgccgcctacgtgttcgaggaccccttcaacatccacgacctgaaggtgaacgtggagcacatgaccgagaagatgaagaccgacatccagagaggcctggtgctgagaaacgagaagtgccacgactactacaccaccgagttcctgtacaacctgtacagcagcgagggcaagggcgtgttcgactgcagaaccaacgtgctgggccacctgcagcagggcggcgcccccacccccttcgacagaaactacggcaccaagctgggcgtgaaggccatgctgtggctgagcgagaagctgagagaggtgtacagaaagggcagagtgttcgccaacgcccccgacagcgcctgcgtgatcggcctgaagaagaaggccgtggccttcagccccgtgaccgagctgaagaaggacaccgacttcgagcacagaatgcccagagagcagtggtggctgagcctgagactgatgctgaagatgctggcccagtacagaatcagcatggccgcctacgtgagcggcgagctggagcacgtgaccagaagaaccctgagcatggacaagggcttctag

SEQ ID NO: 93199 - DNA, 1722 bp, synthetic construct
  misc_feature 1..1722: note = Description of Artificial Sequence: Synthetic coding sequence
  source 1..1722: mol_type = other DNA
atgggcagacactgcggctacctggccctggtgagcgccctggccagcggcgccgactggctgttcatccccgaggccccccccgaggacggctgggagaacttcatgtgcgagagactgggcgagaccagaagcagaggcagcagactgaacatcatcatcatcgccgagggcgccatcgacagaaacggcaagcccatcagcagcagctacgtgaaggacctggtggtgcagagactgggcttcgacaccagagtgaccgtgctgggccacgtgcagagaggcggcacccccagcgccttcgacagaatcctgagcagcaagatgggcatggaggccgtgatggccctgctggaggccacccccgacacccccgcctgcgtggtgaccctgagcggcaaccagagcgtgagactgcccctgatggagtgcgtgcagatgaccaaggaggtgcagaaggccatggacgacaagagattcgacgaggccacccagctgagaggcggcagcttcgagaacaactggaacatctacaagctgctggcccaccagaagccccccaaggagaagagcaacttcagcctggccatcctgaacgtgggcgcccccgccgccggcatgaacgccgccgtgagaagcgccgtgagaaccggcatcagccacggccacaccgtgtacgtggtgcacgacggcttcgagggcctggccaagggccaggtgcaggaggtgggctggcacgacgtggccggctggctgggcagaggcggcagcatgctgggcaccaagagaaccctgcccaagggccagctggagagcatcgtggagaacatcagaatctacggcatccacgccctgctggtggtgggcggcttcgaggcctacgagggcgtgctgcagctggtggaggccagaggcagatacgaggagctgtgcatcgtgatgtgcgtgatccccgccaccatcagcaacaacgtgcccggcaccgacttcagcctgggcagcgacaccgccgtgaacgccgccatggagagctgcgacagaatcaagcagagcgccagcggcaccaagagaagagtgttcatcgtggagaccatgggcggctactgcggctacctggccaccgtgaccggcatcgccgtgggcgccgacgccgcctacgtgttcgaggaccccttcaacatccacgacctgaaggtgaacgtggagcacatgaccgagaagatgaagaccgacatccagagaggcctggtgctgagaaacgagaagtgccacgactactacaccaccgagttcctgtacaacctgtacagcagcgagggcaagggcgtgttcgactgcagaaccaacgtgctgggccacctgcagcagggcggcgcccccacccccttcgacagaaactacggcaccaagctgggcgtgaaggccatgctgtggctgagcgagaagctgagagaggtgtacagaaagggcagagtgttcgccaacgcccccgacagcgcctgcgtgatcggcctgaagaagaaggccgtggccttcagccccgtgaccgagctgaagaaggacaccgacttcgagcacagaatgcccagagagcagtggtggctgagcctgagactgatgctgaagatgctggcccagtacagaatcagcatggccgcctacgtgagcggcgagctggagcacgtgaccagaagaaccctgagcatggacaagggcttctag

SEQ ID NO: 93200 - DNA, 2343 bp, synthetic construct
  misc_feature 1..2343: note = Description of Artificial Sequence: Synthetic coding sequence
  source 1..2343: mol_type = other DNA
atgacccacgaggagcaccacgccgccaagaccctgggcatcggcaaggccatcgccgtgctgaccagcggcggcgacgcccagggcatgaacgccgccgtgagagccgtggtgagagtgggcatcttcaccggcgccagagtgttcttcgtgcacgagggctaccagggcctggtggacggcggcgaccacatcaaggaggccacctgggagagcgtgagcatgatgctgcagctgggcggcaccgtgatcggcagcgccagatgcaaggacttcagagagagagagggcagactgagagccgcctacaacctggtgaagagaggcatcaccaacctgtgcgtgatcggcggcgacggcagcctgaccggcgccgacaccttcagaagcgagtggagcgacctgctgagcgacctgcagaaggccggcaagatcaccgacgaggaggccaccaagagcagctacctgaacatcgtgggcctggtgggcagcatcgacaacgacttctgcggcaccgacatgaccatcggcaccgacagcgccctgcacagaatcatggagatcgtggacgccatcaccaccaccgcccagagccaccagagaaccttcgtgctggaggtgatgggcagacactgcggctacctggccctggtgaccagcctgagctgcggcgccgactgggtgttcatccccgagtgcccccccgacgacgactgggaggagcacctgtgcagaagactgagcgagaccagaaccagaggcagcagactgaacatcatcatcgtggccgagggcgccatcgacaagaacggcaagcccatcaccagcgaggacatcaagaacctggtggtgaagagactgggctacgacaccagagtgaccgtgctgggccacgtgcagagaggcggcacccccagcgccttcgacagaatcctgggcagcagaatgggcgtggaggccgtgatggccctgctggagggcacccccgacacccccgcctgcgtggtgagcctgagcggcaaccaggccgtgagactgcccctgatggagtgcgtgcaggtgaccaaggacgtgaccaaggccatggacgagaagaagttcgacgaggccctgaagctgagaggcagaagcttcatgaacaactgggaggtgtacaagctgctggcccacgtgagaccccccgtgagcaagagcggcagccacaccgtggccgtgatgaacgtgggcgcccccgccgccggcatgaacgccgccgtgagaagcaccgtgagaatcggcctgatccagggcaacagagtgctggtggtgcacgacggcttcgagggcctggccaagggccagatcgaggaggccggctggagctacgtgggcggctggaccggccagggcggcagcaagctgggcaccaagagaaccctgcccaagaagagcttcgagcagatcagcgccaacatcaccaagttcaacatccagggcctggtgatcatcggcggcttcgaggcctacaccggcggcctggagctgatggagggcagaaagcagttcgacgagctgtgcatccccttcgtggtgatccccgccaccgtgagcaacaacgtgcccggcagcgacttcagcgtgggcgccgacaccgccctgaacaccatctgcaccacctgcgacagaatcaagcagagcgccgccggcaccaagagaagagtgttcatcatcgagaccatgggcggctactgcggctacctggccaccatggccggcctggccgccggcgccgacgccgcctacatcttcgaggagcccttcaccatcagagacctgcaggccaacgtggagcacctggtgcagaagatgaagaccaccgtgaagagaggcctggtgctgagaaacgagaagtgcaacgagaactacaccaccgacttcatcttcaacctgtacagcgaggagggcaagggcatcttcgacagcagaaagaacgtgctgggccacatgcagcagggcggcagccccacccccttcgacagaaacttcgccaccaagatgggcgccaaggccatgaactggatgagcggcaagatcaaggagagctacagaaacggcagaatcttcgccaacacccccgacagcggctgcgtgctgggcatgagaaagagagccctggtgttccagcccgtggccgagctgaaggaccagaccgacttcgagcacagaatccccaaggagcagtggtggctgaagctgagacccatcctgaagatcctggccaagtacgagatcgacctggacaccagcgaccacgcccacctggagcacatcaccagaaagagaagcggcgaggccgccgtgtag

SEQ ID NO: 93201 - DNA, 2556 bp, synthetic construct
  misc_feature 1..2556: note = Description of Artificial Sequence: Synthetic coding sequence
  source 1..2556: mol_type = other DNA
atgcacaaggacgagttccacctgaagttcttcatgtgcgtgatccagagcagacagctggtgagaaccccccagagaaccgccggcgaggccagcaccagcagcatgctgatccccaagcccccccccaagaccgacatcctgaagagcctggacaccatggacgaccccgacaccgtgggcagcatccccgtgttcaagaccgagtggatcatgacccacgaggagcaccacgccgccaagaccctgggcatcggcaaggccatcgccgtgctgaccagcggcggcgacgcccagggcatgaacgccgccgtgagagccgtggtgagagtgggcatcttcaccggcgccagagtgttcttcgtgcacgagggctaccagggcctggtggacggcggcgaccacatcaaggaggccacctgggagagcgtgagcatgatgctgcagctgggcggcaccgtgatcggcagcgccagatgcaaggacttcagagagagagagggcagactgagagccgcctacaacctggtgaagagaggcatcaccaacctgtgcgtgatcggcggcgacggcagcctgaccggcgccgacaccttcagaagcgagtggagcgacctgctgagcgacctgcagaaggccggcaagatcaccgacgaggaggccaccaagagcagctacctgaacatcgtgggcctggtgggcagcatcgacaacgacttctgcggcaccgacatgaccatcggcaccgacagcgccctgcacagaatcatggagatcgtggacgccatcaccaccaccgcccagagccaccagagaaccttcgtgctggaggtgatgggcagacactgcggctacctggccctggtgaccagcctgagctgcggcgccgactgggtgttcatccccgagtgcccccccgacgacgactgggaggagcacctgtgcagaagactgagcgagaccagaaccagaggcagcagactgaacatcatcatcgtggccgagggcgccatcgacaagaacggcaagcccatcaccagcgaggacatcaagaacctggtggtgaagagactgggctacgacaccagagtgaccgtgctgggccacgtgcagagaggcggcacccccagcgccttcgacagaatcctgggcagcagaatgggcgtggaggccgtgatggccctgctggagggcacccccgacacccccgcctgcgtggtgagcctgagcggcaaccaggccgtgagactgcccctgatggagtgcgtgcaggtgaccaaggacgtgaccaaggccatggacgagaagaagttcgacgaggccctgaagctgagaggcagaagcttcatgaacaactgggaggtgtacaagctgctggcccacgtgagaccccccgtgagcaagagcggcagccacaccgtggccgtgatgaacgtgggcgcccccgccgccggcatgaacgccgccgtgagaagcaccgtgagaatcggcctgatccagggcaacagagtgctggtggtgcacgacggcttcgagggcctggccaagggccagatcgaggaggccggctggagctacgtgggcggctggaccggccagggcggcagcaagctgggcaccaagagaaccctgcccaagaagagcttcgagcagatcagcgccaacatcaccaagttcaacatccagggcctggtgatcatcggcggcttcgaggcctacaccggcggcctggagctgatggagggcagaaagcagttcgacgagctgtgcatccccttcgtggtgatccccgccaccgtgagcaacaacgtgcccggcagcgacttcagcgtgggcgccgacaccgccctgaacaccatctgcaccacctgcgacagaatcaagcagagcgccgccggcaccaagagaagagtgttcatcatcgagaccatgggcggctactgcggctacctggccaccatggccggcctggccgccggcgccgacgccgcctacatcttcgaggagcccttcaccatcagagacctgcaggccaacgtggagcacctggtgcagaagatgaagaccaccgtgaagagaggcctggtgctgagaaacgagaagtgcaacgagaactacaccaccgacttcatcttcaacctgtacagcgaggagggcaagggcatcttcgacagcagaaagaacgtgctgggccacatgcagcagggcggcagccccacccccttcgacagaaacttcgccaccaagatgggcgccaaggccatgaactggatgagcggcaagatcaaggagagctacagaaacggcagaatcttcgccaacacccccgacagcggctgcgtgctgggcatgagaaagagagccctggtgttccagcccgtggccgagctgaaggaccagaccgacttcgagcacagaatccccaaggagcagtggtggctgaagctgagacccatcctgaagatcctggccaagtacgagatcgacctggacaccagcgaccacgcccacctggagcacatcaccagaaagagaagcggcgaggccgccgtgtag

SEQ ID NO: 93202 - DNA, 2343 bp, synthetic construct; identical to SEQ ID NO: 93200
  misc_feature 1..2343: note = Description of Artificial Sequence: Synthetic coding sequence
  source 1..2343: mol_type = other DNA

SEQ ID NO: 93203 - DNA, 2250 bp, synthetic construct
  misc_feature 1..2250: note = Description of Artificial Sequence: Synthetic coding sequence
  source 1..2250: mol_type = other DNA
atgacccacgaggagcaccacgccgccaagaccctgggcatcggcaaggccatcgccgtgctgaccagcggcggcgacgcccagggcatgaacgccgccgtgagagccgtggtgagagtgggcatcttcaccggcgccagagtgttcttcgtgcacgagggctaccagggcctggtggacggcggcgaccacatcaaggaggccacctgggagagcgtgagcatgatgctgcagctgggcggcaccgtgatcggcagcgccagatgcaaggacttcagagagagagagggcagactgagagccgcctacaacctggtgaagagaggcatcaccaacctgtgcgtgatcggcggcgacggcagcctgaccggcgccgacaccttcagaagcgagtggagcgacctgctgagcgacctgcagaaggccggcaagatcaccgacgaggaggccaccaagagcagctacctgaacatcgtgggcctggtgggcagcatcgacaacgacttctgcggcaccgacatgaccatcggcaccgacagcgccctgcacagaatcatggagatcgtggacgccatcaccaccaccgcccagagccaccagagaaccttcgtgctggaggtgatgggcagacactgcggctacctggccctggtgaccagcctgagctgcggcgccgactgggtgttcatccccgagtgcccccccgacgacgactgggaggagcacctgtgcagaagactgagcgagaccagaaccagaggcagcagactgaacatcatcatcgtggccgagggcgccatcgacaagaacggcaagcccatcaccagcgaggacatcaagaacggcagcagaatgggcgtggaggccgtgatggccctgctggagggcacccccgacacccccgcctgcgtggtgagcctgagcggcaaccaggccgtgagactgcccctgatggagtgcgtgcaggtgaccaaggacgtgaccaaggccatggacgagaagaagttcgacgaggccctgaagctgagaggcagaagcttcatgaacaactgggaggtgtacaagctgctggcccacgtgagaccccccgtgagcaagagcggcagccacaccgtggccgtgatgaacgtgggcgcccccgccgccggcatgaacgccgccgtgagaagcaccgtgagaatcggcctgatccagggcaacagagtgctggtggtgcacgacggcttcgagggcctggccaagggccagatcgaggaggccggctggagctacgtgggcggctggaccggccagggcggcagcaagctgggcaccaagagaaccctgcccaagaagagcttcgagcagatcagcgccaacatcaccaagttcaacatccagggcctggtgatcatcggcggcttcgaggcctacaccggcggcctggagctgatggagggcagaaagcagttcgacgagctgtgcatccccttcgtggtgatccccgccaccgtgagcaacaacgtgcccggcagcgacttcagcgtgggcgccgacaccgccctgaacaccatctgcaccacctgcgacagaatcaagcagagcgccgccggcaccaagagaagagtgttcatcatcgagaccatgggcggctactgcggctacctggccaccatggccggcctggccgccggcgccgacgccgcctacatcttcgaggagcccttcaccatcagagacctgcaggccaacgtggagcacctggtgcagaagatgaagaccaccgtgaagagaggcctggtgctgagaaacgagaagtgcaacgagaactacaccaccgacttcatcttcaacctgtacagcgaggagggcaagggcatcttcgacagcagaaagaacgtgctgggccacatgcagcagggcggcagccccacccccttcgacagaaacttcgccaccaagatgggcgccaaggccatgaactggatgagcggcaagatcaaggagagctacagaaacggcagaatcttcgccaacacccccgacagcggctgcgtgctgggcatgagaaagagagccctggtgttccagcccgtggccgagctgaaggaccagaccgacttcgagcacagaatccccaaggagcagtggtggctgaagctgagacccatcctgaagatcctggccaagtacgagatcgacctggacaccagcgaccacgcccacctggagcacatcaccagaaagagaagcggcgaggccgccgtgtag

SEQ ID NO: 93204 - DNA, 534 bp, synthetic construct
  misc_feature 1..534: note = Description of Artificial Sequence: Synthetic coding sequence
  source 1..534: mol_type = other DNA
atgacccacgaggagcaccacgccgccaagaccctgggcatcggcaaggccatcgccgtgctgaccagcggcggcgacgcccagggcatgaacgccgccgtgagaagcaccgtgagaatcggcctgatccagggcaacagagtgctggtggtgcacgacggcttcgagggcctggccaagggccagatcgaggaggccggctggagctacgtgggcggctggaccggccagggcggcagcaagctgggcaccaagagaaccctgcccaagaagagcttcgagcagatcagcgccaacatcaccaagttcaacatccagggcctggtgatcatcggcggcttcgaggcctacaccggcggcctggagctgatggagggcagaaagcagttcgacgagctgtgcatccccttcgtggtgatccccgccaccgtgagcaacaacgtgcccggcagcgacttcagcgtgggcgccgacaccgccctgaacaccatctgcaccacctgcgacagaatcaagcagagcgccgccggctag

SEQ ID NO: 93205 - DNA, 2343 bp, synthetic construct; identical to SEQ ID NO: 93200
  misc_feature 1..2343: note = Description of Artificial Sequence: Synthetic coding sequence
  source 1..2343: mol_type = other DNA

SEQ ID NO: 93206 - DNA, 354 bp, synthetic construct
  misc_feature 1..354: note = Description of Artificial Sequence: Synthetic coding sequence
  source 1..354: mol_type = other DNA
atgacccacgaggagcaccacgccgccaagaccctgggcatcggcaaggccatcgccgtgctgaccagcggcggcgacgcccagggcatgaacgccgccgtgagagccgtggtgagagtgggcatcttcaccggcgccagagtgttcttcgtgcacgagggctaccagggcctggtggacggcggcgaccacatcaaggaggccacctgggagagcgtgagcatgatgctgcagctgggcggcaccgtgatcggcagcgccagatgcaaggacttcagagagagagagggcagactgagagccgcctacaacctggtgaagagaggcatcaccaacctgtgcgtgatcggctag

SEQ ID NO: 93207 - DNA, 486 bp, synthetic construct
  misc_feature 1..486: note = Description of Artificial Sequence: Synthetic coding sequence
  source 1..486: mol_type = other DNA
atgacccacgaggagcaccacgccgccaagaccctgggcatcggcaaggccatcgccgtgctgaccagcggcggcgacgcccagggcatgaacgccgccgtgagagccgtggtgagagtgggcatcttcaccggcgccagagtgttcttcgtgcacgagggctaccagggcctggtggacggcggcgaccacatcaaggaggccacctgggagagcgtgagcatgatgctgcagctgggcggcaccgtgatcggcagcgccagatgcaaggacttcagagagagagagggcagactgagagccgcctacaacctggtgaagagaggcatcaccaacctgtgcgtgatcggcggcgacggcagcctgaccggcgccgacaccttcagaagcgagtggagcgacctgctgagcgacctgcagaaggccggcaagatcaccgacgaggaggccaccaagagcagctacctgaacatcgtgggcctgtag

SEQ ID NO: 93208 - DNA, 474 bp, synthetic construct
  misc_feature 1..474: note = Description of Artificial Sequence: Synthetic coding sequence
  source 1..474: mol_type = other DNA
atgacccacgaggagcaccacgccgccaagaccctgggcatcggcaaggccatcgccgtgctgaccagcggcggcgacgcccagggcatgaacgccgccgtgagagccgtggtgagagtgggcatcttcaccggcgccagagtgttcttcgtgcacgagggctaccagggcctggtggacggcggcgaccacatcaaggaggccacctgggagagcgtgagcatgatgctgcagctgggcggcaccgtgatcggcagcgccagatgcaaggacttcagagagagagagggcagactgagagccgcctacaacctggtgaagagaggcatcaccaacctgtgcgtgatcggcggcgacggcagcctgaccggcgccgacaccttcagaagcgagtggagcgacctgctgagcgacctgcagaaggccggcaagatcaccgacgaggaggccaccaagagcagctacctgaactag

SEQ ID NO: 93209 - DNA, 258 bp, synthetic construct
  misc_feature 1..258: note = Description of Artificial Sequence: Synthetic coding sequence
  source 1..258: mol_type = other DNA
atgacccacgaggagcaccacgccgccaagaccctgggcatcggcaaggccatcgccgtgctgaccagcggcggcgacgcccagggcatgaacgccgccgtgagagccgtggtgagagtgggcatcttcaccggcgccagagtgttcttcgtgcacgagggctaccagggcctggtggacggcggcgaccacatcaaggaggccacctgggagagcgtgagcatgatgctgcagctgggcggcaccgtgatcggctag

SEQ ID NO: 93210 - DNA, 420 bp, synthetic construct
  misc_feature 1..420: note = Description of Artificial Sequence: Synthetic coding sequence
  source 1..420: mol_type = other DNA
atgacccacgaggagcaccacgccgccaagaccctgggcatcggcaaggccatcgccgtgctgaccagcggcggcgacgcccagggcatgaacgccgccgtgagagccgtggtgagagtgggcatcttcaccggcgccagagtgttcttcgtgcacgagggctaccagggcctggtggacggcggcgaccacatcaaggaggccacctgggagagcgtgagcatgatgctgcagctgggcggcaccgtgatcggcagcgccagatgcaaggacttcagagagagagagggcagactgagagccgcctacaacctggtgaagagaggcatcaccaacctgtgcgtgatcggcggcgacggcagcctgaccggcgccgacaccttcagaagcgagtggagcgacctgctgagcgacctgtag

SEQ ID NO: 93211 - DNA, 2250 bp, synthetic construct; identical to SEQ ID NO: 93203
  misc_feature 1..2250: note = Description of Artificial Sequence: Synthetic coding sequence
  source 1..2250: mol_type = other DNA

SEQ ID NO: 93212 - DNA, 609 bp, synthetic construct
  misc_feature 1..609: note = Description of Artificial Sequence: Synthetic coding sequence
  source 1..609: mol_type = other DNA
atgggcggctactgcggctacctggccaacatgggcggcctggccgccggcgccgacgccgcctacatcttcgaggagcccttcgacatcagagacctgcagagcaacgtggagcacctgaccgagaagatgaagaccaccatccagagaggcctggtgctgagaaacgagagctgcagcgagaactacaccaccgacttcatctaccagctgtacagcgaggagggcaagggcgtgttcgactgcagaaagaacgtgctgggccacatgcagcagggcggcgcccccagccccttcgacagaaacttcggcaccaagatcagcgccagagccatggagtggatcaccgccaagctgaaggaggccagaggcagaggcaagaagttcaccaccgacgacagcatctgcgtgctgggcatcagcaagagaaacgtgatcttccagcccgtggccgagctgaagaagcagaccgacttcgagcacagaatccccaaggagcagtggtggctgaagctgagacccctgatgaagatcctggccaagtacaaggccagctacgacgtgagcgacagcggccagctggagcacgtgcagccctggagcgtgtag

SEQ ID NO: 93213 - DNA, 2331 bp, synthetic construct
  misc_feature 1..2331: note = Description of Artificial Sequence: Synthetic coding sequence
  source 1..2331: mol_type = other DNA
atgtgcggctacgagagatgcagaccctgcagaggcgcccacggctacctgagaggcggccagggcgtgctgcacctgagaggcctgcccggccacggcggcagaagactgaagcacagaagaggcagactgggcgagtgcctgcagcaccccgccagcggcgccgtgagaggcgactggagagagaagcccggctgctggagccacagattcccctgccccggcagacacgccctggtgggcggcaccatcatcggcagcgccagatgccaggccttcagaaccagagagggcagactgaaggccgcctgcaacctgctgcagagaggcatcaccaacctgtgcgtgatcggcggcgacggcagcctgaccggcgccaacctgttcagaaaggagtggagcggcctgctggaggagctggccagaaacggccagatcgacaaggaggccgtgcagaagtacgcctacctgaacgtggtgggcatggtgggcagcatcgacaacgacttctgcggcaccgacatgaccatcggcaccgacagcgccctgcacagaatcatcgaggtggtggacgccatcatgaccaccgcccagagccaccagagaaccttcgtgctggaggtgatgggcagacactgcggctacctggccctggtgagcgccctggcctgcggcgccgactgggtgttcctgcccgagagcccccccgaggagggctgggaggagcagatgtgcgtgaagctgagcgagaacagagccagaaagaagagactgaacatcatcatcgtggccgagggcgccatcgacacccagaacaagcccatcaccagcgagaagatcaaggagctggtggtgacccagctgggctacgacaccagagtgaccatcctgggccacgtgcagagaggcggcacccccagcgccttcgacagaatcctggccagcagaatgggcgtggaggccgtgatcgccctgctggaggccacccccgacacccccgcctgcgtggtgagcctgaacggcaaccacgccgtgagactgcccctgatggagtgcgtgcagatgacccaggacgtgcagaaggccatggacgagagaagattccaggacgccgtgagactgagaggcagaagcttcgccggcaacctgaacacctacaagagactggccatcaagctgcccgacgaccagatccccaagaccaactgcaacgtggccgtgatcaacgtgggcgcccccgccgccggcatgaacgccgccgtgagaagcgccgtgagagtgggcatcgccgacggccacagaatgctggccatctacgacggcttcgacggcttcgccaagggccagatcaaggagatcggctggaccgacgtgggcggctggaccggccagggcggcagcatcctgggcaccaagagagtgctgcccggcaagtacctggaggagatcgccacccagatgagaacccacagcatcaacgccctgctgatcatcggcggcttcgaggcctacctgggcctgctggagctgagcgccgccagagagaagcacgaggagttctgcgtgcccatggtgatggtgcccgccaccgtgagcaacaacgtgcccggcagcgacttcagcatcggcgccgacaccgccctgaacaccatcaccgacacctgcgacagaatcaagcagagcgccagcggcaccaagagaagagtgttcatcatcgagaccatgggcggctactgcggctacctggccaacatgggcggcctggccgccggcgccgacgccgcctacatcttcgaggagcccttcgacatcagagacctgcagagcaacgtggagcacctgaccgagaagatgaagaccaccatccagagaggcctggtgctgagaaacgagagctgcagcgagaactacaccaccgacttcatctaccagctgtacagcgaggagggcaagggcgtgttcgactgcagaaagaacgtgctgggccacatgcagcagggcggcgcccccagccccttcgacagaaacttcggcaccaagatcagcgccagagccatggagtggatcaccgccaagctgaaggaggccagaggcagaggcaagaagttcaccaccgacgacagcatctgcgtgctgggcatcagcaagagaaacgtgatcttccagcccgtggccgagctgaagaagcagaccgacttcgagcacagaatccccaaggagcagtggtggctgaagctgagacccctgatgaagatcctggccaagtacaaggccagctacgacgtgagcgacagcggccagctggagcacgtgcagccctggagcgtgtag

SEQ ID NO: 93214 - DNA, 2355 bp, synthetic construct
  misc_feature 1..2355: note = Description of Artificial Sequence: Synthetic coding sequence
  source 1..2355: mol_type = other DNA
atggacgccgacgacagcagagcccccaagggcagcctgagaaagttcctggagcacctgagcggcgccggcaaggccatcggcgtgctgaccagcggcggcgacgcccagggcatgaacgccgccgtgagagccgtggtgagaatgggcatctacgtgggcgccaaggtgtacttcatctacgagggctaccagggcatggtggacggcggcagcaacatcgccgaggccgactgggagagcgtgagcagcatcctgcaggtgggcggcaccatcatcggcagcgccagatgccaggccttcagaaccagagagggcagactgaaggccgcctgcaacctgctgcagagaggcatcaccaacctgtgcgtgatcggcggcgacggcagcctgaccggcgccaacctgttcagaaaggagtggagcggcctgctggaggagctggccagaaacggccagatcgacaaggaggccgtgcagaagtacgcctacctgaacgtggtgggcatggtgggcagcatcgacaacgacttctgcggcaccgacatgaccatcggcaccgacagcgccctgcacagaatcatcgaggtggtggacgccatcatgaccaccgcccagagccaccagagaaccttcgtgctggaggtgatgggcagacactgcggctacctggccctggtgagcgccctggcctgcggcgccgactgggtgttcctgcccgagagcccccccgaggagggctgggaggagcagatgtgcgtgaagctgagcgagaacagagccagaaagaagagactgaacatcatcatcgtggccgagggcgccatcgacacccagaacaagcccatcaccagcgagaagatcaaggagctggtggtgacccagctgggctacgacaccagagtgaccatcctgggccacgtgcagagaggcggcacccccagcgccttcgacagaatcctggccagcagaatgggcgtggaggccgtgatcgccctgctggaggccacccccgacacccccgcctgcgtggtgagcctgaacggcaaccacgccgtgagactgcccctgatggagtgcgtgcagatgacccaggacgtgcagaaggccatggacgagagaagattccaggacgccgtgagactgagaggcagaagcttcgccggcaacctgaacacctacaagagactggccatcaagctgcccgacgaccagatccccaagaccaactgcaacgtggccgtgatcaacgtgggcgcccccgccgccggcatgaacgccgccgtgagaagcgccgtgagagtgggcatcgccgacggccacagaatgctggccatctacgacggcttcgacggcttcgccaagggccagatcaaggagatcggctggaccgacgtgggcggctggaccggccagggcggcagcatcctgggcaccaagagagtgctgcccggcaagtacctggaggagatcgccacccagatgagaacccacagcatcaacgccctgctgatcatcggcggcttcgaggcctacctgggcctgctggagctgagcgccgccagagagaagcacgaggagttctgcgtgcccatggtgatggtgcccgccaccgtgagcaacaacgtgcccggcagcgacttcagcatcggcgccgacaccgccctgaacaccatcaccgacacctgcgacagaatcaagcagagcgccagcggcaccaagagaagagtgttcatcatcgagaccatgggcggctactgcggctacctggccaacatgggcggcctggccgccggcgccgacgccgcctacatcttcgaggagcccttcgacatcagagacctgcagagcaacgtggagcacctgaccgagaagatgaagaccaccatccagagaggcctggtgctgagaaacgagagctgcagcgagaactacaccaccgacttcatctaccagctgtacagcgaggagggcaagggcgtgttcgactgcagaaagaacgtgctgggccacatgcagcagggcggcgcccccagccccttcgacagaaacttcggcaccaagatcagcgccagagccatggagtggatcaccgccaagctgaaggaggccagaggcagaggcaagaagttcaccaccgacgacagcatctgcgtgctgggcatcagcaagagaaacgtgatcttccagcccgtggccgagctgaagaagcagaccgacttcgagcacagaatccccaaggagcagtggtggctgaagctgagacccctgatgaagatcctggccaagtacaaggccagctacgacgtgagcgacagcggccagctggagcacgtgcagccctggagcgtgtag

SEQ ID NO: 93215 - DNA, 2322 bp, synthetic construct
  misc_feature 1..2322: note = Description of Artificial Sequence: Synthetic coding sequence
  source 1..2322: mol_type = other DNA
tacgagagatgcagaccctgcagaggcgcccacggctacctgagaggcggccagggcgtgctgcacctgagaggcctgcccggccacggcggcagaagactgaagcacagaagaggcagactgggcgagtgcctgcagcaccccgccagcggcgccgtgagaggcgactggagagagaagcccggctgctggagccacagattcccctgccccggcagacacgccctggtgggcggcaccatcatcggcagcgccagatgccaggccttcagaaccagagagggcagactgaaggccgcctgcaacctgctgcagagaggcatcaccaacctgtgcgtgatcggcggcgacggcagcctgaccggcgccaacctgttcagaaaggagtggagcggcctgctggaggagctggccagaaacggccagatcgacaaggaggccgtgcagaagtacgcctacctgaacgtggtgggcatggtgggcagcatcgacaacgacttctgcggcaccgacatgaccatcggcaccgacagcgccctgcacagaatcatcgaggtggtggacgccatcatgaccaccgcccagagccaccagagaaccttcgtgctggaggtgatgggcagacactgcggctacctggccctggtgagcgccctggcctgcggcgccgactgggtgttcctgcccgagagcccccccgaggagggctgggaggagcagatgtgcgtgaagctgagcgagaacagagccagaaagaagagactgaacatcatcatcgtggccgagggcgccatcgacacccagaacaagcccatcaccagcgagaagatcaaggagctggtggtgacccagctgggctacgacaccagagtgaccatcctgggccacgtgcagagaggcggcacccccagcgccttcgacagaatcctggccagcagaatgggcgtggaggccgtgatcgccctgctggaggccacccccgacacccccgcctgcgtggtgagcctgaacggcaaccacgccgtgagactgcccctgatggagtgcgtgcagatgacccaggacgtgcagaaggccatggacgagagaagattccaggacgccgtgagactgagaggcagaagcttcgccggcaacctgaacacctacaagagactggccatcaagctgcccgacgaccagatccccaagaccaactgcaacgtggccgtgatcaacgtgggcgcccccgccgccggcatgaacgccgccgtgagaagcgccgtgagagtgggcatcgccgacggccacagaatgctggccatctacgacggcttcgacggcttcgccaagggccagatcaaggagatcggctggaccgacgtgggcggctggaccggccagggcggcagcatcctgggcaccaagagagtgctgcccggcaagtacctggaggagatcgccacccagatgagaacccacagcatcaacgccctgctgatcatcggcggcttcgaggcctacctgggcctgctggagctgagcgccgccagagagaagcacgaggagttctgcgtgcccatggtgatggtgcccgccaccgtgagcaacaacgtgcccggcagcgacttcagcatcggcgccgacaccgccctgaacaccatcaccgacacctgcgacagaatcaagcagagcgccagcggcaccaagagaagagtgttcatcatcgagaccatgggcggctactgcggctacctggccaacatgggcggcctggccgccggcgccgacgccgcctacatcttcgaggagcccttcgacatcagagacctgcagagcaacgtggagcacctgaccgagaagatgaagaccaccatccagagaggcctggtgctgagaaacgagagctgcagcgagaactacaccaccgacttcatctaccagctgtacagcgaggagggcaagggcgtgttcgactgcagaaagaacgtgctgggccacatgcagcagggcggcgcccccagccccttcgacagaaacttcggcaccaagatcagcgccagagccatggagtggatcaccgccaagctgaaggaggccagaggcagaggcaagaagttcaccaccgacgacagcatctgcgtgctgggcatcagcaagagaaacgtgatcttccagcccgtggccgagctgaagaagcagaccgacttcgagcacagaatccccaaggagcagtggtggctgaagctgagacccctgatgaagatcctggccaagtacaaggccagctacgacgtgagcgacagcggccagctggagcacgtgcagccctggagcgtgtag

SEQ ID NO: 93216 - DNA, 633 bp, synthetic construct
  misc_feature 1..633: note = Description of Artificial Sequence: Synthetic coding sequence
  source 1..633: mol_type = other DNA
atgaacgccgccgtgagagccgtggtgagaatgggcatctacgtgggcgccaaggtgtacttcatctacgagggctaccagggcatggtggacggcggcagcaacatcgccgaggccgactgggagagcgtgagcagcatcctgcaggtgggcggcaccatcatcggcagcgccagatgccaggccttcagaaccagagagggcagactgaaggccgcctgcaacctgctgcagagaggcatcaccaacctgtgcgtgatcggcggcgacggcagcctgaccggcgccaacctgttcagaaaggagtggagcggcctgctggaggagctggccagaaacggccagatcgacaaggaggccgtgcagaagtacgcctacctgaacgtggtgggcatggtgggcagcatcgacaacgacttctgcggcaccgacatgaccatcggcaccgacagcgccctgcacagaatcatcgaggtggtggacgccatcatgaccaccgcccagagccaccagagaaccttcgtgctggaggtgatgggcagacactgcggctacctggccctggtgagcgccctggcctgcggcgccgactgggtgttcctgcccgagagcccccccgaggagggctggtag

SEQ ID NO: 93217 - DNA, 501 bp, synthetic construct
  misc_feature 1..501: note = Description of Artificial Sequence: Synthetic coding sequence
  source 1..501: mol_type = other DNA
tgagccgacggccacagaatgctggccatctacgacggcttcgacggcttcgccaagggccagatcaaggagatcggctggaccgacgtgggcggctggaccggccagggcggcagcatcctgggcaccaagagagtgctgcccggcaagtacctggaggagatcgccacccagatgagaacccacagcatcaacgccctgctgatcatcggcggcttcgaggcctacaagagcgcctgcgacatggccgaggccagaggcagacaccaggagctgtgcatccccctgtgcgtggtgcccgccaccatcagcaacaacgtgcccggcaccgagatcagcctgggcagcgacaccggcctgaacgccgtggtggagacctgcgacagaatcaagcagagcgccagcggcaccaagagaagagtgttcatcatcgagaccatgggcggctactgcggctacctggccaacatgggcggcctggccgccggcgccgacgcctag

SEQ ID NO: 93218 - DNA, 723 bp, synthetic construct
  misc_feature 1..723: note = Description of Artificial Sequence: Synthetic coding sequence
  source 1..723: mol_type = other DNA
atgggcagacactgcggctacctggccctggtgagcgccctggcctgcggcgccgactgggtgttcctgcccgagagcccccccgaggagggctgggaggagcagatgtgcgtgaagctgagcgagaacagagccagaaagaagagactgaacatcatcatcgtggccgagggcgccatcgacacccagaacaagcccatcaccagcgagaagatcaaggagctggtggtgacccagctgggctacgacaccagagtgaccatcctgggccacgtgcagagaggcggcacccccagcgccttcgacagaatcctggccagcagaatgggcgtggaggccgtgatcgccctgctggaggccacccccgacacccccgcctgcgtggtgagcctgaacggcaaccacgccgtgagactgcccctgatggagtgcgtgcagatgacccaggacgtgcagaaggccatggacgagagaagattccaggacgccgtgagactgagaggcagaagcttcgccggcaacctgaacacctacaagagactggccatcaagctgcccgacgaccagatccccaagaccaactgcaacgtggccgtgatcaacgtgggcgcccccgccgccggcatgaacgccgccgtgagaagcgccgtgagagtgggcatcgccgacggccacagaatgctggccatctacgacggcttcgacggcttcgccaagggctag

SEQ ID NO: 93219 - DNA, 501 bp, synthetic construct
  misc_feature 1..501: note = Description of Artificial Sequence: Synthetic coding sequence
  source 1..501: mol_type = other DNA
atgaacgccgccgtgagagccgtggtgagaatgggcatctacgtgggcgccaaggtgtacttcatctacgagggctaccagggcatggtggacggcggcagcaacatcgccgaggccgactgggagagcgtgagcagcatcctgcaggtgggcggcaccatcatcggcagcgccagatgccaggccttcagaaccagagagggcagactgaaggccgcctgcaacctgctgcagagaggcatcaccaacctgtgcgtgatcggcggcgacggcagcctgaccggcgccaacctgttcagaaaggagtggagcggcctgctggaggagctggccagaaacggccagatcgacaaggaggccgtgcagaagtacgcctacctgaacgtggtgggcatggtgggcagcatcgacaacgacttctgcggcaccgacatgaccatcggcaccgacagcgccctgcacagaatcatcgaggtggtggacgccatcatgaccacctag

SEQ ID NO: 93220 - DNA, 312 bp, synthetic construct
  misc_feature 1..312: note = Description of Artificial Sequence: Synthetic coding sequence
  source 1..312: mol_type = other DNA
tgattcatctaccagctgtacagcgaggagggcaagggcgtgttcgactgcagaaagaacgtgctgggccacatgcagcagggcggcgcccccagccccttcgacagaaacttcggcaccaagatcagcgccagagccatggagtggatcaccgccaagctgaaggaggccagaggcagaggcaagaagttcaccaccgacgacagcatctgcgtgctgggcatcagcaagagaaacgtgatcttccagcccgtggccgagctgaagaagcagaccgacttcgagaccgtgagcatgcagccccccagatag

SEQ ID NO: 93221 - DNA, 1743 bp, synthetic construct
  misc_feature 1..1743: note = Description of Artificial Sequence: Synthetic coding sequence
  source 1..1743: mol_type = other DNA
atgagcgacttcgaggagtggatcagcggcacctacagaaagatggaggagggccccctgcccctgctgaccttcgccaccgccccctaccacgaccagaagcccggcaccagcggcctgagaaagaagacctactacttcgaggagaagccctgctacctggagaacttcatccagagcatcttcttcagcatcgacctgaaggacagacagggcagcagcctggtggtgggcggcgacggcagatacttcaacaagagcgccatcgagaccatcgtgcagatggccgccgccaacggcatcggcagactggtgatcggccagaacggcatcctgagcacccccgccgtgagctgcatcatcagaaagatcaaggccatcggcggcatcatcctgaccgccagccacaaccccggcggccccaacggcgacttcggcatcaagttcaacatcagcaacggcggccccgcccccgaggccatcaccgacaagatcttccagatcagcaagaccatcgaggagtacgccgtgtgccccgacctgaaggtggacctgggcgtgctgggcaagcagcagttcgacctggagaacaagttcaagcccttcaccgtggagatcgtggacagcgtggaggcctacgccaccatgctgagaagcatcttcgacttcagcgccctgaaggagctgctgagcggccccaacagactgaagatcagaatcgacgccatgcacggcgtggtgggcccctacgtgaagaagatcctgtgcgaggagctgggcgcccccgccaacagcgccgtgaactgcgtgcccctggaggacttcggcggccaccaccccgaccccaacctgacctacgccgccgacctggtggagaccatgaagagcggcgagcacgacttcggcgccgccttcgacggcgacggcgacagaaacatgatcctgggcaagcacggcttcttcgtgaaccccagcgacagcgtggccgtgatcgccgccaacatcttcagcatcccctacttccagcagaccggcgtgagaggcttcgccagaagcatgcccaccagcggcgccctggacagagtggccagcgccaccaagatcgccctgtacgagacccccaccggctggaagttcttcggcaacctgatggacgccagcaagctgagcctgtgcggcgaggagagcttcggcaccggcagcgaccacatcagagagaaggacggcctgtgggccgtgctggcctggctgagcatcctggccaccagaaagcagagcgtggaggacatcctgaaggaccactggcagaagtacggcagaaacttcttcaccagatacgactacgaggaggtggaggccgagggcgccaacaagatgatgaaggacctggaggccctgatgttcgacagaagcttcgtgggcaagcagttcagcgccaacgacaaggtgtacaccgtggagaaggccgacaacttcgagtacagcgaccccgtggacggcagcatcagcagaaaccagggcctgagactgatcttcaccgacggcagcagaatcgtgttcagactgagcggcaccggcagcgccggcgccaccatcagactgtacatcgacagctacgagaaggacgtggccaagatcaaccaggacccccaggtgatgctggcccccctgatcagcatcgccctgaaggtgagccagctgcaggagagaaccggcagaaccgcccccaccgtgatcacctag

SEQ ID NO: 93222 - DNA, 1689 bp, synthetic construct
  misc_feature 1..1689: note = Description of Artificial Sequence: Synthetic coding sequence
  source 1..1689: mol_type = other DNA
atggtgaagatcgtgaccgtgaagacccaggcctaccaggaccagaagcccggcaccagcggcctgagaaagagagtgaaggtgttccagagcagcgccaactacgccgagaacttcatccagagcatcatcagcaccgtggagcccgcccagagacaggaggccaccctggtggtgggcggcgacggcagattctacatgaaggaggccatccagctgatcgccagaatcgccgccgccaacggcatcggcagactggtgatcggccagaacggcatcctgagcacccccgccgtgagctgcatcatcagaaagatcaaggccatcggcggcatcatcctgaccgccagccacaaccccggcggccccaacggcgacttcggcatcaagttcaacatcagcaacggcggccccgcccccgaggccatcaccgacaagatcttccagatcagcaagaccatcgaggagtacgccgtgtgccccgacctgaaggtggacctgggcgtgctgggcaagcagcagttcgacctggagaacaagttcaagcccttcaccgtggagatcgtggacagcgtggaggcctacgccaccatgctgagaagcatcttcgacttcagcgccctgaaggagctgctgagcggccccaacagactgaagatcagaatcgacgccatgcacggcgtggtgggcccctacgtgaagaagatcctgtgcgaggagctgggcgcccccgccaacagcgccgtgaactgcgtgcccctggaggacttcggcggccaccaccccgaccccaacctgacctacgccgccgacctggtggagaccatgaagagcggcgagcacgacttcggcgccgccttcgacggcgacggcgacagaaacatgatcctgggcaagcacggcttcttcgtgaaccccagcgacagcgtggccgtgatcgccgccaacatcttcagcatcccctacttccagcagaccggcgtgagaggcttcgccagaagcatgcccaccagcggcgccctggacagagtggccagcgccaccaagatcgccctgtacgagacccccaccggctggaagttcttcggcaacctgatggacgccagcaagctgagcctgtgcggcgaggagagcttcggcaccggcagcgaccacatcagagagaaggacggcctgtgggccgtgctggcctggctgagcatcctggccaccagaaagcagagcgtggaggacatcctgaaggaccactggcagaagtacggcagaaacttcttcaccagatacgactacgaggaggtggaggccgagggcgccaacaagatgatgaaggacctggaggccctgatgttcgacagaagcttcgtgggcaagcagttcagcgccaacgacaaggtgtacaccgtggagaaggccgacaacttcgagtacagcgaccccgtggacggcagcatcagcagaaaccagggcctgagactgatcttcaccgacggcagcagaatcgtgttcagactgagcggcaccggcagcgccggcgccaccatcagactgtacatcgacagctacgagaaggacgtggccaagatcaaccaggacccccaggtgatgctggcccccctgatcagcatcgccctgaaggtgagccagctgcaggagagaaccggcagaaccgcccccaccgtgatcacctag

SEQ ID NO: 93223 - DNA, 1617 bp, synthetic construct
  misc_feature 1..1617: note = Description of Artificial Sequence: Synthetic coding sequence
  source 1..1617: mol_type = other DNA
atggtgaaggtgttccagagcagcgccaactacgccgagaacttcatccagagcatcatcagcaccgtggagcccgcccagagacaggaggccaccctggtggtgggcggcgacggcagattctacatgaaggaggccatccagctgatcgccagaatcgccgccgccaacggcatcggcagactggtgatcggccagaacggcatcctgagcacccccgccgtgagctgcatcatcagaaagatcaaggccatcggcggcatcatcctgaccgccagccacaaccccggcggccccaacggcgacttcggcatcaagttcaacatcagcaacggcggccccgcccccgaggccatcaccgacaagatcttccagatcagcaagaccatcgaggagtacgccgtgtgccccgacctgaaggtggacctgggcgtgctgggcaagcagcagttcgacctggagaacaagttcaagcccttcaccgtggagatcgtggacagcgtggaggcctacgccaccatgctgagaagcatcttcgacttcagcgccctgaaggagctgctgagcggccccaacagactgaagatcagaatcgacgccatgcacggcgtggtgggcccctacgtgaagaagatcctgtgcgaggagctgggcgcccccgccaacagcgccgtgaactgcgtgcccctggaggacttcggcggccaccaccccgaccccaacctgacctacgccgccgacctggtggagaccatgaagagcggcgagcacgacttcggcgccgccttcgacggcgacggcgacagaaacatgatcctgggcaagcacggcttcttcgtgaaccccagcgacagcgtggccgtgatcgccgccaacatcttcagcatcccctacttccagcagaccggcgtgagaggcttcgccagaagcatgcccaccagcggcgccctggacagagtggccagcgccaccaagatcgccctgtacgagacccccaccggctggaagttcttcggcaacctgatggacgccagcaagctgagcctgtgcggcgaggagagcttcggcaccggcagcgaccacatcagagagaaggacggcctgtgggccgtgctggcctggctgagcatcctggccaccagaaagcagagcgtggaggacatcctgaaggaccactggcagaagtacggcagaaacttcttcaccagatacgactacgaggaggtggaggccgagggcgccaacaagatgatgaaggacctggaggccctgatgttcgacagaagcttcgtgggcaagcagttcagcgccaacgacaaggtgtacaccgtggagaaggccgacaacttcgagtacagcgaccccgtggacggcagcatcagcagaaaccagggcctgagactgatcttcaccgacggcagcagaatcgtgttcagactgagcggcaccggcagcgccggcgccaccatcagactgtacatcgacagctacgagaaggacgtggccaagatcaaccaggacccccaggtgatgctggcccccctgatcagcatcgccctgaaggtgagccagctgcaggagagaaccggcagaaccgcccccaccgtgatcacctag

SEQ ID NO: 93224 - DNA, 1098 bp, synthetic construct
  misc_feature 1..1098: note = Description of Artificial Sequence: Synthetic coding sequence
  source 1..1098: mol_type = other DNA
atgctgagaagcatcttcgacttcagcgccctgaaggagctgctgagcggccccaacagactgaagatcagaatcgacgccatgcacggcgtggtgggcccctacgtgaagaagatcctgtgcgaggagctgggcgcccccgccaacagcgccgtgaactgcgtgcccctggaggacttcggcggccaccaccccgaccccaacctgacctacgccgccgacctggtggagaccatgaagagcggcgagcacgacttcggcgccgccttcgacggcgacggcgacagaaacatgatcctgggcaagcacggcttcttcgtgaaccccagcgacagcgtggccgtgatcgccgccaacatcttcagcatcccctacttccagcagaccggcgtgagaggcttcgccagaagcatgcccaccagcggcgccctggacagagtggccagcgccaccaagatcgccctgtacgagacccccaccggctggaagttcttcggcaacctgatggacgccagcaagctgagcctgtgcggcgaggagagcttcggcaccggcagcgaccacatcagagagaaggacggcctgtgggccgtgctggcctggctgagcatcctggccaccagaaagcagagcgtggaggacatcctgaaggaccactggcagaagtacggcagaaacttcttcaccagatacgactacgaggaggtggaggccgagggcgccaacaagatgatgaaggacctggaggccctgatgttcgacagaagcttcgtgggcaagcagttcagcgccaacgacaaggtgtacaccgtggagaaggccgacaacttcgagtacagcgaccccgtggacggcagcatcagcagaaaccagggcctgagactgatcttcaccgacggcagcagaatcgtgttcagactgagcggcaccggcagcgccggcgccaccatcagactgtacatcgacagctacgagaaggacgtggccaagatcaaccaggacccccaggtgatgctggcccccctgatcagcatcgccctgaaggtgagccagctgcaggagagaaccggcagaaccgcccccaccgtgatcacctag

SEQ ID NO: 93225 - DNA, 1839 bp, synthetic construct
  misc_feature 1..1839: note = Description of Artificial Sequence: Synthetic coding sequence
  source 1..1839: mol_type = other DNA
atggccgcccccgagggcagcggcctgggcgaggacgccagactggaccaggagaccgcccagtggctgagatgggacaagaacagcctgaccctggaggccgtgaagagactgatcgccgagggcaacaaggaggagctgagaaagtgcttcggcgccagaatggagttcggcaccgccggcctgagagccgccatgggccccggcatcagcagaatgaacgacctgaccatcatccagaccacccagggcttctgcagatacctggagaagcagttcagcgacctgaagcagaagggcatcgtgatcagcttcgacgccagagcccaccccagcagcggcggcagcagcagaagattcgccagactggccgccaccaccttcatcagccagggcatccccgtgtacctgttcagcgacatcacccccacccccttcgtgcccttcaccgtgagccacctgaagctgtgcgccggcatcatgatcaccgccagccacaaccccaagcaggacaacggctacaaggtgtactgggacaacggcgcccagatcatcagcccccacgacaagggcatcagccaggccatcgaggagaacctggagccctggccccaggcctgggacgacagcctgatcgacagcagccccctgctgcacaaccccagcgccagcatcaacaacgactacttcgaggacctgaagaagtactgcttccacagaagcgtgaacagagagaccaaggtgaagttcgtgcacaccagcgtgcacggcgtgggccacagcttcgtgcagagcgccttcaaggccttcgacctggtgccccccgaggccgtgcccgagcagaaggaccccgaccccgagttccccaccgtgaagtaccccaaccccgaggagggcaagggcgtgctgaccctgagcttcgccctggccgacaagaccaaggccagaatcgtgctggccaacgaccccgacgccgacagactggccgtggccgagaagcaggacagcggcgagtggagagtgttcagcggcaacgagctgggcgccctgctgggctggtggctgttcaccagctggaaggagaagaaccaggacagaagcgccctgaaggacacctacatgctgagcagcaccgtgagcagcaagatcctgagagccatcgccctgaaggagggcttccacttcgaggagaccctgaccggcttcaagtggatgggcaacagagccaagcagctgatcgaccagggcaagaccgtgctgttcgccttcgaggaggccatcggctacatgtgctgccccttcgtgctggacaaggacggcgtgagcgccgccgtgatcagcgccgagctggccagcttcctggccaccaagaacctgagcctgagccagcagctgaaggccatctacgtggagtacggctaccacatcaccaaggccagctacttcatctgccacgaccaggagaccatcaagaagctgttcgagaacctgagaaactacgacggcaagaacaactaccccaaggcctgcggcaagttcgagatcagcgccatcagagacctgaccaccggctacgacgacagccagcccgacaagaaggccgtgctgcccaccagcaagagcagccagatgatcaccttcaccttcgccaacggcggcgtggccaccatgagaaccagcggcaccgagcccaagatcaagtactacgccgagctgtgcgccccccccggcaacagcgaccccgagcagctgaagaaggagctgaacgagctggtgagcgccatcgaggagcacttcttccagccccagaagtacaacctgcagcccaaggccgactag

SEQ ID NO: 93226 - DNA, 1359 bp, synthetic construct
  misc_feature 1..1359: note = Description of Artificial Sequence: Synthetic coding sequence
  source 1..1359: mol_type = other DNA
atgatcaccgccagccacaaccccaagcaggacaacggctacaaggtgtactgggacaacggcgcccagatcatcagcccccacgacaagggcatcagccaggccatcgaggagaacctggagccctggccccaggcctgggacgacagcctgatcgacagcagccccctgctgcacaaccccagcgccagcatcaacaacgactacttcgaggacctgaagaagtactgcttccacagaagcgtgaacagagagaccaaggtgaagttcgtgcacaccagcgtgcacggcgtgggccacagcttcgtgcagagcgccttcaaggccttcgacctggtgccccccgaggccgtgcccgagcagaaggaccccgaccccgagttccccaccgtgaagtaccccaaccccgaggagggcaagggcgtgctgaccctgagcttcgccctggccgacaagaccaaggccagaatcgtgctggccaacgaccccgacgccgacagactggccgtggccgagaagcaggacagcggcgagtggagagtgttcagcggcaacgagctgggcgccctgctgggctggtggctgttcaccagctggaaggagaagaaccaggacagaagcgccctgaaggacacctacatgctgagcagcaccgtgagcagcaagatcctgagagccatcgccctgaaggagggcttccacttcgaggagaccctgaccggcttcaagtggatgggcaacagagccaagcagctgatcgaccagggcaagaccgtgctgttcgccttcgaggaggccatcggctacatgtgctgccccttcgtgctggacaaggacggcgtgagcgccgccgtgatcagcgccgagctggccagcttcctggccaccaagaacctgagcctgagccagcagctgaaggccatctacgtggagtacggctaccacatcaccaaggccagctacttcatctgccacgaccaggagaccatcaagaagctgttcgagaacctgagaaactacgacggcaagaacaactaccccaaggcctgcggcaagttcgagatcagcgccatcagagacctgaccaccggctacgacgacagccagcccgacaagaaggccgtgctgcccaccagcaagagcagccagatgatcaccttcaccttcgccaacggcggcgtggccaccatgagaaccagcggcaccgagcccaagatcaagtactacgccgagctgtgcgccccccccggcaacagcgaccccgagcagctgaagaaggagctgaacgagctggtgagcgccatcgaggagcacttcttccagccccagaagtacaacctgcagcccaaggccgactag

SEQ ID NO: 93227 - DNA, 876 bp, synthetic construct
  misc_feature 1..876: note = Description of Artificial Sequence: Synthetic coding sequence
  source 1..876: mol_type = other DNA
atgagcagccagctgatcctgagacccttcaccgtgagccacctgaagctgtgcgccggcatcatgatcaccgccagccacaaccccaagcaggacaacggctacaaggtgtactgggacaacggcgcccagatcatcagcccccacgacaagggcatcagccaggccatcgaggagaacctggagccctggccccaggcctgggacgacagcctgatcgacagcagccccctgctgcacaaccccagcgccagcatcaacaacgactacttcgaggacctgaagaagtactgcttccacagaagcgtgaacagagagaccaaggtgaagttcgtgcacaccagcgtgcacggcgtgggccacagcttcgtgcagagcgccttcaaggccttcgacctggtgccccccgaggccgtgcccgagcagaaggaccccgaccccgagttccccaccgtgaagtaccccaaccccgaggagggcaagggcgtgctgaccctgagcttcgccctggccgacaagaccaaggccagaatcgtgctggccaacgaccccgacgccgacagactggccgtggccgagaagcaggacagcggcgagtggagagtgttcagcggcaacgagctgggcgccctgctgggctggtggctgttcaccagctggaaggagaagaaccaggacagaagcgccctgaaggacacctacatgctgagcagcaccgtgagcagcaagatcctgagagccatcgccctgaaggagggcttccacttcgaggagaccctgaccggcttcaagtggatgggcaacagagccaagcagctgatcgaccagggcaagaccgtgctgttcgccttcgaggaggccatcggcaagaagtag

SEQ ID NO: 93228 - DNA, 1869 bp, synthetic construct
  misc_feature 1..1869: note = Description of Artificial Sequence: Synthetic coding sequence
  source 1..1869: mol_type = other DNA
atggccgagaacaccgagggcgacctgaacagcaacctgctgcacgccccctaccacaccggcgacccccagctggacaccgccatcggccagtggctgagatgggacaagaaccccaagaccaaggagcagatcgagaacctgctgagaaacggcatgaacaaggagctgagagacagactgtgctgcagaatgaccttcggcaccgccggcctgagaagcgccatgggcgccggcttctgctacatcaacgacctgaccgtgatccagagcacccagggcatgtacaagtacctggagagatgcttcagcgacttcaagcagagaggcttcgtggtgggctacgacaccagaggccaggtgaccagcagctgcagcagccagagactggccaagctgaccgccgccgtgctgctggccaaggacgtgcccgtgtacctgttcagcagatacgtgcccacccccttcgtgccctacgccgtgcagaagctgaaggccgtggccggcgtgatgatcaccgccagccacaacagaaaggaggacaacggctacaaggtgtactgggagaccggcgcccagatcaccagcccccacgacaaggagatcctgaagtgcatcgaggagtgcgtggagccctggaacggcagctggaacgacaacctggtggacaccagccccctgaagagagaccccctgcaggacatctgcagaagatacatggaggacctgaagaagatctgcttctacagagagctgaacagcaagaccaccctgaagttcgtgcacaccagcttccacggcgtgggccacgactacgtgcagctggccttcaaggtgttcggcttcaagccccccatccccgtgcccgagcagaaggaccccgaccccgacttcagcaccgtgaagtgccccaaccccgaggagggcgagagcgtgctggagctgagcctgagactggccgagaaggagaacgccagagtggtgctggccaccgaccccgacgccgacagactggccgccgccgagctgcaggagaacggctgctggaaggtgttcaccggcaacgagctggccgccctgttcggctggtggatgttcgactgctggaagaagaacaagagcagaaacgccgacgtgaagaacgtgtacatgctggccaccaccgtgagcagcaagatcctgaaggccatcgccctgaaggagggcttccacttcgaggagaccctgcccggcttcaagtggatcggcagcagaatcatcgacctgctggagaacggcaaggaggtgctgttcgccttcgaggagagcatcggcttcctgtgcggcaccagcgtgctggacaaggacggcgtgagcgccgccgtggtggtggccgagatggccagctacctggagaccatgaacatcaccctgaagcagcagctggtgaaggtgtacgagaagtacggctaccacatcagcaagaccagctacttcctgtgctacgagccccccaccatcaagagcatcttcgagagactgagaaacttcgacagccccaaggagtaccccaagttctgcggcaccttcgccatcctgcacgtgagagacgtgaccaccggctacgacagcagccagcccaacaagaagagcgtgctgcccgtgagcaagaacagccagatgatcaccttcaccttccagaacggctgcgtggccaccctgagaaccagcggcaccgagcccaagatcaagtactacgccgagatgtgcgccagccccgaccagagcgacaccgccctgctggaggaggagctgaagaagctgatcgacgccctgatcgagaacttcctgcagcccagcaagaacggcctgatctggagaagcgtgtag

SEQ ID NO: 93229 - DNA, 1713 bp, synthetic construct
  misc_feature 1..1713: note = Description of Artificial Sequence: Synthetic coding sequence
  source 1..1713: mol_type = other DNA
atgggcggcgagtggggccagagcgccatctgccccgagagcgcccaggagtggacctaccaggtgggccagcacctggtggacatggacctgggcgccatcaccaagtacagcgccctgcacgccaagcccaacggcctgatcctgcagtacggcaccgccggcttcagaaccaaggccgagcacctggaccacgtgatgttcagaatgggcctgctggccgtgctgagaagcaagcagaccaagagcaccatcggcgtgatggtgaccgccagccacaaccccgaggaggacaacggcgtgaagctggtggaccccctgggcgagatgctggcccccagctgggaggagcacgccacctgcctggccaacgccgaggagcaggacatgcagagagtgctgatcgacatcagcgagaaggaggccgtgaacctgcagcaggacgccttcgtggtgatcggcagagacaccagacccagcagcgagaagctgagccagagcgtgatcgacggcgtgaccgtgctgggcggccagttccacgactacggcctgctgaccaccccccagctgcactacatggtgtactgcagaaacaccggcggcagatacggcaaggccaccatcgagggctactaccagaagctgagcaaggccttcgtggagctgaccaagcaggccagctgcagcggcgacgagtacagaagcctgaaggtggactgcgccaacggcatcggcgccctgaagctgagagagatggagcactacttcagccagggcctgagcgtgcagctgttcaacgacggcagcaagggcaagctgaaccacctgtgcggcgccgacttcgtgaagagccaccagaagcccccccagggcatggagatcaagagcaacgagagatgctgcagcttcgacggcgacgccgacagaatcgtgtactactaccacgacgccgacggccacttccacctgatcgacggcgacaagatcgccaccctgatcagcagcttcctgaaggagctgctggtggagatcggcgagagcctgaacatcggcgtggtgcagaccgcctacgccaacggcagcagcaccagatacctggaggaggtgatgaaggtgcccgtgtactgcaccaagaccggcgtgaagcacctgcaccacaaggcccaggagttcgacatcggcgtgtacttcgaggccaacggccacggcaccgccctgttcagcaccgccgtggagatgaagatcaagcagagcgccgagcagctggaggacaagaagagaaaggccgccaagatgctggagaacatcatcgacctgttcaaccaggccgccggcgacgccatcagcgacatgctggtgatcgaggccatcctggccctgaagggcctgaccgtgcagcagtgggacgccctgtacaccgacctgcccaacagacagctgaaggtgcaggtggccgacagaagagtgatcagcaccaccgacgccgagagacaggccgtgaccccccccggcctgcaggaggccatcaacgacctggtgaagaagtacaagctgagcagagccttcgtgagacccagcggcaccgaggacgtggtgagagtgtacgccgaggccgacagccaggagagcgccgaccacctggcccacgaggtgagcctggccgtgttccagctggccggcggcatcggcgagagaccccagcccggcttctag

SEQ ID NO: 93230 - DNA, 444 bp, synthetic construct
  misc_feature 1..444: note = Description of Artificial Sequence: Synthetic coding sequence
  source 1..444: mol_type = other DNA
atggacctgggcgccatcaccaagtacagcgccctgcacgccaagcccaacggcctgatcctgcagtacggcaccgccggcttcagaaccaaggccgagcacctggaccacgtgatgttcagaatgggcctgctggccgtgctgagaagcaagcagaccaagagcaccatcggcgtgatggtgaccgccagccacaaccccgaggaggacaacggcgtgaagctggtggaccccctgggcgagatgctggcccccagctgggaggagcacgccacctgcctggccaacgccgaggagcaggacatgcagagagtgctgatcgacatcagcgagaaggaggccgtgaacctgcagcaggacgccttcgtggtgatcggcagagacaccagacccagcagcgagaagctgagccagagcgtgatcgacggcgtgaccgtgctgtag

SEQ ID NO: 93231 - DNA, 1629 bp, synthetic construct
  misc_feature 1..1629: note = Description of Artificial Sequence: Synthetic coding sequence
  source 1..1629: mol_type = other DNA
atggacctgggcgccatcaccaagtacagcgccctgcacgccaagcccaacggcctgatcctgcagtacggcaccgccggcttcagaaccaaggccgagcacctggaccacgtgatgttcagaatgggcctgctggccgtgctgagaagcaagcagaccaagagcaccatcggcgtgatggtgaccgccagccacaaccccgaggaggacaacggcgtgaagctggtggaccccctgggcgagatgctggcccccagctgggaggagcacgccacctgcctggccaacgccgaggagcaggacatgcagagagtgctgatcgacatcagcgagaaggaggccgtgaacctgcagcaggacgccttcgtggtgatcggcagagacaccagacccagcagcgagaagctgagccagagcgtgatcgacggcgtgaccgtgctgggcggccagttccacgactacggcctgctgaccaccccccagctgcactacatggtgtactgcagaaacaccggcggcagatacggcaaggccaccatcgagggctactaccagaagctgagcaaggccttcgtggagctgaccaagcaggccagctgcagcggcgacgagtacagaagcctgaaggtggactgcgccaacggcatcggcgccctgaagctgagagagatggagcactacttcagccagggcctgagcgtgcagctgttcaacgacggcagcaagggcaagctgaaccacctgtgcggcgccgacttcgtgaagagccaccagaagcccccccagggcatggagatcaagagcaacgagagatgctgcagcttcgacggcgacgccgacagaatcgtgtactactaccacgacgccgacggccacttccacctgatcgacggcgacaagatcgccaccctgatcagcagcttcctgaaggagctgctggtggagatcggcgagagcctgaacatcggcgtggtgcagaccgcctacgccaacggcagcagcaccagatacctggaggaggtgatgaaggtgcccgtgtactgcaccaagaccggcgtgaagcacctgcaccacaaggcccaggagttcgacatcggcgtgtacttcgaggccaacggccacggcaccgccctgttcagcaccgccgtggagatgaagatcaagcagagcgccgagcagctggaggacaagaagagaaaggccgccaagatgctggagaacatcatcgacctgttcaaccaggccgccggcgacgccatcagcgacatgctggtgatcgaggccatcctggccctgaagggcctgaccgtgcagcagtgggacgccctgtacaccgacctgcccaacagacagctgaaggtgcaggtggccgacagaagagtgatcagcaccaccgacgccgagagacaggccgtgaccccccccggcctgcaggaggccatcaacgacctggtgaagaagtacaagctgagcagagccttcgtgagacccagcggcaccgaggacgtggtgagagtgtacgccgaggccgacagccaggagagcgccgaccacctggcccacgaggtgagcctggccgtgttccagctggccggcggcatcggcgagagaccccagcccggcttctag

SEQ ID NO: 93232 - DNA, 1701 bp, synthetic construct
  misc_feature 1..1701: note = Description of Artificial Sequence: Synthetic coding sequence
  source 1..1701: mol_type = other DNA
atggacctgggcgccatcaccaagtacagcgccctgcacgccaagcccaacggcctgatcctgcagtacggcaccgccggcttcagaaccaaggccgagcacctggaccacgtgatgttcagaatgggcctgctggccgtgctgagaagcaagcagaccaagagcaccatcggcgtgatggtgaccgccagccacaaccccgaggaggacaacggcgtgaagctggtggaccccctgggcgagatgctggcccccagctgggaggagcacgccacctgcctggccaacgccgaggagcaggacatgcagagagtgctgatcgacatcagcgagaaggaggccgtgaacctgcagcaggacgccttcgtggtgatcggcagagacaccagacccagcagcgagaagctgagccagagcgtgatcgacggcgtgaccgtgctgggcggccagttccacgactacggcctgctgaccaccccccagctgcactacatggtgtactgcagaaacaccggcggcagatacggcaaggccaccatcgagggctactaccagaagctgagcaaggccttcgtggagctgaccaagcaggccagctgcagcggcgacgagtacagaagcctgaaggtggactgcgccaacggcatcggcgccctgaagctgagagagatggagcactacttcagccagggcctgagcgtgcagctgttcaacgacggcagcaagggcaagctgaaccacctgtgcggcgccgacttcgtgaagagccaccagaagcccccccagggcatggagatcaagagcaacgagagatgctgcagcttcgacggcgacgccgacagaatcgtgtactactaccacgacgccgacggccacttccacctgatcgacggcgacaagatcgccaccctgatcagcagcttcctgaaggagctgctggtggagatcggcgagagcctgaacatcggcgtggtgcagaccgcctacgccaacggcagcagcaccagatacctggaggaggtgatgaaggtgcccgtgtactgcaccaagaccggcgtgaagcacctgcaccacaaggcccaggagttcgacatcggcgtgtacttcgaggccaacggccacggcaccgccctgttcagcaccgccgtggagatgaagatcaagcagagcgccgagcagctggaggacaagaagagaaaggccgccaagatgctggagaacatcatcgacctgttcaaccaggccgccggcgacgccatcagcgacatgctggtgatcgaggccatcctggccctgaagggcctgaccgtgcagcagtgggacgccctgtacaccgacctgcccaacagacagctgaaggtgcaggtggccgacagaagagtgatcagcaccaccgacgccgagagacaggccgtgaccccccccggcctgcaggaggccatcaacgacctggtgaagaagtacaagctgagcagagccttcgtgagacccagcggcaccgaggacgtggtgagagtgtacgccgaggccgacagccaggagagcgccgaccacctggcccacgaggtgagcctggccgtgttccagctggccggcggcatcggcgagagaccccagcccggctacaaggccgccgagaccacccacaacatcaacaacgccttcggccccggcaccgccaacgagcacaccgtgccctag

SEQ ID NO: 93233 - DNA, 720 bp, synthetic construct
  misc_feature 1..720: note = Description of Artificial Sequence: Synthetic coding sequence
  source 1..720: mol_type = other DNA
atggagggcagccccatccccgtgctgaccgtgcccaccgccccctacgaggaccagagacccgccggcggcggcggcctgagaagacccaccggcctgttcgagggccagagaaactacctgcccaacttcatccagagcgtgctgagcagcatcgacctgagagacagacagggctgcaccatggtggtgggcagcgacggcagatacttcagcagaaccgccatcgagatcgtggtgcagatggccgccgccaacggcatcggcagactgatcatcggccagaacggcatcctgagcacccccgccgtgagctgcatcatcagaaagatcaaggccgccggcggcatcatcctgaccgccagccactgccccggcggccccggcggcgagttcggcgtgaagttcaacgtggccaacggcgtggagatcgtggaccccgtggacatctacctgaacctgctgagaaccatcttcgacttccacgccatcaagggcctgctgaccggccccagccagctgaagatcagaatcgacgccatgcacggcgtgatgggcccctacgtgagaaaggtgctgtgcgacgagctgggcgcccccgccaacagcgccatcaactgcgtgcccctggaggacttcggcggccagcaccccgaccccaacctgacctacgccaccaccctgctggaggccatgaagggcggcgagtacggcttctag

SEQ ID NO: 93234 - DNA, 1704 bp, synthetic construct
  misc_feature 1..1704: note = Description of Artificial Sequence: Synthetic coding sequence
  source 1..1704: mol_type = other DNA
atggagggcagccccatccccgtgctgaccgtgcccaccgccccctacgaggaccagagacccgccggcggcggcggcctgagaagacccaccggcctgttcgagggccagagaaactacctgcccaacttcatccagagcgtgctgagcagcatcgacctgagagacagacagggctgcaccatggtggtgggcagcgacggcagatacttcagcagaaccgccatcgagatcgtggtgcagatggccgccgccaacggcatcggcagactgatcatcggccagaacggcatcctgagcacccccgccgtgagctgcatcatcagaaagatcaaggccgccggcggcatcatcctgaccgccagccactgccccggcggccccggcggcgagttcggcgtgaagttcaacgtggccaacggcggccccgcccccgacgtggtgagcgacaagatctaccagatcagcaagaccatcgaggagtacgccatctgccccgacctgagaatcgacctgagcagactgggcagacaggagttcgacctggagaacaagttcaagcccttcagagtggagatcgtggaccccgtggacatctacctgaacctgctgagaaccatcttcgacttccacgccatcaagggcctgctgaccggccccagccagctgaagatcagaatcgacgccatgcacggcgtgatgggcccctacgtgagaaaggtgctgtgcgacgagctgggcgcccccgccaacagcgccatcaactgcgtgcccctggaggacttcggcggccagcaccccgaccccaacctgacctacgccaccaccctgctggaggccatgaagggcggcgagtacggcttcggcgccgccttcgacgccgacggcgacagatacatgatcctgggccagaacggcttcttcgtgagccccagcgacagcctggccatcatcgccgccaacctgagctgcatcccctacttcagacagatgggcgtgagaggcttcggcagaagcatgcccaccagcatggccctggacagagtggccaagagcatgaaggtgcccgtgtacgagacccccgccggctggagattcttcagcaacctgatggacagcggcagatgcaacctgtgcggcgaggagagcttcggcaccggcagcgaccacctgagagagaaggacggcctgtgggccgtgctggtgtggctgagcatcatcgccgccagaaagcagagcgtggaggagatcgtgagagaccactgggccaagttcggcagacactactactgcagattcgactacgagggcctggaccccaagaccacctactacatcatgagagacctggaggccctggtgaccgacaagagcttcatcggccagcagttcgccgtgggcagccacgtgtacagcgtggccaagaccgacagcttcgagtacgtggaccccgtggacggcaccgtgaccaagaagcagggcctgagaatcatcttcagcgacgccagcagactgatcttcagactgagcagcagcagcggcgtgagagccaccctgagactgtacgccgagagctacgagagagaccccagcggccacgaccaggagccccaggccgtgctgagccccctgatcgccatcgccctgaagatcagccagatccacgagagaaccggcagaagaggccccaccgtgatcacctag

SEQ ID NO: 93235 - DNA, 1452 bp, synthetic construct
  misc_feature 1..1452: note = Description of Artificial Sequence: Synthetic coding sequence
  source 1..1452: mol_type = other DNA
atggcccaggccgacatcgccctgatcggcctggccgtgatgggccagaacctgatcctgaacatgaacgaccacggcttcgtggtgtgcgccttcaacagaaccgtgagcaaggtggacgacttcctggccaacgaggccaagggcaccaaggtggtgggcgcccagagcctgaaggagatggtgagcaagctgaagaagcccagaagaatcatcctgctggtgaaggccggccaggccgtggacgacttcatcgagaagctggtgcccctgctggacaccggcgacatcatcatcgacggcggcaacagcgagtacagagacaccaccagaagatgcagagacctgaaggccaagggcatcctgttcgtgggcagcggcgtgagcggcggcgaggagggcgccagatacggccccagcctgatgcccggcggcaacaaggaggcctggccccacatcaagaccatcttccagggcatcgccgccaaggtgggcaccggcgagccctgctgcgactgggtgggcgacgagggcgccggccacttcgtgaagatggtgcacaacggcatcgagtacggcgacatgcagctgatctgcgaggcctaccacctgatgaaggacgtgctgggcatggcccaggacgagatggcccaggccttcgaggactggaacaagaccgagctggacagcttcctgatcgagatcaccgccaacatcctgaagttccaggacaccgacggcaagcacctgctgcccaagatcagagacagcgccggccagaagggcaccggcaagtggaccgccatcagcgccctggagtacggcgtgcccgtgaccctgatcggcgaggccgtgttcgccagatgcctgagcagcctgaaggacgagagaatccaggccagcaagaagctgaagggcccccagaagttccagttcgacggcgacaagaagagcttcctggaggacatcagaaaggccctgtacgccagcaagatcatcagctacgcccagggcttcatgctgctgagacaggccgccaccgagttcggctggaccctgaactacggcggcatcgccctgatgtggagaggcggctgcatcatcagaagcgtgttcctgggcaagatcaaggacgccttcgacagaaaccccgagctgcagaacctgctgctggacgacttcttcaagagcgccgtggagaactgccaggacagctggagaagagccgtgagcaccggcgtgcaggccggcatccccatgccctgcttcaccaccgccctgagcttctacgacggctacagacacgagatgctgcccgccagcctgatccaggcccagagagactacttcggcgcccacacctacgagctgctggccaagcccggccagttcatccacaccaactggaccggccacggcggcaccgtgagcagcagcagctacaacgcctag

SEQ ID NO: 93236 - DNA, 1413 bp, synthetic construct
  misc_feature 1..1413: note = Description of Artificial Sequence: Synthetic coding sequence
  source 1..1413: mol_type = other DNA
atgggccagaacctgatcctgaacatgaacgaccacggcttcgtggtgtgcgccttcaacagaaccgtgagcaaggtggacgacttcctggccaacgaggccaagggcaccaaggtggtgggcgcccagagcctgaaggagatggtgagcaagctgaagaagcccagaagaatcatcctgctggtgaaggccggccaggccgtggacgacttcatcgagaagctggtgcccctgctggacaccggcgacatcatcatcgacggcggcaacagcgagtacagagacaccaccagaagatgcagagacctgaaggccaagggcatcctgttcgtgggcagcggcgtgagcggcggcgaggagggcgccagatacggccccagcctgatgcccggcggcaacaaggaggcctggccccacatcaagaccatcttccagggcatcgccgccaaggtgggcaccggcgagccctgctgcgactgggtgggcgacgagggcgccggccacttcgtgaagatggtgcacaacggcatcgagtacggcgacatgcagctgatctgcgaggcctaccacctgatgaaggacgtgctgggcatggcccaggacgagatggcccaggccttcgaggactggaacaagaccgagctggacagcttcctgatcgagatcaccgccaacatcctgaagttccaggacaccgacggcaagcacctgctgcccaagatcagagacagcgccggccagaagggcaccggcaagtggaccgccatcagcgccctggagtacggcgtgcccgtgaccctgatcggcgaggccgtgttcgccagatgcctgagcagcctgaaggacgagagaatccaggccagcaagaagctgaagggcccccagaagttccagttcgacggcgacaagaagagcttcctggaggacatcagaaaggccctgtacgccagcaagatcatcagctacgcccagggcttcatgctgctgagacaggccgccaccgagttcggctggaccctgaactacggcggcatcgccctgatgtggagaggcggctgcatcatcagaagcgtgttcctgggcaagatcaaggacgccttcgacagaaaccccgagctgcagaacctgctgctggacgacttcttcaagagcgccgtggagaactgccaggacagctggagaagagccgtgagcaccggcgtgcaggccggcatccccatgccctgcttcaccaccgccctgagcttctacgacggctacagacacgagatgctgcccgccagcctgatccaggcccagagagactacttcggcgcccacacctacgagctgctggccaagcccggccagttcatccacaccaactggaccggccacggcggcaccgtgagcagcagcagctacaacgcctag

SEQ ID NO: 93237 - DNA, 1386 bp, synthetic construct
  misc_feature 1..1386: note = Description of Artificial Sequence: Synthetic coding sequence
  source 1..1386: mol_type = other DNA
atggcccaggccgacatcgccctgatcggcctggccgtgatgggccagaacctgatcctgaacatgaacgaccacggcttcgtggtgtgcgccttcaacagaaccgtgagcaaggtggacgacttcctggccaacgaggccaagggcaccaaggtggtgggcgcccagagcctgaaggagatggtgagcaagctgaagaagcccagaagaatcatcctgctggtgaaggccggccaggccgtggacgacttcatcgagaagctgagaagatgcagagacctgaaggccaagggcatcctgttcgtgggcagcggcgtgagcggcggcgaggagggcgccagatacggccccagcctgatgcccggcggcaacaaggaggcctggccccacatcaagaccatcttccagggcatcgccgccaaggtgggcaccggcgagccctgctgcgactgggtgggcgacgagggcgccggccacttcgtgaagatggtgcacaacggcatcgagtacggcgacatgcagctgatctgcgaggcctaccacctgatgaaggacgtgctgggcatggcccaggacgagatggcccaggccttcgaggactggaacaagaccgagctggacagcttcctgatcgagatcaccgccaacatcctgaagttccaggacaccgacggcaagcacctgctgcccaagatcagagacagcgccggccagaagggcaccggcaagtggaccgccatcagcgccctggagtacggcgtgcccgtgaccctgatcggcgaggccgtgttcgccagatgcctgagcagcctgaaggacgagagaatccaggccagcaagaagctgaagggcccccagaagttccagttcgacggcgacaagaagagcttcctggaggacatcagaaaggccctgtacgccagcaagatcatcagctacgcccagggcttcatgctgctgagacaggccgccaccgagttcggctggaccctgaactacggcggcatcgccctgatgtggagaggcggctgcatcatcagaagcgtgttcctgggcaagatcaaggacgccttcgacagaaaccccgagctgcagaacctgctgctggacgacttcttcaagagcgccgtggagaactgccaggacagctggagaagagccgtgagcaccggcgtgcaggccggcatccccatgccctgcttcaccaccgccctgagcttctacgacggctacagacacgagatgctgcccgccagcctgatccaggcccagagagactacttcggcgcccacacctacgagctgctggccaagcccggccagttcatccacaccaactggaccggccacggcggcaccgtgagcagcagcagctacaacgcctag

SEQ ID NO: 93238 - DNA, 1290 bp, synthetic construct
  misc_feature 1..1290: note = Description of Artificial Sequence: Synthetic coding sequence
  source 1..1290: mol_type = other DNA
atgaccaccgccctgtggagcgtgctgctgatcggcctgagccccaagctgatgatcagctggcccatgagacaggccgtggacgacttcatcgagaagctggtgcccctgctggacaccggcgacatcatcatcgacggcggcaacagcgagtacagagacaccaccagaagatgcagagacctgaaggccaagggcatcctgttcgtgggcagcggcgtgagcggcggcgaggagggcgccagatacggccccagcctgatgcccggcggcaacaaggaggcctggccccacatcaagaccatcttccagggcatcgccgccaaggtgggcaccggcgagccctgctgcgactgggtgggcgacgagggcgccggccacttcgtgaagatggtgcacaacggcatcgagtacggcgacatgcagctgatctgcgaggcctaccacctgatgaaggacgtgctgggcatggcccaggacgagatggcccaggccttcgaggactggaacaagaccgagctggacagcttcctgatcgagatcaccgccaacatcctgaagttccaggacaccgacggcaagcacctgctgcccaagatcagagacagcgccggccagaagggcaccggcaagtggaccgccatcagcgccctggagtacggcgtgcccgtgaccctgatcggcgaggccgtgttcgccagatgcctgagcagcctgaaggacgagagaatccaggccagcaagaagctgaagggcccccagaagttccagttcgacggcgacaagaagagcttcctggaggacatcagaaaggccctgtacgccagcaagatcatcagctacgcccagggcttcatgctgctgagacaggccgccaccgagttcggctggaccctgaactacggcggcatcgccctgatgtggagaggcggctgcatcatcagaagcgtgttcctgggcaagatcaaggacgccttcgacagaaaccccgagctgcagaacctgctgctggacgacttcttcaagagcgccgtggagaactgccaggacagctggagaagagccgtgagcaccggcgtgcaggccggcatccccatgccctgcttcaccaccgccctgagcttctacgacggctacagacacgagatgctgcccgccagcctgatccaggcccagagagactacttcggcgcccacacctacgagctgctggccaagcccggccagttcatccacaccaactggaccggccacggcggcaccgtgagcagcagcagctacaacgcctag

SEQ ID NO: 93239 - DNA, 1500 bp, synthetic construct
  misc_feature 1..1500: note = Description of Artificial Sequence: Synthetic coding sequence
  source 1..1500: mol_type = other DNA
atgaccttctggacccagatgttcttcctgctgcaggactgcgagggcctgatcgtgagaagcgccaccaaggtgaccgccgacgtgatcaacgccgccgagaagctgcaggtggtgggcagagccggcaccggcgtggacaacgtggacctggaggccgccaccagaaagggcatcctggtgatgaacacccccaacggcaacagcctgagcgccgccgagctgacctgcggcatgatcatgtgcctggccagacagatcccccaggccaccgccagcatgaaggacggcaagtgggagagaaagaagttcatgggcaccgagctgaacggcaagaccctgggcatcctgggcctgggcagaatcggcagagaggtggccaccagaatgcagagcttcggcatgaagaccatcggctacgaccccatcatcagccccgaggtgagcgccagcttcggcgtgcagcagctgcccctggaggagatctggcccctgtgcgacttcatcaccgtgcacacccccctgctgcccagcaccaccggcctgctgaacgacaacaccttcgcccagtgcaagaagggcgtgagagtggtgaactgcgccagaggcggcatcgtggacgagggcgccctgctgagagccctgcagagcggccagtgcgccggcgccgccctggacgtgttcaccgaggagccccccagagacagagccctggtggaccacgagaacgtgatcagctgcccccacctgggcgccagcaccaaggaggcccagagcagatgcggcgaggagatcgccgtgcagttcgtggacatggtgaagggcaagagcctgaccggcgtggtgaacgcccaggccctgaccagcgccttcagcccccacaccaagccctggatcggcctggccgaggccctgggcaccctgatgagagcctgggccggcagccccaagggcaccatccaggtgatcacccagggcaccagcctgaagaacgccggcaactgcctgagccccgccgtgatcgtgggcctgctgaaggaggccagcaagcaggccgacgtgaacctggtgaacgccaagctgctggtgaaggaggccggcctgaacgtgaccaccagccacagccccgccgcccccggcgagcagggcttcggcgagtgcctgctggccgtggccctggccggcgccccctaccaggccgtgggcctggtgcagggcaccacccccgtgctgcagggcctgaacggcgccgtgttcagacccgaggtgcccctgagaagagacctgcccctgctgctgttcagaacccagaccagcgaccccgccatgctgcccaccatgatcggcctgctggccgaggccggcgtgagactgctgagctaccagaccagcctggtgagcgacggcgagacctggcacgtgatgggcatcagcagcctgctgcccagcctggaggcctggaagcagcacgtgaccgaggccttccagttccacttctag

SEQ ID NO: 93240 - DNA, 1602 bp, synthetic construct
  misc_feature 1..1602: note = Description of Artificial Sequence: Synthetic coding sequence
  source 1..1602: mol_type = other DNA
atggccttcgccaacctgagaaaggtgctgatcagcgacagcctggacccctgctgcagaaagatcctgcaggacggcggcctgcaggtggtggagaagcagaacctgagcaaggaggagctgatcgccgagctgcaggactgcgagggcctgatcgtgagaagcgccaccaaggtgaccgccgacgtgatcaacgccgccgagaagctgcaggtggtgggcagagccggcaccggcgtggacaacgtggacctggaggccgccaccagaaagggcatcctggtgatgaacacccccaacggcaacagcctgagcgccgccgagctgacctgcggcatgatcatgtgcctggccagacagatcccccaggccaccgccagcatgaaggacggcaagtgggagagaaagaagttcatgggcaccgagctgaacggcaagaccctgggcatcctgggcctgggcagaatcggcagagaggtggccaccagaatgcagagcttcggcatgaagaccatcggctacgaccccatcatcagccccgaggtgagcgccagcttcggcgtgcagcagctgcccctggaggagatctggcccctgtgcgacttcatcaccgtgcacacccccctgctgcccagcaccaccggcctgctgaacgacaacaccttcgcccagtgcaagaagggcgtgagagtggtgaactgcgccagaggcggcatcgtggacgagggcgccctgctgagagccctgcagagcggccagtgcgccggcgccgccctggacgtgttcaccgaggagccccccagagacagagccctggtggaccacgagaacgtgatcagctgcccccacctgggcgccagcaccaaggaggcccagagcagatgcggcgaggagatcgccgtgcagttcgtggacatggtgaagggcaagagcctgaccggcgtggtgaacgcccaggccctgaccagcgccttcagcccccacaccaagccctggatcggcctggccgaggccctgggcaccctgatgagagcctgggccggcagccccaagggcaccatccaggtgatcacccagggcaccagcctgaagaacgccggcaactgcctgagccccgccgtgatcgtgggcctgctgaaggaggccagcaagcaggccgacgtgaacctggtgaacgccaagctgctggtgaaggaggccggcctgaacgtgaccaccagccacagccccgccgcccccggcgagcagggcttcggcgagtgcctgctggccgtggccctggccggcgccccctaccaggccgtgggcctggtgcagggcaccacccccgtgctgcagggcctgaacggcgccgtgttcagacccgaggtgcccctgagaagagacctgcccctgctgctgttcagaacccagaccagcgaccccgccatgctgcccaccatgatcggcctgctggccgaggccggcgtgagactgctgagctaccagaccagcctggtgagcgacggcgagacctggcacgtgatgggcatcagcagcctgctgcccagcctggaggcctggaagcagcacgtgaccgaggccttccagttccacttctag

SEQ ID NO: 93241 - DNA, 291 bp, synthetic construct
  misc_feature 1..291: note = Description of Artificial Sequence: Synthetic coding sequence
  source 1..291: mol_type = other DNA
atgaagaccatcggctacgaccccatcatcagccccgaggtgagcgccagcttcggcgtgcagcagctgcccctggaggagatctggcccctgtgcgacttcatcaccgtgcacacccccctgctgcccagcaccaccggcctgctgaacgacaacaccttcgcccagtgcaagaagggcgtgagagtggtgaactgcgccagaggcggcatcgtggacgagggcgccctgctgagagccctgcagagcggccagtgcgccggcgccgccctggacgtgttcaccgagtag

SEQ ID NO: 93242 - DNA, 1221 bp, synthetic construct
  misc_feature 1..1221: note = Description of Artificial Sequence: Synthetic coding sequence
  source 1..1221: mol_type = other DNA
atgaaggacggcaagtgggagagaaagaagttcatgggcaccgagctgaacggcaagaccctgggcatcctgggcctgggcagaatcggcagagaggtggccaccagaatgcagagcttcggcatgaagaccatcggctacgaccccatcatcagccccgaggtgagcgccagcttcggcgtgcagcagctgcccctggaggagatctggcccctgtgcgacttcatcaccgtgcacacccccctgctgcccagcaccaccggcctgctgaacgacaacaccttcgcccagtgcaagaagggcgtgagagtggtgaactgcgccagaggcggcatcgtggacgagggcgccctgctgagagccctgcagagcggccagtgcgccggcgccgccctggacgtgttcaccgaggagccccccagagacagagccctggtggaccacgagaacgtgatcagctgcccccacctgggcgccagcaccaaggaggcccagagcagatgcggcgaggagatcgccgtgcagttcgtggacatggtgaagggcaagagcctgaccggcgtggtgaacgcccaggccctgaccagcgccttcagcccccacaccaagccctggatcggcctggccgaggccctgggcaccctgatgagagcctgggccggcagccccaagggcaccatccaggtgatcacccagggcaccagcctgaagaacgccggcaactgcctgagccccgccgtgatcgtgggcctgctgaaggaggccagcaagcaggccgacgtgaacctggtgaacgccaagctgctggtgaaggaggccggcctgaacgtgaccaccagccacagccccgccgcccccggcgagcagggcttcggcgagtgcctgctggccgtggccctggccggcgccccctaccaggccgtgggcctggtgcagggcaccacccccgtgctgcagggcctgaacggcgccgtgttcagacccgaggtgcccctgagaagagacctgcccctgctgctgttcagaacccagaccagcgaccccgccatgctgcccaccatgatcggcctgctggccgaggccggcgtgagactgctgagctaccagaccagcctggtgagcgacggcgagacctggcacgtgatgggcatcagcagcctgctgcccagcctggaggcctggaagcagcacgtgaccgaggccttccagttccacttctag

SEQ ID NO: 93243 - DNA, 1254 bp, synthetic construct
  misc_feature 1..1254: note = Description of Artificial Sequence: Synthetic coding sequence
  source 1..1254: mol_type = other DNA
atgagcctgagcaacaagctgaccctggacaagctggacgtgaagggcaagagagtggtgatgagagtggacttcaacgtgcccatgaagaacaaccagatcaccaacaaccagagaatcaaggccgccgtgcccagcatcaagttctgcctggacaacggcgccaagagcgtggtgctgatgagccacctgggcagacccgacggcgtgcccatgcccgacaagtacagcctggagcccgtggccgtggagctgaagagcctgctgggcaaggacgtgctgttcctgaaggactgcgtgggccccgaggtggagaaggcctgcgccaaccccgccgccggcagcgtgatcctgctggagaacctgagattccacgtggaggaggagggcaagggcaaggacgccagcggcaacaaggtgaaggccgagcccgccaagatcgaggccttcagagccagcctgagcaagctgggcgacgtgtacgtgaacgacgccttcggcaccgcccacagagcccacagcagcatggtgggcgtgaacctgccccagaaggccggcggcttcctgatgaagaaggagctgaactacttcgccaaggccctggagagccccgagagacccttcctggccatcctgggcggcgccaaggtggccgacaagatccagctgatcaacaacatgctggacaaggtgaacgagatgatcatcggcggcggcatggccttcaccttcctgaaggtgctgaacaacatggagatcggcaccagcctgttcgacgaggagggcgccaagatcgtgaaggacctgatgagcaaggccgagaagaacggcgtgaagatcaccctgcccgtggacttcgtgaccgccgacaagttcgacgagaacgccaagaccggccaggccaccgtggccagcggcatccccgccggctggatgggcctggactgcggccccgagagcagcaagaagtacgccgaggccgtgaccagagccaagcagatcgtgtggaacggccccgtgggcgtgttcgagtgggaggccttcgccagaggcaccaaggccctgatggacgaggtggtgaaggccaccagcagaggctgcatcaccatcatcggcggcggcgacaccgccacctgctgcgccaagtggaacaccgaggacaaggtgagccacgtgagcaccggcggcggcgccagcctggagctgctggagggcaaggtgctgcccggcgtggacgccctgagcaacatctag

SEQ ID NO: 93244 - DNA, 846 bp, synthetic construct
  misc_feature 1..846: note = Description of Artificial Sequence: Synthetic coding sequence
  source 1..846: mol_type = other DNA
atgagcctgagcaacaagctgaccctggacaagctggacgtgaagggcaagagagtggtgatgagagtggacttcaacgtgcccatgaagaacaaccagatcaccaacaaccagagaatcaaggccgccgtgcccagcatcaagttctgcctggacaacggcgccaagagcgtggtgctgatgagccacctgggcagacccgacggcagacccttcctggccatcctgggcggcgccaaggtggccgacaagatccagctgatcaacaacatgctggacaaggtgaacgagatgatcatcggcggcggcatggccttcaccttcctgaaggtgctgaacaacatggagatcggcaccagcctgttcgacgaggagggcgccaagatcgtgaaggacctgatgagcaaggccgagaagaacggcgtgaagatcaccctgcccgtggacttcgtgaccgccgacaagttcgacgagaacgccaagaccggccaggccaccgtggccagcggcatccccgccggctggatgggcctggactgcggccccgagagcagcaagaagtacgccgaggccgtgaccagagccaagcagatcgtgtggaacggccccgtgggcgtgttcgagtgggaggccttcgccagaggcaccaaggccctgatggacgaggtggtgaaggccaccagcagaggctgcatcaccatcatcggcggcggcgacaccgccacctgctgcgccaagtggaacaccgaggacaaggtgagccacgtgagcaccggcggcggcgccagcctggagctgctggagggcaaggtgctgcccggcgtggacgccctgagcaacatctag

SEQ ID NO: 93245 - DNA, 729 bp, synthetic construct
  misc_feature 1..729: note = Description of Artificial Sequence: Synthetic coding sequence
  source 1..729: mol_type = other DNA
atggtgggcgtgaacctgccccagaaggccggcggcttcctgatgaagaaggagctgaactacttcgccaaggccctggagagccccgagagacccttcctggccatcctgggcggcgccaaggtggccgacaagatccagctgatcaacaacatgctggacaaggtgaacgagatgatcatcggcggcggcatggccttcaccttcctgaaggtgctgaacaacatggagatcggcaccagcctgttcgacgaggagggcgccaagatcgtgaaggacctgatgagcaaggccgagaagaacggcgtgaagatcaccctgcccgtggacttcgtgaccgccgacaagttcgacgagaacgccaagaccggccaggccaccgtggccagcggcatccccgccggctggatgggcctggactgcggccccgagagcagcaagaagtacgccgaggccgtgaccagagccaagcagatcgtgtggaacggccccgtgggcgtgttcgagtgggaggccttcgccagaggcaccaaggccctgatggacgaggtggtgaaggccaccagcagaggctgcatcaccatcatcggcggcggcgacaccgccacctgctgcgccaagtggaacaccgaggacaaggtgagccacgtgagcaccggcggcggcgccagcctggagctgctggagggcaaggtgctgcccggcgtggacgccctgagcaacatctag

SEQ ID NO: 93246 - DNA, 1170 bp, synthetic construct
  misc_feature 1..1170: note = Description of Artificial Sequence: Synthetic coding sequence
  source 1..1170: mol_type = other DNA
atgaagaacaaccagatcaccaacaaccagagaatcaaggccgccgtgcccagcatcaagttctgcctggacaacggcgccaagagcgtggtgctgatgagccacctgggcagacccgacggcgtgcccatgcccgacaagtacagcctggagcccgtggccgtggagctgaagagcctgctgggcaaggacgtgctgttcctgaaggactgcgtgggccccgaggtggagaaggcctgcgccaaccccgccgccggcagcgtgatcctgctggagaacctgagattccacgtggaggaggagggcaagggcaaggacgccagcggcaacaaggtgaaggccgagcccgccaagatcgaggccttcagagccagcctgagcaagctgggcgacgtgtacgtgaacgacgccttcggcaccgcccacagagcccacagcagcatggtgggcgtgaacctgccccagaaggccggcggcttcctgatgaagaaggagctgaactacttcgccaaggccctggagagccccgagagacccttcctggccatcctgggcggcgccaaggtggccgacaagatccagctgatcaacaacatgctggacaaggtgaacgagatgatcatcggcggcggcatggccttcaccttcctgaaggtgctgaacaacatggagatcggcaccagcctgttcgacgaggagggcgccaagatcgtgaaggacctgatgagcaaggccgagaagaacggcgtgaagatcaccctgcccgtggacttcgtgaccgccgacaagttcgacgagaacgccaagaccggccaggccaccgtggccagcggcatccccgccggctggatgggcctggactgcggccccgagagcagcaagaagtacgccgaggccgtgaccagagccaagcagatcgtgtggaacggccccgtgggcgtgttcgagtgggaggccttcgccagaggcaccaaggccctgatggacgaggtggtgaaggccaccagcagaggctgcatcaccatcatcggcggcggcgacaccgccacctgctgcgccaagtggaacaccgaggacaaggtgagccacgtgagcaccggcggcggcgccagcctggagctgctggagggcaaggtgctgcccggcgtggacgccctgagcaacatctag

SEQ ID NO: 93247 - DNA, 1254 bp, synthetic construct
  misc_feature 1..1254: note = Description of Artificial Sequence: Synthetic coding sequence
  source 1..1254: mol_type = other DNA
atgagcctgagcaagaagctgaccctggacaagctggacgtgagaggcaagagagtgatcatgagagtggacttcaacgtgcccatgaagaagaaccagatcaccaacaaccagagaatcaaggccagcatccccagcatcaagtactgcctggacaacggcgccaaggccgtggtgctgatgagccacctgggcagacccgacggcgtgcccatgcccgacaagtacagcctggcccccgtggccgtggagctgaagagcctgctgggcaaggacgtgctgttcctgaaggactgcgtgggcgccgaggtggagaaggcctgcgccaaccccgcccccggcagcgtgatcctgctggagaacctgagattccacgtggaggaggagggcaagggccaggaccccagcggcaagaagatcaaggccgagcccgacaagatcgaggccttcagagccagcctgagcaagctgggcgacgtgtacgtgaacgacgccttcggcaccgcccacagagcccacagcagcatggtgggcgtgaacctgccccacaaggccagcggcttcctgatgaagaaggagctggactacttcgccaaggccctggagaaccccgtgagacccttcctggccatcctgggcggcgccaaggtggccgacaagatccagctgatcaagaacatgctggacaaggtgaacgagatgatcatcggcggcggcatggcctacaccttcctgaaggtgctgaacaacatggagatcggcgccagcctgttcgacgaggagggcgccaagatcgtgaaggacatcatggccaaggcccagaagaacggcgtgagaatcaccttccccgtggacttcgtgaccggcgacaagttcgacgagaacgcccaggtgggcaaggccaccgtggccagcggcatcagccccggctggatgggcctggactgcggccccgagagcaacaagaaccacgcccaggtggtggcccaggccagactgatcgtgtggaacggccccctgggcgtgttcgagtgggacgccttcgccaagggcaccaaggccctgatggacgagatcgtgaaggccaccagcaagggctgcatcaccgtgatcggcggcggcgacaccgccacctgctgcgccaagtggaacaccgaggacaaggtgagccacgtgagcaccggcggcggcgccagcctggagctgctggagggcaagatcctgcccggcgtggaggccctgagcaacatgtag

SEQ ID NO: 93248 - DNA, 765 bp, synthetic construct
  misc_feature 1..765: note = Description of Artificial Sequence: Synthetic coding sequence
  source 1..765: mol_type = other DNA
atggccgcctacaagctggtgctgatcagacacggcgagagcgcctggaacctggagaacagattcagcggctggtacgacgccgacctgagccccgccggccacgaggaggccaagagaggcggccaggccctgagagacgccggctacgagttcgacatctgcttcaccagcgtgcagaagagagccatcagaaccctgtggaccgtgctggacgccatcgaccagatgtggctgcccgtggtgagaacctggagactgaacgagagacactacggcggcctgaccggcctgaacaaggccgagaccgccgccaagcacggcgaggcccaggtgaagatctggagaagaagctacgacgtgccccccccccccatggagcccgaccaccccttctacagcaacatcagcaaggacagaagatacgccgacctgaccgaggaccagctgcccagctgcgagagcctgaaggacaccatcgccagagccctgcccttctggaacgaggagatcgtgccccagatcaaggagggcaagagagtgctgatcgccgcccacggcaacagcctgagaggcatcgtgaagcacctggagggcctgagcgaggaggccatcatggagctgaacctgcccaccggcatccccatcgtgtacgagctggacaagaacctgaagcccatcaagcccatgcagttcctgggcgacgaggagaccgtgagaaaggccatggaggccgtggccgcccagggcaaggccaagaagtag

SEQ ID NO: 93249 - DNA, 435 bp, synthetic construct
  misc_feature 1..435: note = Description of Artificial Sequence: Synthetic coding sequence
  source 1..435: mol_type = other DNA
atgcccctgatcagatgcggctgccacgacgtgccccccccccccatggagcccgaccaccccttctacagcaacatcagcaaggacagaagatacgccgacctgaccgaggaccagctgcccagctgcgagagcctgaaggacaccatcgccagagccctgcccttctggaacgaggagatcgtgccccagatcaaggagggcaagagagtgctgatcgccgcccacggcaacagcctgagaggcatcgtgaagcacctggagggcctgagcgaggaggccatcatggagctgaacctgcccaccggcatccccatcgtgtacgagctggacaagaacctgaagcccatcaagcccatgcagttcctgggcgacgaggagaccgtgagaaaggccatggaggccgtggccgcccagggcaaggccaagaagtag

SEQ ID NO: 93250 - DNA, 762 bp, synthetic construct
  misc_feature 1..762: note = Description of Artificial Sequence: Synthetic coding sequence
  source 1..762: mol_type = other DNA
atggccacccacagactggtgatggtgagacacggcgagagcacctggaaccaggagaacagattctgcggctggttcgacgccgagctgagcgagaagggcaccgaggaggccaagagaggcgccaaggccatcaaggacgccaagatggagttcgacatctgctacaccagcgtgctgaagagagccatcagaaccctgtgggccatcctggacggcaccgaccagatgtggctgcccgtggtgagaacctggagactgaacgagagacactacggcggcctgaccggcctgaacaaggccgagaccgccgccaagcacggcgaggagcaggtgaagatctggagaagaagcttcgacatcccccccccccccatggacgagaagcacccctactacaacagcatcagcaaggagagaagatacgccggcctgaagcccggcgagctgcccacctgcgagagcctgaaggacaccatcgccagagccctgcccttctggaacgaggagatcgtgccccagatcaaggccggcaagagagtgctgatcgccgcccacggcaacagcctgagaggcatcgtgaagcacctggagggcatgagcgaccaggccatcatggagctgaacctgcccaccggcatccccatcgtgtacgagctgaacaaggagctgaagcccaccaagcccatgcagttcctgggcgacgaggagaccgtgagaaaggccatggaggccgtggccgcccagggcaaggccaagtag

SEQ ID NO: 93251 - DNA, 765 bp, synthetic construct
  misc_feature 1..765: note = Description of Artificial Sequence: Synthetic coding sequence
  source 1..765: mol_type = other DNA
atggccgcctacaagctggtgctgatcagacacggcgagagcacctggaacctggagaacagattcagctgctggtacgacgccgacctgagccccgccggccacgaggaggccaagagaggcggccaggccctgagagacgccggctacgagttcgacatctgcctgaccagcgtgcagaagagagtgatcagaaccctgtggaccgtgctggacgccatcgaccagatgtggctgcccgtggtgagaacctggagactgaacgagagacactacggcggcctgaccggcctgaacaaggccgagaccgccgccaagcacggcgaggcccaggtgaagatctggagaagaagctacgacgtgccccccccccccatggagcccgaccaccccttctacagcaacatcagcaaggacagaagatacgccgacctgaccgaggaccagctgcccagctacgagagccccaaggacaccatcgccagagccctgcccttctggaacgaggagatcgtgccccagatcaaggagggcaagagagtgctgatcgccgcccacggcaacagcctgcagggcatcgccaagcacgtggagggcctgagcgaggaggccatcatggagctgaacctgcccaccggcatccccatcgtgtacgagctggacaagaacctgaagcccatcaagcccatgcagttcctgggcgacgaggagaccgtgtgcaaggccatcgaggccgtggccgcccagggcaaggccaagaagtag

SEQ ID NO: 93252 - DNA, 966 bp, synthetic construct
  misc_feature 1..966: note = Description of Artificial Sequence: Synthetic coding sequence
  source 1..966: mol_type = other DNA
atggccgccgccgaggccggcggcgacgacgccagatgcgtgagactgagcgccgagagagcccaggccctgctggccgacgtggacaccctgctgttcgactgcgacggcgtgctgtggagaggcgagaccgccgtgcccggcgcccccgaggccctgagagccctgagagccagaggcaagagactgggcttcatcaccaacaacagcagcaagaccagagccgcctacgccgagaagctgagaagactgggcttcggcggccccgccggccccggcgccagcctggaggtgttcggcaccgcctactgcaccgccctgtacctgagacagagactggccggcgcccccgcccccaaggcctacgtgctgggcagccccgccctggccgccgagctggaggccgtgggcgtggccagcgtgggcgtgggccccgagcccctgcagggcgagggccccggcgactggctgcacgcccccctggagcccgacgtgagagccgtggtggtgggcttcgacccccacttcagctacatgaagctgaccaaggccctgagatacctgcagcagcccggctgcctgctggtgggcaccaacatggacaacagactgcccctggagaacggcagattcatcgccggcaccggctgcctggtgagagccgtggagatggccgcccagagacaggccgacatcatcggcaagcccagcagattcatcttcgactgcgtgagccaggagtacggcatcaaccccgagagaaccgtgatggtgggcgacagactggacaccgacatcctgctgggcgccacctgcggcctgaagaccatcctgaccctgaccggcgtgagcaccctgggcgacgtgaagaacaaccaggagagcgactgcgtgagcaagaagaagatggtgcccgacttctacgtggacagcatcgccgacctgctgcccgccctgcagggctag

SEQ ID NO: 93253 - DNA, 378 bp, synthetic construct
  misc_feature 1..378: note = Description of Artificial Sequence: Synthetic coding sequence
  source 1..378: mol_type = other DNA
atggccgtggccgacctggccctgatccccgacgtggacatcgacagcgacggcgtgttcaagtacgtgctgatcagagtgcacagcgcccccagaagcggcgcccccgccgccgagagcaaggagatcgtgagaggctacaagtgggccgagtaccacgccgacatctacgacaaggtgagcggcgacatgcagaagcagggctgcgactgcgagtgcctgggcggcggcagaatcagccaccagagccaggacaagaagatccacgtgtacggctacagcatggcctacggccccgcccagcacgccatcagcaccgagaagatcaaggccaagtaccccgactacgaggtgacctgggccaacgacggctactag

SEQ ID NO: 93254 - DNA, 375 bp, synthetic construct
  misc_feature 1..375: note = Description of Artificial Sequence: Synthetic coding sequence
  source 1..375: mol_type = other DNA
atggccgtggccgacctggccctgatccccgacgtggacatcgacagcgacggcgtgttcaagtacgtgctgatcagagtgcacagcgcccccagaagcggcgcccccgccgccgagagcaaggagatcgtgagaggctacaagtgggccgagtaccacgccgacatctacgacaaggtgagcggcgacatgcagaagcagggctgcgactgcgagtgcctgggcggcggcagaatcagccaccagagccaggacaagaagatccacgtgtacggctacagcatgatgagacccacctgcgtgcccctgggcgccagcggccccagaatccaccaccagggcctgtggagctgccccgccagacacttcaactag

SEQ ID NO: 93255 - DNA, 375 bp, synthetic construct; identical to SEQ ID NO: 93254
  misc_feature 1..375: note = Description of Artificial Sequence: Synthetic coding sequence
  source 1..375: mol_type = other DNA

SEQ ID NO: 93256 - DNA, 1356 bp, synthetic construct
  misc_feature 1..1356: note = Description of Artificial Sequence: Synthetic coding sequence
  source 1..1356: mol_type = other DNA
atggccaccgacgacaagaccagccccaccctggacagcgccaacgacctgcccagaagccccaccagccccagccacctgacccacttcaagcccctgacccccgaccaggacgagccccccttcaagagcgcctacagcagcttcgtgaacctgttcagattcaacaaggagagagccgagggcggccagggcgagcagcagcccctgagcggcagctggaccagcccccagctgcccagcagaacccagagcgtgagaagccccaccccctacaagaagcagctgaacgaggagctgcagagaagaagcagcgccctgggcgacctgagagcctgcacctactgcagaaagatcgccctgagctacgcccacagcaccgacagcaacagcatcggcgaggacctgaacgccctgagcgacagcgcctgcagcgtgagcgtgctggaccccagcgagcccagaacccccgtgggcagcagaaaggccagcagaaacatcttcctggaggacgacctggcctggcagagcctgatccaccccgacagcagcaacacccccctgagcaccagactggtgagcgtgcaggaggacgccggcaagagccccgccagaaacagaagcgccagcatcaccaacctgagcctggacagaagcggcagccccatggtgcccagctacgagaccagcgtgagcccccaggccaacagaacctacgtgagaaccgagaccaccgaggacgagagaaagatcctgctggacagcgtgcagctgaaggacctgtggaagaagatctgccaccacagcagcggcatggagttccaggaccacagatactggctgagaacccaccccaactgcatcgtgggcaaggagctggtgaactggctgatcagaaacggccacatcgccaccagagcccaggccatcgccatcggccaggccatggtggacggcagatggctggactgcgtgagccaccacgaccagctgttcagagacgagtacgccctgtacagacccctgcagagcaccgagttcagcgagacccccagccccgacagcgacagcgtgaacagcgtggagggccacagcgagcccagctggttcaaggacatcaagttcgacgacagcgacaccgagcagatcgccgaggagggcgacgacaacctggccaacagcgccagccccagcaagagaaccagcgtgagcagcttccagagcaccgtggacagcgacagcgccgccagcatcagcctgaacgtggagctggacaacgtgaacttccacatcaagaagcccagcaagtacccccacgtgcccccccaccccgccgaccagaagggcagaagatag

SEQ ID NO: 93257 - DNA, 1647 bp, synthetic construct
  misc_feature 1..1647: note = Description of Artificial Sequence: Synthetic coding sequence
  source 1..1647: mol_type = other DNA
atggccaccgacgacaagaccagccccaccctggacagcgccaacgacctgcccagaagccccaccagccccagccacctgacccacttcaagcccctgacccccgaccaggacgagccccccttcaagagcgcctacagcagcttcgtgaacctgttcagattcaacaaggagagagccgagggcggccagggcgagcagcagcccctgagcggcagctggaccagcccccagctgcccagcagaacccagagcgtgagaagccccaccccctacaagaagcagctgaacgaggagctgcagagaagaagcagcgccctggacaccagaagaaaggccgagcccaccttcggcggccacgaccccagaaccgccgtgcagctgagaagcctgagcaccgtgctgaagagactgaaggagatcatggagggcaagagccaggacagcgacctgaagcagtactggatgcccgacagccagtgcaaggagtgctacgactgcagcgagaagttcaccaccttcagaagaagacaccactgcagactgtgcggccagatcttctgcagcagatgctgcaaccaggagatccccggcaagttcatgggctacaccggcgacctgagagcctgcacctactgcagaaagatcgccctgagctacgcccacagcaccgacagcaacagcatcggcgaggacctgaacgccctgagcgacagcgcctgcagcgtgagcgtgctggaccccagcgagcccagaacccccgtgggcagcagaaaggccagcagaaacatcttcctggaggacgacctggcctggcagagcctgatccaccccgacagcagcaacacccccctgagcaccagactggtgagcgtgcaggaggacgccggcaagagccccgccagaaacagaagcgccagcatcaccaacctgagcctggacagaagcggcagccccatggtgcccagctacgagaccagcgtgagcccccaggccaacagaacctacgtgagaaccgagaccaccgaggacgagagaaagatcctgctggacagcgtgcagctgaaggacctgtggaagaagatctgccaccacagcagcggcatggagttccaggaccacagatactggctgagaacccaccccaactgcatcgtgggcaaggagctggtgaactggctgatcagaaacggccacatcgccaccagagcccaggccatcgccatcggccaggccatggtggacggcagatggctggactgcgtgagccaccacgaccagctgttcagagacgagtacgccctgtacagacccctgcagagcaccgagttcagcgagacccccagccccgacagcgacagcgtgaacagcgtggagggccacagcgagcccagctggttcaaggacatcaagttcgacgacagcgacaccgagcagatcgccgaggagggcgacgacaacctggccaacagcgccagccccagcaagagaaccagcgtgagcagcttccagagcaccgtggacagcgacagcgccgccagcatcagcctgaacgtggagctggacaacgtgaacttccacatcaagaagcccagcaagtacccccacgtgcccccccaccccgccgaccagaagggcagaagatag

SEQ ID NO: 93258 - DNA, 6297 bp, synthetic construct
  misc_feature 1..6297: note = Description of Artificial Sequence: Synthetic coding sequence
  source 1..6297: mol_type = other DNA
atggccaccgacgacaagaccagccccaccctggacagcgccaacgacctgcccagaagccccaccagccccagccacctgacccacttcaagcccctgacccccgaccaggacgagccccccttcaagagcgcctacagcagcttcgtgaacctgttcagattcaacaaggagagagccgagggcggccagggcgagcagcagcccctgagcggcagctggaccagcccccagctgcccagcagaacccagagcgtgagaagccccaccccctacaagaagcagctgaacgaggagctgcagagaagaagcagcgccctggacaccagaagaaaggccgagcccaccttcggcggccacgaccccagaaccgccgtgcagctgagaagcctgagcaccgtgctgaagagactgaaggagatcatggagggcaagagccaggacagcgacctgaagcagtactggatgcccgacagccagtgcaaggagtgctacgactgcagcgagaagttcaccaccttcagaagaagacaccactgcagactgtgcggccagatcttctgcagcagatgctgcaaccaggagatccccggcaagttcatgggctacaccggcgacctgagagcctgcacctactgcagaaagatcgccctgagctacgcccacagcaccgacagcaacagcatcggcgaggacctgaacgccctgagcgacagcgcctgcagcgtgagcgtgctggaccccagcgagcccagaacccccgtgggcagcagaaaggccagcagaaacatcttcctggaggacgacctggcctggcagagcctgatccaccccgacagcagcaacacccccctgagcaccagactggtgagcgtgcaggaggacgccggcaagagccccgccagaaacagaagcgccagcatcaccaacctgagcctggacagaagcggcagccccatggtgcccagctacgagaccagcgtgagcccccaggccaacagaacctacgtgagaaccgagaccaccgaggacgagagaaagatcctgctggacagcgtgcagctgaaggacctgtggaagaagatctgccaccacagcagcggcatggagttccaggaccacagatactggctgagaacccaccccaactgcatcgtgggcaaggagctggtgaactggctgatcagaaacggccacatcgccaccagagcccaggccatcgccatcggccaggccatggtggacggcagatggctggactgcgtgagccaccacgaccagctgttcagagacgagtacgccctgtacagacccctgcagagcaccgagttcagcgagacccccagccccgacagcgacagcgtgaacagcgtggagggccacagcgagcccagctggttcaaggacatcaagttcgacgacagcgacaccgagcagatcgccgaggagggcgacgacaacctggccaacagcgccagccccagcaagagaaccagcgtgagcagcttccagagcaccgtggacagcgacagcgccgccagcatcagcctgaacgtggagctggacaacgtgaacttccacatcaagaagcccagcaagtacccccacgtgcccccccaccccgccgaccagaaggagtacctgatcagcgacaccggcggccagcagctgagcatcagcgacgccttcatcaaggagagcctgttcaacagaagagtggaggagaagagcaaggagctgcccttcacccccctgggctggcaccacaacaacctggagctgctgagagaggagaacggcgagaagcaggccatggagagactgctgagcgccaaccacaaccacatgatggccctgctgcagcagctgctgcacagcgacagcctgagcagcagctggagagacatcatcgtgagcctggtgtgccaggtggtgcagaccgtgagacccgacgtgaagaaccaggacgacgacatggacatcagacagttcgtgcacatcaagaagatccccggcggcaagaagttcgacagcgtggtggtgaacggcttcgtgtgcaccaagaacatcgcccacaagaagatgagcagctgcatcaagaaccccaagatcctgctgctgaagtgcagcatcgagtacctgtacagagaggagaccaagttcacctgcatcgaccccatcgtgctgcaggagagagagttcctgaagaactacgtgcagagaatcgtggacgtgagacccaccctggtgctggtggagaagaccgtgagcagaatcgcccaggacatgctgctggagcacggcatcaccctggtgatcaacgtgaagagccaggtgctggagagaatcagcagaatgacccagggcgacctggtgatgagcatggaccagctgctgaccaagccccacctgggcacctgccacaagttctacatgcagatcttccagctgcccaacgagcagaccaagaccctgatgttcttcgagggctgcccccagcacctgggctgcaccatcaagctgagaggcggcagcgactacgagctggccagagtgaaggagatcctgatcttcatgatctgcgtggcctaccacagccagctggagatcagcttcctgatggacgagttcgccatgccccccaccctgatgcagaaccccagcttccacagcctgatcgagggcagaggccacgagggcgccgtgcaggagcagtacggcggcggcagcatcccctgggaccccgacatcccccccgagagcctgccctgcgacgacagcagcctgctggagctgagaatcgtgttcgagaagggcgagcaggagaacaagaacctgccccaggccgtggccagcgtgaagcaccaggagcacagcaccaccgcctgccccgccggcctgccctgcgccttcttcgcccccgtgcccgagagcctgctgcccctgcccgtggacgaccagcaggacgccctgggcagcgagcagcccgagaccctgcagcagaccgtggtgctgcaggaccccaagagccagatcagagccttcagagaccccctgcaggacgacaccggcctgtacgtgaccgaggaggtgaccagcagcgaggacaagagaaagacctacagcctggccttcaagcaggagctgaaggacgtgatcctgtgcatcagccccgtgatcaccttcagagagcccttcctgctgaccgagaagggcatgagatgcagcaccagagactacttcgccgagcaggtgtactggagccccctgctgaacaaggagttcaaggagatggagaacagaagaaagaagcagctgctgagagacctgagcggcctgcagggcatgaacggcagcatccaggccaagagcatccaggtgctgcccagccacgagctggtgagcaccagaatcgccgagcacctgggcgacagccagagcctgggcagaatgctggccgactacagagccagaggcggcagaatccagcccaagaacagcgaccccttcgcccacagcaaggacgccagcagcaccagcagcggccagagcggcagcaagaacgagggcgacgaggagagaggcctgatcctgagcgacgccgtgtggagcaccaaggtggactgcctgaaccccatcaaccaccagagactgtgcgtgctgttcagcagcagcagcgcccagagcagcaacgcccccagcgcctgcgtgagcccctggatcgtgaccatggagttctacggcaagaacgacctgaccctgggcatcttcctggagagatactgcttcagacccagctaccagtgccccagcatgttctgcgacacccccatggtgcaccacatcagaagattcgtgcacggccagggctgcgtgcagatcatcctgaaggagctggacagccccgtgcccggctaccagcacaccatcctgacctacagctggtgcagaatctgcaagcaggtgacccccgtggtggccctgagcaacgagagctggagcatgagcttcgccaagtacctggagctgagattctacggccaccagtacaccagaagagccaacgccgagccctgcggccacagcatccaccacgactaccaccagtacttcagctacaaccagatggtggccagcttcagctacagccccatcagactgctggaggtgtgcgtgcccctgcccaagatcttcatcaagagacaggcccccctgaaggtgagcctgctgcaggacctgaaggacttcttccagaaggtgagccaggtgtacgtggccatcgacgagagactggccagcctgaagaccgacaccttcagcaagaccagagaggagaagatggaggacatcttcgcccagaaggagatggaggagggcgagttcaagaactggatcgagaagatgcaggccagactgatgagcagcagcgtggacaccccccagcagctgcagagcgtgttcgagagcctgatcgccaagaagcagagcctgtgcgaggtgctgcaggcctggaacaacagactgcaggacctgttccagcaggagaagggcagaaagagacccagcgtgccccccagccccggcagactgagacagggcgaggagagcaagatcagcgccatggacgccagccccagaaacatcagccccggcctgcagaacggcgagaaggaggacagattcctgaccaccctgagcagccagagcagcaccagcagcacccacctgcagctgcccaccccccccgaggtgatgagcgagcagagcgtgggcggcccccccgagctggacaccgccagcagcagcgaggacgtgttcgacggccacctgctgggcagcaccgacagccaggtgaaggagaagagcaccatgaaggccatcttcgccaacctgctgcccggcaacagctacaaccccatccccttccccttcgaccccgacaagcactacctgatgtacgagcacgagagagtgcccatcgccgtgtgcgagaaggagcccagcagcatcatcgccttcgccctgagctgcaaggagtacagaaacgccctggaggagctgagcaaggccacccagtggaacagcgccgaggagggcctgcccaccaacagcaccagcgacagcagacccaagagcagcagccccatcagactgcccgagatgagcggcggccagaccaacagaaccaccgagaccgagccccagcccaccaagaaggccagcggcatgctgagcttcttcagaggcaccgccggcaagagccccgacctgagcagccagaagagagagaccctgagaggcgccgacagcgcctactaccaggtgggccagaccggcaaggagggcaccgagaaccagggcgtggagccccaggacgaggtggacggcggcgacacccagaagaagcagctgatcaacccccacgtggagctgcagttcagcgacgccaacgccaagttctactgcagactgtactacgccggcgagttccacaagatgagagaggtgatcctggacagcagcgaggaggacttcatcagaagcctgagccacagcagcccctggcaggccagaggcggcaagagcggcgccgccttctacgccaccgaggacgacagattcatcctgaagcagatgcccagactggaggtgcagagcttcctggacttcgccccccactacttcaactacatcaccaacgccgtgcagcagaagagacccaccgccctggccaagatcctgggcgtgtacagaatcggctacaagaacagccagaacaacaccgagaagaagctggacctgctggtgatggagaacctgttctacggcagaaagatggcccaggtgttcgacctgaagggcagcctgagaaacagaaacgtgaagaccgacaccggcaaggagagctgcgacgtggtgctgctggacgagaacctgctgaagatggtgagagacaaccccctgtacatcagaagccacagcaaggccgtgctgagaaccagcatccacagcgacagccacttcctgagcagccacctgatcatcgactacagcctgctggtgggcagagacgacaccagcaacgagctggtggtgggcatcatcgactacatcagaaccttcacctgggacaagaagctggagatggtggtgaagagcaccggcatcctgggcggccagggcaagatgcccaccgtggtgagccccgagctgtacagaaccagattctgcgaggccatggacaagtacttcctgatggtgcccgaccactggaccggcctgggcctgaactgctag

SEQ ID NO: 93259 - DNA, 3051 bp, synthetic construct
  misc_feature 1..3051: note = Description of Artificial Sequence: Synthetic coding sequence
  source 1..3051: mol_type = other DNA
atggagttccaggaccacagatactggctgagaacccaccccaactgcatcgtgggcaaggagctggtgaactggctgatcagaaacggccacatcgccaccagagcccaggccatcgccatcggccaggccatggtggacggcagatggctggactgcgtgagccaccacgaccagctgttcagagacgagtacgccctgtacagacccctgcagagcaccgagttcagcgagacccccagccccgacagcgacagcgtgaacagcgtggagggccacagcgagcccagctggttcaaggacatcaagttcgacgacagcgacaccgagcagatcgccgaggagggcgacgacaacctggccaagtacctgatcagcgacaccggcggccagcagctgagcatcagcgacgccttcatcaaggagagcctgttcaacagaagagtggaggagaagagcaaggagctgcccttcacccccctgggctggcaccacaacaacctggagctgctgagagaggagaacggcgagaagcaggccatggagagactgctgagcgccaaccacaaccacatgatggccctgctgcagcagctgctgcacagcgacagcctgagcagcagctggagagacatcatcgtgagcctggtgtgccaggtggtgcagaccgtgagacccgacgtgaagaaccaggacgacgacatggacatcagacagttcgtgcacatcaagaagatccccggcggcaagaagttcgacagcgtggtggtgaacggcttcgtgtgcaccaagaacatcgcccacaagaagatgagcagctgcatcaagaaccccaagatcctgctgctgaagtgcagcatcgagtacctgtacagagaggagaccaagttcacctgcatcgaccccatcgtgctgcaggagagagagttcctgaagaactacgtgcagagaatcgtggacgtgagacccaccctggtgctggtggagaagaccgtgagcagaatcgcccaggacatgctgctggagcacggcatcaccctggtgatcaacgtgaagagccaggtgctggagagaatcagcagaatgacccagggcgacctggtgatgagcatggaccagctgctgaccaagccccacctgggcacctgccacaagttctacatgcagatcttccagctgcccaacgagcagaccaagaccctgatgttcttcgagggctgcccccagcacctgggctgcaccatcaagctgagaggcggcagcgactacgagctggccagagtgaaggagatcctgatcttcatgatctgcgtggcctaccacagccagctggagatcagcttcctgatggacgagttcgccatgccccccaccctgatgcagaaccccagcttccacagcctgatcgagggcagaggccacgagggcgccgtgcaggagcagtacggcggcggcagcatcccctgggaccccgacatcccccccgagagcctgccctgcgacgacagcagcctgctggagctgagaatcgtgttcgagaagggcgagcaggagaacaagaacctgccccaggccgtggccagcgtgaagcaccaggagcacagcaccaccgcctgccccgccggcctgccctgcgccttcttcgcccccgtgcccgagagcctgctgcccctgcccgtggacgaccagcaggacgccctgggcagcgagcagcccgagaccctgcagcagaccgtggtgctgcaggaccccaagagccagatcagagccttcagagaccccctgcaggacgacaccggcctgtacgtgaccgaggaggtgaccagcagcgaggacaagagaaagacctacagcctggccttcaagcaggagctgaaggacgtgatcctgtgcatcagccccgtgatcaccttcagagagcccttcctgctgaccgagaagggcatgagatgcagcaccagagactacttcgccgagcaggtgtactggagccccctgctgaacaaggagttcaaggagatggagaacagaagaaagaagcagctgctgagagacctgagcggcctgcagggcatgaacggcagcatccaggccaagagcatccaggtgctgcccagccacgagctggtgagcaccagaatcgccgagcacctgggcgacagccagagcctgggcagaatgctggccgactacagagccagaggcggcagaatccagcccaagaacagcgaccccttcgcccacagcaaggacgccagcagcaccagcagcggccagagcggcagcaagaacgagggcgacgaggagagaggcctgatcctgagcgacgccgtgtggagcaccaaggtggactgcctgaaccccatcaaccaccagagactgtgcgtgctgttcagcagcagcagcgcccagagcagcaacgcccccagcgcctgcgtgagcccctggatcgtgaccatggagttctacggcaagaacgacctgaccctgggcatcttcctggagagatactgcttcagacccagctaccagtgccccagcatgttctgcgacacccccatggtgcaccacatcagaagattcgtgcacggccagggctgcgtgcagatcatcctgaaggagctggacagccccgtgcccggctaccagcacaccatcctgacctacagctggtgcagaatctgcaagcaggtgacccccgtggtggccctgagcaacgagagctggagcatgagcttcgccaagtacctggagctgagattctacggccaccagtacaccagaagagccaacgccgagccctgcggccacagcatccaccacgactaccaccagtacttcagctacaaccagatggtggccagcttcagctacagccccatcagactgctggaggtgtgcgtgcccctgcccaagatcttcatcaagagacaggcccccctgaaggtgagcctgctgcaggacctgaaggacttcttccagaaggtgagccaggtgtacgtggccatcgacgagagactggccagcctgaagaccgacaccttcagctag

SEQ ID NO: 93260 - DNA, 522 bp, synthetic construct
  misc_feature 1..522: note = Description of Artificial Sequence: Synthetic coding sequence
  source 1..522: mol_type = other DNA
atgagaccctggagcagccccgcccagctggtggccggcgcccagcccgccggcagaggcgaccccctgggccccagacccatccccccccccagattcagaagagccagcagccagagagagcccccctaccccagacccgccgagcccgccctggagctggccggcagcaagtgccagcccgacacccccgccgccagcctgtgccccgccgacagccccagccagcacagagtgatgccccccggccccgccagctgggccaacgtgggcagcagaccccacaccgtggccaacggccacgagctgttcgaggtgagcgaggagagagacgaggaggtggccgccttctgccacatgctggacatcctgagaagcggcagcgacatccaggactacttcctgaccggctacgtgtggagcgccgtgacccccagccccgagcacctgggcgacgaggtgaacctgaaggtgaccgtgctgtgcgacagactgcaggaggccctgaccttcacctgctag

SEQ ID NO: 93261 - DNA, 4905 bp, synthetic construct
  misc_feature 1..4905: note = Description of Artificial Sequence: Synthetic coding sequence
  source 1..4905: mol_type = other DNA
atgagcagcacccagggcaacggcgagcactggaagagcctggagagcgtgggcatcagcagaaaggagctggccatggccgaggccctgcagatggagtacgacgccctgagcagactgagacacgacaaggaggagaacagagccaagcagaacgccgaccccagcctgatcagctgggacgagcccggcgtggacttctacagcaagcccgccggcagaagaaccgacctgaagctgctgagaggcctgagcggcagcgaccccaccctgaactacaacagcctgagcccccaggagggcccccccaaccacagcaccagccagggcccccagcccggcagcgacccctggcccaagggcagcctgagcggcgactacctgtacatcttcgacggcagcgacggcggcgtgagcagcagccccggccccggcgacatcgagggcagctgcaagaagctgagccccccccccctgccccccagagccagcatctgggacaccccccccctgccccccagaaagggcagccccagcagcagcaagatcagccagcccagcgacatcaacaccttcagcctggtggagcagctgcccggcaagctgctggagcacagaatcctggaggaggaggaggtgctgggcggcggcggccagggcagactgctgggcagcgtggactacgacggcatcaacgacgccatcaccagactgaacctgaagagcacctacgacgccgagatgctgagagacgccaccagaggctggaaggagggcagaggccccctggacttcagcaaggacaccagcggcaagcccgtggccagaagcaagaccatgcccccccaggtgccccccagaacctacgccagcagatacggcaacagaaagaacgccacccccggcaagaacagaagaatcagcgccgcccccgtgggcagcagaccccacaccgtggccaacggccacgagctgttcgaggtgagcgaggagagagacgaggaggtggccgccttctgccacatgctggacatcctgagaagcggcagcgacatccaggactacttcctgaccggctacgtgtggagcgccgtgacccccagccccgagcacctgggcgacgaggtgaacctgaaggtgaccgtgctgtgcgacagactgcaggaggccctgaccttcacctgcaactgcagcagcaccgtggacctgctgatctaccagaccctgtgctacacccacgacgacctgagaaacgtggacgtgggcgacttcgtgctgaagccctgcggcctggaggagttcctgcagaacaagcacgccctgggcagccacgagtacatccagtactgcagaaagttcgacatcgacatcagactgcagctgatggagcagaaggtggtgagaagcgacctggccagaaccgtgaacgacgaccagagccccagcaccctgaactacctggtgcacctgcaggagagacccgtgaagcagaccatcagcagacaggccctgagcctgctgttcgacacctaccacaacgaggtggacgccttcctgctggccgacggcgacttccccctgaaggccgacagagtggtgcagagcgtgaaggccatctgcaacgccctggccgccgtggagacccccgagatcaccagcgccctgaaccagctgcccccctgccccagcagaatgcagcccaagatccagaaggaccccagcgtgctggccgtgagagagaacagagagaaggtggtggaggccctgaccgccgccatcctggacctggtggagctgtactgcaacaccttcaacgccgacttccagaccgccgtgcccggcagcagaaagcacgacctggtgcaggaggcctgccacttcgccagaagcctggccttcaccgtgtacgccacccacagaatccccatcatctgggccaccagctacgaggacttctacctgagctgcagcctgagccacggcggcaaggagctgtgcagccccctgcagaccagaagagcccacttcagcaagtacctgttccacctgatcgtgtgggaccagcagatctgcttccccgtgcaggtgaacagactgcccagagagaccctgctgtgcgccaccctgtacgccctgcccatccccccccccggcagcagcagcgaggccaacaagcagagaagagtgcccgaggccctgggctgggtgaccacccccctgttcaacttcagacaggtgctgacctgcggcagaaagctgctgggcctgtggcccgccacccaggagaaccccagcgccagatggagcgcccccaacttccaccagcccgacagcgtgatcctgcagatcgacttccccaccagcgccttcgacatcaagttcaccagcccccccggcgacaagttcagccccagatacgagttcggcagcctgagagaggaggaccagagaaagctgaaggacatcatgcagaaggagagcctgtactggctgaccgacgccgacaagaagagactgtgggagaagagatactactgccacagcgaggtgagcagcctgcccctggtgctggccagcgcccccagctgggagtgggcctgcctgcccgacatctacgtgctgctgaagcagtggacccacatgaaccaccaggacgccctgggcctgctgcacgccaccttccccgaccaggaggtgagaagaatggccgtgcagtggatcggcagcctgagcgacgccgagctgctggactacctgccccagctggtgcaggccctgaagtacgagtgctacctggacagccccctggtgagattcctgctgaagagagccgtgagcgacctgagagtgacccactacttcttctggctgctgaaggacggcctgaaggacagccagttcagcatcagataccagtacctgctggccgccctgctgtgctgctgcggcaagggcctgagagaggagttcaacagacagtgctggctggtgaacgccctggccaagctggcccagcaggtgagagaggccgcccccagcgccagacagggcatcctgagaaccggcctggaggaggtgaagcagttcttcgccctgaacggcagctgcagactgcccctgagccccagcctgctggtgaagggcatcgtgcccagagactgcagctacttcaacagcaacgccgtgcccctgaagctgagcttccagaacgtggaccccctgggcgagaacatcagagtgatcttcaagtgcggcgacgacctgagacaggacatgctgaccctgcagatgatcagaatcatgagcaagatctgggtgcaggagggcctggacatgagaatggtgatcttcagatgcttcagcaccggcagaggcagaggcatggtggagatgatccccaacgccgagaccctgagaaagatccaggtggagcacggcgtgaccggcagcttcaaggacagacccctggccgactggctgcagaagcacaaccccggcgaggacgagtacgagaaggccgtggagaacttcatctacagctgcgccggctgctgcgtggccacctacgtgctgggcatctgcgacagacacaacgacaacatcatgctgaagaccaccggccacatgttccacatcgacttcggcagattcctgggccacgcccagatgttcggcaacatcaagagagacagagcccccttcgtgttcaccagcgacatggcctacgtgatcaacggcggcgacaagcccagcagcagattccacgacttcgtggacctgtgctgccaggcctacaacctgatcagaaagcacacccacctgttcctgaacctgctgggcctgatgctgagctgcggcatccccgagctgagcgacctggaggacctgaagtacgtgtacgacgccctgagaccccaggacaccgaggccaacgccaccacctacttcaccagactgatcgagagcagcctgggcagcgtggccaccaagctgaacttcttcatccacaacctggcccagatgaagttcaccggcagcgacgacagactgaccctgagcttcgccagcagaacccacaccctgaagagcagcggcagaatcagcgacgtgttcctgtgcagacacgagaagatcttccaccccaacaagggctacatctacgtggtgaaggtgatgagagagaacacccacgaggccacctacatccagagaaccttcgaggagttccaggagctgcacaacaagctgagactgctgttccccagcagccacctgcccagcttccccagcagattcgtgatcggcagaagcagaggcgaggccgtggccgagagaagaagagaggagctgaacggctacatctggcacctgatccacgccccccccgaggtggccgagtgcgacctggtgtacaccttcttccaccccctgcccagagacgagaaggccatgggcaccagccccgcccccaagagcagcgacggcacctgggccagacccgtgggcaaggtgggcggcgaggtgaagctgagcatcagctacaagaacaacaagctgttcatcatggtgatgcacatcagaggcctgcagctgctgcaggacggcaacgaccccgacccctacgtgaagatctacctgctgcccgacccccagaagaccaccaagagaaagaccaaggtggccagaaagacctgcaaccccacctacaacgagatgctggtgtacgacggcatccccaagggcgacctgcagcagagagagctgcagctgagcgtgctgagcgagcagggcttctgggagaacgtgctgctgggcgaggtgaacatcagactgagagagctggacctggcccaggagaagaccggctggttcgccctgggcagcagaagccacggcaccctgtag

SEQ ID NO: 93262 - DNA, 360 bp, synthetic construct
  misc_feature 1..360: note = Description of Artificial Sequence: Synthetic coding sequence
  source 1..360: mol_type = other DNA
atgttcggcaacatcaagagagacagagcccccttcgtgttcaccagcgacatggcctacgtgatcaacggcggcgacaagcccagcagcagattccacgacttcgtggacctgtgctgccaggcctacaacctgatcagaaagcacacccacctgttcctgaacctgctgggcctgatgctgagctgcggcatccccgagctgagcgacctggaggacctgaagtacgtgtacgacgccctgagaccccaggacaccgaggccaacgccaccacctacttcaccagagtgatcctggccagcgtggtgggcggcagagagagcaagacctgcagcgccgtgagcagcagcggcgactag

SEQ ID NO: 93263 - DNA, 396 bp, synthetic construct
  misc_feature 1..396: note = Description of Artificial Sequence: Synthetic coding sequence
  source 1..396: mol_type = other DNA
atgagcagcacccagggcaacggcgagcactggaagagcctggagagcgtgggcatcagcagaaaggagctggccatggccgaggccctgcagatggagtacgacgccctgagcagactgagacacgacaaggaggagaacagagccaagcagaacgccgaccccagcctgatcagctgggacgagcccggcgtggacttctacagcaagcccgccggcagaagaaccgacctgaagctgctgagaggcctgagcggcagcgaccccaccctgaactacaacagcctgagcccccaggagggcccccccaaccacagcaccagccagggcccccagcccggcagcgacccctggcccaagggcagcctgagcggcgactacctgtacatcttctag

SEQ ID NO: 93264 - DNA, 4821 bp, synthetic construct
  misc_feature 1..4821: note = Description of Artificial Sequence: Synthetic coding sequence
  source 1..4821: mol_type = other DNA
atgagcagcacccagggcaacggcgagcactggaagagcctggagagcgtgggcatcagcagaaaggagctggccatggccgaggccctgcagatggagtacgacgccctgagcagactgagacacgacaaggaggagaacagagccaagcagaacgccgaccccagcctgatcagctgggacgagcccggcgtggacttctacagcaagcccgccggcagaagaaccgacctgaagctgctgagaggcctgagcggcagcgaccccaccctgaactacaacagcctgagcccccaggagggcccccccaaccacagcaccagccagggcccccagcccggcagcgacccctggcccaagggcagcctgagcggcgactacctgtacatcttcgacggcagcgacggcggcgtgagcagcagccccggccccggcgacatcgagggcagctgcaagaagctgagccccccccccctgccccccagagccagcatctgggacaccccccccctgccccccagaaagggcagccccagcagcagcaagatcagccagcccagcgacatcaacaccttcagcctggtggagcagctgcccggcaagctgctggagcacagaatcctggaggaggaggaggtgctgggcggcggcggccagggcagactgctgggcagcgtggactacgacggcatcaacgacgccatcaccagactgaacctgaagagcacctacgacgccgagatgctgagagacgccaccagaggctggaaggagggcagaggccccctggacttcagcaaggacaccagcggcaagcccgtggccagaagcaagaccatgcccccccaggtgccccccagaacctacgccagcagatacggcaacagaaagaacgccacccccggcaagaacagaagaatcagcgccgcccccgtgggcagcagaccccacaccgtggccaacggccacgagctgttcgaggtgagcgaggagagagacgaggaggtggccgccttctgccacatgctggacatcctgagaagcggcagcgacatccaggactacttcctgaccggctacgtgtggagcgccgtgacccccagccccgagcacctgggcgacgaggtgaacctgaaggtgaccgtgctgtgcgacagactgcaggaggccctgaccttcacctgcaactgcagcagcaccgtggacctgctgatctaccagaccctgtgctacacccacgacgacctgagaaacgtggacgtgggcgacttcgtgctgaagccctgcggcctggaggagttcctgcagaacaagcacgccctgggcagccacgagtacatccagtactgcagaaagttcgacatcgacatcagactgcagctgatggagcagaaggtggtgagaagcgacctggccagaaccgtgaacgacgaccagagccccagcaccctgaactacctggtgcacctgcaggagagacccgtgaagcagaccatcagcagacaggccctgagcctgctgttcgacacctaccacaacgaggtggacgccttcctgctggccgacggcgacttccccctgaaggccgacagagtggtgcagagcgtgaaggccatctgcaacgccctggccgccgtggagacccccgagatcaccagcgccctgaaccagctgcccccctgccccagcagaatgcagcccaagatccagaaggaccccagcgtgctggccgtgagagagaacagagagaaggtggtggaggccctgaccgccgccatcctggacctggtggagctgtactgcaacaccttcaacgccgacttccagaccgccgtgcccggcagcagaaagcacgacctggtgcaggaggcctgccacttcgccagaagcctggccttcaccgtgtacgccacccacagaatccccatcatctgggccaccagctacgaggacttctacctgagctgcagcctgagccacggcggcaaggagctgtgcagccccctgcagaccagaagagcccacttcagcaagtacctgttccacctgatcgtgtgggaccagcagatctgcttccccgtgcaggtgaacagactgcccagagagaccctgctgtgcgccaccctgtacgccctgcccatccccccccccggcagcagcagcgaggccaacaagcagagaagagtgcccgaggccctgggctgggtgaccacccccctgttcaacttcagacaggtgctgacctgcggcagaaagctgctgggcctgtggcccgccacccaggagaaccccagcgccagatggagcgcccccaacttccaccagcccgacagcgtgatcctgcagatcgacttccccaccagcgccttcgacatcaagttcaccagcccccccggcgacaagttcagccccagatacgagttcggcagcctgagagaggaggaccagagaaagctgaaggacatcatgcagaaggagagcctgtactggctgaccgacgccgacaagaagagactgtgggagaagagatactactgccacagcgagtggacccacatgaaccaccaggacgccctgggcctgctgcacgccaccttccccgaccaggaggtgagaagaatggccgtgcagtggatcggcagcctgagcgacgccgagctgctggactacctgccccagctggtgcaggccctgaagtacgagtgctacctggacagccccctggtgagattcctgctgaagagagccgtgagcgacctgagagtgacccactacttcttctggctgctgaaggacggcctgaaggacagccagttcagcatcagataccagtacctgctggccgccctgctgtgctgctgcggcaagggcctgagagaggagttcaacagacagtgctggctggtgaacgccctggccaagctggcccagcaggtgagagaggccgcccccagcgccagacagggcatcctgagaaccggcctggaggaggtgaagcagttcttcgccctgaacggcagctgcagactgcccctgagccccagcctgctggtgaagggcatcgtgcccagagactgcagctacttcaacagcaacgccgtgcccctgaagctgagcttccagaacgtggaccccctgggcgagaacatcagagtgatcttcaagtgcggcgacgacctgagacaggacatgctgaccctgcagatgatcagaatcatgagcaagatctgggtgcaggagggcctggacatgagaatggtgatcttcagatgcttcagcaccggcagaggcagaggcatggtggagatgatccccaacgccgagaccctgagaaagatccaggtggagcacggcgtgaccggcagcttcaaggacagacccctggccgactggctgcagaagcacaaccccggcgaggacgagtacgagaaggccgtggagaacttcatctacagctgcgccggctgctgcgtggccacctacgtgctgggcatctgcgacagacacaacgacaacatcatgctgaagaccaccggccacatgttccacatcgacttcggcagattcctgggccacgcccagatgttcggcaacatcaagagagacagagcccccttcgtgttcaccagcgacatggcctacgtgatcaacggcggcgacaagcccagcagcagattccacgacttcgtggacctgtgctgccaggcctacaacctgatcagaaagcacacccacctgttcctgaacctgctgggcctgatgctgagctgcggcatccccgagctgagcgacctggaggacctgaagtacgtgtacgacgccctgagaccccaggacaccgaggccaacgccaccacctacttcaccagactgatcgagagcagcctgggcagcgtggccaccaagctgaacttcttcatccacaacctggcccagatgaagttcaccggcagcgacgacagactgaccctgagcttcgccagcagaacccacaccctgaagagcagcggcagaatcagcgacgtgttcctgtgcagacacgagaagatcttccaccccaacaagggctacatctacgtggtgaaggtgatgagagagaacacccacgaggccacctacatccagagaaccttcgaggagttccaggagctgcacaacaagctgagactgctgttccccagcagccacctgcccagcttccccagcagattcgtgatcggcagaagcagaggcgaggccgtggccgagagaagaagagaggagctgaacggctacatctggcacctgatccacgccccccccgaggtggccgagtgcgacctggtgtacaccttcttccaccccctgcccagagacgagaaggccatgggcaccagccccgcccccaagagcagcgacggcacctgggccagacccgtgggcaaggtgggcggcgaggtgaagctgagcatcagctacaagaacaacaagctgttcatcatggtgatgcacatcagaggcctgcagctgctgcaggacggcaacgaccccgacccctacgtgaagatctacctgctgcccgacccccagaagaccaccaagagaaagaccaaggtggccagaaagacctgcaaccccacctacaacgagatgctggtgtacgacggcatccccaagggcgacctgcagcagagagagctgcagctgagcgtgctgagcgagcagggcttctgggagaacgtgctgctgggcgaggtgaacatcagactgagagagctggacctggcccaggagaagaccggctggttcgccctgggcagcagaagccacggcaccctgtag

SEQ ID NO: 93265 - DNA, 183 bp, synthetic construct
  misc_feature 1..183: note = Description of Artificial Sequence: Synthetic coding sequence
  source 1..183: mol_type = other DNA
atgagcagcacccagggcaacggcgagcactggaagagcctggagagcgtgggcatcagcagaaaggagctggccatggccgaggccctgcagatggagtacgacgccctgagcagactgagacacgacaaggaggagaacagagccaagcagaacgccgaccccagcctgatcagctggtag

SEQ ID NO: 93266 - DNA, 522 bp, synthetic construct; identical to SEQ ID NO: 93260
  misc_feature 1..522: note = Description of Artificial Sequence: Synthetic coding sequence
  source 1..522: mol_type = other DNA

SEQ ID NO: 93267 - DNA, 4338 bp, synthetic construct
  misc_feature 1..4338: note = Description of Artificial Sequence: Synthetic coding sequence
  source 1..4338: mol_type = other DNA
atggcctacagctggcagaccgaccccaaccccaacgagagccacgagaagcagtacgagcaccaggagttcctgttcgtgaaccagccccacagcagcagccaggtgagcctgggcttcgaccagatcgtggacgagatcagcggcaagatcccccactacgagagcgagatcgacgagaacaccttcttcgtgcccaccgcccccaagtgggacagcaccggccacagcctgaacgaggcccaccagatcagcctgaacgagttcaccagcaagagcagagagctgagctggcaccaggtgagcaaggcccccgccatcggcttcagccccagcgtgctgcccaagccccagaacaccaacaaggagtgcagctggggcagccccatcggcaagcaccacggcgccgacgacagcagattcagcatcctggcccccagcttcaccagcctggacaagatcaacctggagaaggagctggagaacgagaaccacaactaccacatcggcttcgagagcagcatcccccccaccaacagcagcttcagcagcgacttcatgcccaaggaggagaacaagagaagcggccacgtgaacatcgtggagcccagcctgatgctgctgaagggcagcctgcagcccggcatgtgggagagcacctggcagaagaacatcgagagcatcggctgcagcatccagctggtggaggtgccccagagcagcaacaccagcctggccagcttctgcaacaaggtgaagaagatcagagagagataccacgccgccgacgtgaacttcaacagcggcaagatctggagcaccaccaccgccttcccctaccagctgttcagcaagaccaagttcaacatccacatcttcatcgacaacagcacccagcccctgcacttcatgccctgcgccaactacctggtgaaggacctgatcgccgagatcctgcacttctgcaccaacgaccagctgctgcccaaggaccacatcctgagcgtgtgcggcagcgaggagttcctgcagaacgaccactgcctgggcagccacaagatgttccagaaggacaagagcgtgatccagctgcacctgcagaagagcagagaggcccccggcaagctgagcagaaagcacgaggaggaccacagccagttctacctgaaccagctgctggagttcatgcacatctggaaggtgagcagacagtgcctgctgaccctgatcagaaagtacgacttccacctgaagtacctgctgaagacccaggagaacgtgtacaacatcatcgaggaggtgaagaagatctgcagcgtgctgggctgcgtggagaccaagcagatcaccgacgccgtgaacgagctgagcctgatcctgcagagaaagggcgagaacttctaccagagcagcgagaccagcgccaagggcctgatcgagaaggtgaccaccgagctgagcaccagcatctaccagctgatcaacgtgtactgcaacagcttctacgccgacttccagcccgtgaacgtgcccagatgcaccagctacctgaaccccggcctgcccagccacctgagcttcaccgtgtacgccgcccacaacatccccgagacctgggtgcacagaatcaacttccccctggagatcaagagcctgcccagagagagcatgctgaccgtgaagctgttcggcatcgcctgcgccaccaacaacgccaacctgctggcctggacctgcctgcccctgttccccaaggagaagagcatcctgggcagcatgctgttcagcatgaccctgcagagcgagccccccgtggagatgatcacccccggcgtgtgggacgtgagccagcccagccccgtgaccctgcagatcgacttccccgccaccggctgggagtacatgaagcccgacagcgaggagaacagaagcaacctggaggagcccctgaaggagtgcatcaagcacatcgccagactgagccagaagcagacccccctgctgctgagcgaggagaagaagagatacctgtggttctacagattctactgcaacaacgagaactgcagcctgcccctggtgctgggcagcgcccccggctgggacgagagaaccgtgagcgagatgcacaccatcctgagaagatggaccttcagccagcccctggaggccctgggcctgctgaccagcagcttccccgaccaggagatcagaaaggtggccgtgcagcagctggacaacctgctgaacgacgagctgctggagtacctgccccagctggtgcaggccgtgaagttcgagtggaacctggagagccccctggtgcagctgctgctgcacagaagcctgcagagcatccaggtggcccacagactgtactggctgctgaagaacgccgagaacgaggcctacttcaagagctggtaccagaagctgctggccgccctgcagttctgcgccggcaaggccctgaacgacgagttcagcaaggagcagaagctgatcaagatcctgggcgacatcggcgagagagtgaagagcgccagcgaccaccagagacaggaggtgctgaagaaggagatcggcagactggaggagttcttccaggacgtgaacacctgccacctgcccctgaaccccgccctgtgcatcaagggcatcgaccacgacgcctgcagctacttcaccagcaacgccctgcccctgaagatcaccttcatcaacgccaaccccatgggcaagaacatcagcatcatcttcaaggccggcgacgacctgagacaggacatgctggtgctgcagctgatccaggtgatggacaacatctggctgcaggagggcctggacatgcagatgatcatctacagatgcctgagcaccggcaaggaccagggcctggtgcagatggtgcccgacgccgtgaccctggccaagatccacagacacagcggcctgatcggccccctgaaggagaacaccatcaagaagtggttcagccagcacaaccacctgaaggccgactacgagaaggccctgagaaacttcttctacagctgcgccggctggtgcgtggtgaccttcatcctgggcgtgtgcgacagacacaacgacaacatcatgctgaccaagagcggccacatgttccacatcgacttcggcaagttcctgggccacgcccagaccttcggcggcatcaagagagacagagcccccttcatcttcaccagcgagatggagtacttcatcaccgagggcggcaagaacccccagcacttccaggacttcgtggagctgtgctgcagagcctacaacatcatcagaaagcacagccagctgctgctgaacctgctggagatgatgctgtacgccggcctgcccgagctgagcggcatccaggacctgaagtacgtgtacaacaacctgagaccccaggacaccgacctggaggccaccagccacttcaccaagaagatcaaggagagcctggagtgcttccccgtgaagctgaacaacctgatccacaccctggcccagatgagcgccatcagccccgccaagagcaccagccagaccttcccccaggagagctgcctgctgagcaccaccagaagcatcgagagagccaccatcctgggcttcagcaagaagagcagcaacctgtacctgatccaggtgacccacagcaacaacgagaccagcctgaccgagaagagcttcgagcagttcagcaagctgcacagccagctgcagaagcagttcgccagcctgaccctgcccgagttcccccactggtggcacctgcccttcaccaacagcgaccacagaagattcagagacctgaaccactacatggagcagatcctgaacgtgagccacgaggtgaccaacagcgactgcgtgctgagcttcttcctgagcgaggccgtgcagcagaccgtggaggagagcagccccgtgtacctgggcgagaagttccccgacaagaagcccaaggtgcagctggtgatcagctacgaggacgtgaagctgaccatcctggtgaagcacatgaagaacatccacctgcccgacggcagcgcccccagcgcccacgtggagttctacctgctgccctaccccagcgaggtgagaagaagaaagaccaagagcgtgcccaagtgcaccgaccccacctacaacgagatcgtggtgtacgacgaggtgaccgagctgcagggccacgtgctgatgctgatcgtgaagagcaagaccgtgttcgtgggcgccatcaacatcagactgtgcagcgtgcccctggacaaggagaagtggtaccccctgggcaacagcatcatctag

SEQ ID NO: 93268 - DNA, 4338 bp, synthetic construct; identical to SEQ ID NO: 93267
  misc_feature 1..4338: note = Description of Artificial Sequence: Synthetic coding sequence
  source 1..4338: mol_type = other DNA

SEQ ID NO: 93269 - DNA, 4461 bp, synthetic construct
  misc_feature 1..4461: note = Description of Artificial Sequence: Synthetic coding sequence
  source 1..4461: mol_type = other DNA
atggcctacagctggcagaccgaccccaaccccaacgagagccacgagaagcagtacgagcaccaggagttcctgttcgtgaaccagccccacagcagcagccaggtgagcctgggcttcgaccagatcgtggacgagatcagcggcaagatcccccactacgagagcgagatcgacgagaacaccttcttcgtgcccaccgcccccaagtgggacagcaccggccacagcctgaacgaggcccaccagatcagcctgaacgagttcaccagcaagagcagagagctgagctggcaccaggtgagcaaggcccccgccatcggcttcagccccagcgtgctgcccaagccccagaacaccaacaaggagtgcagctggggcagccccatcggcaagcaccacggcgccgacgacagcagattcagcatcctggcccccagcttcaccagcctggacaagatcaacctggagaaggagctggagaacgagaaccacaactaccacatcggcttcgagagcagcatcccccccaccaacagcagcttcagcagcgacttcatgcccaaggaggagaacaagagaagcggccacgtgaacatcgtggagcccagcctgatgctgctgaagggcagcctgcagcccggcatgtgggagagcacctggcagaagaacatcgagagcatcggctgcagcatccagctggtggaggtgccccagagcagcaacaccagcctggccagcttctgcaacaaggtgaagaagatcagagagagataccacgccgccgacgtgaacttcaacagcggcaagatctggagcaccaccaccgccttcccctaccagctgttcagcaagaccaagttcaacatccacatcttcatcgacaacagcacccagcccctgcacttcatgccctgcgccaactacctggtgaaggacctgatcgccgagatcctgcacttctgcaccaacgaccagctgctgcccaaggaccacatcctgagcgtgtgcggcagcgaggagttcctgcagaacgaccactgcctgggcagccacaagatgttccagaaggacaagagcgtgatccagctgcacctgcagaagagcagagaggcccccggcaagctgagcagaaagcacgaggaggaccacagccagttctacctgaaccagctgctggagttcatgcacatctggaaggtgagcagacagtgcctgctgaccctgatcagaaagtacgacttccacctgaagtacctgctgaagacccaggagaacgtgtacaacatcatcgaggaggtgaagaagatctgcagcgtgctgggctgcgtggagaccaagcagatcaccgacgccgtgaacgagctgagcctgatcctgcagagaaagggcgagaacttctaccagagcagcgagaccagcgccaagggcctgatcgagaaggtgaccaccgagctgagcaccagcatctaccagctgatcaacgtgtactgcaacagcttctacgccgacttccagcccgtgaacgtgcccagatgcaccagctacctgaaccccggcctgcccagccacctgagcttcaccgtgtacgccgcccacaacatccccgagacctgggtgcacagctacaaggccttcagcttcacctgctggctgacctacgccggcaagaagctgtgccaggtgagaaactacagaaacatccccgacaagaagctgttcttcttcctggtgaactggaacgagaccatcaacttccccctggagatcaagagcctgcccagagagagcatgctgaccgtgaagctgttcggcatcgcctgcgccaccaacaacgccaacctgctggcctggacctgcctgcccctgttccccaaggagaagagcatcctgggcagcatgctgttcagcatgaccctgcagagcgagccccccgtggagatgatcacccccggcgtgtgggacgtgagccagcccagccccgtgaccctgcagatcgacttccccgccaccggctgggagtacatgaagcccgacagcgaggagaacagaagcaacctggaggagcccctgaaggagtgcatcaagcacatcgccagactgagccagaagcagacccccctgctgctgagcgaggagaagaagagatacctgtggttctacagattctactgcaacaacgagaactgcagcctgcccctggtgctgggcagcgcccccggctgggacgagagaaccgtgagcgagatgcacaccatcctgagaagatggaccttcagccagcccctggaggccctgggcctgctgaccagcagcttccccgaccaggagatcagaaaggtggccgtgcagcagctggacaacctgctgaacgacgagctgctggagtacctgccccagctggtgcaggccgtgaagttcgagtggaacctggagagccccctggtgcagctgctgctgcacagaagcctgcagagcatccaggtggcccacagactgtactggctgctgaagaacgccgagaacgaggcctacttcaagagctggtaccagaagctgctggccgccctgcagttctgcgccggcaaggccctgaacgacgagttcagcaaggagcagaagctgatcaagatcctgggcgacatcggcgagagagtgaagagcgccagcgaccaccagagacaggaggtgctgaagaaggagatcggcagactggaggagttcttccaggacgtgaacacctgccacctgcccctgaaccccgccctgtgcatcaagggcatcgaccacgacgcctgcagctacttcaccagcaacgccctgcccctgaagatcaccttcatcaacgccaaccccatgggcaagaacatcagcatcatcttcaaggccggcgacgacctgagacaggacatgctggtgctgcagctgatccaggtgatggacaacatctggctgcaggagggcctggacatgcagatgatcatctacagatgcctgagcaccggcaaggaccagggcctggtgcagatggtgcccgacgccgtgaccctggccaagatccacagacacagcggcctgatcggccccctgaaggagaacaccatcaagaagtggttcagccagcacaaccacctgaaggccgactacgagaaggccctgagaaacttcttctacagctgcgccggctggtgcgtggtgaccttcatcctgggcgtgtgcgacagacacaacgacaacatcatgctgaccaagagcggccacatgttccacatcgacttcggcaagttcctgggccacgcccagaccttcggcggcatcaagagagacagagcccccttcatcttcaccagcgagatggagtacttcatcaccgagggcggcaagaacccccagcacttccaggacttcgtggagctgtgctgcagagcctacaacatcatcagaaagcacagccagctgctgctgaacctgctggagatgatgctgtacgccggcctgcccgagctgagcggcatccaggacctgaagtacgtgtacaacaacctgagaccccaggacaccgacctggaggccaccagccacttcaccaagaagatcaaggagagcctggagtgcttccccgtgaagctgaacaacctgatccacaccctggcccagatgagcgccatcagccccgccaagagcaccagccagaccttcccccaggagagctgcctgctgagcaccaccagaagcatcgagagagccaccatcctgggcttcagcaagaagagcagcaacctgtacctgatccaggtgacccacagcaacaacgagaccagcctgaccgagaagagcttcgagcagttcagcaagctgcacagccagctgcagaagcagttcgccagcctgaccctgcccgagttcccccactggtggcacctgcccttcaccaacagcgaccacagaagattcagagacctgaaccactacatggagcagatcctgaacgtgagccacgaggtgaccaacagcgactgcgtgctgagcttcttcctgagcgaggccgtgcagcagaccgtggaggagagcagccccgtgtacctgggcgagaagttccccgacaagaagcccaaggtgcagctggtgatcagctacgaggacgtgaagctgaccatcctggtgaagcacatgaagaacatccacctgcccgacggcagcgcccccagcgcccacgtggagttctacctgctgccctaccccagcgaggtgagaagaagaaagaccaagagcgtgcccaagtgcaccgaccccacctacaacgagatcgtggtgtacgacgaggtgaccgagctgcagggccacgtgctgatgctgatcgtgaagagcaagaccgtgttcgtgggcgccatcaacatcagactgtgcagcgtgcccctggacaaggagaagtggtaccccctgggcaacagcatcatctag

SEQ ID NO: 93270 - DNA, 414 bp, synthetic construct
  misc_feature 1..414: note = Description of Artificial Sequence: Synthetic coding sequence
  source 1..414: mol_type = other DNA
atgaccatggagaccctgcccaaggtgctggaggtggacgagaagagccccgaggccaaggacctgctgcccagccagaccgccagcagcctgtgcatcagcagcagaagcgagagcgtgtggaccaccacccccagaagcaactgggagatctacagaaagcccatcgtgatcatgagcgtgggcggcgccatcctgctgttcggcgtggtgatcacctgcctggcctacaccctgaagctgagcgacaagagcctgagcatcctgaagatggtgggccccggcttcctgagcctgggcctgatgatgctggtgtgcggcctggtgtgggtgcccatcatcaagaagaagcagaagcacagacagaagagcaacttcctgagaagcctgaagagcttcttcctgaccagatag

SEQ ID NO: 93271 - DNA, 414 bp, synthetic construct; identical to SEQ ID NO: 93270
  misc_feature 1..414: note = Description of Artificial Sequence: Synthetic coding sequence
  source 1..414: mol_type = other DNA

SEQ ID NO: 93272 - DNA, 159 bp, synthetic construct
  misc_feature 1..159: note = Description of Artificial Sequence: Synthetic coding sequence
  source 1..159: mol_type = other DNA
atggagaaggtgcagtacctgaccagaagcgccatcagaagagccagcaccatcgagatgccccagcaggccagacagaagctgcagaacctgttcatcaacttctgcctgatcctgatctgcctgctgctgatctgcatcatcgtgatgctgctgtag

SEQ ID NO: 93273 - DNA, 1371 bp, synthetic construct
  misc_feature 1..1371: note = Description of Artificial Sequence: Synthetic coding sequence
  source 1..1371: mol_type = other DNA
atgccccccggcccctgggagagctgcttctgggtgggcggcctgatcctgtggctgagcgtgggcagcagcggcgacgccccccccaccccccagcccaagtgcgccgacttccagagcgccaacctgttcgagggcaccgacctgaaggtgcagttcctgctgttcgtgcccagcaaccccagctgcggccagctggtggagggcagcagcgacctgcagaacagcggcttcaacgccaccctgggcaccaagctgatcatccacggcttcagagtgctgggcaccaagcccagctggatcgacaccttcatcagaaccctgctgagagccaccaacgccaacgtgatcgccgtggactggatctacggcagcaccggcgtgtacttcagcgccgtgaagaacgtgatcaagctgagcctggagatcagcctgttcctgaacaagctgctggtgctgggcgtgagcgagagcagcatccacatcatcggcgtgagcctgggcgcccacgtgggcggcatggtgggccagctgttcggcggccagctgggccagatcaccggcctggaccccgccggccccgagtacaccagagccagcgtggaggagagactggacgccggcgacgccctgttcgtggaggccatccacaccgacaccgacaacctgggcatcagaatccccgtgggccacgtggactacttcgtgaacggcggccaggaccagcccggctgccccaccttcttctacgccggctacagctacctgatctgcgaccacatgagagccgtgcacctgtacatcagcgccctggagaacagctgccccctgatggccttcccctgcgccagctacaaggccttcctggccggcagatgcctggactgcttcaaccccttcctgctgagctgccccagaatcggcctggtggagcagggcggcgtgaagatcgagcccctgcccaaggaggtgaaggtgtacctgctgaccaccagcagcgccccctactgcatgcaccacagcctggtggagttccacctgaaggagctgagaaacaaggacaccaacatcgaggtgaccttcctgagcagcaacatcaccagcagcagcaagatcaccatccccaagcagcagagatacggcaagggcatcatcgcccacgccaccccccagtgccagatcaaccaggtgaagttcaagttccagagcagcaacagagtgtggaagaaggacagaaccaccatcatcggcaagttctgcaccgccctgctgcccgtgaacgacagagagaagatggtgtgcctgcccgagcccgtgaacctgcaggccagcgtgaccgtgagctgcgacctgaagatcgcctgcgtgtag

SEQ ID NO: 93274 - DNA, 1323 bp, synthetic construct
  misc_feature 1..1323: note = Description of Artificial Sequence: Synthetic coding sequence
  source 1..1323: mol_type = other DNA
atgccccccggcccctgggagagctgcttctgggtgggcggcctgatcctgtggctgagcgtgggcagcagcggcgacgccccccccaccccccagcccaagtgcgccgacttccagagcgccaacctgttcgagggcaccgacctgaaggtgcagttcctgctgttcgtgcccagcaaccccagctgcggccagctggtggagggcagcagcgacctgcagaacagcggcttcaacgccaccctgggcaccaagctgatcatccacggcttcagagtgctgggcaccaagcccagctggatcgacaccttcatcagaaccctgctgagagccaccaacgccaacgtgatcgccgtggactggatctacggcagcaccggcgtgtacttcagcgccgtgaagaacgtgctgggcgtgagcgagagcagcatccacatcatcggcgtgagcctgggcgcccacgtgggcggcatggtgggccagctgttcggcggccagctgggccagatcaccggcctggaccccgccggccccgagtacaccagagccagcgtggaggagagactggacgccggcgacgccctgttcgtggaggccatccacaccgacaccgacaacctgggcatcagaatccccgtgggccacgtggactacttcgtgaacggcggccaggaccagcccggctgccccaccttcttctacgccggctacagctacctgatctgcgaccacatgagagccgtgcacctgtacatcagcgccctggagaacagctgccccctgatggccttcccctgcgccagctacaaggccttcctggccggcagatgcctggactgcttcaaccccttcctgctgagctgccccagaatcggcctggtggagcagggcggcgtgaagatcgagcccctgcccaaggaggtgaaggtgtacctgctgaccaccagcagcgccccctactgcatgcaccacagcctggtggagttccacctgaaggagctgagaaacaaggacaccaacatcgaggtgaccttcctgagcagcaacatcaccagcagcagcaagatcaccatccccaagcagcagagatacggcaagggcatcatcgcccacgccaccccccagtgccagatcaaccaggtgaagttcaagttccagagcagcaacagagtgtggaagaaggacagaaccaccatcatcggcaagttctgcaccgccctgctgcccgtgaacgacagagagaagatggtgtgcctgcccgagcccgtgaacctgcaggccagcgtgaccgtgagctgcgacctgaagatcgcctgcgtgtag

SEQ ID NO: 93275 - DNA, 852 bp, synthetic construct
  misc_feature 1..852: note = Description of Artificial Sequence: Synthetic coding sequence
  source 1..852: mol_type = other DNA
atggtgggccagctgttcggcggccagctgggccagatcaccggcctggaccccgccggccccgagtacaccagagccagcgtggaggagagactggacgccggcgacgccctgttcgtggaggccatccacaccgacaccgacaacctgggcatcagaatccccgtgggccacgtggactacttcgtgaacggcggccaggaccagcccggctgccccaccttcttctacgccggctacagctacctgatctgcgaccacatgagagccgtgcacctgtacatcagcgccctggagaacagctgccccctgatggccttcccctgcgccagctacaaggccttcctggccggcagatgcctggactgcttcaaccccttcctgctgagctgccccagaatcggcctggtggagcagggcggcgtgaagatcgagcccctgcccaaggaggtgaaggtgtacctgctgaccaccagcagcgccccctactgcatgcaccacagcctggtggagttccacctgaaggagctgagaaacaaggacaccaacatcgaggtgaccttcctgagcagcaacatcaccagcagcagcaagatcaccatccccaagcagcagagatacggcaagggcatcatcgcccacgccaccccccagtgccagatcaaccaggtgaagttcaagttccagagcagcaacagagtgtggaagaaggacagaaccaccatcatcggcaagttctgcaccgccctgctgcccgtgaacgacagagagaagatggtgtgcctgcccgagcccgtgaacctgcaggccagcgtgaccgtgagctgcgacctgaagatcgcctgcgtgtag

SEQ ID NO: 93276 - DNA, 1656 bp, synthetic construct
  misc_feature 1..1656: note = Description of Artificial Sequence: Synthetic coding sequence
  source 1..1656: mol_type = other DNA
atgagaaccagacccagacccagactgagaagaaccgagaacttcctgaccgccgtgcaccacggcaagaaggaggagaaggccgccgtggagagaagaagactgcacgtgctgaaggccctgaagaagctgagaatcgaggccgacgaggcccccgtggtggccgtgctgggcagcggcggcggcctgagagcccacatcgcctgcctgggcgtgctgagcgagatgaaggagcagggcctgctggacgccgtgacctacctggccggcgtgagcggcagcacctgggccatcagcagcctgtacaccaacgacggcgacatggaggccctggaggccgacctgaagcacagattcaccagacaggagtgggacctggccaagagcctgcagaagaccatccaggccgccagaagcgagaactacagcctgaccgacttctgggcctacatggtgatcagcaagcagaccagagagctgcccgagagccacctgagcaacatgaagaagcccgtggaggagggcaccctgccctaccccatcttcgccgccatcgacaacgacctgcagcccagctggcaggaggccagagcccccgagacctggttcgagttcaccccccaccacgccggcttcagcgccctgggcgccttcgtgagcatcacccacttcggcagcaagttcaagaagggcagactggtgagaacccaccccgagagagacctgaccttcctgagaggcctgtggggcagcgccctgggcaacaccgaggtgatcagagagtacatcttcgaccagctgagaaacctgaccctgaagggcctgtggagaagagccgtggccaacgccaagagcatcggccacctgatcttcgccagactgctgagactgcaggagagcagccagggcgagcaccccccccccgaggacgagggcggcgagcccgagcacacctggctgaccgagatgctggagaactggaccagaaccagcctggagaagcaggagcagccccacgaggaccccgagagaaagggcagcctgagcaacctgatggacttcgtgaagaagaccggcatctgcgccagcaagtgggagtggggcaccacccacaacttcctgtacaagcacggcggcatcagagacaagatcatgagcagcagaaagcacctgcacctggtggacgccggcctggccatcaacacccccttccccctggtgctgccccccaccagagaggtgcacctgatcctgagcttcgacttcagcgccggcgaccccttcgagaccatcagagccaccaccgactactgcagaagacacaagatccccttcccccaggtggaggaggccgagctggacctgtggagcaaggcccccgccagctgctacatcctgaagggcgagaccggccccgtggtgatgcacttccccctgttcaacatcgacgcctgcggcggcgacatcgaggcctggagcgacacctacgacaccttcaagctggccgacacctacaccctggacgtggtggtgctgctgctggccctggccaagaagaacgtgagagagaacaagaagaagatcctgagagagctgatgaacgtggccggcctgtactaccccaaggacagcgccagaagctgctgcctggcctag

SEQ ID NO: 93277 - DNA, 4392 bp, synthetic construct
  misc_feature 1..4392: note = Description of Artificial Sequence: Synthetic coding sequence
  source 1..4392: mol_type = other DNA
atgctgctgagccccagcctgctgctgctgctgctgctgggcgcccccagaggctgcgccgagggcgtggccgccgccctgacccccgagagactgctggagtggcaggacaagggcatcttcgtgatccagagcgagagcctgaagaagtgcatccaggccggcaagagcgtgctgaccctggagaactgcaagcaggccaacaagcacatgctgtggaagtgggtgagcaaccacggcctgttcaacatcggcggcagcggctgcctgggcctgaacttcagcgcccccgagcagcccctgagcctgtacgagtgcgacagcaccctggtgagcctgagatggagatgcaacagaaagatgatcaccggccccctgcagtacagcgtgcaggtggcccacgacaacaccgtggtggccagcagaaagtacatccacaagtggatcagctacggcagcggcggcggcgacatctgcgagtacctgcacaaggacctgcacaccatcaagggcaacacccacggcatgccctgcatgttccccttccagtacaaccaccagtggcaccacgagtgcaccagagagggcagagaggacgacctgctgtggtgcgccaccaccagcagatacgagagagacgagaagtggggcttctgccccgaccccaccagcgccgaggtgggctgcgacaccatctgggagaaggacctgaacagccacatctgctaccagttcaacctgctgagcagcctgagctggagcgaggcccacagcagctgccagatgcagggcggcaccctgctgagcatcaccgacgagaccgaggagaacttcatcagagagcacatgagcagcaagaccgtggaggtgtggatgggcctgaaccagctggacgagcacgccggctggcagtggagcgacggcacccccctgaactacctgaactggagccccgaggtgaacttcgagcccttcgtggaggaccactgcggcaccttcagcagcttcatgcccagcgcctggagaagcagagactgcgagagcaccctgccctacatctgcaagaagtacctgaaccacatcgaccacgagatcgtggagaaggacgcctggaagtactacgccacccactgcgagcccggctggaacccctacaacagaaactgctacaagctgcagaaggaggagaagacctggcacgaggccctgagaagctgccaggccgacaacagcgccctgatcgacatcaccagcctggccgaggtggagttcctggtgaccctgctgggcgacgagaacgccagcgagacctggatcggcctgagcagcaacaagatccccgtgagcttcgagtggagcaacgacagcagcgtgatcttcaccaactggcacaccctggagccccacatcttccccaacagaagccagctgtgcgtgagcgccgagcagagcgagggccactggaaggtgaagaactgcgaggagagactgttctacatctgcaagaaggccggccacgtgctgagcgacgccgagagcggctgccaggagggctgggagagacacggcggcttctgctacaagatcgacaccgtgctgagaagcttcgaccaggccagcagcggctactactgcccccccgccctggtgaccatcaccaacagattcgagcaggccttcatcaccagcctgatcagcagcgtggtgaagatgaaggacagctacttctggatcgccctgcaggaccagaacgacaccggcgagtacacctggaagcccgtgggccagaagcccgagcccgtgcagtacacccactggaacacccaccagcccagatacagcggcggctgcgtggccatgagaggcagacaccccctgggcagatgggaggtgaagcactgcagacacttcaaggccatgagcctgtgcaagcagcccgtggagaaccaggagaaggccgagtacgaggagagatggcccttccacccctgctacctggactgggagagcgagcccggcctggccagctgcttcaaggtgttccacagcgagaaggtgctgatgaagagaacctggagagaggccgaggccttctgcgaggagttcggcgcccacctggccagcttcgcccacatcgaggaggagaacttcgtgaacgagctgctgcacagcaagttcaactggaccgaggagagacagttctggatcggcttcaacaagagaaaccccctgaacgccggcagctgggagtggagcgacagaacccccgtggtgagcagcttcctggacaacacctacttcggcgaggacgccagaaactgcgccgtgtacaaggccaacaagaccctgctgcccctgcactgcggcagcaagagagagtggatctgcaagatccccagagacgtgaagcccaagatccccttctggtaccagtacgacgtgccctggctgttctaccaggacgccgagtacctgttccacaccttcgccagcgagtggctgaacttcgagttcgtgtgcagctggctgcacagcgacctgctgaccatccacagcgcccacgagcaggagttcatccacagcaagatcaaggccctgagcaagtacggcgccagctggtggatcggcctgcaggaggagagagccaacgacgagttcagatggagagacggcacccccgtgatctaccagaactgggacaccggcagagagagaaccgtgaacaaccagagccagagatgcggcttcatcagcagcatcaccggcctgtggggcagcgaggagtgcagcgtgagcatgcccagcatctgcaagagaaagaaggtgtggctgatcgagaagaagaaggacacccccaagcagcacggcacctgccccaagggctggctgtacttcaactacaagtgcctgctgctgaacatccccaaggaccccagcagctggaagaactggacccacgcccagcacttctgcgccgaggagggcggcaccctggtggccatcgagagcgaggtggagcaggccttcatcaccatgaacctgttcggccagaccaccagcgtgtggatcggcctgcagaacgacgactacgagacctggctgaacggcaagcccgtggtgtacagcaactggagccccttcgacatcatcaacatccccagccacaacaccaccgaggtgcagaagcacatccccctgtgcgccctgctgagcagcaaccccaacttccacttcaccggcaagtggtacttcgaggactgcggcaaggagggctacggcttcgtgtgcgagaagatgcaggacaccagcggccacggcgtgaacaccagcgacatgtaccccatgcccaacaccctggagtacggcaacagaacctacaagatcatcaacgccaacatgacctggtacgccgccatcaagacctgcctgatgcacaaggcccagctggtgagcatcaccgaccagtaccaccagagcttcctgaccgtggtgctgaacagactgggctacgcccactggatcggcctgttcaccaccgacaacggcctgaacttcgactggagcgacggcaccaagagcagcttcaccttctggaaggacgaggagagcagcctgctgggcgactgcgtgttcgccgacagcaacggcagatggcacagcaccgcctgcgagagcttcctgcagggcgccatctgccacgtgccccccgagaccagacagagcgagcaccccgagctgtgcagcgagaccagcatcccctggatcaagttcaagagcaactgctacagcttcagcaccgtgctggacagcatgagcttcgaggccgcccacgagttctgcaagaaggagggcagcaacctgctgaccatcaaggacgaggccgagaacgccttcctgctggaggagctgttcgccttcggcagcagcgtgcagatggtgtggctgaacgcccagttcgacggcaacaacgagaccatcaagtggttcgacggcacccccaccgaccagagcaactggggcatcagaaagcccgacaccgactacttcaagccccaccactgcgtggccctgagaatccccgagggcctgtggcagctgagcccctgccaggagaagaagggcttcatctgcaagatggaggccgacatccacaccgccgaggccctgcccgagaagggccccagccacagcatcatccccctggccgtggtgctgaccctgatcgtgatcgtggccatctgcaccctgagcttctgcatctacaagcacaacggcggcttcttcagaagactggccggcttcagaaacccctactaccccgccaccaacttcagcaccgtgtacctggaggagaacatcctgatcagcgacctggagaagagcgaccagtag

SEQ ID NO: 93278 - DNA, 3975 bp, synthetic construct
  misc_feature 1..3975: note = Description of Artificial Sequence: Synthetic coding sequence
  source 1..3975: mol_type = other DNA
atgctgctgagccccagcctgctgctgctgctgctgctgggcgcccccagaggctgcgccgagggcgtggccgccgccctgacccccgagagactgctggagtggcaggacaagggcatcttcgtgatccagagcgagagcctgaagaagtgcatccaggccggcaagagcgtgctgaccctggagaactgcaagcaggccaacaagcacatgctgtggaagtgggtgagcaaccacggcctgttcaacatcggcggcagcggctgcctgggcctgaacttcagcgcccccgagcagcccctgagcctgtacgagtgcgacagcaccctggtgagcctgagatggagatgcaacagaaagatgatcaccggccccctgcagtacagcgtgcaggtggcccacgacaacaccgtggtggccagcagaaagtacatccacaagtggatcagctacggcagcggcggcggcgacatctgcgagtacctgcacaaggacctgcacaccatcaagggcaacacccacggcatgccctgcatgttccccttccagtacaaccaccagtggcaccacgagtgcaccagagagggcagagaggacgacctgctgtggtgcgccaccaccagcagatacgagagagacgagaagtggggcttctgccccgaccccaccagcgccgaggtgggctgcgacaccatctgggagaaggacctgaacagccacatctgctaccagttcaacctgctgagcagcctgagctggagcgaggcccacagcagctgccagatgcagggcggcaccctgctgagcatcaccgacgagaccgaggagaacttcatcagagagcacatgagcagcaagaccgtggaggtgtggatgggcctgaaccagctggacgagcacgccggctggcagtggagcgacggcacccccctgaactacctgaactggagccccgaggtgaacttcgagcccttcgtggaggaccactgcggcaccttcagcagcttcatgcccagcgcctggagaagcagagactgcgagagcaccctgccctacatctgcaagaagtacctgaaccacatcgaccacgagatcgtggagaaggacgcctggaagtactacgccacccactgcgagcccggctggaacccctacaacagaaactgctacaagctgcagaaggaggagaagacctggcacgaggccctgagaagctgccaggccgacaacagcgccctgatcgacatcaccagcctggccgaggtggagttcctggtgaccctgctgggcgacgagaacgccagcgagacctggatcggcctgagcagcaacaagatccccgtgagcttcgagtggagcaacgacagcagcgtgatcttcaccaactggcacaccctggagccccacatcttccccaacagaagccagctgtgcgtgagcgccgagcagagcgagggccactggaaggtgaagaactgcgaggagagactgttctacatctgcaagaaggccggccacgtgctgagcgacgccgagagcggctgccaggagggctgggagagacacggcggcttctgctacaagatcgacaccgtgctgagaagcttcgaccaggccagcagcggctactactgcccccccgccctggtgaccatcaccaacagattcgagcaggccttcatcaccagcctgatcagcagcgtggtgaagatgaaggacagctacttctggatcgccctgcaggaccagaacgacaccggcgagtacacctggaagcccgtgggccagaagcccgagcccgtgcagtacacccactggaacacccaccagcccagatacagcggcggctgcgtggccatgagaggcagacaccccctgggcagatgggaggtgaagcactgcagacacttcaaggccatgagcctgtgcaagcagcccgtggagaaccaggagaaggccgagtacgaggagagatggcccttccacccctgctacctggactgggagagcgagcccggcctggccagctgcttcaaggtgttccacagcgagaaggtgctgatgaagagaacctggagagaggccgaggccttctgcgaggagttcggcgcccacctggccagcttcgcccacatcgaggaggagaacttcgtgaacgagctgctgcacagcaagttcaactggaccgaggagagacagttctggatcggcttcaacaagagaaaccccctgaacgccggcagctgggagtggagcgacagaacccccgtggtgagcagcttcctggacaacacctacttcggcgaggacgccagaaactgcgccgtgtacaaggccaacaagaccctgctgcccctgcactgcggcagcaagagagagtggatctgcaagatccccagagacgtgaagcccaagatccccttctggtaccagtacgacgtgccctggctgttctaccaggacgccgagtacctgttccacaccttcgccagcgagtggctgaacttcgagttcgtgtgcagctggctgcacagcgacctgctgaccatccacagcgcccacgagcaggagttcatccacagcaagatcaaggccctgagcaagtacggcgccagctggtggatcggcctgcaggaggagagagccaacgacgagttcagatggagagacggcacccccgtgatctaccagaactgggacaccggcagagagagaaccgtgaacaaccagagccagagatgcggcttcatcagcagcatcaccggcctgtggggcagcgaggagtgcagcgtgagcatgcccagcatctgcaagagaaagaaggtgtggctgatcgagaagaagaaggacacccccaagcagcacggcacctgccccaagggctggctgtacttcaactacaagtgcctgctgctgaacatccccaaggaccccagcagctggaagaactggacccacgcccagcacttctgcgccgaggagggcggcaccctggtggccatcgagagcgaggtggagcaggccttcatcaccatgaacctgttcggccagaccaccagcgtgtggatcggcctgcagaacgacgactacgagacctggctgaacggcaagcccgtggtgtacagcaactggagccccttcgacatcatcaacatccccagccacaacaccaccgaggtgcagaagcacatccccctgtgcgccctgctgagcagcaaccccaacttccacttcaccggcaagtggtacttcgaggactgcggcaaggagggctacggcttcgtgtgcgagaagatgcaggacaccagcggccacggcgtgaacaccagcgacatgtaccccatgcccaacaccctggagtacggcaacagaacctacaagatcatcaacgccaacatgacctggtacgccgccatcaagacctgcctgatgcacaaggcccagctggtgagcatcaccgaccagtaccaccagagcttcctgaccgtggtgctgaacagactgggctacgcccactggatcggcctgttcaccaccgacaacggcctgaacttcgactggagcgacggcaccaagagcagcttcaccttctggaaggacgaggagagcagcctgctgggcgactgcgtgttcgccgacagcaacggcagatggcacagcaccgcctgcgagagcttcctgcagggcgccatctgccacgtgccccccgagaccagacagagcgagcaccccgagctgtgcagcgagaccagcatcccctggatcaagttcaagagcaactgctacagcttcagcaccgtgctggacagcatgagcttcgaggccgcccacgagttctgcaagaaggagggcagcaacctgctgaccatcaaggacgaggccgagaacgccttcctgctggaggagctgttcgccttcggcagcagcgtgcagatggtgtggctgaacgcccagttcgacggcaacagcaagtag

SEQ ID NO: 93279 - DNA, 1584 bp, synthetic construct
  misc_feature 1..1584: note = Description of Artificial Sequence: Synthetic coding sequence
  source 1..1584: mol_type = other DNA
atgggcagcagcgaggtgagcatcatccccggcctgcagaaggaggagaaggccgccgtggagagaagaagactgcacgtgctgaaggccctgaagaagctgagaatcgaggccgacgaggcccccgtggtggccgtgctgggcagcggcggcggcctgagagcccacatcgcctgcctgggcgtgctgagcgagatgaaggagcagggcctgctggacgccgtgacctacctggccggcgtgagcggcagcacctgggccatcagcagcctgtacaccaacgacggcgacatggaggccctggaggccgacctgaagcacagattcaccagacaggagtgggacctggccaagagcctgcagaagaccatccaggccgccagaagcgagaactacagcctgaccgacttctgggcctacatggtgatcagcaagcagaccagagagctgcccgagagccacctgagcaacatgaagaagcccgtggaggagggcaccctgccctaccccatcttcgccgccatcgacaacgacctgcagcccagctggcaggaggccagagcccccgagacctggttcgagttcaccccccaccacgccggcttcagcgccctgggcgccttcgtgagcatcacccacttcggcagcaagttcaagaagggcagactggtgagaacccaccccgagagagacctgaccttcctgagaggcctgtggggcagcgccctgggcaacaccgaggtgatcagagagtacatcttcgaccagctgagaaacctgaccctgaagggcctgtggagaagagccgtggccaacgccaagagcatcggccacctgatcttcgccagactgctgagactgcaggagagcagccagggcgagcaccccccccccgaggacgagggcggcgagcccgagcacacctggctgaccgagatgctggagaactggaccagaaccagcctggagaagcaggagcagccccacgaggaccccgagagaaagggcagcctgagcaacctgatggacttcgtgaagaagaccggcatctgcgccagcaagtgggagtggggcaccacccacaacttcctgtacaagcacggcggcatcagagacaagatcatgagcagcagaaagcacctgcacctggtggacgccggcctggccatcaacacccccttccccctggtgctgccccccaccagagaggtgcacctgatcctgagcttcgacttcagcgccggcgaccccttcgagaccatcagagccaccaccgactactgcagaagacacaagatccccttcccccaggtggaggaggccgagctggacctgtggagcaaggcccccgccagctgctacatcctgaagggcgagaccggccccgtggtgatgcacttccccctgttcaacatcgacgcctgcggcggcgacatcgaggcctggagcgacacctacgacaccttcaagctggccgacacctacaccctggacgtggtggtgctgctgctggccctggccaagaagaacgtgagagagaacaagaagaagatcctgagagagctgatgaacgtggccggctag

SEQ ID NO: 93280 - DNA, 1626 bp, synthetic construct
  misc_feature 1..1626: note = Description of Artificial Sequence: Synthetic coding sequence
  source 1..1626: mol_type = other DNA
atgggcagcagcgaggtgagcatcatccccggcctgcagaaggaggagaaggccgccgtggagagaagaagactgcacgtgctgaaggccctgaagaagctgagaatcgaggccgacgaggcccccgtggtggccgtgctgggcagcggcggcggcctgagagcccacatcgcctgcctgggcgtgctgagcgagatgaaggagcagggcctgctggacgccgtgacctacctggccggcgtgagcggcagcacctgggccatcagcagcctgtacaccaacgacggcgacatggaggccctggaggccgacctgaagcacagattcaccagacaggagtgggacctggccaagagcctgcagaagaccatccaggccgccagaagcgagaactacagcctgaccgacttctgggcctacatggtgatcagcaagcagaccagagagctgcccgagagccacctgagcaacatgaagaagcccgtggaggagggcaccctgccctaccccatcttcgccgccatcgacaacgacctgcagcccagctggcaggaggccagagcccccgagacctggttcgagttcaccccccaccacgccggcttcagcgccctgggcgccttcgtgagcatcacccacttcggcagcaagttcaagaagggcagactggtgagaacccaccccgagagagacctgaccttcctgagaggcctgtggggcagcgccctgggcaacaccgaggtgatcagagagtacatcttcgaccagctgagaaacctgaccctgaagggcctgtggagaagagccgtggccaacgccaagagcatcggccacctgatcttcgccagactgctgagactgcaggagagcagccagggcgagcaccccccccccgaggacgagggcggcgagcccgagcacacctggctgaccgagatgctggagaactggaccagaaccagcctggagaagcaggagcagccccacgaggaccccgagagaaagggcagcctgagcaacctgatggacttcgtgaagaagaccggcatctgcgccagcaagtgggagtggggcaccacccacaacttcctgtacaagcacggcggcatcagagacaagatcatgagcagcagaaagcacctgcacctggtggacgccggcctggccatcaacacccccttccccctggtgctgccccccaccagagaggtgcacctgatcctgagcttcgacttcagcgccggcgaccccttcgagaccatcagagccaccaccgactactgcagaagacacaagatccccttcccccaggtggaggaggccgagctggacctgtggagcaaggcccccgccagctgctacatcctgaagggcgagaccggccccgtggtgatgcacttccccctgttcaacatcgacgcctgcggcggcgacatcgaggcctggagcgacacctacgacaccttcaagctggccgacacctacaccctggacgtggtggtgctgctgctggccctggccaagaagaacgtgagagagaacaagaagaagatcctgagagagctgatgaacgtggccggcctgtactaccccaaggacagcgccagaagctgctgcctggcctag

SEQ ID NO: 93281 - DNA, 2457 bp, synthetic construct
  misc_feature 1..2457: note = Description of Artificial Sequence: Synthetic coding sequence
  source 1..2457: mol_type = other DNA
atggagagcctgagccccggcggcccccccggccacccctaccagggcgaggccagcacctgctggcagctgaccgtgagagtgctggaggccagaaacctgagatgggccgacctgctgagcgaggccgacccctacgtgatcctgcagctgagcaccgcccccggcatgaagttcaagaccaagaccctgaccgacaccagccaccccgtgtggaacgaggccttcagattcctgatccagagccaggtgaagaacgtgctggagctgagcatctacgacgaggacagcgtgaccgaggacgacatctgcttcaaggtgctgtacgacatcagcgaggtgctgcccggcaagctgctgagaaagaccttcagccagagcccccagggcgaggaggagctggacgtggagttcctgatggaggagaccagcgacagacccgagaacctgatcaccaacaaggtgatcgtggccagagagctgagctgcctggacgtgcacctggacagcaccggcagcaccgccgtggtggccgaccaggacaagctggagctggagctggtgctgaagggcagctacgaggacacccagaccagcttcctgggcaccgccagcgccttcagattccactacatggccgccctggagaccgagctgagcggcagactgagaagcagcagaagcaacggctggaacggcgacaacagcgccggctacctgaccgtgcccctgagacccctgaccatcggcaaggaggtgaccatggacgtgcccgcccccaacgcccccggcgtgagactgcagctgaaggccgagggctgccccgaggagctggccgtgcacctgggcttcaacctgtgcgccgaggagcaggccttcctgagcagaagaaagcaggtggtggccaaggccctgaagcaggccctgcagctggacagagacctgcaggaggacgaggtgcccgtggtgggcatcatggccaccggcggcggcgccagagccatgaccagcctgtacggccacctgctggccctgcagaagctgggcctgctggactgcgtgacctacttcagcggcatcagcggcagcacctggaccatggcccacctgtacggcgaccccgagtggagccagagagacctggagggccccatcagatacgccagagagcacctggccaagagcaagctggaggtgttcagccccgagagactggccagctacagaagagagctggagctgagagccgagcagggccaccccaccaccttcgtggacctgtgggccctggtgctggagagcatgctgcacggccaggtgatggaccagaagctgagcggccagagagccgccctggagagaggccagaaccccctgcccctgtacctgagcctgaacgtgaaggagaacaacctggagaccctggacttcaaggagtgggtggagttcagcccctacgaggtgggcttcctgaagtacggcgccttcgtgccccccgagctgttcggcagcgagttcttcatgggcagactgatgagaagaatccccgagcccagaatctgcttcctggaggccatctggagcaacatcttcagcctgaacctgctggacgcctggtacgacctgaccagcagcggcgagagctggaagcagcacatcaaggacaagaccagaagcctggagaaggagcccctgaccaccagcggcaccagcagcagactggaggccagctggctgcagcccggcaccgccctggcccaggccttcaagggcttcctgaccggcagacccctgcaccagagaagccccaacttcctgcagggcctgcagctgcaccaggactactgcagccacaaggacttcagcacctgggccgactaccagctggacagcatgcccagccagctgacccccaaggagcccagactgtgcctggtggacgccgcctacttcatcaacaccagcagccccagcatgttcagacccggcagaagactggacctgatcctgagcttcgactacagcctgagcgcccccttcgaggccctgcagcagaccgagctgtactgcagagccagaggcctgcccttccccagagtggagcccagcccccaggaccagcaccagcccagagagtgccacctgttcagcgaccccgcctgccccgaggcccccatcctgctgcacttccccctggtgaacgccagcttcaaggaccacagcgcccccggcgtgcagagaagccccgccgagctgcagggcggccaggtggacctgaccggcgccacctgcccctacaccctgagcaacatgacctacaaggaggaggacttcgagagactgctgagactgagcgactacaacgtgcagaccagccagggcgccatcctgcaggccctgagaaccgccctgaagcacagaaccctggaggccagaccccccagagcccagacctag

SEQ ID NO: 93282 - DNA, 1326 bp, synthetic construct
  misc_feature 1..1326: note = Description of Artificial Sequence: Synthetic coding sequence
  source 1..1326: mol_type = other DNA
atggtgccccccaagctgcacgtgctgttctgcctgtgcggctgcctggccgtggtgtaccccttcgactggcagtacatcaaccccgtggcccacatgaagagcagcgcctgggtgaacaagatccaggtgctgatggccgccgccagcttcggccagaccaagatccccagaggcaacggcccctacagcgtgggctgcaccgacctgatgttcgaccacaccaacaagggcaccttcctgagactgtactaccccagccaggacaacgacagactggacaccctgtggatccccaacaaggagtacttctggggcctgagcaagttcctgggcacccactggctgatgggcaacatcctgagactgctgttcggcagcatgaccacccccgccaactggaacagccccctgagacccggcgagaagtaccccctggtggtgttcagccacggcctgggcgccttcagaaccctgtacagcgccatcggcatcgacctggccagccacggcttcatcgtggccgccgtggagcacagagacagaagcgccagcgccacctactacttcaaggaccagagcgccgccgagatcggcgacaagagctggctgtacctgagaaccctgaagcaggaggaggagacccacatcagaaacgagcaggtgagacagagagccaaggagtgcagccaggccctgagcctgatcctggacatcgaccacggcaagcccgtgaagaacgccctggacctgaagttcgacatggagcagctgaaggacagcatcgacagagagaagatcgccgtgatcggccacagcttcggcggcgccaccgtgatccagaccctgagcgaggaccagagattcagatgcggcatcgccctggacgcctggatgttccccctgggcgacgaggtgtacagcagaatcccccagcccctgttcttcatcaacagcgagtacttccagtaccccgccaacatcatcaagatgaagaagtgctacagccccgacaaggagagaaagatgatcaccatcagaggcagcgtgcaccagaacttcgccgacttcaccttcgccaccggcaagatcatcggccacatgctgaagctgaagggcgacatcgacagcaacgtggccatcgacctgagcaacaaggccagcctggccttcctgcagaagcacctgggcctgcacaaggacttcgaccagtgggactgcctgatcgagggcgacgacgagaacctgatccccggcaccaacatcaacaccaccaaccagcacatcatgctgcagaacagcagcggcatcgagaagtacaactag

SEQ ID NO: 93283 - DNA, 1326 bp, synthetic construct; identical to SEQ ID NO: 93282
  misc_feature 1..1326: note = Description of Artificial Sequence: Synthetic coding sequence
  source 1..1326: mol_type = other DNA

SEQ ID NO: 93284 - DNA, 660 bp, synthetic construct
  misc_feature 1..660: note = Description of Artificial Sequence: Synthetic coding sequence
  source 1..660: mol_type = other DNA
atggccgccgccagcttcggccagaccaagatccccagaggcaacggcccctacagcgtgggctgcaccgacctgatgttcgaccacaccaacaagggcaccttcctgagactgtactaccccagccaggacaacgacagactggacaccctgtggatccccaacaaggagtacttctggggcctgagcaagttcctgggcacccactggctgatgggcaacatcctgagactgctgttcggcagcatgaccacccccgccaactggaacagccccctgagacccggcgagaagtaccccctggtggtgttcagccacggcctgggcgccttcagaaccctgtacagcgccatcggcatcgacctggccagccacggcttcatcgtggccgccgtggagcacagagacagaagcgccagcgccacctactacttcaaggaccagagcgccgccgagatcggcgacaagagctggctgtacctgagaaccctgaagcaggaggaggagacccacatcagaaacgagcaggtgagacagagagccaaggagtgcagccaggccctgagcctgatcctggacatcgaccacggcaagcccgtgaagaacgccctggacctgaagttcgacatggagcagctgaaggtgagctacaagaagtag

SEQ ID NO: 93285 - DNA, 414 bp, synthetic construct
  misc_feature 1..414: note = Description of Artificial Sequence: Synthetic coding sequence
  source 1..414: mol_type = other DNA
atgaccacccccgccaactggaacagccccctgagacccggcgagaagtaccccctggtggtgttcagccacggcctgggcgccttcagaaccctgtacagcgccatcggcatcgacctggccagccacggcttcatcgtggccgccgtggagcacagagacagaagcgccagcgccacctactacttcaaggaccagagcgccgccgagatcggcgacaagagctggctgtacctgagaaccctgaagcaggaggaggagacccacatcagaaacgagcaggtgagacagagagccaaggagtgcagccaggccctgagcctgatcctggacatcgaccacggcaagcccgtgaagaacgccctggacctgaagttcgacatggagcagctgaaggtgagctacaagaagtag

SEQ ID NO: 93286 - DNA, 489 bp, synthetic construct
  misc_feature 1..489: note = Description of Artificial Sequence: Synthetic coding sequence
  source 1..489: mol_type = other DNA
atgagagcccccatccccgagcccaagcccggcgacctgatcgagatcttcagacccttctacagacactgggccatctacgtgggcgacggctacgtggtgcacctggccccccccagcgaggtggccggcgccggcgccgccagcgtgatgagcgccctgaccgacaaggccatcgtgaagaaggagctgctgtacgacgtggccggcagcgacaagtaccaggtgaacaacaagcacgacgacaagtacagccccctgccctgcagcaagatcatccagagagccgaggagctggtgggccaggaggtgctgtacaagctgaccagcgagaactgcgagcacttcgtgaacgagctgagatacggcgtggccagaagcgaccaggtgagagacgtgatcatcgccgccagcgtggccggcatgggcctggccgccatgagcctgatcggcgtgatgttcagcagaaacaagagacagaagcagtag

SEQ ID NO: 93287 - DNA, 489 bp, synthetic construct; identical to SEQ ID NO: 93286
  misc_feature 1..489: note = Description of Artificial Sequence: Synthetic coding sequence
  source 1..489: mol_type = other DNA

SEQ ID NO: 93288 - DNA, 4377 bp, synthetic construct
  misc_feature 1..4377: note = Description of Artificial Sequence: Synthetic coding sequence
  source 1..4377: mol_type = other DNA
atgggcctgagacccggcatcttcctgctggagctgctgctgctgctgggccagggcaccccccagatccacaccagccccagaaagagcaccctggagggccagctgtggcccgagaccctgaagaacagccccttcccctgcaaccccaacaagctgggcgtgaacatgcccagcaagagcgtgcacagcctgaagcccagcgacatcaagttcgtggccgccatcggcaacctggagatcccccccgaccccggcaccggcgacctggagaagcaggactggaccgagagaccccagcaggtgtgcatgggcgtgatgaccgtgctgagcgacatcatcagatacttcagccccagcgtgcccatgcccgtgtgccacaccggcaagagagtgatcccccacgacggcgccgaggacctgtggatccaggcccaggagctggtgagaaacatgaaggagaacctgcagctggacttccagttcgactggaagctgatcaacgtgttcttcagcaacgccagccagtgctacctgtgccccagcgcccagcagaacggcctggccgccggcggcgtggacgagctgatgggcgtgctggactacctgcagcaggaggtgcccagagccttcgtgaacctggtggacctgagcgaggtggccgaggtgagcagacagtaccacggcacctggctgagccccgcccccgagccctgcaactgcagcgaggagaccaccagactggccaaggtggtgatgcagtggagctaccaggaggcctggaacagcctgctggccagcagcagatacagcgagcaggagagcttcaccgtggtgttccagcccttcttctacgagaccacccccagcctgcacagcgaggaccccagactgcaggacagcaccaccctggcctggcacctgtggaacagaatgatggagcccgccggcgagaaggacgagcccctgagcgtgaagcacggcagacccatgaagtgccccagccaggagagcccctacctgttcagctacagaaacagcaactacctgaccagactgcagaagccccaggacaagctggaggtgagagagggcgccgagatcagatgccccgacaaggaccccagcgacaccgtgcccaccagcgtgcacagactgaagcccgccgacatcaacgtgatcggcgccctgggcgacagcctgaccgccggcaacggcgccggcagcacccccggcaacgtgctggacgtgctgacccagtacagaggcctgagctggagcgtgggcggcgacgagaacatcggcaccgtgaccaccctggccaacatcctgagagagttcaaccccagcctgaagggcttcagcgtgggcaccggcaaggagaccagccccaacgccttcctgaaccaggccgtggccggcggcagagccgaggacctgcccgtgcaggccagaagactggtggacctgatgaagaacgacaccagaatccacttccaggaggactggaagatcatcaccctgttcatcggcggcaacgacctgtgcgacttctgcaacgacctggtgcactacagcccccagaacttcaccgacaacatcggcaaggccctggacatcctgcacgccgaggtgcccagagccttcgtgaacctggtgaccgtgctggagatcgtgaacctgagagagctgtaccaggagaagaaggtgtactgccccagaatgatcctgagaagcctgtgcccctgcgtgctgaagttcgacgacaacagcaccgagctggccaccctgatcgagttcaacaagaagttccaggagaagacccaccagctgatcgagagcggcagatacgacaccagagaggacttcaccgtggtggtgcagcccttcttcgagaacgtggacatgcccaagaccagcgagggcctgcccgacaacagcttcttcgcccccgactgcttccacttcagcagcaagagccacagcagagccgccagcgccctgtggaacaacatgctggagcccgtgggccagaagaccaccagacacaagttcgagaacaagatcaacatcacctgccccaaccaggtgcagcccttcctgagaacctacaagaacagcatgcagggccacggcacctggctgccctgcagagacagagcccccagcgccctgcaccccaccagcgtgcacgccctgagacccgccgacatccaggtggtggccgccctgggcgacagcctgaccgccggcaacggcatcggcagcaagcccgacgacctgcccgacgtgaccacccagtacagaggcctgagctacagcgccggcggcgacggcagcctggagaacgtgaccaccctgcccaacatcctgagagagttcaacagaaacctgaccggctacgccgtgggcaccggcgacgccaacgacaccaacgccttcctgaaccaggccgtgcccggcgccaaggccgaggacctgatgagccaggtgcagaccctgatgcagaagatgaaggacgaccacagagtgaacttccacgaggactggaaggtgatcaccgtgctgatcggcggcagcgacctgtgcgactactgcaccgacagcaacctgtacagcgccgccaacttcgtgcaccacctgagaaacgccctggacgtgctgcacagagaggtgcccagagtgctggtgaacctggtggacttcctgaaccccaccatcatgagacaggtgttcctgggcaaccccgacaagtgccccgtgcagcaggccagcgtgctgtgcaactgcgtgctgaccctgagagagaacagccaggagctggccagactggaggccttcagcagagcctacagaagcagcatgagagagctggtgggcagcggcagatacgacacccaggaggacttcagcgtggtgctgcagcccttcttccagaacatccagctgcccgtgctggccgacggcctgcccgacaccagcttcttcgcccccgactgcatccaccccaaccagaagttccacagccagctggccagagccctgtggaccaacatgctggagcccctgggcagcaagaccgagaccctggacctgagagccgagatgcccatcacctgccccacccagaacgagcccttcctgagaacccccagaaacagcaactacacctaccccatcaagcccgccatcgagaactggggcagcgacttcctgtgcaccgagtggaaggccagcaacagcgtgcccaccagcgtgcaccagctgagacccgccgacatcaaggtggtggccgccctgggcgacagcctgaccaccgccgtgggcgccagacccaacaacagcagcgacctgcccaccagctggagaggcctgagctggagcatcggcggcgacggcaacctggagacccacaccaccctgcccaacatcctgaagaagttcaacccctacctgctgggcttcagcaccagcacctgggagggcaccgccggcctgaacgtggccgccgagggcgccagagccagagacatgcccgcccaggcctgggacctggtggagagaatgaagaacagccccgacatcaacctggagaaggactggaagctggtgaccctgttcatcggcgtgaacgacctgtgccactactgcgagaaccccgaggcccacctggccaccgagtacgtgcagcacatccagcaggccctggacatcctgagcgaggagctgcccagagccttcgtgaacgtggtggaggtgatggagctggccagcctgtaccagggccagggcggcaagtgcgccatgctggccgcccagaacaactgcacctgcctgagacacagccagagcagcctggagaagcaggagctgaagaaggtgaactggaacctgcagcacggcatcagcagcttcagctactggcaccagtacacccagagagaggacttcgccgtggtggtgcagcccttcttccagaacaccctgacccccctgaacgagagaggcgacaccgacctgaccttcttcagcgaggactgcttccacttcagcgacagaggccacgccgagatggccatcgccctgtggaacaacatgctggagcccgtgggcagaaagaccaccagcaacaacttcacccacagcagagccaagctgaagtgccccagccccgagagcccctacctgtacaccctgagaaacagcagactgctgcccgaccaggccgaggaggcccccgaggtgctgtactgggccgtgcccgtggccgccggcgtgggcctggtggtgggcatcatcggcaccgtggtgtggagatgcagaagaggcggcagaagagaggacccccccatgagcctgagaaccgtggccctgtag

SEQ ID NO: 93289 - DNA, 1467 bp, synthetic construct
  misc_feature 1..1467: note = Description of Artificial Sequence: Synthetic coding sequence
  source 1..1467: mol_type = other DNA
atggagcccgccggcgagaaggacgagcccctgagcgtgaagcacggcagacccatgaagtgccccagccaggagagcccctacctgttcagctacagaaacagcaactacctgaccagactgcagaagccccaggacaagctggaggtgagagagggcgccgagatcagatgccccgacaaggaccccagcgacaccgtgcccaccagcgtgcacagactgaagcccgccgacatcaacgtgatcggcgccctgggcgacagcctgaccgccggcaacggcgccggcagcacccccggcaacgtgctggacgtgctgacccagtacagaggcctgagctggagcgtgggcggcgacgagaacatcggcaccgtgaccaccctggccaacatcctgagagagttcaaccccagcctgaagggcttcagcgtgggcaccggcaaggagaccagccccaacgccttcctgaaccaggccgtggccggcggcagagccgaggacctgcccgtgcaggccagaagactggtggacctgatgaagaacgacaccagaatccacttccaggaggactggaagatcatcaccctgttcatcggcggcaacgacctgtgcgacttctgcaacgacctggtgcactacagcccccagaacttcaccgacaacatcggcaaggccctggacatcctgcacgccgaggtgcccagagccttcgtgaacctggtgaccgtgctggagatcgtgaacctgagagagctgtaccaggagaagaaggtgtactgccccagaatgatcctgagaagcctgtgcccctgcgtgctgaagttcgacgacaacagcaccgagctggccaccctgatcgagttcaacaagaagttccaggagaagacccaccagctgatcgagagcggcagatacgacaccagagaggacttcaccgtggtggtgcagcccttcttcgagaacgtggacatgcccaagaccagcgagggcctgcccgacaacagcttcttcgcccccgactgcttccacttcagcagcaagagccacagcagagccgccagcgccctgtggaacaacatgctggagcccgtgggccagaagaccaccagacacaagttcgagaacaagatcaacatcacctgccccaaccaggtgcagcccttcctgagaacctacaagaacagcatgcagggccacggcacctggctgccctgcagagacagagcccccagcgccctgcaccccaccagcgtgcacgccctgagacccgccgacatccaggtggtggccgccctgggcgacagcctgaccgccggcaacggcatcggcagcaagcccgacgacctgcccgacgtgaccacccagtacagaggcctgagctacagagagagcaagcccggcttcctgagcgacagctgggtgagcaagagcaacagaaagtgcaccagaaaggcccccaacccctag

SEQ ID NO: 93290 - DNA, 4344 bp, synthetic construct
  misc_feature 1..4344: note = Description of Artificial Sequence: Synthetic coding sequence
  source 1..4344: mol_type = other DNA
atgggcctgagacccggcatcttcctgctggagctgctgctgctgctgggccagggcaccccccagatccacaccagccccagaaagagcaccctggagggccagctgtggcccgagaccctgaagaacagccccttcccctgcaaccccaacaagctgggcgtgaacatgcccagcaagagcgtgcacagcctgaagcccagcgacatcaagttcgtggccgccatcggcaacctggagatcccccccgaccccggcaccggcgacctggagaagcaggactggaccgagagaccccagcaggtgtgcatgggcgtgatgaccgtgctgagcgacatcatcagatacttcagccccagcgtgcccatgcccgtgtgccacaccggcaagagagtgatcccccacgacggcgccgaggacctgtggatccaggcccaggagctggtgagaaacatgaaggagaacctgcagctggacttccagttcgactggaagctgatcaacgtgttcttcagcaacgccagccagtgctacctgtgccccagcgcccagcaggcccccagcctgagcaccgtgctgctgagccagaacggcctggccgccggcggcgtggacgagctgatgggcgtgctggactacctgcagcaggaggtgcccagagccttcgtgaacctggtggacctgagcgaggtggccgaggtgagcagacagtaccacggcacctggctgagccccgcccccgagccctgcaactgcagcgaggagaccaccagactggccaaggtggtgatgcagtggagctaccaggaggcctggaacagcctgctggccagcagcagatacagcgagcaggagagcttcaccgtggtgttccagcccttcttctacgagaccacccccagcctgcacagcgaggaccccagactgcaggacagcaccaccctggcctggcacctgtggaacagaatgatggagcccgccggcgagaaggacgagcccctgagcgtgaagcacggcagacccatgaagtgccccagccaggagagcccctacctgttcagctacagaaacagcaactacctgaccagactgcagaagccccaggacaagctggaggtgagagagggcgccgagatcagatgccccgacaaggaccccagcgacaccgtgcccaccagcgtgcacagactgaagcccgccgacatcaacgtgatcggcgccctgggcgacagcctgaccgccggcaacggcgccggcagcacccccggcaacgtgctggacgtgctgacccagtacagaggcctgagctggagcgtgggcggcgacgagaacatcggcaccgtgaccaccctggccaacatcctgagagagttcaaccccagcctgaagggcttcagcgtgggcaccggcaaggagaccagccccaacgccttcctgaaccaggccgtggccggcggcagagccgaggacctgcccgtgcaggccagaagactggtggacctgatgaagaacgacaccagaatccacttccaggaggactggaagatcatcaccctgttcatcggcggcaacgacctgtgcgacttctgcaacgacctggtgcccagagccttcgtgaacctggtgaccgtgctggagatcgtgaacctgagagagctgtaccaggagaagaaggtgtactgccccagaatgatcctgagaagcctgtgcccctgcgtgctgaagttcgacgacaacagcaccgagctggccaccctgatcgagttcaacaagaagttccaggagaagacccaccagctgatcgagagcggcagatacgacaccagagaggacttcaccgtggtggtgcagcccttcttcgagaacgtggacatgcccaagaccagcgagggcctgcccgacaacagcttcttcgcccccgactgcttccacttcagcagcaagagccacagcagagccgccagcgccctgtggaacaacatgctggagcccgtgggccagaagaccaccagacacaagttcgagaacaagatcaacatcacctgccccaaccaggtgcagcccttcctgagaacctacaagaacagcatgcagggccacggcacctggctgccctgcagagacagagcccccagcgccctgcaccccaccagcgtgcacgccctgagacccgccgacatccaggtggtggccgccctgggcgacagcctgaccgccggcaacggcatcggcagcaagcccgacgacctgcccgacgtgaccacccagtacagaggcctgagctacagcgccggcggcgacggcagcctggagaacgtgaccaccctgcccaacatcctgagagagttcaacagaaacctgaccggctacgccgtgggcaccggcgacgccaacgacaccaacgccttcctgaaccaggccgtgcccggcgccaaggccgaggacctgatgagccaggtgcagaccctgatgcagaagatgaaggacgaccacagagtgaacttccacgaggactggaaggtgatcaccgtgctgatcggcggcagcgacctgtgcgactactgcaccgacagcaacctgtacagcgccgccaacttcgtgcaccacctgagaaacgccctggacgtgctgcacagagaggtgcccagagtgctggtgaacctggtggacttcctgaaccccaccatcatgagacaggtgttcctgggcaaccccgacaagtgccccgtgcagcaggccagcgtgctgtgcaactgcgtgctgaccctgagagagaacagccaggagctggccagactggaggccttcagcagagcctacagaagcagcatgagagagctggtgggcagcggcagatacgacacccaggaggacttcagcgtggtgctgcagcccttcttccagaacatccagctgcccgtgctggccgacggcctgcccgacaccagcttcttcgcccccgactgcatccaccccaaccagaagttccacagccagctggccagagccctgtggaccaacatgctggagcccctgggcagcaagaccgagaccctggacctgagagccgagatgcccatcacctgccccacccagaacgagcccttcctgagaacccccagaaacagcaactacacctaccccatcaagcccgccatcgagaactggggcagcgacttcctgtgcaccgagtggaaggccagcaacagcgtgcccaccagcgtgcaccagctgagacccgccgacatcaaggtggtggccgccctgggcgacagcctgaccaccgccgtgggcgccagacccaacaacagcagcgacctgcccaccagctggagaggcctgagctggagcatcggcggcgacggcaacctggagacccacaccaccctgcccaacatcctgaagaagttcaacccctacctgctgggcttcagcaccagcacctgggagggcaccgccggcctgaacgtggccgccgagggcgccagagccagagacatgcccgcccaggcctgggacctggtggagagaatgaagaacagccccgacatcaacctggagaaggactggaagctggtgaccctgttcatcggcgtgaacgacctgtgccactactgcgagaaccccgaggcccacctggccaccgagtacgtgcagcacatccagcaggccctggacatcctgagcgaggagctgcccagagccttcgtgaacgtggtggaggtgatggagctggccagcctgtaccagggccagggcggcaagtgcgccatgctggccgcccagaacaactgcacctgcctgagacacagccagagcagcctggagaagcaggagctgaagaaggtgaactggaacctgcagcacggcatcagcagcttcagctactggcaccagtacacccagagagaggacttcgccgtggtggtgcagcccttcttccagaacaccctgacccccctgaacgagagaggcgacaccgacctgaccttcttcagcgaggactgcttccacttcagcgacagaggccacgccgagatggccatcgccctgtggaacaacatgctggagcccgtgggcagaaagaccaccagcaacaacttcacccacagcagagccaagctgaagtgccccagccccgagagcccctacctgtacaccctgagaaacagcagactgctgcccgaccaggccgaggaggcccccgaggtgctgtactgggccgtgcccgtggccgccggcgtgggcctggtggtgggcatcatcggcaccgtggtgtggagatgcagaagaggcggcagaagagaggacccccccatgagcctgagaaccgtggccctgtag

SEQ ID NO: 93291 - DNA, 1272 bp, synthetic construct
  misc_feature 1..1272: note = Description of Artificial Sequence: Synthetic coding sequence
  source 1..1272: mol_type = other DNA
atgcccatcacctgccccacccagaacgagcccttcctgagaacccccagaaacagcaactacacctaccccatcaagcccgccatcgagaactggggcagcgacttcctgtgcaccgagtggaaggccagcaacagcgtgcccaccagcgtgcaccagctgagacccgccgacatcaaggtggtggccgccctgggcgacagcctgaccaccgccgtgggcgccagacccaacaacagcagcgacctgcccaccagctggagaggcctgagctggagcatcggcggcgacggcaacctggagacccacaccaccctgcccaacatcctgaagaagttcaacccctacctgctgggcttcagcaccagcacctgggagggcaccgccggcctgaacgtggccgccgagggcgccagagccagagacatgcccgcccaggcctgggacctggtggagagaatgaagaacagccccgacatcaacctggagaaggactggaagctggtgaccctgttcatcggcgtgaacgacctgtgccactactgcgagaaccccgaggcccacctggccaccgagtacgtgcagcacatccagcaggccctggacatcctgagcgaggagctgcccagagccttcgtgaacgtggtggaggtgatggagctggccagcctgtaccagggccagggcggcaagtgcgccatgctggccgcccagaacaactgcacctgcctgagacacagccagagcagcctggagaagcaggagctgaagaaggtgaactggaacctgcagcacggcatcagcagcttcagctactggcaccagtacacccagagagaggacttcgccgtggtggtgcagcccttcttccagaacaccctgacccccctgaacgagagaggcgacaccgacctgaccttcttcagcgaggactgcttccacttcagcgacagaggccacgccgagatggccatcgccctgtggaacaacatgctggagcccgtgggcagaaagaccaccagcaacaacttcacccacagcagagccaagctgaagtgccccagccccgagagcccctacctgtacaccctgagaaacagcagactgctgcccgaccaggccgaggaggcccccgaggtgctgtactgggccgtgcccgtggccgccggcgtgggcctggtggtgggcatcatcggcaccgtggtgtggagatgcagaagaggcggcagaagagaggacccccccatgagcctgagaaccgtggccctgtag

SEQ ID NO: 93292 - DNA, 3504 bp, synthetic construct
  misc_feature 1..3504: note = Description of Artificial Sequence: Synthetic coding sequence
  source 1..3504: mol_type = other DNA
atggccggcgcccagcccggcgtgcacgccctgcagctggagccccccaccgtggtggagaccctgagaagaggcagcaagttcatcaagtgggacgaggagaagctgatgaccgtggtgagcggccccgaccccgtgaacaccgtgttcctgaacttcatggccgtgcaggacgacaccgccaaggtgtggagcgaggagctgttcaagctggccatgaacatcctggcccagaacgccagcagaaacaccttcctgagaaaggcctacaccaagctgaagctgcaggtgaaccaggacggcagaatccccgtgaagaacatcctgaagatgttcagcgccgacaagaagagagtggagaccgccctggagagctgcggcctgaagttcaacagaagcgagagcatcagacccgacgagttcagcctggagatcttcgagagattcctgaacaagctgtgcctgagacccgacatcgacaagatcctgctggagatcggcgccaagggcaagccctacctgaccctggagcagctgatggacttcatcaaccagaagcagagagaccccagactgaacgaggtgctgtacccccccctgagacccagccaggccagactgctgatcgagaagtacgagcccaaccagcagttcctggagagagaccagatgagcatggagggcttcagcagatacctgggcggcgaggagaacggcatcctgcccctggaggccctggacctgagcaccgacatgacccagcccctgagcgcctacttcatcaacagcagccacaacacctacctgaccgccggccagctggccggcaccagcagcgtggagatgtacagacaggccctgctgtggggctgcagatgcgtggagctggacgtgtggaagggcagaccccccgaggaggagcccttcatcacccacggcttcaccatgaccaccgaggtgcccctgagagacgtgctggaggccatcgccgagaccgccttcaagaccagcccctaccccgtgatcctgagcttcgagaaccacgtggacagcgccaagcagcaggccaagatggccgagtactgcagaagcatcttcggcgacgccctgctgatcgagcccctggacaagtaccccctggcccccggcgtgcccctgcccagcccccaggacctgatgggcagaatcctggtgaagaacaagaagagacacagacccagcgccggcggccccgacagcgccggcagaaagagacccctggagcagagcaacagcgccctgagcgagagcagcgccgccaccgagcccagcagcccccagctgggcagccccagcagcgacagctgccccggcctgagcaacggcgaggaggtgggcctggagaagcccagcctggagccccagaagagcctgggcgacgagggcctgaacagaggcccctacgtgctgggccccgccgacagagaggacgaggaggaggacgaggaggaggaggagcagaccgaccccaagaagcccaccaccgacgagggcaccgccagcagcgaggtgaacgccaccgaggagatgagcaccctggtgaactacatcgagcccgtgaagttcaagagcttcgaggccgccagaaagagaaacaagtgcttcgagatgagcagcttcgtggagaccaaggccatggagcagctgaccaagagccccatggagttcgtggagtacaacaagcagcagctgagcagaatctaccccaagggcaccagagtggacagcagcaactacatgccccagctgttctggaacgtgggctgccagctggtggccctgaacttccagaccctggacgtggccatgcagctgaacgccggcgtgttcgagtacaacggcagaagcggctacctgctgaagcccgagttcatgagaagacccgacaagagcttcgaccccttcaccgaggtgatcgtggacggcatcgtggccaacgccctgagagtgaaggtgatcagcggccagttcctgagcgacagaaaggtgggcatctacgtggaggtggacatgttcggcctgcccgtggacaccagaagaaagtacagaaccagaaccagccagggcaacagcttcaaccccgtgtgggacgaggagcccttcgacttccccaaggtggtgctgcccaccctggccagcctgagaatcgccgccttcgaggagggcggcaagttcgtgggccacagaatcctgcccgtgagcgccatcagaagcggctaccactacgtgtgcctgagaaacgaggccaaccagcccctgtgcctgcccgccctgctgatctacaccgaggccagcgactacatccccgacgaccaccaggactacgccgaggccctgatcaaccccatcaagcacgtgagcctgatggaccagagagccagacagctggccgccctgatcggcgagagcgaggcccaggccggccaggagacctgccaggacacccagagccagcagctgggcagccagcccagcagcaaccccacccccagccccctggacgccagccccagaagaccccccggccccaccaccagccccgccagcaccagcctgagcagccccggccagagagacgacctgatcgccagcatcctgagcgaggtggcccccacccccctggacgagctgagaggccacaaggccctggtgaagctgagaagcagacaggagagagacctgagagagctgagaaagaagcaccagagaaaggccgtgaccctgaccagaagactgctggacggcctggcccaggcccaggccgagggcagatgcagactgagacccggcgccctgggcggcgccgccgacgtggaggacaccaaggagggcgaggacgaggccaagagataccaggagttccagaacagacaggtgcagagcctgctggagctgagagaggcccaggtggacgccgaggcccagagaagactggagcacctgagacaggccctgcagagactgagagaggtggtgctggacgccaacaccacccagttcaagagactgaaggagatgaacgagagagagaagaaggagctgcagaagatcctggacagaaagagacacaacagcatcagcgaggccaagatgagagacaagcacaagaaggaggccgagctgaccgagatcaacagaagacacatcaccgagagcgtgaacagcatcagaagactggaggaggcccagaagcagagacacgacagactggtggccggccagcagcaggtgctgcagcagctggccgaggaggagcccaagctgctggcccagctggcccaggagtgccaggagcagagagccagactgccccaggagatcagaagaagcctgctgggcgagatgcccgagggcctgggcgacggccccctggtggcctgcgccagcaacggccacgcccccggcagcagcggccacctgagcggcgccgacagcgagagccaggaggagaacacccagctgtag

SEQ ID NO: 93293 - DNA, 3651 bp, synthetic construct
  misc_feature 1..3651: note = Description of Artificial Sequence: Synthetic coding sequence
  source 1..3651: mol_type = other DNA
atggccggcgcccagcccggcgtgcacgccctgcagctgaagcccgtgtgcgtgagcgacagcctgaagaagggcaccaagttcgtgaagtgggacgacgacagcaccatcgtgacccccatcatcctgagaaccgacccccagggcttcttcttctactggaccgaccagaacaaggagaccgagctgctggacctgagcctggtgaaggacgccagatgcggcagacacgccaaggcccccaaggaccccaagctgagagagctgctggacgtgggcaacatcggcagactggagcagagaatgatcaccgtggtgtacggccccgacctggtgaacatcagccacctgaacctggtggccttccaggaggaggtggccaaggagtggaccaacgaggtgttcagcctggccaccaacctgctggcccagaacatgagcagagacgccttcctggagaaggcctacaccaagctgaagctgcaggtgacccccgagggcagaatccccctgaagaacatctacagactgttcagcgccgacagaaagagagtggagaccgccctggaggcctgcagcctgcccagcagcagaaacgacagcatcccccaggaggacttcacccccgaggtgtacagagtgttcctgaacaacctgtgccccagacccgagatcgacaacatcttcagcgagttcggcgccaagagcaagccctacctgaccgtggaccagatgatggacttcatcaacctgaagcagagagaccccagactgaacgagatcctgtacccccccctgaagcaggagcaggtgcaggtgctgatcgagaagtacgagcccaacaacagcctggccagaaagggccagatcagcgtggacggcttcatgagatacctgagcggcgaggagaacggcgtggtgagccccgagaagctggacctgaacgaggacatgagccagcccctgagccactacttcatcaacagcagccacaacacctacctgaccgccggccagctggccggcaacagcagcgtggagatgtacagacaggtgctgctgagcggctgcagatgcgtggagctggactgctggaagggcagaaccgccgaggaggagcccgtgatcacccacggcttcaccatgaccaccgagatcagcttcaaggaggtgatcgaggccatcgccgagtgcgccttcaagaccagccccttccccatcctgctgagcttcgagaaccacgtggacagccccaagcagcaggccaagatggccgagtactgcagactgatcttcggcgacgccctgctgatggagcccctggagaagtaccccctggagagcggcgtgcccctgcccagccccatggacctgatgtacaagatcctggtgaagaacaagaagaagagccacaagagcagcgagggcagcggcaagaagaagctgagcgagcaggccagcaacacctacagcgacagcagcagcatgttcgagcccagcagccccggcgccggcgaggccgacaccgagagcgacgacgacgacgacgacgacgactgcaagaagagcagcatggacgagggcaccgccggcagcgaggccatggccaccgaggagatgagcaacctggtgaactacatccagcccgtgaagttcgagagcttcgagatcagcaagaagagaaacaagagcttcgagatgagcagcttcgtggagaccaagggcctggagcagctgaccaagagccccgtggagttcgtggagtacaacaagatgcagctgagcagaatctaccccaagggcaccagagtggacagcagcaactacatgccccagctgttctggaacgccggctgccagatggtggccctgaacttccagaccatggacctggccatgcagatcaacatgggcatgtacgagtacaacggcaagagcggctacagactgaagcccgagttcatgagaagacccgacaagcacttcgaccccttcaccgagggcatcgtggacggcatcgtggccaacaccctgagcgtgaagatcatcagcggccagttcctgagcgacaagaaggtgggcacctacgtggaggtggacatgttcggcctgcccgtggacaccagaagaaaggccttcaagaccaagaccagccagggcaacgccgtgaaccccgtgtgggaggaggagcccatcgtgttcaagaaggtggtgctgcccaccctggcctgcctgagaatcgccgtgtacgaggagggcggcaagttcatcggccacagaatcctgcccgtgcaggccatcagacccggctaccactacatctgcctgagaaacgagagaaaccagcccctgaccctgcccgccgtgttcgtgtacatcgaggtgaaggactacgtgcccgacacctacgccgacgtgatcgaggccctgagcaaccccatcagatacgtgaacctgatggagcagagagccaagcagctggccgccctgaccctggaggacgaggaggaggtgaagaaggaggccgaccccggcgagacccccagcgaggcccccagcgaggccagaaccacccccgccgagaacggcgtgaaccacaccaccaccctgacccccaagccccccagccaggccctgcacagccagcccgcccccggcagcgtgaaggcccccgccaagaccgaggacctgatccagagcgtgctgaccgaggtggaggcccagaccatcgaggagctgaagcagcagaagagcttcgtgaagctgcagaagaagcactacaaggagatgaaggacctggtgaagagacaccacaagaagaccaccgacctgatcaaggagcacaccaccaagtacaacgagatccagaacgactacctgagaagaagagccgccctggagaagagcgccaagaaggacagcaagaagaagagcgagcccagcagccccgaccacggcagcagcaccatcgagcaggacctggccgccctggacgccgagatgacccagaagctgatcgacctgaaggacaagcagcagcagcagctgctgaacctgagacaggagcagtactacagcgagaagtaccagaagagagagcacatcaagctgctgatccagaagctgaccgacgtggccgaggagtgccagaacaaccagctgaagaagctgaaggagatctgcgagaaggagaagaaggagctgaagaagaagatggacaagaagagacaggagaagatcaccgaggccaagagcaaggacaagagccagatggaggaggagaagaccgagatgatcagaagctacatccaggaggtggtgcagtacatcaagagactggaggaggcccagagcaagagacaggagaagctggtggagaagcacaaggagatcagacagcagatcctggacgagaagcccaagctgcaggtggagctggagcaggagtaccaggacaagttcaagagactgcccctggagatcctggagttcgtgcaggaggccatgaagggcaagatcagcgaggacagcaaccacggcagcgcccccctgagcctgagcagcgaccccggcaaggtgaaccacaagacccccagcagcgaggagctgggcggcgacatccccggcaaggagttcgacacccccctgtag

SEQ ID NO: 93294 - DNA, 672 bp, synthetic construct
  misc_feature 1..672: note = Description of Artificial Sequence: Synthetic coding sequence
  source 1..672: mol_type = other DNA
atgagaagacccgacaagcacttcgaccccttcaccgagggcatcgtggacggcatcgtggccaacaccctgagcgtgaagatcatcagcggccagttcctgagcgacaagaaggtgggcacctacgtggaggtggacatgttcggcctgcccgtggacaccagaagaaaggccttcaagaccaagaccagccagggcaacgccgtgaaccccgtgtgggaggaggagcccatcgtgttcaagaaggtggtgctgcccaccctggcctgcctgagaatcgccgtgtacgaggagggcggcaagttcatcggccacagaatcctgcccgtgcaggccatcagacccggctaccactacatctgcctgagaaacgagagaaaccagcccctgaccctgcccgccgtgttcgtgtacatcgaggtgaaggactacgtgcccgacacctacgccgacgtgatcgaggccctgagcaaccccatcagatacgtgaacctgatggagcagagagccaagcagctggccgccctgaccctggaggacgaggaggaggtgaagaaggagggcggcttcctgcacgacgagatcatgagactgaccagaaacaccctggagaagctgatggccctgcccctgacccacgtggtgcccatccagagcaagatgctgagctag

SEQ ID NO: 93295 - DNA, 3522 bp, synthetic construct
  misc_feature 1..3522: note = Description of Artificial Sequence: Synthetic coding sequence
  source 1..3522: mol_type = other DNA
atggccggcgcccagcccggcgtgcacgccctgcagctgaagcccgtgtgcgtgagcgacagcctgaagaagggcaccaagttcgtgaagtgggacgacgacagcaccatcgtgacccccatcatcctgagaaccgacccccagggcttcttcttctactggaccgaccagaacaaggagaccgagctgctggacctgagcctggtgaaggacgccagatgcggcagacacgccaaggcccccaaggaccccaagctgagagagctgctggacgtgggcaacatcggcagactggagcagagaatgatcaccgtggtgtacggccccgacctggtgaacatcagccacctgaacctggtggccttccaggaggaggtggccaaggagtggaccaacgaggtgttcagcctggccaccaacctgctggcccagaacatgagcagagacgccttcctggagaaggcctacaccaagctgaagctgcaggtgacccccgagggcagaatccccctgaagaacatctacagactgttcagcgccgacagaaagagagtggagaccgccctggaggcctgcagcctgcccagcagcagaaacgacagcatcccccaggaggacttcacccccgaggtgtacagagtgttcctgaacaacctgtgccccagacccgagatcgacaacatcttcagcgagttcggcgccaagagcaagccctacctgaccgtggaccagatgatggacttcatcaacctgaagcagagagaccccagactgaacgagatcctgtacccccccctgaagcaggagcaggtgcaggtgctgatcgagaagtacgagcccaacaacagcctggccagaaagggccagatcagcgtggacggcttcatgagatacctgagcggcgaggagaacggcgtggtgagccccgagaagctggacctgaacgaggacatgagccagcccctgagccactacttcatcaacagcagccacaacacctacctgaccgccggccagctggccggcaacagcagcgtggagatgtacagacaggtgctgctgagcggctgcagatgcgtggagctggactgctggaagggcagaaccgccgaggaggagcccgtgatcacccacggcttcaccatgaccaccgagatcagcttcaaggaggtgatcgaggccatcgccgagtgcgccttcaagaccagccccttccccatcctgctgagcttcgagaaccacgtggacagccccaagcagcaggccaagatggccgagtactgcagactgatcttcggcgacgccctgctgatggagcccctggagaagtaccccctggagagcggcgtgcccctgcccagccccatggacctgatgtacaagatcctggtgaagaacaagaagaagagccacaagagcagcgagggcagcggcaagaagaagctgagcgagcaggccagcaacacctacagcgacagcagcagcatgttcgagcccagcagccccggcgccggcgaggccgacaccgagagcgacgacgacgacgacgacgacgactgcaagaagagcagcatggacgagggcaccgccggcagcgaggccatggccaccgaggagatgagcaacctggtgaactacatccagcccgtgaagttcgagagcttcgagatcagcaagaagagaaacaagagcttcgagatgagcagcttcgtggagaccaagggcctggagcagctgaccaagagccccgtggagttcgtggagtacaacaagatgcagctgagcagaatctaccccaagggcaccagagtggacagcagcaactacatgccccagctgttctggaacgccggctgccagatggtggccctgaacttccagaccatggacctggccatgcagatcaacatgggcatgtacgagtacaacggcaagagcggctacagactgaagcccgagttcatgagaagacccgacaagcacttcgaccccttcaccgagggcatcgtggacggcatcgtggccaacaccctgagcgtgaagatcatcagcggccagttcctgagcgacaagaaggtgggcacctacgtggaggtggacatgttcggcctgcccgtggacaccagaagaaaggccttcaagaccaagaccagccagggcaacgccgtgaaccccgtgtgggaggaggagcccatcgtgttcaagaaggtggtgctgcccaccctggcctgcctgagaatcgccgtgtacgaggagggcggcaagttcatcggccacagaatcctgcccgtgcaggccatcagacccggctaccactacatctgcctgagaaacgagagaaaccagcccctgaccctgcccgccgtgttcgtgtacatcgaggtgaaggactacgtgcccgacacctacgccgacgtgatcgaggccctgagcaaccccatcagatacgtgaacctgatggagcagagagccaagcagctggccgccctgaccctggaggacgaggaggaggtgaagaaggaggccgaccccggcgagacccccagcgaggcccccagcgaggccagaaccacccccgccgagaacggcgtgaaccacaccaccaccctgacccccaagccccccagccaggccctgcacagccagcccgcccccggcagcgtgaaggcccccgccaagaccgaggacctgatccagagcgtgctgaccgaggtggaggcccagaccatcgaggagctgaagcagcagaagagcttcgtgaagctgcagaagaagcactacaaggagatgaaggacctggtgaagagacaccacaagaagaccaccgacctgatcaaggagcacaccaccaagtacaacgagatccagaacgactacctgagaagaagagccgccctggagaagagcgccaagaaggacagcaagaagaagagcgagcccagcagccccgaccacggcagcagcaccatcgagcaggacctggccgccctggacgccgagatgacccagaagctgatcgacctgaaggacaagcagcagcagcagctgctgaacctgagacaggagcagtactacagcgagaagtaccagaagagagagcacatcaagctgctgatccagaagctgaccgacgtggccgaggagtgccagaacaaccagctgaagaagctgaaggagatctgcgagaaggagaagaaggagctgaagaagaagatggacaagaagagacaggagaagatcaccgaggccaagagcaaggacaagagccagatggaggaggagaagaccgagatgatcagaagctacatccaggaggtggtgcagtacatcaagagactggaggaggcccagagcaagagacaggagaagctggtggagaagcacaaggagatcagacagcagatcctggacgagaagcccaagggcgagggcagcagcagcttcctgagcgagacctgccacgaggaccccagcgtgagccccaacttcaccccccccaacccccaggccctgaagtggtag

SEQ ID NO: 93296 - DNA, 3522 bp, synthetic construct; identical to SEQ ID NO: 93295
  misc_feature 1..3522: note = Description of Artificial Sequence: Synthetic coding sequence
  source 1..3522: mol_type = other DNA

SEQ ID NO: 93297 - DNA, 699 bp, synthetic construct
  misc_feature 1..699: note = Description of Artificial Sequence: Synthetic coding sequence
  source 1..699: mol_type = other DNA
gccggcgcccagcccggcgtgcacgccctgcagctgaagcccgtgtgcgtgagcgacagcctgaagaagggcaccaagttcgtgaagtgggacgacgacagcaccatcgtgacccccatcatcctgagaaccgacccccagggcttcttcttctactggaccgaccagaacaaggagaccgagctgctggacctgagcctggtgaaggacgccagatgcggcagacacgccaaggcccccaaggaccccaagctgagagagctgctggacgtgggcaacatcggcagactggagcagagaatgatcaccgtggtgtacggccccgacctggtgaacatcagccacctgaacctggtggccttccaggaggaggtggccaaggagtggaccaacgaggtgttcagcctggccaccaacctgctggcccagaacatgagcagagacgccttcctggagaaggcctacaccaagctgaagctgcaggtgacccccgagggcagaatccccctgaagaacatctacagactgttcagcgccgacagaaagagagtggagaccgccctggaggcctgcagcctgcccagcagcagagtggagaaggccaacgaggccgccaagagcgagcagagctgcggcaaggccccccccaagcacttccacctgcacttcatcaagcagaacaagatgctggagccctag

SEQ ID NO: 93298 - DNA, 93 bp, synthetic construct
  misc_feature 1..93: note = Description of Artificial Sequence: Synthetic coding sequence
  source 1..93: mol_type = other DNA
gaggaggcccagagcaagagacaggagaagctggtggagaagcacaaggagatcagacagcagatcctggacgagaagcccaaggtgccctag

SEQ ID NO: 93299 - DNA, 591 bp, synthetic construct
  misc_feature 1..591: note = Description of Artificial Sequence: Synthetic coding sequence
  source 1..591: mol_type = other DNA
atcatcagcggccagttcctgagcgacaagaaggtgggcacctacgtggaggtggacatgttcggcctgcccgtggacaccagaagaaaggccttcaagaccaagaccagccagggcaacgccgtgaaccccgtgtgggaggaggagcccatcgtgttcaagaaggtggtgctgcccaccctggcctgcctgagaatcgccgtgtacgaggagggcggcaagttcatcggccacagaatcctgcccgtgcaggccatcagacccggctaccactacatctgcctgagaaacgagagaaaccagcccctgaccctgcccgccgtgttcgtgtacatcgaggtgaaggactacgtgcccgacacctacgccgacgtgatcgaggccctgagcaaccccatcagatacgtgaacctgatggagcagagagccaagcagctggccgccctgaccctggaggacgaggaggaggtgaagaaggagggcggcttcctgcacgacgagatcatgagactgaccagaaacaccctggagaagctgatggccctgcccctgacccacgtggtgcccatccagagcaagatgctgagctag

SEQ ID NO: 93300 - DNA, 3411 bp, synthetic construct
  misc_feature 1..3411: note = Description of Artificial Sequence: Synthetic coding sequence
  source 1..3411: mol_type = other DNA
acccaggaccccaagctgagagagctgctggacgtgggcaacatcggcagactggagcagagaatgatcaccgtggtgtacggccccgacctggtgaacatcagccacctgaacctggtggccttccaggaggaggtggccaaggagtggaccaacgaggtgttcagcctggccaccaacctgctggcccagaacatgagcagagacgccttcctggagaaggcctacaccaagctgaagctgcaggtgacccccgagggcagaatccccctgaagaacatctacagactgttcagcgccgacagaaagagagtggagaccgccctggaggcctgcagcctgcccagcagcagaaacgacagcatcccccaggaggacttcacccccgaggtgtacagagtgttcctgaacaacctgtgccccagacccgagatcgacaacatcttcagcgagttcggcgccaagagcaagccctacctgaccgtggaccagatgatggacttcatcaacctgaagcagagagaccccagactgaacgagatcctgtacccccccctgaagcaggagcaggtgcaggtgctgatcgagaagtacgagcccaacaacagcctggccagaaagggccagatcagcgtggacggcttcatgagatacctgagcggcgaggagaacggcgtggtgagccccgagaagctggacctgaacgaggacatgagccagcccctgagccactacttcatcaacagcagccacaacacctacctgaccgccggccagctggccggcaacagcagcgtggagatgtacagacaggtgctgctgagcggctgcagatgcgtggagctggactgctggaagggcagaaccgccgaggaggagcccgtgatcacccacggcttcaccatgaccaccgagatcagcttcaaggaggtgatcgaggccatcgccgagtgcgccttcaagaccagccccttccccatcctgctgagcttcgagaaccacgtggacagccccaagcagcaggccaagatggccgagtactgcagactgatcttcggcgacgccctgctgatggagcccctggagaagtaccccctggagagcggcgtgcccctgcccagccccatggacctgatgtacaagatcctggtgaagaacaagaagaagagccacaagagcagcgagggcagcggcaagaagaagctgagcgagcaggccagcaacacctacagcgacagcagcagcatgttcgagcccagcagccccggcgccggcgaggccgacaccgagagcgacgacgacgacgacgacgacgactgcaagaagagcagcatggacgagggcaccgccggcagcgaggccatggccaccgaggagatgagcaacctggtgaactacatccagcccgtgaagttcgagagcttcgagatcagcaagaagagaaacaagagcttcgagatgagcagcttcgtggagaccaagggcctggagcagctgaccaagagccccgtggagttcgtggagtacaacaagatgcagctgagcagaatctaccccaagggcaccagagtggacagcagcaactacatgccccagctgttctggaacgccggctgccagatggtggccctgaacttccagaccatggacctggccatgcagatcaacatgggcatgtacgagtacaacggcaagagcggctacagactgaagcccgagttcatgagaagacccgacaagcacttcgaccccttcaccgagggcatcgtggacggcatcgtggccaacaccctgagcgtgaagatcatcagcggccagttcctgagcgacaagaaggtgggcacctacgtggaggtggacatgttcggcctgcccgtggacaccagaagaaaggccttcaagaccaagaccagccagggcaacgccgtgaaccccgtgtgggaggaggagcccatcgtgttcaagaaggtggtgctgcccaccctggcctgcctgagaatcgccgtgtacgaggagggcggcaagttcatcggccacagaatcctgcccgtgcaggccatcagacccggctaccactacatctgcctgagaaacgagagaaaccagcccctgaccctgcccgccgtgttcgtgtacatcgaggtgaaggactacgtgcccgacacctacgccgacgtgatcgaggccctgagcaaccccatcagatacgtgaacctgatggagcagagagccaagcagctggccgccctgaccctggaggacgaggaggaggtgaagaaggaggccgaccccggcgagacccccagcgaggcccccagcgaggccagaaccacccccgccgagaacggcgtgaaccacaccaccaccctgacccccaagccccccagccaggccctgcacagccagcccgcccccggcagcgtgaaggcccccgccaagaccgaggacctgatccagagcgtgctgaccgaggtggaggcccagaccatcgaggagctgaagcagcagaagagcttcgtgaagctgcagaagaagcactacaaggagatgaaggacctggtgaagagacaccacaagaagaccaccgacctgatcaaggagcacaccaccaagtacaacgagatccagaacgactacctgagaagaagagccgccctggagaagagcgccaagaaggacagcaagaagaagagcgagcccagcagccccgaccacggcagcagcaccatcgagcaggacctggccgccctggacgccgagatgacccagaagctgatcgacctgaaggacaagcagcagcagcagctgctgaacctgagacaggagcagtactacagcgagaagtaccagaagagagagcacatcaagctgctgatccagaagctgaccgacgtggccgaggagtgccagaacaaccagctgaagaagctgaaggagatctgcgagaaggagaagaaggagctgaagaagaagatggacaagaagagacaggagaagatcaccgaggccaagagcaaggacaagagccagatggaggaggagaagaccgagatgatcagaagctacatccaggaggtggtgcagtacatcaagagactggaggaggcccagagcaagagacaggagaagctggtggagaagcacaaggagatcagacagcagatcctggacgagaagcccaagctgcaggtggagctggagcaggagtaccaggacaagttcaagagactgcccctggagatcctggagttcgtgcaggaggccatgaagggcaagatcagcgaggacagcaaccacggcagcgcccccctgagcctgagcagcgaccccggcaaggtgaaccacaagacccccagcagcgaggagctgggcggcgacatccccggcaaggagttcgacacccccctgtag

SEQ ID NO: 93301 - DNA, 3282 bp, synthetic construct
  misc_feature 1..3282: note = Description of Artificial Sequence: Synthetic coding sequence
  source 1..3282: mol_type = other DNA
acccaggaccccaagctgagagagctgctggacgtgggcaacatcggcagactggagcagagaatgatcaccgtggtgtacggccccgacctggtgaacatcagccacctgaacctggtggccttccaggaggaggtggccaaggagtggaccaacgaggtgttcagcctggccaccaacctgctggcccagaacatgagcagagacgccttcctggagaaggcctacaccaagctgaagctgcaggtgacccccgagggcagaatccccctgaagaacatctacagactgttcagcgccgacagaaagagagtggagaccgccctggaggcctgcagcctgcccagcagcagaaacgacagcatcccccaggaggacttcacccccgaggtgtacagagtgttcctgaacaacctgtgccccagacccgagatcgacaacatcttcagcgagttcggcgccaagagcaagccctacctgaccgtggaccagatgatggacttcatcaacctgaagcagagagaccccagactgaacgagatcctgtacccccccctgaagcaggagcaggtgcaggtgctgatcgagaagtacgagcccaacaacagcctggccagaaagggccagatcagcgtggacggcttcatgagatacctgagcggcgaggagaacggcgtggtgagccccgagaagctggacctgaacgaggacatgagccagcccctgagccactacttcatcaacagcagccacaacacctacctgaccgccggccagctggccggcaacagcagcgtggagatgtacagacaggtgctgctgagcggctgcagatgcgtggagctggactgctggaagggcagaaccgccgaggaggagcccgtgatcacccacggcttcaccatgaccaccgagatcagcttcaaggaggtgatcgaggccatcgccgagtgcgccttcaagaccagccccttccccatcctgctgagcttcgagaaccacgtggacagccccaagcagcaggccaagatggccgagtactgcagactgatcttcggcgacgccctgctgatggagcccctggagaagtaccccctggagagcggcgtgcccctgcccagccccatggacctgatgtacaagatcctggtgaagaacaagaagaagagccacaagagcagcgagggcagcggcaagaagaagctgagcgagcaggccagcaacacctacagcgacagcagcagcatgttcgagcccagcagccccggcgccggcgaggccgacaccgagagcgacgacgacgacgacgacgacgactgcaagaagagcagcatggacgagggcaccgccggcagcgaggccatggccaccgaggagatgagcaacctggtgaactacatccagcccgtgaagttcgagagcttcgagatcagcaagaagagaaacaagagcttcgagatgagcagcttcgtggagaccaagggcctggagcagctgaccaagagccccgtggagttcgtggagtacaacaagatgcagctgagcagaatctaccccaagggcaccagagtggacagcagcaactacatgccccagctgttctggaacgccggctgccagatggtggccctgaacttccagaccatggacctggccatgcagatcaacatgggcatgtacgagtacaacggcaagagcggctacagactgaagcccgagttcatgagaagacccgacaagcacttcgaccccttcaccgagggcatcgtggacggcatcgtggccaacaccctgagcgtgaagatcatcagcggccagttcctgagcgacaagaaggtgggcacctacgtggaggtggacatgttcggcctgcccgtggacaccagaagaaaggccttcaagaccaagaccagccagggcaacgccgtgaaccccgtgtgggaggaggagcccatcgtgttcaagaaggtggtgctgcccaccctggcctgcctgagaatcgccgtgtacgaggagggcggcaagttcatcggccacagaatcctgcccgtgcaggccatcagacccggctaccactacatctgcctgagaaacgagagaaaccagcccctgaccctgcccgccgtgttcgtgtacatcgaggtgaaggactacgtgcccgacacctacgccgacgtgatcgaggccctgagcaaccccatcagatacgtgaacctgatggagcagagagccaagcagctggccgccctgaccctggaggacgaggaggaggtgaagaaggaggccgaccccggcgagacccccagcgaggcccccagcgaggccagaaccacccccgccgagaacggcgtgaaccacaccaccaccctgacccccaagccccccagccaggccctgcacagccagcccgcccccggcagcgtgaaggcccccgccaagaccgaggacctgatccagagcgtgctgaccgaggtggaggcccagaccatcgaggagctgaagcagcagaagagcttcgtgaagctgcagaagaagcactacaaggagatgaaggacctggtgaagagacaccacaagaagaccaccgacctgatcaaggagcacaccaccaagtacaacgagatccagaacgactacctgagaagaagagccgccctggagaagagcgccaagaaggacagcaagaagaagagcgagcccagcagccccgaccacggcagcagcaccatcgagcaggacctggccgccctggacgccgagatgacccagaagctgatcgacctgaaggacaagcagcagcagcagctgctgaacctgagacaggagcagtactacagcgagaagtaccagaagagagagcacatcaagctgctgatccagaagctgaccgacgtggccgaggagtgccagaacaaccagctgaagaagctgaaggagatctgcgagaaggagaagaaggagctgaagaagaagatggacaagaagagacaggagaagatcaccgaggccaagagcaaggacaagagccagatggaggaggagaagaccgagatgatcagaagctacatccaggaggtggtgcagtacatcaagagactggaggaggcccagagcaagagacaggagaagctggtggagaagcacaaggagatcagacagcagatcctggacgagaagcccaagggcgagggcagcagcagcttcctgagcgagacctgccacgaggaccccagcgtgagccccaacttcaccccccccaacccccaggccctgaagtggtag

SEQ ID NO: 93302 - DNA, 3558 bp, synthetic construct
  misc_feature 1..3558: note = Description of Artificial Sequence: Synthetic coding sequence
  source 1..3558: mol_type = other DNA
atgagcctgctgaaccccgtgctgctgccccccaaggtgaaggcctacctgagccagggcgagagattcatcaagtgggacgacgagaccaccgtggccagccccgtgatcctgagagtggaccccaagggctactacctgtactggacctaccagagcaaggagatggagttcctggacatcaccagcatcagagacaccagattcggcaagttcgccaagatgcccaagagccagaagctgagagacgtgttcaacatggacttccccgacaacagcttcctgctgaagaccctgaccgtggtgagcggccccgacatggtggacctgaccttccacaacttcgtgagctacaaggagaacgtgggcaaggcctgggccgaggacgtgctggccctggtgaagcaccccctgaccgccaacgccagcagaagcaccttcctggacaagatcctggtgaagctgaagatgcagctgaacagcgagggcaagatccccgtgaagaacttcttccagatgttccccgccgacagaaagagagtggaggccgccctgagcgcctgccacctgcccaagggcaagaacgacgccatcaaccccgaggacttccccgagcccgtgtacaagagcttcctgatgagcctgtgccccagacccgagatcgacgagatcttcaccagctaccacgccaaggccaagccctacatgaccaaggagcacctgaccaagttcatcaaccagaagcagagagacagcagactgaacagcctgctgttcccccccgccagacccgaccaggtgcagggcctgatcgacaagtacgagcccagcggcatcaacgcccagagaggccagctgagccccgagggcatggtgtggttcctgtgcggccccgagaacagcgtgctggcccaggacaagctgctgctgcaccacgacatgacccagcccctgaaccactacttcatcaacagcagccacaacacctacctgaccgccggccagttcagcggcctgagcagcgccgagatgtacagacaggtgctgctgagcggctgcagatgcgtggagctggactgctggaagggcaagccccccgacgaggagcccatcatcacccacggcttcaccatgaccaccgacatcttcttcaaggaggccatcgaggccatcgccgagagcgccttcaagaccagcccctaccccatcatcctgagcttcgagaaccacgtggacagccccagacagcaggccaagatggccgagtactgcagaaccatcttcggcgacatgctgctgaccgagcccctggagaagttccccctgaagcccggcgtgcccctgcccagccccgaggacctgagaggcaagatcctgatcaagaacaagaagaaccagttcagcggccccaccagcagcagcaaggacaccggcggcgaggccgagggcagcagcccccccagcgcccccgccggcgagggcaccgtgtgggccggcgaggagggcaccgagctggaggaggaggaggtggaggaggaggaggaggaggagagcggcaacctggacgaggaggagatcaagaagatgcagagcgacgagggcaccgccggcctggaggtgaccgcctacgaggagatgagcagcctggtgaactacatccagcccaccaagttcgtgagcttcgagttcagcgcccagaagaacagaagctacgtgatcagcagcttcaccgagctgaaggcctacgacctgctgagcaaggccagcgtgcagttcgtggactacaacaagagacagatgagcagaatctaccccaagggcaccagaatggacagcagcaactacatgccccagatgttctggaacgccggctgccagatggtggccctgaacttccagaccatggacctgcccatgcagcagaacatggccgtgttcgagttcaacggccagagcggctacctgctgaagcacgagttcatgagaagacccgacaagcagttcaaccccttcagcgtggacagaatcgacgtggtggtggccaccaccctgagcatcaccgtgatcagcggccagttcctgagcgagagaagcgtgagaacctacgtggaggtggagctgttcggcctgcccggcgaccccaagagaagatacagaaccaagctgagccccagcaccaacagcatcaaccccgtgtggaaggaggagcccttcgtgttcgagaagatcctgatgcccgagctggccagcctgagagtggccgtgatggaggagggcaacaagttcctgggccacagaatcatccccatcaacgccctgaacagcggctaccaccacctgtgcctgcacagcgagagcaacatgcccctgaccatgcccgccctgttcatcttcctggagatgaaggactacatccccggcgcctgggccgacctgaccgtggccctggccaaccccatcaagttcttcagcgcccacgacaccaagagcgtgaagctgaaggaggccatgggcggcctgcccgagaagcccttccccctggccagccccgtggccagccaggtgaacggcgccctggcccccaccagcaacggcagccccgccgccagagccggcgccagagaggaggccatgaaggaggccgccgagcccagaaccgccagcctggaggagctgagagagctgaagggcgtggtgaagctgcagagaagacacgagaaggagctgagagagctggagagaagaggcgccagaagatgggaggagctgctgcagagaggcgccgcccagctggccgagctgggcccccccggcgtgggcggcgtgggcgcctgcaagctgggccccggcaagggcagcagaaagaagagaagcctgcccagagaggagagcgccggcgccgcccccggcgagggccccgagggcgtggacggcagagtgagagagctgaaggacagactggagctggagctgctgagacagggcgaggagcagtacgagtgcgtgctgaagagaaaggagcagcacgtggccgagcagatcagcaagatgatggagctggccagagagaagcaggccgccgagctgaaggccctgaaggagaccagcgagaacgacaccaaggagatgaagaagaagctggagaccaagagactggagagaatccagggcatgaccaaggtgaccaccgacaagatggcccaggagagactgaagagagagatcaacaacagccacatccaggaggtggtgcaggtgatcaagcagatgaccgagaacctggagagacaccaggagaagctggaggagaagcaggccgcctgcctggagcagatcagagagatggagaagcagttccagaaggaggccctggccgagtacgaggccagaatgaagggcctggaggccgaggtgaaggagagcgtgagagcctgcctgagaacctgcttccccagcgaggccaaggacaagcccgagagagcctgcgagtgcccccccgagctgtgcgagcaggaccccctgatcgccaaggccgacgcccaggagagcagactgtag

SEQ ID NO: 93303 - DNA, 3546 bp, synthetic construct
  misc_feature 1..3546: note = Description of Artificial Sequence: Synthetic coding sequence
  source 1..3546: mol_type = other DNA
atgagcctgctgaaccccgtgctgctgccccccaaggtgaaggcctacctgagccagggcgagagattcatcaagtgggacgacgagaccaccgtggccagccccgtgatcctgagagtggaccccaagggctactacctgtactggacctaccagagcaaggagatggagttcctggacatcaccagcatcagagacaccagattcggcaagttcgccaagatgcccaagagccagaagctgagagacgtgttcaacatggacttccccgacaacagcttcctgctgaagaccctgaccgtggtgagcggccccgacatggtggacctgaccttccacaacttcgtgagctacaaggagaacgtgggcaaggcctgggccgaggacgtgctggccctggtgaagcaccccctgaccgccaacgccagcagaagcaccttcctggacaagatcctggtgaagctgaagatgcagctgaacagcgagggcaagatccccgtgaagaacttcttccagatgttccccgccgacagaaagagagtggaggccgccctgagcgcctgccacctgcccaagggcaagaacgacgccatcaaccccgaggacttccccgagcccgtgtacaagagcttcctgatgagcctgtgccccagacccgagatcgacgagatcttcaccagctaccacgccaaggccaagccctacatgaccaaggagcacctgaccaagttcatcaaccagaagcagagagacagcagactgaacagcctgctgttcccccccgccagacccgaccaggtgcagggcctgatcgacaagtacgagcccagcggcatcaacgcccagagaggccagctgagccccgagggcatggtgtggttcctgtgcggccccgagaacagcgtgctggcccaggacaagctgctgctgcaccacgacatgacccagcccctgaaccactacttcatcaacagcagccacaacacctacctgaccgccggccagttcagcggcctgagcagcgccgagatgtacagacaggtgctgctgagcggctgcagatgcgtggagctggactgctggaagggcaagccccccgacgaggagcccatcatcacccacggcttcaccatgaccaccgacatcttcttcaaggaggccatcgaggccatcgccgagagcgccttcaagaccagcccctaccccatcatcctgagcttcgagaaccacgtggacagccccagacagcaggccaagatggccgagtactgcagaaccatcttcggcgacatgctgctgaccgagcccctggagaagttccccctgaagcccggcgtgcccctgcccagccccgaggacctgagaggcaagatcctgatcaagaacaagaagaaccagttcagcggccccaccagcagcagcaaggacaccggcggcgaggccgagggcagcagcccccccagcgcccccgccgtgtgggccggcgaggagggcaccgagctggaggaggaggaggtggaggaggaggaggaggaggagagcggcaacctggacgaggaggagatcaagaagatgcagagcgacgagggcaccgccggcctggaggtgaccgcctacgaggagatgagcagcctggtgaactacatccagcccaccaagttcgtgagcttcgagttcagcgcccagaagaacagaagctacgtgatcagcagcttcaccgagctgaaggcctacgacctgctgagcaaggccagcgtgcagttcgtggactacaacaagagacagatgagcagaatctaccccaagggcaccagaatggacagcagcaactacatgccccagatgttctggaacgccggctgccagatggtggccctgaacttccagaccatggacctgcccatgcagcagaacatggccgtgttcgagttcaacggccagagcggctacctgctgaagcacgagttcatgagaagacccgacaagcagttcaaccccttcagcgtggacagaatcgacgtggtggtggccaccaccctgagcatcaccgtgatcagcggccagttcctgagcgagagaagcgtgagaacctacgtggaggtggagctgttcggcctgcccggcgaccccaagagaagatacagaaccaagctgagccccagcaccaacagcatcaaccccgtgtggaaggaggagcccttcgtgttcgagaagatcctgatgcccgagctggccagcctgagagtggccgtgatggaggagggcaacaagttcctgggccacagaatcatccccatcaacgccctgaacagcggctaccaccacctgtgcctgcacagcgagagcaacatgcccctgaccatgcccgccctgttcatcttcctggagatgaaggactacatccccggcgcctgggccgacctgaccgtggccctggccaaccccatcaagttcttcagcgcccacgacaccaagagcgtgaagctgaaggaggccatgggcggcctgcccgagaagcccttccccctggccagccccgtggccagccaggtgaacggcgccctggcccccaccagcaacggcagccccgccgccagagccggcgccagagaggaggccatgaaggaggccgccgagcccagaaccgccagcctggaggagctgagagagctgaagggcgtggtgaagctgcagagaagacacgagaaggagctgagagagctggagagaagaggcgccagaagatgggaggagctgctgcagagaggcgccgcccagctggccgagctgggcccccccggcgtgggcggcgtgggcgcctgcaagctgggccccggcaagggcagcagaaagaagagaagcctgcccagagaggagagcgccggcgccgcccccggcgagggccccgagggcgtggacggcagagtgagagagctgaaggacagactggagctggagctgctgagacagggcgaggagcagtacgagtgcgtgctgaagagaaaggagcagcacgtggccgagcagatcagcaagatgatggagctggccagagagaagcaggccgccgagctgaaggccctgaaggagaccagcgagaacgacaccaaggagatgaagaagaagctggagaccaagagactggagagaatccagggcatgaccaaggtgaccaccgacaagatggcccaggagagactgaagagagagatcaacaacagccacatccaggaggtggtgcaggtgatcaagcagatgaccgagaacctggagagacaccaggagaagctggaggagaagcaggccgcctgcctggagcagatcagagagatggagaagcagttccagaaggaggccctggccgagtacgaggccagaatgaagggcctggaggccgaggtgaaggagagcgtgagagcctgcctgagaacctgcttccccagcgaggccaaggacaagcccgagagagcctgcgagtgcccccccgagctgtgcgagcaggaccccctgatcgccaaggccgacgcccaggagagcagactgtag

SEQ ID NO: 93304 - DNA, 3705 bp, synthetic construct
  misc_feature 1..3705: note = Description of Artificial Sequence: Synthetic coding sequence
  source 1..3705: mol_type = other DNA
atggccggcgcccagcccggcgtgcacgccctgcagctggagccccccaccgtggtggagaccctgagaagaggcagcaagttcatcaagtgggacgaggagaccagcagcagaaacctggtgaccctgagagtggaccccaacggcttcttcctgtactggaccggccccaacatggaggtggacaccctggacatcagcagcatcagagacaccagaaccggcagatacgccagactgcccaaggaccccaagatcagagaggtgctgggcttcggcggccccgacgccagactggaggagaagctgatgaccgtggtgagcggccccgaccccgtgaacaccgtgttcctgaacttcatggccgtgcaggacgacaccgccaaggtgtggagcgaggagctgttcaagctggccatgaacatcctggcccagaacgccagcagaaacaccttcctgagaaaggcctacaccaagctgaagctgcaggtgaaccaggacggcagaatccccgtgaagaacatcctgaagatgttcagcgccgacaagaagagagtggagaccgccctggagagctgcggcctgaagttcaacagaagcgagagcatcagacccgacgagttcagcctggagatcttcgagagattcctgaacaagctgtgcctgagacccgacatcgacaagatcctgctggagatcggcgccaagggcaagccctacctgaccctggagcagctgatggacttcatcaaccagaagcagagagaccccagactgaacgaggtgctgtacccccccctgagacccagccaggccagactgctgatcgagaagtacgagcccaaccagcagttcctggagagagaccagatgagcatggagggcttcagcagatacctgggcggcgaggagaacggcatcctgcccctggaggccctggacctgagcaccgacatgacccagcccctgagcgcctacttcatcaacagcagccacaacacctacctgaccgccggccagctggccggcaccagcagcgtggagatgtacagacaggccctgctgtggggctgcagatgcgtggagctggacgtgtggaagggcagaccccccgaggaggagcccttcatcacccacggcttcaccatgaccaccgaggtgcccctgagagacgtgctggaggccatcgccgagaccgccttcaagaccagcccctaccccgtgatcctgagcttcgagaaccacgtggacagcgccaagcagcaggccaagatggccgagtactgcagaagcatcttcggcgacgccctgctgatcgagcccctggacaagtaccccctggcccccggcgtgcccctgcccagcccccaggacctgatgggcagaatcctggtgaagaacaagaagagacacagacccagcgccggcggccccgacagcgccggcagaaagagacccctggagcagagcaacagcgccctgagcgagagcagcgccgccaccgagcccagcagcccccagctgggcagccccagcagcgacagctgccccggcctgagcaacggcgaggaggtgggcctggagaagcccagcctggagccccagaagagcctgggcgacgagggcctgaacagaggcccctacgtgctgggccccgccgacagagaggacgaggaggaggacgaggaggaggaggagcagaccgaccccaagaagcccaccaccgacgagggcaccgccagcagcgaggtgaacgccaccgaggagatgagcaccctggtgaactacatcgagcccgtgaagttcaagagcttcgaggccgccagaaagagaaacaagtgcttcgagatgagcagcttcgtggagaccaaggccatggagcagctgaccaagagccccatggagttcgtggagtacaacaagcagcagctgagcagaatctaccccaagggcaccagagtggacagcagcaactacatgccccagctgttctggaacgtgggctgccagctggtggccctgaacttccagaccctggacgtggccatgcagctgaacgccggcgtgttcgagtacaacggcagaagcggctacctgctgaagcccgagttcatgagaagacccgacaagagcttcgaccccttcaccgaggtgatcgtggacggcatcgtggccaacgccctgagagtgaaggtgatcagcggccagttcctgagcgacagaaaggtgggcatctacgtggaggtggacatgttcggcctgcccgtggacaccagaagaaagtacagaaccagaaccagccagggcaacagcttcaaccccgtgtgggacgaggagcccttcgacttccccaaggtggtgctgcccaccctggccagcctgagaatcgccgccttcgaggagggcggcaagttcgtgggccacagaatcctgcccgtgagcgccatcagaagcggctaccactacgtgtgcctgagaaacgaggccaaccagcccctgtgcctgcccgccctgctgatctacaccgaggccagcgactacatccccgacgaccaccaggactacgccgaggccctgatcaaccccatcaagcacgtgagcctgatggaccagagagccagacagctggccgccctgatcggcgagagcgaggcccaggccggccaggagacctgccaggacacccagagccagcagctgggcagccagcccagcagcaaccccacccccagccccctggacgccagccccagaagaccccccggccccaccaccagccccgccagcaccagcctgagcagccccggccagagagacgacctgatcgccagcatcctgagcgaggtggcccccacccccctggacgagctgagaggccacaaggccctggtgaagctgagaagcagacaggagagagacctgagagagctgagaaagaagcaccagagaaaggccgtgaccctgaccagaagactgctggacggcctggcccaggcccaggccgagggcagatgcagactgagacccggcgccctgggcggcgccgccgacgtggaggacaccaaggagggcgaggacgaggccaagagataccaggagttccagaacagacaggtgcagagcctgctggagctgagagaggcccaggtggacgccgaggcccagagaagactggagcacctgagacaggccctgcagagactgagagaggtggtgctggacgccaacaccacccagttcaagagactgaaggagatgaacgagagagagaagaaggagctgcagaagatcctggacagaaagagacacaacagcatcagcgaggccaagatgagagacaagcacaagaaggaggccgagctgaccgagatcaacagaagacacatcaccgagagcgtgaacagcatcagaagactggaggaggcccagaagcagagacacgacagactggtggccggccagcagcaggtgctgcagcagctggccgaggaggagcccaagctgctggcccagctggcccaggagtgccaggagcagagagccagactgccccaggagatcagaagaagcctgctgggcgagatgcccgagggcctgggcgacggccccctggtggcctgcgccagcaacggccacgcccccggcagcagcggccacctgagcggcgccgacagcgagagccaggaggagaacacccagctgtag

SEQ ID NO: 93305 - DNA, 3705 bp, synthetic construct; identical to SEQ ID NO: 93304
  misc_feature 1..3705: note = Description of Artificial Sequence: Synthetic coding sequence
  source 1..3705: mol_type = other DNA

SEQ ID NO: 93306 - DNA, 3528 bp, synthetic construct
  misc_feature 1..3528: note = Description of Artificial Sequence: Synthetic coding sequence
  source 1..3528: mol_type = other DNA
atggccaagccctacgagttcaactggcagaaggaggtgcccagcttcctgcaggagggcgccgtgttcgacagatacgaggaggagagcttcgtgttcgagcccaactgcctgttcaaggtggacgagttcggcttcttcctgacctggagaagcgagggcaaggagggccaggtgctggagtgcagcctgatcaacagcatcagaagcggcgccatccccaaggaccccaagatcctggccgccctggaggccgtgggcaagagcgagaacgacctggagggcagaatcgtgtgcgtgtgcagcggcaccgacctggtgaacatcagcttcacctacatggtggccgagaaccccgaggtgaccaagcagtgggtggagggcctgagaagcatcatccacaacttcagagccaacaacgtgagccccatgacctgcctgaagaagcactggatgaagctggccttcatgaccaacaccaacggcaagatccccgtgagaagcatcaccagaaccttcgccagcggcaagaccgagaaggtgatcttccaggccctgaaggagctgggcctgcccagcggcaagaacgacgagatcgagcccaccgccttcagctacgagaagttctacgagctgacccagaagatctgccccagaaccgacatcgaggacctgttcaagaagatcaacggcgacaagaccgactacctgaccgtggaccagctggtgagcttcctgaacgagcaccagagagaccccagactgaacgagatcctgttccccttctacgacgccaagagagccatgcagatcatcgagatgtacgagcccgacgaggacctgaagaagaagggcctgatcagcagcgacggcttctgcagatacctgatgagcgacgagaacgcccccgtgttcctggacagactggagctgtaccaggagatggaccaccccctggcccactacttcatcagcagcagccacaacacctacctgaccggcagacagttcggcggcaagagcagcgtggagatgtacagacaggtgctgctggccggctgcagatgcgtggagctggactgctgggacggcaagggcgaggaccaggagcccatcatcacccacggcaaggccatgtgcaccgacatcctgttcaaggacgtgatccaggccatcaaggagaccgccttcgtgaccagcgagtaccccgtgatcctgagcttcgagaaccactgcagcaagtaccagcagtacaagatgagcaagtactgcgaggacctgttcggcgacctgctgctgaagcaggccctggagagccaccccctggagcccggcagagccctgcccagccccaacgacctgaagagaaagatcctgatcaagaacaagagactgaagcccgaggtggagaagaagcagctggaggccctgagaagcatgatggaggccggcgagagcgccagccccgccaacatcctggaggacgacaacgaggaggagatcgagagcgccgaccaggaggaggaggcccaccccgagttcaagttcggcaacgagctgagcgccgacgacctgggccacaaggaggccgtggccaacagcgtgaagaagggcctggtgaccgtggaggacgagcaggcctggatggccagctacaagtacgtgggcgccaccaccaacatccacccctacctgagcaccatgatcaactacgcccagcccgtgaagttccagggcttccacgtggccgaggagagaaacatccactacaacatgagcagcttcaacgagagcgtgggcctgggctacctgaagacccacgccatcgagttcgtgaactacaacaagagacagatgagcagaatctaccccaagggcggcagagtggacagcagcaactacatgccccagatcttctggaacgccggctgccagatggtgagcctgaactaccagacccccgacctggccatgcagctgaaccagggcaagttcgagtacaacggcagctgcggctacctgctgaagcccgacttcatgagaagacccgacagaaccttcgaccccttcagcgagacccccgtggacggcgtgatcgccgccacctgcagcgtgcaggtgatcagcggccagttcctgagcgacaagaagatcggcacctacgtggaggtggacatgtacggcctgcccaccgacaccatcagaaaggagttcagaaccagaatggtgatgaacaacggcctgaaccccgtgtacaacgaggagagcttcgtgttcagaaaggtgatcctgcccgacctggccgtgctgagaatcgccgtgtacgacgacaacaacaagctgatcggccagagaatcctgcccctggacggcctgcaggccggctacagacacatcagcctgagaaacgagggcaacaagcccctgagcctgcccaccatcttctgcaacatcgtgctgaagacctacgtgcccgacggcttcggcgacatcgtggacgccctgagcgaccccaagaagttcctgagcatcaccgagaagagagccgaccagatgagagccatgggcatcgagaccagcgacatcgccgacgtgcccagcgacaccagcaagaacgacaagaagggcaaggccaacaccgccaaggccaacgtgaccccccagagcagcagcgagctgagacccaccaccaccgccgccctggccagcggcgtggaggccaagaagggcatcgagctgatcccccaggtgagaatcgaggacctgaagcagatgaaggcctacctgaagcacctgaagaagcagcagaaggagctgaacagcctgaagaagaagcacgccaaggagcacagcaccatgcagaagctgcactgcacccaggtggacaagatcgtggcccagtacgacaaggagaagagcacccacgagaagatcctggagaaggccatgaagaagaagggcggcagcaactgcctggagatgaagaaggagaccgagatcaagatccagaccctgaccagcgaccacaagagcaaggtgaaggagatcgtggcccagcacaccaaggagtggagcgagatgatcaacacccacagcgccgaggagcaggagatcagagacctgcacctgagccagcagtgcgagctgctgaagaagctgctgatcaacgcccacgagcagcagacccagcagctgaagctgagccacgacagagagagcaaggagatgagagcccaccaggccaagatcagcatggagaacagcaaggccatcagccaggacaagagcatcaagaacaaggccgagagagagagaagagtgagagagctgaacagcagcaacaccaagaagttcctggaggagagaaagagactggccatgaagcagagcaaggagatggaccagctgaagaaggtgcagctggagcacctggagttcctggagaagcagaacgagcaggccaaggagatgcagcagatggtgaagctggaggccgagatggacagaagacccgccaccgtggtgtag

SEQ ID NO: 93307 - DNA, 3585 bp, synthetic construct
  misc_feature 1..3585: note = Description of Artificial Sequence: Synthetic coding sequence
  source 1..3585: mol_type = other DNA
atggccaagccctacgagttcaactggcagaaggaggtgcccagcttcctgcaggagggcgccgtgttcgacagatacgaggaggagagcttcgtgttcgagcccaactgcctgttcaaggtggacgagttcggcttcttcctgacctggagaagcgagggcaaggagggccaggtgctggagtgcagcctgatcaacagcatcagaagcggcgccatccccaaggaccccaagatcctggccgccctggaggccgtgggcaagagcgagaacgacctggagggcagaatcgtgtgcgtgtgcagcggcaccgacctggtgaacatcagcttcacctacatggtggccgagaaccccgaggtgaccaagcagtgggtggagggcctgagaagcatcatccacaacttcagagccaacaacgtgagccccatgacctgcctgaagaagcactggatgaagctggccttcatgaccaacaccaacggcaagatccccgtgagaagcatcaccagaaccttcgccagcggcaagaccgagaaggtgatcttccaggccctgaaggagctgggcctgcccagcggcaagaacgacgagatcgagcccaccgccttcagctacgagaagttctacgagctgacccagaagatctgccccagaaccgacatcgaggacctgttcaagaagatcaacggcgacaagaccgactacctgaccgtggaccagctggtgagcttcctgaacgagcaccagagagaccccagactgaacgagatcctgttccccttctacgacgccaagagagccatgcagatcatcgagatgtacgagcccgacgaggacctgaagaagaagggcctgatcagcagcgacggcttctgcagatacctgatgagcgacgagaacgcccccgtgttcctggacagactggagctgtaccaggagatggaccaccccctggcccactacttcatcagcagcagccacaacacctacctgaccggcagacagttcggcggcaagagcagcgtggagatgtacagacaggtgctgctggccggctgcagatgcgtggagctggactgctgggacggcaagggcgaggaccaggagcccatcatcacccacggcaaggccatgtgcaccgacatcctgttcaaggacgtgatccaggccatcaaggagaccgccttcgtgaccagcgagtaccccgtgatcctgagcttcgagaaccactgcagcaagtaccagcagtacaagatgagcaagtactgcgaggacctgttcggcgacctgctgctgaagcaggccctggagagccaccccctggagcccggcagagccctgcccagccccaacgacctgaagagaaagatcctgatcaagaacaagagactgaagcccgaggtggagaagaagcagctggaggccctgagaagcatgatggaggccggcgagagcgccagccccgccaacatcctggaggacgacaacgaggaggagatcgagagcgccgaccaggaggaggaggcccaccccgagttcaagttcggcaacgagctgagcgccgacgacctgggccacaaggaggccgtggccaacagcgtgaagaagggcctggtgaccgtggaggacgagcaggcctggatggccagctacaagtacgtgggcgccaccaccaacatccacccctacctgagcaccatgatcaactacgcccagcccgtgaagttccagggcttccacgtggccgaggagagaaacatccactacaacatgagcagcttcaacgagagcgtgggcctgggctacctgaagacccacgccatcgagttcgtgaactacaacaagagacagatgagcagaatctaccccaagggcggcagagtggacagcagcaactacatgccccagatcttctggaacgccggctgccagatggtgagcctgaactaccagacccccgacctggccatgcagctgaaccagggcaagttcgagtacaacggcagctgcggctacctgctgaagcccgacttcatgagaagacccgacagaaccttcgaccccttcagcgagacccccgtggacggcgtgatcgccgccacctgcagcgtgcaggtgatcagcggccagttcctgagcgacaagaagatcggcacctacgtggaggtggacatgtacggcctgcccaccgacaccatcagaaaggagttcagaaccagaatggtgatgaacaacggcctgaaccccgtgtacaacgaggagagcttcgtgttcagaaaggtgatcctgcccgacctggccgtgctgagaatcgccgtgtacgacgacaacaacaagctgatcggccagagaatcctgcccctggacggcctgcaggccggctacagacacatcagcctgagaaacgagggcaacaagcccctgagcctgcccaccatcttctgcaacatcgtgctgaagacctacgtgcccgacggcttcggcgacatcgtggacgccctgagcgaccccaagaagttcctgagcatcaccgagaagagagccgaccagatgagagccatgggcatcgagaccagcgacatcgccgacgtgcccagcgacaccagcaagaacgacaagaagggcaaggccaacaccgccaaggccaacgtgaccccccagagcagcagcgagctgagacccaccaccaccgccgccctggccagcggcgtggaggccaagaagggcatcgagctgatcccccaggtgagaatcgaggacctgaagcagatgaaggcctacctgaagcacctgaagaagcagcagaaggagctgaacagcctgaagaagaagcacgccaaggagcacagcaccatgcagaagctgcactgcacccaggtggacaagatcgtggcccagtacgacaaggagaagagcacccacgagaagatcctggagaaggccatgaagaagaagggcggcagcaactgcctggagatgaagaaggagaccgagatcaagatccagaccctgaccagcgaccacaagagcaaggtgaaggagatcgtggcccagcacaccaaggagtggagcgagatgatcaacacccacagcgccgaggagcaggagatcagagacctgcacctgagccagcagtgcgagctgctgaagaagctgctgatcaacgcccacgagcagcagacccagcagctgaagctgagccacgacagagagagcaaggagatgagagcccaccaggccaagatcagcatggagaacagcaaggccatcagccaggacaagagcatcaagaacaaggccgagagagagagaagagtgagagagctgaacagcagcaacaccaagaagttcctggaggagagaaagagactggccatgaagcagagcaaggagatggaccagctgaagaaggtgcagctggagcacctggagttcctggagaagcagaacgagcagctgctgaagagctgccacgccgtgagccagacccagggcgagggcgacgccgccgacggcgagatcggcagcagagacggcccccagaccagcaacagcagcatgaagctgcagaacgccaactag

SEQ ID NO: 93308 - DNA, 3564 bp, synthetic construct
  misc_feature 1..3564: note = Description of Artificial Sequence: Synthetic coding sequence
  source 1..3564: mol_type = other DNA
atggccaagccctacgagttcaactggcagaaggaggtgcccagcttcctgcaggagggcgccgtgttcgacagatacgaggaggagagcttcgtgttcgagcccaactgcctgttcaaggtggacgagttcggcttcttcctgacctggagaagcgagggcaaggagggccaggtgctggagtgcagcctgatcaacagcatcagaagcggcgccatccccaaggaccccaagatcctggccgccctggaggccgtgggcaagagcgagaacgacctggagggcagaatcgtgtgcgtgtgcagcggcaccgacctggtgaacatcagcttcacctacatggtggccgagaaccccgaggtgaccaagcagtgggtggagggcctgagaagcatcatccacaacttcagagccaacaacgtgagccccatgacctgcctgaagaagcactggatgaagctggccttcatgaccaacaccaacggcaagatccccgtgagaagcatcaccagaaccttcgccagcggcaagaccgagaaggtgatcttccaggccctgaaggagctgggcctgcccagcggcaagaacgacgagatcgagcccaccgccttcagctacgagaagttctacgagctgacccagaagatctgccccagaaccgacatcgaggacctgttcaagaagatcaacggcgacaagaccgactacctgaccgtggaccagctggtgagcttcctgaacgagcaccagagagaccccagactgaacgagatcctgttccccttctacgacgccaagagagccatgcagatcatcgagatgtacgagcccgacgaggacctgaagaagaagggcctgatcagcagcgacggcttctgcagatacctgatgagcgacgagaacgcccccgtgttcctggacagactggagctgtaccaggagatggaccaccccctggcccactacttcatcagcagcagccacaacacctacctgaccggcagacagttcggcggcaagagcagcgtggagatgtacagacaggtgctgctggccggctgcagatgcgtggagctggactgctgggacggcaagggcgaggaccaggagcccatcatcacccacggcaaggccatgtgcaccgacatcctgttcaaggacgtgatccaggccatcaaggagaccgccttcgtgaccagcgagtaccccgtgatcctgagcttcgagaaccactgcagcaagtaccagcagtacaagatgagcaagtactgcgaggacctgttcggcgacctgctgctgaagcaggccctggagagccaccccctggagcccggcagagccctgcccagccccaacgacctgaagagaaagatcctgatcaagaacaagagactgaagcccgaggtggagaagaagcagctggaggccctgagaagcatgatggaggccggcgagagcgccagccccgccaacatcctggaggacgacaacgaggaggagatcgagagcgccgaccaggaggaggaggcccaccccgagttcaagttcggcaacgagctgagcgccgacgacctgggccacaaggaggccgtggccaacagcgtgaagaaggccagcgacgacctggagcacgagaacaacaagaagggcctggtgaccgtggaggacgagcaggcctggatggccagctacaagtacgtgggcgccaccaccaacatccacccctacctgagcaccatgatcaactacgcccagcccgtgaagttccagggcttccacgtggccgaggagagaaacatccactacaacatgagcagcttcaacgagagcgtgggcctgggctacctgaagacccacgccatcgagttcgtgaactacaacaagagacagatgagcagaatctaccccaagggcggcagagtggacagcagcaactacatgccccagatcttctggaacgccggctgccagatggtgagcctgaactaccagacccccgacctggccatgcagctgaaccagggcaagttcgagtacaacggcagctgcggctacctgctgaagcccgacttcatgagaagacccgacagaaccttcgaccccttcagcgagacccccgtggacggcgtgatcgccgccacctgcagcgtgcaggtgatcagcggccagttcctgagcgacaagaagatcggcacctacgtggaggtggacatgtacggcctgcccaccgacaccatcagaaaggagttcagaaccagaatggtgatgaacaacggcctgaaccccgtgtacaacgaggagagcttcgtgttcagaaaggtgatcctgcccgacctggccgtgctgagaatcgccgtgtacgacgacaacaacaagctgatcggccagagaatcctgcccctggacggcctgcaggccggctacagacacatcagcctgagaaacgagggcaacaagcccctgagcctgcccaccatcttctgcaacatcgtgctgaagacctacgtgcccgacggcttcggcgacatcgtggacgccctgagcgaccccaagaagttcctgagcatcaccgagaagagagccgaccagatgagagccatgggcatcgagaccagcgacatcgccgacgtgcccagcgacaccagcaagaacgacaagaagggcaaggccaacaccgccaaggccaacgtgaccccccagagcagcagcgagctgagacccaccaccaccgccgccctggccagcggcgtggaggccaagaagggcatcgagctgatcccccaggtgagaatcgaggacctgaagcagatgaaggcctacctgaagcacctgaagaagcagcagaaggagctgaacagcctgaagaagaagcacgccaaggagcacagcaccatgcagaagctgcactgcacccaggtggacaagatcgtggcccagtacgacaaggagaagagcacccacgagaagatcctggagaaggccatgaagaagaagggcggcagcaactgcctggagatgaagaaggagaccgagatcaagatccagaccctgaccagcgaccacaagagcaaggtgaaggagatcgtggcccagcacaccaaggagtggagcgagatgatcaacacccacagcgccgaggagcaggagatcagagacctgcacctgagccagcagtgcgagctgctgaagaagctgctgatcaacgcccacgagcagcagacccagcagctgaagctgagccacgacagagagagcaaggagatgagagcccaccaggccaagatcagcatggagaacagcaaggccatcagccaggacaagagcatcaagaacaaggccgagagagagagaagagtgagagagctgaacagcagcaacaccaagaagttcctggaggagagaaagagactggccatgaagcagagcaaggagatggaccagctgaagaaggtgcagctggagcacctggagttcctggagaagcagaacgagcaggccaaggagatgcagcagatggtgaagctggaggccgagatggacagaagacccgccaccgtggtgtag

SEQ ID NO: 93309 - DNA, 3528 bp, synthetic construct; identical to SEQ ID NO: 93306
  misc_feature 1..3528: note = Description of Artificial Sequence: Synthetic coding sequence
  source 1..3528: mol_type = other DNA

SEQ ID NO: 93310 - DNA, 3585 bp, synthetic construct; identical to SEQ ID NO: 93307
  misc_feature 1..3585: note = Description of Artificial Sequence: Synthetic coding sequence
  source 1..3585: mol_type = other DNA

SEQ ID NO: 93311 - DNA, 342 bp, synthetic construct
  misc_feature 1..342: note = Description of Artificial Sequence: Synthetic coding sequence
  source 1..342: mol_type = other DNA
atggccaagccctacgagttcaactggcagaaggaggtgcccagcttcctgcaggagggcgccgtgttcgacagatacgaggaggagagcttcgtgttcgagcccaactgcctgttcaaggtggacgagttcggcttcttcctgacctggagaagcgagggcaaggagggccaggtgctggagtgcagcctgatcaacagcatcagaagcggcgccatccccaaggaccccaagatcctggccgccctggaggccgtgggcaagagcgagaacgacctggagggcagaatcgtgtgcgtgtgcagcggcaccgacctggtgaacatcagcttcacctactag

SEQ ID NO: 93312 - DNA, 3072 bp, synthetic construct
  misc_feature 1..3072: note = Description of Artificial Sequence: Synthetic coding sequence
  source 1..3072: mol_type = other DNA
cccgtgagaagcatcaccagaaccttcgccagcggcaagaccgagaaggtgatcttccaggccctgaaggagctgggcctgcccagcggcaagaacgacgagatcgagcccaccgccttcagctacgagaagttctacgagctgacccagaagatctgccccagaaccgacatcgaggacctgttcaagaagatcaacggcgacaagaccgactacctgaccgtggaccagctggtgagcttcctgaacgagcaccagagagaccccagactgaacgagatcctgttccccttctacgacgccaagagagccatgcagatcatcgagatgtacgagcccgacgaggacctgaagaagaagggcctgatcagcagcgacggcttctgcagatacctgatgagcgacgagaacgcccccgtgttcctggacagactggagctgtaccaggagatggaccaccccctggcccactacttcatcagcagcagccacaacacctacctgaccggcagacagttcggcggcaagagcagcgtggagatgtacagacaggtgctgctggccggctgcagatgcgtggagctggactgctgggacggcaagggcgaggaccaggagcccatcatcacccacggcaaggccatgtgcaccgacatcctgttcaaggacgtgatccaggccatcaaggagaccgccttcgtgaccagcgagtaccccgtgatcctgagcttcgagaaccactgcagcaagtaccagcagtacaagatgagcaagtactgcgaggacctgttcggcgacctgctgctgaagcaggccctggagagccaccccctggagcccggcagagccctgcccagccccaacgacctgaagagaaagatcctgatcaagaacaagagactgaagcccgaggtggagaagaagcagctggaggccctgagaagcatgatggaggccggcgagagcgccagccccgccaacatcctggaggacgacaacgaggaggagatcgagagcgccgaccaggaggaggaggcccaccccgagttcaagttcggcaacgagctgagcgccgacgacctgggccacaaggaggccgtggccaacagcgtgaagaaggccagcgacgacctggagcacgagaacaacaagaagggcctggtgaccgtggaggacgagcaggcctggatggccagctacaagtacgtgggcgccaccaccaacatccacccctacctgagcaccatgatcaactacgcccagcccgtgaagttccagggcttccacgtggccgaggagagaaacatccactacaacatgagcagcttcaacgagagcgtgggcctgggctacctgaagacccacgccatcgagttcgtgaactacaacaagagacagatgagcagaatctaccccaagggcggcagagtggacagcagcaactacatgccccagatcttctggaacgccggctgccagatggtgagcctgaactaccagacccccgacctggccatgcagctgaaccagggcaagttcgagtacaacggcagctgcggctacctgctgaagcccgacttcatgagaagacccgacagaaccttcgaccccttcagcgagacccccgtggacggcgtgatcgccgccacctgcagcgtgcaggtgatcagcggccagttcctgagcgacaagaagatcggcacctacgtggaggtggacatgtacggcctgcccaccgacaccatcagaaaggagttcagaaccagaatggtgatgaacaacggcctgaaccccgtgtacaacgaggagagcttcgtgttcagaaaggtgatcctgcccgacctggccgtgctgagaatcgccgtgtacgacgacaacaacaagctgatcggccagagaatcctgcccctggacggcctgcaggccggctacagacacatcagcctgagaaacgagggcaacaagcccctgagcctgcccaccatcttctgcaacatcgtgctgaagacctacgtgcccgacggcttcggcgacatcgtggacgccctgagcgaccccaagaagttcctgagcatcaccgagaagagagccgaccagatgagagccatgggcatcgagaccagcgacatcgccgacgtgcccagcgacaccagcaagaacgacaagaagggcaaggccaacaccgccaaggccaacgtgaccccccagagcagcagcgagctgagacccaccaccaccgccgccctggccagcggcgtggaggccaagaagggcatcgagctgatcccccaggtgagaatcgaggacctgaagcagatgaaggcctacctgaagcacctgaagaagcagcagaaggagctgaacagcctgaagaagaagcacgccaaggagcacagcaccatgcagaagctgcactgcacccaggtggacaagatcgtggcccagtacgacaaggagaagagcacccacgagaagatcctggagaaggccatgaagaagaagggcggcagcaactgcctggagatgaagaaggagaccgagatcaagatccagaccctgaccagcgaccacaagagcaaggtgaaggagatcgtggcccagcacaccaaggagtggagcgagatgatcaacacccacagcgccgaggagcaggagatcagagacctgcacctgagccagcagtgcgagctgctgaagaagctgctgatcaacgcccacgagcagcagacccagcagctgaagctgagccacgacagagagagcaaggagatgagagcccaccaggccaagatcagcatggagaacagcaaggccatcagccaggacaagagcatcaagaacaaggccgagagagagagaagagtgagagagctgaacagcagcaacaccaagaagttcctggaggagagaaagagactggccatgaagcagagcaaggagatggaccagctgaagaaggtgcagctggagcacctggagttcctggagaagcagaacgagcaggccaaggagatgcagcagatggtgaagctggaggccgagatggacagaagacccgccaccgtggtgtag

SEQ ID NO: 93313 - DNA, 183 bp, synthetic construct
  misc_feature 1..183: note = Description of Artificial Sequence: Synthetic coding sequence
  source 1..183: mol_type = other DNA
atggccaagccctacgagttcaactggcagaaggaggtgcccagcttcctgcaggagggcgccgtgttcgacagatacgaggaggagagcttcgtgttcgagcccaactgcctgttcaaggtggacgagttcggcttcttcctgacctggagaagcgagggcaaggagggccaggtgctgtag

SEQ ID NO: 93314 - DNA, 246 bp, synthetic construct
  misc_feature 1..246: note = Description of Artificial Sequence: Synthetic coding sequence
  source 1..246: mol_type = other DNA
atggccaagccctacgagttcaactggcagaaggaggtgcccagcttcctgcaggagggcgccgtgttcgacagatacgaggaggagagcttcgtgttcgagcccaactgcctgttcaaggtggacgagttcggcttcttcctgacctggagaagcgagggcaaggagggccaggtgctggagtgcagcctgatcaacagcatcagaagcggcgccatccccaaggaccccaagatcctggcctag

SEQ ID NO: 93315 - DNA, 333 bp, synthetic construct
  misc_feature 1..333: note = Description of Artificial Sequence: Synthetic coding sequence
  source 1..333: mol_type = other DNA
atggccaagccctacgagttcaactggcagaaggaggtgcccagcttcctgcaggagggcgccgtgttcgacagatacgaggaggagagcttcgtgttcgagcccaactgcctgttcaaggtggacgagttcggcttcttcctgacctggagaagcgagggcaaggagggccaggtgctggagtgcagcctgatcaacagcatcagaagcggcgccatccccaaggaccccaagatcctggccgccctggaggccgtgggcaagagcgagaacgacctggagggcagaatcgtgtgcgtgtgcagcggcaccgacctggtgaacatcagctag

SEQ ID NO: 93316 - DNA, 2271 bp, synthetic construct
  misc_feature 1..2271: note = Description of Artificial Sequence: Synthetic coding sequence
  source 1..2271: mol_type = other DNA
atggacagcggcagagacttcctgaccctgcacggcctgcaggacgacgaggacctgcaggccctgctgaagggcagccagctgctgaaggtgaagagcagcagctggagaagagagagattctacaagctgcaggaggactgcaagaccatctggcaggagagcagaaaggtgatgagaacccccgagagccagctgttcagcatcgaggacatccaggaggtgagaatgggccacagaaccgagggcctggagaagttcgccagagacgtgcccgaggacagatgcttcagcatcgtgttcaaggaccagagaaacaccctggacctgatcgcccccagccccgccgacgcccagcactgggtgctgggcctgcacaagatcatccaccacagcggcagcatggaccagagacagaagctgcagcactggatccacagctgcctgagaaaggccgacaagaacaaggacaacaagatgagcttcaaggagctgcagaacttcctgaaggagctgaacatccaggtggacgacagctacgccagaaagatcttcagagagtgcgaccacagccagaccgacagcctggaggacgaggagatcgaggccttctacaagatgctgacccagagagtggagatcgacagaaccttcgccgaggccgccggcagcggcgagaccctgagcgtggaccagctggtgaccttcctgcagcaccagcagagagaggaggccgccggccccgccctggccctgagcctgatcgagagatacgagcccagcgagaccgccaaggcccagagacagatgaccaaggacggcttcctgatgtacctgctgagcgccgacggcagcgccttcagcctggcccacagaagagtgtaccaggacatgggccagcccctgagccactacctggtgagcagcagccacaacacctacctgctggaggaccagctggccggccccagcagcaccgaggcctacatcagagccctgtgcaagggctgcagatgcctggagctggactgctgggacggccccaaccaggagcccatcatctaccacggctacaccttcaccagcaagatcctgttctgcgacgtgctgagagccatcagagactacgccttcaaggccagcccctaccccgtgatcctgagcctggagaaccactgcaccctggagcagcagagagtgatggccagacacctgcacgccatcctgggccccatgctgctgaacagacccctggacggcgtgaccaacagcctgcccagccccgagcagctgaagggcaagatcctgctgaagggcaagaagctgggcggcctgctgccccccggcggcgagggcggccccgaggccaccgtggtgagcgacgaggacgaggccgccgagatggaggacgaggccgtgagaagcagagtgcagcacaagcccaaggaggacaagctgagactggcccaggagctgagcgacatggtgatctactgcaagagcgtgcacttcggcggcttcagcagccccggcacccccggccaggccttctacgagatggccagcttcagcgagaacagagccctgagactgctgcaggagagcggcaacggcttcgtgagacacaacgtgggccacctgagcagaatctaccccgccggctggagaaccgacagcagcaactacagccccgtggagatgtggaacggcggctgccagatcgtggccctgaacttccagacccccggccccgagatggacgtgtaccagggcagattccaggacaacggcgcctgcggctacgtgctgaagcccgccttcctgagagaccccaacggcaccttcaaccccagagccctggcccagggcccctggtgggccagaaagagactgaacatcagagtgatcagcggccagcagctgcccaaggtgaacaagaacaagaacagcatcgtggaccccaaggtgaccgtggagatccacggcgtgagcagagacgtggccagcagacagaccgccgtgatcaccaacaacggcttcaacccctggtgggacaccgagttcgccttcgaggtggtggtgcccgacctggccctgatcagattcctggtggaggactacgacgccagcagcaagaacgacttcatcggccagagcaccatccccctgaacagcctgaagcagggctacagacacgtgcacctgatgagcaagaacggcgaccagcaccccagcgccaccctgttcgtgaagatcagcctgcaggactag

SEQ ID NO: 93317 - DNA, 2334 bp, synthetic construct
  misc_feature 1..2334: note = Description of Artificial Sequence: Synthetic coding sequence
  source 1..2334: mol_type = other DNA
atgcagtgcctgggcatcagaagcagaagcagaagcagagagctgtacctgcaggagagaagcctgaaggtggccgccctgaacggcagaagactgggcctgcaggacgacgaggacctgcaggccctgctgaagggcagccagctgctgaaggtgaagagcagcagctggagaagagagagattctacaagctgcaggaggactgcaagaccatctggcaggagagcagaaaggtgatgagaacccccgagagccagctgttcagcatcgaggacatccaggaggtgagaatgggccacagaaccgagggcctggagaagttcgccagagacgtgcccgaggacagatgcttcagcatcgtgttcaaggaccagagaaacaccctggacctgatcgcccccagccccgccgacgcccagcactgggtgctgggcctgcacaagatcatccaccacagcggcagcatggaccagagacagaagctgcagcactggatccacagctgcctgagaaaggccgacaagaacaaggacaacaagatgagcttcaaggagctgcagaacttcctgaaggagctgaacatccaggtggacgacagctacgccagaaagatcttcagagagtgcgaccacagccagaccgacagcctggaggacgaggagatcgaggccttctacaagatgctgacccagagagtggagatcgacagaaccttcgccgaggccgccggcagcggcgagaccctgagcgtggaccagctggtgaccttcctgcagcaccagcagagagaggaggccgccggccccgccctggccctgagcctgatcgagagatacgagcccagcgagaccgccaaggcccagagacagatgaccaaggacggcttcctgatgtacctgctgagcgccgacggcagcgccttcagcctggcccacagaagagtgtaccaggacatgggccagcccctgagccactacctggtgagcagcagccacaacacctacctgctggaggaccagctggccggccccagcagcaccgaggcctacatcagagccctgtgcaagggctgcagatgcctggagctggactgctgggacggccccaaccaggagcccatcatctaccacggctacaccttcaccagcaagatcctgttctgcgacgtgctgagagccatcagagactacgccttcaaggccagcccctaccccgtgatcctgagcctggagaaccactgcaccctggagcagcagagagtgatggccagacacctgcacgccatcctgggccccatgctgctgaacagacccctggacggcgtgaccaacagcctgcccagccccgagcagctgaagggcaagatcctgctgaagggcaagaagctgggcggcctgctgccccccggcggcgagggcggccccgaggccaccgtggtgagcgacgaggacgaggccgccgagatggaggacgaggccgtgagaagcagagtgcagcacaagcccaaggaggacaagctgagactggcccaggagctgagcgacatggtgatctactgcaagagcgtgcacttcggcggcttcagcagccccggcacccccggccaggccttctacgagatggccagcttcagcgagaacagagccctgagactgctgcaggagagcggcaacggcttcgtgagacacaacgtgggccacctgagcagaatctaccccgccggctggagaaccgacagcagcaactacagccccgtggagatgtggaacggcggctgccagatcgtggccctgaacttccagacccccggccccgagatggacgtgtaccagggcagattccaggacaacggcgcctgcggctacgtgctgaagcccgccttcctgagagaccccaacggcaccttcaaccccagagccctggcccagggcccctggtgggccagaaagagactgaacatcagagtgatcagcggccagcagctgcccaaggtgaacaagaacaagaacagcatcgtggaccccaaggtgaccgtggagatccacggcgtgagcagagacgtggccagcagacagaccgccgtgatcaccaacaacggcttcaacccctggtgggacaccgagttcgccttcgaggtggtggtgcccgacctggccctgatcagattcctggtggaggactacgacgccagcagcaagaacgacttcatcggccagagcaccatccccctgaacagcctgaagcagggctacagacacgtgcacctgatgagcaagaacggcgaccagcaccccagcgccaccctgttcgtgaagatcagcctgcaggactag

SEQ ID NO: 93318 - DNA, 6909 bp, synthetic construct
  misc_feature 1..6909: note = Description of Artificial Sequence: Synthetic coding sequence
  source 1..6909: mol_type = other DNA
atgaccagcgaggagatgaccgccagcgtgctgatccccgtgacccagagaaaggtggtgagcgcccagagcgccgccgacgagagcagcgagaaggtgagcgacatcaacatcagcaaggcccacaccgtgagaagaagcggcgagaccagccacaccatcagccagctgaacaagctgaaggaggagcccagcggcagcaacctgcccaagatcctgagcatcgccagagagaagatcgtgagcgacgagaacagcaacgagaagtgctgggagaagatcatgcccgacagcgccaagaacctgaacatcaactgcaacaacatcctgagaaaccaccagcacggcctgccccagagacagttctacgagatgtacaacagcgtggccgaggaggacctgtgcctggagaccggcatccccagccccctggagagaaaggtgttccccggcatccagctggagctggacagacccagcatgggcatcagccccctgggcaaccagagcgtgatcatcgagaccggcagagcccaccccgacagcagaagagccgtgttccacttccactacgaggtggacagaagaatgagcgacaccttctgcaccctgagcgagaacctgatcctggacgactgcggcaactgcgtgcccctgcccggcggcgaggagaagcagaagaagaactacgtggcctacacctgcaagctgatggagctggccaagaactgcgacaacaagaacgagcagctgcagtgcgaccactgcgacaccctgaacgacaagtacttctgcttcgagggcagctgcgagaaggtggacatggtgtacagcggcgacagcttctgcagaaaggacttcaccgacagccaggccgccaagaccttcctgagccacttcgaggacttccccgacaactgcgacgacgtggaggaggacgccttcaagagcaagaaggagagaagcaccctgctggtgagaagattctgcaagaacgacagagaggtgaagaagagcgtgtacaccggcaccagagccatcgtgagaaccctgcccagcggccacatcggcctgaccgcctggagctacatcgaccagaagagaaacggccccctgctgccctgcggcagagtgatggagccccccagcaccgtggagatcagacaggacggcagccagagactgagcgaggcccagtggtaccccatctacaacgccgtgagaagagaggagaccgagaacaccgtgggcagcctgctgcacttcctgaccaagctgcccgccagcgagaccgcccacggcagaatcagcgtgggcccctgcctgaagcagtgcgtgagagacaccgtgtgcgagtacagagccaccctgcagagaaccagcatcagccagtacatcaccggcagcctgctggaggccaccaccagcctgggcgccagaagcggcctgctgagcaccttcggcggcagcaccggcagaatgatgctgaaggagagacagcccggccccagcgtggccaacagcaacgccctgcccagcagcagcgccggcatcagcaaggagctgatcgacctgcagcccctgatccagttccccgaggaggtggccagcatcctgatggagcaggagcagaccatctacagaagagtgctgcccgtggactacctgtgcttcctgaccagagacctgggcacccccgagtgccagagcagcctgccctgcctgaaggccagcatcagcgccagcatcctgaccacccagaacggcgagcacaacgccctggaggacctggtgatgagattcaacgaggtgagcagctgggtgacctggctgatcctgaccgccggcagcatggaggagaagagagaggtgttcagctacctggtgcacgtggccaagtgctgctggaacatgggcaactacaacgccgtgatggagttcctggccggcctgagaagcagaaaggtgctgaagatgtggcagttcatggaccagagcgacatcgagaccatgagaagcctgaaggacgccatggcccagcacgagagcagctgcgagtacagaaaggtggtgaccagagccctgcacatccccggctgcaaggtggtgcccttctgcggcgtgttcctgaaggagctgtgcgaggtgctggacggcgccagcggcctgatgaagctgtgccccagatacaacagccaggaggagaccctggagttcgtggccgactacagcggccaggacaacttcctgcagagagtgggccagaacggcctgaagaacagcgagaaggagagcaccgtgaacagcatcttccaggtgatcagaagctgcaacagaagcctggagaccgacgaggaggacagccccagcgagggcaacagcagcagaaagagcagcctgaaggacaagagcagatggcagttcatcatcggcgacctgctggacagcgacaacgacatcttcgagcagagcaaggagtacgacagccacggcagcgaggacagccagaaggccttcgaccacggcaccgagctgatcccctggtacgtgctgagcatccaggccgacgtgcaccagttcctgctgcagggcgccaccgtgatccactacgaccaggacacccacctgagcgccagatgcttcctgcagctgcagcccgacaacagcaccctgacctgggtgaagcccaccaccgccagccccgccagcagcaaggccaagctgggcgtgctgaacaacaccgccgagcccggcaagttccccctgctgggcaacgccggcctgagcagcctgaccgagggcgtgctggacctgttcgccgtgaaggccgtgtacatgggccaccccggcatcgacatccacaccgtgtgcgtgcagaacaagctgggcagcatgttcctgagcgagaccggcgtgaccctgctgtacggcctgcagaccaccgacaacagactgctgcacttcgtggcccccaagcacaccgccaagatgctgttcagcggcctgctggagctgaccagagccgtgagaaagatgagaaagttccccgaccagagacagcagtggctgagaaagcagtacgtgagcctgtaccaggaggacggcagatacgagggccccaccctggcccacgccgtggagctgttcggcggcagaagatggagcgccagaaaccccagccccggcaccagcgccaagaacgccgagaagcccaacatgcagagaaacaacaccctgggcatcagcaccaccaagaagaagaagaagatcctgatgagaggcgagagcggcgaggtgaccgacgacgagatggccaccagaaaggccaagatgcacaaggagtgcagaagcagaagcggcagcgacccccaggacatcaacgagcaggaggagagcgaggtgaacgccatcgccaacccccccaaccccctgcccagcagaagagcccacagcctgaccaccgccggcagccccaacctggccgccggcaccagcagccccatcagacccgtgagcagccccgtgctgagcagcagcaacaagagccccagcagcgcctggagcagcagcagctggcacggcagaatcaagggcggcatgaagggcttccagagcttcatggtgagcgacagcaacatgagcttcgtggagttcgtggagctgttcaagagcttcagcgtgagaagcagaaaggacctgaaggacctgttcgacgtgtacgccgtgccctgcaacagaagcggcagcgagagcgcccccctgtacaccaacctgaccatcgacgagaacaccagcgacctgcagcccgacctggacctgctgaccagaaacgtgagcgacctgggcctgttcatcaagagcaagcagcagctgagcgacaaccagagacagatcagcgacgccatcgccgccgccagcatcgtgaccaacggcaccggcatcgagagcaccagcctgggcatcttcggcgtgggcatcctgcagctgaacgacttcctggtgaactgccagggcgagcactgcacctacgacgagatcctgagcatcatccagaagttcgagcccagcatcagcatgtgccaccagggcctgatgagcttcgagggcttcgccagattcctgatggacaaggagaacttcgccagcaagaacgacgagagccaggagaacatcaaggagctgcagctgcccctgagctactactacatcgagagcagccacaacacctacctgaccggccaccagctgaagggcgagagcagcgtggagctgtacagccaggtgctgctgcagggctgcagaagcgtggagctggactgctgggacggcgacgacggcatgcccatcatctaccacggccacaccctgaccaccaagatccccttcaaggaggtggtggaggccatcgacagaagcgccttcatcaacagcgacctgcccatcatcatcagcatcgagaaccactgcagcctgccccagcagagaaagatggccgagatcttcaagaccgtgttcggcgagaagctggtgaccaagttcctgttcgagaccgacttcagcgacgaccccatgctgcccagccccgaccagctgagaaagaaggtgctgctgaagaacaagaagctgaaggcccaccagacccccgtggacatcctgaagcagaaggcccaccagctggccagcatgcaggtgcaggcctacaacggcggcaacgccaaccccagacccgccaacaacgaggaggaggaggacgaggaggacgagtacgactacgactacgagagcctgagcgacgacaacatcctggaggacagacccgagaacaagagctgcaacgacaagctgcagttcgagtacaacgaggagatccccaagagaatcaagaaggccgacaacagcgcctgcaacaagggcaaggtgtacgacatggagctgggcgaggagttctacctggaccagaacaagaaggagagcagacagatcgcccccgagctgagcgacctggtgatctactgccaggccgtgaagttccccggcctgagcaccctgaacgccagcggcagcagcagaggcaaggagagaaagagcagaaagagcatcttcggcaacaaccccggcagaatgagccccggcgagaccgccagcttcaacaagaccagcggcaagagcagctgcgagggcatcagacagacctgggaggagagcagcagccccctgaaccccaccaccagcctgagcgccatcatcagaacccccaagtgctaccacatcagcagcctgaacgagaacgccgccaagagactgtgcagaagatacagccagaagctgacccagcacaccgcctgccagctgctgagaacctaccccgccgccaccagaatcgacagcagcaaccccaaccccctgatgttctggctgcacggcatccagctggtggccctgaactaccagaccgacgacctgcccctgcacctgaacgccgccatgttcgaggccaacggcggctgcggctacgtgctgaagccccccgtgctgtgggacaagaactgccccatgtaccagaagttcagccccctggagagagacctggacagcatggaccccgccgtgtacagcctgaccatcgtgagcggccagaacgtgtgccccagcaacagcatgggcagcccctgcatcgaggtggacgtgctgggcatgcccctggacagctgccacttcagaaccaagcccatccacagaaacaccctgaaccccatgtggaacgagcagttcctgttccacgtgcacttcgaggacctggtgttcctgagattcgccgtggtggagaacaacagcagcgccgtgaccgcccagagaatcatccccctgaaggccctgaagagaggctacagacacctgcagctgagaaacctgcacaacgaggtgctggagatcagcagcctgttcatcaacagcagaagaatggaggagaacagcagcggcaacaccatgagcgccagcagcatgttcaacaccgaggagagaaagtgcctgcagacccacagagtgaccgtgcacggcgtgcccggccccgagcccttcaccgtgttcaccatcaacggcggcaccaaggccaagcagctgctgcagcagatcctgaccaacgagcaggacatcaagcccgtgaccaccgactacttcctgatggaggagaagtacttcatcagcaaggagaagaacgagtgcagaaagcagcccttccagagagccatcggccccgaggaggagatcatgcagatcctgagcagctggttccccgaggagggctacatgggcagaatcgtgctgaagacccagcaggagaacctggaggagaagaacatcgtgcaggacgacaaggaggtgatcctgagcagcgaggaggagagcttcttcgtgcaggtgcacgacgtgagccccgagcagcccagaaccgtgatcaaggcccccagagtgagcaccgcccaggacgtgatccagcagaccctgtgcaaggccaagtacagctacagcatcctgagcaaccccaaccccagcgactacgtgctgctggaggaggtggtgaaggacaccaccaacaagaagaccaccacccccaagagcagccagagagtgctgctggaccaggagtgcgtgttccaggcccagagcaagtggaagggcgccggcaagttcatcctgaagctgaaggagcaggtgcaggccagcagagaggacaagaagaagggcatcagcttcgccagcgagctgaagaagctgaccaagagcaccaagcagcccagaggcctgaccagccccagccagctgctgaccagcgagagcatccagaccaaggaggagaagcccgtgggcggcctgagcagcagcgacaccatggactacagacagtag

SEQ ID NO: 93319 - DNA, 5985 bp, synthetic construct
  misc_feature 1..5985: note = Description of Artificial Sequence: Synthetic coding sequence
  source 1..5985: mol_type = other DNA
atggtgagcgagggcagcgccgccggcagagacttcgccggcatggaggaggtgagacagctgcacgtgagattctgcaagggcatcaagatctggcaccaggcctggttcctgtgcagcctgctgggcagagagccccaggagagagaggccggctgccagctgtggctgtgcaccctgagcgccgtgctgaaggtgggctggctgttccccctgagcgaggtgcccaacttcaccctgctgaaggacggctgcggctgctggagactgaaggaggaccagatctacaacgccgtgagaagagaggagaccgagaacaccgtgggcagcctgctgcacttcctgaccaagctgcccgccagcgagaccgcccacggcagaatcagcgtgggcccctgcctgaagcagtgcgtgagagacaccgtgtgcgagtacagagccaccctgcagagaaccagcatcagccagtacatcaccggcagcctgctggaggccaccaccagcctgggcgccagaagcggcctgctgagcaccttcggcggcagcaccggcagaatgatgctgaaggagagacagcccggccccagcgtggccaacagcaacgccctgcccagcagcagcgccggcatcagcaaggagctgatcgacctgcagcccctgatccagttccccgaggaggtggccagcatcctgatggagcaggagcagaccatctacagaagagtgctgcccgtggactacctgtgcttcctgaccagagacctgggcacccccgagtgccagagcagcctgccctgcctgaaggccagcatcagcgccagcatcctgaccacccagaacggcgagcacaacgccctggaggacctggtgatgagattcaacgaggtgagcagctgggtgacctggctgatcctgaccgccggcagcatggaggagaagagagaggtgttcagctacctggtgcacgtggccaagtgctgctggaacatgggcaactacaacgccgtgatggagttcctggccggcctgagaagcagaaaggtgctgaagatgtggcagttcatggaccagagcgacatcgagaccatgagaagcctgaaggacgccatggcccagcacgagagcagctgcgagtacagaaaggtggtgaccagagccctgcacatccccggctgcaaggtggtgcccttctgcggcgtgttcctgaaggagctgtgcgaggtgctggacggcgccagcggcctgatgaagctgtgccccagatacaacagccaggaggagaccctggagttcgtggccgactacagcggccaggacaacttcctgcagagagtgggccagaacggcctgaagaacagcgagaaggagagcaccgtgaacagcatcttccaggtgatcagaagctgcaacagaagcctggagaccgacgaggaggacagccccagcgagggcaacagcagcagaaagagcagcctgaaggacaagagcagatggcagttcatcatcggcgacctgctggacagcgacaacgacatcttcgagcagagcaaggagtacgacagccacggcagcgaggacagccagaaggccttcgaccacggcaccgagctgatcccctggtacgtgctgagcatccaggccgacgtgcaccagttcctgctgcagggcgccaccgtgatccactacgaccaggacacccacctgagcgccagatgcttcctgcagctgcagcccgacaacagcaccctgacctgggtgaagcccaccaccgccagccccgccagcagcaaggccaagctgggcgtgctgaacaacaccgccgagcccggcaagttccccctgctgggcaacgccggcctgagcagcctgaccgagggcgtgctggacctgttcgccgtgaaggccgtgtacatgggccaccccggcatcgacatccacaccgtgtgcgtgcagaacaagctgggcagcatgttcctgagcgagaccggcgtgaccctgctgtacggcctgcagaccaccgacaacagactgctgcacttcgtggcccccaagcacaccgccaagatgctgttcagcggcctgctggagctgaccagagccgtgagaaagatgagaaagttccccgaccagagacagcagtggctgagaaagcagtacgtgagcctgtaccaggaggacggcagatacgagggccccaccctggcccacgccgtggagctgttcggcggcagaagatggagcgccagaaaccccagccccggcaccagcgccaagaacgccgagaagcccaacatgcagagaaacaacaccctgggcatcagcaccaccaagaagaagaagaagatcctgatgagaggcgagagcggcgaggtgaccgacgacgagatggccaccagaaaggccaagatgcacaaggagtgcagaagcagaagcggcagcgacccccaggacatcaacgagcaggaggagagcgaggtgaacgccatcgccaacccccccaaccccctgcccagcagaagagcccacagcctgaccaccgccggcagccccaacctggccgccggcaccagcagccccatcagacccgtgagcagccccgtgctgagcagcagcaacaagagccccagcagcgcctggagcagcagcagctggcacggcagaatcaagggcggcatgaagggcttccagagcttcatggtgagcgacagcaacatgagcttcgtggagttcgtggagctgttcaagagcttcagcgtgagaagcagaaaggacctgaaggacctgttcgacgtgtacgccgtgccctgcaacagaagcggcagcgagagcgcccccctgtacaccaacctgaccatcgacgagaacaccagcgacctgcagcccgacctggacctgctgaccagaaacgtgagcgacctgggcctgttcatcaagagcaagcagcagctgagcgacaaccagagacagatcagcgacgccatcgccgccgccagcatcgtgaccaacggcaccggcatcgagagcaccagcctgggcatcttcggcgtgggcatcctgcagctgaacgacttcctggtgaactgccagggcgagcactgcacctacgacgagatcctgagcatcatccagaagttcgagcccagcatcagcatgtgccaccagggcctgatgagcttcgagggcttcgccagattcctgatggacaaggagaacttcgccagcaagaacgacgagagccaggagaacatcaaggagctgcagctgcccctgagctactactacatcgagagcagccacaacacctacctgaccggccaccagctgaagggcgagagcagcgtggagctgtacagccaggtgctgctgcagggctgcagaagcgtggagctggactgctgggacggcgacgacggcatgcccatcatctaccacggccacaccctgaccaccaagatccccttcaaggaggtggtggaggccatcgacagaagcgccttcatcaacagcgacctgcccatcatcatcagcatcgagaaccactgcagcctgccccagcagagaaagatggccgagatcttcaagaccgtgttcggcgagaagctggtgaccaagttcctgttcgagaccgacttcagcgacgaccccatgctgcccagccccgaccagctgagaaagaaggtgctgctgaagaacaagaagctgaaggcccaccagacccccgtggacatcctgaagcagaaggcccaccagctggccagcatgcaggtgcaggcctacaacggcggcaacgccaaccccagacccgccaacaacgaggaggaggaggacgaggaggacgagtacgactacgactacgagagcctgagcgacgacaacatcctggaggacagacccgagaacaagagctgcaacgacaagctgcagttcgagtacaacgaggagatccccaagagaatcaagaaggccgacaacagcgcctgcaacaagggcaaggtgtacgacatggagctgggcgaggagttctacctggaccagaacaagaaggagagcagacagatcgcccccgagctgagcgacctggtgatctactgccaggccgtgaagttccccggcctgagcaccctgaacgccagcggcagcagcagaggcaaggagagaaagagcagaaagagcatcttcggcaacaaccccggcagaatgagccccggcgagaccgccagcttcaacaagaccagcggcaagagcagctgcgagggcatcagacagacctgggaggagagcagcagccccctgaaccccaccaccagcctgagcgccatcatcagaacccccaagtgctaccacatcagcagcctgaacgagaacgccgccaagagactgtgcagaagatacagccagaagctgacccagcacaccgcctgccagctgctgagaacctaccccgccgccaccagaatcgacagcagcaaccccaaccccctgatgttctggctgcacggcatccagctggtggccctgaactaccagaccgacgacctgcccctgcacctgaacgccgccatgttcgaggccaacggcggctgcggctacgtgctgaagccccccgtgctgtgggacaagaactgccccatgtaccagaagttcagccccctggagagagacctggacagcatggaccccgccgtgtacagcctgaccatcgtgagcggccagaacgtgtgccccagcaacagcatgggcagcccctgcatcgaggtggacgtgctgggcatgcccctggacagctgccacttcagaaccaagcccatccacagaaacaccctgaaccccatgtggaacgagcagttcctgttccacgtgcacttcgaggacctggtgttcctgagattcgccgtggtggagaacaacagcagcgccgtgaccgcccagagaatcatccccctgaaggccctgaagagaggctacagacacctgcagctgagaaacctgcacaacgaggtgctggagatcagcagcctgttcatcaacagcagaagaatggaggagaacagcagcggcaacaccatgagcgccagcagcatgttcaacaccgaggagagaaagtgcctgcagacccacagagtgaccgtgcacggcgtgcccggccccgagcccttcaccgtgttcaccatcaacggcggcaccaaggccaagcagctgctgcagcagatcctgaccaacgagcaggacatcaagcccgtgaccaccgactacttcctgatggaggagaagtacttcatcagcaaggagaagaacgagtgcagaaagcagcccttccagagagccatcggccccgaggaggagatcatgcagatcctgagcagctggttccccgaggagggctacatgggcagaatcgtgctgaagacccagcaggagaacctggaggagaagaacatcgtgcaggacgacaaggaggtgatcctgagcagcgaggaggagagcttcttcgtgcaggtgcacgacgtgagccccgagcagcccagaaccgtgatcaaggcccccagagtgagcaccgcccaggacgtgatccagcagaccctgtgcaaggccaagtacagctacagcatcctgagcaaccccaaccccagcgactacgtgctgctggaggaggtggtgaaggacaccaccaacaagaagaccaccacccccaagagcagccagagagtgctgctggaccaggagtgcgtgttccaggcccagagcaagtggaagggcgccggcaagttcatcctgaagctgaaggagcaggtgcaggccagcagagaggacaagaagaagggcatcagcttcgccagcgagctgaagaagctgaccaagagcaccaagcagcccagaggcctgaccagccccagccagctgctgaccagcgagagcatccagaccaaggaggagaagcccgtgggcggcctgagcagcagcgacaccatggactacagacagtag

SEQ ID NO: 93320 - DNA, 6939 bp, synthetic construct
  misc_feature 1..6939: note = Description of Artificial Sequence: Synthetic coding sequence
  source 1..6939: mol_type = other DNA
atgaccagcgaggagatgaccgccagcgtgctgatccccgtgacccagagaaaggtggtgagcgcccagagcgccgccgacgagagcagcgagaaggtgagcgacatcaacatcagcaaggcccacaccgtgagaagaagcggcgagaccagccacaccatcagccagctgaacaagctgaaggaggagcccagcggcagcaacctgcccaagatcctgagcatcgccagagagaagatcgtgagcgacgagaacagcaacgagaagtgctgggagaagatcatgcccgacagcgccaagaacctgaacatcaactgcaacaacatcctgagaaaccaccagcacggcctgccccagagacagttctacgagatgtacaacagcgtggccgaggaggacctgtgcctggagaccggcatccccagccccctggagagaaaggtgttccccggcatccagctggagctggacagacccagcatgggcatcagccccctgggcaaccagagcgtgatcatcgagaccggcagagcccaccccgacagcagaagagccgtgttccacttccactacgaggtggacagaagaatgagcgacaccttctgcaccctgagcgagaacctgatcctggacgactgcggcaactgcgtgcccctgcccggcggcgaggagaagcagaagaagaactacgtggcctacacctgcaagctgatggagctggccaagaactgcgacaacaagaacgagcagctgcagtgcgaccactgcgacaccctgaacgacaagtacttctgcttcgagggcagctgcgagaaggtggacatggtgtacagcggcgacagcttctgcagaaaggacttcaccgacagccaggccgccaagaccttcctgagccacttcgaggacttccccgacaactgcgacgacgtggaggaggacgccttcaagagcaagaaggagagaagcaccctgctggtgagaagattctgcaagaacgacagagaggtgaagaagagcgtgtacaccggcaccagagccatcgtgagaaccctgcccagcggccacatcggcctgaccgcctggagctacatcgaccagaagagaaacggccccctgctgccctgcggcagagtgatggagccccccagcaccgtggagatcagacaggacggcagccagagactgagcgaggcccagtggtaccccatctacaacgccgtgagaagagaggagaccgagaacaccgtgggcagcctgctgcacttcctgaccaagctgcccgccagcgagaccgcccacggcagaatcagcgtgggcccctgcctgaagcagtgcgtgagagacaccgtgtgcgagtacagagccaccctgcagagaaccagcatcagccagtacatcaccggcagcctgctggaggccaccaccagcctgggcgccagaagcggcctgctgagcaccttcggcggcagcaccggcagaatgatgctgaaggagagacagcccggccccagcgtggccaacagcaacgccctgcccagcagcagcgccggcatcagcaaggagctgatcgacctgcagcccctgatccagttccccgaggaggtggccagcatcctgatggagcaggagcagaccatctacagaagagtgctgcccgtggactacctgtgcttcctgaccagagacctgggcacccccgagtgccagagcagcctgccctgcctgaaggccagcatcagcgccagcatcctgaccacccagaacggcgagcacaacgccctggaggacctggtgatgagattcaacgaggtgagcagctgggtgacctggctgatcctgaccgccggcagcatggaggagaagagagaggtgttcagctacctggtgcacgtggccaagtgctgctggaacatgggcaactacaacgccgtgatggagttcctggccggcctgagaagcagaaaggtgctgaagatgtggcagttcatggaccagagcgacatcgagaccatgagaagcctgaaggacgccatggcccagcacgagagcagctgcgagtacagaaaggtggtgaccagagccctgcacatccccggctgcaaggtggtgcccttctgcggcgtgttcctgaaggagctgtgcgaggtgctggacggcgccagcggcctgatgaagctgtgccccagatacaacagccaggaggagaccctggagttcgtggccgactacagcggccaggacaacttcctgcagagagtgggccagaacggcctgaagaacagcgagaaggagagcaccgtgaacagcatcttccaggtgatcagaagctgcaacagaagcctggagaccgacgaggaggacagccccagcgagggcaacagcagcagaaagagcagcctgaaggacaagagcagatggcagttcatcatcggcgacctgctggacagcgacaacgacatcttcgagcagagcaaggagtacgacagccacggcagcgaggacagccagaaggccttcgaccacggcaccgagctgatcccctggtacgtgctgagcatccaggccgacgtgcaccagttcctgctgcagggcgccaccgtgatccactacgaccaggacacccacctgagcgccagatgcttcctgcagctgcagcccgacaacagcaccctgacctgggtgaagcccaccaccgccagccccgccagcagcaaggccaagctgggcgtgctgaacaacaccgccgagcccggcaagttccccctgctgggcaacgccggcctgagcagcctgaccgagggcgtgctggacctgttcgccgtgaaggccgtgtacatgggccaccccggcatcgacatccacaccgtgtgcgtgcagaacaagctgggcagcatgttcctgagcgagaccggcgtgaccctgctgtacggcctgcagaccaccgacaacagactgctgcacttcgtggcccccaagcacaccgccaagatgctgttcagcggcctgctggagctgaccagagccgtgagaaagatgagaaagttccccgaccagagacagcagtggctgagaaagcagtacgtgagcctgtaccaggaggacggcagatacgagggccccaccctggcccacgccgtggagctgttcggcggcagaagatggagcgccagaaaccccagccccggcaccagcgccaagaacgccgagaagcccaacatgcagagaaacaacaccctgggcatcagcaccaccaagaagaagaagaagatcctgatgagaggcgagagcggcgaggtgaccgacgacgagatggccaccagaaaggccaagatgcacaaggagtgcagaagcagaagcggcagcgacccccaggacatcaacgagcaggaggagagcgaggtgaacgccatcgccaacccccccaaccccctgcccagcagaagagcccacagcctgaccaccgccggcagccccaacctggccgccggcaccagcagccccatcagacccgtgagcagccccgtgctgagcagcagcaacaagagccccagcagcgcctggagcagcagcagctggcacggcagaatcaagggcggcatgaagggcttccagagcttcatggtgagcgacagcaacatgagcttcgtggagttcgtggagctgttcaagagcttcagcgtgagaagcagaaaggacctgaaggacctgttcgacgtgtacgccgtgccctgcaacagaagcggcagcgagagcgcccccctgtacaccaacctgaccatcgacgagaacaccagcgacctgcagcccgacctggacctgctgaccagaaacgtgagcgacctgggcctgttcatcaagagcaagcagcagctgagcgacaaccagagacagatcagcgacgccatcgccgccgccagcatcgtgaccaacggcaccggcatcgagagcaccagcctgggcatcttcggcgtgggcatcctgcagctgaacgacttcctggtgaactgccagggcgagcactgcacctacgacgagatcctgagcatcatccagaagttcgagcccagcatcagcatgtgccaccagggcctgatgagcttcgagggcttcgccagattcctgatggacaaggagaacttcgccagcaagaacgacgagagccaggagaacatcaaggagctgcagctgcccctgagctactactacatcgagagcagccacaacacctacctgaccggccaccagctgaagggcgagagcagcgtggagctgtacagccaggtgctgctgcagggctgcagaagcgtggagctggactgctgggacggcgacgacggcatgcccatcatctaccacggccacaccctgaccaccaagatccccttcaaggaggtggtggaggccatcgacagaagcgccttcatcaacagcgacctgcccatcatcatcagcatcgagaaccactgcagcctgccccagcagagaaagatggccgagatcttcaagaccgtgttcggcgagaagctggtgaccaagttcctgttcgagaccgacttcagcgacgaccccatgctgcccagccccgaccagctgagaaagaaggtgctgctgaagaacaagaagctgaaggcccaccagacccccgtggacatcctgaagcagaaggcccaccagctggccagcatgcaggtgcaggcctacaacggcggcaacgccaaccccagacccgccaacaacgaggaggaggaggacgaggaggacgagtacgactacgactacgagagcctgagcgacgacaacatcctggaggacagacccgagaacaagagctgcaacgacaagctgcagttcgagtacaacgaggagatccccaagagaatcaagaaggccgacaacagcgcctgcaacaagggcaaggtgtacgacatggagctgggcgaggagttctacctggaccagaacaagaaggagagcagacagatcgcccccgagctgagcgacctggtgatctactgccaggccgtgaagttccccggcctgagcaccctgaacgccagcggcagcagcagaggcaaggagagaaagagcagaaagagcatcttcggcaacaaccccggcagaatgagccccggcgagaccgccagcttcaacaagaccagcggcaagagcagctgcgagggcatcagacagacctgggaggagagcagcagccccctgaaccccaccaccagcctgagcgccatcatcagaacccccaagtgctaccacatcagcagcctgaacgagaacgccgccaagagactgtgcagaagatacagccagaagctgacccagcacaccgcctgccagctgctgagaacctaccccgccgccaccagaatcgacagcagcaaccccaaccccctgatgttctggctgcacggcatccagctggtggccctgaactaccagaccgacgacctgcccctgcacctgaacgccgccatgttcgaggccaacggcggctgcggctacgtgctgaagccccccgtgctgtgggacaagaactgccccatgtaccagaagttcagccccctggagagagacctggacagcatggaccccgccgtgtacagcctgaccatcgtgagcggccagaacgtgtgccccagcaacagcatgggcagcccctgcatcgaggtggacgtgctgggcatgcccctggacagctgccacttcagaaccaagcccatccacagaaacaccctgaaccccatgtggaacgagcagttcctgttccacgtgcacttcgaggacctggtgttcctgagattcgccgtggtggagaacaacagcagcgccgtgaccgcccagagaatcatccccctgaaggccctgaagagaggctacagacacctgcagctgagaaacctgcacaacgaggtgctggagatcagcagcctgttcatcaacagcagaagaatggaggagaacagcagcggcaacaccatgagcgccagcagcatgttcaacaccgaggagagaaagtgcctgcagacccacagagtgaccgtgcacggcgtgcccggccccgagcccttcaccgtgttcaccatcaacggcggcaccaaggccaagcagctgctgcagcagatcctgaccaacgagcaggacatcaagcccgtgaccaccgactacttcctgatggaggagaagtacttcatcagcaaggagaagaacgagtgcagaaagcagcccttccagagagccatcggccccgaggaggagatcatgcagatcctgagcagctggttccccgaggagggctacatgggcagaatcgtgctgaagacccagcaggagaacctggaggagaagaacatcgtgcaggacgacaaggaggtgatcctgagcagcgaggaggagagcttcttcgtgcaggtgcacgacgtgagccccgagcagcccagaaccgtgatcaaggcccccagagtgagcaccgcccaggacgtgatccagcagaccctgtgcaaggccaagtacagctacagcatcctgagcaaccccaaccccagcgactacgtgctgctggaggaggtggtgaaggacaccaccaacaagaagaccaccacccccaagagcagccagagagtgctgctggaccaggagtgcgtgttccaggcccagagcaagtggaagggcgccggcaagttcatcctgaagctgaaggagcaggtgcaggccagcagagaggacaagaagaagggcatcagcttcgccagcgagctgaagaagctgaccaagagcaccaagcagcccagaggcctgaccagccccagccagctgctgaccagcgagagcatccagaccaaggaggagaagcccgtgggcggcctgagcagcagcgacaccatggactacagacaggtgaagatcttcaagcaggaggtgaaggagtag

SEQ ID NO: 93321 - DNA, 5985 bp, synthetic construct; identical to SEQ ID NO: 93319
  misc_feature 1..5985: note = Description of Artificial Sequence: Synthetic coding sequence
  source 1..5985: mol_type = other DNA

SEQ ID NO: 93322 - DNA, 4968 bp, synthetic construct
  misc_feature 1..4968: note = Description of Artificial Sequence: Synthetic coding sequence
  source 1..4968: mol_type = other DNA
atgagcgtgatgcagagcggcacccagatgatcaagctgaagagaggcaccaagggcctggtgagactgttctacctggacgagcacagaaccagactgagatggagacccagcagaaagagcgagaaggccaagatcctgatcgacagcatctacaaggtgaccgagggcagacagagcgagatcttccacagacaggccgagggcaacttcgaccccagctgctgcttcaccatctaccacggcaaccacatggagagcctggacctgatcaccagcaaccccgaggaggccagaacctggatcaccggcctgaagtacctgatggccggcatcagcgacgaggacagcctggccaagagacagagaacccacgaccagtgggtgaagcagaccttcgaggaggccgacaagaacggcgacggcctgctgaacatcgaggagatccaccagctgatgcacaagctgaacgtgaacctgcccagaagaaaggtgagacagatgttccaggaggccgacaccgacgagaaccagggcaccctgaccttcgaggagttctgcgtgttctacaagatgatgagcctgagaagagacctgtacctgctgctgctgagctacagcgacaagaaggaccacctgaccgtggaggagctggcccagttcctgaaggtggagcagaagatgaacaacgtgaccaccgactactgcctggacatcatcaagaagttcgaggtgagcgaggagaacaaggtgaagaacgtgctgggcatcgagggcttcaccaacttcatgagaagccccgcctgcgacatcttcaaccccctgcaccacgaggtgtaccaggacatggaccagcccctgtgcaactactacatcgccagcagccacaacacctacctgaccggcgaccagctgctgagccagagcaaggtggacatgtacgccagagtgctgcaggagggctgcagatgcgtggaggtggactgctgggacggccccgacggcgagcccgtggtgcaccacggctacaccctgaccagcaagatcctgttcagagacgtggtggagaccatcaacaagcacgccttcgtgaagaacgagttccccgtgatcctgagcatcgagaaccactgcagcatccagcagcagagaaagatcgcccagtacctgaagggcatcttcggcgacaagctggacctgagcagcgtggacaccggcgagtgcaagcagctgcccagcccccagagcctgaagggcaagatcctggtgaagggcaagaagctgccctaccacctgggcgacgacgccgaggagggcgaggtgagcgacgaggacagcgccgacgagatcgaggacgagtgcaagttcaagctgcactacagcaacggcaccaccgagcaccaggtggagagcttcatcagaaagaagctggagagcctgctgaaggagagccagatcagagacaaggaggaccccgacagcttcaccgtgagagccctgctgaaggccacccacgagggcctgaacgcccacctgaagcagagccccgacgtgaaggagagcggcaagaagagccacggcagaagcctgatgaccaacttcggcaagcacaagaagaccaccaagagcagaagcaagagctacagcaccgacgacgaggaggacacccagcagagcaccggcaaggagggcggccagctgtacagactgggcagaagaagaaagaccatgaagctgtgcagagagctgagcgacctggtggtgtacaccaacagcgtggccgcccaggacatcgtggacgacggcaccaccggcaacgtgctgagcttcagcgagaccagagcccaccaggtggtgcagcagaagagcgagcagttcatgatctacaaccagaagcagctgaccagaatctaccccagcgcctacagaatcgacagcagcaacttcaaccccctgccctactggaacgccggctgccagctggtggccctgaactaccagagcgagggcagaatgatgcagctgaacagagccaagttcaaggccaacggcaactgcggctacgtgctgaagccccagcagatgtgcaagggcaccttcaaccccttcagcggcgaccccctgcccgccaaccccaagaagcagctgatcctgaaggtgatcagcggccagcagctgcccaagccccccgacagcatgttcggcgacagaggcgagatcatcgaccccttcgtggaggtggagatcatcggcctgcccgtggactgctgcaaggaccagaccagagtggtggacgacaacggcttcaaccccgtgtgggaggagaccctgaccttcaccgtgcacatgcccgagatcgccctggtgagattcctggtgtgggaccacgaccccatcggcagagacttcgtgggccagagaaccgtgaccttcagcagcctggtgcccggctacagacacgtgtacctggagggcctgaccgaggccagcatcttcgtgcacatcaccatcaacgagatctacggcaagaacagacagctgcagggcctgaagggcctgttcaacaagaaccccagacacagcagcagcgagaacaacagccactacgtgagaaagagaagcatcggcgacagaatcctgagaagaaccgccagcgcccccgccaagggcagaaagaagagcaagatgggcttccaggagatggtggagatcaaggacagcgtgagcgaggccaccagagaccaggacggcgtgctgagaagaaccaccagaagcctgcaggccagacccgtgagcatgcccgtggacagaaacctgctgggcgccctgagcctgcccgtgagcgagaccgccaaggacatcgagggcaaggagaacagcctggccgaggacaaggacggcagaagaaagggcaaggccagcatcaaggacccccacttcctgaacttcaacaagaagctgagcagcagcagcagcgccctgctgcacaaggacaccagccagggcgacaccatcgtgagcaccgcccacatgagcgtgaccggcgagcagctgggcatgagcagccccagaggcggcagaaccaccagcaacgccaccagcaactgccaggagaacccctgccccagcaagagcctgagccccaagcagcacctggcccccgaccccgtggtgaaccccacccaggacctgcacggcgtgaagatcaaggagaagggcaaccccgaggacttcgtggagggcaagagcatcctgagcggcagcgtgctgagccacagcaacctggagatcaagaacctggagggcaacagaggcaagggcagagccgccaccagcttcagcctgagcgacgtgagcatgctgtgcagcgacatccccgacctgcacagcaccgccatcctgcaggagagcgtgatcagccacctgatcgacaacgtgaccctgaccaacgagaacgagcccggcagcagcatcagcgccctgatcggccagttcgacgagaccaacaaccaggccctgaccgtggtgagccacctgcacaacaccagcgtgatgagcggccactgccccctgcccagcctgggcctgaagatgcccatcaagcacggcttctgcaagggcaagagcaagagcagcttcctgtgcagcagccccgagctgatcgccctgagcagcagcgagaccaccaagcacgccaccaacaccgtgtacgagaccacctgcacccccatcagcaagaccaagcccgacgacgacctgagcagcaaggccaagaccgccgccctggagagcaacctgcccggcagccccaacaccagcagaggctggctgcccaagagccccaccaagggcgaggactgggagaccctgaagagctgcagccccgccagcagccccgacctgaccctggaggacgtgatcgccgaccccaccctgtgcttcaacagcggcgagagcagcctggtggagatcgacggcgagagcgagaacctgagcctgaccacctgcgagtacagaagagagggcaccagccagctggccagccccctgaagctgaagtacaaccagggcgtggtggagcacttccagagaggcctgagaaacggctactgcaaggagaccctgagacccagcgtgcccgagatcttcaacaacatccaggacgtgaagacccagagcatcagctacctggcctaccagggcgccggcttcgtgcacaaccacttcagcgacagcgacgccaagatgttccagacctgcgtgccccagcagagcagcgcccaggacatgcacgtgcccgtgcccaagcagctggcccacctgcccctgcccgccctgaagctgcccagcccctgcaagagcaagagcctgggcgacctgaccagcgaggacatcgcctgcaacttcgagagcaagtaccagtgcatcagcaagagcttcgtgaccaccggcatcagagacaagaagggcgtgaccgtgaagaccaagagcctggagcccatcgacgccctgaccgagcagctgagaaagctggtgagcttcgaccaggaggacaactgccaggtgctgtacagcaagcaggacgccaaccagctgcccagagccctggtgagaaagctgagcagcagaagccagagcagagtgagaaacatcgccagcagagccaaggagaagcaggaggccaacaagcagaaggtgcccaaccccagcaacggcgccggcgtggtgctgagaaacaagcccagcgcccccacccccgccgtgaacagacacagcaccggcagctacatcgccggctacctgaagaacaccaagggcggcggcctggagggcagaggcatccccgagggcgcctgcaccgccctgcactacggccacgtggaccagttctgcagcgacaacagcgtgctgcagaccgagcccagcagcgacgacaagcccgagatctacttcctgctgagactgtag

SEQ ID NO: 93323 - DNA, 5082 bp, synthetic construct
  misc_feature 1..5082: note = Description of Artificial Sequence: Synthetic coding sequence
  source 1..5082: mol_type = other DNA
atggccgacctggaggtgtacaagaacctgagccccgagaaggtggagagatgcatgagcgtgatgcagagcggcacccagatgatcaagctgaagagaggcaccaagggcctggtgagactgttctacctggacgagcacagaaccagactgagatggagacccagcagaaagagcgagaaggccaagatcctgatcgacagcatctacaaggtgaccgagggcagacagagcgagatcttccacagacaggccgagggcaacttcgaccccagctgctgcttcaccatctaccacggcaaccacatggagagcctggacctgatcaccagcaaccccgaggaggccagaacctggatcaccggcctgaagtacctgatggccggcatcagcgacgaggacagcctggccaagagacagagaacccacgaccagtgggtgaagcagaccttcgaggaggccgacaagaacggcgacggcctgctgaacatcgaggagatccaccagctgatgcacaagctgaacgtgaacctgcccagaagaaaggtgagacagatgttccaggaggccgacaccgacgagaaccagggcaccctgaccttcgaggagttctgcgtgttctacaagatgatgagcctgagaagagacctgtacctgctgctgctgagctacagcgacaagaaggaccacctgaccgtggaggagctggcccagttcctgaaggtggagcagaagatgaacaacgtgaccaccgactactgcctggacatcatcaagaagttcgaggtgagcgaggagaacaaggtgaagaacgtgctgggcatcgagggcttcaccaacttcatgagaagccccgcctgcgacatcttcaaccccctgcaccacgaggtgtaccaggacatggaccagcccctgtgcaactactacatcgccagcagccacaacacctacctgaccggcgaccagctgctgagccagagcaaggtggacatgtacgccagagtgctgcaggagggctgcagatgcgtggaggtggactgctgggacggccccgacggcgagcccgtggtgcaccacggctacaccctgaccagcaagatcctgttcagagacgtggtggagaccatcaacaagcacgccttcgtgaagaacgagttccccgtgatcctgagcatcgagaaccactgcagcatccagcagcagagaaagatcgcccagtacctgaagggcatcttcggcgacaagctggacctgagcagcgtggacaccggcgagtgcaagcagctgcccagcccccagagcctgaagggcaagatcctggtgaagggcaagaagctgccctaccacctgggcgacgacgccgaggagggcgaggtgagcgacgaggacagcgccgacgagatcgaggacgagtgcaagttcaagctgcactacagcaacggcaccaccgagcaccaggtggagagcttcatcagaaagaagctggagagcctgctgaaggagagccagatcagagacaaggaggaccccgacagcttcaccgtgagagccctgctgaaggccacccacgagggcctgaacgcccacctgaagcagagccccgacgtgaaggagagcggcaagaagagccacggcagaagcctgatgaccaacttcggcaagcacaagaagaccaccaagagcagaagcaagagctacagcaccgacgacgaggaggacacccagcagagcaccggcaaggagggcggccagctgtacagactgggcagaagaagaaagaccatgaagctgtgcagagagctgagcgacctggtggtgtacaccaacagcgtggccgcccaggacatcgtggacgacggcaccaccggcaacgtgctgagcttcagcgagaccagagcccaccaggtggtgcagcagaagagcgagcagttcatgatctacaaccagaagcagctgaccagaatctaccccagcgcctacagaatcgacagcagcaacttcaaccccctgccctactggaacgccggctgccagctggtggccctgaactaccagagcgagggcagaatgatgcagctgaacagagccaagttcaaggccaacggcaactgcggctacgtgctgaagccccagcagatgtgcaagggcaccttcaaccccttcagcggcgaccccctgcccgccaaccccaagaagcagctgatcctgaaggtgatcagcggccagcagctgcccaagccccccgacagcatgttcggcgacagaggcgagatcatcgaccccttcgtggaggtggagatcatcggcctgcccgtggactgctgcaaggaccagaccagagtggtggacgacaacggcttcaaccccgtgtgggaggagaccctgaccttcaccgtgcacatgcccgagatcgccctggtgagattcctggtgtgggaccacgaccccatcggcagagacttcgtgggccagagaaccgtgaccttcagcagcctggtgcccggctacagacacgtgtacctggagggcctgaccgaggccagcatcttcgtgcacatcaccatcaacgagatctacggcaagtggagccccctgatcctgaaccccagctacaccatcctgcacttcctgggcgccaccaagaacagacagctgcagggcctgaagggcctgttcaacaagaaccccagacacagcagcagcgagaacaacagccactacgtgagaaagagaagcatcggcgacagaatcctgagaagaaccgccagcgcccccgccaagggcagaaagaagagcaagatgggcttccaggagatggtggagatcaaggacagcgtgagcgaggccaccagagaccaggacggcgtgctgagaagaaccaccagaagcctgcaggccagacccgtgagcatgcccgtggacagaaacctgctgggcgccctgagcctgcccgtgagcgagaccgccaaggacatcgagggcaaggagaacagcctggccgaggacaaggacggcagaagaaagggcaaggccagcatcaaggacccccacttcctgaacttcaacaagaagctgagcagcagcagcagcgccctgctgcacaaggacaccagccagggcgacaccatcgtgagcaccgcccacatgagcgtgaccggcgagcagctgggcatgagcagccccagaggcggcagaaccaccagcaacgccaccagcaactgccaggagaacccctgccccagcaagagcctgagccccaagcagcacctggcccccgaccccgtggtgaaccccacccaggacctgcacggcgtgaagatcaaggagaagggcaaccccgaggacttcgtggagggcaagagcatcctgagcggcagcgtgctgagccacagcaacctggagatcaagaacctggagggcaacagaggcaagggcagagccgccaccagcttcagcctgagcgacgtgagcatgctgtgcagcgacatccccgacctgcacagcaccgccatcctgcaggagagcgtgatcagccacctgatcgacaacgtgaccctgaccaacgagaacgagcccggcagcagcatcagcgccctgatcggccagttcgacgagaccaacaaccaggccctgaccgtggtgagccacctgcacaacaccagcgtgatgagcggccactgccccctgcccagcctgggcctgaagatgcccatcaagcacggcttctgcaagggcaagagcaagagcagcttcctgtgcagcagccccgagctgatcgccctgagcagcagcgagaccaccaagcacgccaccaacaccgtgtacgagaccacctgcacccccatcagcaagaccaagcccgacgacgacctgagcagcaaggccaagaccgccgccctggagagcaacctgcccggcagccccaacaccagcagaggctggctgcccaagagccccaccaagggcgaggactgggagaccctgaagagctgcagccccgccagcagccccgacctgaccctggaggacgtgatcgccgaccccaccctgtgcttcaacagcggcgagagcagcctggtggagatcgacggcgagagcgagaacctgagcctgaccacctgcgagtacagaagagagggcaccagccagctggccagccccctgaagctgaagtacaaccagggcgtggtggagcacttccagagaggcctgagaaacggctactgcaaggagaccctgagacccagcgtgcccgagatcttcaacaacatccaggacgtgaagacccagagcatcagctacctggcctaccagggcgccggcttcgtgcacaaccacttcagcgacagcgacgccaagatgttccagacctgcgtgccccagcagagcagcgcccaggacatgcacgtgcccgtgcccaagcagctggcccacctgcccctgcccgccctgaagctgcccagcccctgcaagagcaagagcctgggcgacctgaccagcgaggacatcgcctgcaacttcgagagcaagtaccagtgcatcagcaagagcttcgtgaccaccggcatcagagacaagaagggcgtgaccgtgaagaccaagagcctggagcccatcgacgccctgaccgagcagctgagaaagctggtgagcttcgaccaggaggacaactgccaggtgctgtacagcaagcaggacgccaaccagctgcccagagccctggtgagaaagctgagcagcagaagccagagcagagtgagaaacatcgccagcagagccaaggagaagcaggaggccaacaagcagaaggtgcccaaccccagcaacggcgccggcgtggtgctgagaaacaagcccagcgcccccacccccgccgtgaacagacacagcaccggcagctacatcgccggctacctgaagaacaccaagggcggcggcctggagggcagaggcatccccgagggcgcctgcaccgccctgcactacggccacgtggaccagttctgcagcgacaacagcgtgctgcagaccgagcccagcagcgacgacaagcccgagatctacttcctgctgagactgtag

SEQ ID NO: 93324 - DNA, 4968 bp, synthetic construct; identical to SEQ ID NO: 93322
  misc_feature 1..4968: note = Description of Artificial Sequence: Synthetic coding sequence
  source 1..4968: mol_type = other DNA

SEQ ID NO: 93325 - DNA, 3009 bp, synthetic construct
  misc_feature 1..3009: note = Description of Artificial Sequence: Synthetic coding sequence
  source 1..3009: mol_type = other DNA
atggccgacctggaggtgtacaagaacctgagccccgagaaggtggagagatgcatgagcgtgatgcagagcggcacccagatgatcaagctgaagagaggcaccaagggcctggtgagactgttctacctggacgagcacagaaccagactgagatggagacccagcagaaagagcgagaaggccaagatcctgatcgacagcatctacaaggtgaccgagggcagacagagcgagatcttccacagacaggccgagggcaacttcgaccccagctgctgcttcaccatctaccacggcaaccacatggagagcctggacctgatcaccagcaaccccgaggaggccagaacctggatcaccggcctgaagtacctgatggccggcatcagcgacgaggacagcctggccaagagacagagaacccacgaccagtgggtgaagcagaccttcgaggaggccgacaagaacggcgacggcctgctgaacatcgaggagatccaccagctgatgcacaagctgaacgtgaacctgcccagaagaaaggtgagacagatgttccaggaggccgacaccgacgagaaccagggcaccctgaccttcgaggagttctgcgtgttctacaagatgatgagcctgagaagagacctgtacctgctgctgctgagctacagcgacaagaaggaccacctgaccgtggaggagctggcccagttcctgaaggtggagcagaagatgaacaacgtgaccaccgactactgcctggacatcatcaagaagttcgaggtgagcgaggagaacaaggtgaagaacgtgctgggcatcgagggcttcaccaacttcatgagaagccccgcctgcgacatcttcaaccccctgcaccacgaggtgtaccaggacatggaccagcccctgtgcaactactacatcgccagcagccacaacacctacctgaccggcgaccagctgctgagccagagcaaggtggacatgtacgccagagtgctgcaggagggctgcagatgcgtggaggtggactgctgggacggccccgacggcgagcccgtggtgcaccacggctacaccctgaccagcaagatcctgttcagagacgtggtggagaccatcaacaagcacgccttcgtgaagaacgagttccccgtgatcctgagcatcgagaaccactgcagcatccagcagcagagaaagatcgcccagtacctgaagggcatcttcggcgacaagctggacctgagcagcgtggacaccggcgagtgcaagcagctgcccagcccccagagcctgaagggcaagatcctggtgaagggcaagaagctgccctaccacctgggcgacgacgccgaggagggcgaggtgagcgacgaggacagcgccgacgagatcgaggacgagtgcaagttcaagctgcactacagcaacggcaccaccgagcaccaggtggagagcttcatcagaaagaagctggagagcctgctgaaggagagccagatcagagacaaggaggaccccgacagcttcaccgtgagagccctgctgaaggccacccacgagggcctgaacgcccacctgaagcagagccccgacgtgaaggagagcggcaagaagagccacggcagaagcctgatgaccaacttcggcaagcacaagaagaccaccaagagcagaagcaagagctacagcaccgacgacgaggaggacacccagcagagcaccggcaaggagggcggccagctgtacagactgggcagaagaagaaagaccatgaagctgtgcagagagctgagcgacctggtggtgtacaccaacagcgtggccgcccaggacatcgtggacgacggcaccaccggcaacgtgctgagcttcagcgagaccagagcccaccaggtggtgcagcagaagagcgagcagttcatgatctacaaccagaagcagctgaccagaatctaccccagcgcctacagaatcgacagcagcaacttcaaccccctgccctactggaacgccggctgccagctggtggccctgaactaccagagcgagggcagaatgatgcagctgaacagagccaagttcaaggccaacggcaactgcggctacgtgctgaagccccagcagatgtgcaagggcaccttcaaccccttcagcggcgaccccctgcccgccaaccccaagaagcagctgatcctgaaggtgatcagcggccagcagctgcccaagccccccgacagcatgttcggcgacagaggcgagatcatcgaccccttcgtggaggtggagatcatcggcctgcccgtggactgctgcaaggaccagaccagagtggtggacgacaacggcttcaaccccgtgtgggaggagaccctgaccttcaccgtgcacatgcccgagatcgccctggtgagattcctggtgtgggaccacgaccccatcggcagagacttcgtgggccagagaaccgtgaccttcagcagcctggtgcccggctacagacacgtgtacctggagggcctgaccgaggccagcatcttcgtgcacatcaccatcaacgagatctacggcaagtggagccccctgatcctgaaccccagctacaccatcctgcacttcctgggcgccaccaagaacagacagctgcagggcctgaagggcctgttcaacaagaaccccagacacagcagcagcgagaacaacagccactacgtgagaaagagaagcatcggcgacagaatcctgagaagaaccgccagcgcccccgccaagggcagaaagaagagcaagatgggcttccaggagatggtggagatcaaggacagcgtgagcgaggccaccagagaccaggacggcgtgctgagaagaaccaccagaagcctgcaggccagacccgtgagcatgcccgtggacagaaacctgctgggcgccctgagcctgcccgtgagcgagaccgccaaggacatcgagggcaaggagaacagcctggtgcagatctag

SEQ ID NO: 93326 - DNA, 4968 bp, synthetic construct; identical to SEQ ID NO: 93322
  misc_feature 1..4968: note = Description of Artificial Sequence: Synthetic coding sequence
  source 1..4968: mol_type = other DNA

SEQ ID NO: 93327 - DNA, 3045 bp, synthetic construct
  misc_feature 1..3045: note = Description of Artificial Sequence: Synthetic coding sequence
  source 1..3045: mol_type = other DNA
atggccgacctggaggtgtacaagaacctgagccccgagaaggtggagagatgcatgagcgtgatgcagagcggcacccagatgatcaagctgaagagaggcaccaagggcctggtgagactgttctacctggacgagcacagaaccagactgagatggagacccagcagaaagagcgagaaggccaagatcctgatcgacagcatctacaaggtgaccgagggcagacagagcgagatcttccacagacaggccgagggcaacttcgaccccagctgctgcttcaccatctaccacggcaaccacatggagagcctggacctgatcaccagcaaccccgaggaggccagaacctggatcaccggcctgaagtacctgatggccggcatcagcgacgaggacagcctggccaagagacagagaacccacgaccagtgggtgaagcagaccttcgaggaggccgacaagaacggcgacggcctgctgaacatcgaggagatccaccagctgatgcacaagctgaacgtgaacctgcccagaagaaaggtgagacagatgttccaggaggccgacaccgacgagaaccagggcaccctgaccttcgaggagttctgcgtgttctacaagatgatgagcctgagaagagacctgtacctgctgctgctgagctacagcgacaagaaggaccacctgaccgtggaggagctggcccagttcctgaaggtggagcagaagatgaacaacgtgaccaccgactactgcctggacatcatcaagaagttcgaggtgagcgaggagaacaaggtgaagaacgtgctgggcatcgagggcttcaccaacttcatgagaagccccgcctgcgacatcttcaaccccctgcaccacgaggtgtaccaggacatggaccagcccctgtgcaactactacatcgccagcagccacaacacctacctgaccggcgaccagctgctgagccagagcaaggtggacatgtacgccagagtgctgcaggagggctgcagatgcgtggaggtggactgctgggacggccccgacggcgagcccgtggtgcaccacggctacaccctgaccagcaagatcctgttcagagacgtggtggagaccatcaacaagcacgccttcgtgaagaacgagttccccgtgatcctgagcatcgagaaccactgcagcatccagcagcagagaaagatcgcccagtacctgaagggcatcttcggcgacaagctggacctgagcagcgtggacaccggcgagtgcaagcagctgcccagcccccagagcctgaagggcaagatcctggtgaagggcaagaagctgccctaccacctgggcgacgacgccgaggagggcgaggtgagcgacgaggacagcgccgacgagatcgaggacgagtgcaagttcaagctgcactacagcaacggcaccaccgagcaccaggtggagagcttcatcagaaagaagctggagagcctgctgaaggagagccagatcagagacaaggaggaccccgacagcttcaccgtgagagccctgctgaaggccacccacgagggcctgaacgcccacctgaagcagagccccgacgtgaaggagagcggcaagaagagccacggcagaagcctgatgaccaacttcggcaagcacaagaagaccaccaagagcagaagcaagagctacagcaccgacgacgaggaggacacccagcagagcaccggcaaggagggcggccagctgtacagactgggcagaagaagaaagaccatgaagctgtgcagagagctgagcgacctggtggtgtacaccaacagcgtggccgcccaggacatcgtggacgacggcaccaccggcaacgtgctgagcttcagcgagaccagagcccaccaggtggtgcagcagaagagcgagcagttcatgatctacaaccagaagcagctgaccagaatctaccccagcgcctacagaatcgacagcagcaacttcaaccccctgccctactggaacgccggctgccagctggtggccctgaactaccagagcgagggcagaatgatgcagctgaacagagccaagttcaaggccaacggcaactgcggctacgtgctgaagccccagcagatgtgcaagggcaccttcaaccccttcagcggcgaccccctgcccgccaaccccaagaagcagctgatcctgaaggtgatcagcggccagcagctgcccaagccccccgacagcatgttcggcgacagaggcgagatcatcgaccccttcgtggaggtggagatcatcggcctgcccgtggactgctgcaaggaccagaccagagtggtggacgacaacggcttcaaccccgtgtgggaggagaccctgaccttcaccgtgcacatgcccgagatcgccctggtgagattcctggtgtgggaccacgaccccatcggcagagacttcgtgggccagagaaccgtgaccttcagcagcctggtgcccggctacagacacgtgtacctggagggcctgaccgaggccagcatcttcgtgcacatcaccatcaacgagatctacggcaagaacagacagctgcagggcctgaagggcctgttcaacaagaaccccagacacagcagcagcgagaacaacagccactacgtgagaaagagaagcatcggcgacagaatcctgagaagaaccgccagcgcccccgccaagggcagaaagaagagcaagatgggcttccaggagatggtggagatcaaggacagcgtgagcgaggccaccagagaccaggacggcgtgctgagaagaaccaccagaagcctgcaggccagacccgtgagcatgcccgtggacagaaacctgctgggcgccctgagcctgcccgtgagcgagaccgccaaggacatcgagggcaaggagaacagcctggacagcagcttctgcagacccaccgagcaggccaaggccgagatgtgcaaggtgcccttccccagacagctggagtgcgtgatgaagatggagatcagcgagacctag

SEQ ID NO: 93328 - DNA, 3507 bp, synthetic construct
  misc_feature 1..3507: note = Description of Artificial Sequence: Synthetic coding sequence
  source 1..3507: mol_type = other DNA
atgttcagagaggccgacaccgacgaccaccagggcaccctgggcttcgaggagttctgcgccttctacaagatgatgagcaccagaagagacctgtacctgctgatgctgacctacagcaaccacaaggaccacctggacgccgccagcctgcagagattcctgcaggtggagcagaagatggccggcgtgaccctggagagctgccaggacatcatcgagcagttcgagccctgccccgagaacaagagcaagggcctgctgggcatcgacggcttcaccaactacaccagaagccccgccggcgacatcttcaaccccgagcaccaccacgtgcaccaggacatgacccagcccctgagccactacttcatcaccagcagccacaacacctacctggtgggcgaccagctgatgagccagagcagagtggacatgtacgcctgggtgctgcaggccggctgcagatgcgtggaggtggactgctgggacggccccgacggcgagcccatcgtgcaccacggctacaccctgaccagcaagatcctgttcaaggacgtgatcgagaccatcaacaagtacgccttcatcaagaacgagtaccccgtgatcctgagcatcgagaaccactgcagcgtgatccagcagaagaagatggcccagtacctgaccgacatcctgggcgacaagctggacctgagcagcgtgagcagcgaggacgccaccaccctgcccagcccccagatgctgaagggcaagatcctggtgaagggcaagaagctgcccgccaacatcagcgaggacgccgaggagggcgaggtgagcgacgaggacagcgccgacgagatcgacgacgactgcaagctgctgaacggcgacgccagcaccaacagaaagagagtggagaacaccgccaagagaaagctggacagcctgatcaaggagagcaagatcagagactgcgaggaccccaacaacttcagcgtgagcaccctgagccccagcggcaagctgggcagaaagagcaaggccgaggaggacgtggagagcggcgaggacgccggcgccagcagaagaaacggcagactggtggtgggcagcttcagcagaagaaagaagaagggcagcaagctgaagaaggccgccagcgtggaggagggcgacgagggccaggacagccccggcggccagagcagaggcgccaccagacagaagaagaccatgaagctgagcagagccctgagcgacctggtgaagtacaccaagagcgtggccacccacgacatcgagatggaggccgccagcagctggcaggtgagcagcttcagcgagaccaaggcccaccagatcctgcagcagaagcccgcccagtacctgagattcaaccagcagcagctgagcagaatctaccccagcagctacagagtggacagcagcaactacaacccccagcccttctggaacgccggctgccagatgggcgtgttcaaccccaacagcgaggaccccctgcccggccagctgaagaagcagctggtgctgagaatcatcagcggccagcagctgcccaagcccagagacagcatgctgggcgacagaggcgagatcatcgaccccttcgtggaggtggagatcatcggcctgcccgtggactgcagcagagagcagaccagagtggtggacgacaacggcttcaaccccacctgggaggagaccctggtgttcatggtgcacatgcccgagatcgccctggtgagattcctggtgtgggaccacgaccccatcggcagagacttcatcggccagagaaccctggccttcagcagcatgatgcccggctacagacacgtgtacctggagggcatggaggaggccagcatcttcgtgcacgtggccgtgagcgacatcagcggcaaggtgaagcaggccctgggcctgaagggcctgttcctgagaggccccaagcccggcagcctggacagccacgccgccggcagaccccccgccagacccagcgtgagccagagaatcctgagaagaaccgccagcgcccccaccaagagccagaagcccggcagaagaggcttccccgagctggtgctgggcaccagagacaccggcagcaagggcgtggccgacgacgtggtgccccccggccccggccccgcccccgaggcccccgcccaggagggccccggcagcggcagccccagagacaccagacccctgagcacccagagacccctgccccccctgtgcagcctggagaccatcgccgaggagcccgcccccggccccggcccccccccccccgccgccgtgcccaccagcagcagccagggcagacccccctaccccaccggccccggcgccaacgtggccagccccctggaggacaccgaggagcccagagacagcagacccagaccctgcaacggcgagggcgccggcggcgcctacgagagagcccccggcagccagaccgacggcagaagccagcccagaaccctgggccacctgcccgtgatcagaagagtgaagagcgagggccaggtgcccaccgagcccctgggcggctggagacccctggccgcccccttccccgcccccgccgtgtacagcgacgccaccggcagcgaccccctgtggcagagactggagccctgcggccacagagacagcgtgagcagcagcagcagcatgagcagcagcgacaccgtgatcgacctgagcctgcccagcctgggcctgggcagaagcagagagaacctggccggcgcccacatgggcagactgccccccagaccccacagcgccagcgccgccagacccgacctgccccccgtgaccaagagcaagagcaaccccaacctgagagccaccggccagagaccccccatccccgacgagctgcagcccagaagcctggcccccagaatggccggcctgcccttcagacccccctggggctgcctgagcctggtgggcgtgcaggactgccccgtggccgccaagagcaagagcctgggcgacctgaccgccgacgacttcgcccccagcttcgagggcggcagcagaagactgagccacagcctgggcctgcccggcggcaccagaagagtgagcggccccggcgtgagaagagacaccctgaccgagcagctgagatggctgaccgtgttccagcaggccggcgacatcaccagccccaccagcctgggccccgccggcgagggcgtggccggcggccccggcttcgtgagaagaagcagcagcagaagccacagcagagtgagagccatcgccagcagagccagacaggcccaggagagacagcagagactgcagggcctgggcagacagggcccccccgaggaggagagaggcacccccgagggcgcctgcagcgtgggccacgagggcagcgtggacgcccccgcccccagcaagggcgccctgggccccgccagcgccgccgccgagaacctggtgctgctgagactgtag

SEQ ID NO: 93329 - DNA, 1500 bp, synthetic construct
  misc_feature 1..1500: note = Description of Artificial Sequence: Synthetic coding sequence
  source 1..1500: mol_type = other DNA
atgggcgccatgcaggagggcatgcagatggtgaagctgagaggcggcagcaagggcctggtgagattctactacctggacgagcacagaagctgcatcagatggagacccagcagaaagaacgagaaggccaagatcagcatcgacagcatccaggaggtgagcgagggcagacagagcgaggtgttccagagataccccgacggcagcttcatcatcgaccccttcgtggaggtggagatcatcggcctgcccgtggactgcagcagagagcagaccagagtggtggacgacaacggcttcaaccccacctgggaggagaccctggtgttcatggtgcacatgcccgagatcgccctggtgagattcctggtgtgggaccacgaccccatcggcagagacttcatcggccagagaaccctggccttcagcagcatgatgcccggctacagacacgtgtacctggagggcatggaggaggccagcatcttcgtgcacgtggccgtgagcgacatcagcggcaaggtgaagcaggccctgggcctgaagggcctgttcctgagaggccccaagcccggcagcctggacagccacgccgccggcagaccccccgccagacccagcgtgagccagagaatcctgagaagaaccgccagcgcccccaccaagagccagaagcccggcagaagaggcttccccgagctggtgctgggcaccagagacaccggcagcaagggcgtggccgacgacgtggtgccccccggccccggccccgcccccgaggcccccgcccaggagggccccggcagcggcagccccagaggcaaggcccccgccgccgtggccgagaagagccccgtgagagtgagaccccccagagtgctggacggccccggccccgccggcatggccgccacctgcatgaagtgcgtggtgggcagctgcgccggcgtgaacaccggcggcctgcagagagagagaccccccagccccggccccgccagcagacaggccgccatcagacagcagcccagagccagagccgacagcctgggcgccccctgctgcggcctggacccccacgccatccccggcagaagcagagaggcccccaagggccccggcgcctggagacagggccccggcggcagcggcagcatgagcagcgacagcagcagccccgacagccccggcatccccgagagaagccccagatggcccgagggcgcctgcagacagcccggcgccctgcagggcgagatgagcgccctgttcgcccagaagctggaggagatcagaagcaagagccccatgttcagcgccggcaagcccctgctgccctgcgtggtgctgccccacgcccccggcatggccggccccggcagccccgccgccgccagcgcctggaccgtgagccccagagtgctggtgctggtggccctgtacccctggcactgcctgagaggcaccctgctgccctggctggcctgcggcccctag

SEQ ID NO: 93330 - DNA, 3177 bp, synthetic construct
  misc_feature 1..3177: note = Description of Artificial Sequence: Synthetic coding sequence
  source 1..3177: mol_type = other DNA
atggccggcatcagcgacgaggacagcctggccagaagacagagaaccagagaccagtggctgaagcagaccttcgacgaggccgacaagaacggcgacggcagcctgagcatcggcgaggtgctgcagctgctgcacaagctgaacgtgaacctgcccagacagagagtgaagcagatgttcagagaggccgacaccgacgaccaccagggcaccctgggcttcgaggagttctgcgccttctacaagatgatgagcaccagaagagacctgtacctgctgatgctgacctacagcaaccacaaggaccacctggacgccgccagcctgcagagattcctgcaggtggagcagaagatggccggcgtgaccctggagagctgccaggacatcatcgagcagttcgagccctgccccgagaacaagagcaagggcctgctgggcatcgacggcttcaccaactacaccagaagccccgccggcgacatcttcaaccccgagcaccaccacgtgcaccaggacatgacccagcccctgagccactacttcatcaccagcagccacaacacctacctggtgggcgaccagctgatgagccagagcagagtggacatgtacgcctgggtgctgcaggccggctgcagatgcgtggaggtggactgctgggacggccccgacggcgagcccatcgtgcaccacggctacaccctgaccagcaagatcctgttcaaggacgtgatcgagaccatcaacaagtacgccttcatcaagaacgagtaccccgtgatcctgagcatcgagaaccactgcagcgtgatccagcagaagaagatggcccagtacctgaccgacatcctgggcgacaagctggacctgagcagcgtgagcagcgaggacgccaccaccctgcccagcccccagatgctgaagggcaagatcctggtgaagggcaagaagctgcccgccaacatcagcgaggacgccgaggagggcgaggtgagcgacgaggacagcgccgacgagatcgacgacgactgcaagctgctgaacggcgacgccagcaccaacagaaagagagtggagaacaccgccaagagaaagctggacagcctgatcaaggagagcaagatcagagactgcgaggaccccaacaacttcagcgtgagcaccctgagccccagcggcaagctgggcagaaagagcaaggccgaggaggacgtggagagcggcgaggacgccggcgccagcagaagaaacggcagactggtggtgggcagcttcagcagaagaaagaagaagggcagcaagctgaagaaggccgccagcgtggaggagggcgacgagggccaggacagccccggcggccagagcagaggcgccaccagacagaagaagaccatgaagctgagcagagccctgagcgacctggtgaagtacaccaagagcgtggccacccacgacatcgagatggaggccgccagcagctggcaggtgagcagcttcagcgagaccaaggcccaccagatcctgcagcagaagcccgcccagtacctgagattcaaccagcagcagctgagcagaatctaccccagcagctacagagtggacagcagcaactacaacccccagcccttctggaacgccggctgccagatggtggccctgaactaccagagcgagggcagaatgctgcagctgaacagagccaagttcagcgccaacggcggctgcggctacgtgctgaagcccggctgcatgtgccagggcgtgttcaaccccaacagcgaggaccccctgcccggccagctgaagaagcagctggtgctgagaatcatcagcggccagcagctgcccaagcccagagacagcatgctgggcgacagaggcgagatcatcgaccccttcgtggaggtggagatcatcggcctgcccgtggactgcagcagagagcagaccagagtggtggacgacaacggcttcaaccccacctgggaggagaccctggtgttcatggtgcacatgcccgagatcgccctggtgagattcctggtgtgggaccacgaccccatcggcagagacttcatcggccagagaaccctggccttcagcagcatgatgcccggctacagacacgtgtacctggagggcatggaggaggccagcatcttcgtgcacgtggccgtgagcgacatcagcggcaaggtgaagcaggccctgggcctgaagggcctgttcctgagaggccccaagcccggcagcctggacagccacgccgccggcagaccccccgccagacccagcgtgagccagagaatcctgagaagaaccgccagcgcccccaccaagagccagaagcccggcagaagaggcttccccgagctggtgctgggcaccagagacaccggcagcaagggcgtggccgacgacgtggtgccccccggccccggccccgcccccgaggcccccgcccaggagggccccggcagcggcagccccagaggcaaggcccccgccgccgtggccgagaagagccccgtgagagtgagaccccccagagtgctggacggccccggccccgccggcatggccgccacctgcatgaagtgcgtggtgggcagctgcgccggcgtgaacaccggcggcctgcagagagagagaccccccagccccggccccgccagcagacaggccgccatcagacagcagcccagagccagagccgacagcctgggcgccccctgctgcggcctggacccccacgccatccccggcagaagcagagaggcccccaagggccccggcgcctggagacagggccccggcggcagcggcagcatgagcagcgacagcagcagccccgacagccccggcatccccgagagaagccccagatggcccgagggcgcctgcagacagcccggcgccctgcagggcgagatgagcgccctgttcgcccagaagctggaggagatcagaagcaagagccccatgttcagcgccggcaagcccctgctgccctgcgtggtgctgccccacgcccccggcatggccggccccggcagccccgccgccgccagcgcctggaccgtgagccccagagtgctggtgctggtggccctgtacccctggcactgcctgagaggcaccctgctgccctggctggcctgcggcccctag

SEQ ID NO: 93331 - DNA, 1494 bp, synthetic construct
  misc_feature 1..1494: note = Description of Artificial Sequence: Synthetic coding sequence
  source 1..1494: mol_type = other DNA
atgggcgccatgcaggagggcatgcagatggtgaagctgagaggcggcagcaagggcctggtgagattctactacctggacgagcacagaagctgcatcagatggagacccagcagaaagaacgagaaggccaagatcagcatcgacagcatccaggaggtgagcgagggcagacagagcgaggtgttccagagataccccgacggcagcttcgaccccttcgtggaggtggagatcatcggcctgcccgtggactgcagcagagagcagaccagagtggtggacgacaacggcttcaaccccacctgggaggagaccctggtgttcatggtgcacatgcccgagatcgccctggtgagattcctggtgtgggaccacgaccccatcggcagagacttcatcggccagagaaccctggccttcagcagcatgatgcccggctacagacacgtgtacctggagggcatggaggaggccagcatcttcgtgcacgtggccgtgagcgacatcagcggcaaggtgaagcaggccctgggcctgaagggcctgttcctgagaggccccaagcccggcagcctggacagccacgccgccggcagaccccccgccagacccagcgtgagccagagaatcctgagaagaaccgccagcgcccccaccaagagccagaagcccggcagaagaggcttccccgagctggtgctgggcaccagagacaccggcagcaagggcgtggccgacgacgtggtgccccccggccccggccccgcccccgaggcccccgcccaggagggccccggcagcggcagccccagaggcaaggcccccgccgccgtggccgagaagagccccgtgagagtgagaccccccagagtgctggacggccccggccccgccggcatggccgccacctgcatgaagtgcgtggtgggcagctgcgccggcgtgaacaccggcggcctgcagagagagagaccccccagccccggccccgccagcagacaggccgccatcagacagcagcccagagccagagccgacagcctgggcgccccctgctgcggcctggacccccacgccatccccggcagaagcagagaggcccccaagggccccggcgcctggagacagggccccggcggcagcggcagcatgagcagcgacagcagcagccccgacagccccggcatccccgagagaagccccagatggcccgagggcgcctgcagacagcccggcgccctgcagggcgagatgagcgccctgttcgcccagaagctggaggagatcagaagcaagagccccatgttcagcgccggcaagcccctgctgccctgcgtggtgctgccccacgcccccggcatggccggccccggcagccccgccgccgccagcgcctggaccgtgagccccagagtgctggtgctggtggccctgtacccctggcactgcctgagaggcaccctgctgccctggctggcctgcggcccctag

SEQ ID NO: 93332 - DNA, 4251 bp, synthetic construct
  misc_feature 1..4251: note = Description of Artificial Sequence: Synthetic coding sequence
  source 1..4251: mol_type = other DNA
atgagcggcccctggcccagccccgacagcagaaccaagggcaccgtggcctggctggccgaggtgctgctgtgggtgggcggcagcgtggtgctgagcagcgagtggcagctgggccccctggtggagagatgcatgggcgccatgcaggagggcatgcagatggtgaagctgagaggcggcagcaagggcctggtgagattctactacctggacgagcacagaagctgcatcagatggagacccagcagaaagaacgagaaggccaagatcagcatcgacagcatccaggaggtgagcgagggcagacagagcgaggtgttccagagataccccgacggcagcttcgaccccaactgctgcttcagcatctaccacggcagccacagagagagcctggacctggtgagcaccagcagcgaggtggccagaacctgggtgaccggcctgagatacctgatggccggcatcagcgacgaggacagcctggccagaagacagagaaccagagaccagtggctgaagcagaccttcgacgaggccgacaagaacggcgacggcagcctgagcatcggcgaggtgctgcagctgctgcacaagctgaacgtgaacctgcccagacagagagtgaagcagatgttcagagaggccgacaccgacgaccaccagggcaccctgggcttcgaggagttctgcgccttctacaagatgatgagcaccagaagagacctgtacctgctgatgctgacctacagcaaccacaaggaccacctggacgccgccagcctgcagagattcctgcaggtggagcagaagatggccggcgtgaccctggagagctgccaggacatcatcgagcagttcgagccctgccccgagaacaagagcaagggcctgctgggcatcgacggcttcaccaactacaccagaagccccgccggcgacatcttcaaccccgagcaccaccacgtgcaccaggacatgacccagcccctgagccactacttcatcaccagcagccacaacacctacctggtgggcgaccagctgatgagccagagcagagtggacatgtacgcctgggtgctgcaggccggctgcagatgcgtggaggtggactgctgggacggccccgacggcgagcccatcgtgcaccacggctacaccctgaccagcaagatcctgttcaaggacgtgatcgagaccatcaacaagtacgccttcatcaagaacgagtaccccgtgatcctgagcatcgagaaccactgcagcgtgatccagcagaagaagatggcccagtacctgaccgacatcctgggcgacaagctggacctgagcagcgtgagcagcgaggacgccaccaccctgcccagcccccagatgctgaagggcaagatcctggtgaagggcaagaagctgcccgccaacatcagcgaggacgccgaggagggcgaggtgagcgacgaggacagcgccgacgagatcgacgacgactgcaagctgctgaacggcgacgccagcaccaacagaaagagagtggagaacaccgccaagagaaagctggacagcctgatcaaggagagcaagatcagagactgcgaggaccccaacaacttcagcgtgagcaccctgagccccagcggcaagctgggcagaaagagcaaggccgaggaggacgtggagagcggcgaggacgccggcgccagcagaagaaacggcagactggtggtgggcagcttcagcagaagaaagaagaagggcagcaagctgaagaaggccgccagcgtggaggagggcgacgagggccaggacagccccggcggccagagcagaggcgccaccagacagaagaagaccatgaagctgagcagagccctgagcgacctggtgaagtacaccaagagcgtggccacccacgacatcgagatggaggccgccagcagctggcaggtgagcagcttcagcgagaccaaggcccaccagatcctgcagcagaagcccgcccagtacctgagattcaaccagcagcagctgagcagaatctaccccagcagctacagagtggacagcagcaactacaacccccagcccttctggaacgccggctgccagatggtggccctgaactaccagagcgagggcagaatgctgcagctgaacagagccaagttcagcgccaacggcggctgcggctacgtgctgaagcccggctgcatgtgccagggcgtgttcaaccccaacagcgaggaccccctgcccggccagctgaagaagcagctggtgctgagaatcatcagcggccagcagctgcccaagcccagagacagcatgctgggcgacagaggcgagatcatcgaccccttcgtggaggtggagatcatcggcctgcccgtggactgcagcagagagcagaccagagtggtggacgacaacggcttcaaccccacctgggaggagaccctggtgttcatggtgcacatgcccgagatcgccctggtgagattcctggtgtgggaccacgaccccatcggcagagacttcatcggccagagaaccctggccttcagcagcatgatgcccggctacagacacgtgtacctggagggcatggaggaggccagcatcttcgtgcacgtggccgtgagcgacatcagcggcaaggtgaagcaggccctgggcctgaagggcctgttcctgagaggccccaagcccggcagcctggacagccacgccgccggcagaccccccgccagacccagcgtgagccagagaatcctgagaagaaccgccagcgcccccaccaagagccagaagcccggcagaagaggcttccccgagctggtgctgggcaccagagacaccggcagcaagggcgtggccgacgacgtggtgccccccggccccggccccgcccccgaggcccccgcccaggagggccccggcagcggcagccccagagacaccagacccctgagcacccagagacccctgccccccctgtgcagcctggagaccatcgccgaggagcccgcccccggccccggcccccccccccccgccgccgtgcccaccagcagcagccagggcagacccccctaccccaccggccccggcgccaacgtggccagccccctggaggacaccgaggagcccagagacagcagacccagaccctgcaacggcgagggcgccggcggcgcctacgagagagcccccggcagccagaccgacggcagaagccagcccagaaccctgggccacctgcccgtgatcagaagagtgaagagcgagggccaggtgcccaccgagcccctgggcggctggagacccctggccgcccccttccccgcccccgccgtgtacagcgacgccaccggcagcgaccccctgtggcagagactggagccctgcggccacagagacagcgtgagcagcagcagcagcatgagcagcagcgacaccgtgatcgacctgagcctgcccagcctgggcctgggcagaagcagagagaacctggccggcgcccacatgggcagactgccccccagaccccacagcgccagcgccgccagacccgacctgccccccgtgaccaagagcaagagcaaccccaacctgagagccaccggccagagaccccccatccccgacgagctgcagcccagaagcctggcccccagaatggccggcctgcccttcagacccccctggggctgcctgagcctggtgggcgtgcaggactgccccgtggccgccaagagcaagagcctgggcgacctgaccgccgacgacttcgcccccagcttcgagggcggcagcagaagactgagccacagcctgggcctgcccggcggcaccagaagagtgagcggccccggcgtgagaagagacaccctgaccgagcagctgagatggctgaccgtgttccagcaggccggcgacatcaccagccccaccagcctgggccccgccggcgagggcgtggccggcggccccggcttcgtgagaagaagcagcagcagaagccacagcagagtgagagccatcgccagcagagccagacaggcccaggagagacagcagagactgcagggcctgggcagacagggcccccccgaggaggagagaggcacccccgagggcgcctgcagcgtgggccacgagggcagcgtggacgcccccgcccccagcaagggcgccctgggccccgccagcgccgccgccgagaacctggtgctgctgagactgtag

SEQ ID NO: 93333 - DNA, 4143 bp, synthetic construct
  misc_feature 1..4143: note = Description of Artificial Sequence: Synthetic coding sequence
  source 1..4143: mol_type = other DNA
atgagcggcccctggcccagccccgacagcagaaccaagggcaccgtggcctggctggccgaggtgctgctgtgggtgggcggcagcgtggtgctgagcagcgagtggcagctgggccccctggtggagagatgcatgggcgccatgcaggagggcatgcagatggtgaagctgagaggcggcagcaagggcctggtgagattctactacctggacgagcacagaagctgcatcagatggagacccagcagaaagaacgagaaggccaagatcagcatcgacagcatccaggaggtgagcgagggcagacagagcgaggtgttccagagataccccgacggcagcttcgaccccaactgctgcttcagcatctaccacggcagccacagagagagcctggacctggtgagcaccagcagcgaggtggccagaacctgggtgaccggcctgagatacctgatggccggcatcagcgacgaggacagcctggccagaagacagagaaccagagaccagtggctgaagcagaccttcgacgaggccgacaagaacggcgacggcagcctgagcatcggcgaggtgctgcagctgctgcacaagctgaacgtgaacctgcccagacagagagtgaagcagatgttcagagaggccgacaccgacgaccaccagggcaccctgggcttcgaggagttctgcgccttctacaagatgatgagcaccagaagagacctgtacctgctgatgctgacctacagcaaccacaaggaccacctggacgccgccagcctgcagagattcctgcaggtggagcagaagatggccggcgtgaccctggagagctgccaggacatcatcgagcagttcgagccctgccccgagaacaagagcaagggcctgctgggcatcgacggcttcaccaactacaccagaagccccgccggcgacatcttcaaccccgagcaccaccacgtgcaccaggacatgacccagcccctgagccactacttcatcaccagcagccacaacacctacctggtgggcgaccagctgatgagccagagcagagtggacatgtacgcctgggtgctgcaggccggctgcagatgcgtggaggtggactgctgggacggccccgacggcgagcccatcgtgcaccacggctacaccctgaccagcaagatcctgttcaaggacgtgatcgagaccatcaacaagtacgccttcatcaagaacgagtaccccgtgatcctgagcatcgagaaccactgcagcgtgatccagcagaagaagatggcccagtacctgaccgacatcctgggcgacaagctggacctgagcagcgtgagcagcgaggacgccaccaccctgcccagcccccagatgctgaagggcaagatcctggtgaagggcaagaagctgcccgccaacatcagcgaggacgccgaggagggcgaggtgagcgacgaggacagcgccgacgagatcgacgacgactgcaagctgctgaacggcgacgccagcaccaacagaaagagagtggagaacaccgccaagagaaagctggacagcctgatcaaggagagcaagatcagagactgcgaggaccccaacaacttcagcgtgagcaccctgagccccagcggcaagctgggcagaaagagcaaggccgaggaggacgtggagagcggcgaggacgccggcgccagcagaagaaacggcagactggtggtgggcagcttcagcagaagaaagaagaagggcagcaagctgaagaaggccgccagcgtggaggagggcgacgagggccaggacagccccggcggccagagcagaggcgccaccagacagaagaagaccatgaagctgagcagagccctgagcgacctggtgaagtacaccaagagcgtggccacccacgacatcgagatggaggccgccagcagctggcaggtgagcagcttcagcgagaccaaggcccaccagatcctgcagcagaagcccgcccagtacctgagattcaaccagcagcagctgagcagaatctaccccagcagctacagagtggacagcagcaactacaacccccagcccttctggaacgccggctgccagatgggcgtgttcaaccccaacagcgaggaccccctgcccggccagctgaagaagcagctggtgctgagaatcatcagcggccagcagctgcccaagcccagagacagcatgctgggcgacagaggcgagatcatcgaccccttcgtggaggtggagatcatcggcctgcccgtggactgcagcagagagcagaccagagtggtggacgacaacggcttcaaccccacctgggaggagaccctggtgttcatggtgcacatgcccgagatcgccctggtgagattcctggtgtgggaccacgaccccatcggcagagacttcatcggccagagaaccctggccttcagcagcatgatgcccggctacagacacgtgtacctggagggcatggaggaggccagcatcttcgtgcacgtggccgtgagcgacatcagcggcaaggtgaagcaggccctgggcctgaagggcctgttcctgagaggccccaagcccggcagcctggacagccacgccgccggcagaccccccgccagacccagcgtgagccagagaatcctgagaagaaccgccagcgcccccaccaagagccagaagcccggcagaagaggcttccccgagctggtgctgggcaccagagacaccggcagcaagggcgtggccgacgacgtggtgccccccggccccggccccgcccccgaggcccccgcccaggagggccccggcagcggcagccccagagacaccagacccctgagcacccagagacccctgccccccctgtgcagcctggagaccatcgccgaggagcccgcccccggccccggcccccccccccccgccgccgtgcccaccagcagcagccagggcagacccccctaccccaccggccccggcgccaacgtggccagccccctggaggacaccgaggagcccagagacagcagacccagaccctgcaacggcgagggcgccggcggcgcctacgagagagcccccggcagccagaccgacggcagaagccagcccagaaccctgggccacctgcccgtgatcagaagagtgaagagcgagggccaggtgcccaccgagcccctgggcggctggagacccctggccgcccccttccccgcccccgccgtgtacagcgacgccaccggcagcgaccccctgtggcagagactggagccctgcggccacagagacagcgtgagcagcagcagcagcatgagcagcagcgacaccgtgatcgacctgagcctgcccagcctgggcctgggcagaagcagagagaacctggccggcgcccacatgggcagactgccccccagaccccacagcgccagcgccgccagacccgacctgccccccgtgaccaagagcaagagcaaccccaacctgagagccaccggccagagaccccccatccccgacgagctgcagcccagaagcctggcccccagaatggccggcctgcccttcagacccccctggggctgcctgagcctggtgggcgtgcaggactgccccgtggccgccaagagcaagagcctgggcgacctgaccgccgacgacttcgcccccagcttcgagggcggcagcagaagactgagccacagcctgggcctgcccggcggcaccagaagagtgagcggccccggcgtgagaagagacaccctgaccgagcagctgagatggctgaccgtgttccagcaggccggcgacatcaccagccccaccagcctgggccccgccggcgagggcgtggccggcggccccggcttcgtgagaagaagcagcagcagaagccacagcagagtgagagccatcgccagcagagccagacaggcccaggagagacagcagagactgcagggcctgggcagacagggcccccccgaggaggagagaggcacccccgagggcgcctgcagcgtgggccacgagggcagcgtggacgcccccgcccccagcaagggcgccctgggccccgccagcgccgccgccgagaacctggtgctgctgagactgtag

SEQ ID NO: 93334 - DNA, 2136 bp, synthetic construct
  misc_feature 1..2136: note = Description of Artificial Sequence: Synthetic coding sequence
  source 1..2136: mol_type = other DNA
tgagccctgaactaccagagcgagggcagaatgctgcagctgaacagagccaagttcagcgccaacggcggctgcggctacgtgctgaagcccggctgcatgtgccagggcgtgttcaaccccaacagcgaggaccccctgcccggccagctgaagaagcagctggtgctgagaatcatcagcggccagcagctgcccaagcccagagacagcatgctgggcgacagaggcgagatcatcgaccccttcgtggaggtggagatcatcggcctgcccgtggactgcagcagagagcagaccagagtggtggacgacaacggcttcaaccccacctgggaggagaccctggtgttcatggtgcacatgcccgagatcgccctggtgagattcctggtgtgggaccacgaccccatcggcagagacttcatcggccagagaaccctggccttcagcagcatgatgcccggctacagacacgtgtacctggagggcatggaggaggccagcatcttcgtgcacgtggccgtgagcgacatcagcggcaaggtgaagcaggccctgggcctgaagggcctgttcctgagaggccccaagcccggcagcctggacagccacgccgccggcagaccccccgccagacccagcgtgagccagagaatcctgagaagaaccgccagcgcccccaccaagagccagaagcccggcagaagaggcttccccgagctggtgctgggcaccagagacaccggcagcaagggcgtggccgacgacgtggtgccccccggccccggccccgcccccgaggcccccgcccaggagggccccggcagcggcagccccagagacaccagacccctgagcacccagagacccctgccccccctgtgcagcctggagaccatcgccgaggagcccgcccccggccccggcccccccccccccgccgccgtgcccaccagcagcagccagggcagacccccctaccccaccggccccggcgccaacgtggccagccccctggaggacaccgaggagcccagagacagcagacccagaccctgcaacggcgagggcgccggcggcgcctacgagagagcccccggcagccagaccgacggcagaagccagcccagaaccctgggccacctgcccgtgatcagaagagtgaagagcgagggccaggtgcccaccgagcccctgggcggctggagacccctggccgcccccttccccgcccccgccgtgtacagcgacgccaccggcagcgaccccctgtggcagagactggagccctgcggccacagagacagcgtgagcagcagcagcagcatgagcagcagcgacaccgtgatcgacctgagcctgcccagcctgggcctgggcagaagcagagagaacctggccggcgcccacatgggcagactgccccccagaccccacagcgccagcgccgccagacccgacctgccccccgtgaccaagagcaagagcaaccccaacctgagagccaccggccagagaccccccatccccgacgagctgcagcccagaagcctggcccccagaatggccggcctgcccttcagacccccctggggctgcctgagcctggtgggcgtgcaggactgccccgtggccgccaagagcaagagcctgggcgacctgaccgccgacgacttcgcccccagcttcgagggcggcagcagaagactgagccacagcctgggcctgcccggcggcaccagaagagtgagcggccccggcgtgagaagagacaccctgaccgagcagctgagatggctgaccgtgttccagcaggccggcgacatcaccagccccaccagcctgggccccgccggcgagggcgtggccggcggccccggcttcgtgagaagaagcagcagcagaagccacagcagagtgagagccatcgccagcagagccagacaggcccaggagagacagcagagactgcagggcctgggcagacagggcccccccgaggaggagagaggcacccccgagggcgcctgcagcgtgggccacgagggcagcgtggacgcccccgcccccagcaagggcgccctgggccccgccagcgccgccgccgagaacctggtgctgctgagactgtag

SEQ ID NO: 93335 - DNA, 3390 bp, synthetic construct
  misc_feature 1..3390: note = Description of Artificial Sequence: Synthetic coding sequence
  source 1..3390: mol_type = other DNA
atggaggagcccggcccccccggcggcctgagccaggaccaggtggagagatgcatgggcgccatgcaggagggcatgcagatggtgaagctgagaggcggcagcaagggcctggtgagattctactacctggacgagcacagaagctgcatcagatggagacccagcagaaagaacgagaaggccaagatcagcatcgacagcatccaggaggtgagcgagggcagacagagcgaggtgttccagagataccccgacggcagcttcgaccccaactgctgcttcagcatctaccacggcagccacagagagagcctggacctggtgagcaccagcagcgaggtggccagaacctgggtgaccggcctgagatacctgatggccggcatcagcgacgaggacagcctggccagaagacagagaaccagagaccagtggctgaagcagaccttcgacgaggccgacaagaacggcgacggcagcctgagcatcggcgaggtgctgcagctgctgcacaagctgaacgtgaacctgcccagacagagagtgaagcagatgttcagagaggccgacaccgacgaccaccagggcaccctgggcttcgaggagttctgcgccttctacaagatgatgagcaccagaagagacctgtacctgctgatgctgacctacagcaaccacaaggaccacctggacgccgccagcctgcagagattcctgcaggtggagcagaagatggccggcgtgaccctggagagctgccaggacatcatcgagcagttcgagccctgccccgagaacaagagcaagggcctgctgggcatcgacggcttcaccaactacaccagaagccccgccggcgacatcttcaaccccgagcaccaccacgtgcaccaggacatgacccagcccctgagccactacttcatcaccagcagccacaacacctacctggtgggcgaccagctgatgagccagagcagagtggacatgtacgcctgggtgctgcaggccggctgcagatgcgtggaggtggactgctgggacggccccgacggcgagcccatcgtgcaccacggctacaccctgaccagcaagatcctgttcaaggacgtgatcgagaccatcaacaagtacgccttcatcaagaacgagtaccccgtgatcctgagcatcgagaaccactgcagcgtgatccagcagaagaagatggcccagtacctgaccgacatcctgggcgacaagctggacctgagcagcgtgagcagcgaggacgccaccaccctgcccagcccccagatgctgaagggcaagatcctggtgaagggcaagaagctgcccgccaacatcagcgaggacgccgaggagggcgaggtgagcgacgaggacagcgccgacgagatcgacgacgactgcaagctgctgaacggcgacgccagcaccaacagaaagagagtggagaacaccgccaagagaaagctggacagcctgatcaaggagagcaagatcagagactgcgaggaccccaacaacttcagcgtgagcaccctgagccccagcggcaagctgggcagaaagagcaaggccgaggaggacgtggagagcggcgaggacgccggcgccagcagaagaaacggcagactggtggtgggcagcttcagcagaagaaagaagaagggcagcaagctgaagaaggccgccagcgtggaggagggcgacgagggccaggacagccccggcggccagagcagaggcgccaccagacagaagaagaccatgaagctgagcagagccctgagcgacctggtgaagtacaccaagagcgtggccacccacgacatcgagatggaggccgccagcagctggcaggtgagcagcttcagcgagaccaaggcccaccagatcctgcagcagaagcccgcccagtacctgagattcaaccagcagcagctgagcagaatctaccccagcagctacagagtggacagcagcaactacaacccccagcccttctggaacgccggctgccagatggtggccctgaactaccagagcgagggcagaatgctgcagctgaacagagccaagttcagcgccaacggcggctgcggctacgtgctgaagcccggctgcatgtgccagggcgtgttcaaccccaacagcgaggaccccctgcccggccagctgaagaagcagctggtgctgagaatcatcagcggccagcagctgcccaagcccagagacagcatgctgggcgacagaggcgagatcatcgaccccttcgtggaggtggagatcatcggcctgcccgtggactgcagcagagagcagaccagagtggtggacgacaacggcttcaaccccacctgggaggagaccctggtgttcatggtgcacatgcccgagatcgccctggtgagattcctggtgtgggaccacgaccccatcggcagagacttcatcggccagagaaccctggccttcagcagcatgatgcccggctacagacacgtgtacctggagggcatggaggaggccagcatcttcgtgcacgtggccgtgagcgacatcagcggcaaggtgaagcaggccctgggcctgaagggcctgttcctgagaggccccaagcccggcagcctggacagccacgccgccggcagaccccccgccagacccagcgtgagccagagaatcctgagaagaaccgccagcgcccccaccaagagccagaagcccggcagaagaggcttccccgagctggtgctgggcaccagagacaccggcagcaagggcgtggccgacgacgtggtgccccccggccccggccccgcccccgaggcccccgcccaggagggccccggcagcggcagccccagaggcaaggcccccgccgccgtggccgagaagagccccgtgagagtgagaccccccagagtgctggacggccccggccccgccggcatggccgccacctgcatgaagtgcgtggtgggcagctgcgccggcgtgaacaccggcggcctgcagagagagagaccccccagccccggccccgccagcagacaggccgccatcagacagcagcccagagccagagccgacagcctgggcgccccctgctgcggcctggacccccacgccatccccggcagaagcagagaggcccccaagggccccggcgcctggagacagggccccggcggcagcggcagcatgagcagcgacagcagcagccccgacagccccggcatccccgagagaagccccagatggcccgagggcgcctgcagacagcccggcgccctgcagggcgagatgagcgccctgttcgcccagaagctggaggagatcagaagcaagagccccatgttcagcgccgtgagaaactag

SEQ ID NO: 93336 - DNA, 1827 bp, synthetic construct
  misc_feature 1..1827: note = Description of Artificial Sequence: Synthetic coding sequence
  source 1..1827: mol_type = other DNA
atggagatgagatggttcctgagcaagatccaggacgacttcagaggcggcaagatcaacctggagaagacccagagactgctggagaagctggacatcagatgcagctacatccacgtgaagcagatcttcaaggacaacgacagactgaagcagggcagaatcaccatcgaggagttcagagccatctacagaatcatcacccacagagaggagatcatcgagatcttcaacacctacagcgagaacagaaagatcctgctggccagcaacctggcccagttcctgacccaggagcagtacgccgccgagatgagcaaggccatcgccttcgagatcatccagaagtacgagcccatcgaggaggtgagaaaggcccaccagatgagcctggagggcttcaccagatacatggacagcagagagtgcctgctgttcaagaacgagtgcagaaaggtgtaccaggacatgacccaccccctgaacgactacttcatcagcagcagccacaacacctacctggtgagcgaccagctgctgggccccagcgacctgtggggctacgtgagcgccctggtgaagggctgcagatgcctggagatcgactgctgggacggcgcccagaacgagcccgtggtgtaccacggctacaccctgaccagcaagctgctgttcaagaccgtgatccaggccatccacaagtacgccttcatgaccagcgactaccccgtggtgctgagcctggagaaccactgcagcaccgcccagcaggaggtgatggccgacaacctgcaggccaccttcggcgagagcctgctgagcgacatgctggacgacttccccgacaccctgcccagccccgaggccctgaagttcaagatcctggtgaagaacaagaagatcggcaccctgaaggagacccacgagagaaagggcagcgacaagagaggcgacaaccaggacaaggagaccggcgtgaagaagctgcccggcgtgatgctgttcaagaagaagaagaccagaaagctgaagatcgccctggccctgagcgacctggtgatctacaccaaggccgagaagttcaagagcttccagcacagcagactgtaccagcagttcaacgagaacaacagcatcggcgagacccaggccagaaagctgagcaagctgagagtgcacgagttcatcttccacaccagaaagttcatcaccagaatctaccccaaggccaccagagccgacagcagcaacttcaacccccaggagttctggaacatcggctgccagatggtggccctgaacttccagacccccggcctgcccatggacctgcagaacggcaagttcctggacaacggcggcagcggctacatcctgaagccccacttcctgagagagagcaagagctacttcaaccccagcaacatcaaggagggcatgcccatcaccctgaccatcagactgatcagcggcatccagctgcccctgacccacagcagcagcaacaagggcgacagcctggtgatcatcgaggtgttcggcgtgcccaacgaccagatgaagcagcagaccagagtgatcaagaagaacgccttcagccccagatggaacgagaccttcaccttcatcatccacgtgcccgagctggccctgatcagattcgtggtggagggccagggcctgatcgccggcaacgagttcctgggccagtacaccctgcccctgctgtgcatgaacaagggctacagaagaatccccctgttcagcagaatgggcgagagcctggagcccgccagcctgttcgtgtacgtgtggtacgtgagatag

SEQ ID NO: 93337 - DNA, 1242 bp, synthetic construct
  misc_feature 1..1242: note = Description of Artificial Sequence: Synthetic coding sequence
  source 1..1242: mol_type = other DNA
atgagatggttcctgagcaagatccaggacgacttcagaggcggcaagatcaacctggagaagacccagagactgctggagaagctggacatcagatgcagctacatccacgtgaagcagatcttcaagaccagcgactaccccgtggtgctgagcctggagaaccactgcagcaccgcccagcaggaggtgatggccgacaacctgcaggccaccttcggcgagagcctgctgagcgacatgctggacgacttccccgacaccctgcccagccccgaggccctgaagttcaagatcctggtgaagaacaagaagatcggcaccctgaaggagacccacgagagaaagggcagcgacaagagaggcgacaaccaggacaaggagaccggcgtgaagaagctgcccggcgtgatgctgttcaagaagaagaagaccagaaagctgaagatcgccctggccctgagcgacctggtgatctacaccaaggccgagaagttcaagagcttccagcacagcagactgtaccagcagttcaacgagaacaacagcatcggcgagacccaggccagaaagctgagcaagctgagagtgcacgagttcatcttccacaccagaaagttcatcaccagaatctaccccaaggccaccagagccgacagcagcaacttcaacccccaggagttctggaacatcggctgccagatggtggccctgaacttccagacccccggcctgcccatggacctgcagaacggcaagttcctggacaacggcggcagcggctacatcctgaagccccacttcctgagagagagcaagagctacttcaaccccagcaacatcaaggagggcatgcccatcaccctgaccatcagactgatcagcggcatccagctgcccctgacccacagcagcagcaacaagggcgacagcctggtgatcatcgaggtgttcggcgtgcccaacgaccagatgaagcagcagaccagagtgatcaagaagaacgccttcagccccagatggaacgagaccttcaccttcatcatccacgtgcccgagctggccctgatcagattcgtggtggagggccagggcctgatcgccggcaacgagttcctgggccagtacaccctgcccctgctgtgcatgaacaagggctacagaagaatccccctgttcagcagaatgggcgagagcctggagcccgccagcctgttcgtgtacgtgtggtacgtgagatag

SEQ ID NO: 93338 - DNA, 1821 bp, synthetic construct
  misc_feature 1..1821: note = Description of Artificial Sequence: Synthetic coding sequence
  source 1..1821: mol_type = other DNA
atgagatggttcctgagcaagatccaggacgacttcagaggcggcaagatcaacctggagaagacccagagactgctggagaagctggacatcagatgcagctacatccacgtgaagcagatcttcaaggacaacgacagactgaagcagggcagaatcaccatcgaggagttcagagccatctacagaatcatcacccacagagaggagatcatcgagatcttcaacacctacagcgagaacagaaagatcctgctggccagcaacctggcccagttcctgacccaggagcagtacgccgccgagatgagcaaggccatcgccttcgagatcatccagaagtacgagcccatcgaggaggtgagaaaggcccaccagatgagcctggagggcttcaccagatacatggacagcagagagtgcctgctgttcaagaacgagtgcagaaaggtgtaccaggacatgacccaccccctgaacgactacttcatcagcagcagccacaacacctacctggtgagcgaccagctgctgggccccagcgacctgtggggctacgtgagcgccctggtgaagggctgcagatgcctggagatcgactgctgggacggcgcccagaacgagcccgtggtgtaccacggctacaccctgaccagcaagctgctgttcaagaccgtgatccaggccatccacaagtacgccttcatgaccagcgactaccccgtggtgctgagcctggagaaccactgcagcaccgcccagcaggaggtgatggccgacaacctgcaggccaccttcggcgagagcctgctgagcgacatgctggacgacttccccgacaccctgcccagccccgaggccctgaagttcaagatcctggtgaagaacaagaagatcggcaccctgaaggagacccacgagagaaagggcagcgacaagagaggcgacaaccaggacaaggagaccggcgtgaagaagctgcccggcgtgatgctgttcaagaagaagaagaccagaaagctgaagatcgccctggccctgagcgacctggtgatctacaccaaggccgagaagttcaagagcttccagcacagcagactgtaccagcagttcaacgagaacaacagcatcggcgagacccaggccagaaagctgagcaagctgagagtgcacgagttcatcttccacaccagaaagttcatcaccagaatctaccccaaggccaccagagccgacagcagcaacttcaacccccaggagttctggaacatcggctgccagatggtggccctgaacttccagacccccggcctgcccatggacctgcagaacggcaagttcctggacaacggcggcagcggctacatcctgaagccccacttcctgagagagagcaagagctacttcaaccccagcaacatcaaggagggcatgcccatcaccctgaccatcagactgatcagcggcatccagctgcccctgacccacagcagcagcaacaagggcgacagcctggtgatcatcgaggtgttcggcgtgcccaacgaccagatgaagcagcagaccagagtgatcaagaagaacgccttcagccccagatggaacgagaccttcaccttcatcatccacgtgcccgagctggccctgatcagattcgtggtggagggccagggcctgatcgccggcaacgagttcctgggccagtacaccctgcccctgctgtgcatgaacaagggctacagaagaatccccctgttcagcagaatgggcgagagcctggagcccgccagcctgttcgtgtacgtgtggtacgtgagatag

SEQ ID NO: 93339 - DNA, 1248 bp, synthetic construct
  misc_feature 1..1248: note = Description of Artificial Sequence: Synthetic coding sequence
  source 1..1248: mol_type = other DNA
atggagatgagatggttcctgagcaagatccaggacgacttcagaggcggcaagatcaacctggagaagacccagagactgctggagaagctggacatcagatgcagctacatccacgtgaagcagatcttcaagaccagcgactaccccgtggtgctgagcctggagaaccactgcagcaccgcccagcaggaggtgatggccgacaacctgcaggccaccttcggcgagagcctgctgagcgacatgctggacgacttccccgacaccctgcccagccccgaggccctgaagttcaagatcctggtgaagaacaagaagatcggcaccctgaaggagacccacgagagaaagggcagcgacaagagaggcgacaaccaggacaaggagaccggcgtgaagaagctgcccggcgtgatgctgttcaagaagaagaagaccagaaagctgaagatcgccctggccctgagcgacctggtgatctacaccaaggccgagaagttcaagagcttccagcacagcagactgtaccagcagttcaacgagaacaacagcatcggcgagacccaggccagaaagctgagcaagctgagagtgcacgagttcatcttccacaccagaaagttcatcaccagaatctaccccaaggccaccagagccgacagcagcaacttcaacccccaggagttctggaacatcggctgccagatggtggccctgaacttccagacccccggcctgcccatggacctgcagaacggcaagttcctggacaacggcggcagcggctacatcctgaagccccacttcctgagagagagcaagagctacttcaaccccagcaacatcaaggagggcatgcccatcaccctgaccatcagactgatcagcggcatccagctgcccctgacccacagcagcagcaacaagggcgacagcctggtgatcatcgaggtgttcggcgtgcccaacgaccagatgaagcagcagaccagagtgatcaagaagaacgccttcagccccagatggaacgagaccttcaccttcatcatccacgtgcccgagctggccctgatcagattcgtggtggagggccagggcctgatcgccggcaacgagttcctgggccagtacaccctgcccctgctgtgcatgaacaagggctacagaagaatccccctgttcagcagaatgggcgagagcctggagcccgccagcctgttcgtgtacgtgtggtacgtgagatag

SEQ ID NO: 93340 - DNA, 1212 bp, synthetic construct
  misc_feature 1..1212: note = Description of Artificial Sequence: Synthetic coding sequence
  source 1..1212: mol_type = other DNA
atggacagcagagagtgcctgctgttcaagaacgagtgcagaaaggtgtaccaggacatgacccaccccctgaacgactacttcatcagcagcagccacaacacctacctggtgagcgaccagctgctgggccccagcgacctgtggggctacgtgagcgccctggtgaagggctgcagatgcctggagatcgactgctgggacggcgcccagaacgagcccgtggtgtaccacggctacaccctgaccagcaagctgctgttcaagaccgtgatccaggccatccacaagtacgccttcatgaccagcgactaccccgtggtgctgagcctggagaaccactgcagcaccgcccagcaggaggtgatggccgacaacctgcaggccaccttcggcgagagcctgctgagcgacatgctggacgacttccccgacaccctgcccagccccgaggccctgaagttcaagatcctggtgaagaacaagaagatcggcaccctgaaggagacccacgagagaaagggcagcgacaagagaggcgacaaccaggacaaggagaccggcgtgaagaagctgcccggcgtgatgctgttcaagaagaagaagaccagaaagctgaagatcgccctggccctgagcgacctggtgatctacaccaaggccgagaagttcaagagcttccagcacagcagactgtaccagcagttcaacgagaacaacagcatcggcgagacccaggccagaaagctgagcaagctgagagtgcacgagttcatcttccacaccagaaagttcatcaccagaatctaccccaaggccaccagagccgacagcagcaacttcaacccccaggagttctggaacatcggctgccagatggtggccctgaacttccagacccccggcctgcccatggacctgcagaacggcaagttcctggacaacggcggcagcggctacatcctgaagccccacttcctgagagagagcaagagctacttcaaccccagcaacatcaaggagggcatgcccatcaccctgaccatcagactgatcagcggcatccagctgcccctgacccacagcagcagcaacaagggcgacagcctggtgatcatcgaggtgttcggcgtgcccaacgaccagatgaagcagcagaccagagtgatcaagaagaacggccagggcaacatggtgatcatccccgcctag

SEQ ID NO: 93341 - DNA, 3387 bp, synthetic construct
  misc_feature 1..3387: note = Description of Artificial Sequence: Synthetic coding sequence
  source 1..3387: mol_type = other DNA
atggccgactgcgtgagaggctgggccgccgtgggcggcgccctgcccaccagccccggccccagcctgggcgccaagggcgccctgaaggccggcgtgggcgaggacggcgtgggcggcggcagactggtgcacggcagagccagatacgacagcggcggcgtgagcaacggcgactgcagcctgggcgtgagcggcgacgaggccagagccagccccaccagaggccccagaggcgtggccctggcccccacccccagcgccgtggtgtgcaccctgcccagagagagcaagcccggcggcctgcccagaagaagcagcatcatcaaggacggcaccaagcagaagagagagagaaagaagaccgtgagcttcagcagcatgcccaccgagaagaagatcagcagcgccagcgactgcatcaacagcatggtggagggcagcgagctgaagaaggtgagaagcaacagcagaatctaccacagatacttcctgctggacgccgacatgcagagcctgagatgggagcccagcaagaaggacagcgagaaggccaagatcgacatcaagagcatcaaggaggtgagaaccggcaagaacaccgacatcttcagaagcaacggcatcagcgaccagatcagcgaggactgcgccttcagcgtgatctacggcgagaactacgagagcctggacctggtggccaacagcgccgacgtggccaacatctgggtgaccggcctgagatacctgatcagctacggcaagcacaccctggacatgctggagagcagccaggacaacatgagaaccagctgggtgagccagatgttcagcgagatcgacgtggacaacctgggccacatcaccctgtgcaacgccgtgcagtgcatcagaaacctgaaccccggcctgaagaccagcaagatcgagctgaagttcaaggagctgcacaagagcaaggacaaggccggcaccgaggtgaccaaggaggagttcatcgaggtgttccacgagctgtgcaccagacccgagatctacttcctgctggtgcagttcagcagcaacaaggagttcctggacaccaaggacctgatgatgttcctggaggccgagcagggcgtggcccacatcaacgaggagatcagcctggagatcatccacaagtacgagcccagcaaggagggccaggagaagggctggctgagcatcgacggcttcaccaactacctgatgagccccgactgctacatcttcgaccccgagcacaagaaggtgtgccaggacatgaagcagcccctgagccactacttcatcaacagcagccacaacacctacctgatcgaggaccagttcagaggccccagcgacatcaccggctacatcagagccctgaagatgggctgcagaagcgtggagctggacgtgtgggacggccccgacaacgagcccgtgatctacaccggccacaccatgaccagccagatcgtgttcagaagcgtgatcgacatcatcaacaagtacgccttcttcgccagcgagtaccccctgatcctgtgcctggagaaccactgcagcatcaagcagcagaaggtgatggtgcagcacatgaagaagctgctgggcgacaagctgtacaccaccagccccaacgtggaggagagctacctgcccagccccgacgtgctgaagggcaagatcctgatcaaggccaagaagctgagcagcaactgcagcggcgtggagggcgacgtgaccgacgaggacgagggcgccgagatgagccagagaatgggcaaggagaacatggagcagcccaacaacgtgcccgtgaagagattccagctgtgcaaggagctgagcgagctggtgagcatctgcaagagcgtgcagttcaaggagttccaggtgagcttccaggtgcagaagtactgggaggtgtgcagcttcaacgaggtgctggccagcaagtacgccaacgagaaccccggcgacttcgtgaactacaacaagagattcctggccagagtgttccccagccccatgagaatcgacagcagcaacatgaacccccaggacttctggaagtgcggctgccagatcgtggccatgaacttccagacccccggcctgatgatggacctgaacatcggctggttcagacagaacggcaactgcggctacgtgctgagacccgccatcatgagagaggaggtgagcttcttcagcgccaacaccaaggacagcgtgcccggcgtgagcccccagctgctgcacatcaagatcatcagcggccagaacttccccaagcccaagggcagcggcgccaagggcgacgtggtggacccctacgtgtacgtggagatccacggcatccccgccgactgcgccgagcagagaaccaagaccgtgcaccagaacggcgacgcccccatcttcgacgagagcttcgagttccagatcaacctgcccgagctggccatggtgagattcgtggtgctggacgacgactacatcggcgacgagttcatcggccagtacaccatccccttcgagtgcctgcagaccggctacagacacgtgcccctgcagagcctgaccggcgaggtgctggcccacgccagcctgttcgtgcacgtggccatcaccaacagaagaggcggcggcaagccccacaagagaggcctgagcgtgagaaagggcaagaagagcagagagtacgccagcctgagaaccctgtggatcaagaccgtggacgaggtgttcaagaacgcccagccccccatcagagacgccaccgacctgagagagaacatgcagaacgccgtggtgagcttcaaggagctgtgcggcctgagcagcgtggccaacctgatgcagtgcatgctggccgtgagccccagattcctgggccccgacaacacccccctggtggtgctgaacctgagcgagcagtaccccaccatggagctgcagggcatcgtgcccgaggtgctgaagaagatcgtgaccacctacgacatgatgatccagagcctgaaggccctgatcgagaacgccgacgccgtgtacgagaagatcgtgcactgccagaaggccgccatggagttccacgagcacctgcacagcatcggcaccaaggagggcctgaaggagagaaagctgcagaaggccgtggagagcttcacctggaacatcaccatcctgaagggccaggccgacctgctgaagtacgccaagaacgagaccctggagaacctgaagcagatccacttcgccgccgtgagctgcggcctgaacaagcccggcaccgagaacgccgacgtgcagaagcccagaagaagcctggaggtgatccccgagaaggccaacgacgagaccggcgagtag

SEQ ID NO: 93342 - DNA, 2883 bp, synthetic construct
  misc_feature 1..2883: note = Description of Artificial Sequence: Synthetic coding sequence
  source 1..2883: mol_type = other DNA
atgcccaccgagaagaagatcagcagcgccagcgactgcatcaacagcatggtggagggcagcgagctgaagaaggtgagaagcaacagcagaatctaccacagatacttcctgctggacgccgacatgcagagcctgagatgggagcccagcaagaaggacagcgagaaggccaagatcgacatcaagagcatcaaggaggtgagaaccggcaagaacaccgacatcttcagaagcaacggcatcagcgaccagatcagcgaggactgcgccttcagcgtgatctacggcgagaactacgagagcctggacctggtggccaacagcgccgacgtggccaacatctgggtgaccggcctgagatacctgatcagctacggcaagcacaccctggacatgctggagagcagccaggacaacatgagaaccagctgggtgagccagatgttcagcgagatcgacgtggacaacctgggccacatcaccctgtgcaacgccgtgcagtgcatcagaaacctgaaccccggcctgaagaccagcaagatcgagctgaagttcaaggagctgcacaagagcaaggacaaggccggcaccgaggtgaccaaggaggagttcatcgaggtgttccacgagctgtgcaccagacccgagatctacttcctgctggtgcagttcagcagcaacaaggagttcctggacaccaaggacctgatgatgttcctggaggccgagcagggcgtggcccacatcaacgaggagatcagcctggagatcatccacaagtacgagcccagcaaggagggccaggagaagggctggctgagcatcgacggcttcaccaactacctgatgagccccgactgctacatcttcgaccccgagcacaagaaggtgtgccaggacatgaagcagcccctgagccactacttcatcaacagcagccacaacacctacctgatcgaggaccagttcagaggccccagcgacatcaccggctacatcagagccctgaagatgggctgcagaagcgtggagctggacgtgtgggacggccccgacaacgagcccgtgatctacaccggccacaccatgaccagccagatcgtgttcagaagcgtgatcgacatcatcaacaagtacgccttcttcgccagcgagtaccccctgatcctgtgcctggagaaccactgcagcatcaagcagcagaaggtgatggtgcagcacatgaagaagctgctgggcgacaagctgtacaccaccagccccaacgtggaggagagctacctgcccagccccgacgtgctgaagggcaagatcctgatcaaggccaagaagctgagcagcaactgcagcggcgtggagggcgacgtgaccgacgaggacgagggcgccgagatgagccagagaatgggcaaggagaacatggagcagcccaacaacgtgcccgtgaagagattccagctgtgcaaggagctgagcgagctggtgagcatctgcaagagcgtgcagttcaaggagttccaggtgagcttccaggtgcagaagtactgggaggtgtgcagcttcaacgaggtgctggccagcaagtacgccaacgagaaccccggcgacttcgtgaactacaacaagagattcctggccagagtgttccccagccccatgagaatcgacagcagcaacatgaacccccaggacttctggaagtgcggctgccagatcgtggccatgaacttccagacccccggcctgatgatggacctgaacatcggctggttcagacagaacggcaactgcggctacgtgctgagacccgccatcatgagagaggaggtgagcttcttcagcgccaacaccaaggacagcgtgcccggcgtgagcccccagctgctgcacatcaagatcatcagcggccagaacttccccaagcccaagggcagcggcgccaagggcgacgtggtggacccctacgtgtacgtggagatccacggcatccccgccgactgcgccgagcagagaaccaagaccgtgcaccagaacggcgacgcccccatcttcgacgagagcttcgagttccagatcaacctgcccgagctggccatggtgagattcgtggtgctggacgacgactacatcggcgacgagttcatcggccagtacaccatccccttcgagtgcctgcagaccggctacagacacgtgcccctgcagagcctgaccggcgaggtgctggcccacgccagcctgttcgtgcacgtggccatcaccaacagaagaggcggcggcaagccccacaagagaggcctgagcgtgagaaagggcaagaagagcagagagtacgccagcctgagaaccctgtggatcaagaccgtggacgaggtgttcaagaacgcccagccccccatcagagacgccaccgacctgagagagaacatgcagaacgccgtggtgagcttcaaggagctgtgcggcctgagcagcgtggccaacctgatgcagtgcatgctggccgtgagccccagattcctgggccccgacaacacccccctggtggtgctgaacctgagcgagcagtaccccaccatggagctgcagggcatcgtgcccgaggtgctgaagaagatcgtgaccacctacgacatgatgatccagagcctgaaggccctgatcgagaacgccgacgccgtgtacgagaagatcgtgcactgccagaaggccgccatggagttccacgagcacctgcacagcatcggcaccaaggagggcctgaaggagagaaagctgcagaaggccgtggagagcttcacctggaacatcaccatcctgaagatcagaaagaccggcagaagaagcatcttcgtgccccagacccccatcatggtgtag

SEQ ID NO: 93343 - DNA, 3006 bp, synthetic construct
  misc_feature 1..3006: note = Description of Artificial Sequence: Synthetic coding sequence
  source 1..3006: mol_type = other DNA
atgcccaccgagaagaagatcagcagcgccagcgactgcatcaacagcatggtggagggcagcgagctgaagaaggtgagaagcaacagcagaatctaccacagatacttcctgctggacgccgacatgcagagcctgagatgggagcccagcaagaaggacagcgagaaggccaagatcgacatcaagagcatcaaggaggtgagaaccggcaagaacaccgacatcttcagaagcaacggcatcagcgaccagatcagcgaggactgcgccttcagcgtgatctacggcgagaactacgagagcctggacctggtggccaacagcgccgacgtggccaacatctgggtgaccggcctgagatacctgatcagctacggcaagcacaccctggacatgctggagagcagccaggacaacatgagaaccagctgggtgagccagatgttcagcgagatcgacgtggacaacctgggccacatcaccctgtgcaacgccgtgcagtgcatcagaaacctgaaccccggcctgaagaccagcaagatcgagctgaagttcaaggagctgcacaagagcaaggacaaggccggcaccgaggtgaccaaggaggagttcatcgaggtgttccacgagctgtgcaccagacccgagatctacttcctgctggtgcagttcagcagcaacaaggagttcctggacaccaaggacctgatgatgttcctggaggccgagcagggcgtggcccacatcaacgaggagatcagcctggagatcatccacaagtacgagcccagcaaggagggccaggagaagggctggctgagcatcgacggcttcaccaactacctgatgagccccgactgctacatcttcgaccccgagcacaagaaggtgtgccaggacatgaagcagcccctgagccactacttcatcaacagcagccacaacacctacctgatcgaggaccagttcagaggccccagcgacatcaccggctacatcagagccctgaagatgggctgcagaagcgtggagctggacgtgtgggacggccccgacaacgagcccgtgatctacaccggccacaccatgaccagccagatcgtgttcagaagcgtgatcgacatcatcaacaagtacgccttcttcgccagcgagtaccccctgatcctgtgcctggagaaccactgcagcatcaagcagcagaaggtgatggtgcagcacatgaagaagctgctgggcgacaagctgtacaccaccagccccaacgtggaggagagctacctgcccagccccgacgtgctgaagggcaagatcctgatcaaggccaagaagctgagcagcaactgcagcggcgtggagggcgacgtgaccgacgaggacgagggcgccgagatgagccagagaatgggcaaggagaacatggagcagcccaacaacgtgcccgtgaagagattccagctgtgcaaggagctgagcgagctggtgagcatctgcaagagcgtgcagttcaaggagttccaggtgagcttccaggtgcagaagtactgggaggtgtgcagcttcaacgaggtgctggccagcaagtacgccaacgagaaccccggcgacttcgtgaactacaacaagagattcctggccagagtgttccccagccccatgagaatcgacagcagcaacatgaacccccaggacttctggaagtgcggctgccagatcgtggccatgaacttccagacccccggcctgatgatggacctgaacatcggctggttcagacagaacggcaactgcggctacgtgctgagacccgccatcatgagagaggaggtgagcttcttcagcgccaacaccaaggacagcgtgcccggcgtgagcccccagctgctgcacatcaagatcatcagcggccagaacttccccaagcccaagggcagcggcgccaagggcgacgtggtggacccctacgtgtacgtggagatccacggcatccccgccgactgcgccgagcagagaaccaagaccgtgcaccagaacggcgacgcccccatcttcgacgagagcttcgagttccagatcaacctgcccgagctggccatggtgagattcgtggtgctggacgacgactacatcggcgacgagttcatcggccagtacaccatccccttcgagtgcctgcagaccggctacagacacgtgcccctgcagagcctgaccggcgaggtgctggcccacgccagcctgttcgtgcacgtggccatcaccaacagaagaggcggcggcaagccccacaagagaggcctgagcgtgagaaagggcaagaagagcagagagtacgccagcctgagaaccctgtggatcaagaccgtggacgaggtgttcaagaacgcccagccccccatcagagacgccaccgacctgagagagaacatgcagaacgccgtggtgagcttcaaggagctgtgcggcctgagcagcgtggccaacctgatgcagtgcatgctggccgtgagccccagattcctgggccccgacaacacccccctggtggtgctgaacctgagcgagcagtaccccaccatggagctgcagggcatcgtgcccgaggtgctgaagaagatcgtgaccacctacgacatgatgatccagagcctgaaggccctgatcgagaacgccgacgccgtgtacgagaagatcgtgcactgccagaaggccgccatggagttccacgagcacctgcacagcatcggcaccaaggagggcctgaaggagagaaagctgcagaaggccgtggagagcttcacctggaacatcaccatcctgaagggccaggccgacctgctgaagtacgccaagaacgagaccctggagaacctgaagcagatccacttcgccgccgtgagctgcggcctgaacaagcccggcaccgagaacgccgacgtgcagaagcccagaagaagcctggaggtgatccccgagaaggccaacgacgagaccggcgagtag

SEQ ID NO: 93344 - DNA, 3006 bp, synthetic construct; identical to SEQ ID NO: 93343
  misc_feature 1..3006: note = Description of Artificial Sequence: Synthetic coding sequence
  source 1..3006: mol_type = other DNA

SEQ ID NO: 93345 - DNA, 2802 bp, synthetic construct
  misc_feature 1..2802: note = Description of Artificial Sequence: Synthetic coding sequence
  source 1..2802: mol_type = other DNA
atgaccgccacccccgagagcctgttccccaccggcgacgagctggacagcagccagctgcagatggagagcgacgaggtggacaccctgaaggagggcgaggaccccgccgacagaatgcaccccttcctggccatctacgagctgcagagcctgaaggtgcaccccctggtgttcgcccccggcgtgcccgtgaccgcccaggtggtgggcaccgagagatacaccagcggcagcaaggtgggcacctgcaccctgtacagcgtgagactgacccacggcgacttcagctggaccaccaagaagaagtacagacacttccaggagctgcacagagacctgctgagacacaaggtgctgatgagcctgctgcccctggccagattcgccgtggcctacagccccgccagagacgccggcaacagagagatgcccagcctgcccagagccggccccgagggcagcaccagacacgccgccagcaagcagaagtacctggagaactacctgaacagactgctgaccatgagcttctacagaaactaccacgccatgaccgagttcctggaggtgagccagctgagcttcatccccgacctgggcagaaagggcctggagggcatgatcagaaagagaagcggcggccacagagtgcccggcctgacctgctgcggcagagaccaggtgtgctacagatggagcaagagatggctggtggtgaaggacagcttcctgctgtacatgtgcctggagaccggcgccatcagcttcgtgcagctgttcgaccccggcttcgaggtgcaggtgggcaagagaagcaccgaggccagacacggcgtgagaatcgacaccagccacagaagcctgatcctgaagtgcagcagctacagacaggccagatggtgggcccaggagatcaccgagctggcccagggccccggcagagacttcctgcagctgcacagacacgacagctacgccccccccagacccggcaccctggccagatggttcgtgaacggcgccggctacttcgccgccgtggccgacgccatcctgagagcccaggaggagatcttcatcaccgactggtggctgagccccgaggtgtacctgaagagacccgcccacagcgacgactggagactggacatcatgctgaagagaaaggccgaggagggcgtgagagtgagcatcctgctgttcaaggaggtggagctggccctgggcatcaacagcggctacagcaagagagccctgatgctgctgcaccccaacatcaaggtgatgagacaccccgaccaggtgaccctgtgggcccaccacgagaagctgctggtggtggaccaggtggtggccttcctgggcggcctggacctggcctacggcagatgggacgacctgcactacagactgaccgacctgggcgacagcagcgagagcgccgccagccagccccccacccccagacccgacagccccgccacccccgacctgagccacaaccagttcttctggctgggcaaggactacagcaacctgatcaccaaggactgggtgcagctggacagacccttcgaggacttcatcgacagagagaccacccccagaatgccctggagagacgtgggcgtggtggtgcacggcctgcccgccagagacctggccagacacttcatccagagatggaacttcaccaagaccaccaaggccaagtacaagacccccacctacccctacctgctgcccaagagcaccagcaccgccaaccagctgcccttcaccctgcccggcggccagtgcaccaccgtgcaggtgctgagaagcgtggacagatggagcgccggcaccctggagaacagcatcctgaacgcctacctgcacaccatcagagagagccagcacttcctgtacatcgagaaccagttcttcatcagctgcagcgacggcagaaccgtgctgaacaaggtgggcgacgagatcgtggacagaatcctgaaggcccacaagcagggctggtgctacagagtgtacgtgctgctgcccctgctgcccggcttcgagggcgacatcagcaccggcggcggcaacagcatccaggccatcctgcacttcacctacagaaccctgtgcagaggcgagtacagcatcctgcacagactgaaggccgccatgggcaccgcctggagagactacatcagcatctgcggcctgagaacccacggcgagctgggcggccaccccgtgagcgagctgatctacatccacagcaaggtgctgatcgccgacgacagaaccgtgatcatcggcagcgccaacatcaacgacagaagcctgctgggcaagagagacagcgagctggccgtgctgatcgaggacaccgagaccgagcccagcctgatgaacggcgccgagtaccaggccggcagattcgccctgagcctgagaaagcactgcttcggcgtgatcctgggcgccaacaccagacccgacctggacctgagagaccccatctgcgacgacttcttccagctgtggcaggacatggccgagagcaacgccaacatctacgagcagatcttcagatgcctgcccagcaacgccaccagaagcctgagaaccctgagagagtacgtggccgtggagcccctggccaccgtgagcccccccctggccagaagcgagctgacccaggtgcagggccacctggtgcacttccccctgaagttcctggaggacgagagcctgctgccccccctgggcagcaaggagggcatgatccccctggaggtgtggacctag

SEQ ID NO: 93346 - DNA, 2769 bp, synthetic construct
  misc_feature 1..2769: note = Description of Artificial Sequence: Synthetic coding sequence
  source 1..2769: mol_type = other DNA
atgaccgccacccccgagagcctgttccccaccggcgacgagctggacagcagccagctgcagatggagagcgacgaggtggacaccctgaaggagggcgaggaccccgccgacagaatgcaccccttcctggccatctacgagctgcagagcctgaaggtgcaccccctggtgttcgcccccggcgtgcccgtgaccgcccaggtggtgggcaccgagagatacaccagcggcagcaaggtgggcacctgcaccctgtacagcgtgagactgacccacggcgacttcagctggaccaccaagaagaagtacagacacttccaggagctgcacagagacctgctgagacacaaggtgctgatgagcctgctgcccctggccagattcgccgtggcctacagccccgccagagacgccggcaacagagagatgcccagcctgcccagagccggccccgagggcagcaccagacacgccgccagcaagcagaagtacctggagaactacctgaacagactgctgaccatgagcttctacagaaactaccacgccatgaccgagttcctggaggtgagccagctgagcttcatccccgacctgggcagaaagggcctggagggcatgatcagaaagagaagcggcggccacagagtgcccggcctgacctgctgcggcagagaccaggtgtgctacagatggagcaagagatggctggtggtgaaggacagcttcctgctgtacatgtgcctggagaccggcgccatcagcttcgtgcagctgttcgaccccggcttcgaggtgcaggtgggcaagagaagcaccgaggccagacacggcgtgagaatcgacaccagccacagaagcctgatcctgaagtgcagcagctacagacaggccagatggtgggcccaggagatcaccgagctggcccagggccccggcagagacttcctgcagctgcacagacacgacagctacgccccccccagacccggcaccctggccagatggttcgtgaacggcgccggctacttcgccgccgtggccgacgccatcctgagagcccaggaggagatcttcatcaccgactggtggctgagccccgaggtgtacctgaagagacccgcccacagcgacgactggagactggacatcatgctgaagagaaaggccgaggagggcgtgagagtgagcatcctgctgttcaaggaggtggagctggccctgggcatcaacagcggctacagcaagagagccctgatgctgctgcaccccaacatcaaggtgatgagacaccccgaccaggtgaccctgtgggcccaccacgagaagctgctggtggtggaccaggtggtggccttcctgggcggcctggacctggcctacggcagatgggacgacctgcactacagactgaccgacctgggcgacagcagcgagagcgccgccagccagccccccacccccagacccgacagccccgccacccccgacctgagccacaaccagttcttctggctgggcaaggactacagcaacctgatcaccaaggactgggtgcagctggacagacccttcgaggacttcatcgacagagagaccacccccagaatgccctggagagacgtgggcgtggtggtgcacggcctgcccgccagagacctggccagacacttcatccagagatggaacttcaccaagaccaccaaggccaagtacaagacccccacctacccctacctgctgcccaagagcaccagcaccgccaaccagctgcccttcaccctgcccggcggccagtgcaccaccgtgcaggtgctgagaagcgtggacagatggagcgccggcaccctggagaacagcatcctgaacgcctacctgcacaccatcagagagagccagcacttcctgtacatcgagaaccagttcttcatcagctgcagcgacggcagaaccgtgctgaacaaggtgggcgacgagatcgtggacagaatcctgaaggcccacaagcagggctggtgctacagagtgtacgtgctgctgcccctgctgcccggcttcgagggcgacatcagcaccggcggcggcaacagcatccaggccatcctgcacttcacctacagaaccctgtgcagaggcgagtacagcatcctgcacagactgaaggccgccatgggcaccgcctggagagactacatcagcatctgcggcctgagaacccacggcgagctgggcggccaccccgtgagcgagctgatctacatccacagcaaggtgctgatcgccgacgacagaaccgtgatcatcggcagcgccaacatcaacgacagaagcctgctgggcaagagagacagcgagctggccgtgctgatcgaggacaccgagaccgagcccagcctgatgaacggcgccgagtaccaggccggcagcgtgatcctgggcgccaacaccagacccgacctggacctgagagaccccatctgcgacgacttcttccagctgtggcaggacatggccgagagcaacgccaacatctacgagcagatcttcagatgcctgcccagcaacgccaccagaagcctgagaaccctgagagagtacgtggccgtggagcccctggccaccgtgagcccccccctggccagaagcgagctgacccaggtgcagggccacctggtgcacttccccctgaagttcctggaggacgagagcctgctgccccccctgggcagcaaggagggcatgatccccctggaggtgtggacctag

SEQ ID NO: 93347 - DNA, 957 bp, synthetic construct
  misc_feature 1..957: note = Description of Artificial Sequence: Synthetic coding sequence
  source 1..957: mol_type = other DNA
atggacaagcagaacagccagatgaacgccagccaccccgagaccaacctgcccgtgggctaccccccccagtacccccccaccgccttccagggcccccccggctacagcggctaccccggcccccaggtgagctacccccccccccccgccggccacagcggccccggccccgccggcttccccgtgcccaaccagcccgtgtacaaccagcccgtgtacaaccagcccgtgggcgccgccggcgtgccctggatgcccgccccccagccccccctgaactgcccccccggcctggagtacctgagccagatcgaccagatcctgatccaccagcagatcgagctgctggaggtgctgaccggcttcgagaccaacaacaagtacgagatcaagaacagcttcggccagagagtgtacttcgccgccgaggacaccgactgctgcaccagaaactgctgcggccccagcagacccttcaccctgagaatcatcgacaacatgggccaggaggtgatcaccctggagagacccctgagatgcagcagctgctgctgcccctgctgcctgcaggagatcgagatccaggccccccccggcgtgcccatcggctacgtgatccagacctggcacccctgcctgcccaagttcaccatccagaacgagaagagagaggacgtgctgaagatcagcggcccctgcgtggtgtgcagctgctgcggcgacgtggacttcgagatcaagagcctggacgagcagtgcgtggtgggcaagatcagcaagcactggaccggcatcctgagagaggccttcaccgacgccgacaacttcggcatccagttccccctggacctggacgtgaagatgaaggccgtgatgatcggcgcctgcttcctgatcgacttcatgttcttcgagagcaccggcagccaggagcagaagagcggcgtgtggtag

SEQ ID NO: 93348 - DNA, 93 bp, synthetic construct
  misc_feature 1..93: note = Description of Artificial Sequence: Synthetic coding sequence
  source 1..93: mol_type = other DNA
atgaaggccgtgatgatcggcgcctgcttcctgatcgacttcatgttcttcgagagcaccggcagccaggagcagaagagcggcgtgtggtag

SEQ ID NO: 93349 - DNA, 750 bp, synthetic construct
  misc_feature 1..750: note = Description of Artificial Sequence: Synthetic coding sequence
  source 1..750: mol_type = other DNA
atggacaagcagaacagccagatgaacgccagccaccccgagaccaacctgcccgtgggctaccccccccagtacccccccaccgccttccagggcccccccggctacagcggctaccccggcccccaggtgagctacccccccccccccgccggccacagcggccccggccccgccggcttccccgtgcccaaccagcccgtgtacaaccagcccgtgtacaaccagcccgtgggcgccgccggcgtgccctggatgcccgccccccagccccccctgaactgcccccccggcctggagtacctgagccagatcgaccagatcctgatccaccagcagatcgagctgctggaggtgctgaccggcttcgagaccaacaacaagtacgagatcaagaacagcttcggccagagagtgtacttcgccgccgaggacaccgactgctgcaccagaaactgctgcggccccagcagacccttcaccctgagaatcatcgacaacatgggccaggaggtgatcaccctggagagacccctgagatgcagcagctgctgctgcccctgctgcctgcaggagatcgagatccaggccccccccggcgtgcccatcggctacgtgatccagacctggcacccctgcctgcccaagttcaccatccagaacgagaagagagaggacgtgctgaagatcagcggcccctgcgtggtgtgcagctgctgcggcgacgtggacttcgagatcaagagctag

SEQ ID NO: 93350 - DNA, 675 bp, synthetic construct
  misc_feature 1..675: note = Description of Artificial Sequence: Synthetic coding sequence
  source 1..675: mol_type = other DNA
atgcccgccccccccccccccctgaactgcccccccggcctggagtacctgagccagatcgacatgatcctgatccaccagcagatcgagctgctggaggtgctgttcagcttcgagagcagcaacatgtacgagatcaagaacagcttcggccagagaatctacttcgccgccgaggacaccaacttctgcatcagaaactgctgcggcagaagcagacccttcaccctgagaatcaccgacaacgtgggcagagaggtgatcaccctggagagacccctgagatgcaactgctgctgctgcccctgctgcctgcaggagatcgagatccaggccccccccggcgtgcccgtgggctacgtgacccagacctggcacccctgcctgaccaagttcaccatcaagaaccagaagagagaggacgtgctgaagatcagcggcccctgcatcgtgtgcagctgcatcgccggcgtggacttcgagatcaccagcctggacgagcagatcgtggtgggcagaatcagcaagcactggagcggcttcctgagagaggccttcaccgacgccgacaacttcggcatccagttccccagagacctggacgtgaagatgaaggccgtgatgatcggcgcctgcttcctgatcgactacatgttcttcgagagaaccagatag

SEQ ID NO: 93351 - DNA, 486 bp, synthetic construct
  misc_feature 1..486: note = Description of Artificial Sequence: Synthetic coding sequence
  source 1..486: mol_type = other DNA
atgcccgccccccccccccccctgaactgcccccccggcctggagtacctgagccagatcgacatgatcctgatccaccagcagatcgagctgctggaggtgctgttcagcttcgagagcagcaacatgtacgagatcaagaacagcttcggccagagaatctacttcgccgccgaggacaccaacttctgcatcagaaactgctgcggcagaagcagacccttcaccctgagaatcaccgacaacgtgggcagagaggtgatcaccctggagagacccctgagatgcaactgctgctgctgcccctgctgcctgcaggagatcgagatccaggccccccccggcgtgcccgtgggctacgtgacccagacctggcacccctgcctgaccaagttcaccatcaagaaccagaagagagaggacgtgctgaagatcagcggcccctgcatcgtgtgcagctgcatcgccggcgtggacttcgagtag

SEQ ID NO: 93352 - DNA, 894 bp, synthetic construct
  misc_feature 1..894: note = Description of Artificial Sequence: Synthetic coding sequence
  source 1..894: mol_type = other DNA
atgagaagctggaacagcctgttctgcctgaacagcagcagaccccccggccacatcgtgtaccccaagcaccaggccggccacaccggcaagcaggccgaccacctgggcagccaggccttctaccccggcagacagcacgactacctggtgccccccgccggcaccgccggcatccccgtgcagaaccagcccggcagacccgagggcgtgccctggatgcccgccccccccccccccctgaactgcccccccggcctggagtacctgagccagatcgacatgatcctgatccaccagcagatcgagctgctggaggtgctgttcagcttcgagagcagcaacatgtacgagatcaagaacagcttcggccagagaatctacttcgccgccgaggacaccaacttctgcatcagaaactgctgcggcagaagcagacccttcaccctgagaatcaccgacaacgtgggcagagaggtgatcaccctggagagacccctgagatgcaactgctgctgctgcccctgctgcctgcaggagatcgagatccaggccccccccggcgtgcccgtgggctacgtgacccagacctggcacccctgcctgaccaagttcaccatcaagaaccagaagagagaggacgtgctgaagatcagcggcccctgcatcgtgtgcagctgcatcgccggcgtggacttcgagatcaccagcctggacgagcagatcgtggtgggcagaatcagcaagcactggagcggcttcctgagagaggccttcaccgacgccgacaacttcggcatccagttccccagagacctggacgtgaagatgaaggccgtgatgatcggcgcctgcttcctgatcgactacatgttcttcgagagaaccagatag

SEQ ID NO: 93353 - DNA, 951 bp, synthetic construct
  misc_feature 1..951: note = Description of Artificial Sequence: Synthetic coding sequence
  source 1..951: mol_type = other DNA
gtgagcgcccacctgagattcttcctggccatcatcctgagagacagcggcctgtgggccgagtggagaatgaagcccttccagatccacctgcccggcccccccggccacatcgtgtaccccaagcaccaggccggccacaccggcaagcaggccgaccacctgggcagccaggccttctaccccggcagacagcacgactacctggtgccccccgccggcaccgccggcatccccgtgcagaaccagcccggcagacccgagggcgtgccctggatgcccgccccccccccccccctgaactgcccccccggcctggagtacctgagccagatcgacatgatcctgatccaccagcagatcgagctgctggaggtgctgttcagcttcgagagcagcaacatgtacgagatcaagaacagcttcggccagagaatctacttcgccgccgaggacaccaacttctgcatcagaaactgctgcggcagaagcagacccttcaccctgagaatcaccgacaacgtgggcagagaggtgatcaccctggagagacccctgagatgcaactgctgctgctgcccctgctgcctgcaggagatcgagatccaggccccccccggcgtgcccgtgggctacgtgacccagacctggcacccctgcctgaccaagttcaccatcaagaaccagaagagagaggacgtgctgaagatcagcggcccctgcatcgtgtgcagctgcatcgccggcgtggacttcgagatcaccagcctggacgagcagatcgtggtgggcagaatcagcaagcactggagcggcttcctgagagaggccttcaccgacgccgacaacttcggcatccagttccccagagacctggacgtgaagatgaaggccgtgatgatcggcgcctgcttcctgatcgactacatgttcttcgagagaaccagatag

SEQ ID NO: 93354 - DNA, 888 bp, synthetic construct
  misc_feature 1..888: note = Description of Artificial Sequence: Synthetic coding sequence
  source 1..888: mol_type = other DNA
atggccggctacctgccccccaagggctacgcccccagccccccccccccctaccccgtgacccccggctaccccgagcccgccctgcaccccggccccggccaggcccccgtgcccgcccaggtgcccgcccccgcccccggcttcgccctgttccccagccccggccccgtggccctgggcagcgccgcccccttcctgcccctgcccggcgtgcccagcggcctggagttcctggtgcagatcgaccagatcctgatccaccagaaggccgagagagtggagaccttcctgggctgggagacctgcaacagatacgagctgagaagcggcgccggccagcccctgggccaggccgccgaggagagcaactgctgcgccagactgtgctgcggcgccagaagacccctgagagtgagactggccgaccccggcgacagagaggtgctgagactgctgagacccctgcactgcggctgcagctgctgcccctgcggcctgcaggagatggaggtgcaggccccccccggcaccaccatcggccacgtgctgcagacctggcaccccttcctgcccaagttcagcatccaggacgccgacagacagaccgtgctgagagtggtgggcccctgctggacctgcggctgcggcaccgacaccaacttcgaggtgaagaccagagacgagagcagaagcgtgggcagaatcagcaagcagtggggcggcctggtgagagaggccctgaccgacgccgacgacttcggcctgcagttccccctggacctggacgtgagagtgaaggccgtgctgctgggcgccaccttcctgatcgactacatgttcttcgagaagagaggcggcgccggccccagcgccgtgaccagctag

SEQ ID NO: 93355 - DNA, 672 bp, synthetic construct
  misc_feature 1..672: note = Description of Artificial Sequence: Synthetic coding sequence
  source 1..672: mol_type = other DNA
atggccggctacctgccccccaagggctacgcccccagccccccccccccctaccccgtgacccccggctaccccgagcccgccctgcaccccggccccggccaggcccccgtgcccgcccaggtgcccgcccccgcccccggcttcgccctgttccccagccccggccccgtggccctgggcagcgccgcccccttcctgcccctgcccggcgtgcccagcggcctggagttcctggtgcagatcgaccagatcctgatccaccagaaggccgagagagtggagaccttcctgggctggagacccgtgatcggcatgaactgcgccctgggccccggcagcccctgggtgagaagacccagaagagccaccgccgcccccgtgtgcgccgtggcccccgccggcagatgcgtgagcgcctggcccacccccggcaccgtgagatgctgcgtgtgcagcgccagatgcaccgtggccgccgccgccgcccccgtggccagcagaagatggaagtacagactgcaccaggccccccccctggccacctgctacagacccggcatccccagcagccccagcagccccagcagaatgcccatcgccagacagagctgcgagtggtggggccccgccggccccgtggccgtggcccagacccccaccctgagatag

SEQ ID NO: 93356 - DNA, 888 bp, synthetic construct; identical to SEQ ID NO: 93354
  misc_feature 1..888: note = Description of Artificial Sequence: Synthetic coding sequence
  source 1..888: mol_type = other DNA

SEQ ID NO: 93357 - DNA, 888 bp, synthetic construct; identical to SEQ ID NO: 93354
  misc_feature 1..888: note = Description of Artificial Sequence: Synthetic coding sequence
  source 1..888: mol_type = other DNA

SEQ ID NO: 93358 - DNA, 990 bp, synthetic construct
  misc_feature 1..990: note = Description of Artificial Sequence: Synthetic coding sequence
  source 1..990: mol_type = other DNA
atgagcggcgtggtgcccaccgcccccgagcagcccgccggcgagatggagaaccagaccaagccccccgaccccagacccgacgccccccccgagtacaacagccacttcctgcccggcccccccggcaccgccgtgcccccccccaccggctaccccggcggcctgcccatgggctactacagcccccagcagcccagcaccttccccctgtaccagcccgtgggcggcatccaccccgtgagataccagcccggcaagtaccccatgcccaaccagagcgtgcccatcacctggatgcccggccccacccccatggccaactgcccccccggcctggagtacctggtgcagctggacaacatccacgtgctgcagcacttcgagcccctggagatgatgacctgcttcgagaccaacaacagatacgacatcaagaacaacagcgaccagatggtgtacatcgtgaccgaggacaccgacgacttcaccagaaacgcctacagaaccctgagacccttcgtgctgagagtgaccgactgcatgggcagagagatcatgaccatgcagagacccttcagatgcacctgctgctgcttctgctgccccagcgccagacaggagctggaggtgcagtgcccccccggcgtgaccatcggcttcgtggccgagcactggaacctgtgcagagccgtgtacagcatccagaacgagaagaaggagaacgtgatgagagtgagaggcccctgcagcacctacggctgcggcagcgacagcgtgttcgaggtgaagagcctggacggcatcagcaacatcggcagcatcatcagaaagtggaacggcctgctgagcgccatggccgacgccgaccacttcgacatccacttccccctggacctggacgtgaagatgaaggccatgatcttcggcgcctgcttcctgatcgacttcatgtacttcgagagaagccccccccagagaagcagatag

SEQ ID NO: 93359 - DNA, 720 bp, synthetic construct
  misc_feature 1..720: note = Description of Artificial Sequence: Synthetic coding sequence
  source 1..720: mol_type = other DNA
atgagcggcgtggtgcccaccgcccccgagcagcccgccggcgagatggagaaccagaccaagccccccgaccccagacccgacgccccccccgagtacaacagccacttcctgcccggcccccccggcaccgccgtgcccccccccaccggctaccccggcggcctgcccatgggctactacagcccccagcagcccagcaccttccccctgtaccagcccgtgggcggcatccaccccgtgagataccagcccggcaagtaccccatgcccaaccagagcgtgcccatcacctggatgcccggccccacccccatggccaactgcccccccggcctggagtacctggtgcagctggaggtgcagtgcccccccggcgtgaccatcggcttcgtggccgagcactggaacctgtgcagagccgtgtacagcatccagaacgagaagaaggagaacgtgatgagagtgagaggcccctgcagcacctacggctgcggcagcgacagcgtgttcgaggtgaagagcctggacggcatcagcaacatcggcagcatcatcagaaagtggaacggcctgctgagcgccatggccgacgccgaccacttcgacatccacttccccctggacctggacgtgaagatgaaggccatgatcttcggcgcctgcttcctgatcgacttcatgtacttcgagagaagccccccccagagaagcagatag

SEQ ID NO: 93360 - DNA, 990 bp, synthetic construct; identical to SEQ ID NO: 93358
  misc_feature 1..990: note = Description of Artificial Sequence: Synthetic coding sequence
  source 1..990: mol_type = other DNA

SEQ ID NO: 93361 - DNA, 789 bp, synthetic construct
  misc_feature 1..789: note = Description of Artificial Sequence: Synthetic coding sequence
  source 1..789: mol_type = other DNA
atgagcggcgtggtgcccaccgcccccgagcagcccgccggcgagatggagaaccagaccaagccccccgaccccagacccgacgccccccccgagtacaacagccacttcctgcccggcccccccggcaccgccgtgcccccccccaccggctaccccggcggcctgcccatgggctactacagcccccagcagcccagcaccttccccctgtaccagcccgtgggcggcatccaccccgtgagataccagcccggcaagtaccccatgcccaaccagagcgtgcccatcacctggatgcccggccccacccccatggccaactgcccccccggcctggagtacctggtgcagctggacaacatccacgtgctgcagcacttcgagcccctggagatgatgacctgcttcgagaccaacaacagatacgacatcaagaacaacagcgaccagatggtgtacatcgtgaccgaggacaccgacgacttcaccagaaacgcctacagaaccctgagacccttcgtgctgagagtgaccgactgcatgggcagagagatcatgaccatgcagagacccttcagatgcacctgctgctgcttctgctgccccagcgccagacaggagctggaggtgcagtgcccccccggcgtgaccatcggcttcgtggccgagcactggaacctgtgcagagccgtgtacagcatccagaacgagaagaaggagaacgtgatgagagtgagaggcccctgcagcacctacggctgcggcagcgacagcgtgttcgagtag

SEQ ID NO: 93362 - DNA, 627 bp, synthetic construct
  misc_feature 1..627: note = Description of Artificial Sequence: Synthetic coding sequence
  source 1..627: mol_type = other DNA
atgagcggcgtggtgcccaccgcccccgagcagcccgccggcgagatggagaaccagaccaagccccccgaccccagacccgacgccccccccgagtacaacagccacttcctgcccggcccccccggcaccgccgtgcccccccccaccggctaccccggcggcctgcccatgggctactacagcccccagcagcccagcaccttccccctgtaccagcccgtgggcggcatccaccccgtgagataccagcccggcaagtaccccatgcccaaccagagcgtgcccatcacctggatgcccggccccacccccatggccaactgcccccccggcctggagtacctggtgcagctggacaacatccacgtgctgcagcacttcgagcccctggagatgatgacctgcttcgagaccaacaacagatacgacatcaagaacaacagcgaccagatggtgtacatcgtgaccgaggacaccgacgacttcaccagaaacgcctacagaaccctgagacccttcgtgctgagagtgaccgactgcatgggcagagagatcatgaccatgcagagacccttcagatgcacctgctgctgcttctgctgccccagcgccagacaggagtag

SEQ ID NO: 93363 - DNA, 429 bp, synthetic construct
  misc_feature 1..429: note = Description of Artificial Sequence: Synthetic coding sequence
  source 1..429: mol_type = other DNA
atgagcggcgtggtgcccaccgcccccgagcagcccgccggcgagatggagaaccagaccaagccccccgaccccagacccgacgccccccccgagtacaacagccacttcctgcccggcccccccggcaccgccgtgcccccccccaccggctaccccggcggcctgcccatgggctactacagcccccagcagcccagcaccttccccctgtaccagcccgtgggcggcatccaccccgtgagataccagcccggcaagtaccccatgcccaaccagagcgtgcccatcacctggatgcccggccccacccccatggccaactgcccccccggcctggagtacctggtgcagctggacaacatccacgtgctgcagcacttcgagcccctggagatgatgacctgcttcgagaccaacaacagatag

SEQ ID NO: 93364 - DNA, 990 bp, synthetic construct; identical to SEQ ID NO: 93358
  misc_feature 1..990: note = Description of Artificial Sequence: Synthetic coding sequence
  source 1..990: mol_type = other DNA

SEQ ID NO: 93365 - DNA, 297 bp, synthetic construct
  misc_feature 1..297: note = Description of Artificial Sequence: Synthetic coding sequence
  source 1..297: mol_type = other DNA
atgagcggcgtggtgcccaccgcccccgagcagcccgccggcgagatggagaaccagaccaagccccccgaccccagacccgacgccccccccgagtacaacagccacttcctgcccggcccccccggcaccgccgtgcccccccccaccggctaccccggcggcctgcccatgggctactacagcccccagcagcccagcaccttccccctgtaccagcccgtgggcggcatccaccccgtgagataccagcccggcaagtaccccatgcccaaccagagcgtgcccatcacctag

SEQ ID NO: 93366 - DNA, 675 bp, synthetic construct
  misc_feature 1..675: note = Description of Artificial Sequence: Synthetic coding sequence
  source 1..675: mol_type = other DNA
atggagaaccagaccaagccccccgaccccagacccgacgccccccccgagtacaacagccacttcctgcccggcccccccggcaccgccgtgcccccccccaccggctaccccggcggcctgcccatgggctactacagcccccagcagcccagcaccttccccctgtaccagcccgtgggcggcatccaccccgtgagataccagcccggcaagtaccccatgcccaaccagagcgtgcccatcacctggatgcccggccccacccccatggccaactgcccccccggcctggagtacctggtgcagctggaggtgcagtgcccccccggcgtgaccatcggcttcgtggccgagcactggaacctgtgcagagccgtgtacagcatccagaacgagaagaaggagaacgtgatgagagtgagaggcccctgcagcacctacggctgcggcagcgacagcgtgttcgaggtgaagagcctggacggcatcagcaacatcggcagcatcatcagaaagtggaacggcctgctgagcgccatggccgacgccgaccacttcgacatccacttccccctggacctggacgtgaagatgaaggccatgatcttcggcgcctgcttcctgatcgacttcatgtacttcgagagaagccccccccagagaagcagatag

SEQ ID NO: 93367 - DNA, 1326 bp, synthetic construct
  misc_feature 1..1326: note = Description of Artificial Sequence: Synthetic coding sequence
  source 1..1326: mol_type = other DNA
atggccctgttcggcgccctgttcctggccctgctggccggcgcccacgccgagttccccggctgcaagatcagagtgaccagcaaggccctggagctggtgaagcaggagggcctgagattcctggagcaggagctggagaccatcaccatccccgacctgagaggcaaggagggccacttctactacaacatcagcgaggtgaaggtgaccgagctgcagctgaccagcagcgagctggacttccagccccagcaggagctgatgctgcagatcaccaacgccagcctgggcctgagattcagaagacagctgctgtactggttcctgaaggtgtacgacttcctgagcaccttcatcaccagcggcatgagattcctgctgaaccagcagatctgccccgtgctgtaccacgccggcaccgtgctgctgaacagcctgctggacaccgtgcccgtgagaagcagcgtggacgagctggtgggcatcgactacagcctgatgaaggaccccgtggccagcaccagcaacctggacatggacttcagaggcgccttcttccccctgaccgagagaaactggagcctgcccaacagagccgtggagccccagctgcaggaggaggagagaatggtgtacgtggccttcagcgagttcttcttcgacagcgccatggagagctacttcagagccggcgccctgcagctgctgctggtgggcgacaaggtgccccacgacctggacatgctgctgagagccacctacttcggcagcatcgtgctgctgagccccgccgtgatcgacagccccctgaagctggagctgagagtgctggccccccccagatgcaccatcaagcccagcggcaccaccatcagcgtgaccgccagcgtgaccatcgccctggtgccccccgaccagcccgaggtgcagctgagcagcatgaccatggacgccagactgagcgccaagatggccctgagaggcaaggccctgagaacccagctggacctgagaagattcagaatctacagcaaccacagcgccctggagagcctggccctgatccccctgcaggcccccctgaagaccatgctgcagatcggcgtgatgcccatgctgaacgagagaacctggagaggcgtgcagatccccctgcccgagggcatcaacttcgtgcacgaggtggtgaccaaccacgccggcttcctgaccatcggcgccgacctgcacttcgccaagggcctgagagaggtgatcgagaagaacagacccgccgacgtgagagccagcaccgcccccacccccagcaccgccgccgtgtag

SEQ ID NO: 93368 - DNA, 1482 bp, synthetic construct
  misc_feature 1..1482: note = Description of Artificial Sequence: Synthetic coding sequence
  source 1..1482: mol_type = other DNA
atggccctgttcggcgccctgttcctggccctgctggccggcgcccacgccgagttccccggctgcaagatcagagtgaccagcaaggccctggagctggtgaagcaggagggcctgagattcctggagcaggagctggagaccatcaccatccccgacctgagaggcaaggagggccacttctactacaacatcagcgaggtgaaggtgaccgagctgcagctgaccagcagcgagctggacttccagccccagcaggagctgatgctgcagatcaccaacgccagcctgggcctgagattcagaagacagctgctgtactggttcttctacgacggcggctacatcaacgccagcgccgagggcgtgagcatcagaaccggcctggagctgagcagagaccccgccggcagaatgaaggtgagcaacgtgagctgccaggccagcgtgagcagaatgcacgccgccttcggcggcaccttcaagaaggtgtacgacttcctgagcaccttcatcaccagcggcatgagattcctgctgaaccagcagatctgccccgtgctgtaccacgccggcaccgtgctgctgaacagcctgctggacaccgtgcccgtgagaagcagcgtggacgagctggtgggcatcgactacagcctgatgaaggaccccgtggccagcaccagcaacctggacatggacttcagaggcgccttcttccccctgaccgagagaaactggagcctgcccaacagagccgtggagccccagctgcaggaggaggagagaatggtgtacgtggccttcagcgagttcttcttcgacagcgccatggagagctacttcagagccggcgccctgcagctgctgctggtgggcgacaaggtgccccacgacctggacatgctgctgagagccacctacttcggcagcatcgtgctgctgagccccgccgtgatcgacagccccctgaagctggagctgagagtgctggccccccccagatgcaccatcaagcccagcggcaccaccatcagcgtgaccgccagcgtgaccatcgccctggtgccccccgaccagcccgaggtgcagctgagcagcatgaccatggacgccagactgagcgccaagatggccctgagaggcaaggccctgagaacccagctggacctgagaagattcagaatctacagcaaccacagcgccctggagagcctggccctgatccccctgcaggcccccctgaagaccatgctgcagatcggcgtgatgcccatgctgaacgagagaacctggagaggcgtgcagatccccctgcccgagggcatcaacttcgtgcacgaggtggtgaccaaccacgccggcttcctgaccatcggcgccgacctgcacttcgccaagggcctgagagaggtgatcgagaagaacagacccgccgacgtgagagccagcaccgcccccacccccagcaccgccgccgtgtag

SEQ ID NO: 93369 - DNA, 1482 bp, synthetic construct; identical to SEQ ID NO: 93368
  misc_feature 1..1482: note = Description of Artificial Sequence: Synthetic coding sequence
  source 1..1482: mol_type = other DNA

SEQ ID NO: 93370 - DNA, 1542 bp, synthetic construct
  misc_feature 1..1542: note = Description of Artificial Sequence: Synthetic coding sequence
  source 1..1542: mol_type = other DNA
atgggcctgagcggcagcgacaacagctgcgaccccacccccccccccggccccctggccatggccctgttcggcgccctgttcctggccctgctggccggcgcccacgccgagttccccggctgcaagatcagagtgaccagcaaggccctggagctggtgaagcaggagggcctgagattcctggagcaggagctggagaccatcaccatccccgacctgagaggcaaggagggccacttctactacaacatcagcgaggtgaaggtgaccgagctgcagctgaccagcagcgagctggacttccagccccagcaggagctgatgctgcagatcaccaacgccagcctgggcctgagattcagaagacagctgctgtactggttcttctacgacggcggctacatcaacgccagcgccgagggcgtgagcatcagaaccggcctggagctgagcagagaccccgccggcagaatgaaggtgagcaacgtgagctgccaggccagcgtgagcagaatgcacgccgccttcggcggcaccttcaagaaggtgtacgacttcctgagcaccttcatcaccagcggcatgagattcctgctgaaccagcagatctgccccgtgctgtaccacgccggcaccgtgctgctgaacagcctgctggacaccgtgcccgtgagaagcagcgtggacgagctggtgggcatcgactacagcctgatgaaggaccccgtggccagcaccagcaacctggacatggacttcagaggcgccttcttccccctgaccgagagaaactggagcctgcccaacagagccgtggagccccagctgcaggaggaggagagaatggtgtacgtggccttcagcgagttcttcttcgacagcgccatggagagctacttcagagccggcgccctgcagctgctgctggtgggcgacaaggtgccccacgacctggacatgctgctgagagccacctacttcggcagcatcgtgctgctgagccccgccgtgatcgacagccccctgaagctggagctgagagtgctggccccccccagatgcaccatcaagcccagcggcaccaccatcagcgtgaccgccagcgtgaccatcgccctggtgccccccgaccagcccgaggtgcagctgagcagcatgaccatggacgccagactgagcgccaagatggccctgagaggcaaggccctgagaacccagctggacctgagaagattcagaatctacagcaaccacagcgccctggagagcctggccctgatccccctgcaggcccccctgaagaccatgctgcagatcggcgtgatgcccatgctgaacgagagaacctggagaggcgtgcagatccccctgcccgagggcatcaacttcgtgcacgaggtggtgaccaaccacgccggcttcctgaccatcggcgccgacctgcacttcgccaagggcctgagagaggtgatcgagaagaacagacccgccgacgtgagagccagcaccgcccccacccccagcaccgccgccgtgtag

SEQ ID NO: 93371 - DNA, 1218 bp, synthetic construct
  misc_feature 1..1218: note = Description of Artificial Sequence: Synthetic coding sequence
  source 1..1218: mol_type = other DNA
atgctgcagatcaccaacgccagcctgggcctgagattcagaagacagctgctgtactggttcttctacgacggcggctacatcaacgccagcgccgagggcgtgagcatcagaaccggcctggagctgagcagagaccccgccggcagaatgaaggtgagcaacgtgagctgccaggccagcgtgagcagaatgcacgccgccttcggcggcaccttcaagaaggtgtacgacttcctgagcaccttcatcaccagcggcatgagattcctgctgaaccagcagatctgccccgtgctgtaccacgccggcaccgtgctgctgaacagcctgctggacaccgtgcccgtgagaagcagcgtggacgagctggtgggcatcgactacagcctgatgaaggaccccgtggccagcaccagcaacctggacatggacttcagaggcgccttcttccccctgaccgagagaaactggagcctgcccaacagagccgtggagccccagctgcaggaggaggagagaatggtgtacgtggccttcagcgagttcttcttcgacagcgccatggagagctacttcagagccggcgccctgcagctgctgctggtgggcgacaaggtgccccacgacctggacatgctgctgagagccacctacttcggcagcatcgtgctgctgagccccgccgtgatcgacagccccctgaagctggagctgagagtgctggccccccccagatgcaccatcaagcccagcggcaccaccatcagcgtgaccgccagcgtgaccatcgccctggtgccccccgaccagcccgaggtgcagctgagcagcatgaccatggacgccagactgagcgccaagatggccctgagaggcaaggccctgagaacccagctggacctgagaagattcagaatctacagcaaccacagcgccctggagagcctggccctgatccccctgcaggcccccctgaagaccatgctgcagatcggcgtgatgcccatgctgaacgagagaacctggagaggcgtgcagatccccctgcccgagggcatcaacttcgtgcacgaggtggtgaccaaccacgccggcttcctgaccatcggcgccgacctgcacttcgccaagggcctgagagaggtgatcgagaagaacagacccgccgacgtgagagccagcaccgcccccacccccagcaccgccgccgtgtag

SEQ ID NO: 93372 - DNA, 1197 bp, synthetic construct
  misc_feature 1..1197: note = Description of Artificial Sequence: Synthetic coding sequence
  source 1..1197: mol_type = other DNA
atggccctgttcggcgccctgttcctggccctgctggccggcgcccacgccgagttccccggctgcaagatcagagtgaccagcaaggccctggagctggtgaagcaggagggcctgagattcctggagcaggagctggagaccatcaccatccccgacctgagaggcaaggagggccacttctactacaacatcagcgagaaggtgtacgacttcctgagcaccttcatcaccagcggcatgagattcctgctgaaccagcagatctgccccgtgctgtaccacgccggcaccgtgctgctgaacagcctgctggacaccgtgcccgtgagaagcagcgtggacgagctggtgggcatcgactacagcctgatgaaggaccccgtggccagcaccagcaacctggacatggacttcagaggcgccttcttccccctgaccgagagaaactggagcctgcccaacagagccgtggagccccagctgcaggaggaggagagaatggtgtacgtggccttcagcgagttcttcttcgacagcgccatggagagctacttcagagccggcgccctgcagctgctgctggtgggcgacaaggtgccccacgacctggacatgctgctgagagccacctacttcggcagcatcgtgctgctgagccccgccgtgatcgacagccccctgaagctggagctgagagtgctggccccccccagatgcaccatcaagcccagcggcaccaccatcagcgtgaccgccagcgtgaccatcgccctggtgccccccgaccagcccgaggtgcagctgagcagcatgaccatggacgccagactgagcgccaagatggccctgagaggcaaggccctgagaacccagctggacctgagaagattcagaatctacagcaaccacagcgccctggagagcctggccctgatccccctgcaggcccccctgaagaccatgctgcagatcggcgtgatgcccatgctgaacgagagaacctggagaggcgtgcagatccccctgcccgagggcatcaacttcgtgcacgaggtggtgaccaaccacgccggcttcctgaccatcggcgccgacctgcacttcgccaagggcctgagagaggtgatcgagaagaacagacccgccgacgtgagagccagcaccgcccccacccccagcaccgccgccgtgtag

SEQ ID NO: 93373 - DNA, 2343 bp, synthetic construct
  misc_feature 1..2343: note = Description of Artificial Sequence: Synthetic coding sequence
  source 1..2343: mol_type = other DNA
atggccccctacagcctgctggtgaccagactgcagaaggccctgggcgtgagacagtaccacgtggccagcgtgctgtgccagagagccaaggtggccatgagccacttcgagcccaacgagtacatccactacgacctgctggagaagaacatcaacatcgtgagaaagagactgaacagacccctgaccctgagcgagaagatcgtgtacggccacctggacgaccccgccagccaggagatcgagagaggcaagagctacctgagactgagacccgacagagtggccatgcaggacgccaccgcccagatggccatgctgcagttcatcagcagcggcctgagcaaggtggccgtgcccagcaccatccactgcgaccacctgatcgaggcccaggtgggcggcgagaaggacctgagaagagccaaggacatcaaccaggaggtgtacaacttcctggccaccgccggcgccaagtacggcgtgggcttctggaagcccggcagcggcatcatccaccagatcatcctggagaactacgcctaccccggcgtgctgctgatcggcaccgacagccacacccccaacggcggcggcctgggcggcatctgcatcggcgtgggcggcgccgacgccgtggacgtgatggccggcatcccctgggagctgaagtgccccaaggtgatcggcgtgaagctgaccggcagcctgagcggctggagcagccccaaggacgtgatcctgaaggtggccggcatcctgaccgtgaagggcggcaccggcgccatcgtggagtaccacggccccggcgtggacagcatcagctgcaccggcatggccaccatctgcaacatgggcgccgagatcggcgccaccaccagcgtgttcccctacaaccacagaatgaagaagtacctgagcaagaccggcagagaggacatcgccaacctggccgacgagttcaaggaccacctggtgcccgaccccggctgccactacgaccagctgatcgagatcaacctgagcgagctgaagccccacatcaacggccccttcacccccgacctggcccaccccgtggccgaggtgggcaaggtggccgagaaggagggctggcccctggacatcagagtgggcctgatcggcagctgcaccaacagcagctacgaggacatgggcagaagcgccgccgtggccaagcaggccctggcccacggcctgaagtgcaagagccagttcaccatcacccccggcagcgagcagatcagagccaccatcgagagagacggctacgcccagatcctgagagacctgggcggcatcgtgctggccaacgcctgcggcccctgcatcggccagtgggacagaaaggacatcaagaagggcgagaagaacaccatcgtgaccagctacaacagaaacttcaccggcagaaacgacgccaaccccgagacccacgccttcgtgaccagccccgagatcgtgaccgccctggccatcgccggcaccctgaagttcaaccccgagaccgactacctgaccggcaccgacggcaagaagttcagactggaggcccccgacgccgacgagctgcccaagggcgagttcgaccccggccaggacacctaccagcacccccccaaggacagcagcggccagcacgtggacgtgagccccaccagccagagactgcagctgctggagcccttcgacaagtgggacggcaaggacctggaggacctgcagatcctgatcaaggtgaagggcaagtgcaccaccgaccacatcagcgccgccggcccctggctgaagttcagaggccacctggacaacatcagcaacaacctgctgatcggcgccatcaacatcgagaacggcaaggccaacagcgtgagaaacgccgtgacccaggagttcggccccgtgcccgacaccgccagatactacaagaagcacggcatcagatgggtggtgatcggcgacgagaactacggcgagggcagcagcagagagcacgccgccctggagcccagacacctgggcggcagagccatcatcaccaagagcttcgccagaatccacgagaccaacctgaagaagcagggcctgctgcccctgaccttcgccgaccccgccgactacaacaagatccaccccgtggacaagctgaccatccagggcctgaaggacttcacccccggcaagcccctgaagtgcatcatcaagcaccccaacggcacccaggagaccatcctgctgaaccacaccttcaacgagacccagatcgagtggttcagagccggcagcgccctgaacagaatgaaggagctgcagcagtag

SEQ ID NO: 93374 - DNA, 741 bp, synthetic construct
  misc_feature 1..741: note = Description of Artificial Sequence: Synthetic coding sequence
  source 1..741: mol_type = other DNA
atggccgcccccggccccgccctgtgcctgttcgacgtggacggcaccctgaccgcccccagacagaagatcaccaaggagatggacgacttcctgcagaagctgagacagaagatcaagatcggcgtggtgggcggcagcgacttcgagaaggtgcaggagcagctgggcaacgacgtggtggagaagtacgactacgtgttccccgagaacggcctggtggcctacaaggacggcaagctgctgtgcagacagaacatccagagccacctgggcgaggccctgatccaggacctgatcaactactgcctgagctacatcgccaagatcaagctgcccaagaagagaggcaccttcatcgagttcagaaacggcatgctgaacgtgagccccatcggcagaagctgcagccaggaggagagaatcgagttctacgagctggacaagaaggagaacatcagacagaagttcgtggccgacctgagaaaggagttcgccggcaagggcctgaccttcagcatcggcggccagatcagcttcgacgtgttccccgacggctgggacaagagatactgcctgagacacgtggagaacgacggctacaagaccatctacttcttcggcgacaagaccatgcccggcggcaacgaccacgagatcttcaccgaccccagaaccatgggctacagcgtgaccgcccccgaggacaccagaagaatctgcgagctgctgttcagctag

SEQ ID NO: 93375 - DNA, 366 bp, synthetic construct
  misc_feature 1..366: note = Description of Artificial Sequence: Synthetic coding sequence
  source 1..366: mol_type = other DNA
atgctgaacgtgagccccatcggcagaagctgcagccaggaggagagaatcgagttctacgagctggacaagaaggagaacatcagacagaagttcgtggccgacctgagaaaggagttcgccggcaagggcctgaccttcagcatcggcggccagatcagcttcgacgtgttccccgacggctgggacaagagatactgcctgagacacgtggagaacgacggctacaagaccatctacttcttcggcgacaagaccatgcccggcggcaacgaccacgagatcttcaccgaccccagaaccatgggctacagcgtgaccgcccccgaggacaccagaagaatctgcgagctgctgttcagctag

SEQ ID NO: 93376 - DNA, 492 bp, synthetic construct
  misc_feature 1..492: note = Description of Artificial Sequence: Synthetic coding sequence
  source 1..492: mol_type = other DNA
atgatgaacatccagagccacctgggcgaggccctgatccaggacctgatcaactactgcctgagctacatcgccaagatcaagctgcccaagaagagaggcaccttcatcgagttcagaaacggcatgctgaacgtgagccccatcggcagaagctgcagccaggaggagagaatcgagttctacgagctggacaagaaggagaacatcagacagaagttcgtggccgacctgagaaaggagttcgccggcaagggcctgaccttcagcatcggcggccagatcagcttcgacgtgttccccgacggctgggacaagagatactgcctgagacacgtggagaacgacggctacaagaccatctacttcttcggcgacaagaccatgcccggcggcaacgaccacgagatcttcaccgaccccagaaccatgggctacagcgtgaccgcccccgaggacaccagaagaatctgcgagctgctgttcagctag

SEQ ID NO: 93377 - DNA, 579 bp, synthetic construct
  misc_feature 1..579: note = Description of Artificial Sequence: Synthetic coding sequence
  source 1..579: mol_type = other DNA
atggcccccctgggcggcgcccccagactggtgctgctgttcagcggcaagagaaagagcggcaaggacttcgtgaccgaggccctgcagagcagactgggcgccgacgtgtgcgccgtgctgagactgagcggccccctgaaggagcagtacgcccaggagcacggcctgaacttccagagactgctggacaccagcacctacaaggaggccttcagaaaggacatgatcagatggggcgaggagaagagacaggccgaccccggcttcttctgcagaaagatcgtggagggcatcagccagcccatctggctggtgagcgacaccagaagagtgagcgacatccagtggttcagagaggcctacggcgccgtgacccagaccgtgagagtggtggccctggagcagagcagacagcagagaggctgggtgttcacccccggcgtggacgacgccgagagcgagtgcggcctggacaacttcggcgacttcgactgggtgatcgagaaccacggcgtggagcagagactggaggagcagctggagaacctgatcgagttcatcagaagcagactgtag

SEQ ID NO: 93378 - DNA, 615 bp, synthetic construct
  misc_feature 1..615: note = Description of Artificial Sequence: Synthetic coding sequence
  source 1..615: mol_type = other DNA
atggagcccaaggccagctgccccgccgccgcccccctgatggagagaaagttccacgtgctggtgggcgtgaccggcagcgtggccgccctgaagctgcccctgctggtgagcaagctgctggacatccccggcctggaggtggccgtggtgaccaccgagagagccaagcacttctacagcccccaggacatccccgtgaccctgtacagcgacgccgacgagtgggagatctggaagagcagaagcgaccccgtgctgcacatcgacctgagaagatgggccgacctgctgctggtggcccccctggacgccaacaccctgggcaaggtggccagcggcatctgcgacaacctgctgacctgcgtgatgagagcctgggacagaagcaagcccctgctgttctgccccgccatgaacaccgccatgtgggagcaccccatcaccgcccagcaggtggaccagctgaaggccttcggctacgtggagatcccctgcgtggccaagaagctggtgtgcggcgacgagggcctgggcgccatggccgaggtgggcaccatcgtggacaaggtgaaggaggtgctgttccagcacagcggcttccagcagagctag

SEQ ID NO: 93379 - DNA, 171 bp, synthetic construct
  misc_feature 1..171: note = Description of Artificial Sequence: Synthetic coding sequence
  source 1..171: mol_type = other DNA
atggccgagatggaccccgtggccgagttcccccagccccccggcgccgccagatgggccgaggccctgctgagatgcttcacctggctgagactgtgccagatcagcatgttcctgagcctgaagtgcctgaacaccagaagcagccacctgggcgcccactgcagatag

SEQ ID NO: 93380 - DNA, 642 bp, synthetic construct
  misc_feature 1..642: note = Description of Artificial Sequence: Synthetic coding sequence
  source 1..642: mol_type = other DNA
atggccgagatggaccccgtggccgagttcccccagccccccggcgccgccagatgggccgaggtgatggccagattcgccgccagactgggcgcccagggcagaagagtggtgctggtgaccagcggcggcaccaaggtgcccctggaggccagacccgtgagattcctggacaacttcagcagcggcagaagaggcgccaccagcgccgaggccttcctggccgccggctacggcgtgctgttcctgtacagagccagaagcgccttcccctacgcccacagattccccccccagacctggctgagcgccctgagacccagcggccccgccctgagcggcctgctgagcctggaggccgaggagaacgccctgcccggcttcgccgaggccctgagaagctaccaggaggccgccgccgccggcaccttcctggccgtggagttcaccaccctggccgactacctgcacctgctgcaggccgccgcccaggccctgaaccccctgggccccagcgccatgttctacctggccgccgccgtgagcgacttctacgtgcccgtgagcgagatgcccgagcacaagatccagagcagcggcggccccctgcaggtgatgggcgccagcctgcccgagatctag

SEQ ID NO: 93381 - DNA, 936 bp, synthetic construct
  misc_feature 1..936: note = Description of Artificial Sequence: Synthetic coding sequence
  source 1..936: mol_type = other DNA
atggccgagatggaccccgtggccgagttcccccagccccccggcgccgccagatgggccgaggtgatggccagattcgccgccagactgggcgcccagggcagaagagtggtgctggtgaccagcggcggcaccaaggtgcccctggaggccagacccgtgagattcctggacaacttcagcagcggcagaagaggcgccaccagcgccgaggccttcctggccgccggctacggcgtgctgttcctgtacagagccagaagcgccttcccctacgcccacagattccccccccagacctggctgagcgccctgagacccagcggccccgccctgagcggcctgctgagcctggaggccgaggagaacgccctgcccggcttcgccgaggccctgagaagctaccaggaggccgccgccgccggcaccttcctggccgtggagttcaccaccctggccgactacctgcacctgctgcaggccgccgcccaggccctgaaccccctgggccccagcgccatgttctacctggccgccgccgtgagcgacttctacgtgcccgtgagcgagatgcccgagcacaagatccagagcagcggcggccccctgcagatcaccatgaagatggtgcccaagctgctgagccccctggtgaaggactgggcccccaaggccttcatcatcagcttcaagctggagaccgaccccgccatcgtgatcaacagagccagaaaggccctggagatctaccagcaccaggtggtggtggccaacatcctggagagcagacagagcttcgtgttcatcgtgaccaaggacagcgagaccaagctgctgctgagcgaggaggagatcgagaagggcgtggagatcgaggagaagatcgtggacaacctgcagagcagacacaccgccttcatcggcgacagaaactag

SEQ ID NO: 93382 - DNA, 417 bp, synthetic construct
  misc_feature 1..417: note = Description of Artificial Sequence: Synthetic coding sequence
  source 1..417: mol_type = other DNA
atgttctacctggccgccgccgtgagcgacttctacgtgcccgtgagcgagatgcccgagcacaagatccagagcagcggcggccccctgcagatcaccatgaagatggtgcccaagctgctgagccccctggtgaaggactgggcccccaaggccttcatcatcagcttcaagctggagaccgaccccgccatcgtgatcaacagagccagaaaggccctggagatctaccagcaccaggtggtggtggccaacatcctggagagcagacagagcttcgtgttcatcgtgaccaaggacagcgagaccaagctgctgctgagcgaggaggagatcgagaagggcgtggagatcgaggagaagatcgtggacaacctgcagagcagacacaccgccttcatcggcgacagaaactag

SEQ ID NO: 93383 - DNA, 417 bp, synthetic construct; identical to SEQ ID NO: 93382
  misc_feature 1..417: note = Description of Artificial Sequence: Synthetic coding sequence
  source 1..417: mol_type = other DNA

SEQ ID NO: 93384 - DNA, 393 bp, synthetic construct
  misc_feature 1..393: note = Description of Artificial Sequence: Synthetic coding sequence
  source 1..393: mol_type = other DNA
atggccgagtacggcaccctgctgcaggacctgaccaacaacatcaccctggaggacctggagcagctgaagagcgcctgcaaggaggacatccccagcgagaagagcgaggagatcaccaccggcagcgcctggttcagcttcctggagagccacaacaagctggacaaggacaacctgagctacatcgagcacatcttcgagatcagcagaagacccgacctgctgaccatggtggtggactacagaaccagagtgctgaagatcagcgaggaggacgagctggacaccaagctgaccagaatccccagcgccaagaagtacaaggacatcatcagacagcccagcgaggaggagatcatcaagctggcccccccccccaagaaggcctag

SEQ ID NO: 93385 - DNA, 456 bp, synthetic construct
  misc_feature 1..456: note = Description of Artificial Sequence: Synthetic coding sequence
  source 1..456: mol_type = other DNA
atggaggacgagggcaacaagctgtgccaggcccccccctggcccggccagaccagccccgtgatggccgagtacggcaccctgctgcaggacctgaccaacaacatcaccctggaggacctggagcagctgaagagcgcctgcaaggaggacatccccagcgagaagagcgaggagatcaccaccggcagcgcctggttcagcttcctggagagccacaacaagctggacaaggacaacctgagctacatcgagcacatcttcgagatcagcagaagacccgacctgctgaccatggtggtggactacagaaccagagtgctgaagatcagcgaggaggacgagctggacaccaagctgaccagaatccccagcgccaagaagtacaaggacatcatcagacagcccagcgaggaggagatcatcaagctggcccccccccccaagaaggcctag

SEQ ID NO: 93386 - DNA, 327 bp, synthetic construct
  misc_feature 1..327: note = Description of Artificial Sequence: Synthetic coding sequence
  source 1..327: mol_type = other DNA
atggccgagtacggcaccctgctgcaggacctgaccaacaacatcaccctggaggacctggagcagctgaagagcgcctgcaaggaggacatccccagcgagaagaacaacctgagctacatcgagcacatcttcgagatcagcagaagacccgacctgctgaccatggtggtggactacagaaccagagtgctgaagatcagcgaggaggacgagctggacaccaagctgaccagaatccccagcgccaagaagtacaaggacatcatcagacagcccagcgaggaggagatcatcaagctggcccccccccccaagaaggcctag

SEQ ID NO: 93387 - DNA, 1554 bp, synthetic construct
  misc_feature 1..1554: note = Description of Artificial Sequence: Synthetic coding sequence
  source 1..1554: mol_type = other DNA
atggagctggaggagctgggcatcagagaggagtgcggcgtgttcggctgcatcgccagcggcgagtggcccacccagctggacgtgccccacgtgatcaccctgggcctggtgggcctgcagcacagaggccaggagagcgccggcatcgtgaccagcgacggcagcagcgtgcccaccttcaagagccacaagggcatgggcctggtgaaccacgtgttcaccgaggacaacctgaagaagctgtacgtgagcaacctgggcatcggccacaccagatacgccaccaccggcaagtgcgagctggagaactgccagcccttcgtggtggagaccctgcacggcaagatcgccgtggcccacaacggcgagctggtgaacgccgccagactgagaaagaagctgctgagacacggcatcggcctgagcaccagcagcgacagcgagatgatcacccagctgctggcctacacccccccccaggagcaggacgacacccccgactgggtggccagaatcaagaacctgatgaaggaggcccccaccgcctacagcctgctgatcatgcacagagacgtgatctacgccgtgagagacccctacggcaacagacccctgtgcatcggcagactgatccccgtgagcgacatcaacgacaaggagaagaagaccagcgagaccgagggctgggtggtgagcagcgagagctgcagcttcctgagcatcggcgccagatactacagagaggtgctgcccggcgagatcgtggagatcagcagacacaacgtgcagaccctggacatcatcagcagaagcgagggcaaccccgtggccttctgcatcttcgagtacgtgtacttcgccagacccgacagcatgttcgaggaccagatggtgtacaccgtgagatacagatgcggccagcagctggccatcgaggcccccgtggacgccgacctggtgagcaccgtgcccgagagcgccacccccgccgccctggcctacgccggcaagtgcggcctgccctacgtggaggtgctgtgcaagaacagatacgtgggcagaaccttcatccagcccaacatgagactgagacagctgggcgtggccaagaagttcggcgtgctgagcgacaacttcaagggcaagagaatcgtgctggtggacgacagcatcgtgagaggcaacaccatcagccccatcatcaagctgctgaaggagagcggcgccaaggaggtgcacatcagagtggccagcccccccatcaagtacccctgcttcatgggcatcaacatccccaccaaggaggagctgatcgccaacaagcccgagttcgaccacctggccgagtacctgggcgccaacagcgtggtgtacctgagcgtggagggcctggtgagcagcgtgcaggagggcatcaagttcaagaagcagaaggagaagaagcacgacatcatgatccaggagaacggcaacggcctggagtgcttcgagaagagcggccactgcaccgcctgcctgaccggcaagtaccccgtggagctggagtggtag

SEQ ID NO: 93388 - DNA, 657 bp, synthetic construct
  misc_feature 1..657: note = Description of Artificial Sequence: Synthetic coding sequence
  source 1..657: mol_type = other DNA
atggagctgctgatcatgatcaacgcctgcaagatcgccagcgccagcagagtgaccgccgtgatcccctgcttcccctacgccagacaggacaagaaggacaagggcttcttcgacatccccgtggacaacctgtacgccgagcccgccgtgctgaagtggatcagagagaacatcagcgagtggagaaactgcaccatcgtgagccccgacgccggcggcgccaagagagtgaccagcatcgccgacagactgaacgtggacttcgccctgatccacaaggagagaaagaaggccaacgaggtggacagaatggtgctggtgggcgacgtgaaggacagagtggccatcctggtggacgacatggccgacacctgcggcaccatctgccacgccgccgacaagctgctgagcgccggcgccaccagagtgtacgccatcctgacccacggcatcttcagcggccccgccatcagcagaatcaacaacgcctgcttcgaggccgtggtggtgaccaacaccatcccccaggaggacaagatgaagcactgcagcaagatccaggtgatcgacatcagcatgatcctggccgaggccatcagaagaacccacaacggcgagagcgtgagctacctgttcagccacgtgcccctgtag

SEQ ID NO: 93389 - DNA, 507 bp, synthetic construct
  misc_feature 1..507: note = Description of Artificial Sequence: Synthetic coding sequence
  source 1..507: mol_type = other DNA
atgcccaacatcaagatcttcagcggcagcagccaccaggacctgagccagaagatcgccgacagactgggcctggagctgggcaaggtggtgaccaagaagttcagcaaccaggagacctgcgtggagatcggcgagagcgtgagaggcgaggacgtgtacatcgtgcagagcggctgcggcgagatcaacgacaacctgatggagctgctgatcatgatcaacgcctgcaagatcgccagcgccagcagagtgaccgccgtgatcccctgcttcccctacgccagacaggacaagaaggacaagagcagagcccccatcagcgccaagctggtggccaacatgctgagcgtggccggcgccgaccacatcatcaccatggacctgcacgccagccagatccaggtgagcgtggaggccaagtactggtgcctgaagggcggcagaaagggcctgatgatgctgaagaccgccgagaagcccaagatcatgcccaagtacatctag

SEQ ID NO: 93390 - DNA, 756 bp, synthetic construct
  misc_feature 1..756: note = Description of Artificial Sequence: Synthetic coding sequence
  source 1..756: mol_type = other DNA
atggagctgctgatcatgatcaacgcctgcaagatcgccagcgccagcagagtgaccgccgtgatcccctgcttcccctacgccagacaggacaagaaggacaagagcagagcccccatcagcgccaagctggtggccaacatgctgagcgtggccggcgccgaccacatcatcaccatggacctgcacgccagccagatccagggcttcttcgacatccccgtggacaacctgtacgccgagcccgccgtgctgaagtggatcagagagaacatcagcgagtggagaaactgcaccatcgtgagccccgacgccggcggcgccaagagagtgaccagcatcgccgacagactgaacgtggacttcgccctgatccacaaggagagaaagaaggccaacgaggtggacagaatggtgctggtgggcgacgtgaaggacagagtggccatcctggtggacgacatggccgacacctgcggcaccatctgccacgccgccgacaagctgctgagcgccggcgccaccagagtgtacgccatcctgacccacggcatcttcagcggccccgccatcagcagaatcaacaacgcctgcttcgaggccgtggtggtgaccaacaccatcccccaggaggacaagatgaagcactgcagcaagatccaggtgatcgacatcagcatgatcctggccgaggccatcagaagaacccacaacggcgagagcgtgagctacctgttcagccacgtgcccctgtag

SEQ ID NO: 93391 - DNA, 957 bp, synthetic construct
  misc_feature 1..957: note = Description of Artificial Sequence: Synthetic coding sequence
  source 1..957: mol_type = other DNA
atgcccaacatcaagatcttcagcggcagcagccaccaggacctgagccagaagatcgccgacagactgggcctggagctgggcaaggtggtgaccaagaagttcagcaaccaggagacctgcgtggagatcggcgagagcgtgagaggcgaggacgtgtacatcgtgcagagcggctgcggcgagatcaacgacaacctgatggagctgctgatcatgatcaacgcctgcaagatcgccagcgccagcagagtgaccgccgtgatcccctgcttcccctacgccagacaggacaagaaggacaagagcagagcccccatcagcgccaagctggtggccaacatgctgagcgtggccggcgccgaccacatcatcaccatggacctgcacgccagccagatccagggcttcttcgacatccccgtggacaacctgtacgccgagcccgccgtgctgaagtggatcagagagaacatcagcgagtggagaaactgcaccatcgtgagccccgacgccggcggcgccaagagagtgaccagcatcgccgacagactgaacgtggacttcgccctgatccacaaggagagaaagaaggccaacgaggtggacagaatggtgctggtgggcgacgtgaaggacagagtggccatcctggtggacgacatggccgacacctgcggcaccatctgccacgccgccgacaagctgctgagcgccggcgccaccagagtgtacgccatcctgacccacggcatcttcagcggccccgccatcagcagaatcaacaacgcctgcttcgaggccgtggtggtgaccaacaccatcccccaggaggacaagatgaagcactgcagcaagatccaggtgatcgacatcagcatgatcctggccgaggccatcagaagaacccacaacggcgagagcgtgagctacctgttcagccacgtgcccctgtag

SEQ ID NO: 93392 - DNA, 957 bp, synthetic construct; identical to SEQ ID NO: 93391
  misc_feature 1..957: note = Description of Artificial Sequence: Synthetic coding sequence
  source 1..957: mol_type = other DNA

SEQ ID NO: 93393 - DNA, 957 bp, synthetic construct
  misc_feature 1..957: note = Description of Artificial Sequence: Synthetic coding sequence
  source 1..957: mol_type = other DNA
acccccaacatcaagatcttcagcggcagcagccaccaggacctgagccagaagatcgccgacagactgggcctggagctgggcaaggtggtgaccaagaagttcagcaaccaggagacctgcgtggagatcgacgagagcgtgagaggcgaggacgtgtacatcgtgcagagcggctgcggcgagatcaacgacagcctgatggagctgctgatcatgatcaacgcctgcaagatcgccagcgccagcagagtgaccgccgtgatcccctgcttcccctacgccagacaggacaagaaggacaagagcagaagccccatcagcgccaagctggtggccaacatgctgagcatcgccggcgccgaccacatcatcaccatggacctgcacgccagccagatccagggcttcttcgacatccccgtggacaacctgtacgccgagcccaccgtgctgaagtggatcagagagaacatccccgagtggaagaactgcatcatcgtgagccccgacgccggcggcgccaagagagtgaccagcatcgccgaccagctgaacgtggacttcgccctgatccacaaggagagaaagaaggccaacgaggtggactgcatcgtgctggtgggcgacgtgaacgacagagtggccatcctggtggacgacatggccgacacctgcgtgaccatctgcctggccgccgacaagctgctgagcgccggcgccaccagagtgtacgccatcctgacccacggcatcttcagcggccccgccatcagcagaatcaacaccgcctgcttcgaggccgtggtggtgaccaacaccatcccccaggacgagaagatgaagcactgcagcaagatcagagtgatcgacatcagcatgatcctggccgaggccatcagaagaacccacaacggcgagagcgtgagctacctgttcagccacgtgcccctgtag

SEQ ID NO: 93394 - DNA, 957 bp, synthetic construct
  misc_feature 1..957: note = Description of Artificial Sequence: Synthetic coding sequence
  source 1..957: mol_type = other DNA
atgcccaacatcgtgctgttcagcggcagcagccaccaggacctgagccagagagtggccgacagactgggcctggagctgggcaaggtggtgaccaagaagttcagcaaccaggagaccagcgtggagatcggcgagagcgtgagaggcgaggacgtgtacatcatccagagcggctgcggcgagatcaacgacaacctgatggagctgctgatcatgatcaacgcctgcaagatcgccagcagcagcagagtgaccgccgtgatcccctgcttcccctacgccagacaggacaagaaggacaagagcagagcccccatcagcgccaagctggtggccaacatgctgagcgtggccggcgccgaccacatcatcaccatggacctgcacgccagccagatccagggcttcttcgacatccccgtggacaacctgtacgccgagcccgccgtgctgcagtggatcagagagaacatcgccgagtggaagaactgcatcatcgtgagccccgacgccggcggcgccaagagagtgaccagcatcgccgacagactgaacgtggagttcgccctgatccacaaggagagaaagaaggccaacgaggtggacagaatggtgctggtgggcgacgtgaaggacagagtggccatcctggtggacgacatggccgacacctgcggcaccatctgccacgccgccgacaagctgctgagcgccggcgccaccaaggtgtacgccatcctgacccacggcatcttcagcggccccgccatcagcagaatcaacaacgccgccttcgaggccgtggtggtgaccaacaccatcccccaggaggacaagatgaagcactgcaccaagatccaggtgatcgacatcagcatgatcctggccgaggccatcagaagaacccacaacggcgagagcgtgagctacctgttcagccacgtgcccctgtag

SEQ ID NO: 93395 - DNA, 966 bp, synthetic construct
  misc_feature 1..966: note = Description of Artificial Sequence: Synthetic coding sequence
  source 1..966: mol_type = other DNA
atgcccaacatcgtgctgttcagcggcagcagccaccaggacctgagccagagagtggccgacagactgggcctggagctgggcaaggtggtgaccaagaagttcagcaaccaggagaccagcgtggagatcggcgagagcgtgagaggcgaggacgtgtacatcatccagagcggctgcggcgagatcaacgacaacctgatggagctgctgatcatgatcaacgcctgcaagatcgccagcagcagcagagtgaccgccgtgatcccctgcttcccctacgccagacaggacaagaaggacaaggtgggcgagagcagagcccccatcagcgccaagctggtggccaacatgctgagcgtggccggcgccgaccacatcatcaccatggacctgcacgccagccagatccagggcttcttcgacatccccgtggacaacctgtacgccgagcccgccgtgctgcagtggatcagagagaacatcgccgagtggaagaactgcatcatcgtgagccccgacgccggcggcgccaagagagtgaccagcatcgccgacagactgaacgtggagttcgccctgatccacaaggagagaaagaaggccaacgaggtggacagaatggtgctggtgggcgacgtgaaggacagagtggccatcctggtggacgacatggccgacacctgcggcaccatctgccacgccgccgacaagctgctgagcgccggcgccaccaaggtgtacgccatcctgacccacggcatcttcagcggccccgccatcagcagaatcaacaacgccgccttcgaggccgtggtggtgaccaacaccatcccccaggaggacaagatgaagcactgcaccaagatccaggtgatcgacatcagcatgatcctggccgaggccatcagaagaacccacaacggcgagagcgtgagctacctgttcagccacgtgcccctgtag

SEQ ID NO: 93396 - DNA, 849 bp, synthetic construct
  misc_feature 1..849: note = Description of Artificial Sequence: Synthetic coding sequence
  source 1..849: mol_type = other DNA
atggagctgctgatcatggcctacgccctgaagaccgcctgcgccagaaacatcatcggcgtgatcccctacttcccctacagcaagcagagcaagatgagaaagagaggcagcatcgtgtgcaagctgctggccagcatgctggccaaggccggcctgacccacatcatcaccatggacctgcaccagaaggagatccagggcttcttcagcttccccgtggacaacctgagagccagccccttcctgctgcagtacatccaggaggagatccccaactacagaaacgccgtgatcgtggccaagagccccgacgccgccaagagagcccagagctacgccgagagactgagactgggcctggccgtgatccacggcgaggcccagtgcaccgagctggacatggacgacggcagacacagcccccccatggtgaagaacgccaccgtgcaccccggcctggagctgcccctgatgatggccaaggagaagccccccatcaccgtggtgggcgacgtgggcggcagaatcgccatcatcgtggacgacatcatcgacgacgtggagagcttcgtggccgccgccgagatcctgaaggagagaggcgcctacaagatctacgtgatggccacccacggcatcctgagcgccgaggcccccagactgatcgaggagagcagcgtggacgaggtggtggtgaccaacaccgtgccccacgaggtgcagaagctgcagtgccccaagatcaagaccgtggacatcagcctgatcctgagcgaggccatcagaagaatccacaacggcgagagcatggcctacctgttcagaaacatcaccgtggacgactag

SEQ ID NO: 93397 - DNA, 1158 bp, synthetic construct
  misc_feature 1..1158: note = Description of Artificial Sequence: Synthetic coding sequence
  source 1..1158: mol_type = other DNA
atgcccaagaagctgctgctgctgcccccccccagcgccagcagcgccttcagagtgcccagagccagacccgtgcccccccccgccatgaacgccgccagaaccggctacagagtgttcagcgccaacagcaccgccgcctgcaccgagctggccaagagaatcaccgagagactgggcgccgagctgggcaagagcgtggtgtaccaggagaccaacggcgagaccagagtggagatcaaggagagcgtgagaggccaggacatcttcatcatccagaccatccccagagacgtgaacaccgccgtgatggagctgctgatcatggcctacgccctgaagaccgcctgcgccagaaacatcatcggcgtgatcccctacttcccctacagcaagcagagcaagatgagaaagagaggcagcatcgtgtgcaagctgctggccagcatgctggccaaggccggcctgacccacatcatcaccatggacctgcaccagaaggagatccagggcttcttcagcttccccgtggacaacctgagagccagccccttcctgctgcagtacatccaggaggagatccccaactacagaaacgccgtgatcgtggccaagagccccgacgccgccaagagagcccagagctacgccgagagactgagactgggcctggccgtgatccacggcgaggcccagtgcaccgagctggacatggacgacggcagacacagcccccccatggtgaagaacgccaccgtgcaccccggcctggagctgcccctgatgatggccaaggagaagccccccatcaccgtggtgggcgacgtgggcggcagaatcgccatcatcgtggacgacatcatcgacgacgtggagagcttcgtggccgccgccgagatcctgaaggagagaggcgcctacaagatctacgtgatggccacccacggcatcctgagcgccgaggcccccagactgatcgaggagagcagcgtggacgaggtggtggtgaccaacaccgtgccccacgaggtgcagaagctgcagtgccccaagatcaagaccgtggacatcagcctgatcctgagcgaggccatcagaagaatccacaacggcgagagcatggcctacctgttcagaaacatcaccgtggacgactag

SEQ ID NO: 93398 - DNA, 1110 bp, synthetic construct
  misc_feature 1..1110: note = Description of Artificial Sequence: Synthetic coding sequence
  source 1..1110: mol_type = other DNA
atgttctgcgtgaccccccccgagctggagaccaagatgaacatcaccaagggcggcctggtgctgttcagcgccaacagcaacagcagctgcatggagctgagcaagaagatcgccgagagactgggcgtggagatgggcaaggtgcaggtgtaccaggagcccaacagagagaccagagtgcagatccaggagagcgtgagaggcaaggacgtgttcatcatccagaccgtgagcaaggacgtgaacaccaccatcatggagctgctgatcatggtgtacgcctgcaagaccagctgcgccaagagcatcatcggcgtgatcccctacttcccctacagcaagcagtgcaagatgagaaagagaggcagcatcgtgagcaagctgctggccagcatgatgtgcaaggccggcctgacccacctgatcaccatggacctgcaccagaaggagatccagggcttcttcaacatccccgtggacaacctgagagccagccccttcctgctgcagtacatccaggaggagatccccgactacagaaacgccgtgatcgtggccaagagccccgccagcgccaagagagcccagagcttcgccgagagactgagactgggcatcgccgtgatccacggcgaggcccaggacgccgagagcgacctggtggacggcagacacagcccccccatggtgagaagcgtggccgccatccaccccagcctggagatccccatgctgatccccaaggagaagccccccatcaccgtggtgggcgacgtgggcggcagaatcgccatcatcgtggacgacatcatcgacgacgtggacagcttcctggccgccgccgagaccctgaaggagagaggcgcctacaagatcttcgtgatggccacccacggcctgctgagcagcgacgcccccagaagaatcgaggagagcgccatcgacgaggtggtggtgaccaacaccatcccccacgaggtgcagaagctgcagtgccccaagatcaagaccgtggacatcagcatgatcctgagcgaggccatcagaagaatccacaacggcgagagcatgagctacctgttcagaaacatcggcctggacgactag

SEQ ID NO: 93399 - DNA, 1110 bp, synthetic construct; identical to SEQ ID NO: 93398
  misc_feature 1..1110: note = Description of Artificial Sequence: Synthetic coding sequence
  source 1..1110: mol_type = other DNA

SEQ ID NO: 93400 - DNA, 807 bp, synthetic construct
  misc_feature 1..807: note = Description of Artificial Sequence: Synthetic coding sequence
  source 1..807: mol_type = other DNA
atgttctgcgtgaccccccccgagctggagaccaagatgaacatcaccaagggcggcctggtgctgttcagcgccaacagcaacagcagctgcatggagctgagcaagaagatcgccgagagactgggcgtggagatgggcaaggtgcaggtgtaccaggagcccaacagagagaccagagtgcagatccaggagagcgtgagaggcaaggacgtgttcatcatccagaccgtgagcaaggacgtgaacaccaccatcatggagctgctgatcatggtgtacgcctgcaagaccagctgcgccaagagcatcatcggcgtgatcccctacttcccctacagcaagcagtgcaagatgagaaagagaggcagcatcgtgagcaagctgctggccagcatgatgtgcaaggccggcctgacccacctgatcaccatggacctgcaccagaaggagatccagggcttcttcaacatccccgtggacaacctgagagccagccccttcctgctgcagtacatccaggaggagatccccgactacagaaacgccgtgatcgtggccaagagccccgccagcgccaagagagcccagagcttcgccgagagactgagactgggcatcgccgtgatccacggcgaggcccaggacgccgagagcgacctggtggacggcagacacagcccccccatggtgagaagcgtggccgccatccaccccagcctggagatccccatgctgatccccaaggagaagccccccatcaccgtggtgggcgacgtgggcggcagaatcgccatcatcgtgtag

SEQ ID NO: 93401 - DNA, 585 bp, synthetic construct
  misc_feature 1..585: note = Description of Artificial Sequence: Synthetic coding sequence
  source 1..585: mol_type = other DNA
atgttctgcgtgaccccccccgagctggagaccaagatgaacatcaccaagggcggcctggtgctgttcagcgccaacagcaacagcagctgcatggagctgagcaagaagatcgccgagagactgggcgtggagatgggcaaggtgcaggtgtaccaggagcccaacagagagaccagagtgcagatccaggagagcgtgagaggcaaggacgtgttcatcatccagaccgtgagcaaggacgtgaacaccaccatcatggagctgctgatcatggtgtacgcctgcaagaccagctgcgccaagagcatcatcggcgtgatcccctacttcccctacagcaagcagtgcaagatgagaaagagaggcagcatcgtgagcaagctgctggccagcatgatgtgcaaggccggcctgacccacctgatcaccatggacctgcaccagaaggagatccagggcttcttcaacatccccgtggacaacctgagagccagccccttcctgctgcagtacatccaggaggagatccccgactacagaaacgccgtgatcgtggccaagagccccgccagcgccaagtag

SEQ ID NO: 93402 - DNA, 990 bp, synthetic construct
  misc_feature 1..990: note = Description of Artificial Sequence: Synthetic coding sequence
  source 1..990: mol_type = other DNA
atgttctgcgtgaccccccccgagctggagaccaagatgaacatcaccaagggcggcctggtgctgttcagcgccaacagcaacagcagctgcatggagctgagcaagaagatcgccgaggacgtgaacaccaccatcatggagctgctgatcatggtgtacgcctgcaagaccagctgcgccaagagcatcatcggcgtgatcccctacttcccctacagcaagcagtgcaagatgagaaagagaggcagcatcgtgagcaagctgctggccagcatgatgtgcaaggccggcctgacccacctgatcaccatggacctgcaccagaaggagatccagggcttcttcaacatccccgtggacaacctgagagccagccccttcctgctgcagtacatccaggaggagatccccgactacagaaacgccgtgatcgtggccaagagccccgccagcgccaagagagcccagagcttcgccgagagactgagactgggcatcgccgtgatccacggcgaggcccaggacgccgagagcgacctggtggacggcagacacagcccccccatggtgagaagcgtggccgccatccaccccagcctggagatccccatgctgatccccaaggagaagccccccatcaccgtggtgggcgacgtgggcggcagaatcgccatcatcgtggacgacatcatcgacgacgtggacagcttcctggccgccgccgagaccctgaaggagagaggcgcctacaagatcttcgtgatggccacccacggcctgctgagcagcgacgcccccagaagaatcgaggagagcgccatcgacgaggtggtggtgaccaacaccatcccccacgaggtgcagaagctgcagtgccccaagatcaagaccgtggacatcagcatgatcctgagcgaggccatcagaagaatccacaacggcgagagcatgagctacctgttcagaaacatcggcctggacgactag

SEQ ID NO: 93403 - DNA, 531 bp, synthetic construct
  misc_feature 1..531: note = Description of Artificial Sequence: Synthetic coding sequence
  source 1..531: mol_type = other DNA
atgttctgcgtgaccccccccgagctggagaccaagatgaacatcaccaagggcggcctggtgctgttcagcgccaacagcaacagcagctgcatggagctgagcaagaagatcgccgagagactgggcgtggagatgggcaaggtgcaggtgtaccaggagcccaacagagagaccagagtgcagatccaggagagcgtgagaggcaaggacgtgttcatcatccagaccgtgagcaaggacgtgaacaccaccatcatggagctgctgatcatggtgtacgcctgcaagaccagctgcgccaagagcatcatcggcgtgatcccctacttcccctacagcaagcagtgcaagatgagaaagagaggcagcatcgtgagcaagctgctggccagcatgatgtgcaaggccggcctgacccacctgatcaccatggacctgcaccagaaggagatccagggcttcttcaacatccccgtggacaacctgagagccagccccttcctgctgcagtacatccaggaggagtag

SEQ ID NO: 93404 - DNA, 735 bp, synthetic construct
  misc_feature 1..735: note = Description of Artificial Sequence: Synthetic coding sequence
  source 1..735: mol_type = other DNA
atgttctgcgtgaccccccccgagctggagaccaagatgaacatcaccaagggcggcctggtgctgttcagcgccaacagcaacagcagctgcatggagctgagcaagaagatcgccgagagactgggcgtggagatgggcaaggtgcaggtgtaccaggagcccaacagagagaccagagtgcagatccaggagagcgtgagaggcaaggacgtgttcatcatccagaccgtgagcaaggacgtgaacaccaccatcatggagctgctgatcatggtgtacgcctgcaagaccagctgcgccaagagcatcatcggcgtgatcccctacttcccctacagcaagcagtgcaagatgagaaagagaggcagcatcgtgagcaagctgctggccagcatgatgtgcaaggccggcctgacccacctgatcaccatggacctgcaccagaaggagatccagggcttcttcaacatccccgtggacaacctgagagccagccccttcctgctgcagtacatccaggaggagatccccgactacagaaacgccgtgatcgtggccaagagccccgccagcgccaagagagcccagagcttcgccgagagactgagactgggcatcgccgtgatccacggcgaggcccaggacgccgagagcgacctggtggacggcagacacagcccccccatggtgagaagcgtggccgccatccaccccagcctggagatcccctag

SEQ ID NO: 93405 - DNA, 135 bp, synthetic construct
  misc_feature 1..135: note = Description of Artificial Sequence: Synthetic coding sequence
  source 1..135: mol_type = other DNA
atgttctgcgtgaccccccccgagctggagaccaagatgaacatcaccaagggcggcctggtgctgttcagcgccaacagcaacagcagctgcatggagctgagcaagaagatcgccgagagactgggcgtgtag

SEQ ID NO: 93406 - DNA, 807 bp, synthetic construct; identical to SEQ ID NO: 93400
  misc_feature 1..807: note = Description of Artificial Sequence: Synthetic coding sequence
  source 1..807: mol_type = other DNA

SEQ ID NO: 93407 - DNA, 423 bp, synthetic construct
  misc_feature 1..423: note = Description of Artificial Sequence: Synthetic coding sequence
  source 1..423: mol_type = other DNA
atgttctgcgtgaccccccccgagctggagaccaagatgaacatcaccaagggcggcctggtgctgttcagcgccaacagcaacagcagctgcatggagctgagcaagaagatcgccgagagactgggcgtggagatgggcaaggtgcaggtgtaccaggagcccaacagagagaccagagtgcagatccaggagagcgtgagaggcaaggacgtgttcatcatccagaccgtgagcaaggacgtgaacaccaccatcatggagctgctgatcatggtgtacgcctgcaagaccagctgcgccaagagcatcatcggcgtgatcccctacttcccctacagcaagcagtgcaagatgagaaagagaggcagcatcgtgagcaagctgctggccagcatgatgtgcaaggccggcctgacctag

SEQ ID NO: 93408 - DNA, 807 bp, synthetic construct; identical to SEQ ID NO: 93400
  misc_feature 1..807: note = Description of Artificial Sequence: Synthetic coding sequence
  source 1..807: mol_type = other DNA

SEQ ID NO: 93409 - DNA, 852 bp, synthetic construct
  misc_feature 1..852: note = Description of Artificial Sequence: Synthetic coding sequence
  source 1..852: mol_type = other DNA
atggagctgctgatcatggtgtacgcctgcaagaccagctgcgccaagagcatcatcggcgtgatcccctacttcccctacagcaagcagtgcaagatgagaaagagaggcagcatcgtgagcaagctgctggccagcatgatgtgcaaggccggcctgacccacctgatcaccatggacctgcaccagaaggagatccagggcttcttcaacatccccgtggacaacctgagagccagccccttcctgctgcagtacatccaggaggagatccccgactacagaaacgccgtgatcgtggccaagagccccgccagcgccaagagagcccagagcttcgccgagagactgagactgggcatcgccgtgatccacggcgaggcccaggacgccgagagcgacctggtggacggcagacacagcccccccatggtgagaagcgtggccgccatccaccccagcctggagatccccatgctgatccccaaggagaagccccccatcaccgtggtgggcgacgtgggcggcagaatcgccatcatcgtggacgacatcatcgacgacgtggacagcttcctggccgccgccgagaccctgaaggagagaggcgcctacaagatcttcgtgatggccacccacggcctgctgagcagcgacgcccccagaagaatcgaggagagcgccatcgacgaggtggtggtgaccaacaccatcccccacgaggtgcagaagctgcagtgccccaagatcaagaccgtggacatcagcatgatcctgagcgaggccatcagaagaatccacaacggcgagagcatgagctacctgttcagaaacatcggcctggacgactag

SEQ ID NO: 93410 - DNA, 963 bp, synthetic construct
  misc_feature 1..963: note = Description of Artificial Sequence: Synthetic coding sequence
  source 1..963: mol_type = other DNA
atgttctgcgtgaccccccccgagctggagaccaagatgaacatcaccaagggcggcctggtgctgttcagcgccaacagcaacagcagctgcatggagctgagcaagaagatcgccgagagactgggcgtggagatgggcaaggtgcaggtgtaccaggagcccaacagagagaccagagtgcagatccaggagagcgtgagaggcaaggacgtgttcatcatccagaccgtgagcaaggacgtgaacaccaccatcatggagctgctgatcatggtgtacgcctgcaagaccagctgcgccaagagcatcatcggcgtgatcccctacttcccctacagcaagcagtgcaagatgagaaagagaggcagcatcgtgagcaagctgctggccagcatgatgtgcaaggccggcctgacccacctgatcaccatggacctgcaccagaaggagatccagggcttcttcaacatccccgtggacaacctgagagccagccccttcctgctgcagtacatccaggaggagatccccgactacagaaacgccgtgatcgtggccaagagccccgccagcgccaagagagcccagagcttcgccgagagactgagactgggcatcgccgtgatccacggcgaggcccaggacgccgagagcgacctggtggacggcagacacagcccccccatggtgagaagcgtggccgccatccaccccagcctggagatccccatgctgatccccaaggagaagccccccatcaccgtggtgggcgacgtgggcggcagaatcgccatcatcgtggtggtggtgaccaacaccatcccccacgaggtgcagaagctgcagtgccccaagatcaagaccgtggacatcagcatgatcctgagcgaggccatcagaagaatccacaacggcgagagcatgagctacctgttcagaaacatcggcctggacgactag

SEQ ID NO: 93411 - DNA, 237 bp, synthetic construct
  misc_feature 1..237: note = Description of Artificial Sequence: Synthetic coding sequence
  source 1..237: mol_type = other DNA
atgttctgcgtgaccccccccgagctggagaccaagatgaacatcaccaagggcggcctggtgctgttcagcgccaacagcaacagcagctgcatggagctgagcaagaagatcgccgagaacaagagcaccaacagcagagtgtgcgagggcaagagatgcttccaccaccccaactgcttcgagggcagagagcaccaccaccacggcgcccccgaccacggcgtgtgcatgtag

SEQ ID NO: 93412 - DNA, 678 bp, synthetic construct
  misc_feature 1..678: note = Description of Artificial Sequence: Synthetic coding sequence
  source 1..678: mol_type = other DNA
atggccggcagcagcgaggaggcccccgactacggcagaggcgtggtgatcatggacgactggcccggctacgacctgaacctgttcacctacccccagcactactacggcgacctggagtacgtgctgatcccccacggcatcatcgtggacagaatcgagagactggccaaggacatcatgaaggacatcggctacagcgacatcatggtgctgtgcgtgctgaagggcggctacaagttctgcgccgacctggtggagcacctgaagaacatcagcagaaacagcgacagattcgtgagcatgaaggtggacttcatcagactgaagagctacagaaacgaccagagcatgggcgagatgcagatcatcggcggcgacgacctgagcaccctggccggcaagaacgtgctgatcgtggaggacgtggtgggcaccggcagaaccatgaaggccctgctgagcaacatcgagaagtacaagcccaacatgatcaaggtggccagcctgctggtgaagagaaccagcagaagcgacggcttcagacccgactacgccggcttcgagatccccaacctgttcgtggtgggctacgccctggactacaacgagtacttcagagacctgaaccacatctgcgtgatcaacgagcacggcaaggagaagtacagagtgtag

SEQ ID NO: 93413 - DNA, 573 bp, synthetic construct
  misc_feature 1..573: note = Description of Artificial Sequence: Synthetic coding sequence
  source 1..573: mol_type = other DNA
atggccggcagcagcgaggaggcccccgactacggcagaggcgtggtgatcatggacgactggcccggctacgacctgaacctgttcacctacccccagcactactacggcgacctggagtacgtgctgatcccccacggcatcatcgtggacagaatcgagagactggccaaggacatcatgaaggacatcggctacagcgacatcatggtgctgtgcgtgctgaagggcggctacaagttctgcgccgacctggtggagcacctgaagaacatcagcagaaacagcgacagattcgtgagcatgaaggtggacttcatcagactgaagagctacagaaacgaccagagcatgggcgagatgcagatcatcggcggcgacgacctgagcaccctggccggcaagagcgtgctgttcgccaaggacgtggtgggcaccggcagaaccatgaaggccctgctgagcaacatcgagaagtacaagcccaacatgatcaaggtggccagcctgctggtgaagagaaccagcagaagcgacggcttcagacccgacagccacatgagacaccagtag

SEQ ID NO: 93414 - DNA, 522 bp, synthetic construct
  misc_feature 1..522: note = Description of Artificial Sequence: Synthetic coding sequence
  source 1..522: mol_type = other DNA
atggccggcagcagcgaggaggcccccgactacggcagaggcgtggtgatcatggacgactggcccggctacgacctgaacctgttcacctacccccagcactactacggcgacctggagtacgtgctgatcccccacggcatcatcgtggacagaatcgagagactggccaaggacatcatgaaggacatcggctacagcgacatcatggtgctgtgcgtgctgaagggcggctacaagttctgcgccgacctggtggagcacctgaagaacatcagcagaaacagcgacagattcgtgagcatgaaggtggacttcatcagactgaagagctacagactgagagccagactgaagagaaccaccatctgcgacagaggcggcctggccttcagccagggctacatgagcagctgcgcccccctgcaggagagccccaacaccctgtggagaggctacctgcaggtgctgatcccctgcttccacatcagattccagctgcccagaagcgagcagaactag

SEQ ID NO: 93415 - DNA, 573 bp, synthetic construct
  misc_feature 1..573: note = Description of Artificial Sequence: Synthetic coding sequence
  source 1..573: mol_type = other DNA
atggccggcagcagcgaggaggcccccgactacggcagaggcgtggtgatcatggacgactggcccggctacgacctgaacctgttcacctacccccagcactactacggcgacctggagtacgtgctgatcccccacggcatcatcgtggacagaatcgagagactggccaaggacatcatgaaggacatcggctacagcgacatcatggtgctgtgcgtgctgaagggcggctacaagttctgcgccgacctggtggagcacctgaagaacatcagcagaaacagcgacagattcgtgagcatgaaggtggacttcatcagactgaagagctacagaaacgaccagagcatgggcgagatgcagatcatcggcggcgacgacctgagcaccctggccggcaagaacgtgctgatcgtggaggacgtggtgggcaccggcagaaccatgaaggccctgctgagcaacatcgagaagtacaagcccaacatgatcaaggtggccagcctgctggtgaagagaaccagcagaagcgacggcttcagacccgacagccacatgagacaccagtag

SEQ ID NO: 93416 - DNA, 1299 bp, synthetic construct
  misc_feature 1..1299: note = Description of Artificial Sequence: Synthetic coding sequence
  source 1..1299: mol_type = other DNA
atggccaccgccgaggtgctgaacatcggcaagaagctgtacgagggcaagaccaaggaggtgtacgagctgctggacagccccggcaaggtgctgctgcagagcaaggaccagatcaccgccggcaacgccgccagaaagaaccacctggagggcaaggccgccatcagcaacaagatcaccagctgcatcttccagctgctgcaggaggccgtgaccagctacaagagcaacagaatcaagaccgccttcaccagaaagtgcggcgagaccgccttcatcgccccccagtgcgagatgatccccatcgagtgggtgtgcagaagaatcgccaccggcagcttcctgaagagaaaccccggcgtgaaggagggctacaagttctacccccccaaggtggagctgttcttcaaggacgacgccaacaacgacccccagtggagcgaggagcagctgatcgccgccaagttctgcttcgccggcctgctgatcggccagaccgaggtggacatcatgagccacgccacccaggccatcttcgagatcctggagaagagctggctgccccagaactgcaccctggtggacatgaagatcgagttcggcgtggacgtgaccaccaaggagatcgtgctggccgacgtgatcgacaacgacagctggagactgtggcccagcggcgacagaagccagcagaaggacaagcagagctacagagacctgaaggaggtgacccccgagggcctgcagatggtgaagaagaacttcgagtgggtggccgagagagtggagctgctgctgaagagcgagagccagtgcagagtggtggtgctgatgggcagcaccagcgacctgggccactgcgagaagatcaagaaggcctgcggcaacttcggcatcccctgcgagctgagagtgaccagcgcccacaagggccccgacgagaccctgagaatcaaggccgagtacgagggcgacggcatccccaccgtgttcgtggccgtggccggcagaagcaacggcctgggccccgtgatgagcggcaacaccgcctaccccgtgatcagctgcccccccctgacccccgactggggcgtgcaggacgtgtggagcagcctgagactgcccagcggcctgggctgcagcaccgtgctgagccccgagggcagcgcccagttcgccgcccagatcttcggcctgagcaaccacctggtgtggagcaagctgagagccagcatcctgaacacctggatcagcctgaagcaggccgacaagaagatcagagagtgcaacctgtag

SEQ ID NO: 93417 - DNA, 1278 bp, synthetic construct
  misc_feature 1..1278: note = Description of Artificial Sequence: Synthetic coding sequence
  source 1..1278: mol_type = other DNA
atggccaccgccgaggtgctgaacatcggcaagaagctgtacgagggcaagaccaaggaggtgtacgagctgctggacagccccggcaaggtgctgctgcagagcaaggaccagatcaccgccggcaacgccgccagaaagaaccacctggagggcaaggccgccatcagcaacaagatcaccagctgcatcttccagctgctgcaggaggccggcatcaagaccgccttcaccagaaagtgcggcgagaccgccttcatcgccccccagtgcgagatgatccccatcgagtgggtgtgcagaagaatcgccaccggcagcttcctgaagagaaaccccggcgtgaaggagggctacaagttctacccccccaaggtggagctgttcttcaaggacgacgccaacaacgacccccagtggagcgaggagcagctgatcgccgccaagttctgcttcgccggcctgctgatcggccagaccgaggtggacatcatgagccacgccacccaggccatcttcgagatcctggagaagagctggctgccccagaactgcaccctggtggacatgaagatcgagttcggcgtggacgtgaccaccaaggagatcgtgctggccgacgtgatcgacaacgacagctggagactgtggcccagcggcgacagaagccagcagaaggacaagcagagctacagagacctgaaggaggtgacccccgagggcctgcagatggtgaagaagaacttcgagtgggtggccgagagagtggagctgctgctgaagagcgagagccagtgcagagtggtggtgctgatgggcagcaccagcgacctgggccactgcgagaagatcaagaaggcctgcggcaacttcggcatcccctgcgagctgagagtgaccagcgcccacaagggccccgacgagaccctgagaatcaaggccgagtacgagggcgacggcatccccaccgtgttcgtggccgtggccggcagaagcaacggcctgggccccgtgatgagcggcaacaccgcctaccccgtgatcagctgcccccccctgacccccgactggggcgtgcaggacgtgtggagcagcctgagactgcccagcggcctgggctgcagcaccgtgctgagccccgagggcagcgcccagttcgccgcccagatcttcggcctgagcaaccacctggtgtggagcaagctgagagccagcatcctgaacacctggatcagcctgaagcaggccgacaagaagatcagagagtgcaacctgtag

SEQ ID NO: 93418 - DNA, 1278 bp, synthetic construct; identical to SEQ ID NO: 93417
  misc_feature 1..1278: note = Description of Artificial Sequence: Synthetic coding sequence
  source 1..1278: mol_type = other DNA

SEQ ID NO: 93419 - DNA, 4017 bp, synthetic construct
  misc_feature 1..4017: note = Description of Artificial Sequence: Synthetic coding sequence
  source 1..4017: mol_type = other DNA
atgagccccgtgctgcacttctacgtgagacccagcggccacgagggcgccgcccccggccacaccagaagaaagctgcagggcaagctgcccgagctgcagggcgtggagaccgagctgtgctacaacgtgaactggaccgccgaggccctgcccagcgccgaggagaccaagaagctgatgtggctgttcggctgccccctgctgctggacgacgtggccagagagagctggctgctgcccggcagcaacgacctgctgctggaggtgggccccagactgaacttcagcacccccaccagcaccaacatcgtgagcgtgtgcagagccaccggcctgggccccgtggacagagtggagaccaccagaagatacagactgagcttcgcccacccccccagcgccgaggtggaggccatcgccctggccaccctgcacgacagaatgaccgagcagcacttcccccaccccatccagagcttcagccccgagagcatgcccgagcccctgaacggccccatcaacatcctgggcgagggcagactggccctggagaaggccaaccaggagctgggcctggccctggacagctgggacctggacttctacaccaagagattccaggagctgcagagaaaccccagcaccgtggaggccttcgacctggcccagagcaacagcgagcacagcagacactggttcttcaagggccagctgcacgtggacggccagaagctggtgcacagcctgttcgagagcatcatgagcacccaggagagcagcaaccccaacaacgtgctgaagttctgcgacaacagcagcgccatccagggcaaggaggtgagattcctgagacccgaggaccccaccagacccagcagattccagcagcagcagggcctgagacacgtggtgttcaccgccgagacccacaacttccccaccggcgtgtgccccttcagcggcgccaccaccggcaccggcggcagaatcagagacgtgcagtgcaccggcagaggcgcccacgtggtggccggcaccgccggctactgcttcggcaacctgcacatccccggctacaacctgccctgggaggaccccagcttccagtaccccggcaacttcgccagacccctggaggtggccatcgaggccagcaacggcgccagcgactacggcaacaagttcggcgagcccgtgctggccggcttcgccagaagcctgggcctgcagctgcccgacggccagagaagagagtggatcaagcccatcatgttcagcggcggcatcggcagcatggaggccgaccacatcagcaaggaggcccccgagcccggcatggaggtggtgaaggtgggcggccccgtgtacagaatcggcgtgggcggcggcgccgccagcagcgtgcaggtgcagggcgacaacaccagcgacctggacttcggcgccgtgcagagaggcgaccccgagatggagcagaagatgaacagagtgatcagagcctgcgtggaggcccccaagggcaaccccatctgcagcctgcacgaccagggcgccggcggcaacggcaacgtgctgaaggagctgagcgaccccgccggcgccatcatctacaccagcagattccagctgggcgaccccaccctgaacgccctggagatctggggcgccgagtaccaggagagcaacgccctgctgctgagaagccccaacagagacttcctgacccacgtgagcgccagagagagatgccccgcctgcttcgtgggcaccatcaccggcgacagaagaatcgtgctggtggacgacagagagtgccccgtgagaagaaacggccagggcgacgccccccccacccccctgcccacccccgtggacctggagctggagtgggtgctgggcaagatgcccagaaaggagttcttcctgcagagaaagccccccatgctgcagcccctggccctgccccccggcctgagcgtgcaccaggccctggagagagtgctgagactgcccgccgtggccagcaagagatacctgaccaacaaggtggacagaagcgtgggcggcctggtggcccagcagcagtgcgtgggccccctgcagacccccctggccgacgtggccgtggtggccctgagccacgaggagctgatcggcgccgccaccgccctgggcgagcagcccgtgaagagcctgctggaccccaaggtggccgccagactggccgtggccgaggccctgaccaacctggtgttcgccctggtgaccgacctgagagacgtgaagtgcagcggcaactggatgtgggccgccaagctgcccggcgagggcgccgccctggccgacgcctgcgaggccatggtggccgtgatggccgccctgggcgtggccgtggacggcggcaaggacagcctgagcatggccgccagagtgggcaccgagaccgtgagagcccccggcagcctggtgatcagcgcctacgccgtgtgccccgacatcaccgccaccgtgacccccgacctgaagcaccccgagggcagaggccacctgctgtacgtggccctgagccccggccagcacagactgggcggcaccgccctggcccagtgcttcagccagctgggcgagcacccccccgacctggacctgcccgagaacctggtgagagccttcagcatcacccagggcctgctgaaggacagactgctgtgcagcggccacgacgtgagcgacggcggcctggtgacctgcctgctggagatggccttcgccggcaactgcggcctgcaggtggacgtgcccgtgcccagagtggacgtgctgagcgtgctgttcgccgaggagcccggcctggtgctggaggtgcaggagcccgacctggcccaggtgctgaagagatacagagacgccggcctgcactgcctggagctgggccacaccggcgaggccggcccccacgccatggtgagagtgagcgtgaacggcgccgtggtgctggaggagcccgtgggcgagctgagagccctgtgggaggagaccagcttccagctggacagactgcaggccgagcccagatgcgtggccgaggaggagagaggcctgagagagagaatgggccccagctactgcctgccccccaccttccccaaggccagcgtgcccagagagcccggcggccccagccccagagtggccatcctgagagaggagggcagcaacggcgacagagagatggccgacgccttccacctggccggcttcgaggtgtgggacgtgaccatgcaggacctgtgcagcggcgccatcggcctggacaccttcagaggcgtggccttcgtgggcggcttcagctacgccgacgtgctgggcagcgccaagggctgggccgccgccgtgaccttccaccccagagccggcgccgagctgagaagattcagaaagagacccgacaccttcagcctgggcgtgtgcaacggctgccagctgctggccctgctgggctgggtgggcggcgaccccaacgaggacgccgccgagatgggccccgacagccagcccgccagacccggcctgctgctgagacacaacctgagcggcagatacgagagcagatgggccagcgtgagagtgggccccggccccgccctgatgctgagaggcatggagggcgccgtgctgcccgtgtggagcgcccacggcgagggctacgtggccttcagcagccccgagctgcaggcccagatcgaggccagaggcctggcccccctgcactgggccgacgacgacggcaaccccaccgagcagtaccccctgaaccccaacggcagccccggcggcgtggccggcatctgcagctgcgacggcagacacctggccgtgatgccccaccccgagagagccgtgagaccctggcagtgggcctggagacccccccccttcgacaccctgaccaccagcccctggctgcagctgttcatcaacgccagaaactggaccctggagggcagctgctag

SEQ ID NO: 93420 - DNA, 2745 bp, synthetic construct
  misc_feature 1..2745: note = Description of Artificial Sequence: Synthetic coding sequence
  source 1..2745: mol_type = other DNA
atgttcagcggcggcatcggcagcatggaggccgaccacatcagcaaggaggcccccgagcccggcatggaggtggtgaaggtgggcggccccgtgtacagaatcggcgtgggcggcggcgccgccagcagcgtgcaggtgcagggcgacaacaccagcgacctggacttcggcgccgtgcagagaggcgaccccgagatggagcagaagatgaacagagtgatcagagcctgcgtggaggcccccaagggcaaccccatctgcagcctgcacgaccagggcgccggcggcaacggcaacgtgctgaaggagctgagcgaccccgccggcgccatcatctacaccagcagattccagctgggcgaccccaccctgaacgccctggagatctggggcgccgagtaccaggagagcaacgccctgctgctgagaagccccaacagagacttcctgacccacgtgagcgccagagagagatgccccgcctgcttcgtgggcaccatcaccggcgacagaagaatcgtgctggtggacgacagagagtgccccgtgagaagaaacggccagggcgacgccccccccacccccctgcccacccccgtggacctggagctggagtgggtgctgggcaagatgcccagaaaggagttcttcctgcagagaaagccccccatgctgcagcccctggccctgccccccggcctgagcgtgcaccaggccctggagagagtgctgagactgcccgccgtggccagcaagagatacctgaccaacaaggtggacagaagcgtgggcggcctggtggcccagcagcagtgcgtgggccccctgcagacccccctggccgacgtggccgtggtggccctgagccacgaggagctgatcggcgccgccaccgccctgggcgagcagcccgtgaagagcctgctggaccccaaggtggccgccagactggccgtggccgaggccctgaccaacctggtgttcgccctggtgaccgacctgagagacgtgaagtgcagcggcaactggatgtgggccgccaagctgcccggcgagggcgccgccctggccgacgcctgcgaggccatggtggccgtgatggccgccctgggcgtggccgtggacggcggcaaggacagcctgagcatggccgccagagtgggcaccgagaccgtgagagcccccggcagcctggtgatcagcgcctacgccgtgtgccccgacatcaccgccaccgtgacccccgacctgaagcaccccgagggcagaggccacctgctgtacgtggccctgagccccggccagcacagactgggcggcaccgccctggcccagtgcttcagccagctgggcgagcacccccccgacctggacctgcccgagaacctggtgagagccttcagcatcacccagggcctgctgaaggacagactgctgtgcagcggccacgacgtgagcgacggcggcctggtgacctgcctgctggagatggccttcgccggcaactgcggcctgcaggtggacgtgcccgtgcccagagtggacgtgctgagcgtgctgttcgccgaggagcccggcctggtgctggaggtgcaggagcccgacctggcccaggtgctgaagagatacagagacgccggcctgcactgcctggagctgggccacaccggcgaggccggcccccacgccatggtgagagtgagcgtgaacggcgccgtggtgctggaggagcccgtgggcgagctgagagccctgtgggaggagaccagcttccagctggacagactgcaggccgagcccagatgcgtggccgaggaggagagaggcctgagagagagaatgggccccagctactgcctgccccccaccttccccaaggccagcgtgcccagagagcccggcggccccagccccagagtggccatcctgagagaggagggcagcaacggcgacagagagatggccgacgccttccacctggccggcttcgaggtgtgggacgtgaccatgcaggacctgtgcagcggcgccatcggcctggacaccttcagaggcgtggccttcgtgggcggcttcagctacgccgacgtgctgggcagcgccaagggctgggccgccgccgtgaccttccaccccagagccggcgccgagctgagaagattcagaaagagacccgacaccttcagcctgggcgtgtgcaacggctgccagctgctggccctgctgggctgggtgggcggcgaccccaacgaggacgccgccgagatgggccccgacagccagcccgccagacccggcctgctgctgagacacaacctgagcggcagatacgagagcagatgggccagcgtgagagtgggccccggccccgccctgatgctgagaggcatggagggcgccgtgctgcccgtgtggagcgcccacggcgagggctacgtggccttcagcagccccgagctgcaggcccagatcgaggccagaggcctggcccccctgcactgggccgacgacgacggcaaccccaccgagcagtaccccctgaaccccaacggcagccccggcggcgtggccggcatctgcagctgcgacggcagacacctggccgtgatgccccaccccgagagagccgtgagaccctggcagtgggcctggagacccccccccttcgacaccctgaccaccagcccctggctgcagctgttcatcaacgccagaaactggaccctggagggcagctgctag

SEQ ID NO: 93421 - DNA, 2244 bp, synthetic construct
  misc_feature 1..2244: note = Description of Artificial Sequence: Synthetic coding sequence
  source 1..2244: mol_type = other DNA
gtgaagggcgagagaagaatcgtgctggtggacgacagagagtgccccgtgagaagaaacggccagggcgacgccccccccacccccctgcccacccccgtggacctggagctggagtgggtgctgggcaagatgcccagaaaggagttcttcctgcagagaaagccccccatgctgcagcccctggccctgccccccggcctgagcgtgcaccaggccctggagagagtgctgagactgcccgccgtggccagcaagagatacctgaccaacaaggtggacagaagcgtgggcggcctggtggcccagcagcagtgcgtgggccccctgcagacccccctggccgacgtggccgtggtggccctgagccacgaggagctgatcggcgccgccaccgccctgggcgagcagcccgtgaagagcctgctggaccccaaggtggccgccagactggccgtggccgaggccctgaccaacctggtgttcgccctggtgaccgacctgagagacgtgaagtgcagcggcaactggatgtgggccgccaagctgcccggcgagggcgccgccctggccgacgcctgcgaggccatggtggccgtgatggccgccctgggcgtggccgtggacggcggcaaggacagcctgagcatggccgccagagtgggcaccgagaccgtgagagcccccggcagcctggtgatcagcgcctacgccgtgtgccccgacatcaccgccaccgtgacccccgacctgaagcaccccgagggcagaggccacctgctgtacgtggccctgagccccggccagcacagactgggcggcaccgccctggcccagtgcttcagccagctgggcgagcacccccccgacctggacctgcccgagaacctggtgagagccttcagcatcacccagggcctgctgaaggacagactgctgtgcagcggccacgacgtgagcgacggcggcctggtgacctgcctgctggagatggccttcgccggcaactgcggcctgcaggtggacgtgcccgtgcccagagtggacgtgctgagcgtgctgttcgccgaggagcccggcctggtgctggaggtgcaggagcccgacctggcccaggtgctgaagagatacagagacgccggcctgcactgcctggagctgggccacaccggcgaggccggcccccacgccatggtgagagtgagcgtgaacggcgccgtggtgctggaggagcccgtgggcgagctgagagccctgtgggaggagaccagcttccagctggacagactgcaggccgagcccagatgcgtggccgaggaggagagaggcctgagagagagaatgggccccagctactgcctgccccccaccttccccaaggccagcgtgcccagagagcccggcggccccagccccagagtggccatcctgagagaggagggcagcaacggcgacagagagatggccgacgccttccacctggccggcttcgaggtgtgggacgtgaccatgcaggacctgtgcagcggcgccatcggcctggacaccttcagaggcgtggccttcgtgggcggcttcagctacgccgacgtgctgggcagcgccaagggctgggccgccgccgtgaccttccaccccagagccggcgccgagctgagaagattcagaaagagacccgacaccttcagcctgggcgtgtgcaacggctgccagctgctggccctgctgggctgggtgggcggcgaccccaacgaggacgccgccgagatgggccccgacagccagcccgccagacccggcctgctgctgagacacaacctgagcggcagatacgagagcagatgggccagcgtgagagtgggccccggccccgccctgatgctgagaggcatggagggcgccgtgctgcccgtgtggagcgcccacggcgagggctacgtggccttcagcagccccgagctgcaggcccagatcgaggccagaggcctggcccccctgcactgggccgacgacgacggcaaccccaccgagcagtaccccctgaaccccaacggcagccccggcggcgtggccggcatctgcagctgcgacggcagacacctggccgtgatgccccaccccgagagagccgtgagaccctggcagtgggcctggagacccccccccttcgacaccctgaccaccagcccctggctgcagctgttcatcaacgccagaaactggaccctggagggcagctgctag

SEQ ID NO: 93422 - DNA, 1302 bp, synthetic construct
  misc_feature 1..1302: note = Description of Artificial Sequence: Synthetic coding sequence
  source 1..1302: mol_type = other DNA
atggccgccagagtgctgatcatcggcagcggcggcagagagcacaccctggcctggaagctggcccagagccaccacgtgaagcaggtgctggtggcccccggcaacgccggcaccgcctgcagcgagaagatcagcaacaccgccatcagcatcagcgaccacaccgccctggcccagttctgcaaggagaagaagatcgagttcgtggtggtgggccccgaggcccccctggccgccggcatcgtgggcaacctgagaagcgccggcgtgcagtgcttcggccccaccgccgaggccgcccagctggagagcagcaagagattcgccaaggagttcatggacagacacggcatccccaccgcccagtggaaggccttcaccaagcccgaggaggcctgcagcttcatcctgagcgccgacttccccgccctggtggtgaaggccagcggcctggccgccggcaagggcgtgatcgtggccaagagcaaggaggaggcctgcaaggccgtgcaggagatcatgcaggagaaggccttcggcgccgccggcgagaccatcgtgatcgaggagctgctggacggcgaggaggtgagctgcctgtgcttcaccgacggcaagaccgtggcccccatgccccccgcccaggaccacaagagactgctggagggcgacggcggccccaacaccggcggcatgggcgcctactgccccgccccccaggtgagcaacgacctgctgctgaagatcaaggacaccgtgctgcagagaaccgtggacggcatgcagcaggagggcaccccctacaccggcatcctgtacgccggcatcatgctgaccaagaacggccccaaggtgctggagttcaactgcagattcggcgaccccgagtgccaggtgatcctgcccctgctgaagagcgacctgtacgaggtgatccagagcaccctggacggcctgctgtgcaccagcctgcccgtgtggctggagaaccacaccgccctgaccgtggtgatggccagcaagggctaccccggcgactacaccaagggcgtggagatcaccggcttccccgaggcccaggccctgggcctggaggtgttccacgccggcaccgccctgaagaacggcaaggtggtgacccacggcggcagagtgctggccgtgaccgccatcagagagaacctgatcagcgccctggaggaggccaagaagggcctggccgccatcaagttcgagggcgccatctacagaaaggacgtgggcttcagagccatcgccttcctgcagcagcccagatag

SEQ ID NO: 93423 - DNA, 3033 bp, synthetic construct
  misc_feature 1..3033: note = Description of Artificial Sequence: Synthetic coding sequence
  source 1..3033: mol_type = other DNA
atggccgccagagtgctgatcatcggcagcggcggcagagagcacaccctggcctggaagctggcccagagccaccacgtgaagcaggtgctggtggcccccggcaacgccggcaccgcctgcagcgagaagatcagcaacaccgccatcagcatcagcgaccacaccgccctggcccagttctgcaaggagaagaagatcgagttcgtggtggtgggccccgaggcccccctggccgccggcatcgtgggcaacctgagaagcgccggcgtgcagtgcttcggccccaccgccgaggccgcccagctggagagcagcaagagattcgccaaggagttcatggacagacacggcatccccaccgcccagtggaaggccttcaccaagcccgaggaggcctgcagcttcatcctgagcgccgacttccccgccctggtggtgaaggccagcggcctggccgccggcaagggcgtgatcgtggccaagagcaaggaggaggcctgcaaggccgtgcaggagatcatgcaggagaaggccttcggcgccgccggcgagaccatcgtgatcgaggagctgctggacggcgaggaggtgagctgcctgtgcttcaccgacggcaagaccgtggcccccatgccccccgcccaggaccacaagagactgctggagggcgacggcggccccaacaccggcggcatgggcgcctactgccccgccccccaggtgagcaacgacctgctgctgaagatcaaggacaccgtgctgcagagaaccgtggacggcatgcagcaggagggcaccccctacaccggcatcctgtacgccggcatcatgctgaccaagaacggccccaaggtgctggagttcaactgcagattcggcgaccccgagtgccaggtgatcctgcccctgctgaagagcgacctgtacgaggtgatccagagcaccctggacggcctgctgtgcaccagcctgcccgtgtggctggagaaccacaccgccctgaccgtggtgatggccagcaagggctaccccggcgactacaccaagggcgtggagatcaccggcttccccgaggcccaggccctgggcctggaggtgttccacgccggcaccgccctgaagaacggcaaggtggtgacccacggcggcagagtgctggccgtgaccgccatcagagagaacctgatcagcgccctggaggaggccaagaagggcctggccgccatcaagttcgagggcgccatctacagaaaggacgtgggcttcagagccatcgccttcctgcagcagcccagaagcctgacctacaaggagagcggcgtggacatcgccgccggcaacatgctggtgaagaagatccagcccctggccaaggccaccagcagaagcggctgcaaggtggacctgggcggcttcgccggcctgttcgacctgaaggccgccggcttcaaggaccccctgctggccagcggcaccgacggcgtgggcaccaagctgaagatcgcccagctgtgcaacaagcacgacaccatcggccaggacctggtggccatgtgcgtgaacgacatcctggcccagggcgccgagcccctgttcttcctggactacttcagctgcggcaagctggacctgagcgtgaccgaggccgtggtggccggcatcgccaaggcctgcggcaaggccggctgcgccctgctgggcggcgagaccgccgagatgcccgacatgtacccccccggcgagtacgacctggccggcttcgccgtgggcgccatggagagagaccagaagctgccccacctggagagaatcaccgagggcgacgtggtggtgggcatcgccagcagcggcctgcacagcaacggcttcagcctggtgagaaagatcgtggccaagagcagcctgcagtacagcagccccgcccccgacggctgcggcgaccagaccctgggcgacctgctgctgacccccaccagaatctacagccacagcctgctgcccgtgctgagaagcggccacgtgaaggccttcgcccacatcaccggcggcggcctgctggagaacatccccagagtgctgcccgagaagctgggcgtggacctggacgcccagacctggagaatccccagagtgttcagctggctgcagcaggagggccacctgagcgaggaggagatggccagaaccttcaactgcggcgtgggcgccgtgctggtggtgagcaaggagcagaccgagcagatcctgagagacatccagcagcacaaggaggaggcctgggtgatcggcagcgtggtggccagagccgagggcagccccagagtgaaggtgaagaacctgatcgagagcatgcagatcaacggcagcgtgctgaagaacggcagcctgaccaaccacttcagcttcgagaagaagaaggccagagtggccgtgctgatcagcggcaccggcagcaacctgcaggccctgatcgacagcaccagagagcccaacagcagcgcccagatcgacatcgtgatcagcaacaaggccgccgtggccggcctggacaaggccgagagagccggcatccccaccagagtgatcaaccacaagctgtacaagaacagagtggagttcgacagcgccatcgacctggtgctggaggagttcagcatcgacatcgtgtgcctggccggcttcatgagaatcctgagcggccccttcgtgcagaagtggaacggcaagatgctgaacatccaccccagcctgctgcccagcttcaagggcagcaacgcccacgagcaggccctggagaccggcgtgaccgtgaccggctgcaccgtgcacttcgtggccgaggacgtggacgccggccagatcatcctgcaggaggccgtgcccgtgaagagaggcgacaccgtggccaccctgagcgagagagtgaagctggccgagcacaagatcttccccgccgccctgcagctggtggccagcggcaccgtgcagctgggcgagaacggcaagatctgctgggtgaaggaggagtag

SEQ ID NO: 93424 - DNA, 3033 bp, synthetic construct; identical to SEQ ID NO: 93423
  misc_feature 1..3033: note = Description of Artificial Sequence: Synthetic coding sequence
  source 1..3033: mol_type = other DNA

SEQ ID NO: 93425 - DNA, 3033 bp, synthetic construct; identical to SEQ ID NO: 93423
  misc_feature 1..3033: note = Description of Artificial Sequence: Synthetic coding sequence
  source 1..3033: mol_type = other DNA

SEQ ID NO: 93426 - DNA, 699 bp, synthetic construct
  misc_feature 1..699: note = Description of Artificial Sequence: Synthetic coding sequence
  source 1..699: mol_type = other DNA
atggccgccagagtgctgatcatcggcagcggcggcagagagcacaccctggcctggaagctggcccagagccaccacgtgaagcaggtgctggtggcccccggcaacgccggcaccgcctgcagcgagaagatcagcaacaccgccatcagcatcagcgaccacaccgccctggcccagttctgcaaggagaagaagatcgagttcgtggtggtgggccccgaggcccccctggccgccggcatcgtgggcaacctgagaagcgccggcgtgcagtgcttcggccccaccgccgaggccgcccagctggagagcagcaagagattcgccaaggagttcatggacagacacggcatccccaccgcccagtggaaggccttcaccaagcccgaggaggcctgcagcttcatcctgagcgccgacttccccgccctggtggtgaaggccagcggcctggccgccggcaagggcgtgatcgtggccaagagcaaggaggaggcctgcaaggccgtgcaggagatcatgcaggagaaggccttcggcgccgccggcgagaccatcgtgatcgaggagctgctggacggcgaggaggtgagctgcctgtgcttcaccgacggcaagaccgtggcccccatgccccccgcccaggaccacaagagactgctggagggcgacggcggccccaacaccggcggctag

SEQ ID NO: 93427 - DNA, 726 bp, synthetic construct
  misc_feature 1..726: note = Description of Artificial Sequence: Synthetic coding sequence
  source 1..726: mol_type = other DNA
atggccgccagagtgctgatcatcggcagcggcggcagagagcacaccctggcctggaagctggcccagagccaccacgtgaagcaggtgctggtggcccccggcaacgccggcaccgcctgcagcgagaagatcagcaacaccgccatcagcatcagcgaccacaccgccctggcccagttctgcaaggagaagaagatcgagttcgtggtggtgggccccgaggcccccctggccgccggcatcgtgggcaacctgagaagcgccggcgtgcagtgcttcggccccaccgccgaggccgcccagctggagagcagcaagagattcgccaaggagttcatggacagacacggcatccccaccgcccagtggaaggccttcaccaagcccgaggaggcctgcagcttcatcctgagcgccgacttccccgccctggtggtgaaggccagcggcctggccgccggcaagggcgtgatcgtggccaagagcaaggaggaggcctgcaaggccgtgcaggagatcatgcaggagaaggccttcggcgccgccggcgagaccatcgtgatcgaggagctgctggacggcgaggaggtgagctgcctgtgcttcaccgacggcaagaccgtggcccccatgccccccgcccaggaccacaagagactgctggagggcgacggcggccccaacaccggcggcatgggcgcctactgccccgccccccagtag

SEQ ID NO: 93428 - DNA, 417 bp, synthetic construct
  misc_feature 1..417: note = Description of Artificial Sequence: Synthetic coding sequence
  source 1..417: mol_type = other DNA
atggccgccagagtgctgatcatcggcagcggcggcagagagcacaccctggcctggaagctggcccagagccaccacgtgaagcaggtgctggtggcccccggcaacgccggcaccgcctgcagcgagaagatcagcaacaccgccatcagcatcagcgaccacaccgccctggcccagttctgcaaggagaagaagatcgagttcgtggtggtgggccccgaggcccccctggccgccggcatcgtgggcaacctgagaagcgccggcgtgcagtgcttcggccccaccgccgaggccgcccagctggagagcagcaagagattcgccaaggagttcatggacagacacggcatccccaccgcccagtggaaggccttcaccaagcccgaggaggcctgcagcttcatcctgtag

SEQ ID NO: 93429 - DNA, 411 bp, synthetic construct
  misc_feature 1..411: note = Description of Artificial Sequence: Synthetic coding sequence
  source 1..411: mol_type = other DNA
atggccgccagagtgctgatcatcggcagcggcggcagagagcacaccctggcctggaagctggcccagagccaccacgtgaagcaggtgctggtggcccccggcaacgccggcaccgcctgcagcgagaagatcagcaacaccgccatcagcatcagcgaccacaccgccctggcccagttctgcaaggagaagaagatcgagttcgtggtggtgggccccgaggcccccctggccgccggcatcgtgggcaacctgagaagcgccggcgtgcagtgcttcggccccaccgccgaggccgcccagctggagagcagcaagagattcgccaaggagttcatggacagacacggcatccccaccgcccagtggaaggccttcaccaagcccgaggaggcctgcagcttctag

SEQ ID NO: 93430 - DNA, 1689 bp, synthetic construct
  misc_feature 1..1689: note = Description of Artificial Sequence: Synthetic coding sequence
  source 1..1689: mol_type = other DNA
atgctggtgaagaagatccagcccctggccaaggccaccagcagaagcggctgcaaggtggacctgggcggcttcgccggcctgttcgacctgaaggccgccggcttcaaggaccccctgctggccagcggcaccgacggcgtgggcaccaagctgaagatcgcccagctgtgcaacaagcacgacaccatcggccaggacctggtggccatgtgcgtgaacgacatcctggcccagggcgccgagcccctgttcttcctggactacttcagctgcggcaagctggacctgagcgtgaccgaggccgtggtggccggcatcgccaaggcctgcggcaaggccggctgcgccctgctgggcggcgagaccgccgagatgcccgacatgtacccccccggcgagtacgacctggccggcttcgccgtgggcgccatggagagagaccagaagctgccccacctggagagaatcaccgagggcgacgtggtggtgggcatcgccagcagcggcctgcacagcaacggcttcagcctggtgagaaagatcgtggccaagagcagcctgcagtacagcagccccgcccccgacggctgcggcgaccagaccctgggcgacctgctgctgacccccaccagaatctacagccacagcctgctgcccgtgctgagaagcggccacgtgaaggccttcgcccacatcaccggcggcggcctgctggagaacatccccagagtgctgcccgagaagctgggcgtggacctggacgcccagacctggagaatccccagagtgttcagctggctgcagcaggagggccacctgagcgaggaggagatggccagaaccttcaactgcggcgtgggcgccgtgctggtggtgagcaaggagcagaccgagcagatcctgagagacatccagcagcacaaggaggaggcctgggtgatcggcagcgtggtggccagagccgagggcagccccagagtgaaggtgaagaacctgatcgagagcatgcagatcaacggcagcgtgctgaagaacggcagcctgaccaaccacttcagcttcgagaagaagaaggccagagtggccgtgctgatcagcggcaccggcagcaacctgcaggccctgatcgacagcaccagagagcccaacagcagcgcccagatcgacatcgtgatcagcaacaaggccgccgtggccggcctggacaaggccgagagagccggcatccccaccagagtgatcaaccacaagctgtacaagaacagagtggagttcgacagcgccatcgacctggtgctggaggagttcagcatcgacatcgtgtgcctggccggcttcatgagaatcctgagcggccccttcgtgcagaagtggaacggcaagatgctgaacatccaccccagcctgctgcccagcttcaagggcagcaacgcccacgagcaggccctggagaccggcgtgaccgtgaccggctgcaccgtgcacttcgtggccgaggacgtggacgccggccagatcatcctgcaggaggccgtgcccgtgaagagaggcgacaccgtggccaccctgagcgagagagtgaagctggccgagcacaagatcttccccgccgccctgcagctggtggccagcggcaccgtgcagctgggcgagaacggcaagatctgctgggtgaaggaggagtag

SEQ ID NO: 93431 - DNA, 2265 bp, synthetic construct
  misc_feature 1..2265: note = Description of Artificial Sequence: Synthetic coding sequence
  source 1..2265: mol_type = other DNA
atgagcagacccctgagcgaccaggagaagagaaagcagatcagcgtgagaggcctggccggcgtggagaacgtgaccgagctgaagaagaacttcaacagacacctgcacttcaccctggtgaaggacagaaacgtggccacccccagagactactacttcgccctggcccacaccgtgagagaccacctggtgggcagatggatcagaacccagcagcactactacgagaaggaccccaagaagatcagcggcggctggcagatggaggaggccgacgactggctgagatacggcaacccctgggagaaggccagacccgagttcaccctgcccgtgcacttctacggccacgtggagcacaccagccagggcgccaagtgggtggacacccaggtggtgctggccatgccctacgacacccccgtgcccggctacagaaacaacgtggtgaacaccatgagactgtggagcgccaaggcccccaacgacttcaacctgaaggacttcaacgtgggcggctacatccaggccgtgctggacagaaacctggccgagaacatcagcagagtgctgtaccccaacgacaacttcttcgagggcaaggagctgagactgaagcaggagtacttcgtggtggccgccaccctgcaggacatcatcagaagattcaagagcagcaagttcggctgcagagaccccgtgagaaccaacttcgacgccttccccgacaaggtggccatccagctgaacgacacccaccccagcctggccatccccgagctgatgagaatcctggtggacctggagagaatggactgggacaaggcctgggacgtgaccgtgagaacctgcgcctacaccaaccacaccgtgctgcccgaggccctggagagatggcccgtgcacctgctggagaccctgctgcccagacacctgcagatcatctacgagatcaaccagagattcctgaacagagtggccgccgccttccccggcgacgtggacagactgagaagaatgagcctggtggaggagggcgccgtgaagagaatcaacatggcccacctgtgcatcgccggcagccacgccgtgaacggcgtggccagaatccacagcgagatcctgaagaagaccatcttcaaggacttctacgagctggagccccacaagttccagaacaagaccaacggcatcacccccagaagatggctggtgctgtgcaaccccggcctggccgaggtgatcgccgagagaatcggcgaggacttcatcagcgacctggaccagctgagaaagctgctgagcttcgtggacgacgaggccttcatcagagacgtggccaaggtgaagcaggagaacaagctgaagttcgccgcctacctggagagagagtacaaggtgcacatcaaccccaacagcctgttcgacatccaggtgaagagaatccacgagtacaagagacagctgctgaactgcctgcacgtgatcaccctgtacaacagaatcaagagagagcccaacaagttcttcgtgcccagaaccgtgatgatcggcggcaaggccgcccccggctaccacatggccaagatgatcatcagactggtgaccgccatcggcgacgtggtgaaccacgaccccgccgtgggcgacagactgagagtgatcttcctggagaactacagagtgagcctggccgagaaggtgatccccgccgccgacctgagcgagcagatcagcaccgccggcaccgaggccagcggcaccggcaacatgaagttcatgctgaacggcgccctgaccatcggcaccatggacggcgccaacgtggagatggccgaggaggccggcgaggagaacttcttcatcttcggcatgagagtggaggacgtggacaagctggaccagagaggctacaacgcccaggagtactacgacagaatccccgagctgagacaggtgatcgagcagctgagcagcggcttcttcagccccaagcagcccgacctgttcaaggacatcgtgaacatgctgatgcaccacgacagattcaaggtgttcgccgactacgaggactacatcaagtgccaggagaaggtgagcgccctgtacaagaaccccagagagtggaccagaatggtgatcagaaacatcgccaccagcggcaagttcagcagcgacagaaccatcgcccagtacgccagagagatctggggcgtggagcccagcagacagagactgcccgcccccgacgaggccatctag

SEQ ID NO: 93432 - DNA, 3633 bp, synthetic construct
  misc_feature 1..3633: note = Description of Artificial Sequence: Synthetic coding sequence
  source 1..3633: mol_type = other DNA
atgagaagcagaagcaacagcggcgtgagactggacggctacgccagactggtgcagcagaccatcctgtgccaccagaaccccgtgaccggcctgctgcccgccagctacgaccagaaggacgcctgggtgagagacaacgtgtacagcatcctggccgtgtggggcctgggcctggcctacagaaagaacgccgacagagacgaggacaaggccaaggcctacgagctggagcagagcgtggtgaagctgatgagaggcctgctgcactgcatgatcagacaggtggacaaggtggagagcttcaagtacagccagagcaccaaggacagcctgcacgccaagtacaacaccaagacctgcgccaccgtggtgggcgacgaccagtggggccacctgcagctggacgccaccagcgtgtacctgctgttcctggcccagatgaccgccagcggcctgcacatcatccacagcctggacgaggtgaacttcatccagaacctggtgttctacatcgaggccgcctacaagaccgccgacttcggcatctgggagagaggcgacaagaccaaccagggcatcagcgagctgaacgccagcagcgtgggcatggccaaggccgccctggaggccctggacgagctggacctgttcggcgtgaagggcggcccccagagcgtgatccacgtgctggccgacgaggtgcagcactgccagagcatcctgaacagcctgctgcccagagccagcaccagcaaggaggtggacgccagcctgctgagcgtggtgagcttccccgccttcgccgtggaggacagccagctggtggagctgaccaagcaggagatcatcaccaagctgcagggcagatacggctgctgcagattcctgagagacggctacaagacccccaaggaggaccccaacagactgtactacgagcccgccgagctgaagctgttcgagaacatcgagtgcgagtggcccctgttctggacctacttcatcctggacggcgtgttcagcggcaacgccgagcaggtgcaggagtacaaggaggccctggaggccgtgctgatcaagggcaagaacggcgtgcccctgctgcccgagctgtacagcgtgccccccgacagagtggacgaggagtaccagaacccccacaccgtggacagagtgcccatgggcaagctgccccacatgtggggccagagcctgtacatcctgggcagcctgatggccgagggcttcctggcccccggcgagatcgaccccctgaacagaagattcagcaccgtgcccaagcccgacgtggtggtgcaggtgagcatcctggccgagaccgaggagatcaagaccatcctgaaggacaagggcatctacgtggagaccatcgccgaggtgtaccccatcagagtgcagcccgccagaatcctgagccacatctacagcagcctgggctgcaacaacagaatgaagctgagcggcagaccctacagacacatgggcgtgctgggcaccagcaagctgtacgacatcagaaagaccatcttcaccttcaccccccagttcatcgaccagcagcagttctacctggccctggacaacaagatgatcgtggagatgctgagaaccgacctgagctacctgtgcagcagatggagaatgaccggccagcccaccatcaccttccccatcagccacagcatgctggacgaggacggcaccagcctgaacagcagcatcctggccgccctgagaaagatgcaggacggctacttcggcggcgccagagtgcagaccggcaagctgagcgagttcctgaccaccagctgctgcacccacctgagcttcatggaccccggccccgagggcaagctgtacagcgaggactacgacgacaactacgactacctggagagcggcaactggatgaacgactacgacagcaccagccacgccagatgcggcgacgaggtggccagatacctggaccacctgctggcccacaccgccccccaccccaagctggcccccaccagccagaagggcggcctggacagattccaggccgccgtgcagaccacctgcgacctgatgagcctggtgaccaaggccaaggagctgcacgtgcagaacgtgcacatgtacctgcccaccaagctgttccaggccagcagacccagcttcaacctgctggacagcccccaccccagacaggagaaccaggtgcccagcgtgagagtggagatccacctgcccagagaccagagcggcgaggtggacttcaaggccctggtgctgcagctgaaggagaccagcagcctgcaggagcaggccgacatcctgtacatgctgtacaccatgaagggccccgactggaacaccgagctgtacaacgagagaagcgccaccgtgagagagctgctgaccgagctgtacggcaaggtgggcgagatcagacactggggcctgatcagatacatcagcggcatcctgagaaagaaggtggaggccctggacgaggcctgcaccgacctgctgagccaccagaagcacctgaccgtgggcctgccccccgagcccagagagaagaccatcagcgcccccctgccctacgaggccctgacccagctgatcgacgaggccagcgagggcgacatgagcatcagcatcctgacccaggagatcatggtgtacctggccatgtacatgagaacccagcccggcctgttcgccgagatgttcagactgagaatcggcctgatcatccaggtgatggccaccgagctggcccacagcctgagatgcagcgccgaggaggccaccgagggcctgatgaacctgagccccagcgccatgaagaacctgctgcaccacatcctgagcggcaaggagttcggcgtggagagaagcgtgagacccaccgacagcaacgtgagccccgccatcagcatccacgagatcggcgccgtgggcgccaccaagaccgagagaaccggcatcatgcagctgaagagcgagatcaagcagagccccggcaccagcatgacccccagcagcggcagcttccccagcgcctacgaccagcagagcagcaaggacagcagacagggccagtggcagagaagaagaagactggacggcgccctgaacagagtgcccgtgggcttctaccagaaggtgtggaaggtgctgcagaagtgccacggcctgagcgtggagggcttcgtgctgcccagcagcaccaccagagagatgacccccggcgagatcaagttcagcgtgcacgtggagagcgtgctgaacagagtgccccagcccgagtacagacagctgctggtggaggccatcctggtgctgaccatgctggccgacatcgagatccacagcatcggcagcatcatcgccgtggagaagatcgtgcacatcgccaacgacctgttcctgcaggagcagaagaccctgggcgccgacgacaccatgctggccaaggaccccgccagcggcatctgcaccctgctgtacgacagcgcccccagcggcagattcggcaccatgacctacctgagcaaggccgccgccacctacgtgcaggagttcctgccccacagcatctgcgccatgcagtag

SEQ ID NO: 93433 - DNA, 3723 bp, synthetic construct
  misc_feature 1..3723: note = Description of Artificial Sequence: Synthetic coding sequence
  source 1..3723: mol_type = other DNA
atgagaagcagaagcaacagcggcgtgagactggacggctacgccagactggtgcagcagaccatcctgtgccaccagaaccccgtgaccggcctgctgcccgccagctacgaccagaaggacgcctgggtgagagacaacgtgtacagcatcctggccgtgtggggcctgggcctggcctacagaaagaacgccgacagagacgaggacaaggccaaggcctacgagctggagcagagcgtggtgaagctgatgagaggcctgctgcactgcatgatcagacaggtggacaaggtggagagcttcaagtacagccagagcaccaaggacagcctgcacgccaagtacaacaccaagacctgcgccaccgtggtgggcgacgaccagtggggccacctgcagctggacgccaccagcgtgtacctgctgttcctggcccagatgaccgccagcggcctgcacatcatccacagcctggacgaggtgaacttcatccagaacctggtgttctacatcgaggccgcctacaagaccgccgacttcggcatctgggagagaggcgacaagaccaaccagggcatcagcgagctgaacgccagcagcgtgggcatggccaaggccgccctggaggccctggacgagctggacctgttcggcgtgaagggcggcccccagagcgtgatccacgtgctggccgacgaggtgcagcactgccagagcatcctgaacagcctgctgcccagagccagcaccagcaaggaggtggacgccagcctgctgagcgtggtgagcttccccgccttcgccgtggaggacagccagctggtggagctgaccaagcaggagatcatcaccaagctgcagggcagatacggctgctgcagattcctgagagacggctacaagacccccaaggaggaccccaacagactgtactacgagcccgccgagctgaagctgttcgagaacatcgagtgcgagtggcccctgttctggacctacttcatcctggacggcgtgttcagcggcaacgccgagcaggtgcaggagtacaaggaggccctggaggccgtgctgatcaagggcaagaacggcgtgcccctgctgcccgagctgtacagcgtgccccccgacagagtggacgaggagtaccagaacccccacaccgtggacagagtgcccatgggcaagctgccccacatgtggggccagagcctgtacatcctgggcagcctgatggccgagggcttcctggcccccggcgagatcgaccccctgaacagaagattcagcaccgtgcccaagcccgacgtggtggtgcaggtgagcatcctggccgagaccgaggagatcaagaccatcctgaaggacaagggcatctacgtggagaccatcgccgaggtgtaccccatcagagtgcagcccgccagaatcctgagccacatctacagcagcctgggctgcaacaacagaatgaagctgagcggcagaccctacagacacatgggcgtgctgggcaccagcaagctgtacgacatcagaaagaccatcttcaccttcaccccccagttcatcgaccagcagcagttctacctggccctggacaacaagatgatcgtggagatgctgagaaccgacctgagctacctgtgcagcagatggagaatgaccggccagcccaccatcaccttccccatcagccacagcatgctggacgaggacggcaccagcctgaacagcagcatcctggccgccctgagaaagatgcaggacggctacttcggcggcgccagagtgcagaccggcaagctgagcgagttcctgaccaccagctgctgcacccacctgagcttcatggaccccggccccgagggcaagctgtacagcgaggactacgacgacaactacgactacctggagagcggcaactggatgaacgactacgacagcaccagccacgccagatgcggcgacgaggtggccagatacctggaccacctgctggcccacaccgccccccaccccaagctggcccccaccagccagaagggcggcctggacagattccaggccgccgtgcagaccacctgcgacctgatgagcctggtgaccaaggccaaggagctgcacgtgcagaacgtgcacatgtacctgcccaccaagctgttccaggccagcagacccagcttcaacctgctggacagcccccaccccagacaggagaaccaggtgcccagcgtgagagtggagatccacctgcccagagaccagagcggcgaggtggacttcaaggccctggtgctgcagctgaaggagaccagcagcctgcaggagcaggccgacatcctgtacatgctgtacaccatgaagggccccgactggaacaccgagctgtacaacgagagaagcgccaccgtgagagagctgctgaccgagctgtacggcaaggtgggcgagatcagacactggggcctgatcagatacatcagcggcatcctgagaaagaaggtggaggccctggacgaggcctgcaccgacctgctgagccaccagaagcacctgaccgtgggcctgccccccgagcccagagagaagaccatcagcgcccccctgccctacgaggccctgacccagctgatcgacgaggccagcgagggcgacatgagcatcagcatcctgacccaggagatcatggtgtacctggccatgtacatgagaacccagcccggcctgttcgccgagatgttcagactgagaatcggcctgatcatccaggtgatggccaccgagctggcccacagcctgagatgcagcgccgaggaggccaccgagggcctgatgaacctgagccccagcgccatgaagaacctgctgcaccacatcctgagcggcaaggagttcggcgtggagagaagcgtgagacccaccgacagcaacgtgagccccgccatcagcatccacgagatcggcgccgtgggcgccaccaagaccgagagaaccggcatcatgcagctgaagagcgagatcaagcaggtggagttcagaagactgagcatcagcgccgagagccagagcaacggcggccaccccctgggcatcgacctgatgagccccagcttcatgagccccggcaccagcatgacccccagcagcggcagcttccccagcgcctacgaccagcagagcagcaaggacagcagacagggccagtggcagagaagaagaagactggacggcgccctgaacagagtgcccgtgggcttctaccagaaggtgtggaaggtgctgcagaagtgccacggcctgagcgtggagggcttcgtgctgcccagcagcaccaccagagagatgacccccggcgagatcaagttcagcgtgcacgtggagagcgtgctgaacagagtgccccagcccgagtacagacagctgctggtggaggccatcctggtgctgaccatgctggccgacatcgagatccacagcatcggcagcatcatcgccgtggagaagatcgtgcacatcgccaacgacctgttcctgcaggagcagaagaccctgggcgccgacgacaccatgctggccaaggaccccgccagcggcatctgcaccctgctgtacgacagcgcccccagcggcagattcggcaccatgacctacctgagcaaggccgccgccacctacgtgcaggagttcctgccccacagcatctgcgccatgcagtag

SEQ ID NO: 93434 - DNA, 3672 bp, synthetic construct
  misc_feature 1..3672: note = Description of Artificial Sequence: Synthetic coding sequence
  source 1..3672: mol_type = other DNA
atgagaagcagaagcaacagcggcgtgagactggacggctacgccagactggtgcagcagaccatcctgtgccaccagaaccccgtgaccggcctgctgcccgccagctacgaccagaaggacgcctgggtgagagacaacgtgtacagcatcctggccgtgtggggcctgggcctggcctacagaaagaacgccgacagagacgaggacaaggccaaggcctacgagctggagcagagcgtggtgaagctgatgagaggcctgctgcactgcatgatcagacaggtggacaaggtggagagcttcaagtacagccagagcaccaaggacagcctgcacgccaagtacaacaccaagacctgcgccaccgtggtgggcgacgaccagtggggccacctgcagctggacgccaccagcgtgtacctgctgttcctggcccagatgaccgccagcggcctgcacatcatccacagcctggacgaggtgaacttcatccagaacctggtgttctacatcgaggccgcctacaagaccgccgacttcggcatctgggagagaggcgacaagaccaaccagggcatcagcgagctgaacgccagcagcgtgggcatggccaaggccgccctggaggccctggacgagctggacctgttcggcgtgaagggcggcccccagagcgtgatccacgtgctggccgacgaggtgcagcactgccagagcatcctgaacagcctgctgcccagagccagcaccagcaaggaggtggacgccagcctgctgagcgtggtgagcttccccgccttcgccgtggaggacagccagctggtggagctgaccaagcaggagatcatcaccaagctgcagggcagatacggctgctgcagattcctgagagacggctacaagacccccaaggaggaccccaacagactgtactacgagcccgccgagctgaagctgttcgagaacatcgagtgcgagtggcccctgttctggacctacttcatcctggacggcgtgttcagcggcaacgccgagcaggtgcaggagtacaaggaggccctggaggccgtgctgatcaagggcaagaacggcgtgcccctgctgcccgagctgtacagcgtgccccccgacagagtggacgaggagtaccagaacccccacaccgtggacagagtgcccatgggcaagctgccccacatgtggggccagagcctgtacatcctgggcagcctgatggccgagggcttcctggcccccggcgagatcgaccccctgaacagaagattcagcaccgtgcccaagcccgacgtggtggtgcaggtgagcatcctggccgagaccgaggagatcaagaccatcctgaaggacaagggcatctacgtggagaccatcgccgaggtgtaccccatcagagtgcagcccgccagaatcctgagccacatctacagcagcctgggctgcaacaacagaatgaagctgagcggcagaccctacagacacatgggcgtgctgggcaccagcaagctgtacgacatcagaaagaccatcttcaccttcaccccccagttcatcgaccagcagcagttctacctggccctggacaacaagatgatcgtggagatgctgagaaccgacctgagctacctgtgcagcagatggagaatgaccggccagcccaccatcaccttccccatcagccacagcatgctggacgaggacggcaccagcctgaacagcagcatcctggccgccctgagaaagatgcaggacggctacttcggcggcgccagagtgcagaccggcaagctgagcgagttcctgaccaccagctgctgcacccacctgagcttcatggaccccggccccgagggcaagctgtacagcgaggactacgacgacaactacgactacctggagagcggcaactggatgaacgactacgacagcaccagccacgccagatgcggcgacgaggtggccagatacctggaccacctgctggcccacaccgccccccaccccaagctggcccccaccagccagaagggcggcctggacagattccaggccgccgtgcagaccacctgcgacctgatgagcctggtgaccaaggccaaggagctgcacgtgcagaacgtgcacatgtacctgcccaccaagctgttccaggccagcagacccagcttcaacctgctggacagcccccaccccagacaggagaaccaggtgcccagcgtgagagtggagatccacctgcccagagaccagagcggcgaggtggacttcaaggccctggtgctgcagctgaaggagaccagcagcctgcaggagcaggccgacatcctgtacatgctgtacaccatgaagggccccgactggaacaccgagctgtacaacgagagaagcgccaccgtgagagagctgctgaccgagctgtacggcaaggtgggcgagatcagacactggggcctgatcagatacatcagcggcatcctgagaaagaaggtggaggccctggacgaggcctgcaccgacctgctgagccaccagaagcacctgaccgtgggcctgccccccgagcccagagagaagaccatcagcgcccccctgccctacgaggccctgacccagctgatcgacgaggccagcgagggcgacatgagcatcagcatcctgacccaggagatcatggtgtacctggccatgtacatgagaacccagcccggcctgttcgccgagatgttcagactgagaatcggcctgatcatccaggtgatggccaccgagctggcccacagcctgagatgcagcgccgaggaggccaccgagggcctgatgaacctgagccccagcgccatgaagaacctgctgcaccacatcctgagcggcaaggagttcggcgtggagagaagcgtgagacccaccgacagcaacgtgagccccgccatcagcatccacgagatcggcgccgtgggcgccaccaagaccgagagaaccggcatcatgcagctgaagagcgagatcaagcaggtggagttcagaagactgagcatcagcgccgagagccagagccccggcaccagcatgacccccagcagcggcagcttccccagcgcctacgaccagcagagcagcaaggacagcagacagggccagtggcagagaagaagaagactggacggcgccctgaacagagtgcccgtgggcttctaccagaaggtgtggaaggtgctgcagaagtgccacggcctgagcgtggagggcttcgtgctgcccagcagcaccaccagagagatgacccccggcgagatcaagttcagcgtgcacgtggagagcgtgctgaacagagtgccccagcccgagtacagacagctgctggtggaggccatcctggtgctgaccatgctggccgacatcgagatccacagcatcggcagcatcatcgccgtggagaagatcgtgcacatcgccaacgacctgttcctgcaggagcagaagaccctgggcgccgacgacaccatgctggccaaggaccccgccagcggcatctgcaccctgctgtacgacagcgcccccagcggcagattcggcaccatgacctacctgagcaaggccgccgccacctacgtgcaggagttcctgccccacagcatctgcgccatgcagtag

SEQ ID NO: 93435 - DNA, 3546 bp, synthetic construct
  misc_feature 1..3546: note = Description of Artificial Sequence: Synthetic coding sequence
  source 1..3546: mol_type = other DNA
atgagaagcagaagcaacagcggcgtgagactggacggctacgccagactggtgcagcagaccatcctgtgccaccagaaccccgtgaccggcctgctgcccgccagctacgaccagaaggacgcctgggtgagagacaacgtgtacagcatcctggccgtgtggggcctgggcctggcctacagaaagaacgccgacagagacgaggacaaggccaaggcctacgagctggagcagagcgtggtgaagctgatgagaggcctgctgcactgcatgatcagacaggtggacaaggtggagagcttcaagtacagccagagcaccaaggacagcctgcacgccaagtacaacaccaagacctgcgccaccgtggtgggcgacgaccagtggggccacctgcagctggacgccaccagcgtgtacctgctgttcctggcccagatgaccgccagcggcctgcacatcatccacagcctggacgaggtgaacttcatccagaacctggtgttctacatcgaggccgcctacaagaccgccgacttcggcatctgggagagaggcgacaagaccaaccagggcatcagcgagctgaacgccagcagcgtgggcatggccaaggccgccctggaggccctggacgagctggacctgttcggcgtgaagggcggcccccagagcgtgatccacgtgctggccgacgaggtgcagcactgccagagcatcctgaacagcctgctgcccagagccagcaccagcaaggaggtggacgccagcctgctgagcgtggtgagcttccccgccttcgccgtggaggacagccagctggtggagctgaccaagcaggagatcatcaccaagctgcagggcagatacggctgctgcagattcctgagagacggctacaagacccccaaggaggaccccaacagactgtactacgagcccgccgagctgaagctgttcgagaacatcgagtgcgagtggcccctgttctggacctacttcatcctggacggcgtgttcagcggcaacgccgagcaggtgcaggagtacaaggaggccctggaggccgtgctgatcaagggcaagaacggcgtgcccctgctgcccgagctgtacagcgtgccccccgacagagtggacgaggagtaccagaacccccacaccgtggacagagtgcccatgggcaagctgccccacatgtggggccagagcctgtacatcctgggcagcctgatggccgagggcttcctggcccccggcgagatcgaccccctgaacagaagattcagcaccgtgcccaagcccgacgtggtggtgcaggtgagcatcctggccgagaccgaggagatcaagaccatcctgaaggacaagggcatctacgtggagaccatcgccgaggtgtaccccatcagagtgcagcccgccagaatcctgagccacatctacagcagcctgggctgcaacaacagaatgaagctgagcggcagaccctacagacacatgggcgtgctgggcaccagcaagctgtacgacatcagaaagaccatcttcaccttcaccccccagttcatcgaccagcagcagttctacctggccctggacaacaagatgatcgtggagatgctgagaaccgacctgagctacctgtgcagcagatggagaatgaccggccagcccaccatcaccttccccatcagccacagcatgctggacgaggacggcaccagcctgaacagcagcatcctggccgccctgagaaagatgcaggacggctacttcggcggcgccagagtgcagaccggcaagctgagcgagttcctgaccaccagctgctgcacccacctgagcttcatggaccccggccccgagggcaagctgtacagcgaggactacgacgacaactacgactacctggagagcggcaactggatgaacgactacgacagcaccagccacgacgtgcacatgtacctgcccaccaagctgttccaggccagcagacccagcttcaacctgctggacagcccccaccccagacaggagaaccaggtgcccagcgtgagagtggagatccacctgcccagagaccagagcggcgaggtggacttcaaggccctggtgctgcagctgaaggagaccagcagcctgcaggagcaggccgacatcctgtacatgctgtacaccatgaagggccccgactggaacaccgagctgtacaacgagagaagcgccaccgtgagagagctgctgaccgagctgtacggcaaggtgggcgagatcagacactggggcctgatcagatacatcagcggcatcctgagaaagaaggtggaggccctggacgaggcctgcaccgacctgctgagccaccagaagcacctgaccgtgggcctgccccccgagcccagagagaagaccatcagcgcccccctgccctacgaggccctgacccagctgatcgacgaggccagcgagggcgacatgagcatcagcatcctgacccaggagatcatggtgtacctggccatgtacatgagaacccagcccggcctgttcgccgagatgttcagactgagaatcggcctgatcatccaggtgatggccaccgagctggcccacagcctgagatgcagcgccgaggaggccaccgagggcctgatgaacctgagccccagcgccatgaagaacctgctgcaccacatcctgagcggcaaggagttcggcgtggagagaagcgtgagacccaccgacagcaacgtgagccccgccatcagcatccacgagatcggcgccgtgggcgccaccaagaccgagagaaccggcatcatgcagctgaagagcgagatcaagcaggtggagttcagaagactgagcatcagcgccgagagccagagcaacggcggccaccccctgggcatcgacctgatgagccccagcttcatgagccccggcaccagcatgacccccagcagcggcagcttccccagcgcctacgaccagcagagcagcaaggacagcagacagggccagtggcagagaagaagaagactggacggcgccctgaacagagtgcccgtgggcttctaccagaaggtgtggaaggtgctgcagaagtgccacggcctgagcgtggagggcttcgtgctgcccagcagcaccaccagagagatgacccccggcgagatcaagttcagcgtgcacgtggagagcgtgctgaacagagtgccccagcccgagtacagacagctgctggtggaggccatcctggtgctgaccatgctggccgacatcgagatccacagcatcggcagcatcatcgccgtggagaagatcgtgcacatcgccaacgacctgttcctgcaggagcagaagaccctgggcgccgacgacaccatgctggccaaggaccccgccagcggcatctgcaccctgctgtacgacagcgcccccagcggcagattcggcaccatgacctacctgagcaaggccgccgccacctacgtgcaggagttcctgccccacagcatctgcgccatgcagtag

SEQ ID NO: 93436 - DNA, 3456 bp, synthetic construct
  misc_feature 1..3456: note = Description of Artificial Sequence: Synthetic coding sequence
  source 1..3456: mol_type = other DNA
atgagaagcagaagcaacagcggcgtgagactggacggctacgccagactggtgcagcagaccatcctgtgccaccagaaccccgtgaccggcctgctgcccgccagctacgaccagaaggacgcctgggtgagagacaacgtgtacagcatcctggccgtgtggggcctgggcctggcctacagaaagaacgccgacagagacgaggacaaggccaaggcctacgagctggagcagagcgtggtgaagctgatgagaggcctgctgcactgcatgatcagacaggtggacaaggtggagagcttcaagtacagccagagcaccaaggacagcctgcacgccaagtacaacaccaagacctgcgccaccgtggtgggcgacgaccagtggggccacctgcagctggacgccaccagcgtgtacctgctgttcctggcccagatgaccgccagcggcctgcacatcatccacagcctggacgaggtgaacttcatccagaacctggtgttctacatcgaggccgcctacaagaccgccgacttcggcatctgggagagaggcgacaagaccaaccagggcatcagcgagctgaacgccagcagcgtgggcatggccaaggccgccctggaggccctggacgagctggacctgttcggcgtgaagggcggcccccagagcgtgatccacgtgctggccgacgaggtgcagcactgccagagcatcctgaacagcctgctgcccagagccagcaccagcaaggaggtggacgccagcctgctgagcgtggtgagcttccccgccttcgccgtggaggacagccagctggtggagctgaccaagcaggagatcatcaccaagctgcagggcagatacggctgctgcagattcctgagagacggctacaagacccccaaggaggaccccaacagactgtactacgagcccgccgagctgaagctgttcgagaacatcgagtgcgagtggcccctgttctggacctacttcatcctggacggcgtgttcagcggcaacgccgagcaggtgcaggagtacaaggaggccctggaggccgtgctgatcaagggcaagaacggcgtgcccctgctgcccgagctgtacagcgtgccccccgacagagtggacgaggagtaccagaacccccacaccgtggacagagtgcccatgggcaagctgccccacatgtggggccagagcctgtacatcctgggcagcctgatggccgagggcttcctggcccccggcgagatcgaccccctgaacagaagattcagcaccgtgcccaagcccgacgtggtggtgcaggtgagcatcctggccgagaccgaggagatcaagaccatcctgaaggacaagggcatctacgtggagaccatcgccgaggtgtaccccatcagagtgcagcccgccagaatcctgagccacatctacagcagcctgggctgcaacaacagaatgaagctgagcggcagaccctacagacacatgggcgtgctgggcaccagcaagctgtacgacatcagaaagaccatcttcaccttcaccccccagttcatcgaccagcagcagttctacctggccctggacaacaagatgatcgtggagatgctgagaaccgacctgagctacctgtgcagcagatggagaatgaccggccagcccaccatcaccttccccatcagccacagcatgctggacgaggacggcaccagcctgaacagcagcatcctggccgccctgagaaagatgcaggacggctacttcggcggcgccagagtgcagaccggcaagctgagcgagttcctgaccaccagctgctgcacccacctgagcttcatggaccccggccccgagggcaagctgtacagcgaggactacgacgacaactacgactacctggagagcggcaactggatgaacgactacgacagcaccagccacgacgtgcacatgtacctgcccaccaagctgttccaggccagcagacccagcttcaacctgctggacagcccccaccccagacaggagaaccaggtgcccagcgtgagagtggagatccacctgcccagagaccagagcggcgaggtggacttcaaggccctggtgctgcagctgaaggagaccagcagcctgcaggagcaggccgacatcctgtacatgctgtacaccatgaagggccccgactggaacaccgagctgtacaacgagagaagcgccaccgtgagagagctgctgaccgagctgtacggcaaggtgggcgagatcagacactggggcctgatcagatacatcagcggcatcctgagaaagaaggtggaggccctggacgaggcctgcaccgacctgctgagccaccagaagcacctgaccgtgggcctgccccccgagcccagagagaagaccatcagcgcccccctgccctacgaggccctgacccagctgatcgacgaggccagcgagggcgacatgagcatcagcatcctgacccaggagatcatggtgtacctggccatgtacatgagaacccagcccggcctgttcgccgagatgttcagactgagaatcggcctgatcatccaggtgatggccaccgagctggcccacagcctgagatgcagcgccgaggaggccaccgagggcctgatgaacctgagccccagcgccatgaagaacctgctgcaccacatcctgagcggcaaggagttcggcgtggagagaagcgtgagacccaccgacagcaacgtgagccccgccatcagcatccacgagatcggcgccgtgggcgccaccaagaccgagagaaccggcatcatgcagctgaagagcgagatcaagcagagccccggcaccagcatgacccccagcagcggcagcttccccagcgcctacgaccagcagagcagcaaggacagcagacagggccagtggcagagaagaagaagactggacggcgccctgaacagagtgcccgtgggcttctaccagaaggtgtggaaggtgctgcagaagtgccacggcctgagcgtggagggcttcgtgctgcccagcagcaccaccagagagatgacccccggcgagatcaagttcagcgtgcacgtggagagcgtgctgaacagagtgccccagcccgagtacagacagctgctggtggaggccatcctggtgctgaccatgctggccgacatcgagatccacagcatcggcagcatcatcgccgtggagaagatcgtgcacatcgccaacgacctgttcctgcaggagcagaagaccctgggcgccgacgacaccatgctggccaaggaccccgccagcggcatctgcaccctgctgtacgacagcgcccccagcggcagattcggcaccatgacctacctgagcaaggccgccgccacctacgtgcaggagttcctgccccacagcatctgcgccatgcagtag

SEQ ID NO: 93437 - DNA, 1164 bp, synthetic construct
  misc_feature 1..1164: note = Description of Artificial Sequence: Synthetic coding sequence
  source 1..1164: mol_type = other DNA
atgaccagagacgaggccctgcccgacagccacagcgcccaggacttctacgagaactacgagcccaaggagatcctgggcagaggcgtgagcagcgtggtgagaagatgcatccacaagcccaccagccaggagtacgccgtgaaggtgatcgacgtgaccggcggcggcagcttcagccccgaggaggtgagagagctgagagaggccaccctgaaggaggtggacatcctgagaaaggtgagcggccaccccaacatcatccagctgaaggacacctacgagaccaacaccttcttcttcctggtgttcgacctgatgaagagaggcgagctgttcgactacctgaccgagaaggtgaccctgagcgagaaggagaccagaaagatcatgagagccctgctggaggtgatctgcaccctgcacaagctgaacatcgtgcacagagacctgaagcccgagaacatcctgctggacgacaacatgaacatcaagctgaccgacttcggcttcagctgccagctggagcccggcgagagactgagagaggtgtgcggcacccccagctacctggcccccgagatcatcgagtgcagcatgaacgaggaccaccccggctacggcaaggaggtggacatgtggagcaccggcgtgatcatgtacaccctgctggccggcagcccccccttctggcacagaaagcagatgctgatgctgagaatgatcatgagcggcaactaccagttcggcagccccgagtgggacgactacagcgacaccgtgaaggacctggtgagcagattcctggtggtgcagccccagaacagatacaccgccgaggaggccctggcccaccccttcttccagcagtacctggtggaggaggtgagacacttcagccccagaggcaagttcaaggtgatcgccctgaccgtgctggccagcgtgagaatctactaccagtacagaagagtgaagcccgtgaccagagagatcgtgatcagagacccctacgccctgagacccctgagaagactgatcgacgcctacgccttcagaatctacggccactgggtgaagaagggccagcagcagaacagagccgccctgttcgagaacacccccaaggccgtgctgctgagcctggccgaggaggactactag

SEQ ID NO: 93438 - DNA, 1260 bp, synthetic construct
  misc_feature 1..1260: note = Description of Artificial Sequence: Synthetic coding sequence
  source 1..1260: mol_type = other DNA
atgaccagagacgaggccctgcccgacagccacagcgcccaggacttctacgagaactacgagcccaaggagatcctgggcagaggcgtgagcagcgtggtgagaagatgcatccacaagcccaccagccaggagtacgccgtgaaggtgatcgacgtgaccggcggcggcagcttcagccccgaggaggtgagagagctgagagaggccaccctgaaggaggtggacatcctgagaaaggtgagcggccaccccaacatcatccagctgaaggacacctacgagaccaacaccttcttcttcctggtgttcgacctgtgggaggacaccgacaccatggagatggagcagaagtggtgcctgggctgggacagccccaagagcaccaacttcagagcccagggcagagccagaatgaagagaggcgagctgttcgactacctgaccgagaaggtgaccctgagcgagaaggagaccagaaagatcatgagagccctgctggaggtgatctgcaccctgcacaagctgaacatcgtgcacagagacctgaagcccgagaacatcctgctggacgacaacatgaacatcaagctgaccgacttcggcttcagctgccagctggagcccggcgagagactgagagaggtgtgcggcacccccagctacctggcccccgagatcatcgagtgcagcatgaacgaggaccaccccggctacggcaaggaggtggacatgtggagcaccggcgtgatcatgtacaccctgctggccggcagcccccccttctggcacagaaagcagatgctgatgctgagaatgatcatgagcggcaactaccagttcggcagccccgagtgggacgactacagcgacaccgtgaaggacctggtgagcagattcctggtggtgcagccccagaacagatacaccgccgaggaggccctggcccaccccttcttccagcagtacctggtggaggaggtgagacacttcagccccagaggcaagttcaaggtgatcgccctgaccgtgctggccagcgtgagaatctactaccagtacagaagagtgaagcccgtgaccagagagatcgtgatcagagacccctacgccctgagacccctgagaagactgatcgacgcctacgccttcagaatctacggccactgggtgaagaagggccagcagcagaacagagccgccctgttcgagaacacccccaaggccgtgctgctgagcctggccgaggaggactactag

SEQ ID NO: 93439 - DNA, 1002 bp, synthetic construct
  misc_feature 1..1002: note = Description of Artificial Sequence: Synthetic coding sequence
  source 1..1002: mol_type = other DNA
atgcacccccaggcccacgagcccggcgtgagaagagagggccacagaagacacagatggagacagctgcagcccggcggcggcgccggcgccgccagaagccacgccgagggcggcggccaccccgcccagggcctgagagccccccagcaccagatgaagagaggcgagctgttcgactacctgaccgagaaggtgaccctgagcgagaaggagaccagaaagatcatgagagccctgctggaggtgatctgcaccctgcacaagctgaacatcgtgcacagagacctgaagcccgagaacatcctgctggacgacaacatgaacatcaagctgaccgacttcggcttcagctgccagctggagcccggcgagagactgagagaggtgtgcggcacccccagctacctggcccccgagatcatcgagtgcagcatgaacgaggaccaccccggctacggcaaggaggtggacatgtggagcaccggcgtgatcatgtacaccctgctggccggcagcccccccttctggcacagaaagcagatgctgatgctgagaatgatcatgagcggcaactaccagttcggcagccccgagtgggacgactacagcgacaccgtgaaggacctggtgagcagattcctggtggtgcagccccagaacagatacaccgccgaggaggccctggcccaccccttcttccagcagtacctggtggaggaggtgagacacttcagccccagaggcaagttcaaggtgatcgccctgaccgtgctggccagcgtgagaatctactaccagtacagaagagtgaagcccgtgaccagagagatcgtgatcagagacccctacgccctgagacccctgagaagactgatcgacgcctacgccttcagaatctacggccactgggtgaagaagggccagcagcagaacagagccgccctgttcgagaacacccccaaggccgtgctgctgagcctggccgaggaggactactag

SEQ ID NO: 93440 - DNA, 2529 bp, synthetic construct
  misc_feature 1..2529: note = Description of Artificial Sequence: Synthetic coding sequence
  source 1..2529: mol_type = other DNA
atgagcagacccctgagcgaccaggagaagagaaagcagatcagcgtgagaggcctggccggcgtggagaacgtgaccgagctgaagaagaacttcaacagacacctgcacttcaccctggtgaaggacagaaacgtggccacccccagagactactacttcgccctggcccacaccgtgagagaccacctggtgggcagatggatcagaacccagcagcactactacgagaaggaccccaagagaatctactacctgagcctggagttctacatgggcagaaccctgcagaacaccatggtgaacctggccctggagaacgcctgcgacgaggccacctaccagctgggcctggacatggaggagctggaggagatcgaggaggacgccggcctgggcaacggcggcctgggcagactggccgcctgcttcctggacagcatggccaccctgggcctggccgcctacggctacggcatcagatacgagttcggcatcttcaaccagaagatcagcggcggctggcagatggaggaggccgacgactggctgagatacggcaacccctgggagaaggccagacccgagttcaccctgcccgtgcacttctacggccacgtggagcacaccagccagggcgccaagtgggtggacacccaggtggtgctggccatgccctacgacacccccgtgcccggctacagaaacaacgtggtgaacaccatgagactgtggagcgccaaggcccccaacgacttcaacctgaaggacttcaacgtgggcggctacatccaggccgtgctggacagaaacctggccgagaacatcagcagagtgctgtaccccaacgacaacttcttcgagggcaaggagctgagactgaagcaggagtacttcgtggtggccgccaccctgcaggacatcatcagaagattcaagagcagcaagttcggctgcagagaccccgtgagaaccaacttcgacgccttccccgacaaggtggccatccagctgaacgacacccaccccagcctggccatccccgagctgatgagaatcctggtggacctggagagaatggactgggacaaggcctgggacgtgaccgtgagaacctgcgcctacaccaaccacaccgtgctgcccgaggccctggagagatggcccgtgcacctgctggagaccctgctgcccagacacctgcagatcatctacgagatcaaccagagattcctgaacagagtggccgccgccttccccggcgacgtggacagactgagaagaatgagcctggtggaggagggcgccgtgaagagaatcaacatggcccacctgtgcatcgccggcagccacgccgtgaacggcgtggccagaatccacagcgagatcctgaagaagaccatcttcaaggacttctacgagctggagccccacaagttccagaacaagaccaacggcatcacccccagaagatggctggtgctgtgcaaccccggcctggccgaggtgatcgccgagagaatcggcgaggacttcatcagcgacctggaccagctgagaaagctgctgagcttcgtggacgacgaggccttcatcagagacgtggccaaggtgaagcaggagaacaagctgaagttcgccgcctacctggagagagagtacaaggtgcacatcaaccccaacagcctgttcgacatccaggtgaagagaatccacgagtacaagagacagctgctgaactgcctgcacgtgatcaccctgtacaacagaatcaagagagagcccaacaagttcttcgtgcccagaaccgtgatgatcggcggcaaggccgcccccggctaccacatggccaagatgatcatcagactggtgaccgccatcggcgacgtggtgaaccacgaccccgccgtgggcgacagactgagagtgatcttcctggagaactacagagtgagcctggccgagaaggtgatccccgccgccgacctgagcgagcagatcagcaccgccggcaccgaggccagcggcaccggcaacatgaagttcatgctgaacggcgccctgaccatcggcaccatggacggcgccaacgtggagatggccgaggaggccggcgaggagaacttcttcatcttcggcatgagagtggaggacgtggacaagctggaccagagaggctacaacgcccaggagtactacgacagaatccccgagctgagacaggtgatcgagcagctgagcagcggcttcttcagccccaagcagcccgacctgttcaaggacatcgtgaacatgctgatgcaccacgacagattcaaggtgttcgccgactacgaggactacatcaagtgccaggagaaggtgagcgccctgtacaagaaccccagagagtggaccagaatggtgatcagaaacatcgccaccagcggcaagttcagcagcgacagaaccatcgcccagtacgccagagagatctggggcgtggagcccagcagacagagactgcccgcccccgacgaggccatctag

SEQ ID NO: 93441 - DNA, 2499 bp, synthetic construct
  misc_feature 1..2499: note = Description of Artificial Sequence: Synthetic coding sequence
  source 1..2499: mol_type = other DNA
atgagcagacccctgagcgaccaggagaagagaaagcagatcagcgtgagaggcctggccggcgtggagaacgtgaccgagctgaagaagaacttcaacagacacctgcacttcaccctggtgaaggacagaaacgtggccacccccagagactactacttcgccctggcccacaccgtgagagaccacctggtgggcagatggatcagaacccagcagcactactacgagaaggaccccaagagaatctactacctgagcctggagttctacatgggcagaaccctgcagaacaccatggtgaacctggccctggagaacgcctgcgacgaggccacctaccaggtgggcctgggcagactggccgcctgcttcctggacagcatggccaccctgggcctggccgcctacggctacggcatcagatacgagttcggcatcttcaaccagaagatcagcggcggctggcagatggaggaggccgacgactggctgagatacggcaacccctgggagaaggccagacccgagttcaccctgcccgtgcacttctacggccacgtggagcacaccagccagggcgccaagtgggtggacacccaggtggtgctggccatgccctacgacacccccgtgcccggctacagaaacaacgtggtgaacaccatgagactgtggagcgccaaggcccccaacgacttcaacctgaaggacttcaacgtgggcggctacatccaggccgtgctggacagaaacctggccgagaacatcagcagagtgctgtaccccaacgacaacttcttcgagggcaaggagctgagactgaagcaggagtacttcgtggtggccgccaccctgcaggacatcatcagaagattcaagagcagcaagttcggctgcagagaccccgtgagaaccaacttcgacgccttccccgacaaggtggccatccagctgaacgacacccaccccagcctggccatccccgagctgatgagaatcctggtggacctggagagaatggactgggacaaggcctgggacgtgaccgtgagaacctgcgcctacaccaaccacaccgtgctgcccgaggccctggagagatggcccgtgcacctgctggagaccctgctgcccagacacctgcagatcatctacgagatcaaccagagattcctgaacagagtggccgccgccttccccggcgacgtggacagactgagaagaatgagcctggtggaggagggcgccgtgaagagaatcaacatggcccacctgtgcatcgccggcagccacgccgtgaacggcgtggccagaatccacagcgagatcctgaagaagaccatcttcaaggacttctacgagctggagccccacaagttccagaacaagaccaacggcatcacccccagaagatggctggtgctgtgcaaccccggcctggccgaggtgatcgccgagagaatcggcgaggacttcatcagcgacctggaccagctgagaaagctgctgagcttcgtggacgacgaggccttcatcagagacgtggccaaggtgaagcaggagaacaagctgaagttcgccgcctacctggagagagagtacaaggtgcacatcaaccccaacagcctgttcgacatccaggtgaagagaatccacgagtacaagagacagctgctgaactgcctgcacgtgatcaccctgtacaacagaatcaagagagagcccaacaagttcttcgtgcccagaaccgtgatgatcggcggcaaggccgcccccggctaccacatggccaagatgatcatcagactggtgaccgccatcggcgacgtggtgaaccacgaccccgccgtgggcgacagactgagagtgatcttcctggagaactacagagtgagcctggccgagaaggtgatccccgccgccgacctgagcgagcagatcagcaccgccggcaccgaggccagcggcaccggcaacatgaagttcatgctgaacggcgccctgaccatcggcaccatggacggcgccaacgtggagatggccgaggaggccggcgaggagaacttcttcatcttcggcatgagagtggaggacgtggacaagctggaccagagaggctacaacgcccaggagtactacgacagaatccccgagctgagacaggtgatcgagcagctgagcagcggcttcttcagccccaagcagcccgacctgttcaaggacatcgtgaacatgctgatgcaccacgacagattcaaggtgttcgccgactacgaggactacatcaagtgccaggagaaggtgagcgccctgtacaagaaccccagagagtggaccagaatggtgatcagaaacatcgccaccagcggcaagttcagcagcgacagaaccatcgcccagtacgccagagagatctggggcgtggagcccagcagacagagactgcccgcccccgccccccacgccgagggcggcgtgctggagctggacctgtag

SEQ ID NO: 93442 - DNA, 1425 bp, synthetic construct
  misc_feature 1..1425: note = Description of Artificial Sequence: Synthetic coding sequence
  source 1..1425: mol_type = other DNA
atggccaccaactggggcagcctgctgcaggacaagcagcagctggaggagctggccagacaggccgtggacagagccctggccgagggcgtgctgctgagaaccagccaggagcccaccagcagcgaggtggtgagctacgcccccttcaccctgttccccagcctggtgcccagcgccctgctggagcaggcctacgccgtgcagatggacttcaacctgctggtggacgccgtgagccagaacgccgccttcctggagcagaccctgagcagcaccatcaagcaggacgacttcaccgccagactgttcgacatccacaagcaggtgctgaaggagggcatcgcccagaccgtgttcctgggcctgaacagaagcgactacatgttccagagaagcgccgacggcagccccgccctgaagcagatcgagatcaacaccatcagcgccagcttcggcggcctggccagcagaacccccgccgtgcacagacacgtgctgagcgtgctgagcaagaccaaggaggccggcaagatcctgagcaacaaccccagcaagggcctggccctgggcatcgccaaggcctgggagctgtacggcagccccaacgccctggtgctgctgatcgcccaggagaaggagagaaacatcttcgaccagagagccatcgagaacgagctgctggccagaaacatccacgtgatcagaagaaccttcgaggacatcagcgagaagggcagcctggaccaggacagaagactgttcgtggacggccaggagatcgccgtggtgtacttcagagacggctacatgcccagacagtacagcctgcagaactgggaggccagactgctgctggagagaagccacgccgccaagtgccccgacatcgccacccagctggccggcaccaagaaggtgcagcaggagctgagcagacccggcatgctggagatgctgctgcccggccagcccgaggccgtggccagactgagagccaccttcgccggcctgtacagcctggacgtgggcgaggagggcgaccaggccatcgccgaggccctggccgcccccagcagattcgtgctgaagccccagagagagggcggcggcaacaacctgtacggcgaggagatggtgcaggccctgaagcagctgaaggacagcgaggagagagccagctacatcctgatggagaagatcgagcccgagcccttcgagaactgcctgctgagacccggcagccccgccagagtggtgcagtgcatcagcgagctgggcatcttcggcgtgtacgtgagacaggagaagaccctggtgatgaacaagcacgtgggccacctgctgagaaccaaggccatcgagcacgccgacggcggcgtggccgccggcgtggccgtgctggacaacccctaccccgtgtag

SEQ ID NO: 93443 - DNA, 738 bp, synthetic construct
  misc_feature 1..738: note = Description of Artificial Sequence: Synthetic coding sequence
  source 1..738: mol_type = other DNA
tgaaagcaccaccacaccgtgccccccagcgtgacccccaaggccctggacagaagccccccctgccccgagatgttcaccagagccgcccccggctaccacatggccaagctgatcatcaagctggtgaccagcatcggcgacgtggtgaaccacgaccccgtggtgggcgacagactgaaggtgatcttcctggagaactacagagtgagcctggccgagaaggtgatccccgccgccgacctgagccagcagatcagcaccgccggcaccgaggccagcggcaccggcaacatgaagttcatgctgaacggcgccctgaccatcggcaccatggacggcgccaacgtggagatggccgaggaggccggcgccgagaacctgttcatcttcggcctgagagtggaggacgtggaggccctggacagaaagggctacaacgccagagagtactacgaccacctgcccgagctgaagcaggccgtggaccagatcagcagcggcttcttcagccccaaggagcccgactgcttcaaggacatcgtgaacatgctgatgcaccacgacagattcaaggtgttcgccgactacgaggcctacatgcagtgccaggcccaggtggaccagctgtacagaaaccccaaggagtggaccaagaaggtgatcagaaacatcgcctgcagcggcaagttcagcagcgacagaaccatcaccgagtacgccagagagatctggtag

SEQ ID NO: 93444 - DNA, 975 bp, synthetic construct
  misc_feature 1..975: note = Description of Artificial Sequence: Synthetic coding sequence
  source 1..975: mol_type = other DNA
atggacgcccccagacaggtggtgaacttcggccccggccccgccaagctgccccacagcgtgctgctggagatccagaaggagctgctggactacaagggcgtgggcatcagcgtgctggagatgagccacagaagcagcgacttcgccaagatcatcaacaacaccgagaacctggtgagagagctgctggccgtgcccgacaactacaaggtgatcttcctgcagggcggcggctgcggccagttcagcgccgtgcccctgaacctgatcggcctgaaggccggcagatgcgccgactacgtggtgaccggcgcctggagcgccaaggccgccgaggaggccaagaagttcggcaccatcaacatcgtgcaccccaagctgggcagctacaccaagatccccgaccccagcacctggaacctgaaccccgacgccagctacgtgtactactgcgccaacgagaccgtgcacggcgtggagttcgacttcatccccgacgtgaagggcgccgtgctggtgtgcgacatgagcagcaacttcctgagcaagcccgtggacgtgagcaagttcggcgtgatcttcgccggcgcccagaagaacgtgggcagcgccggcgtgaccgtggtgatcgtgagagacgacctgctgggcttcgccctgagagagtgccccagcgtgctggagtacaaggtgcaggccggcaacagcagcctgtacaacacccccccctgcttcagcatctacgtgatgggcctggtgctggagtggatcaagaacaacggcggcgccgccgccatggagaagctgagcagcatcaagagccagaccatctacgagatcatcgacaacagccagggcttctacgtgagcgtgggcggcatcagagccagcctgtacaacgccgtgaccatcgaggacgtgcagaagctggccgccttcatgaagaagttcctggagatgcaccagctgtag

SEQ ID NO: 93445 - DNA, 1113 bp, synthetic construct
  misc_feature 1..1113: note = Description of Artificial Sequence: Synthetic coding sequence
  source 1..1113: mol_type = other DNA
atggacgcccccagacaggtggtgaacttcggccccggccccgccaagctgccccacagcgtgctgctggagatccagaaggagctgctggactacaagggcgtgggcatcagcgtgctggagatgagccacagaagcagcgacttcgccaagatcatcaacaacaccgagaacctggtgagagagctgctggccgtgcccgacaactacaaggtgatcttcctgcagggcggcggctgcggccagttcagcgccgtgcccctgaacctgatcggcctgaaggccggcagatgcgccgactacgtggtgaccggcgcctggagcgccaaggccgccgaggaggccaagaagttcggcaccatcaacatcgtgcaccccaagctgggcagctacaccaagatccccgaccccagcacctggaacctgaaccccgacgccagctacgtgtactactgcgccaacgagaccgtgcacggcgtggagttcgacttcatccccgacgtgaagggcgccgtgctggtgtgcgacatgagcagcaacttcctgagcaagcccgtggacgtgagcaagttcggcgtgatcttcgccggcgcccagaagaacgtgggcagcgccggcgtgaccgtggtgatcgtgagagacgacctgctgggcttcgccctgagagagtgccccagcgtgctggagtacaaggtgcaggccggcaacagcagcctgtacaacacccccccctgcttcagcatctacgtgatgggcctggtgctggagtggatcaagaacaacggcggcgccgccgccatggagaagctgagcagcatcaagagccagaccatctacgagatcatcgacaacagccagggcttctacgtgtgccccgtggagccccagaacagaagcaagatgaacatccccttcagaatcggcaacgccaagggcgacgacgccctggagaagagattcctggacaaggccctggagctgaacatgctgagcctgaagggccacagaagcgtgggcggcatcagagccagcctgtacaacgccgtgaccatcgaggacgtgcagaagctggccgccttcatgaagaagttcctggagatgcaccagctgtag

SEQ ID NO: 93446 - DNA, 585 bp, synthetic construct
  misc_feature 1..585: note = Description of Artificial Sequence: Synthetic coding sequence
  source 1..585: mol_type = other DNA
atgagcagcaacttcctgagcaagcccgtggacgtgagcaagttcggcgtgatcttcgccggcgcccagaagaacgtgggcagcgccggcgtgaccgtggtgatcgtgagagacgacctgctgggcttcgccctgagagagtgccccagcgtgctggagtacaaggtgcaggccggcaacagcagcctgtacaacacccccccctgcttcagcatctacgtgatgggcctggtgctggagtggatcaagaacaacggcggcgccgccgccatggagaagctgagcagcatcaagagccagaccatctacgagatcatcgacaacagccagggcttctacgtgtgccccgtggagccccagaacagaagcaagatgaacatccccttcagaatcggcaacgccaagggcgacgacgccctggagaagagattcctggacaaggccctggagctgaacatgctgagcctgaagggccacagaagcgtgggcggcatcagagccagcctgtacaacgccgtgaccatcgaggacgtgcagaagctggccgccttcatgaagaagttcctggagatgcaccagctgtag

SEQ ID NO: 93447 - DNA, 1050 bp, synthetic construct
  misc_feature 1..1050: note = Description of Artificial Sequence: Synthetic coding sequence
  source 1..1050: mol_type = other DNA
atgagcagcctgagcggcaaggtgcagaccgtgctgggcctggtggagcccagcaagctgggcagaaccctgacccacgagcacctggccatgaccttcgactgctgctactgccccccccccccctgccaggaggccatcagcaaggagcccatcgtgatgaagaacctgtactggatccagaagaacgcctacagccacaaggagaacctgcagctgaaccaggagaccgaggccatcaaggaggagctgctgtacttcaaggccaacggcggcggcgccctggtggagaacaccaccaccggcatcagcagagacacccagaccctgaagagactggccgaggagaccggcgtgcacatcatcagcggcgccggcttctacgtggacgccacccacagcagcgagaccagagccatgagcgtggagcagctgaccgacgtgctgatgaacgagatcctgcacggcgccgacggcaccagcatcaagtgcggcatcatcggcgagatcggctgcagctggcccctgaccgagagcgagagaaaggtgctgcaggccaccgcccacgcccaggcccagctgggctgccccgtgatcatccaccccggcagaagcagcagagcccccttccagatcatcagaatcctgcaggaggccggcgccgacatcagcaagaccgtgatgagccacctggacagaaccatcctggacaagaaggagctgctggagttcgcccagctgggctgctacctggagtacgacctgttcggcaccgagctgctgcactaccagctgggccccgacatcgacatgcccgacgacaacaagagaatcagaagagtgagactgctggtggaggagggctgcgaggacagaatcctggtggcccacgacatccacaccaagaccagactgatgaagtacggcggccacggctacagccacatcctgaccaacgtggtgcccaagatgctgctgagaggcatcaccgagaacgtgctggacaagatcctgatcgagaaccccaagcagtggctgaccttcaagtag

SEQ ID NO: 93448 - DNA, 1050 bp, synthetic construct; identical to SEQ ID NO: 93447
  misc_feature 1..1050: note = Description of Artificial Sequence: Synthetic coding sequence
  source 1..1050: mol_type = other DNA

SEQ ID NO: 93449 - DNA, 1050 bp, synthetic construct; identical to SEQ ID NO: 93447
  misc_feature 1..1050: note = Description of Artificial Sequence: Synthetic coding sequence
  source 1..1050: mol_type = other DNA

SEQ ID NO: 93450 - DNA, 909 bp, synthetic construct
  misc_feature 1..909: note = Description of Artificial Sequence: Synthetic coding sequence
  source 1..909: mol_type = other DNA
atgagcagcctgagcggcaaggtgcagaccgtgctgggcctggtggagcccagcaagctgggcagaaccctgacccacgagcacctggccatgaccttcgactgctgctactgccccccccccccctgccaggaggccatcagcaaggagcccatcgtgatgaagaacctgtactggatccagaagaacgcctacagccacaaggagaacctgcagctgaaccaggagaccgaggccatcaaggaggagctgctgtacttcaaggccaacggcggcggcgccctggtggagaacaccaccaccggcatcagcagagacacccagaccctgaagagactggccgaggagaccggcgtgcacatcatcagcggcgccggcttctacgtggacgccacccacagcagcgagaccagagccatgagcgtggagcagctgaccgacgtgctgatgaacgagatcctgcacggcgccgacggcaccagcatcaagtgcggcatcatcggcgagatcggctgcagctggcccctgaccgagagcgagagaaaggtgctgcaggccaccgcccacgcccaggcccagctgggctgccccgtgatcatccaccccggcagaagcagcagagcccccttccagatcatcagaatcctgcaggaggccggcgccgacatcagcaagaccgtgatgagccacctggacagagtgagactgctggtggaggagggctgcgaggacagaatcctggtggcccacgacatccacaccaagaccagactgatgaagtacggcggccacggctacagccacatcctgaccaacgtggtgcccaagatgctgctgagaggcatcaccgagaacgtgctggacaagatcctgatcgagaaccccaagcagtggctgaccttcaagtag

SEQ ID NO: 93451 - DNA, 1050 bp, synthetic construct; identical to SEQ ID NO: 93447
  misc_feature 1..1050: note = Description of Artificial Sequence: Synthetic coding sequence
  source 1..1050: mol_type = other DNA

SEQ ID NO: 93452 - DNA, 753 bp, synthetic construct
  misc_feature 1..753: note = Description of Artificial Sequence: Synthetic coding sequence
  source 1..753: mol_type = other DNA
atgttcagcctgcccctgagcctgcccctgtgcgaggacaccgccttcctgcccagcaagtgctgcagcagccacaagaccatcaagcaggccagaaccctgatcatgatcttcctggccagcggcacccacttccagaccatgctgaagagcaagctgaacgtgctgaccctgaagaaggagcccctgcccgccgtgatcttccacgagcccgaggccatcgagctgtgcaccaccacccccctgatgaagaccagaacccacagcggctgcaaggtgacctacctgggcaaggtgagcaccaccggcatgcagttcctgagcggctgcaccgagaagcccgtgatcgagctgtggaagaagcacaccctggccagagaggacgtgttccccgccaacgccctgctggagatcagacccttccaggtgtggctgcaccacctggaccacaagggcgaggccaccgtgcacatggacaccttccaggtggccagaatcgcctactgcaccgccgaccacaacgtgagccccaacatcttcgcctgggtgtacagagagatcaacgacgacctgagctaccagatggactgccacgccgtggagtgcgagagcaagctggaggccaagaagctggcccacgccatgatggaggccttcagaaagaccttccacagcatgaagagcgacggcagaatccacagcaacagcagcagcgaggaggtgagccaggagctggagagcgacgacggctag

SEQ ID NO: 93453 - DNA, 747 bp, synthetic construct
  misc_feature 1..747: note = Description of Artificial Sequence: Synthetic coding sequence
  source 1..747: mol_type = other DNA
atgcccagaatcgccggcaaccacctgatgctggaggagagcagaacctgcagcagccccgagctgctggacggcgtgtggccctgccagcccctgcacttcggcctgcccgccagcgagatgcacttccagaccatgctgaagagcaagctgaacgtgctgaccctgaagaaggagcccctgcccgccgtgatcttccacgagcccgaggccatcgagctgtgcaccaccacccccctgatgaagaccagaacccacagcggctgcaaggtgacctacctgggcaaggtgagcaccaccggcatgcagttcctgagcggctgcaccgagaagcccgtgatcgagctgtggaagaagcacaccctggccagagaggacgtgttccccgccaacgccctgctggagatcagacccttccaggtgtggctgcaccacctggaccacaagggcgaggccaccgtgcacatggacaccttccaggtggccagaatcgcctactgcaccgccgaccacaacgtgagccccaacatcttcgcctgggtgtacagagagatcaacgacgacctgagctaccagatggactgccacgccgtggagtgcgagagcaagctggaggccaagaagctggcccacgccatgatggaggccttcagaaagaccttccacagcatgaagagcgacggcagaatccacagcaacagcagcagcgaggaggtgagccaggagctggagagcgacgacggctag

SEQ ID NO: 93454 - DNA, 654 bp, synthetic construct
  misc_feature 1..654: note = Description of Artificial Sequence: Synthetic coding sequence
  source 1..654: mol_type = other DNA
atgtggcagcccgccaccgagagactgcagcacttccagaccatgctgaagagcaagctgaacgtgctgaccctgaagaaggagcccctgcccgccgtgatcttccacgagcccgaggccatcgagctgtgcaccaccacccccctgatgaagaccagaacccacagcggctgcaaggtgacctacctgggcaaggtgagcaccaccggcatgcagttcctgagcggctgcaccgagaagcccgtgatcgagctgtggaagaagcacaccctggccagagaggacgtgttccccgccaacgccctgctggagatcagacccttccaggtgtggctgcaccacctggaccacaagggcgaggccaccgtgcacatggacaccttccaggtggccagaatcgcctactgcaccgccgaccacaacgtgagccccaacatcttcgcctgggtgtacagagagatcaacgacgacctgagctaccagatggactgccacgccgtggagtgcgagagcaagctggaggccaagaagctggcccacgccatgatggaggccttcagaaagaccttccacagcatgaagagcgacggcagaatccacagcaacagcagcagcgaggaggtgagccaggagctggagagcgacgacggctag

SEQ ID NO: 93455 - DNA, 507 bp, synthetic construct
  misc_feature 1..507: note = Description of Artificial Sequence: Synthetic coding sequence
  source 1..507: mol_type = other DNA
atgtggcagcccgccaccgagagactgcaggtgacctacctgggcaaggtgagcaccaccggcatgcagttcctgagcggctgcaccgagaagcccgtgatcgagctgtggaagaagcacaccctggccagagaggacgtgttccccgccaacgccctgctggagatcagacccttccaggtgtggctgcaccacctggaccacaagggcgaggccaccgtgcacatggacaccttccaggtggccagaatcgcctactgcaccgccgaccacaacgtgagccccaacatcttcgcctgggtgtacagagagatcaacgacgacctgagctaccagatggactgccacgccgtggagtgcgagagcaagctggaggccaagaagctggcccacgccatgatggaggccttcagaaagaccttccacagcatgaagagcgacggcagaatccacagcaacagcagcagcgaggaggtgagccaggagctggagagcgacgacggctag

SEQ ID NO: 93456 - DNA, 753 bp, synthetic construct; identical to SEQ ID NO: 93452
  misc_feature 1..753: note = Description of Artificial Sequence: Synthetic coding sequence
  source 1..753: mol_type = other DNA

SEQ ID NO: 93457 - DNA, 1017 bp, synthetic construct
  misc_feature 1..1017: note = Description of Artificial Sequence: Synthetic coding sequence
  source 1..1017: mol_type = other DNA
atggagcagctgagagccgccgccagactgcagatcgtgctgggccacctgggcagacccagcgccggcgccgtggtggcccaccccaccagcggcaccatcagcagcgccagcttccacccccagcagttccagtacaccctggacaacaacgtgctgaccctggagcagagaaagttctacgaggagaacggcttcctggtgatcaagaacctggtgcccgacgccgacatccagagattcagaaacgagttcgagaagatctgcagaaaggaggtgaagcccctgggcctgaccgtgatgagagacgtgaccatcagcaagagcgagtacgcccccagcgagaagatgatcaccaaggtgcaggacttccaggaggacaaggagctgttcagatactgcaccctgcccgagatcctgaagtacgtggagtgcttcaccggccccaacatcatggccatgcacaccatgctgatcaacaagccccccgacagcggcaagaagaccagcagacaccccctgcaccaggacctgcactacttccccttcagacccagcgacctgatcgtgtgcgcctggaccgccatggagcacatcagcagaaacaacggctgcctggtggtgctgcccggcacccacaagggcagcctgaagccccacgactaccccaagtgggagggcggcgtgaacaagatgttccacggcatccaggactacgaggagaacaaggccagagtgcacctggtgatggagaagggcgacaccgtgttcttccaccccctgctgatccacggcagcggccagaacaagacccagggcttcagaaaggccatcagctgccacttcgccagcgccgactgccactacatcgacgtgaagggcaccagccaggagaacatcgagaaggaggtggtgggcatcgcccacaagttcttcggcgccgagaacagcgtgaacctgaaggacatctggatgttcagagccagactggtgaagggcgagagaaccaacctgtag

SEQ ID NO: 93458 - DNA, 717 bp, synthetic construct
  misc_feature 1..717: note = Description of Artificial Sequence: Synthetic coding sequence
  source 1..717: mol_type = other DNA
atgagagacgtgaccatcagcaagagcgagtacgcccccagcgagaagatgatcaccaaggtgcaggacttccaggaggacaaggagctgttcagatactgcaccctgcccgagatcctgaagtacgtggagtgcttcaccggccccaacatcatggccatgcacaccatgctgatcaacaagccccccgacagcggcaagaagaccagcagacaccccctgcaccaggacctgcactacttccccttcagacccagcgacctgatcgtgtgcgcctggaccgccatggagcacatcagcagaaacaacggctgcctggtggtgctgcccggcacccacaagggcagcctgaagccccacgactaccccaagtgggagggcggcgtgaacaagatgttccacggcatccaggactacgaggagaacaaggccagagtgcacctggtgatggagaagggcgacaccgtgttcttccaccccctgctgatccacggcagcggccagaacaagacccagggcttcagaaaggccatcagctgccacttcgccagcgccgactgccactacatcgacgtgaagggcaccagccaggagaacatcgagaaggaggtggtgggcatcgcccacaagttcttcggcgccgagaacagcgtgaacctgaaggacatctggatgttcagagccagactggtgaagggcgagagaaccaacctgtag

SEQ ID NO: 93459 - DNA, 15429 bp, synthetic construct
  misc_feature 1..15429: note = Description of Artificial Sequence: Synthetic coding sequence
  source 1..15429: mol_type = other DNA
atgggcaacgaggccagcctggagggcgagggcctgcccgagggcctggccgccgccgccgccgccggcggcggcgccagcggcgccggcagccccagccacaccgccatccccgccggcatggaggccgacctgagccagctgagcgaggaggagagaagacagatcgccgccgtgatgagcagagcccagggcctgcccaagggcagcgtgccccccgccgccgccgagagccccagcatgcacagaaagcaggagctggacagcagccacccccccaagcagagcggcagaccccccgaccccggcagacccgcccagcccggcctgagcaagagcagaaccaccgacaccttcagaagcgagcagaagctgcccggcagaagccccagcaccatcagcctgaaggagagcaagagcagaaccgacctgaaggaggagcacaagagcagcatgatgcccggcttcctgagcgaggtgaacgccctgagcgccgtgagcagcgtggtgaacaagttcaaccccttcgacctgatcagcgacagcgaggccagccaggaggagaccaccaagaagcagaaggtggtgcagaaggagcagggcaagcccgagggcatcatcaagccccccctgcagcagcagccccccaagcccatccccaagcagcagggccccggcagagaccccctgcagcaggacggcacccccaagagcatcagcagccagcagcccgagaagatcaagagccagccccccggcaccggcaagcccatccagggccccacccagaccccccagaccgaccacgccaagctgcccctgcagagagacgccagcagaccccagaccaagcaggccgacatcgtgagaggcgagagcgtgaagcccagcctgcccagccccagcaagccccccatccagcagcccacccccggcaagccccccgcccagcagcccggccacgagaagagccagcccggccccgccaagccccccgcccagcccagcggcctgaccaagcccctggcccagcagcccggcaccgtgaagccccccgtgcagccccccggcaccaccaagccccccgcccagcccctgggccccgccaagccccccgcccagcagaccggcagcgagaagcccagcagcgagcagcccggccccaaggccctggcccagccccccggcgtgggcaagacccccgcccagcagcccggccccgccaagccccccacccagcaggtgggcacccccaagcccctggcccagcagcccggcctgcagagccccgccaaggcccccggccccaccaagacccccgtgcagcagcccggccccggcaagatccccgcccagcaggccggccccggcaagaccagcgcccagcagaccggccccaccaagccccccagccagctgcccggccccgccaagccccccccccagcagcccggccccgccaagccccccccccagcagcccggcagcgccaagccccccagccagcagcccggcagcaccaagccccccccccagcagcccggccccgccaagcccagcccccagcagcccggcagcaccaagccccccagccagcagcccggcagcgccaagcccagcgcccagcagcccagccccgccaagcccagcgcccagcagagcaccaagcccgtgagccagaccggcagcggcaagcccctgcagccccccaccgtgagccccagcgccaagcagccccccagccagggcctgcccaagaccatctgccccctgtgcaacaccaccgagctgctgctgcacgtgcccgagaaggccaacttcaacacctgcaccgagtgccagaccaccgtgtgcagcctgtgcggcttcaaccccaacccccacctgaccgaggtgaaggagtggctgtgcctgaactgccagatgaagagagccctgggcggcgacctggcccccgtgcccagcagcccccagcccaagctgaagaccgcccccgtgaccaccaccagcgccgtgagcaagagcagcccccagccccagcagaccagccccaagaaggacgccgcccccaagcaggacctgagcaaggcccccgagcccaagaagcccccccccctggtgaagcagcccaccctgcacggcagccccagcgccaaggccaagcagccccccgaggccgacagcctgagcaagcccgccccccccaaggagcccagcgtgcccagcgagcaggacaaggcccccgtggccgacgacaagcccaagcagcccaagatggtgaagcccaccaccgacctggtgagcagcagcagcgccaccaccaagcccgacatccccagcagcaaggtgcagagccaggccgaggagaagaccaccccccccctgaagaccgacagcgccaagcccagccagagcttcccccccaccggcgagaaggtgagccccttcgacagcaaggccatccccagacccgccagcgacagcaagatcatcagccaccccggccccagcagcgagagcaagggccagaagcaggtggaccccgtgcagaagaaggaggagcccaagaaggcccagaccaagatgagccccaagcccgacgccaagcccatgcccaagggcagccccaccccccccggccccagacccaccgccggccagaccgtgcccaccccccagcagagccccaagccccaggagcagagcagaagattcagcctgaacctgggcagcatcaccgacgcccccaagagccagcccaccaccccccaggagaccgtgaccggcaagctgttcggcttcggcgccagcatcttcagccaggccagcaacctgatcagcaccgccggccagcccggcccccacagccagagcggccccggcgcccccatgaagcaggcccccgcccccagccagccccccaccagccagggcccccccaagagcaccggccaggccccccccgcccccgccaagagcatccccgtgaagaaggagaccaaggcccccgccgccgagaagctggagcccaaggccgagcaggcccccaccgtgaagagaaccgagaccgagaagaagcccccccccatcaaggacagcaagagcctgaccgccgagccccagaaggccgtgctgcccaccaagctggagaagagccccaagcccgagagcacctgccccctgtgcaagaccgagctgaacatcggcagcaaggacccccccaacttcaacacctgcaccgagtgcaagaaccaggtgtgcaacctgtgcggcttcaaccccaccccccacctgaccgagatccaggagtggctgtgcctgaactgccagacccagagagccatcagcggccagctgggcgacatcagaaagatgccccccgcccccagcggccccaaggccagccccatgcccgtgcccaccgagagcagcagccagaagaccgccgtgcccccccaggtgaagctggtgaagaagcaggagcaggaggtgaagaccgaggccgagaaggtgatcctggagaaggtgaaggagaccctgagcatggagaagatcccccccatggtgaccaccgaccagaagcaggaggagagcaagctggagaaggacaaggccagcgccctgcaggagaagaagcccctgcccgaggagaagaagctgatccccgaggaggagaagatcagaagcgaggagaagaagcccctgctggaggagaagaagcccacccccgaggacaagaagctgctgcccgaggccaagaccagcgcccccgaggagcagaagcacgacctgctgaagagccaggtgcagatcgccgaggagaagctggagggcagagtggcccccaagaccgtgcaggagggcaagcagccccagaccaagatggagggcctgcccagcggcaccccccagagcctgcccaaggaggacgacaagaccaccaagaccatcaaggagcagccccagcccccctgcaccgccaagcccgaccaggtggagcccggcaaggagaagaccgagaaggaggacgacaagagcgacaccagcagcagccagcagcccaagagcccccagggcctgagcgacaccggctacagcagcgacggcatcagcagcagcctgggcgagatccccagcctgatccccaccgacgagaaggacatcctgaagggcctgaagaaggacagcttcagccaggagagcagccccagcagccccagcgacctggccaagctggagagcaccgtgctgagcatcctggaggcccaggccagcaccctggccgacgagaagagcgagaagaagacccagccccacgaggtgagccccgagcagcccaaggaccaggagaagacccagagcctgagcgagaccctggagatcaccatcagcgaggaggagatcaaggagagccaggaggagagaaaggacaccttcaagaaggacagccagcaggacatccccagcagcaaggaccacaaggagaagagcgagttcgtggacgacatcaccaccagaagagagccctacgacagcgtggaggagagcagcgagagcgagaacagccccgtgccccagagaaagagaagaaccagcgtgggcagcagcagcagcgacgagtacaagcaggaggacagccagggcagcggcgaggaggaggacttcatcagaaagcagatcatcgagatgagcgccgacgaggacgccagcggcagcgaggacgacgagttcatcagaaaccagctgaaggagatcagcagcagcaccgagagccagaagaaggaggagaccaagggcaagggcaagatcaccgccggcaagcacagaagactgaccagaaagagcagcaccagcatcgacgaggacgccggcagaagacacagctggcacgacgaggacgacgaggccttcgacgagagccccgagctgaagtacagagagaccaagagccaggagagcgaggagctggtggtgaccggcggcggcggcctgagaagattcaagaccatcgagctgaacagcaccatcgccgacaagtacagcgccgagagcagccagaagaagaccagcctgtacttcgacgaggagcccgagctggagatggagagcctgaccgacagccccgaggacagaagcagaggcgagggcagcagcagcctgcacgccagcagcttcacccccggcaccagccccaccagcgtgagcagcctggacgaggacagcgacagcagccccagccacaagaagggcgagagcaagcagcagagaaaggccagacacagaccccacggccccctgctgcccaccatcgaggacagcagcgaggaggaggagctgagagaggaggaggagctgctgaaggagcaggagaagcagagagagatcgagcagcagcagagaaagagcagcagcaagaagagcaagaaggacaaggacgagctgagagcccagagaagaagagagagacccaagaccccccccagcaacctgagccccatcgaggacgccagccccaccgaggagctgagacaggccgccgagatggaggagctgcacagaagcagctgcagcgagtacagccccagcatcgagagcgaccccgagggcttcgagatcagccccgagaagatcatcgaggtgcagaaggtgtacaagctgcccaccgccgtgagcctgtacagccccaccgacgagcagagcatcatgcagaaggagggcagccagaaggccctgaagagcgccgaggagatgtacgaggagatgatgcacaagacccacaagtacaaggccttccccgccgccaacgagagagacgaggtgttcgagaaggagcccctgtacggcggcatgctgatcgaggactacatctacgagagcctggtggaggacacctacaacggcagcgtggacggcagcctgctgaccagacaggaggaggagaacggcttcatgcagcagaagggcagagagcagaagatcagactgagcgagcagatctacgaggaccccatgcagaagatcaccgacctgcagaaggagttctacgagctggagagcctgcacagcgtggtgccccaggaggacatcgtgagcagcagcttcatcatccccgagagccacgagatcgtggacctgggcaccatggtgaccagcaccgaggaggagagaaagctgctggacgccgacgccgcctacgaggagctgatgaagagacagcagatgcagctgacccccggcagcagccccacccaggcccccatcggcgaggacatgaccgagagcaccatggacttcgacagaatgcccgacgccagcctgaccagcagcgtgctgagcggcgccagcctgaccgacagcaccagcagcgccaccctgagcatccccgacgtgaagatcacccagcacttcagcaccgaggagatcgaggacgagtacgtgaccgactacaccagagagatccaggagatcatcgcccacgagagcctgatcctgacctacagcgagcccagcgagagcgccaccagcgtgccccccagcgacacccccagcctgaccagcagcgtgagcagcgtgtgcaccaccgacagcagcagccccatcaccaccctggacagcatcaccaccgtgtacaccgagcccgtggacatgatcaccaagttcgaggacagcgaggagatcagcagcagcacctacttccccggcagcatcatcgactaccccgaggagatcagcgtgagcctggacagaaccgccccccccgacggcagagccagcgccgaccacatcgtgatcagcctgagcgacatggccagcagcatcatcgagagcgtggtgcccaagcccgagggccccgtggccgacaccgtgagcaccgacctgctgatcagcgagaaggaccccgtgaagaaggccaagaaggagaccggcaacggcatcatcctggaggtgctggaggcctacagagacaagaaggagctggaggccgagagaaccaagagcagcctgagcgagaccgtgttcgaccacccccccagcagcgtgatcgccctgcccatgaaggagcagctgagcaccacctacttcaccagcggcgagaccttcggccaggagaagcccgccagccagctgcccagcggcagccccagcgtgagcagcctgcccgccaagcccagacccttcttcagaagcagcagcctggacatcagcgcccagccccccccccccccccccccccccccccccccccccccccccccccccccccccccccccccccccctgcccccccccaccagccccaagcccaccatcctgcccaagaagaagctgaccgtggccagccccgtgaccaccgccacccccctgttcgacgccgtgaccaccctggagaccaccgccgtgctgagaagcaacggcctgcccgtgaccagaatctgcaccaccgcccccccccccgtgccccccaagcccagcagcatccccagcggcctggtgttcacccacagacccgagcccagcaagccccccatcgcccccaagcccgtgatcccccagctgcccaccaccacccagaagcccaccgacatccaccccaagcccaccggcctgagcctgaccagcagcatgaccctgaacctggtgaccagcgccgactacaagctgcccagccccaccagccccctgagcccccacagcaacaagagcagccccagattcagcaagagcctgaccgagacctacgtggtgatcaccctgcccagcgagcccggcacccccaccgacagcagcgccagccaggccatcaccagctggcccctgggcagccccagcaaggacctggtgagcgtggagcccgtgttcagcgtggtgccccccgtgaccgccgtggagatccccatcagcagcgagcagaccttctacatcagcggcgccctgcagaccttcagcgccacccccgtgaccgcccccagcagcttccaggccgcccccaccagcgtgacccagttcctgaccaccgaggtgagcaagaccgaggtgagcgccaccagaagcaccgcccccagcgtgggcctgagcagcatcagcatcaccatcccccccgagcccctggccctggacaacatccacctggagaagccccagtacaaggaggacggcaagctgcagctggtgggcgacgtgatcgacctgagaaccgtgcccaaggtggaggtgaagaccaccgacaagtgcatcgacctgagcgccagcaccatggacgtgaagagacagatcaccgccaacgaggtgtacggcaagcagatcagcgccgtgcagcccagcatcatcaacctgagcgtgaccagcagcatcgtgacccccgtgagcctggccaccgagaccgtgaccttcgtgacctgcaccgccagcgccagctacaccaccggcaccgagagcctggtgggcgccgagcacgccatgaccacccccctgcagctgaccaccagcaagcacgccgagcccccctacagaatccccagcgaccaggtgttccccatcgccagagaggaggcccccatcaacctgagcctgggcacccccgcccacgccgtgaccctggccatcaccaagcccgtgaccgtgccccccgtgggcgtgaccaacggctggaccgacagcaccgtgagccagggcatcaccgacggcgaggtggtggacctgagcaccaccaagagccacagaaccgtggtgaccatggacgagagcaccagcagcgtgatgaccaagatcatcgaggacgagaagcccgtggacctgaccgccggcagaagagccgtgtgctgcgacgtggtgtacaagctgcccttcggcagaagctgcaccgcccagcagcccgccaccaccctgcccgaggacagattcggctacagagacgaccactaccagtacgacagaagcggcccctacggctacagaggcatcggcggcatgaagcccagcatgagcgacaccaacctggccgaggccggccacttcttctacaagagcaagaacgccttcgactacagcgagggcaccgacaccgccgtggacctgaccagcggcagagtgaccaccggcgaggtgatggactacagcagcaagaccaccggcccctaccccgagaccagacaggtgatcagcggcgccggcatcagcaccccccagtacagcaccgccagaatgacccccccccccggcccccagtactgcgtgggcagcgtgctgagaagcagcaacggcgtggtgtacagcagcgtggccacccccacccccagcaccttcgccatcaccacccagcccggcagcatcttcagcaccaccgtgagagacctgagcggcatccacaccgccgacgccgtgaccagcctgcccgccatgcaccacagccagcccatgcccagaagctacttcatcaccaccggcgccagcgagaccgacatcgccgtgaccggcatcgacatcagcgccagcctgcagaccatcaccatggagagcctgaccgccgagaccatcgacagcgtgcccaccctgaccaccgccagcgaggtgttccccgaggtggtgggcgacgagagcgccctgctgatcgtgcccgaggaggacaagcagcagcagcagctggacctggagagagagctgctggagctggagaagatcaagcagcagagattcgccgaggagctggagtgggagagacaggagatccagagattcagagagcaggagaagatcatggtgcagaagaagctggaggagctgcagagcatgaagcagcacctgctgttccagcaggaggaggagagacaggcccagttcatgatgagacaggagaccctggcccagcagcagctgcagctggagcagatccagcagctgcagcagcagctgcaccagcagctggaggagcagaagatcagacagatctaccagtacaactacgaccccagcggcaccgccagcccccagaccaccaccgagcaggccatcctggagggccagtacgccgccctggagggcagccagttctgggccaccgaggacgccaccaccaccgccagcgccgtggtggccatcgagatcccccagagccagggctggtacaccgtgcagagcgacggcgtgacccagtacatcgccccccccggcatcctgagcaccgtgagcgagatccccctgaccgacgtggtggtgaaggaggagaagcagcccaagaagagaagcagcggcgccaaggtgagaggccagtacgacgacatgggcgagaacatgaccgacgaccccagaagcttcaagaagatcgtggacagcggcgtgcagaccgacgacgaggacgccaccgacagaagctacgtgagcagaagaagaagaaccaagaagagcgtggacaccagcgtgcagaccgacgacgaggaccaggacgagtgggacatgcccaccagaagcagaagaaaggccagagtgggcaagtacggcgacagcatgaccgaggccgacaagaccaagcccctgagcaaggtgagcagcatcgccgtgcagaccgtggccgagatcagcgtgcagaccgagcccgtgggcaccatcagaacccccagcatcagagccagagtggacgccaaggtggagatcatcaagcacatcagcgcccccgagaagacctacaagggcggcagcctgggctgccagaccgaggccgacagcgacacccagagcccccagtacctgagcgccaccagcccccccaaggacaagaagagacccacccccctggagatcggctacagcagccacctgagagccgacagcaccgtgcagctggcccccagcccccccaagagccccaaggtgctgtacagccccatcagccccctgagccccggcaaggccctggagagcgccttcgtgccctacgagaagcccctgcccgacgacatcagcccccagaaggtgctgcaccccgacatggccaaggtgccccccgccagccccaagaccgccaagatgatgcagagaagcatgagcgaccccaagcccctgagccccaccgccgacgagagcagcagagcccccttccagtacaccgagggctacaccaccaagggcagccagaccatgaccagcagcggcgcccagaagaaggtgaagagaaccctgcccaaccccccccccgaggagatcagcaccggcacccagagcaccttcagcaccatgggcaccgtgagcagaagaagaatctgcagaaccaacaccatggccagagccaagatcctgcaggacatcgacagagagctggacctggtggagagagagagcgccaagctgagaaagaagcaggccgagctggacgaggaggagaaggagatcgacgccaagctgagatacctggagatgggcatcaacagaagaaaggaggccctgctgaaggagagagagaagagagagagagcctacctgcagggcgtggccgaggacagagactacatgagcgacagcgaggtgagcagcaccagacccaccagaatcgagagccagcacggcatcgagagacccagaaccgccccccagaccgagttcagccagttcatccccccccagacccagaccgagagccagctggtgccccccaccagcccctacacccagtaccagtacagcagccccgccctgcccacccaggcccccaccagctacacccagcagagccacttcgagcagcagaccctgtaccaccagcaggtgagcccctaccagacccagcccaccttccaggccgtggccaccatgagcttcaccccccaggtgcagcccacccccaccccccagcccagctaccagctgcccagccagatgatggtgatccagcagaagcccagacagaccaccctgtacctggagcccaagatcaccagcaactacgaggtgatcagaaaccagcccctgatgatcgcccccgtgagcaccgacaacaccttcgccgtgagccacctgggcagcaagtacaacagcctggacctgagaatcggcctggaggagagaagcagcatggccagcagccccatcagcagcatcagcgccgacagcttctacgccgacatcgaccaccacacccccagaaactacgtgctgatcgacgacatcggcgagatcaccaagggcaccgccgccctgagcaccgccttcagcctgcacgagaaggacctgagcaagaccgacagactgctgagaaccaccgagaccagaagaagccaggaggtgaccgacttcctggcccccctgcagagcagcagcagactgcacagctacgtgaaggccgaggaggaccccatggaggacccctacgagctgaagctgctgaagcaccagatcaagcaggagttcagaagaggcaccgagagcctggaccacctggccggcctgagccactactaccacgccgacaccagctacagacacttccccaagagcgagaagtacagcatcagcagactgaccctggagaagcaggccgccaagcagctgcccgccgccatcctgtaccagaagcagagcaagcacaagaagagcctgatcgaccccaagatgagcaagttcagccccatccaggagagcagagacctggagcccgactacagcagctacatgaccagcagcaccagcagcatcggcggcatcagcagcagagccagactgctgcaggacgacatcaccttcggcctgagaaagaacatcaccgaccagcagaagttcatgggcagcagcctgggcaccggcctgggcaccctgggcaacaccatcagaagcgccctgcaggacgaggccgacaagccctacagcagcggcagcagaagcagacccagcagcagacccagcagcgtgtacggcctggacctgagcatcaagagagacagcagcagcagcagcctgagactgaaggcccaggaggccgaggccctggacgtgagcttcagccacgccagcagcagcgccagaaccaagcccaccagcctgcccatcagccagagcagaggcagaatccccatcgtggcccagaacagcgaggaggagagccccctgagccccgtgggccagcccatgggcatggccagagccgccgccggccccctgccccccatcagcgccgacaccagagaccagttcggcagcagccacagcctgcccgaggtgcagcagcacatgagagaggagagcagaaccagaggctacgacagagacatcgccttcatcatggacgacttccagcacgccatgagcgacagcgaggcctaccacctgagaagagaggagaccgactggttcgacaagcccagagagagcagactggagaacggccacggcctggacagaaagctgcccgagagactggtgcacagcagacccctgagccagcaccaggagcagatcatccagatgaacggcaagaccatgcactacatcttcccccacgccagaatcaagatcaccagagacagcaaggaccacaccgtgagcggcaacggcctgggcatcagaatcgtgggcggcaaggagatccccggccacagcggcgagatcggcgcctacatcgccaagatcctgcccggcggcagcgccgagcagaccggcaagctgatggagggcatgcaggtgctggagtggaacggcatccccctgaccagcaagacctacgaggaggtgcagagcatcatcagccagcagagcggcgaggccgagatctgcgtgagactggacctgaacatgctgagcgacagcgagaacagccagcacctggagctgcacgagccccccaaggccgtggacaaggccaagagccccggcgtggaccccaagcagctggccgccgagctgcagaaggtgagcctgcagcagagccccctggtgctgagcagcgtggtggagaagggcagccacgtgcacagcggccccaccagcgccggcagcagcagcgtgcccagccccggccagcccggcagccccagcgtgagcaagaagaagcacggcagcagcaagcccaccgacggcaccaaggtggtgagccaccccatcaccggcgagatccagctgcagatcaactacgacctgggcaacctgatcatccacatcctgcaggccagaaacctggtgcccagagacaacaacggctacagcgaccccttcgtgaaggtgtacctgctgcccggcagaggccaggtgatggtggtgcagaacgccagcgccgagtacaagagaagaaccaagcacgtgcagaagagcctgaaccccgagtggaaccagaccgtgatctacaagagcatcagcatggagcagctgaagaagaagaccctggaggtgaccgtgtgggactacgacagattcagcagcaacgacttcctgggcgaggtgctgatcgacctgagcagcaccagccacctggacaacacccccagatggtaccccctgaaggagcagaccgagagcatcgaccacggcaagagccacagcagccagagcagccagcagagccccaagcccagcgtgatcaagagcagaagccacggcatcttccccgaccccagcaaggacatgcaggtgcccaccatcgagaagagccacagcagccccggcagcagcaagagcagcagcgagggccacctgagaagccacggccccagcagaagccagagcaagaccagcgtgacccagacccacctggaggacgccggcgccgccatcgccgccgccgaggccgccgtgcagcagctgagaatccagcccaccaagccccccaaccacagacccgccgagagcagcgtgagcaccggcagcagcggcagcagcttcggcagcggctacagcgtggacagcgagggcagcagcagcaccgccggcgagaccaacctgttccccatccccagaatcggcaagatgggccagaacggccaggagcccgtgaagcagcccggcgtgggcgtgggcctggccgacaccgaggccaagacccaggtgatgggcgagatcaagatcgccctgaagaaggagatgaagaccgacggcgagcagctgatcgtggagatcctgcagtgcagaaacatcacctacaagttcaagagccccgaccacctgcccgacctgtacgtgaagatctacgtgatgaacatcagcacccagaagaaggtgatcaagaagaagaccagagtgtgcagacacgacagagagcccagcttcaacgagaccttcagattcagcctgagccccgccggccacagcctgcagatcctgctgttcagcaacggcggcaagttcatgaagaagaccctgatcggcgaggcctgcatctggctggacaaggtggacctgagaaagagaatcgtgaactggcacaagctgctggtgagccccacccagacccactag

SEQ ID NO: 93460 - DNA, 1269 bp, synthetic construct
  misc_feature 1..1269: note = Description of Artificial Sequence: Synthetic coding sequence
  source 1..1269: mol_type = other DNA
accaaggtgtggaacagcaacggcctgggcatcagaatcgtgggcggcaaggagatccccggccacagcggcgagatcggcgcctacatcgccaagatcctgcccggcggcagcgccgagcagaccggcaagctgatggagggcatgcaggtgctggagtggaacggcatccccctgaccagcaagacctacgaggaggtgcagagcatcatcagccagcagagcggcgaggccgagatctgcgtgagactggacctgaacatgctgagcgacagcgagaacagccagcacctggagctgcacgagccccccaaggccgtggacaaggccaagagccccggcgtggaccccaagcagctggccgccgagctgcagaaggtgagcctgcagcagagccccctggtgctgagcagcgtggtggagaagggcagccacgtgcacagcggccccaccagcgccggcagcagcagcgtgcccagccccggccagcccggcagccccagcgtgagcaagaagaagcacggcagcagcaagcccaccgacggcaccaaggtggtgagccaccccatcaccggcgagatccagctgcagatcaactacgacctgggcaacctgatcatccacatcctgcaggccagaaacctggtgcccagagacaacaacggctacagcgaccccttcgtgaaggtgtacctgctgcccggcagaggcgccgagtacaagagaagaaccaagcacgtgcagaagagcctgaaccccgagtggaaccagaccgtgatctacaagagcatcagcatggagcagctgaagaagaagaccctggaggtgaccgtgtgggactacgacagattcagcagcaacgacttcctgggcgaggtgctgatcgacctgagcagcaccagccacctggacaacacccccagatggtaccccctgaaggagcagaccgagagcatcgaccacggcaagagccacagcagccagagcagccagcagagccccaagcccagcgtgatcaagagcagaagccacggcatcttccccgaccccagcaaggacatgcaggtgcccaccatcgagaagagccacagcagccccggcagcagcaagagcagcagcgagggccacctgagaagccacggccccagcagaagccagagcaagaccagcgtgacccagacccacctggaggacgccggcgccgccatcgccgccgccgaggccgccgtgcagcagctgagaatccagcccagcaagagaagaaagtag

SEQ ID NO: 93461 - DNA, 14808 bp, synthetic construct
  misc_feature 1..14808: note = Description of Artificial Sequence: Synthetic coding sequence
  source 1..14808: mol_type = other DNA
atgggcaacgaggccagcctggagggcgagggcctgcccgagggcctggccgccgccgccgccgccggcggcggcgccagcggcgccggcagccccagccacaccgccatccccgccggcatggaggccgacctgagccagctgagcgaggaggagagaagacagatcgccgccgtgatgagcagagcccagggcctgcccaagggcagcgtgccccccgccgccgccgagagccccagcatgcacagaaagcaggagctggacagcagccacccccccaagcagagcggcagaccccccgaccccggcagacccgcccagcccggcctgagcaagagcagaaccaccgacaccttcagaagcgagcagaagctgcccggcagaagccccagcaccatcagcctgaaggagagcaagagcagaaccgacctgaaggaggagcacaagagcagcatgatgcccggcttcctgagcgaggtgaacgccctgagcgccgtgagcagcgtggtgaacaagttcaaccccttcgacctgatcagcgacagcgaggccagccaggaggagaccaccaagaagcagaaggtggtgcagaaggagcagggcaagcccgagggcatcatcaagccccccctgcagcagcagccccccaagcccatccccaagcagcagggccccggcagagaccccctgcagcaggacggcacccccaagagcatcagcagccagcagcccgagaagatcaagagccagccccccggcaccggcaagcccatccagggccccacccagaccccccagaccgaccacgccaagctgcccctgcagagagacgccagcagaccccagaccaagcaggccgacatcgtgagaggcgagagcgtgaagcccagcctgcccagccccagcaagccccccatccagcagcccacccccggcaagccccccgcccagcagcccggccacgagaagagccagcccggccccgccaagccccccgcccagcccagcggcctgaccaagcccctggcccagcagcccggcaccgtgaagccccccgtgcagccccccggcaccaccaagccccccgcccagcccctgggccccgccaagccccccgcccagcagaccggcagcgagaagcccagcagcgagcagcccggccccaaggccctggcccagccccccggcgtgggcaagacccccgcccagcagcccggccccgccaagccccccacccagcaggtgggcacccccaagcccctggcccagcagcccggcctgcagagccccgccaaggcccccggccccaccaagacccccgtgcagcagcccggccccggcaagatccccgcccagcaggccggccccggcaagaccagcgcccagcagaccggccccaccaagccccccagccagctgcccggccccgccaagccccccccccagcagcccggccccgccaagccccccccccagcagcccggcagcgccaagccccccagccagcagcccggcagcaccaagccccccccccagcagcccggccccgccaagcccagcccccagcagcccggcagcaccaagccccccagccagcagcccggcagcgccaagcccagcgcccagcagcccagccccgccaagcccagcgcccagcagagcaccaagcccgtgagccagaccggcagcggcaagcccctgcagccccccaccgtgagccccagcgccaagcagccccccagccagggcctgcccaagaccatctgccccctgtgcaacaccaccgagctgctgctgcacgtgcccgagaaggccaacttcaacacctgcaccgagtgccagaccaccgtgtgcagcctgtgcggcttcaaccccaacccccacctgaccgaggtgaaggagtggctgtgcctgaactgccagatgaagagagccctgggcggcgacctggcccccgtgcccagcagcccccagcccaagctgaagaccgcccccgtgaccaccaccagcgccgtgagcaagagcagcccccagccccagcagaccagccccaagaaggacgccgcccccaagcaggacctgagcaaggcccccgagcccaagaagcccccccccctggtgaagcagcccaccctgcacggcagccccagcgccaaggccaagcagccccccgaggccgacagcctgagcaagcccgccccccccaaggagcccagcgtgcccagcgagcaggacaaggcccccgtggccgacgacaagcccaagcagcccaagatggtgaagcccaccaccgacctggtgagcagcagcagcgccaccaccaagcccgacatccccagcagcaaggtgcagagccaggccgaggagaagaccaccccccccctgaagaccgacagcgccaagcccagccagagcttcccccccaccggcgagaaggtgagccccttcgacagcaaggccatccccagacccgccagcgacagcaagatcatcagccaccccggccccagcagcgagagcaagggccagaagcaggtggaccccgtgcagaagaaggaggagcccaagaaggcccagaccaagatgagccccaagcccgacgccaagcccatgcccaagggcagccccaccccccccggccccagacccaccgccggccagaccgtgcccaccccccagcagagccccaagccccaggagcagagcagaagattcagcctgaacctgggcagcatcaccgacgcccccaagagccagcccaccaccccccaggagaccgtgaccggcaagctgttcggcttcggcgccagcatcttcagccaggccagcaacctgatcagcaccgccggccagcccggcccccacagccagagcggccccggcgcccccatgaagcaggcccccgcccccagccagccccccaccagccagggcccccccaagagcaccggccaggccccccccgcccccgccaagagcatccccgtgaagaaggagaccaaggcccccgccgccgagaagctggagcccaaggccgagcaggcccccaccgtgaagagaaccgagaccgagaagaagcccccccccatcaaggacagcaagagcctgaccgccgagccccagaaggccgtgctgcccaccaagctggagaagagccccaagcccgagagcacctgccccctgtgcaagaccgagctgaacatcggcagcaaggacccccccaacttcaacacctgcaccgagtgcaagaaccaggtgtgcaacctgtgcggcttcaaccccaccccccacctgaccgagatccaggagtggctgtgcctgaactgccagacccagagagccatcagcggccagctgggcgacatcagaaagatgccccccgcccccagcggccccaaggccagccccatgcccgtgcccaccgagagcagcagccagaagaccgccgtgcccccccaggtgaagctggtgaagaagcaggagcaggaggtgaagaccgaggccgagaaggtgatcctggagaaggtgaaggagaccctgagcatggagaagatcccccccatggtgaccaccgaccagaagcaggaggagagcaagctggagaaggacaaggccagcgccctgcaggagaagaagcccctgcccgaggagaagaagctgatccccgaggaggagaagatcagaagcgaggagaagaagcccctgctggaggagaagaagcccacccccgaggacaagaagctgctgcccgaggccaagaccagcgcccccgaggagcagaagcacgacctgctgaagagccaggtgcagatcgccgaggagaagctggagggcagagtggcccccaagaccgtgcaggagggcaagcagccccagaccaagatggagggcctgcccagcggcaccccccagagcctgcccaaggaggacgacaagaccaccaagaccatcaaggagcagccccagcccccctgcaccgccaagcccgaccaggtggagcccggcaaggagaagaccgagaaggaggacgacaagagcgacaccagcagcagccagcagcccaagagcccccagggcctgagcgacaccggctacagcagcgacggcatcagcagcagcctgggcgagatccccagcctgatccccaccgacgagaaggacatcctgaagggcctgaagaaggacagcttcagccaggagagcagccccagcagccccagcgacctggccaagctggagagcaccgtgctgagcatcctggaggcccaggccagcaccctggccgacgagaagagcgagaagaagacccagccccacgaggtgagccccgagcagcccaaggaccaggagaagacccagagcctgagcgagaccctggagatcaccatcagcgaggaggagatcaaggagagccaggaggagagaaaggacaccttcaagaaggacagccagcaggacatccccagcagcaaggaccacaaggagaagagcgagttcgtggacgacatcaccaccagaagagagccctacgacagcgtggaggagagcagcgagagcgagaacagccccgtgccccagagaaagagaagaaccagcgtgggcagcagcagcagcgacgagtacaagcaggaggacagccagggcagcggcgaggaggaggacttcatcagaaagcagatcatcgagatgagcgccgacgaggacgccagcggcagcgaggacgacgagttcatcagaaaccagctgaaggagatcagcagcagcaccgagagccagaagaaggaggagaccaagggcaagggcaagatcaccgccggcaagcacagaagactgaccagaaagagcagcaccagcatcgacgaggacgccggcagaagacacagctggcacgacgaggacgacgaggccttcgacgagagccccgagctgaagtacagagagaccaagagccaggagagcgaggagctggtggtgaccggcggcggcggcctgagaagattcaagaccatcgagctgaacagcaccatcgccgacaagtacagcgccgagagcagccagaagaagaccagcctgtacttcgacgaggagcccgagctggagatggagagcctgaccgacagccccgaggacagaagcagaggcgagggcagcagcagcctgcacgccagcagcttcacccccggcaccagccccaccagcgtgagcagcctggacgaggacagcgacagcagccccagccacaagaagggcgagagcaagcagcagagaaaggccagacacagaccccacggccccctgctgcccaccatcgaggacagcagcgaggaggaggagctgagagaggaggaggagctgctgaaggagcaggagaagcagagagagatcgagcagcagcagagaaagagcagcagcaagaagagcaagaaggacaaggacgagctgagagcccagagaagaagagagagacccaagaccccccccagcaacctgagccccatcgaggacgccagccccaccgaggagctgagacaggccgccgagatggaggagctgcacagaagcagctgcagcgagtacagccccagcatcgagagcgaccccgagggcttcgagatcagccccgagaagatcatcgaggtgcagaaggtgtacaagctgcccaccgccgtgagcctgtacagccccaccgacgagcagagcatcatgcagaaggagggcagccagaaggccctgaagagcgccgaggagatgtacgaggagatgatgcacaagacccacaagtacaaggccttccccgccgccaacgagagagacgaggtgttcgagaaggagcccctgtacggcggcatgctgatcgaggactacatctacgagagcctggtggaggacacctacaacggcagcgtggacggcagcctgctgaccagacaggaggaggagaacggcttcatgcagcagaagggcagagagcagaagatcagactgagcgagcagatctacgaggaccccatgcagaagatcaccgacctgcagaaggagttctacgagctggagagcctgcacagcgtggtgccccaggaggacatcgtgagcagcagcttcatcatccccgagagccacgagatcgtggacctgggcaccatggtgaccagcaccgaggaggagagaaagctgctggacgccgacgccgcctacgaggagctgatgaagagacagcagatgcagctgacccccggcagcagccccacccaggcccccatcggcgaggacatgaccgagagcaccatggacttcgacagaatgcccgacgccagcctgaccagcagcgtgctgagcggcgccagcctgaccgacagcaccagcagcgccaccctgagcatccccgacgtgaagatcacccagcacttcagcaccgaggagatcgaggacgagtacgtgaccgactacaccagagagatccaggagatcatcgcccacgagagcctgatcctgacctacagcgagcccagcgagagcgccaccagcgtgccccccagcgacacccccagcctgaccagcagcgtgagcagcgtgtgcaccaccgacagcagcagccccatcaccaccctggacagcatcaccaccgtgtacaccgagcccgtggacatgatcaccaagttcgaggacagcgaggagatcagcagcagcacctacttccccggcagcatcatcgactaccccgaggagatcagcgtgagcctggacagaaccgccccccccgacggcagagccagcgccgaccacatcgtgatcagcctgagcgacatggccagcagcatcatcgagagcgtggtgcccaagcccgagggccccgtggccgacaccgtgagcaccgacctgctgatcagcgagaaggaccccgtgaagaaggccaagaaggagaccggcaacggcatcatcctggaggtgctggaggcctacagagacaagaaggagctggaggccgagagaaccaagagcagcctgagcgagaccgtgttcgaccacccccccagcagcgtgatcgccctgcccatgaaggagcagctgagcaccacctacttcaccagcggcgagaccttcggccaggagaagcccgccagccagctgcccagcggcagccccagcgtgagcagcctgcccgccaagcccagacccttcttcagaagcagcagcctggacatcagcgcccagccccccccccccccccccccccccccccccccccccccccccccccccccccccccccccccccccctgcccccccccaccagccccaagcccaccatcctgcccaagaagaagctgaccgtggccagccccgtgaccaccgccacccccctgttcgacgccgtgaccaccctggagaccaccgccgtgctgagaagcaacggcctgcccgtgaccagaatctgcaccaccgcccccccccccgtgccccccaagcccagcagcatccccagcggcctggtgttcacccacagacccgagcccagcaagccccccatcgcccccaagcccgtgatcccccagctgcccaccaccacccagaagcccaccgacatccaccccaagcccaccggcctgagcctgaccagcagcatgaccctgaacctggtgaccagcgccgactacaagctgcccagccccaccagccccctgagcccccacagcaacaagagcagccccagattcagcaagagcctgaccgagacctacgtggtgatcaccctgcccagcgagcccggcacccccaccgacagcagcgccagccaggccatcaccagctggcccctgggcagccccagcaaggacctggtgagcgtggagcccgtgttcagcgtggtgccccccgtgaccgccgtggagatccccatcagcagcgagcagaccttctacatcagcggcgccctgcagaccttcagcgccacccccgtgaccgcccccagcagcttccaggccgcccccaccagcgtgacccagttcctgaccaccgaggtgagcaagaccgaggtgagcgccaccagaagcaccgcccccagcgtgggcctgagcagcatcagcatcaccatcccccccgagcccctggccctggacaacatccacctggagaagccccagtacaaggaggacggcaagctgcagctggtgggcgacgtgatcgacctgagaaccgtgcccaaggtggaggtgaagaccaccgacaagtgcatcgacctgagcgccagcaccatggacgtgaagagacagatcaccgccaacgaggtgtacggcaagcagatcagcgccgtgcagcccagcatcatcaacctgagcgtgaccagcagcatcgtgacccccgtgagcctggccaccgagaccgtgaccttcgtgacctgcaccgccagcgccagctacaccaccggcaccgagagcctggtgggcgccgagcacgccatgaccacccccctgcagctgaccaccagcaagcacgccgagcccccctacagaatccccagcgaccaggtgttccccatcgccagagaggaggcccccatcaacctgagcctgggcacccccgcccacgccgtgaccctggccatcaccaagcccgtgaccgtgccccccgtgggcgtgaccaacggctggaccgacagcaccgtgagccagggcatcaccgacggcgaggtggtggacctgagcaccaccaagagccacagaaccgtggtgaccatggacgagagcaccagcagcgtgatgaccaagatcatcgaggacgagaagcccgtggacctgaccgccggcagaagagccgtgtgctgcgacgtggtgtacaagctgcccttcggcagaagctgcaccgcccagcagcccgccaccaccctgcccgaggacagattcggctacagagacgaccactaccagtacgacagaagcggcccctacggctacagaggcatcggcggcatgaagcccagcatgagcgacaccaacctggccgaggccggccacttcttctacaagagcaagaacgccttcgactacagcgagggcaccgacaccgccgtggacctgaccagcggcagagtgaccaccggcgaggtgatggactacagcagcaagaccaccggcccctaccccgagaccagacaggtgatcagcggcgccggcatcagcaccccccagtacagcaccgccagaatgacccccccccccggcccccagtactgcgtgggcagcgtgctgagaagcagcaacggcgtggtgtacagcagcgtggccacccccacccccagcaccttcgccatcaccacccagcccggcagcatcttcagcaccaccgtgagagacctgagcggcatccacaccgccgacgccgtgaccagcctgcccgccatgcaccacagccagcccatgcccagaagctacttcatcaccaccggcgccagcgagaccgacatcgccgtgaccggcatcgacatcagcgccagcctgcagaccatcaccatggagagcctgaccgccgagaccatcgacagcgtgcccaccctgaccaccgccagcgaggtgttccccgaggtggtgggcgacgagagcgccctgctgatcgtgcccgaggaggacaagcagcagcagcagctggacctggagagagagctgctggagctggagaagatcaagcagcagagattcgccgaggagctggagtgggagagacaggagatccagagattcagagagcaggagaagatcatggtgcagaagaagctggaggagctgcagagcatgaagcagcacctgctgttccagcaggaggaggagagacaggcccagttcatgatgagacaggagaccctggcccagcagcagctgcagctggagcagatccagcagctgcagcagcagctgcaccagcagctggaggagcagaagatcagacagatctaccagtacaactacgaccccagcggcaccgccagcccccagaccaccaccgagcaggccatcctggagggccagtacgccgccctggagggcagccagttctgggccaccgaggacgccaccaccaccgccagcgccgtggtggccatcgagatcccccagagccagggctggtacaccgtgcagagcgacggcgtgacccagtacatcgccccccccggcatcctgagcaccgtgagcgagatccccctgaccgacgtggtggtgaaggaggagaagcagcccaagaagagaagcagcggcgccaaggtgagaggccagtacgacgacatgggcgagaacatgaccgacgaccccagaagcttcaagaagatcgtggacagcggcgtgcagaccgacgacgaggacgccaccgacagaagctacgtgagcagaagaagaagaaccaagaagagcgtggacaccagcgtgcagaccgacgacgaggaccaggacgagtgggacatgcccaccagaagcagaagaaaggccagagtgggcaagtacggcgacagcatgaccgaggccgacaagaccaagcccctgagcaaggtgagcagcatcgccgtgcagaccgtggccgagatcagcgtgcagaccgagcccgtgggcaccatcagaacccccagcatcagagccagagtggacgccaaggtggagatcatcaagcacatcagcgcccccgagaagacctacaagggcggcagcctgggctgccagaccgaggccgacagcgacacccagagcccccagtacctgagcgccaccagcccccccaaggacaagaagagacccacccccctggagatcggctacagcagccacctgagagccgacagcaccgtgcagctggcccccagcccccccaagagccccaaggtgctgtacagccccatcagccccctgagccccggcaaggccctggagagcgccttcgtgccctacgagaagcccctgcccgacgacatcagcccccagaaggtgctgcaccccgacatggccaaggtgccccccgccagccccaagaccgccaagatgatgcagagaagcatgagcgaccccaagcccctgagccccaccgccgacgagagcagcagagcccccttccagtacaccgagggctacaccaccaagggcagccagaccatgaccagcagcggcgcccagaagaaggtgaagagaaccctgcccaaccccccccccgaggagatcagcaccggcacccagagcaccttcagcaccatgggcaccgtgagcagaagaagaatctgcagaaccaacaccatggccagagccaagatcctgcaggacatcgacagagagctggacctggtggagagagagagcgccaagctgagaaagaagcaggccgagctggacgaggaggagaaggagatcgacgccaagctgagatacctggagatgggcatcaacagaagaaaggaggccctgctgaaggagagagagaagagagagagagcctacctgcagggcgtggccgaggacagagactacatgagcgacagcgaggtgagcagcaccagacccaccagaatcgagagccagcacggcatcgagagacccagaaccgccccccagaccgagttcagccagttcatccccccccagacccagaccgagagccagctggtgccccccaccagcccctacacccagtaccagtacagcagccccgccctgcccacccaggcccccaccagctacacccagcagagccacttcgagcagcagaccctgtaccaccagcaggtgagcccctaccagacccagcccaccttccaggccgtggccaccatgagcttcaccccccaggtgcagcccacccccaccccccagcccagctaccagctgcccagccagatgatggtgatccagcagaagcccagacagaccaccctgtacctggagcccaagatcaccagcaactacgaggtgatcagaaaccagcccctgatgatcgcccccgtgagcaccgacaacaccttcgccgtgagccacctgggcagcaagtacaacagcctggacctgagaatcggcctggaggagagaagcagcatggccagcagccccatcagcagcatcagcgccgacagcttctacgccgacatcgaccaccacacccccagaaactacgtgctgatcgacgacatcggcgagatcaccaagggcaccgccgccctgagcaccgccttcagcctgcacgagaaggacctgagcaagaccgacagactgctgagaaccaccgagaccagaagaagccaggaggtgaccgacttcctggcccccctgcagagcagcagcagactgcacagctacgtgaaggccgaggaggaccccatggaggacccctacgagctgaagctgctgaagcaccagatcaagcaggagttcagaagaggcaccgagagcctggaccacctggccggcctgagccactactaccacgccgacaccagctacagacacttccccaagagcgagaagtacagcatcagcagactgaccctggagaagcaggccgccaagcagctgcccgccgccatcctgtaccagaagcagagcaagcacaagaagagcctgatcgaccccaagatgagcaagttcagccccatccaggagagcagagacctggagcccgactacagcagctacatgaccagcagcaccagcagcatcggcggcatcagcagcagagccagactgctgcaggacgacatcaccttcggcctgagaaagaacatcaccgaccagcagaagttcatgggcagcagcctgggcaccggcctgggcaccctgggcaacaccatcagaagcgccctgcaggacgaggccgacaagccctacagcagcggcagcagaagcagacccagcagcagacccagcagcgtgtacggcctggacctgagcatcaagagagacagcagcagcagcagcctgagactgaaggcccaggaggccgaggccctggacgtgagcttcagccacgccagcagcagcgccagaaccaagcccaccagcctgcccatcagccagagcagaggcagaatccccatcgtggcccagaacagcgaggaggagagccccctgagccccgtgggccagcccatgggcatggccagagccgccgccggccccctgccccccatcagcgccgacaccagagaccagttcggcagcagccacagcctgcccgaggtgcagcagcacatgagagaggagagcagaaccagaggctacgacagagacatcgccttcatcatggacgacttccagcacgccatgagcgacagcgaggcctaccacctgagaagagaggagaccgactggttcgacaagcccagagagagcagactggagaacggccacggcctggacagaaagctgcccgagagactggtgcacagcagacccctgagccagcaccaggagcagatcatccagatgaacggcaagaccatgcactacatcttcccccacgccagaatcaagatcaccagagacagcaaggaccacaccgtgagcggcaacggcctgggcatcagaatcgtgggcggcaaggagatccccggccacagcggcgagatcggcgcctacatcgccaagatcctgcccggcggcagcgccgagcagaccggcaagctgatggagggcatgcaggtgctggagtggaacggcatccccctgaccagcaagacctacgaggaggtgcagagcatcatcagccagcagagcggcgaggccgagatctgcgtgagactggacctgaacatgctgagcgacagcgagaacagccagcacctggagctgcacgagccccccaaggccgtggacaaggccaagagccccggcgtggaccccaagcagctggccgccgagctgcagaaggtgagcctgcagcagagccccctggtgctgagcagcgtggtggagaagggcagccacgtgcacagcggccccaccagcgccggcagcagcagcgtgcccagccccggccagcccggcagccccagcgtgagcaagaagaagcacggcagcagcaagcccaccgacggcaccaaggtggtgagccaccccatcaccggcgagatccagctgcagatcaactacgacctgggcaacctgatcatccacatcctgcaggccagaaacctggtgcccagagacaacaacggctacagcgaccccttcgtgaaggtgtacctgctgcccggcagaggccaggtgatggtggtgcagaacgccagcgccgagtacaagagaagaaccaagcacgtgcagaagagcctgaaccccgagtggaaccagaccgtgatctacaagagcatcagcatggagcagctgaagaagaagaccctggaggtgaccgtgtgggactacgacagattcagcagcaacgacttcctgggcgaggtgctgatcgacctgagcagcaccagccacctggacaacacccccagatggtaccccctgaaggagcagaccgagagcatcgaccacggcaagagccacagcagccagagcagccagcagagccccaagcccagcgtgatcaagagcagaagccacggcatcttccccgaccccagcaaggacatgcaggtgcccaccatcgagaagagccacagcagccccggcagcagcaagagcagcagcgagggccacctgagaagccacggccccagcagaagccagagcaagaccagcgtgacccagacccacctggaggacgccggcgccgccatcgccgccgccgaggccgccgtgcagcagctgagaatccagcccagcaagagaagaaagtag

SEQ ID NO: 93462 - DNA, 10908 bp, synthetic construct
  misc_feature 1..10908: note = Description of Artificial Sequence: Synthetic coding sequence
  source 1..10908: mol_type = other DNA
atgggcaacgaggccagcctggagggcgagggcctgcccgagggcctggccgccgccgccgccgccggcggcggcgccagcggcgccggcagccccagccacaccgccatccccgccggcatggaggccgacctgagccagctgagcgaggaggagagaagacagatcgccgccgtgatgagcagagcccagggcctgcccaagggcagcgtgccccccgccgccgccgagagccccagcatgcacagaaagcaggagctggacagcagccacccccccaagcagagcggcagaccccccgaccccggcagacccgcccagcccggcctgagcaagagcagaaccaccgacaccttcagaagcgagcagaagctgcccggcagaagccccagcaccatcagcctgaaggagagcaagagcagaaccgacctgaaggaggagcacaagagcagcatgatgcccggcttcctgagcgaggtgaacgccctgagcgccgtgagcagcgtggtgaacaagttcaaccccttcgacctgatcagcgacagcgaggccagccaggaggagaccaccaagaagcagaaggtggtgcagaaggagcagggcaagcccgagggcatcatcaagccccccctgcagcagcagccccccaagcccatccccaagcagcagggccccggcagagaccccctgcagcaggacggcacccccaagagcatcagcagccagcagcccgagaagatcaagagccagccccccggcaccggcaagcccatccagggccccacccagaccccccagaccgaccacgccaagctgcccctgcagagagacgccagcagaccccagaccaagcaggccgacatcgtgagaggcgagagcgtgaagcccagcctgcccagccccagcaagccccccatccagcagcccacccccggcaagccccccgcccagcagcccggccacgagaagagccagcccggccccgccaagccccccgcccagcccagcggcctgaccaagcccctggcccagcagcccggcaccgtgaagccccccgtgcagccccccggcaccaccaagccccccgcccagcccctgggccccgccaagccccccgcccagcagaccggcagcgagaagcccagcagcgagcagcccggccccaaggccctggcccagccccccggcgtgggcaagacccccgcccagcagcccggccccgccaagccccccacccagcaggtgggcacccccaagcccctggcccagcagcccggcctgcagagccccgccaaggcccccggccccaccaagacccccgtgcagcccaagccccccagccagcagcccggcagcaccaagccccccccccagcagcccggccccgccaagcccagcccccagcagcccggcagcaccaagccccccagccagcagcccggcagcgccaagcccagcgcccagcagcccagccccgccaagcccagcgcccagcagagcaccaagcccgtgagccagaccggcagcggcaagcccctgcagccccccaccgtgagccccagcgccaagcagccccccagccagggcctgcccaagaccatctgccccctgtgcaacaccaccgagctgctgctgcacgtgcccgagaaggccaacttcaacacctgcaccgagtgccagaccaccgtgtgcagcctgtgcggcttcaaccccaacccccacctgaccgaggtgaaggagtggctgtgcctgaactgccagatgaagagagccctgggcggcgacctggcccccgtgcccagcagcccccagcccaagctgaagaccgcccccgtgaccaccaccagcgccgtgagcaagagcagcccccagccccagcagaccagccccaagaaggacgccgcccccaagcaggacctgagcaaggcccccgagcccaagaagcccccccccctggtgaagcagcccaccctgcacggcagccccagcgccaaggccaagcagccccccgaggccgacagcctgagcaagcccgccccccccaaggagcccagcgtgcccagcgagcaggacaaggcccccgtggccgacgacaagcccaagcagcccaagatggtgaagcccaccaccgacctggtgagcagcagcagcgccaccaccaagcccgacatccccagcagcaaggtgcagagccaggccgaggagaagaccaccccccccctgaagaccgacagcgccaagcccagccagagcttcccccccaccggcgagaaggtgagccccttcgacagcaaggccatccccagacccgccagcgacagcaagatcatcagccaccccggccccagcagcgagagcaagggccagaagcaggtggaccccgtgcagaagaaggaggagcccaagaaggcccagaccaagatgagccccaagcccgacgccaagcccatgcccaagggcagccccaccccccccggccccagacccaccgccggccagaccgtgcccaccccccagcagagccccaagccccaggagcagagcagaagattcagcctgaacctgggcagcatcaccgacgcccccaagagccagcccaccaccccccaggagaccgtgaccggcaagctgttcggcttcggcgccagcatcttcagccaggccagcaacctgatcagcaccgccggccagcccggcccccacagccagagcggccccggcgcccccatgaagcaggcccccgcccccagccagccccccaccagccagggcccccccaagagcaccggccaggccccccccgcccccgccaagagcatccccgtgaagaaggagaccaaggcccccgccgccgagaagctggagcccaaggccgagcaggcccccaccgtgaagagaaccgagaccgagaagaagcccccccccatcaaggacagcaagagcctgaccgccgagccccagaaggccgtgctgcccaccaagctggagaagagccccaagcccgagagcacctgccccctgtgcaagaccgagctgaacatcggcagcaaggacccccccaacttcaacacctgcaccgagtgcaagaaccaggtgtgcaacctgtgcggcttcaaccccaccccccacctgaccgagaactgccagacccagagagccatcagcggccagctgggcgacatcagaaagatgccccccgcccccagcggccccaaggccagccccatgcccgtgcccaccgagagcagcagccagaagaccgccgtgcccccccaggtgaagctggtgaagaagcaggagcaggaggtgaagaccgaggccgagaaggtgatcctggagaaggtgaaggagaccctgagcatggagaagatcccccccatggtgaccaccgaccagaagcaggaggagagcaagctggagaaggacaaggccagcgccctgcaggagaagaagcccctgcccgaggagaagaagctgatccccgaggaggagaagatcagaagcgaggagaagaagcccctgctggaggagaagaagcccacccccgaggacaagaagctgctgcccgaggccaagaccagcgcccccgaggagcagaagcacgacctgctgaagagccaggtgcagatcgccgaggagaagctggagggcagagtggcccccaagaccgtgcaggagggcaagcagccccagaccaagatggagggcctgcccagcggcaccccccagagcctgcccaaggaggacgacaagaccaccaagaccatcaaggagcagccccagcccccctgcaccgccaagcccgaccaggagaaggaggacgacaagagcgacaccagcagcagccagcagcccaagagcccccagggcctgagcgacaccggctacagcagcgacggcatcagcagcagcctgggcgagatccccagcctgatccccaccgacgagaaggacatcctgaagggcctgaagaaggacagcttcagccaggagagcagccccagcagccccagcgacctggccaagctggagagcaccgtgctgagcatcctggaggcccaggccagcaccctggccgacgagaagagcgagaagaagacccagccccacgaggtgagccccgagcagcccaaggaccaggagaagacccagagcctgagcgagaccctggagatcaccatcagcgaggaggagatcaaggagagccaggaggagagaaaggacaccttcaagaaggacagccagcaggacatccccagcagcaaggaccacaaggagaagagcgagttcgtggacgacatcaccaccagaagagagccctacgacagcgtggaggagagcagcgagagcgagaacagccccgtgccccagagaaagagaagaaccagcgtgggcagcagcagcagcgacgagtacaagcaggaggacagccagggcagcggcgaggaggaggacttcatcagaaagcagatcatcgagatgagcgccgacgaggacgccagcggcagcgaggacgacgagttcatcagaaaccagctgaaggagatcagcagcagcaccgagagccagaagaaggaggagaccaagggcaagggcaagatcaccgccggcaagcacagaagactgaccagaaagagcagcaccagcatcgacgaggacgccggcagaagacacagctggcacgacgaggacgacgaggccttcgacgagagccccgagctgaagtacagagagaccaagagccaggagagcgaggagctggtggtgaccggcggcggcggcctgagaagattcaagaccatcgagctgaacagcaccatcgccgacaagtacagcgccgagagcagccagaagaagaccagcctgtacttcgacgaggagcccgagctggagatggagagcctgaccgacagccccgaggacagaagcagaggcgagggcagcagcagcctgcacgccagcagcttcacccccggcaccagccccaccagcgtgagcagcctggacgaggacagcgacagcagccccagccacaagaagggcgagagcaagcagcagagaaaggccagacacagaccccacggccccctgctgcccaccatcgaggacagcagcgaggaggaggagctgagagaggaggaggagctgctgaaggagcaggagaagcagagagagatcgagcagcagcagagaaagagcagcagcaagaagagcaagaaggacaaggacgagctgagagcccagagaagaagagagagacccaagaccccccccagcaacctgagccccatcgaggacgccagccccaccgaggagctgagacaggccgccgagatggaggagctgcacagaagcagctgcagcgagtacagccccagcatcgagagcgaccccgagggcttcgagatcagccccgagaagatcatcgaggtgcagaaggtgtacaagctgcccaccgccgtgagcctgtacagccccaccgacgagcagagcatcatgcagaaggagggcagccagaaggccctgaagagcgccgaggagatgtacgaggagatgatgcacaagacccacaagtacaaggccttccccgccgccaacgagagagacgaggtgttcgagaaggagcccctgtacggcggcatgctgatcgaggactacatctacgagagcctggtggaggacacctacaacggcagcgtggacggcagcctgctgaccagacaggaggaggagaacggcttcatgcagcagaagggcagagagcagaagatcagactgagcgagcagatctacgaggaccccatgcagaagatcaccgacctgcagaaggagttctacgagctggagagcctgcacagcgtggtgccccaggaggacatcgtgagcagcagcttcatcatccccgagagccacgagatcgtggacctgggcaccatggtgaccagcaccgaggaggagagaaagctgctggacgccgacgccgcctacgaggagctgatgaagagacagcagatgcagctgacccccggcagcagccccacccaggcccccatcggcgaggacatgaccgagagcaccatggacttcgacagaatgcccgacgccagcctgaccagcagcgtgctgagcggcgccagcctgaccgacagcaccagcagcgccaccctgagcatccccgacgtgaagatcacccagcacttcagcaccgaggagatcgaggacgagtacgtgaccgactacaccagagagatccaggagatcatcgcccacgagagcctgatcctgacctacagcgagcccagcgagagcgccaccagcgtgccccccagcgacacccccagcctgaccagcagcgtgagcagcgtgtgcaccaccgacagcagcagccccatcaccaccctggacagcatcaccaccgtgtacaccgagcccgtggacatgatcaccaagttcgaggacagcgaggagatcagcagcagcacctacttccccggcagcatcatcgactaccccgaggagatcagcgtgagcctggacagaaccgccccccccgacggcagagccagcgccgaccacatcgtgatcagcctgagcgacatggccagcagcatcatcgagagcgtggtgcccaagcccgagggccccgtggccgacaccgtgagcaccgacctgctgatcagcgagaaggaccccgtgaagaaggccaagaaggagaccggcaacggcatcatcctggaggtgctggaggcctacagagacaagaaggagctggaggccgagagaaccaagagcagcctgagcgagaccgtgttcgaccacccccccagcagcgtgatcgccctgcccatgaaggagcagctgagcaccacctacttcaccagcggcgagaccttcggccaggagaagcccgccagccagctgcccagcggcagccccagcgtgagcagcctgcccgccaagcccagacccttcttcagaagcagcagcctggacatcagcgcccagccccccccccccccccccccccccccccccccccccccccccccccccccccccccccccccccccctgcccccccccaccagccccaagcccaccatcctgcccaagaagaagctgaccgtggccagccccgtgaccaccgccacccccctgttcgacgccgtgaccaccctggagaccaccgccgtgctgagaagcaacggcctgcccgtgaccagaatctgcaccaccgcccccccccccgtgccccccaagcccagcagcatccccagcggcctggtgttcacccacagacccgagcccagcaagccccccatcgcccccaagcccgtgatcccccagctgcccaccaccacccagaagcccaccgacatccaccccaagcccaccggcctgagcctgaccagcagcatgaccctgaacctggtgaccagcgccgactacaagctgcccagccccaccagccccctgagcccccacagcaacaagagcagccccagattcagcaagagcctgaccgagacctacgtggtgatcaccctgcccagcgagcccggcacccccaccgacagcagcgccagccaggccatcaccagctggcccctgggcagccccagcaaggacctggtgagcgtggagcccgtgttcagcgtggtgccccccgtgaccgccgtggagatccccatcagcagcgagcagaccttctacatcagcggcgccctgcagaccttcagcgccacccccgtgaccgcccccagcagcttccaggccgcccccaccagcgtgacccagttcctgaccaccgaggtgagcaagaccgaggtgagcgccaccagaagcaccgcccccagcgtgggcctgagcagcatcagcatcaccatcccccccgagcccctggccctggacaacatccacctggagaagccccagtacaaggaggacggcaagctgcagctggtgggcgacgtgatcgacctgagaaccgtgcccaaggtggaggtgaagaccaccgacaagtgcatcgacctgagcgccagcaccatggacgtgaagagacagatcaccgccaacgaggtgtacggcaagcagatcagcgccgtgcagcccagcatcatcaacctgagcgtgaccagcagcatcgtgacccccgtgagcctggccaccgagaccgtgaccttcgtgacctgcaccgccagcgccagctacaccaccggcaccgagagcctggtgggcgccgagcacgccatgaccacccccctgcagctgaccaccagcaagcacgccgagcccccctacagaatccccagcgaccaggtgttccccatcgccagagaggaggcccccatcaacctgagcctgggcacccccgcccacgccgtgaccctggccatcaccaagcccgtgaccgtgccccccgtgggcgtgaccaacggctggaccgacagcaccgtgagccagggcatcaccgacggcgaggtggtggacctgagcaccaccaagagccacagaaccgtggtgaccatggacgagagcaccagcagcgtgatgaccaagatcatcgaggacgagaagcccgtggacctgaccgccggcagaagagccgtgtgctgcgacgtggtgtacaagctgcccttcggcagaagctgcaccgcccagcagcccgccaccaccctgcccgaggacagattcggctacagagacgaccactaccagtacgacagaagcggcccctacggctacagaggcatcggcggcatgaagcccagcatgagcgacaccaacctggccgaggccggccacttcttctacaagagcaagaacgccttcgactacagcgagggcaccgacaccgccgtggacctgaccagcggcagagtgaccaccggcgaggtgatggactacagcagcaagaccaccggcccctaccccgagaccagacaggtgatcagcggcgccggcatcagcaccccccagtacagcaccgccagaatgacccccccccccggcccccagtactgcgtgggcagcgtgctgagaagcagcaacggcgtggtgtacagcagcgtggccacccccacccccagcaccttcgccatcaccacccagcccggcagcatcttcagcaccaccgtgagagacctgagcggcatccacaccgccgacgccgtgaccagcctgcccgccatgcaccacagccagcccatgcccagaagctacttcatcaccaccggcgccagcgagaccgacatcgccgtgaccggcatcgacatcagcgccagcctgcagaccatcaccatggagagcctgaccgccgagaccatcgacagcgtgcccaccctgaccaccgccagcgaggtgttccccgaggtggtgggcgacgagagcgccctgctgatcgtgcccgaggaggacaagcagcagcagcagctggacctggagagagagctgctggagctggagaagatcaagcagcagagattcgccgaggagctggagtgggagagacaggagatccagagattcagagagcaggagaagatcatggtgcagaagaagctggaggagctgcagagcatgaagcagcacctgctgttccagcaggaggaggagagacaggcccagttcatgatgagacaggagaccctggcccagcagcagctgcagctggagcagatccagcagctgcagcagcagctgcaccagcagctggaggagcagaagatcagacagatctaccagtacaactacgaccccagcggcaccgccagcccccagaccaccaccgagcaggccatcctggagggccagtacgccgccctggagggcagccagttctgggccaccgaggacgccaccaccaccgccagcgccgtggtggccatcgagatcccccagagccagggctggtacaccgtgcagagcgacggcgtgacccagtacatcgccccccccggcatcctgagcaccgtgagcgagatccccctgaccgacgtggtggtgaaggaggagaagcagcccaagaagagaagcagcggcgccaaggtgagaggccagtacgacgacatgggcgagaacatgaccgacgaccccagaagcttcaagaagatcgtggacagcggcgtgcagaccgacgacgaggacgccaccgacagaagctacgtgagcagaagaagaagaaccaagaagagcgtggacaccagcgtgcagaccgacgacgaggaccaggacgagtgggacatgcccaccagaagcagaagaaaggccagagtgggcaagtacggcgacagcatgaccgaggccgacaagaccaagcccctgagcaaggtgagcagcatcgccgtgcagaccgtggccgagatcagcgtgcagaccgagcccgtgggcaccatcagaacccccagcatcagagccagagtggacgccaaggtggagatcatcaagcacatcagcgcccccgagaagacctacaagggcggcagcctgggctgccagaccgaggccgacagcgacacccagagcccccagtacctgagcgccaccagcccccccaaggacaagaagagacccacccccctggagatcggctacagcagccacctgagagccgacagcaccgtgcagctggcccccagcccccccaagagccccaaggtgctgtacagccccatcagccccctgagccccggcaaggccctggagagcgccttcgtgccctacgagaagcccctgcccgacgacatcagcccccagaaggtgctgcaccccgacatggccaaggtgccccccgccagccccaagaccgccaagatgatgcagagaagcatgagcgaccccaagcccctgagccccaccgccgacgagagcagcagagcccccttccagtacaccgagggctacacctag

SEQ ID NO: 93463 - DNA, 1635 bp, synthetic construct
  misc_feature 1..1635: note = Description of Artificial Sequence: Synthetic coding sequence
  source 1..1635: mol_type = other DNA
atggagaagctgcaggagcacctgatcaaggccaaggccttcaccatcaagaagaccctggagatctacgtgcccatcaagcagttcttctacaacctgatccaccccgagtacagcgccgtgaccgacgtgtacgtgctgatgttcctggccgacaccgtggacttcatcatcatcgtgttcggcttctgggccttcggcaagcacagcgccgccgccgacatcaccagcagcctgagcgaggaccaggtgcccggccccttcctggtgatggtgctgatccagttcggcaccatggtggtggacagagccctgtacctgagaaagaccgtgctgggcaaggtgatcttccaggtgatcctggtgttcggcatccacttctggatgttcttcatcctgcccggcgtgaccgagagaaagttcagccagaacctggtggcccagctgtggtacttcgtgaagtgcgtgtacttcggcctgagcgcctaccagatcagatgcggctaccccaccagagtgctgggcaacttcctgaccaagagctacaactacgtgaacctgttcctgttccagggcttcagactggtgcccttcctgaccgagctgagagccgtgatggactgggtgtggaccgacaccaccctgagcctgagcagctggatctgcgtggaggacatctacgcccacatcttcatcctgaagtgctggagagagagcgagaagcccatcttcaccatgagcgcccagcagagccagctgaaggtgatggaccagcagagcttcaacaagttcatccaggccttcagcagagacaccggcgccatgcagttcctggagaactacgagaaggaggacatcaccgtggccgagctggagggcaacagcaacagcctgtggaccatcagcccccccagcaagcagaagatgatccacgagctgctggaccccaacagcagcttcagcgtggtgttcagctggagcatccagagaaacctgagcctgggcgccaagagcgagatcgccaccgacaagctgagcttccccctgaagaacatcaccagaaagaacatcgccaagatgatcgccggcaacagcaccgagagcagcaagacccccgtgaccatcgagaagatctacccctactacgtgaaggcccccagcgacagcaacagcaagcccatcaagcagctgctgagcgagaacaacttcatggacatcaccatcatcctgagcagagacaacaccaccaagtacaacagcgagtggtgggtgctgaacctgaccggcaacagaatctacaaccccaacagccaggccctggagctggtggtgttcaacgacaaggtgagcccccccagcctgggcttcctggccggctacggcatcatgggcctgtacgccagcgtggtgctggtgatcggcaagttcgtgagagagttcttcagcggcatcagccacagcatcatgttcgaggagctgcccaacgtggacagaatcctgaagctgtgcaccgacatcttcctggtgagagagaccggcgagctggagctggaggaggacctgtacgccaagctgatcttcctgtacagaagccccgagaccatgatcaagtggaccagagagaagaccaactag

SEQ ID NO: 93464 - DNA, 8259 bp, synthetic construct
  misc_feature 1..8259: note = Description of Artificial Sequence: Synthetic coding sequence
  source 1..8259: mol_type = other DNA
atggccagcgaggtggtgtgcggcctgatcttcagactgctgctgcccatctgcctggccgtggcctgcgccttcagatacaacggcctgagcttcgtgtacctgatctacctgctgctgatccccctgttcagcgagcccaccaagaccaccatgcagggccacaccggcagactgctgaagagcctgtgcttcatcagcctgagcttcctgctgctgcacatcatcttccacatcaccctggtgagcctggaggcccagcacagaatcgcccccggctacaactgcagcacctgggagaagaccttcagacagatcggcttcgagagcctgaagggcgccgacgccggcaacggcatcagagtgttcgtgcccgacatcggcatgttcatcgccagcctgaccatctggctgctgtgcagaaacatcgtgcagaagcccgtgaccgacgaggccgcccagagcaaccccgagttcgagaacgaggagctggccgagggcgagaagatcgacagcgaggaggccctgatctacgaggaggacttcaacggcggcgacggcgtggagggcgagctggaggagagcaccaagctgaagatgttcagaagactggccagcgtggccagcaagctgaaggagttcatcggcaacatgatcaccaccgccggcaaggtggtggtgaccatcctgctgggcagcagcggcatgatgctgcccagcctgaccagcagcgtgtacttcttcgtgttcctgggcctgtgcacctggtggagctggtgcagaaccttcgaccccctgctgttcagctgcctgtgcgtgctgctggccatcttcaccgccggccacctgatcggcctgtacctgtaccagttccagttcttccaggaggccgtgccccccaacgactactacgccagactgttcggcatcaagagcgtgatccagaccgactgcagcagcacctggaagatcatcgtgaaccccgacctgagctggtaccaccacgccaaccccatcctgctgctggtgatgtactacaccctggccaccctgatcagaatctggctgcaggagcccctggtgcaggacgagggcaccaaggaggaggacaaggccctggcctgcagccccatccagatcaccgccggcagaagaagaagcctgtggtacgccacccactaccccaccgacgagagaaagctgctgagcatgacccaggacgactacaagcccagcgacggcctgctggtgaccgtgaacggcaaccccgtggactaccacaccatccaccccagcctgcccatggagaacggccccggcaaggccgacctgtacagcaccccccagtacagatgggagcccagcgacgagagcagcgagaagagagaggaggaggaggaggagaaggaggagttcgaggaggagagaagcagagaggagaagagaagcatcaaggtgcacgccatggtgagcgtgttccagttcatcatgaagcagagctacatctgcgccctgatcgccatgatggcctggagcatcacctaccacagctggctgaccttcgtgctgctgatctggagctgcaccctgtggatgatcagaaacagaagaaagtacgccatgatcagcagccccttcatggtggtgtacggcaacctgctgctgatcctgcagtacatctggagcttcgagctgcccgagatcaagaaggtgcccggcttcctggagaagaaggagcccggcgagctggccagcaagatcctgttcaccatcaccttctggctgctgctgagacagcacctgaccgagcagaaggccctgcaggagaaggaggccctgctgagcgaggtgaagatcggcagccaggagaacgaggagaaggacgaggagctgcaggacatccaggtggagggcgagcccaaggaggaggaggaggaggaggccaaggaggagaagcaggagagaaagaaggtggagcaggaggaggccgaggaggaggacgagcaggacatcatgaaggtgctgggcaacctggtggtggccatgttcatcaagtactggatctacgtgtgcggcggcatgttcttcttcgtgagcttcgagggcaagatcgtgatgtacaagatcatctacatggtgctgttcctgttctgcgtggccctgtaccaggtgcactacgagtggtggagaaagatcctgaagtacttctggatgagcgtggtgatctacaccatgctggtgctgatcttcatctacacctaccagttcgagaacttccccggcctgtggcagaacatgaccggcctgaagaaggagaagctggaggacctgggcctgaagcagttcaccgtggccgagctgttcaccagaatcttcatccccaccagcttcctgctggtgtgcatcctgcacctgcactacttccacgacagattcctggagctgaccgacctgaagagcatccccagcaaggaggacaacaccatctacagactggcccaccccgagggcagcctgcccgacctgaccatgatgcacctgaccgccagcctggagaagcccgaggtgagaaagctggccgagcccggcgaggagaagctggagggctacagcgagaaggcccagaagggcgacctgggcaaggacagcgaggagagcgaggaggacggcgaggaggaggaggagagcgaggaggaggaggagaccagcgacctgagaaacaagtggcacctggtgatcgacagactgaccgtgctgttcctgaagttcctggagtacttccacaagctgcaggtgttcatgtggtggatcctggagctgcacatcatcaagatcgtgagcagctacatcatctgggtgagcgtgaaggaggtgagcctgttcaactacgtgttcctgatcagctgggccttcgccctgccctacgccaagctgagaagactggccagcagcgtgtgcaccgtgtggacctgcgtgatcatcgtgtgcaagatgctgtaccagctgcagaccatcaagcccgagaacttcagcgtgaactgcagcctgcccaacgagaaccagaccaacatccccttcaacgagctgaacaagagcctgctgtacagcgcccccatcgaccccaccgagtgggtgggcctgagaaagagcagccccctgctggtgtacctgagaaacaacctgctgatgctggccatcctggccttcgaggtgaccatctacagacaccaggagtactacagaggcagaaacaacctgaccgcccccgtgagcagaaccatcttccacgacatcaccagactgcacctggacgacggcctgatcaactgcgccaagtacttcatcaactacttcttctacaagttcggcctggagacctgcttcctgatgagcgtgaacgtgatcggccagagaatggacttctacgccatgatccacgcctgctggctgatcgccgtgctgtacagaagaagaagaaaggccatcgccgagatctggcccaagtactgctgcttcctggcctgcatcatcaccttccagtacttcatctgcatcggcatcccccccgccccctgcagagactacccctggagattcaagggcgccagcttcaacgacaacatcatcaagtggctgtacttccccgacttcatcgtgagacccaaccccgtgttcctggtgtacgacttcatgctgctgctgtgcgccagcctgcagagacagatcttcgaggacgagaacaaggccgccgtgagaatcatggccggcgacaacgtggagatctgcatgaacctggacgccgccagcttcagccagcacaaccccgtgcccgacttcatccactgcagaagctacctggacatgagcaaggtgatcatcttcagctacctgttctggttcgtgctgaccatcatcttcatcaccggcaccaccagaatcagcatcttctgcatgggctacctggtggcctgcttctacttcctgctgttcggcggcgacctgctgctgaagcccatcaagagcatcctgagatactgggactggctgatcgcctacaacgtgttcgtgatcaccatgaagaacatcctgagcatcggcgcctgcggctacatcggcaccctggtgcacaacagctgctggctgatccaggccttcagcctggcctgcaccgtgaagggctaccagatgcccgccgccaacagcccctgcaccctgcccagcggcgaggccggcatcatctgggacagcatctgcttcgccttcctgctgctgcagagaagagtgttcatgagctactacttcctgcacgtggtggccgacatcaaggccagccagatcctggccagcagaggcgccgagctgttccaggccaccatcgtgaaggccgtgaaggccagaatcgaggaggagaagaagagcatggaccagctgaagagacagatggacagaatcaaggccagacagcagaagtacaagaagggcaaggagagaatgctgagcctgacccaggagcccggcgagggccaggacatgcagaagctgagcgaggaggacgacgagagagaggccgacaagcagaaggccaagggcaagaagaagcagtggtggagaccctgggtggaccacgccagcatggtgagaagcggcgactactacctgttcgagaccgacagcgaggaggaggaggaggaggagctgaagaaggaggacgaggagccccccagaagaagcgccttccagttcgtgtaccaggcctggatcaccgaccccaagaccgccctgagacagagacacaaggagaagaagagaagcgccagagaggagagaaagagaagaagaaagggcagcaaggagggccccgtggagtgggaggacagagaggacgagcccatcaagaagaagagcgacggccccgacaacatcatcaagagaatcttcaacatcctgaagttcacctgggtgctgttcctggccaccgtggacagcttcaccacctggctgaacagcatcagcagagagcacatcgacatcagcaccgtgctgagaatcgagagatgcatgctgaccagagagatcaagaagggcaacgtgcccaccagagagagcatccacatgtactaccagaaccacatcatgaacctgagcagagagagcggcctggacaccatcgacgagcaccccggcgccgccagcggcgcccagaccgcccacagaatggacagcctggacagccacgacagcatcagcagcgagcccacccagtgcaccatgctgtacagcagacagggcaccaccgagaccatcgaggaggtggaggccgagcaggaggaggaggccggcagcaccgcccccgagcccagagaggccaaggagtacgaggccaccggctacgacgtgggcgccatgggcgccgaggaggccagcctgacccccgaggaggagctgacccagttcagcaccctggacggcgacgtggaggccccccccagctacagcaaggccgtgagcttcgagcacctgagcttcggcagccaggacgacagcgccggcaagaacagaatggccgtgagccccgacgacagcagaaccgacaagctgggcagcagcatcctgccccccctgacccacgagctgaccgccagcgagctgctgctgaagaagatgttccacgacgacgagctggaggagagcgagaagttctacgtgggccagcccagattcctgctgctgttctacgccatgtacaacaccctggtggccagaagcgagatggtgtgctacttcgtgatcatcctgaaccacatggtgagcgccagcatgatcaccctgctgctgcccatcctgatcttcctgtgggccatgctgagcgtgcccagacccagcagaagattctggatgatggccatcgtgtacaccgaggtggccatcgtggtgaagtacttcttccagttcggcttcttcccctggaacaagaacgtggaggtgaacaaggacaagccctaccacccccccaacatcatcggcgtggagaagaaggagggctacgtgctgtacgacctgatccagctgctggccctgttcttccacagaagcatcctgaagtgccacggcctgtgggacgaggacgacatgaccgagagcggcatggccagagaggagagcgacgacgagctgagcctgggccacggcagaagagacagcagcgacagcctgaagagcatcaacctggccgccagcgtggagagcgtgcacgtgaccttccccgagcagcagaccgccgtgagaagaaagagaagcggcagcagcagcgagcccagccagagaagcagcttcagcagcaacagaagccagagaggcagcaccagcaccagaaacagcagccagaagggcagcagcgtgctgagcatcaagcagaagggcaagagagagctgtacatggagaagctgcaggagcacctgatcaaggccaaggccttcaccatcaagaagaccctggagatctacgtgcccatcaagcagttcttctacaacctgatccaccccgagtacagcgccgtgaccgacgtgtacgtgctgatgttcctggccgacaccgtggacttcatcatcatcgtgttcggcttctgggccttcggcaagcacagcgccgccgccgacatcaccagcagcctgagcgaggaccaggtgcccggccccttcctggtgatggtgctgatccagttcggcaccatggtggtggacagagccctgtacctgagaaagaccgtgctgggcaaggtgatcttccaggtgatcctggtgttcggcatccacttctggatgttcttcatcctgcccggcgtgaccgagagaaagttcagccagaacctggtggcccagctgtggtacttcgtgaagtgcgtgtacttcggcctgagcgcctaccagatcagatgcggctaccccaccagagtgctgggcaacttcctgaccaagagctacaactacgtgaacctgttcctgttccagggcttcagactggtgcccttcctgaccgagctgagagccgtgatggactgggtgtggaccgacaccaccctgagcctgagcagctggatctgcgtggaggacatctacgcccacatcttcatcctgaagtgctggagagagagcgagaagagatacccccagcccagaggccagaagaagaagaaggtggtgaagtacggcatgggcggcatgatcatcgtgctgctgatctgcatcgtgtggttccccctgctgttcatgagcctgatcaagagcgtggccggcgtgatcaaccagcccctggacgtgagcgtgaccatcaccctgggcggctaccagcccatcttcaccatgagcgcccagcagagccagctgaaggtgatggaccagcagagcttcaacaagttcatccaggccttcagcagagacaccggcgccatgcagttcctggagaactacgagaaggaggacatcaccgtggccgagctggagggcaacagcaacagcctgtggaccatcagcccccccagcaagcagaagatgatccacgagctgctggaccccaacagcagcttcagcgtggtgttcagctggagcatccagagaaacctgagcctgggcgccaagagcgagatcgccaccgacaagctgagcttccccctgaagaacatcaccagaaagaacatcgccaagatgatcgccggcaacagcaccgagagcagcaagacccccgtgaccatcgagaagatctacccctactacgtgaaggcccccagcgacagcaacagcaagcccatcaagcagctgctgagcgagaacaacttcatggacatcaccatcatcctgagcagagacaacaccaccaagtacaacagcgagtggtgggtgctgaacctgaccggcaacagaatctacaaccccaacagccaggccctggagctggtggtgttcaacgacaaggtgagcccccccagcctgggcttcctggccggctacggcatcatgggcctgtacgccagcgtggtgctggtgatcggcaagttcgtgagagagttcttcagcggcatcagccacagcatcatgttcgaggagctgcccaacgtggacagaatcctgaagctgtgcaccgacatcttcctggtgagagagaccggcgagctggagctggaggaggacctgtacgccaagctgatcttcctgtacagaagccccgagaccatgatcaagtggaccagagagaagaccaactag

SEQ ID NO: 93465 - DNA, 1692 bp, synthetic construct
  misc_feature 1..1692: note = Description of Artificial Sequence: Synthetic coding sequence
  source 1..1692: mol_type = other DNA
atgagcgtggtgatctacaccatgctggtgctgatcttcatctacacctaccagttcgagaacttccccggcctgtggcagaacatgaccggcctgaagaaggagaagctggaggacctgggcctgaagcagttcaccgtggccgagctgttcaccagaatcttcatccccaccagcttcctgctggtgtgcatcctgcacctgcactacttccacgacagattcctggagctgaccgacctgaagagcatccccagcaaggaggacaacaccatctacagccacgccaaggtgaacggcagagtgtacctgatcatcaacagcatcaagaagaagctgcccatccaccagaacgagctggcccaccccgagggcagcctgcccgacctgaccatgatgcacctgaccgccagcctggagaagcccgaggtgagaaagctggccgagcccggcgaggagaagctggagggctacagcgagaaggcccagaagggcgacctgggcaaggacagcgaggagagcgaggaggacggcgaggaggaggaggagagcgaggaggaggaggagaccagcgacctgagaaacaagtggcacctggtgatcgacagactgaccgtgctgttcctgaagttcctggagtacttccacaagctgcaggtgttcatgtggtggatcctggagctgcacatcatcaagatcgtgagcagctacatcatctgggtgagcgtgaaggaggtgagcctgttcaactacgtgttcctgatcagctgggccttcgccctgccctacgccaagctgagaagactggccagcagcgtgtgcaccgtgtggacctgcgtgatcatcgtgtgcaagatgctgtaccagctgcagaccatcaagcccgagaacttcagcgtgaactgcagcctgcccaacgagaaccagaccaacatccccttcaacgagctgaacaagagcctgctgtacagcgcccccatcgaccccaccgagtgggtgggcctgagaaagagcagccccctgctggtgtacctgagaaacaacctgctgatgctggccatcctggccttcgaggtgaccatctacagacaccaggagtactacagaggcagaaacaacctgaccgcccccgtgagcagaaccatcttccacgacatcaccagactgcacctggacgacggcctgatcaactgcgccaagtacttcatcaactacttcttctacaagttcggcctggagacctgcttcctgatgagcgtgaacgtgatcggccagagaatggacttctacgccatgatccacgcctgctggctgatcgccgtgctgtacagaagaagaagaaaggccatcgccgagatctggcccaagtactgctgcttcctggcctgcatcatcaccttccagtacttcatctgcatcggcatcccccccgccccctgcagagactacccctggagattcaagggcgccagcttcaacgacaacatcatcaagtggctgtacttccccgacttcatcgtgagacccaaccccgtgttcctggtgtacgacttcatgctgctgctgtgcgccagcctgcagagacagatcttcgaggacgagaacaaggccgccgtgagaatcatggccggcgacaacgtggagatctgcatgaacctggacgccgccagcttcagccagcacaacccctag

SEQ ID NO: 93466 - DNA, 1941 bp, synthetic construct
  misc_feature 1..1941: note = Description of Artificial Sequence: Synthetic coding sequence
  source 1..1941: mol_type = other DNA
atgaccgagagcggcatggccagagaggagagcgacgacgagctgagcctgggccacggcagaagagacagcagcgacagcctgaagagcatcaacctggccgccagcgtggagagcgtgcacgtgaccttccccgagcagcagaccgccgtgagaagaaagagaagcggcagcagcagcgagcccagccagagaagcagcttcagcagcaacagaagccagagaggcagcaccagcaccagaaacagcagccagaagggcagcagcgtgctgagcatcaagcagaagggcaagagagagctgtacatggagaagctgcaggagcacctgatcaaggccaaggccttcaccatcaagaagaccctggagatctacgtgcccatcaagcagttcttctacaacctgatccaccccgagtacagcgccgtgaccgacgtgtacgtgctgatgttcctggccgacaccgtggacttcatcatcatcgtgttcggcttctgggccttcggcaagcacagcgccgccgccgacatcaccagcagcctgagcgaggaccaggtgcccggccccttcctggtgatggtgctgatccagttcggcaccatggtggtggacagagccctgtacctgagaaagaccgtgctgggcaaggtgatcttccaggtgatcctggtgttcggcatccacttctggatgttcttcatcctgcccggcgtgaccgagagaaagttcagccagaacctggtggcccagctgtggtacttcgtgaagtgcgtgtacttcggcctgagcgcctaccagatcagatgcggctaccccaccagagtgctgggcaacttcctgaccaagagctacaactacgtgaacctgttcctgttccagggcttcagactggtgcccttcctgaccgagctgagagccgtgatggactgggtgtggaccgacaccaccctgagcctgagcagctggatctgcgtggaggacatctacgcccacatcttcatcctgaagtgctggagagagagcgagaagcccatcttcaccatgagcgcccagcagagccagctgaaggtgatggaccagcagagcttcaacaagttcatccaggccttcagcagagacaccggcgccatgcagttcctggagaactacgagaaggaggacatcaccgtggccgagctggagggcaacagcaacagcctgtggaccatcagcccccccagcaagcagaagatgatccacgagctgctggaccccaacagcagcttcagcgtggtgttcagctggagcatccagagaaacctgagcctgggcgccaagagcgagatcgccaccgacaagctgagcttccccctgaagaacatcaccagaaagaacatcgccaagatgatcgccggcaacagcaccgagagcagcaagacccccgtgaccatcgagaagatctacccctactacgtgaaggcccccagcgacagcaacagcaagcccatcaagcagctgctgagcgagaacaacttcatggacatcaccatcatcctgagcagagacaacaccaccaagtacaacagcgagtggtgggtgctgaacctgaccggcaacagaatctacaaccccaacagccaggccctggagctggtggtgttcaacgacaaggtgagcccccccagcctgggcttcctggccggctacggcatcatgggcctgtacgccagcgtggtgctggtgatcggcaagttcgtgagagagttcttcagcggcatcagccacagcatcatgttcgaggagctgcccaacgtggacagaatcctgaagctgtgcaccgacatcttcctggtgagagagaccggcgagctggagctggaggaggacctgtacgccaagctgatcttcctgtacagaagccccgagaccatgatcaagtggaccagagagaagaccaactag

SEQ ID NO: 93467 - DNA, 2130 bp, synthetic construct
  misc_feature 1..2130: note = Description of Artificial Sequence: Synthetic coding sequence
  source 1..2130: mol_type = other DNA
atgaccgagagcggcatggccagagaggagagcgacgacgagctgagcctgggccacggcagaagagacagcagcgacagcctgaagagcatcaacctggccgccagcgtggagagcgtgcacgtgaccttccccgagcagcagaccgccgtgagaagaaagagaagcggcagcagcagcgagcccagccagagaagcagcttcagcagcaacagaagccagagaggcagcaccagcaccagaaacagcagccagaagggcagcagcgtgctgagcatcaagcagaagggcaagagagagctgtacatggagaagctgcaggagcacctgatcaaggccaaggccttcaccatcaagaagaccctggagatctacgtgcccatcaagcagttcttctacaacctgatccaccccgagtacagcgccgtgaccgacgtgtacgtgctgatgttcctggccgacaccgtggacttcatcatcatcgtgttcggcttctgggccttcggcaagcacagcgccgccgccgacatcaccagcagcctgagcgaggaccaggtgcccggccccttcctggtgatggtgctgatccagttcggcaccatggtggtggacagagccctgtacctgagaaagaccgtgctgggcaaggtgatcttccaggtgatcctggtgttcggcatccacttctggatgttcttcatcctgcccggcgtgaccgagagaaagttcagccagaacctggtggcccagctgtggtacttcgtgaagtgcgtgtacttcggcctgagcgcctaccagatcagatgcggctaccccaccagagtgctgggcaacttcctgaccaagagctacaactacgtgaacctgttcctgttccagggcttcagactggtgcccttcctgaccgagctgagagccgtgatggactgggtgtggaccgacaccaccctgagcctgagcagctggatctgcgtggaggacatctacgcccacatcttcatcctgaagtgctggagagagagcgagaagagatacccccagcccagaggccagaagaagaagaaggtggtgaagtacggcatgggcggcatgatcatcgtgctgctgatctgcatcgtgtggttccccctgctgttcatgagcctgatcaagagcgtggccggcgtgatcaaccagcccctggacgtgagcgtgaccatcaccctgggcggctaccagcccatcttcaccatgagcgcccagcagagccagctgaaggtgatggaccagcagagcttcaacaagttcatccaggccttcagcagagacaccggcgccatgcagttcctggagaactacgagaaggaggacatcaccgtggccgagctggagggcaacagcaacagcctgtggaccatcagcccccccagcaagcagaagatgatccacgagctgctggaccccaacagcagcttcagcgtggtgttcagctggagcatccagagaaacctgagcctgggcgccaagagcgagatcgccaccgacaagctgagcttccccctgaagaacatcaccagaaagaacatcgccaagatgatcgccggcaacagcaccgagagcagcaagacccccgtgaccatcgagaagatctacccctactacgtgaaggcccccagcgacagcaacagcaagcccatcaagcagctgctgagcgagaacaacttcatggacatcaccatcatcctgagcagagacaacaccaccaagtacaacagcgagtggtgggtgctgaacctgaccggcaacagaatctacaaccccaacagccaggccctggagctggtggtgttcaacgacaaggtgagcccccccagcctgggcttcctggccggctacggcatcatgggcctgtacgccagcgtggtgctggtgatcggcaagttcgtgagagagttcttcagcggcatcagccacagcatcatgttcgaggagctgcccaacgtggacagaatcctgaagctgtgcaccgacatcttcctggtgagagagaccggcgagctggagctggaggaggacctgtacgccaagctgatcttcctgtacagaagccccgagaccatgatcaagtggaccagagagaagaccaactag

SEQ ID NO: 93468 - DNA, 2565 bp, synthetic construct
  misc_feature 1..2565: note = Description of Artificial Sequence: Synthetic coding sequence
  source 1..2565: mol_type = other DNA
atggccctgagactggtggccgacttcgacctgggcaaggacgtgctgccctggctgagagcccagagagccgtgagcgaggccagcggcgccggcagcggcggcgccgacgtgctggagaacgactacgagagcctgcacgtgctgaacgtggagagaaacggcaacatcatctacacctacaaggacgacaagggcaacgtggtgttcggcctgtacgactgccagaccagacagaacgagctgctgtacaccttcgagaaggacctgcaggtgttcagctgcagcgtgaacagcgagagaaccctgctggccgccagcctggtgcagagcaccaaggagggcaagagaaacgagctgcagcccggcagcaagtgcctgaccctgctggtggagatccaccccgtgaacaacgtgaaggtgctgaaggccgtggacagctacatctgggtgcagttcctgtacccccacatcgagagccaccccctgcccgagaaccacctgctgctgatcagcgaggagaagtacatcgagcagttcagaatccacgtggcccaggaggacggcaacagagtggtgatcaagaacagcggccacctgcccagagacagaatcgccgaggacttcgtgtgggcccagtgggacatgagcgagcagagactgtactacatcgacctgaagaagagcagaagcatcctgaagtgcatccagttctacgccgacgagagctacaacctgatgttcgaggtgcccctggacatcagcctgagcaacagcggcttcaagctggtgaacttcggctgcgactaccaccagtacagagacaagttcagcaagcacctgaccctgtgcgtgttcaccaaccacaccggcagcctgtgcgtgtgctacagccccaagtgcgccagctggggccagatcacctacagcgtgttctacatccacaagggccacagcaagaccttcaccaccagcctggagaacgtgggcagccacatgaccaagggcatcaccttcctgaacctggactactacgtggccgtgtacctgcccggccacttcttccacctgctgaacgtgcagcaccccgacctgatctgccacaacctgttcctgaccggcaacaacgagatgatcgacatgctgccccactgccccctgcagagcctgagcggcagcctggtgctggactgctgcagcggcaagctgtacagagccctgctgagccagagcagcctgctgcagctgctgcagaacacctgcctggactgcgagaagatggccgccctgcactgcgccctgtactgcggccagggcgcccagttcctggaggcccagatcatccagtggatcagcgagaacgtgagcgcctgccacagcttcgacctgatccaggagttcatcatcgccagcagctactggagcgtgtacagcgagaccagcaacatggacaagctgctgccccacagcagcgtgctgacctggaacaccgagatccccggcatcaccctggtgaccgaggacatcgccctgcccctgatgaaggtgctgagcttcaagggctactgggagaagctgaacagcaacctggagtacgtgaagtacgccaagccccacttccactacaacaacagcgtggtgagaagagagtggcacaacctgatcagcgaggagaagaccggcaagagaagaagcgccgcctacgtgagaaacatcctggacaacgccgtgaaggtgatcagcaacctggaggccagaaacctgggccccagactgacccccctgctgcaggaggaggacagccaccagagactgctgatgggcctgatggtgagcgagctgaaggaccacttcctgagacacctgcagggcgtggagaagaagaagatcgagcagatggtgctggactacatcagcaagctgctggacctgatctgccacatcgtggagaccaactggagaaagcacaacctgcacagctgggtgctgcacttcaacagcagaggcagcgccgccgagttcgccgtgttccacatcatgaccagaatcctggaggccaccaacagcctgttcctgcccctgccccccggcttccacaccctgcacaccatcctgggcgtgcagtgcctgcccctgcacaacctgctgcactgcatcgacagcggcgtgctgctgctgaccgagaccgccgtgatcagactgatgaaggacctggacaacaccgagaagaacgagaagctgaagttcagcatcatcgtgagactgccccccctgatcggccagaagatctgcagactgtgggaccaccccatgagcagcaacatcatcagcagaaaccacgtgaccagactgctgcagaactacaagaagcagcccagaaacagcatgatcaacaagagcagcttcagcgtggagttcctgcccctgaactacttcatcgagatcctgaccgacatcgagagcagcaaccaggccctgtaccccttcgagggccacgacaacgtggacgccgagttcgtggaggaggccgccctgaagcacaccgccatgctgctgggcctgtag

SEQ ID NO: 93469 - DNA, 528 bp, synthetic construct
  misc_feature 1..528: note = Description of Artificial Sequence: Synthetic coding sequence
  source 1..528: mol_type = other DNA
atgaccagaatcctggaggccaccaacagcctgttcctgcccctgccccccggcttccacaccctgcacaccatcctgggcgtgcagtgcctgcccctgcacaacctgctgcactgcatcgacagcggcgtgctgctgctgaccgagaccgccgtgatcagactgatgaaggacctggacaacaccgagaagaacgagaagctgaagttcagcatcatcgtgagactgccccccctgatcggccagaagatctgcagactgtgggaccaccccatgagcagcaacatcatcagcagaaaccacgtgaccagactgctgcagaactacaagaagcagcccagaaacagcatgatcaacaagagcagcttcagcgtggagttcctgcccctgaactacttcatcgagatcctgaccgacatcgagagcagcaaccaggccctgtaccccttcgagggccacgacaacgtggacgccgagttcgtggaggaggccgccctgaagcacaccgccatgctgctgggcctgtag

SEQ ID NO: 93470 - DNA, 873 bp, synthetic construct
  misc_feature 1..873: note = Description of Artificial Sequence: Synthetic coding sequence
  source 1..873: mol_type = other DNA
atggccaaccccaagctgctgggcatgggcctgagcgaggccgaggccatcggcgccgacagcgccagattcgaggagctgctgctgcaggccagcaaggagctgcagcaggcccagaccaccagacccgagagcacccagatccagccccagcccggcttctgcatcaagaccaacagcagcgagggcaaggtgttcatcaacatctgccacagccccagcatccccccccccgccgacgtgaccgaggaggagctgctgcagatgctggaggaggaccaggccggcttcagaatccccatgagcctgggcgagccccacgccgagctggacgccaagggccagggctgcaccgcctacgacgtggccgtgaacagcgacttctacagaagaatgcagaacagcgacttcctgagagagctggtgatcaccatcgccagagagggcctggaggacaagtacaacctgcagctgaaccccgagtggagaatgatgaagaacagacccttcatgggcagcatcagccagcagaacatcagaagcgagcagagacccagaatccaggagctgggcgacctgtacacccccgcccccggcagagccgagagcggccccgagaagccccacctgaacctgtggctggaggcccccgacctgctgctggccgaggtggacctgcccaagctggacggcgccctgggcctgagcctggagatcggcgagaacagactggtgatgggcggcccccagcagctgtaccacctggacgcctacatccccctgcagatcaacagccacgagagcaaggccgccttccacagaaagagaaagcagctgatggtggccatgcccctgctgcccgtgcccagctag

SEQ ID NO: 93471 - DNA, 942 bp, synthetic construct
  misc_feature 1..942: note = Description of Artificial Sequence: Synthetic coding sequence
  source 1..942: mol_type = other DNA
atgctgctgagcaagatcaacagcctggcccacctgagagccgccccctgcaacgacctgcacgccaccaagctggcccccggcaaggagaaggagcccctggagagccagtaccaggtgggccccctgctgggcagcggcggcttcggcagcgtgtacagcggcatcagagtgagcgacaacctgcccgtggccatcaagcacgtggagaaggacagaatcagcgactggggcgagctgcccaacggcaccagagtgcccatggaggtggtgctgctgaagaaggtgagcagcggcttcagcggcgtgatcagactgctggactggttcgagagacccgacagcttcgtgctgatcctggagagacccgagcccgtgcaggacctgttcgacttcatcaccgagagaggcgccctgcaggaggagctggccagaagcttcttctggcaggtgctggaggccgtgagacactgccacaactgcggcgtgctgcacagagacatcaaggacgagaacatcctgatcgacctgaacagaggcgagctgaagctgatcgacttcggcagcggcgccctgctgaaggacaccgtgtacaccgacttcgacggcaccagagtgtacagcccccccgagtggatcagataccacagataccacggcagaagcgccgccgtgtggagcctgggcatcctgctgtacgacatggtgtgcggcgacatccccttcgagcacgacgaggagatcatcagaggccaggtgttcttcagacagagagtgagcagcgagtgccagcacctgatcagatggtgcctggccctgagacccagcgacagacccaccttcgaggagatccagaaccacccctggatgcaggacgtgctgctgccccaggagaccgccgagatccacctgcacagcctgagccccggccccagcaagtag

SEQ ID NO: 93472 - DNA, 936 bp, synthetic construct
  misc_feature 1..936: note = Description of Artificial Sequence: Synthetic coding sequence
  source 1..936: mol_type = other DNA
atgctgaccaagcccctgcagggcccccccgccccccccggcacccccacccccccccccggcggcaaggacagagaggccttcgaggccgagtacagactgggccccctgctgggcaagggcggcttcggcaccgtgttcgccggccacagactgaccgacagactgcaggtggccatcaaggtgatccccagaaacagagtgctgggctggagccccctgagcgacagcgtgacctgccccctggaggtggccctgctgtggaaggtgggcgccggcggcggccaccccggcgtgatcagactgctggactggttcgagacccaggagggcttcatgctggtgctggagagacccctgcccgcccaggacctgttcgactacatcaccgagaagggccccctgggcgagggccccagcagatgcttcttcggccaggtggtggccgccatccagcactgccacagcagaggcgtggtgcacagagacatcaaggacgagaacatcctgatcgacctgagaagaggctgcgccaagctgatcgacttcggcagcggcgccctgctgcacgacgagccctacaccgacttcgacggcaccagagtgtacagcccccccgagtggatcagcagacaccagtaccacgccctgcccgccaccgtgtggagcctgggcatcctgctgtacgacatggtgtgcggcgacatccccttcgagagagaccaggagatcctggaggccgagctgcacttccccgcccacgtgagccccgactgctgcgccctgatcagaagatgcctggcccccaagcccagcagcagacccagcctggaggagatcctgctggacccctggatgcagacccccgccgaggacgtgcccctgaaccccagcaagggcggccccgcccccctggcctggagcctgctgccctag

SEQ ID NO: 93473 - DNA, 438 bp, synthetic construct
  misc_feature 1..438: note = Description of Artificial Sequence: Synthetic coding sequence
  source 1..438: mol_type = other DNA
atgctggtgctggagagacccctgcccgcccaggacctgttcgactacatcaccgagaagggccccctgggcgagggccccagcagatgcttcttcggccaggtggtggccgccatccagcactgccacagcagaggcgtggtgcacagagacatcaaggacgagaacatcctgatcgacctgagaagaggctgcgccaagctgatcgacttcggcagcggcgccctgctgcacgacgagccctacaccgacttcgacggcaccagagtgtacagcccccccgagtggatcagcagacaccagtaccacgccctgcccgccaccgtgtggagcctgggcatcctgctgtacgacatggtgtgcggcgacatccccttcgagagagaccaggagatcctggaggccgagctgcacttccccgcccacgtgagcccctag

SEQ ID NO: 93474 - DNA, 2925 bp, synthetic construct
  misc_feature 1..2925: note = Description of Artificial Sequence: Synthetic coding sequence
  source 1..2925: mol_type = other DNA
atggccaaggccggcagagccggcggccccccccccggcggcggcgccccctggcacctgagaaacgtgctgagcgacagcgtggagagcagcgacgacgagttcttcgacgccagagaggagatggccgagggcaagaacgccatcctgatcggcatgagccagtggaacagcaacgacctggtggagcagatcgagaccatgggcaagctggacgagcaccagggcgagggcaccgccccctgcaccagcagcatcctgcaggagaagcagagagagctgtacagagtgagcctgagaagacagagattccccgcccagggcagcatcgagatccacgaggacagcgaggagggctgcccccagagaagctgcaagacccacgtgctgctgctggtgctgcacggcggcaacatcctggacaccggcgccggcgaccccagctgcaaggccgccgacatccacaccttcagcagcgtgctggagaaggtgaccagagcccacttccccgccgccctgggccacatcctgatcaagttcgtgccctgccccgccatctgcagcgaggccttcagcctggtgagccacctgaacccctacagccacgacgagggctgcctgagcagcagccaggaccacgtgcccctggccgccctgcccctgctggccatcagcagcccccagtaccaggacgccgtggccaccgtgatcgagagagccaaccaggtgtacagagagttcctgaagagcagcgacggcatcggcttcagcggccaggtgtgcctgatcggcgactgcgtgggcggcctgctggccttcgacgccatctgctacagcgccggccccagcggcgacagccccgccagcagcagcagaaagggcagcatcagcagcacccaggacacccccgtggccgtggaggaggactgcagcctggccagcagcaagagactgagcaagagcaacatcgacatcagcagcggcctggaggacgaggagcccaagagacccctgcccagaaagcagagcgacagcagcacctacgactgcgaggccatcacccagcaccacgccttcctgagcagcatccacagcagcgtgctgaaggacgagagcgagacccccgccgccggcggcccccagctgcccgaggtgagcctgggcagattcgacttcgacgtgagcgacttcttcctgttcggcagccccctgggcctggtgctggccatgagaagaaccgtgctgcccggcctggacggcttccaggtgagacccgcctgcagccaggtgtacagcttcttccactgcgccgaccccagcgccagcagactggagcccctgctggagcccaagttccacctggtgccccccgtgagcgtgcccagataccagagattccccctgggcgacggccagagcctgctgctggccgacgccctgcacacccacagccccctgttcctggagggcagcagcagagacagcccccccctgctggacgcccccgccagccccccccaggccagcagattccagagacccggcagaagaatgagcgagggcagcagccacagcgagagcagcgagagcagcgacagcatggcccccgtgggcgccagcagaatcaccgccaagtggtggggcagcaagagaatcgactacgccctgtactgccccgacgtgctgaccgccttccccaccgtggccctgccccacctgttccacgccagctactgggagagcaccgacgtggtggccttcatcctgagacaggtgatgagatacgagagcgtgaacatcaaggagagcgccagactggaccccgccgccctgagccccgccaaccccagagagaagtggctgagaaagagaacccaggtgaagctgagaaacgtgaccgccaaccacagagccaacgacgtgatcgccgccgaggacggcccccaggtgctggtgggcagattcatgtacggccccctggacatggtggccctgaccggcgagaaggtggacatcctggtgatggccgagcccagcagcggcagatgggtgcacctggacaccgagatcaccaacagcagcggcagaatcacctacaacgtgcccagacccagaagactgggcgtgggcgtgtaccccgtgaagatggtggtgagaggcgaccagacctgcgccatgagctacctgaccgtgctgcccagaggcatggagtgcgtggtgttcagcatcgacggcagcttcgccgccagcgtgagcatcatgggcagcgaccccaaggtgagacccggcgccgtggacgtggtgagacactggcaggacctgggctacatgatcctgtacatcaccggcagacccgacatgcagaagcagagagtggtgagctggctgagccagcacaacttcccccagggcatgatcttcttcagcgacggcctggtgcacgaccccctgagacagaaggccatcttcctgagaaacctgatgcaggagtgcttcatcaagatcagcgccgcctacggcagcaccaaggacatcagcgtgtacagcgtgctgggcctgcccgccagccagatcttcatcgtgggcagacccaccaagaagtaccagacccagtgccagttcctgagcgagggctacgccgcccacctggccgccctggaggccagccacagaagcagacccaagaagaacaacagcagaatgatcctgagaaagggcagcttcggcctgcacgcccagcccgagttcctgagaaagagaaaccacctgagaagaaccatgagcgtgcagcagcccgacccccccgccgccaaccccaagcccgagagagcccagagccagcccgagagcgacaaggaccacgagagacccctgcccgccctgagctgggccagaggcccccccaagttcgagagcgtgccctag

SEQ ID NO: 93475 - DNA, 2817 bp, synthetic construct
  misc_feature 1..2817: note = Description of Artificial Sequence: Synthetic coding sequence
  source 1..2817: mol_type = other DNA
atggccaaggccggcagagccggcggccccccccccggcggcggcgccccctggcacctgagaaacgtgctgagcgacagcgtggagagcagcgacgacgagttcttcgacgccagaggcgagggcaccgccccctgcaccagcagcatcctgcaggagaagcagagagagctgtacagagtgagcctgagaagacagagattccccgcccagggcagcatcgagatccacgaggacagcgaggagggctgcccccagagaagctgcaagacccacgtgctgctgctggtgctgcacggcggcaacatcctggacaccggcgccggcgaccccagctgcaaggccgccgacatccacaccttcagcagcgtgctggagaaggtgaccagagcccacttccccgccgccctgggccacatcctgatcaagttcgtgccctgccccgccatctgcagcgaggccttcagcctggtgagccacctgaacccctacagccacgacgagggctgcctgagcagcagccaggaccacgtgcccctggccgccctgcccctgctggccatcagcagcccccagtaccaggacgccgtggccaccgtgatcgagagagccaaccaggtgtacagagagttcctgaagagcagcgacggcatcggcttcagcggccaggtgtgcctgatcggcgactgcgtgggcggcctgctggccttcgacgccatctgctacagcgccggccccagcggcgacagccccgccagcagcagcagaaagggcagcatcagcagcacccaggacacccccgtggccgtggaggaggactgcagcctggccagcagcaagagactgagcaagagcaacatcgacatcagcagcggcctggaggacgaggagcccaagagacccctgcccagaaagcagagcgacagcagcacctacgactgcgaggccatcacccagcaccacgccttcctgagcagcatccacagcagcgtgctgaaggacgagagcgagacccccgccgccggcggcccccagctgcccgaggtgagcctgggcagattcgacttcgacgtgagcgacttcttcctgttcggcagccccctgggcctggtgctggccatgagaagaaccgtgctgcccggcctggacggcttccaggtgagacccgcctgcagccaggtgtacagcttcttccactgcgccgaccccagcgccagcagactggagcccctgctggagcccaagttccacctggtgccccccgtgagcgtgcccagataccagagattccccctgggcgacggccagagcctgctgctggccgacgccctgcacacccacagccccctgttcctggagggcagcagcagagacagcccccccctgctggacgcccccgccagccccccccaggccagcagattccagagacccggcagaagaatgagcgagggcagcagccacagcgagagcagcgagagcagcgacagcatggcccccgtgggcgccagcagaatcaccgccaagtggtggggcagcaagagaatcgactacgccctgtactgccccgacgtgctgaccgccttccccaccgtggccctgccccacctgttccacgccagctactgggagagcaccgacgtggtggccttcatcctgagacaggtgatgagatacgagagcgtgaacatcaaggagagcgccagactggaccccgccgccctgagccccgccaaccccagagagaagtggctgagaaagagaacccaggtgaagctgagaaacgtgaccgccaaccacagagccaacgacgtgatcgccgccgaggacggcccccaggtgctggtgggcagattcatgtacggccccctggacatggtggccctgaccggcgagaaggtggacatcctggtgatggccgagcccagcagcggcagatgggtgcacctggacaccgagatcaccaacagcagcggcagaatcacctacaacgtgcccagacccagaagactgggcgtgggcgtgtaccccgtgaagatggtggtgagaggcgaccagacctgcgccatgagctacctgaccgtgctgcccagaggcatggagtgcgtggtgttcagcatcgacggcagcttcgccgccagcgtgagcatcatgggcagcgaccccaaggtgagacccggcgccgtggacgtggtgagacactggcaggacctgggctacatgatcctgtacatcaccggcagacccgacatgcagaagcagagagtggtgagctggctgagccagcacaacttcccccagggcatgatcttcttcagcgacggcctggtgcacgaccccctgagacagaaggccatcttcctgagaaacctgatgcaggagtgcttcatcaagatcagcgccgcctacggcagcaccaaggacatcagcgtgtacagcgtgctgggcctgcccgccagccagatcttcatcgtgggcagacccaccaagaagtaccagacccagtgccagttcctgagcgagggctacgccgcccacctggccgccctggaggccagccacagaagcagacccaagaagaacaacagcagaatgatcctgagaaagggcagcttcggcctgcacgcccagcccgagttcctgagaaagagaaaccacctgagaagaaccatgagcgtgcagcagcccgacccccccgccgccaaccccaagcccgagagagcccagagccagcccgagagcgacaaggaccacgagagacccctgcccgccctgagctgggccagaggcccccccaagttcgagagcgtgccctag

SEQ ID NO: 93476 - DNA, 609 bp, synthetic construct
  misc_feature 1..609: note = Description of Artificial Sequence: Synthetic coding sequence
  source 1..609: mol_type = other DNA
atggccaccctgatctacgtggacaaggagaacggcgagcccggcaccagagtggtggccaaggacggcctgaagctgggcagcggccccagcatcaaggccctggacggcagaagccaggtgagcacccccagattcggcaagaccttcgacgccccccccgccctgcccaaggccaccagaaaggccctgggcaccgtgaacagagccaccgagaagagcgtgaagaccaagggccccctgaagcagaagcagcccagcttcagcgccaagaagatgaccgagaagaccgtgaaggccaagagcagcgtgcccgccagcgacgacgcctaccccgagatcgagaagttcttccccttcaaccccctggacttcgagagcttcgacctgcccgaggagcaccagatcgcccacctgcccctgagcggcgtgcccctgatgatcctggacgaggagagagagctggagaagctgttccagctgggcccccccagccccgtgaagatgcccagccccccctgggagagcaacctgctgcagagccccagcagcatcctgagcaccctggacgtggagctgccccccgtgtgctgcgacatcgacatctag

SEQ ID NO: 93477 - DNA, 609 bp, synthetic construct; identical to SEQ ID NO: 93476
  misc_feature 1..609: note = Description of Artificial Sequence: Synthetic coding sequence
  source 1..609: mol_type = other DNA

SEQ ID NO: 93478 - DNA, 609 bp, synthetic construct; identical to SEQ ID NO: 93476
  misc_feature 1..609: note = Description of Artificial Sequence: Synthetic coding sequence
  source 1..609: mol_type = other DNA

SEQ ID NO: 93479 - DNA, 543 bp, synthetic construct
  misc_feature 1..543: note = Description of Artificial Sequence: Synthetic coding sequence
  source 1..543: mol_type = other DNA
atggcccccggcgtggccagaggccccaccccctactggagactgagactgggcggcgccgccctgctgctgctgctgatccccgtggccgccgcccaggagccccccggcgccgcctgcagccagaacaccaacaagacctgcgaggagtgcctgaagaacgtgagctgcctgtggtgcaacaccaacaaggcctgcctggactaccccgtgaccagcgtgctgccccccgccagcctgtgcaagctgagcagcgccagatggggcgtgtgctgggtgaacttcgaggccctgatcatcaccatgagcgtggtgggcggcaccctgctgctgggcatcgccatctgctgctgctgctgctgcagaagaaagagaagcagaaagcccgacagaagcgaggagaaggccatgagagagagagaggagagaagaatcagacaggaggagagaagagccgagatgaagaccagacacgacgagatcagaaagaagtacggcctgttcaaggaggagaacccctacgccagattcgagaacaactag

SEQ ID NO: 93480 - DNA, 429 bp, synthetic construct
  misc_feature 1..429: note = Description of Artificial Sequence: Synthetic coding sequence
  source 1..429: mol_type = other DNA
atggcccccggcgtggccagaggccccaccccctactggagactgagactgggcggcgccgccctgctgctgctgctgatccccgtggccgccgcccaggagccccccggcgccgcctgcagccagaacaccaacaagacctgcgaggagtgcctgaagaacgtgagcgcctgcctgaagaagaagaccagaatgctggacctgaagaccaccaaggccctgcagcacatcagccccgacgccagctgcgaggtgcacgccccccagcccagccccgccggcagacccagaggccactgcggcctgctgaccctggccagcgagcccgccagcctgcccggccaggccgccggcgagctgcccctgaaggacagccccctggtgctgcagaccggcgacctgctgttccccgtgcacctgtgcttctag

SEQ ID NO: 93481 - DNA, 576 bp, synthetic construct
  misc_feature 1..576: note = Description of Artificial Sequence: Synthetic coding sequence
  source 1..576: mol_type = other DNA
atggccaccctgatctacgtggacaaggagatcggcgagcccggcaccagagtggccgccaaggacgtgctgaagctggagagcagacccagcatcaaggccctggacggcatcagccaggtgctgaccagaagattcggcaagacctacgacgcccccagcgccctgcccaaggccaccagaaaggccctgggcaccgtgaacagagccaccgagaagagcgtgaagaccaacggccccagaaagcagaagcagcccagcttcagcgccaagaagatgaccgagaagaccgtgaagaccaagagcagcgtgcccgccagcgacgacgcctaccccgagatcgagaagttcttccccttcaacctgctggacttcgagagcttcgacctgcccgaggagagacagatcgcccacctgcccctgagcggcgtgcccctgatgatcctggacgaggagggcgagctggagaagctgttccagctgggcccccccagccccgtgaagatgcccagccccccctgggagtgcaacctgttcgccgtgagcttcaagcacagcgtggaccccggctgctag

SEQ ID NO: 93482 - DNA, 2586 bp, synthetic construct
  misc_feature 1..2586: note = Description of Artificial Sequence: Synthetic coding sequence
  source 1..2586: mol_type = other DNA
atgaccggcagagccagagccagagccagaggcagagccagaggccaggagaccgcccagctggtgggcagcaccgccagccagcagcccggctacatccagcccagaccccagcccccccccgccgagggcgagctgttcggcagaggcagacagagaggcaccgccggcggcaccgccaagagccagggcctgcagatcagcgccggcttccaggagctgagcctggccgagagaggcggcagaagaagagacttccacgacctgggcgtgaacaccagacagaacctggaccacgtgaaggagagcaagaccggcagcagcggcatcatcgtgagactgagcaccaaccacttcagactgaccagcagaccccagtgggccctgtaccagtaccacatcgactacaaccccctgatggaggccagaagactgagaagcgccctgctgttccagcacgaggacctgatcggcaagtgccacgccttcgacggcaccatcctgttcctgcccaagagactgcagcagaaggtgaccgaggtgttcagcaagaccagaaacggcgaggacgtgagaatcaccatcaccctgaccaacgagctgccccccaccagccccacctgcctgcagttctacaacatcatcttcagaagactgctgaagatcatgaacctgcagcagatcggcagaaactactacaaccccaacgaccccatcgacatccccagccacagactggtgatctggcccggcttcaccaccagcatcctgcagtacgagaacagcatcatgctgtgcaccgacgtgagccacaaggtgctgagaagcgagaccgtgctggacttcatgttcaacttctaccaccagaccgaggagcacaagttccaggagcaggtgagcaaggagctgatcggcctggtggtgctgaccaagtacaacaacaagacctacagagtggacgacatcgactgggaccagaaccccaagagcaccttcaagaaggccgacggcagcgaggtgagcttcctggagtactacagaaagcagtacaaccaggagatcaccgacctgaagcagcccgtgctggtgagccagcccaagagaagaagaggccccggcggcaccctgcccggccccgccatgctgatccccgagctgtgctacctgaccggcctgaccgacaagatgagaaacgacttcaacgtgatgaaggacctggccgtgcacaccagactgacccccgagcagagacagagagaggtgggcagactgatcgactacatccacaagaacgacaacgtgcagagagagctgagagactggggcctgagcttcgacagcaacctgctgagcttcagcggcagaatcctgcagaccgagaagatccaccagggcggcaagaccttcgactacaacccccagttcgccgactggagcaaggagaccagaggcgcccccctgatcagcgtgaagcccctggacaactggctgctgatctacaccagaagaaactacgaggccgccaacagcctgatccagaacctgttcaaggtgacccccgccatgggcatgcagatgagaaaggccatcatgatcgaggtggacgacagaaccgaggcctacctgagagtgctgcagcagaaggtgaccgccgacacccagatcgtggtgtgcctgctgagcagcaacagaaaggacaagtacgacgccatcaagaagtacctgtgcaccgactgccccacccccagccagtgcgtggtggccagaaccctgggcaagcagcagaccgtgatggccatcgccaccaagatcgccctgcagatgaactgcaagatgggcggcgagctgtggagagtggacatccccctgaagctggtgatgatcgtgggcatcgactgctaccacgacatgaccgccggcagaagaagcatcgccggcttcgtggccagcatcaacgagggcatgaccagatggttcagcagatgcatcttccaggacagaggccaggagctggtggacggcctgaaggtgtgcctgcaggccgccctgagagcctggaacagctgcaacgagtacatgcccagcagaatcatcgtgtacagagacggcgtgggcgacggccagctgaagaccctggtgaactacgaggtgccccagttcctggactgcctgaagagcatcggcagaggctacaaccccagactgaccgtgatcgtggtgaagaagagagtgaacaccagattcttcgcccagagcggcggcagactgcagaaccccctgcccggcaccgtgatcgacgtggaggtgaccagacccgagtggtacgacttcttcatcgtgagccaggccgtgagaagcggcagcgtgagccccacccactacaacgtgatctacgacaacagcggcctgaagcccgaccacatccagagactgacctacaagctgtgccacatctactacaactggcccggcgtgatcagagtgcccgccccctgccagtacgcccacaagctggccttcctggtgggccagagcatccacagagagcccaacctgagcctgagcaacagactgtactacctgtag

SEQ ID NO: 93483 - DNA, 369 bp, synthetic construct
  misc_feature 1..369: note = Description of Artificial Sequence: Synthetic coding sequence
  source 1..369: mol_type = other DNA
atgaccggcagagccagagccagagccagaggcagagccagaggccaggagaccgcccagctggtgggcagcaccgccagccagcagcccggctacatccagcccagaccccagcccccccccgccgagggcgagctgttcggcagaggcagacagagaggcaccgccggcggcaccgccaagagccagggcctgcagatcagcgccggcttccaggagctgagcctggccgagagaggcggcagaagaagagacttccacgacctgggcgtgaacaccagacagaacctggaccacgtgaaggagagcaagaccggcagcagcggcatcatcgtgagactgagcaccaaccacttcagactgacctag

SEQ ID NO: 93484 - DNA, 453 bp, synthetic construct
  misc_feature 1..453: note = Description of Artificial Sequence: Synthetic coding sequence
  source 1..453: mol_type = other DNA
atgaccggcagagccagagccagagccagaggcagagccagaggccaggagaccgcccagctggtgggcagcaccgccagccagcagcccggctacatccagcccagaccccagcccccccccgccgagggcgagctgttcggcagaggcagacagagaggcaccgccggcggcaccgccaagagccagggcctgcagatcagcgccggcttccaggagctgagcctggccgagagaggcggcagaagaagagacttccacgacctgggcgtgaacaccagacagaacctggaccacgtgaaggagagcaagaccggcagcagcggcatcatcgtgagactgagcaccaaccacttcagactgaccagcagaccccagtgggccctgtaccagtaccacatcgactacaaccccctgatggaggccagaagactgagaagcgccctgctgtag

SEQ ID NO: 93485 - DNA, 519 bp, synthetic construct
  misc_feature 1..519: note = Description of Artificial Sequence: Synthetic coding sequence
  source 1..519: mol_type = other DNA
atgaccggcagagccagagccagagccagaggcagagccagaggccaggagaccgcccagctggtgggcagcaccgccagccagcagcccggctacatccagcccagaccccagcccccccccgccgagggcgagctgttcggcagaggcagacagagaggcaccgccggcggcaccgccaagagccagggcctgcagatcagcgccggcttccaggagctgagcctggccgagagaggcggcagaagaagagacttccacgacctgggcgtgaacaccagacagaacctggaccacgtgaaggagagcaagaccggcagcagcggcatcatcgtgagactgagcaccaaccacttcagactgaccagcagaccccagtgggccctgtaccagtaccacatcgactacaaccccctgatggaggccagaagactgagaagcgccctgctgttccagcacgaggacctgatcggcaagtgccacgccttcgacggcaccatcctgttcctgcccaagtag

SEQ ID NO: 93486 - DNA, 498 bp, synthetic construct
  misc_feature 1..498: note = Description of Artificial Sequence: Synthetic coding sequence
  source 1..498: mol_type = other DNA
atgaccggcagagccagagccagagccagaggcagagccagaggccaggagaccgcccagctggtgggcagcaccgccagccagcagcccggctacatccagcccagaccccagcccccccccgccgagggcgagctgttcggcagaggcagacagagaggcaccgccggcggcaccgccaagagccagggcctgcagatcagcgccggcttccaggagctgagcctggccgagagaggcggcagaagaagagacttccacgacctgggcgtgaacaccagacagaacctggaccacgtgaaggagagcaagaccggcagcagcggcatcatcgtgagactgagcaccaaccacttcagactgaccagcagaccccagtgggccctgtaccagtaccacatcgactacaaccccctgatggaggccagaagactgagaagcgccctgctgttccagcacgaggacctgatcggcaagtgccacgccttcgacggctag

SEQ ID NO: 93487 - DNA, 2922 bp, synthetic construct
  misc_feature 1..2922: note = Description of Artificial Sequence: Synthetic coding sequence
  source 1..2922: mol_type = other DNA
atggaccccttcagacccagcttcagaggccagagccccatccaccccagccagtgccaggccgtgagaatgcccggctgctggccccaggccagcaagcccctggaccccgccctgggcagaggcgcccccgccggcagaggccacgtgttcggcaagcccgaggagcccagcacccagagaggccccgcccagagagagagcgtgggcctggtgagcatgttcagaggcctgggcatcgagaccgtgagcaagacccccctgaagagagagatgctgcccagcggcagaggcatcctgggcagaggcctgagcgccaacctggtgagaaaggacagagaggagctgagccccaccttctgggaccccaaggtgctggccgccggcgacagcaagatggccgagaccagcgtgggctggagcagaaccctgggcagaggcagcagcgacgccagcctgctgcccctgggcagagccgccggcggcatcagcagagaggtggacaagcccccctgcaccttcagcacccccagcagaggccccccccagctgagcagcccccccgccctgccccagagccccctgcacagccccgacagacccctggtgctgaccgtggagcacaaggagaaggagctgatcgtgaagcagggcagcaagggcaccccccagagcctgggcctgaacctggtgaagatccagtgccacaacgaggccgtgtaccagtaccacgtgaccttcagccccaacgtggagtgcaagagcatgagattcggcatgctgaaggaccaccaggccgtgaccggcaacgtgaccgccttcgacggcagcatcctgtacctgcccgtgaagctgcagcaggtgctggagctgaagagccagagaaagaccgacagcgccgagatcagcatcaagatccagatgaccaagatcctggagccctgcagcgacctgtgcatccccttctacaacgtggtgttcagaagagtgatgaagctgctggacatgaagctggtgggcagaaacttctacgaccccaccagcgccatggtgctgcagcagcacagactgcagatctggcccggctacgccgccagcatcagaagaaccgacggcggcctgttcctgctggccgacgtgagccacaaggtgatcagaaacgactgcgtgctggacgtgatgcacgccatctaccagcagaacaaggagcacttccaggacgagtgcaccaagctgctggtgggcaacatcgtgatcaccagatacaacaacagaacctacagaatcgacgacgtggactggaacaagacccccaaggacagcttcaccatgagcgacggcaaggagatcaccttcctggagtactacagcaagaactacggcatcaccgtgaaggaggaggaccagcccctgctgatccacagacccagcgagagacaggacaaccacggcatgctgctgaagggcgagatcctgctgctgcccgagctgagcttcatgaccggcatccccgagaagatgaagaaggacttcagagccatgaaggacctggcccagcagatcaacctgagccccaagcagcaccacagcgccctggagtgcctgctgcagagaatcgccaagaacgaggccgccaccaacgagctgatgagatggggcctgagactgcagaaggacgtgcacaagatcgagggcagagtgctgcccatggagagaatcaacctgaagaacaccagcttcatcaccagccaggagctgaactgggtgaaggaggtgaccagagaccccagcatcctgaccatccccatgcacttctgggccctgttctaccccaagagagccatggaccaggccagagagctggtgaacatgctggagaagatcgccggccccatcggcatgagaatgagcccccccgcctgggtggagctgaaggacgacagaatcgagacctacgtgagaaccatccagagcaccctgggcgccgagggcaagatccagatggtggtgtgcatcatcatgggccccagagacgacctgtacggcgccatcaagaagctgtgctgcgtgcagagccccgtgcccagccaggtggtgaacgtgagaaccatcggccagcccaccagactgagaagcgtggcccagaagatcctgctgcagatcaactgcaagctgggcggcgagctgtggggcgtggacatccccctgaagcagctgatggtgatcggcatggacgtgtaccacgaccccagcagaggcatgagaagcgtggtgggcttcgtggccagcatcaacctgaccctgaccaagtggtacagcagagtggtgttccagatgccccaccaggagatcgtggacagcctgaagctgtgcctggtgggcagcctgaagaagttctacgaggtgaaccactgcctgcccgagaagatcgtggtgtacagagacggcgtgagcgacggccagctgaagaccgtggccaactacgagatcccccagctgcagaagtgcttcgaggccttcgagaactaccagcccaagatggtggtgttcgtggtgcagaagaagatcagcaccaacctgtacctggccgccccccagaacttcgtgacccccacccccggcaccgtggtggaccacaccatcaccagctgcgagtgggtggacttctacctgctggcccaccacgtgagacagggctgcggcatccccacccactacgtgtgcgtgctgaacaccgccaacctgagccccgaccacatgcagagactgaccttcaagctgtgccacatgtactggaactggcccggcaccatcagagtgcccgccccctgcaagtacgcccacaagctggccttcctgagcggccacatcctgcaccacgagcccgccatccagctgtgcgagaacctgttcttcctgtag

SEQ ID NO: 93488 - DNA, 2922 bp, synthetic construct; identical to SEQ ID NO: 93487
  misc_feature 1..2922: note = Description of Artificial Sequence: Synthetic coding sequence
  source 1..2922: mol_type = other DNA

SEQ ID NO: 93489 - DNA, 639 bp, synthetic construct
  misc_feature 1..639: note = Description of Artificial Sequence: Synthetic coding sequence
  source 1..639: mol_type = other DNA
atgaaggtgttcaagttcatcggcctgatgatcctgctgaccagcgccttcagcgccggcagcggccagagccccatgaccgtgctgtgcagcatcgactggttcatggtgaccgtgcaccccttcatgctgaacaacgacgtgtgcgtgcacttccacgagctgcacctgggcctgggctgcccccccaaccacgtgcagccccacgcctaccagttcacctacagagtgaccgagtgcggcatcagagccaaggccgtgagccaggacatggtgatctacagcaccgagatccactacagcagcaagggcacccccagcaagttcgtgatccccgtgagctgcgccgccccccagaagagcccctggctgaccaagccctgcagcatgagagtggccagcaagagcagagccaccgcccagaaggacgagaagtgctacgaggtgttcagcctgagccagagcagccagagacccaactgcgactgccccccctgcgtgttcagcgaggaggagcacacccaggtgccctgccaccaggccggcgcccaggaggcccagcccctgcagcccagccacttcctggacatcagcgaggactggagcctgcacaccgacgacatgatcggcagcatgtag

SEQ ID NO: 93490 - DNA, 294 bp, synthetic construct
  misc_feature 1..294: note = Description of Artificial Sequence: Synthetic coding sequence
  source 1..294: mol_type = other DNA
atgagacccctgctgtgcgccctgaccggcctggccctgctgagagccgccggcagcctggccgccgccgagcccttcagcccccccagaggcgacagcgcccagagcaccgcctgcgacagacacatggccgtgcagagaagactggacgtgatggaggagatggtggagaagaccgtggaccacctgggcaccgaggtgaagggcctgctgggcctgctggaggagctggcctggaacctgccccccggccccttcagccccgcccccgacctgctgggcgacggcttctag

SEQ ID NO: 93491 - DNA, 264 bp, synthetic construct
  misc_feature 1..264: note = Description of Artificial Sequence: Synthetic coding sequence
  source 1..264: mol_type = other DNA
atgagacccctgctgtgcgccctgaccggcctggccctgctgagagccgccggcagcctggccgccgccgagcccttcagcccccccagaggcgacagcgcccagagcaccgcctgcgacagacacatggccgtgcagagaagactggacgtgatggaggagatggccagcgagccctggagctggagccccgccgtgggcggcggcgcccccgccagacagagaccccagaaccagccctgccccctggacttcctgccctag

SEQ ID NO: 93492 - DNA, 168 bp, synthetic construct
  misc_feature 1..168: note = Description of Artificial Sequence: Synthetic coding sequence
  source 1..168: mol_type = other DNA
atggccgtgcagagaagactggacgtgatggaggagatggtggagaagaccgtggaccacctgggcaccgaggtgaagggcctgctgggcctgctggaggagctggcctggaacctgccccccggccccttcagccccgcccccgacctgctgggcgacggcttctag

SEQ ID NO: 93493 - DNA, 2244 bp, synthetic construct
  misc_feature 1..2244: note = Description of Artificial Sequence: Synthetic coding sequence
  source 1..2244: mol_type = other DNA
atgaaccacagccccctgaagaccgccctggcctacgagtgcttccaggaccaggacaacagcaccctggccctgcccagcgaccagaagatgaagaccggcaccagcggcagacagagagtgcaggagcaggtgatgatgaccgtgaagagacagaagagcaagagcagccagagcagcaccctgagccacagcaacagaggcagcatgtacgacggcctggccgacaactacaactacggcaccaccagcagaagcagctactacagcaagttccaggccggcaacggcagctggggctaccccatctacaacggcaccctgaagagagagcccgacaacagaagattcagcagctacagccagatggagaactggagcagacactaccccagaggcagctgcaacaccaccggcgccggcagcgacatctgcttcatgcagaagatcaaggccagcagaagcgagcccgacctgtactgcgaccccagaggcaccctgagaaagggcaccctgggcagcaagggccagaagaccacccagaacagatacagcttctacagcacctgcagcggccagaaggccatcaagaagtgccccgtgagaccccccagctgcgccagcaagcaggaccccgtgtacatcccccccatcagctgcaacaaggacctgagcttcggccacagcagagccagcagcaagatctgcagcgaggacatcgagtgcagcggcctgaccatccccaaggccgtgcagtacctgagcagccaggacgagaagtaccaggccatcggcgcctactacatccagcacacctgcttccaggacgagagcgccaagcagcaggtgtaccagctgggcggcatctgcaagctggtggacctgctgagaagccccaaccagaacgtgcagcaggccgccgccggcgccctgagaaacctggtgttcagaagcaccaccaacaagctggagaccagaagacagaacggcatcagagaggccgtgagcctgctgagaagaaccggcaacgccgagatccagaagcagctgaccggcctgctgtggaacctgagcagcaccgacgagctgaaggaggagctgatcgccgacgccctgcccgtgctggccgacagagtgatcatccccttcagcggctggtgcgacggcaacagcaacatgagcagagaggtggtggaccccgaggtgttcttcaacgccaccggctgcctgagaaagagactgggcatgagagagctgctggccctggtgccccagagagccaccagcagcagagtgaacctgagcagcgccgacgccggcagacagaccatgagaaactacagcggcctgatcgacagcctgatggcctacgtgcagaactgcgtggccgccagcagatgcgacgacaagagcgtggagaactgcatgtgcgtgctgcacaacctgagctacagactggacgccgaggtgcccaccagatacagacagctggagtacaacgccagaaacgcctacaccgagaagagcagcaccggctgcttcagcaacaagagcgacaagatgatgaacaacaactacgactgccccctgcccgaggaggagaccaaccccaagggcagcggctggctgtaccacagcgacgccatcagaacctacctgaacctgatgggcaagagcaagaaggacgccaccctggaggcctgcgccggcgccctgcagaacctgaccgccagcaagggcctgatgagcagcggcatgagccagctgatcggcctgaaggagaagggcctgccccagatcgccagactgctgcagagcggcaacagcgacgtggtgagaagcggcgccagcctgctgagcaacatgagcagacaccccctgctgcacagagtgatgggcaaccaggtgttccccgaggtgaccagactgctgaccagccacaccggcaacaccagcaacagcgaggacatcctgagcagcgcctgctacaccgtgagaaacctgatggccagccagccccagctggccaagcagtacttcagcagcagcatgctgaacaacatcatcaacctgtgcagaagcagcgccagccccaaggccgccgaggccgccagactgctgctgagcgacatgtggagcagcaaggagctgcagggcgtgctgagacagcagggcttcgacagaaacatgctgggcaccctggccggcgccaacagcctgagaaacttcaccagcagattctag

SEQ ID NO: 93494 - DNA, 2244 bp, synthetic construct; identical to SEQ ID NO: 93493
  misc_feature 1..2244: note = Description of Artificial Sequence: Synthetic coding sequence
  source 1..2244: mol_type = other DNA

SEQ ID NO: 93495 - DNA, 2181 bp, synthetic construct
  misc_feature 1..2181: note = Description of Artificial Sequence: Synthetic coding sequence
  source 1..2181: mol_type = other DNA
atgaaccacagccccctgaagaccgccctggcctacgagtgcttccaggaccaggacaacagcaccctggccctgcccagcgaccagaagatgaagaccggcaccagcggcagacagagagtgcaggagcaggtgatgatgaccgtgaagagacagaagagcaagagcagccagagcagcaccctgagccacagcaacagaggcagcatgtacgacggcctggccgacaactacaactacggcaccaccagcagaagcagctactacagcaagttccaggccggcaacggcagctggggctaccccatctacaacggcaccctgaagagagagcccgacaacagaagattcagcagctacagccagatggagaactggagcagacactaccccagaggcagctgcaacaccaccggcgccggcagcgacatctgcttcatgcagaagatcaaggccagcagaagcgagcccgacctgtactgcgaccccagaggcaccctgagaaagggcaccctgggcagcaagggccagaagaccacccagaacagatacagcttctacagcacctgcagcggccagaaggccatcaagaagtgccccgtgagaccccccagctgcgccagcaagcaggaccccgtgtacatcccccccatcagctgcaacaaggacctgagcttcggccacagcagagccagcagcaagatctgcagcgaggacatcgagtgcagcggcctgaccatccccaaggccgtgcagtacctgagcagccaggacgagaagtaccaggccatcggcgcctactacatccagcacacctgcttccaggacgagagcgccaagcagcaggtgtaccagctgggcggcatctgcaagctggtggacctgctgagaagccccaaccagaacgtgcagcaggccgccgccggcgccctgagaaacctggtgttcagaagcaccaccaacaagctggagaccagaagacagaacggcatcagagaggccgtgagcctgctgagaagaaccggcaacgccgagatccagaagcagctgaccggcctgctgtggaacctgagcagcaccgacgagctgaaggaggagctgatcgccgacgccctgcccgtgctggccgacagagtgatcatccccttcagcggctggtgcgacggcaacagcaacatgagcagagaggtggtggaccccgaggtgttcttcaacgccaccggctgcctgagaaacctgagcagcgccgacgccggcagacagaccatgagaaactacagcggcctgatcgacagcctgatggcctacgtgcagaactgcgtggccgccagcagatgcgacgacaagagcgtggagaactgcatgtgcgtgctgcacaacctgagctacagactggacgccgaggtgcccaccagatacagacagctggagtacaacgccagaaacgcctacaccgagaagagcagcaccggctgcttcagcaacaagagcgacaagatgatgaacaacaactacgactgccccctgcccgaggaggagaccaaccccaagggcagcggctggctgtaccacagcgacgccatcagaacctacctgaacctgatgggcaagagcaagaaggacgccaccctggaggcctgcgccggcgccctgcagaacctgaccgccagcaagggcctgatgagcagcggcatgagccagctgatcggcctgaaggagaagggcctgccccagatcgccagactgctgcagagcggcaacagcgacgtggtgagaagcggcgccagcctgctgagcaacatgagcagacaccccctgctgcacagagtgatgggcaaccaggtgttccccgaggtgaccagactgctgaccagccacaccggcaacaccagcaacagcgaggacatcctgagcagcgcctgctacaccgtgagaaacctgatggccagccagccccagctggccaagcagtacttcagcagcagcatgctgaacaacatcatcaacctgtgcagaagcagcgccagccccaaggccgccgaggccgccagactgctgctgagcgacatgtggagcagcaaggagctgcagggcgtgctgagacagcagggcttcgacagaaacatgctgggcaccctggccggcgccaacagcctgagaaacttcaccagcagattctag

SEQ ID NO: 93496 - DNA, 2646 bp, synthetic construct
  misc_feature 1..2646: note = Description of Artificial Sequence: Synthetic coding sequence
  source 1..2646: mol_type = other DNA
atggccgcccccggcgcccccgccgagtacggctacatcagaaccgtgctgggccagcagatcctgggccagctggacagcagcagcctggccctgcccagcgaggccaagctgaagctggccggcagcagcggcagaggcggccagaccgtgaagagcctgagaatccaggagcaggtgcagcagaccctggccagaaagggcagaagcagcgtgggcaacggcaacctgcacagaaccagcagcgtgcccgagtacgtgtacaacctgcacctggtggagaacgacttcgtgggcggcagaagccccgtgcccaagacctacgacatgctgaaggccggcaccaccgccacctacgagggcagatggggcagaggcaccgcccagtacagcagccagaagagcgtggaggagagaagcctgagacaccccctgagaagactggagatcagccccgacagcagccccgagagagcccactacacccacagcgactaccagtacagccagagaagccaggccggccacaccctgcaccaccaggagagcagaagagccgccctgctggtgccccccagatacgccagaagcgagatcgtgggcgtgagcagagccggcaccaccagcagacagagacacttcgacacctaccacagacagtaccagcacggcagcgtgagcgacaccgtgttcgacagcatccccgccaaccccgccctgctgacctaccccagacccggcaccagcagaagcatgggcaacctgctggagaaggagaactacctgaccgccggcctgaccgtgggccaggtgagacccctggtgcccctgcagcccgtgacccagaacagagccagcagaagcagctggcaccagagcagcttccacagcaccagaaccctgagagaggccggccccagcgtggccgtggacagcagcggcagaagagcccacctgaccgtgggccaggccgccgccggcggcagcggcaacctgctgaccgagagaagcaccttcaccgacagccagctgggcaacgccgacatggagatgaccctggagagagccgtgagcatgctggaggccgaccacatgctgcccagcagaatcagcgccgccgccaccttcatccagcacgagtgcttccagaagagcgaggccagaaagagagtgaaccagctgagaggcatcctgaagctgctgcagctgctgaaggtgcagaacgaggacgtgcagagagccgtgtgcggcgccctgagaaacctggtgttcgaggacaacgacaacaagctggaggtggccgagctgaacggcgtgcccagactgctgcaggtgctgaagcagaccagagacctggagaccaagaagcagatcaccgaccacaccgtgaacctgagaagcagaaacggctggcccggcgccgtggcccacgcctgcaaccccagcaccctgggcggccagggcggcagaatcaccagaagcggcgtgagagaccagcccgaccagcacggcctgctgtggaacctgagcagcaacgacaagctgaagaacctgatgatcaccgaggccctgctgaccctgaccgagaacatcatcatccccttcagcggctggcccgagggcgactaccccaaggccaacggcctgctggacttcgacatcttctacaacgtgaccggctgcctgagaaacatgagcagcgccggcgccgacggcagaaaggccatgagaagatgcgacggcctgatcgacagcctggtgcactacgtgagaggcaccatcgccgactaccagcccgacgacaaggccaccgagaactgcgtgtgcatcctgcacaacctgagctaccagctggaggccgagctgcccgagaagtacagccagaacatctacatccagaacagaaacatccagaccgacaacaacaagagcatcggctgcttcggcagcagaagcagaaaggtgaaggagcagtaccaggacgtgcccatgcccgaggagaagagcaaccccaagggcgtggagtggctgtggcacagcatcgtgatcagaatgtacctgagcctgatcgccaagagcgtgagaaactacacccaggaggccagcctgggcgccctgcagaacctgaccgccggcagcggccccatgcccaccagcgtggcccagaccgtggtgcagaaggagagcggcctgcagcacaccagaaagatgctgcacgtgggcgaccccagcgtgaagaagaccgccatcagcctgctgagaaacctgagcagaaacctgagcctgcagaacgagatcgccaaggagaccctgcccgacctggtgagcatcatccccgacaccgtgcccagcaccgacctgctgatcgagaccaccgccagcgcctgctacaccctgaacaacatcatccagaacagctaccagaacgccagagacctgctgaacaccggcggcatccagaagatcatggccatcagcgccggcgacgcctacgccagcaacaaggccagcaaggccgccagcgtgctgctgtacagcctgtgggcccacaccgagctgcaccacgcctacaagaaggcccagttcaagaagaccgacttcgtgaacagcagaaccgccaaggcctaccacagcctgaaggactag

SEQ ID NO: 93497 - DNA, 2514 bp, synthetic construct
  misc_feature 1..2514: note = Description of Artificial Sequence: Synthetic coding sequence
  source 1..2514: mol_type = other DNA
atggccgcccccggcgcccccgccgagtacggctacatcagaaccgtgctgggccagcagatcctgggccagctggacagcagcagcctggccctgcccagcgaggccaagctgaagctggccggcagcagcggcagaggcggccagaccgtgaagagcctgagaatccaggagcaggtgcagcagaccctggccagaaagggcagaagcagcgtgggcaacggcaacctgcacagaaccagcagcgtgcccgagtacgtgtacaacctgcacctggtggagaacgacttcgtgggcggcagaagccccgtgcccaagacctacgacatgctgaaggccggcaccaccgccacctacgagggcagatggggcagaggcaccgcccagtacagcagccagaagagcgtggaggagagaagcctgagacaccccctgagaagactggagatcagccccgacagcagccccgagagagcccactacacccacagcgactaccagtacagccagagaagccaggccggccacaccctgcaccaccaggagagcagaagagccgccctgctggtgccccccagatacgccagaagcgagatcgtgggcgtgagcagagccggcaccaccagcagacagagacacttcgacacctaccacagacagtaccagcacggcagcgtgagcgacaccgtgttcgacagcatccccgccaaccccgccctgctgacctaccccagacccggcaccagcagaagcatgggcaacctgctggagaaggagaactacctgaccgccggcctgaccgtgggccaggtgagacccctggtgcccctgcagcccgtgacccagaacagagccagcagaagcagctggcaccagagcagcttccacagcaccagaaccctgagagaggccggccccagcgtggccgtggacagcagcggcagaagagcccacctgaccgtgggccaggccgccgccggcggcagcggcaacctgctgaccgagagaagcaccttcaccgacagccagctgggcaacgccgacatggagatgaccctggagagagccgtgagcatgctggaggccgaccacatgctgcccagcagaatcagcgccgccgccaccttcatccagcacgagtgcttccagaagagcgaggccagaaagagagtgaaccagctgagaggcatcctgaagctgctgcagctgctgaaggtgcagaacgaggacgtgcagagagccgtgtgcggcgccctgagaaacctggtgttcgaggacaacgacaacaagctggaggtggccgagctgaacggcgtgcccagactgctgcaggtgctgaagcagaccagagacctggagaccaagaagcagatcaccggcctgctgtggaacctgagcagcaacgacaagctgaagaacctgatgatcaccgaggccctgctgaccctgaccgagaacatcatcatccccttcagcggctggcccgagggcgactaccccaaggccaacggcctgctggacttcgacatcttctacaacgtgaccggctgcctgagaaacatgagcagcgccggcgccgacggcagaaaggccatgagaagatgcgacggcctgatcgacagcctggtgcactacgtgagaggcaccatcgccgactaccagcccgacgacaaggccaccgagaactgcgtgtgcatcctgcacaacctgagctaccagctggaggccgagctgcccgagaagtacagccagaacatctacatccagaacagaaacatccagaccgacaacaacaagagcatcggctgcttcggcagcagaagcagaaaggtgaaggagcagtaccaggacgtgcccatgcccgaggagaagagcaaccccaagggcgtggagtggctgtggcacagcatcgtgatcagaatgtacctgagcctgatcgccaagagcgtgagaaactacacccaggaggccagcctgggcgccctgcagaacctgaccgccggcagcggccccatgcccaccagcgtggcccagaccgtggtgcagaaggagagcggcctgcagcacaccagaaagatgctgcacgtgggcgaccccagcgtgaagaagaccgccatcagcctgctgagaaacctgagcagaaacctgagcctgcagaacgagatcgccaaggagaccctgcccgacctggtgagcatcatccccgacaccgtgcccagcaccgacctgctgatcgagaccaccgccagcgcctgctacaccctgaacaacatcatccagaacagctaccagaacgccagagacctgctgaacaccggcggcatccagaagatcatggccatcagcgccggcgacgcctacgccagcaacaaggccagcaaggccgccagcgtgctgctgtacagcctgtgggcccacaccgagctgcaccacgcctacaagaaggcccagttcaagaagaccgacttcgtgaacagcagaaccgccaaggcctaccacagcctgaaggactag

SEQ ID NO: 93498 - DNA, 2475 bp, synthetic construct
  misc_feature 1..2475: note = Description of Artificial Sequence: Synthetic coding sequence
  source 1..2475: mol_type = other DNA
atggccgcccccggcgcccccgccgagtacggctacatcagaaccgtgctgggccagcagatcctgggccagctggacagcagcagcctggccctgcccagcgaggccaagctgaagctggccggcagcagcggcagaggcggccagaccgtgaagagcctgagaatccaggagcaggtgcagcagaccctggccagaaagggcagaagcagcgtgggcaacggcaacctgcacagaaccagcagcgtgcccgagtacgtgtacaacctgcacctggtggagaacgacttcgtgggcggcagaagccccgtgcccaagacctacgacatgctgaaggccggcaccaccgccacctacgagggcagatggggcagaggcaccgcccagtacagcagccagaagagcgtggaggagagaagcctgagacaccccctgagaagactggagatcagccccgacagcagccccgagagagcccactacacccacagcgactaccagtacagccagagaagccaggccggccacaccctgcaccaccaggagagcagaagagccgccctgctggtgccccccagatacgccagaagcgagatcgtgggcgtgagcagagccggcaccaccagcagacagagacacttcgacacctaccacagacagtaccagcacggcagcgtgagcgacaccgtgttcgacagcatccccgccaaccccgccctgctgacctaccccagacccggcaccagcagaagcatgggcaacctgctggagaaggagaactacctgaccgccggcctgaccgtgggccaggtgagacccctggtgcccctgcagcccgtgacccagaacagagccagcagaagcagctggcaccagagcagcttccacagcaccagaaccctgagagaggccggccccagcgtggccgtggacagcagcggcagaagagcccacctgaccgtgggccaggccgccgccggcggcagcggcaacctgctgaccgagagaagcaccttcaccgacagccagctgggcaacgccgacatggagatgaccctggagagagccgtgagcatgctggaggccgaccacatgctgcccagcagaatcagcgccgccgccaccttcatccagcacgagtgcttccagaagagcgaggccagaaagagagtgaaccagctgagaggcatcctgaagctgctgcagctgctgaaggtgcagaacgaggacgtgcagagagccgtgtgcggcgccctgagaaacctggtgttcgaggacaacgacaacaagctggaggtggccgagctgaacggcgtgcccagactgctgcaggtgctgaagcagaccagagacctggagaccaagaagcagatcaccgaccacaccgtgaacctgagaagcagaaacggctggcccggcgccgtggcccacgcctgcaaccccagcaccctgggcggccagggcggcagaatcaccagaagcggcgtgagagaccagcccgaccagcacggcctgctgtggaacctgagcagcaacgacaagctgaagaacctgatgatcaccgaggccctgctgaccctgaccgagaacatcatcatccccttcagcggctggcccgagggcgactaccccaaggccaacggcctgctggacttcgacatcttctacaacgtgaccggctgcctgagaaacatgagcagcgccggcgccgacggcagaaaggccatgagaagatgcgacggcctgatcgacagcctggtgcactacgtgagaggcaccatcgccgactaccagcccgacgacaaggccaccgagaactgcgtgtgcatcctgcacaacctgagctaccagctggaggccgagctgcccgagaagtacagccagaacatctacatccagaacagaaacatccagaccgacaacaacaagagcatcggctgcttcggcagcagaagcagaaaggtgaaggagcagtaccaggacgtgcccatgcccgaggagaagagcaaccccaagggcgtggagtggctgtggcacagcatcgtgatcagaatgtacctgagcctgatcgccaagagcgtgagaaactacacccaggaggccagcctgggcgccctgcagaacctgaccgccggcagcggccccatgcccaccagcgtggcccagaccgtggtgcagaaggagagcggcctgcagcacaccagaaagatgctgcacgtgggcgaccccagcgtgaagaagaccgccatcagcctgctgagaaacctgagcagaaacctgagcctgcagaacgagatcgccaaggagaccctgcccgacctggtgagcatcatccccgacaccgtgcccagcaccgacctgctgatcgagaccaccgccagcgcctgctacaccctgaacaacatcatccagaacagctaccagaacgccagagacctgctgaacagaggccaccccgagaactacggccactag

SEQ ID NO: 93499 - DNA, 2394 bp, synthetic construct
  misc_feature 1..2394: note = Description of Artificial Sequence: Synthetic coding sequence
  source 1..2394: mol_type = other DNA
atgcaggacggcaacttcctgctgagcgccctgcagcccgaggccggcgtgtgcagcctggccctgcccagcgacctgcagctggacagaagaggcgccgagggccccgaggccgagagactgagagccgccagagtgcaggagcaggtgagagccagactgctgcagctgggccagcagcccagacacaacggcgccgccgagcccgagcccgaggccgagaccgccagaggcaccagcagaggccagtaccacaccctgcaggccggcttcagcagcagaagccagggcctgagcggcgacaagaccagcggcttcagacccatcgccaagcccgcctacagccccgccagctggagcagcagaagcgccgtggacctgagctgcagcagaagactgagcagcgcccacaacggcggcagcgccttcggcgccgccggctacggcggcgcccagcccaccccccccatgcccaccagacccgtgagcttccacgagagaggcggcgtgggcagcagagccgactacgacaccctgagcctgagaagcctgagactgggccccggcggcctggacgacagatacagcctggtgagcgagcagctggagcccgccgccaccagcacctacagagccttcgcctacgagagacaggccagcagcagcagcagcagagccggcggcctggactggcccgaggccaccgaggtgagccccagcagaaccatcagagcccccgccgtgagaaccctgcagagattccagagcagccacagaagcagaggcgtgggcggcgccgtgcccggcgccgtgctggagcccgtggccagagcccccagcgtgagaagcctgagcctgagcctggccgacagcggccacctgcccgacgtgcacggcttcaacagctacggcagccacagaaccctgcagagactgagcagcggcttcgacgacatcgacctgcccagcgccgtgaagtacctgatggccagcgaccccaacctgcaggtgctgggcgccgcctacatccagcacaagtgctacagcgacgccgccgccaagaagcaggccagaagcctgcaggccgtgcccagactggtgaagctgttcaaccacgccaaccaggaggtgcagagacacgccaccggcgccatgagaaacctgatctacgacaacgccgacaacaagctggccctggtggaggagaacggcatcttcgagctgctgagaaccctgagagagcaggacgacgagctgagaaagaacgtgaccggcatcctgtggaacctgagcagcagcgaccacctgaaggacagactggccagagacaccctggagcagctgaccgacctggtgctgagccccctgagcggcgccggcggcccccccctgatccagcagaacgccagcgaggccgagatcttctacaacgccaccggcttcctgagaaacctgagcagcgccagccaggccaccagacagaagatgagagagtgccacggcctggtggacgccctggtgaccagcatcaaccacgccctggacgccggcaagtgcgaggacaagagcgtggagaacgccgtgtgcgtgctgagaaacctgagctacagactgtacgacgagatgccccccagcgccctgcagagactggagggcagaggcagaagagacctggccggcgccccccccggcgaggtggtgggctgcttcaccccccagagcagaagactgagagagctgcccctggccgccgacgccctgaccttcgccgaggtgagcaaggaccccaagggcctggagtggctgtggagcccccagatcgtgggcctgtacaacagactgctgcagagatgcgagctgaacagacacaccaccgaggccgccgccggcgccctgcagaacatcaccgccggcgacagaagatgggccggcgtgctgagcagactggccctggagcaggagagaatcctgaaccccctgctggacagagtgagaaccgccgaccaccaccagctgagaagcctgaccggcctgatcagaaacctgagcagaaacgccagaaacaaggacgagatgagcaccaaggtggtgagccacctgatcgagaagctgcccggcagcgtgggcgagaagagcccccccgccgaggtgctggtgaacatcatcgccgtgctgaacaacctggtggtggccagccccatcgccgccagagacctgctgtacttcgacggcctgagaaagctgatcttcatcaagaagaagagagacagccccgacagcgagaagagcagcagagccgccagcagcctgctggccaacctgtggcagtacaacaagctgcacagagacttcagagccaagggctacagaaaggaggacttcctgggcccctag

SEQ ID NO: 93500 - DNA, 276 bp, synthetic construct
  misc_feature 1..276: note = Description of Artificial Sequence: Synthetic coding sequence
  source 1..276: mol_type = other DNA
accgccttcagaagaacccccggcgaggagttcgcctggagagaccccgagctgcccgaggtgatccacatgctgcagcaccagttccccagcgtgcaggccaacgccgccgcctacctgcagcacctgtgcttcggcgacaacaaggtgaagatggaggtgtgcagactgggcggcatcaagcacctggtggacctgctggaccacagagtgggcagcagcgaggagtgcctgtggtgccccagcaagcccagattctggcaggtgtacagatag

SEQ ID NO: 93501 - DNA, 3450 bp, synthetic construct
  misc_feature 1..3450: note = Description of Artificial Sequence: Synthetic coding sequence
  source 1..3450: mol_type = other DNA
atgcccgcccccgagcaggccagcctggtggaggagggccagccccagaccagacaggaggccgccagcaccggccccggcatggagcccgagaccaccgccaccaccatcctggccagcgtgaaggagcaggagctgcagttccagagactgaccagagagctggaggtggagagacagatcgtggccagccagctggagagatgcagactgggcgccgagagccccagcatcgccagcaccagcagcaccgagaagagcttcccctggagaagcaccgacgtgcccaacaccggcgtgagcaagcccagagtgagcgacgccgtgcagcccaacaactacctgatcagaaccgagcccgagcagggcaccctgtacagccccgagcagaccagcctgcacgagagcgagggcagcctgggcaacagcagaagcagcacccagatgaacagctacagcgacagcggctaccaggaggccggcagcttccacaacagccagaacgtgagcaaggccgacaacagacagcagcacagcttcatcggcagcaccaacaaccacgtggtgagaaacagcagagccgagggccagaccctggtgcagcccagcgtggccaacagagccatgagaagagtgagcagcgtgcccagcagagcccagagccccagctacgtgatcagcaccggcgtgagccccagcagaggcagcctgagaaccagcctgggcagcggcttcggcagccccagcgtgaccgaccccagacccctgaaccccagcgcctacagcagcaccaccctgcccgccgccagagccgccagcccctacagccagagacccgccagccccaccgccatcagaagaatcggcagcgtgaccagcagacagaccagcaaccccaacggccccaccccccagtaccagaccaccgccagagtgggcagccccctgaccctgaccgacgcccagaccagagtggccagccccagccagggccaggtgggcagcagcagccccaagagaagcggcatgaccgccgtgccccagcacctgggccccagcctgcagagaaccgtgcacgacatggagcagttcggccagcagcagtacgacatctacgagagaatggtgccccccagacccgacagcctgaccggcctgagaagcagctacgccagccagcacagccagctgggccaggacctgagaagcgccgtgagccccgacctgcacatcacccccatctacgagggcagaacctactacagccccgtgtacagaagccccaaccacggcaccgtggagctgcagggcagccagaccgccctgtacagaaccggcagcgtgggcatcggcaacctgcagagaaccagcagccagagaagcaccctgacctaccagagaaacaactacgccctgaacaccaccgccacctacgccgagccctacagacccatccagtacagagtgcaggagtgcaactacaacagactgcagcacgccgtgcccgccgacgacggcaccaccagaagccccagcatcgacagcatccagaaggaccccagagagttcgcctggagagaccccgagctgcccgaggtgatccacatgctgcagcaccagttccccagcgtgcaggccaacgccgccgcctacctgcagcacctgtgcttcggcgacaacaaggtgaagatggaggtgtgcagactgggcggcatcaagcacctggtggacctgctggaccacagagtgctggaggtgcagaagaacgcctgcggcgccctgagaaacctggtgttcggcaagagcaccgacgagaacaagatcgccatgaagaacgtgggcggcatccccgccctgctgagactgctgagaaagagcatcgacgccgaggtgagagagctggtgaccggcgtgctgtggaacctgagcagctgcgacgccgtgaagatgaccatcatcagagacgccctgagcaccctgaccaacaccgtgatcgtgccccacagcggctggaacaacagcagcttcgacgacgaccacaagatcaagttccagaccagcctggtgctgagaaacaccaccggctgcctgagaaacctgagcagcgccggcgaggaggccagaaagcagatgagaagctgcgagggcctggtggacagcctgctgtacgtgatccacacctgcgtgaacaccagcgactacgacagcaagaccgtggagaactgcgtgtgcaccctgagaaacctgagctacagactggagctggaggtgccccaggccagactgctgggcctgaacgagctggacgacctgctgggcaaggagagccccagcaaggacagcgagcccagctgctggggcaagaagaagaagaagaagaagagaaccccccaggaggaccagtgggacggcgtgggccccatccccggcctgagcaagagccccaagggcgtggagatgctgtggcaccccagcgtggtgaagccctacctgaccctgctggccgagagcagcaaccccgccaccctggagggcagcgccggcagcctgcagaacctgagcgccggcaactggaagttcgccgcctacatcagagccgccgtgagaaaggagaagggcctgcccatcctggtggagctgctgagaatggacaacgacagagtggtgagcagcgtggccaccgccctgagaaacatggccctggacgtgagaaacaaggagctgatcggcaagtacgccatgagagacctggtgaacagactgcccggcggcaacggccccagcgtgctgagcgacgagaccatggccgccatctgctgcgccctgcacgaggtgaccagcaagaacatggagaacgccaaggccctggccgacagcggcggcatcgagaagctggtgaacatcaccaagggcagaggcgacagaagcagcctgaaggtggtgaaggccgccgcccaggtgctgaacaccctgtggcagtacagagacctgagaagcatctacaagaaggacggctggaaccagaaccacttcatcacccccgtgagcaccctggagagagacagattcaagagccaccccagcctgagcaccaccaaccagcagatgagccccatcatccagagcggcagcagcaagcccagccccatctacatcagcagctacagcagccccgccagagagcagaacagaagactgcagcaccagcagctgtactacagccaggacgacagcaacagaaagaacttcgacgcctacagactgtacctgcagagcccccacagctacgaggacccctacttcgacgacagagtgcacttccccgccagcaccgactacagcacccagtacggcctgaagagcaccaccaactacgtggacttctacagcaccaagagacccagctacagagccgagcagtaccccggcagccccgacagctgggtgtag

SEQ ID NO: 93502 - DNA, 3579 bp, synthetic construct
  misc_feature 1..3579: note = Description of Artificial Sequence: Synthetic coding sequence
  source 1..3579: mol_type = other DNA
atgcccgcccccgagcaggccagcctggtggaggagggccagccccagaccagacaggaggccgccagcaccggccccggcatggagcccgagaccaccgccaccaccatcctggccagcgtgaaggagcaggagctgcagttccagagactgaccagagagctggaggtggagagacagatcgtggccagccagctggagagatgcagactgggcgccgagagccccagcatcgccagcaccagcagcaccgagaagagcttcccctggagaagcaccgacgtgcccaacaccggcgtgagcaagcccagagtgagcgacgccgtgcagcccaacaactacctgatcagaaccgagcccgagcagggcaccctgtacagccccgagcagaccagcctgcacgagagcgagggcagcctgggcaacagcagaagcagcacccagatgaacagctacagcgacagcggctaccaggaggccggcagcttccacaacagccagaacgtgagcaaggccgacaacagacagcagcacagcttcatcggcagcaccaacaaccacgtggtgagaaacagcagagccgagggccagaccctggtgcagcccagcgtggccaacagagccatgagaagagtgagcagcgtgcccagcagagcccagagccccagctacgtgatcagcaccggcgtgagccccagcagaggcagcctgagaaccagcctgggcagcggcttcggcagccccagcgtgaccgaccccagacccctgaaccccagcgcctacagcagcaccaccctgcccgccgccagagccgccagcccctacagccagagacccgccagccccaccgccatcagaagaatcggcagcgtgaccagcagacagaccagcaaccccaacggccccaccccccagtaccagaccaccgccagagtgggcagccccctgaccctgaccgacgcccagaccagagtggccagccccagccagggccaggtgggcagcagcagccccaagagaagcggcatgaccgccgtgccccagcacctgggccccagcctgcagagaaccgtgcacgacatggagcagttcggccagcagcagtacgacatctacgagagaatggtgccccccagacccgacagcctgaccggcctgagaagcagctacgccagccagcacagccagctgggccaggacctgagaagcgccgtgagccccgacctgcacatcacccccatctacgagggcagaacctactacagccccgtgtacagaagccccaaccacggcaccgtggagctgcagggcagccagaccgccctgtacagaaccggcagcgtgggcatcggcaacctgcagagaaccagcagccagagaagcaccctgacctaccagagaaacaactacgccctgaacaccaccgccacctacgccgagccctacagacccatccagtacagagtgcaggagtgcaactacaacagactgcagcacgccgtgcccgccgacgacggcaccaccagaagccccagcatcgacagcatccagaaggaccccagagagttcgcctggagagaccccgagctgcccgaggtgatccacatgctgcagcaccagttccccagcgtgcaggccaacgccgccgcctacctgcagcacctgtgcttcggcgacaacaaggtgaagatggaggtgtgcagactgggcggcatcaagcacctggtggacctgctggaccacagagtgctggaggtgcagaagaacgcctgcggcgccctgagaaacctggtgttcggcaagagcaccgacgagaacaagatcgccatgaagaacgtgggcggcatccccgccctgctgagactgctgagaaagagcatcgacgccgaggtgagagagctggtgaccggcgtgctgtggaacctgagcagctgcgacgccgtgaagatgaccatcatcagagacgccctgagcaccctgaccaacaccgtgatcgtgccccacagcggctggaacaacagcagcttcgacgacgaccacaagatcaagttccagaccagcctggtgctgagaaacaccaccggctgcctgagaaacctgagcagcgccggcgaggaggccagaaagcagatgagaagctgcgagggcctggtggacagcctgctgtacgtgatccacacctgcgtgaacaccagcgactacgacagcaagaccgtggagaactgcgtgtgcaccctgagaaacctgagctacagactggagctggaggtgccccaggccagactgctgggcctgaacgagctggacgacctgctgggcaaggagagccccagcaaggacagcgagcccagctgctggggcaagaagaagaagaagaagaagagaaccccccaggaggaccagtgggacggcgtgggccccatccccggcctgagcaagagccccaagggcgtggagatgctgtggcaccccagcgtggtgaagccctacctgaccctgctggccgagagcagcaaccccgccaccctggagggcagcgccggcagcctgcagaacctgagcgccggcaactggaagttcgccgcctacatcagagccgccgtgagaaaggagaagggcctgcccatcctggtggagctgctgagaatggacaacgacagagtggtgagcagcgtggccaccgccctgagaaacatggccctggacgtgagaaacaaggagctgatcggcaagtacgccatgagagacctggtgaacagactgcccggcggcaacggccccagcgtgctgagcgacgagaccatggccgccatctgctgcgccctgcacgaggtgaccagcaagaacatggagaacgccaaggccctggccgacagcggcggcatcgagaagctggtgaacatcaccaagggcagaggcgacagaagcagcctgaaggtggtgaaggccgccgcccaggtgctgaacaccctgtggcagtacagagacctgagaagcatctacaagaaggacggctggaaccagaaccacttcatcacccccgtgagcaccctggagagagacagattcaagagccaccccagcctgagcaccaccaaccagcagatgagccccatcatccagagcgtgggcagcaccagcagcagccccgccctgctgggcatcagagaccccagaagcgagtacgacagaacccagccccccatgcagtactacaacagccagggcgacgccacccacaagggcctgtaccccggcagcagcaagcccagccccatctacatcagcagctacagcagccccgccagagagcagaacagaagactgcagcaccagcagctgtactacagccaggacgacagcaacagaaagaacttcgacgcctacagactgtacctgcagagcccccacagctacgaggacccctacttcgacgacagagtgcacttccccgccagcaccgactacagcacccagtacggcctgaagagcaccaccaactacgtggacttctacagcaccaagagacccagctacagagccgagcagtaccccggcagccccgacagctgggtgtag

SEQ ID NO: 93503 - DNA, 1845 bp, synthetic construct
  misc_feature 1..1845: note = Description of Artificial Sequence: Synthetic coding sequence
  source 1..1845: mol_type = other DNA
atgaacagctacagcgacagcggctaccaggaggccggcagcttccacaacagccagaacgtgagcaaggccgacaacagacagcagcacagcttcatcggcagcaccaacaaccacgtggtgagaaacagcagagccgagggccagaccctggtgcagcccagcgtggccaacagagccatgagaagagtgagcagcgtgcccagcagagcccagagccccagctacgtgatcagcaccggcgtgagccccagcagaggcagcctgagaaccagcctgggcagcggcttcggcagccccagcgtgaccgaccccagacccctgaaccccagcgcctacagcagcaccaccctgcccgccgccagagccgccagcccctacagccagagacccgccagccccaccgccatcagaagaatcggcagcgtgaccagcagacagaccagcaaccccaacggccccaccccccagtaccagaccaccgccagagtgggcagccccctgaccctgaccgacgcccagaccagagtggccagccccagccagggccaggtgggcagcagcagccccaagagaagcggcatgaccgccgtgccccagcacctgggccccagcctgcagagaaccgtgcacgacatggagcagttcggccagcagcagtacgacatctacgagagaatggtgccccccagacccgacagcctgaccgcctacggcgtgcccatgctggtgagcatcgtgagcctgggcaagaccttcgtgctgccctgccccgacctgcacatcacccccatctacgagggcagaacctactacagccccgtgtacagaagccccaaccacggcaccgtggagctgcagggcagccagaccgccctgtacagaaccggcagcgtgggcatcggcaacctgcagagaaccagcagccagagaagcaccctgacctaccagagaaacaactacgccctgaacaccaccgccacctacgccgagccctacagacccatccagtacagagtgcaggagtgcaactacaacagactgcagcacgccgtgcccgccgacgacggcaccaccagaagccccagcatcgacagcatccagaaggaccccagagagttcgcctggagagaccccgagctgcccgaggtgatccacatgctgcagcaccagttccccagcgtgcaggccaacgccgccgcctacctgcagcacctgtgcttcggcgacaacaaggtgaagatggaggtgtgcagactgggcggcatcaagcacctggtggacctgctggaccacagagtgctggaggtgcagaagaacgcctgcggcgccctgagaaacctggtgttcggcaagagcaccgacgagaacaagatcgccatgaagaacgtgggcggcatccccgccctgctgagactgctgagaaagagcatcgacgccgaggtgagagagctggtgaccggcgtgctgtggaacctgagcagctgcgacgccgtgaagatgaccatcatcagagacgccctgagcaccctgaccaacaccgtgatcgtgccccacagcggctggaacaacagcagcttcgacgacgaccacaagatcaagttccagaccagcctggtgctgagaaacaccaccggctgcctgagaaacctgagcagcgccggcgaggaggccagaaagcagatgagaagctgcgagggcctggtggacagcctgctgtacgtgatccacacctgcgtgaacaccagcgactacgacagcaagaccgtggagaactgcgtgtgcaccctgagaaacctgatcggctggagctggagatgccccagacccggctactgggactag

SEQ ID NO: 93504 - DNA, 1329 bp, synthetic construct
  misc_feature 1..1329: note = Description of Artificial Sequence: Synthetic coding sequence
  source 1..1329: mol_type = other DNA
atgggcctggccatggagcacggcggcagctacgccagagccggcggcagcagcagaggctgctggtactacctgagatacttcttcctgttcgtgagcctgatccagttcctgatcatcctgggcctggtgctgttcatggtgtacggcaacgtgcacgtgagcaccgagagcaacctgcaggccaccgagagaagagccgagggcctgtacagccagctgctgggcctgaccgccagccagagcaacctgaccaaggagctgaacttcaccaccagagccaaggacgccatcatgcagatgtggctgaacgccagaagagacctggacagaatcaacgccagcttcagacagtgccagggcgacagagtgatctacaccaacaaccagagatacatggccgccatcatcctgagcgagaagcagtgcagagaccagttcaaggacatgaacaagagctgcgacgccctgctgttcatgctgaaccagaaggtgaagaccctggaggtggagatcgccaaggagaagaccatctgcaccaaggacaaggagagcgtgctgctgaacaagagagtggccgaggagcagctggtggagtgcgtgaagaccagagagctgcagcaccaggagagacagctggccaaggagcagctgcagaaggtgcaggccctgtgcctgcccctggacaaggacaagttcgagatggacctgagaaacctgtggagagacagcatcatccccagaagcctggacaacctgggctacaacctgtaccaccccctgggcagcgagctggccagcatcagaagagcctgcgaccacatgcccagcctgatgagcagcaaggtggaggagctggccagaagcctgagagccgacatcgagagagtggccagagagaacagcgacctgcagagacagaagctggaggcccagcagggcctgagagccagccaggaggccaagcagaaggtggagaaggaggcccaggccagagaggccaagctgcaggccgagtgcagcagacagacccagctggccctggaggagaaggccgtgctgagaaaggagagagacaacctggccaaggagctggaggagaagaagagagaggccgagcagctgagaatggagctggccatcagaaacagcgccctggacacctgcatcaagaccaagagccagcccatgatgcccgtgagcagacccatgggccccgtgcccaacccccagcccatcgaccccgccagcctggaggagttcaagagaaagatcctggagagccagagaccccccgccggcatccccgtggcccccagcagcggctag

SEQ ID NO: 93505 - DNA, 291 bp, synthetic construct
  misc_feature 1..291: note = Description of Artificial Sequence: Synthetic coding sequence
  source 1..291: mol_type = other DNA
atggagcacaaggaggtggtgctgctgctgctgctgttcctgaagagcggccagggcgagcccctggacgactacgtgaacacccagggccccagcctgttcagcgtgaccaagaagcagctgggcgccggcagcagagaggagtgcgccgccaagtgcgaggaggacaaggagttcacctgcagagccttccagtaccacagcaaggagcagcagtgcgtgatcatggccgagaacagaaagagcagcatcatcatcagaatgagagacgccgtgctgttcgagaagtag

SEQ ID NO: 93506 - DNA, 291 bp, synthetic construct; identical to SEQ ID NO: 93505
  misc_feature 1..291: note = Description of Artificial Sequence: Synthetic coding sequence
  source 1..291: mol_type = other DNA

SEQ ID NO: 93507 - DNA, 291 bp, synthetic construct; identical to SEQ ID NO: 93505
  misc_feature 1..291: note = Description of Artificial Sequence: Synthetic coding sequence
  source 1..291: mol_type = other DNA

SEQ ID NO: 93508 - DNA, 492 bp, synthetic construct
  misc_feature 1..492: note = Description of Artificial Sequence: Synthetic coding sequence
  source 1..492: mol_type = other DNA
atggacgccctggagggcgagagcttcgccctgagcttcagcagcgccagcgacgccgagttcgacgccgtggtgggctacctggaggacatcatcatggacgacgagttccagctgctgcagagaaacttcatggacaagtactacctggagttcgaggacaccgaggagaacaagctgatctacacccccatcttcaacgagtacatcagcctggtggagaagtacatcgaggagcagctgctgcagagaatccccgagttcaacatggccgccttcaccaccaccctgcagcaccacaaggacgaggtggccggcgacatcttcgacatgctgctgaccttcaccgacttcctggccttcaaggagatgttcctggactacagagccgagaaggagggcagaggcctggacctgagcagcggcctggtggtgaccagcctgtgcaagagcagcagcctgcccgccagccagaacaacctgagacactag

SEQ ID NO: 93509 - DNA, 1890 bp, synthetic construct
  misc_feature 1..1890: note = Description of Artificial Sequence: Synthetic coding sequence
  source 1..1890: mol_type = other DNA
atggagaacagcaccaccaccatcagcagagaggagctggaggagctgcaggaggccttcaacaagatcgacatcgacaacagcggctacgtgagcgactacgagctgcaggacctgttcaaggaggccagcctgcccctgcccggctacaaggtgagagagatcgtggagaagatcctgagcgtggccgacagcaacaaggacggcaagatcagcttcgaggagttcgtgagcctgatgcaggagctgaagagcaaggacatcagcaagaccttcagaaagatcatcaacaagagagagggcatcaccgccatcggcggcaccagcaccatcagcagcgagggcacccagcacagctacagcgaggaggagaaggtggccttcgtgaactggatcaacaaggccctggagaacgaccccgactgcaagcacctgatccccatgaaccccaacgacgacagcctgttcaagagcctggccgacggcatcctgctgtgcaagatgatcaacctgagcgagcccgacaccatcgacgagagagccatcaacaagaagaagctgacccccttcaccatcagcgagaacctgaacctggccctgaacagcgccagcgccatcggctgcaccgtggtgaacatcggcgccagcgacctgaaggagggcaagccccacctggtgctgggcctgctgtggcagatcatcaaggtgggcctgttcgccgacatcgagatcagcagaaacgaggccctgatcgccctgctgaacgagggcgaggagctggaggagctgatgaagctgagccccgaggagctgctgctgagatgggtgaactaccacctgaccaacgccggctggcacaccatcagcaacttcagccaggacatcaaggacagcagagcctacttccacctgctgaaccagatcgcccccaagggcggcgaggacggccccgccatcgccatcgacctgagcggcatcaacgagaccaacgacctgaagagagccggcctgatgctgcaggaggccgacaagctgggctgcaagcagttcgtgacccccgccgacgtggtgagcggcaaccccaagctgaacctggccttcgtggccaacctgttcaacacctacccctgcctgcacaagcccaacaacaacgacatcgacatgaacctgctggagggcgagagcaaggaggagagaaccttcagaaactggatgaacagcctgggcgtgaacccctacatcaaccacctgtacagcgacctggccgacgccctggtgatcttccagctgtacgagatgatcagagtgcccgtgaactggagccacgtgaacaagcccccctaccccgccctgggcggcaacatgaagaagatcgagaactgcaactacgccgtggagctgggcaagaacaaggccaagttcagcctggtgggcatcgccggccaggacctgaacgagggcaacagcaccctgaccctggccctggtgtggcagctgatgagaagatacaccctgaacgtgctgagcgacctgggcgagggcgagaaggtgaacgacgagatcatcatcaagtgggtgaaccagaccctgaagagcgccaacaagaagaccagcatcagcagcttcaaggacaagagcatcagcaccagcctgcccgtgctggacctgatcgacgccatcgcccccaacgccgtgagacaggagatgatcagaagagagaacctgagcgacgaggacaagctgaacaacgccaagtacgccatcagcgtggccagaaagatcggcgccagaatctacgccctgcccgacgacctggtggaggtgaagcccaagatggtgatgaccgtgttcgcctgcctgatgggcaagggcctgaacagaatcaagtag

SEQ ID NO: 93510 - DNA, 1890 bp, synthetic construct; identical to SEQ ID NO: 93509
  misc_feature 1..1890: note = Description of Artificial Sequence: Synthetic coding sequence
  source 1..1890: mol_type = other DNA

SEQ ID NO: 93511 - DNA, 165 bp, synthetic construct
  misc_feature 1..165: note = Description of Artificial Sequence: Synthetic coding sequence
  source 1..165: mol_type = other DNA
atggagaacagcaccaccaccatcagcagagaggagctggaggagctgcaggaggccttcaacaagatcgacatcgacaacagcggctacgtgagcgactacgagctgcaggacctgttcaaggaggccagcctgcccctgcccggctacaaggtgagagagtag

SEQ ID NO: 93512 - DNA, 363 bp, synthetic construct
  misc_feature 1..363: note = Description of Artificial Sequence: Synthetic coding sequence
  source 1..363: mol_type = other DNA
atggagaacagcaccaccaccatcagcagagaggagctggaggagctgcaggaggccttcaacaagatcgacatcgacaacagcggctacgtgagcgactacgagctgcaggacctgttcaaggaggccagcctgcccctgcccggctacaaggtgagagagatcgtggagaagatcctgagcgtggccgacagcaacaaggacggcaagatcagcttcgaggagttcgtgagcctgatgcaggagctgaagagcaaggacatcagcaagaccttcagaaagatcatcaacaagagagagggcatcaccgccatcggcggcaccagcaccatcagcagcgagggcacccagcacagctactag

SEQ ID NO: 93513 - DNA, 360 bp, synthetic construct
  misc_feature 1..360: note = Description of Artificial Sequence: Synthetic coding sequence
  source 1..360: mol_type = other DNA
atggagaacagcaccaccaccatcagcagagaggagctggaggagctgcaggaggccttcaacaagatcgacatcgacaacagcggctacgtgagcgactacgagctgcaggacctgttcaaggaggccagcctgcccctgcccggctacaaggtgagagagatcgtggagaagatcctgagcgtggccgacagcaacaaggacggcaagatcagcttcgaggagttcgtgagcctgatgcaggagctgaagagcaaggacatcagcaagaccttcagaaagatcatcaacaagagagagggcatcaccgccatcggcggcaccagcaccatcagcagcgagggcacccagcacagctag

SEQ ID NO: 93514 - DNA, 102 bp, synthetic construct
  misc_feature 1..102: note = Description of Artificial Sequence: Synthetic coding sequence
  source 1..102: mol_type = other DNA
atggagaacagcaccaccaccatcagcagagaggagctggaggagctgcaggaggccttcaacaagatcgacatcgacaacagcggctacgtgagcgactag

SEQ ID NO: 93515 - DNA, 177 bp, synthetic construct
  misc_feature 1..177: note = Description of Artificial Sequence: Synthetic coding sequence
  source 1..177: mol_type = other DNA
atggagaacagcaccaccaccatcagcagagaggagctggaggagctgcaggaggccttcaacaagatcgacatcgacaacagcggctacgtgagcgactacgagctgcaggacctgttcaaggaggccagcctgcccctgcccggctacaaggtgagagagatcgtggagaagtag

SEQ ID NO: 93516 - DNA, 1890 bp, synthetic construct; identical to SEQ ID NO: 93509
  misc_feature 1..1890: note = Description of Artificial Sequence: Synthetic coding sequence
  source 1..1890: mol_type = other DNA

SEQ ID NO: 93517 - DNA, 162 bp, synthetic construct
  misc_feature 1..162: note = Description of Artificial Sequence: Synthetic coding sequence
  source 1..162: mol_type = other DNA
atggagaacagcaccaccaccatcagcagagaggagctggaggagctgcaggaggccttcaacaagatcgacatcgacaacagcggctacgtgagcgactacgagctgcaggacctgttcaaggaggccagcctgcccctgcccggctacaaggtgagatag

SEQ ID NO: 93518 - DNA, 1785 bp, synthetic construct
  misc_feature 1..1785: note = Description of Artificial Sequence: Synthetic coding sequence
  source 1..1785: mol_type = other DNA
atgcccctgcccggctacaaggtgagagagatcatccagaagctgatgctggacggcgacagaaacaaggacggcaagatcagcttcgacgagttcgtgtacatcttccaggaggtgaagagcagcgacatcgccaagaccttcagaaaggccatcaacagaaaggagggcatctgcgccctgggcggcaccagcgagctgagcagcgagggcacccagcacagctacagcgaggaggagaagtacgccttcgtgaactggatcaacaaggccctggagaacgaccccgactgcagacacgtgatccccatgaaccccaacaccgacgacctgttcaaggccgtgggcgacggcatcgtgctgtgcaagatgatcaacctgagcgtgcccgacaccatcgacgagagagccatcaacaagaagaagctgacccccttcatcatccaggagaacctgaacctggccctgaacagcgccagcgccatcggctgccacgtggtgaacatcggcgccgaggacctgagagccggcaagccccacctggtgctgggcctgctgtggcagatcatcaagatcggcctgttcgccgacatcgagctgagcagaaacgaggccctggccgccctgctgagagacggcgagaccctggaggagctgatgaagctgagccccgaggagctgctgctgagatgggccaacttccacctggagaacagcggctggcagaagatcaacaacttcagcgccgacatcaagctgatcgacttcagcaacagcgtgaaggacagcaaggcctacttccacctgctgaaccagatcgcccccaagggccagaaggagggcgagcccagaatcgacatcaacatgagcggcttcaacgagaccgacgacctgaagagagccgagagcatgctgcagcaggccgacaagctgggctgcagacagttcgtgacccccgccgacgtggtgagcggcaaccccaagctgaacctggccttcgtggccaacctgttcaacaagtaccccgccctgaccaagcccgagaaccaggacatcgactggaccctgctggagggcgagaccagagaggagagaaccttcagaaactggatgaacagcctgggcgtgaacccccacgtgaaccacctgtacgccgacctgcaggacgccctggtgatcctgcagctgtacgagagaatcaaggtgcccgtggactggagcaaggtgaacaagcccccctaccccaagctgggcgccaacatgaagaagctggagaactgcaactacgccgtggagctgggcaagcaccccgccaagttcagcctggtgggcatcggcggccaggacctgaacgacggcaaccagaccctgaccctggccctggtgtggcagctgatgagaagatacaccctgaacgtgctggaggacctgggcgacggccagaaggccaacgacgacatcatcgtgaactgggtgaacagaaccctgagcgaggccggcaagagcaccagcatccagagcttcaaggacaagaccatcagcagcagcctggccgtggtggacctgatcgacgccatccagcccggctgcatcaactacgacctggtgaagagcggcaacctgaccgaggacgacaagcacaacaacgccaagtacgccgtgagcatggccagaagaatcggcgccagagtgtacgccctgcccgaggacctggtggaggtgaagcccaagatggtgatgaccgtgttcgcctgcctgatgggcagaggcatgaagagagtgtag

SEQ ID NO: 93519 - DNA, 1893 bp, synthetic construct
  misc_feature 1..1893: note = Description of Artificial Sequence: Synthetic coding sequence
  source 1..1893: mol_type = other DNA
atggacgagatggccaccacccagatcagcaaggacgagctggacgagctgaaggaggccttcgccaaggtggacctgaacagcaacggcttcatctgcgactacgagctgcacgagctgttcaaggaggccaacatgcccctgcccggctacaaggtgagagagatcatccagaagctgatgctggacggcgacagaaacaaggacggcaagatcagcttcgacgagttcgtgtacatcttccaggaggtgaagagcagcgacatcgccaagaccttcagaaaggccatcaacagaaaggagggcatctgcgccctgggcggcaccagcgagctgagcagcgagggcacccagcacagctacagcgaggaggagaagtacgccttcgtgaactggatcaacaaggccctggagaacgaccccgactgcagacacgtgatccccatgaaccccaacaccgacgacctgttcaaggccgtgggcgacggcatcgtgctgtgcaagatgatcaacctgagcgtgcccgacaccatcgacgagagagccatcaacaagaagaagctgacccccttcatcatccaggagaacctgaacctggccctgaacagcgccagcgccatcggctgccacgtggtgaacatcggcgccgaggacctgagagccggcaagccccacctggtgctgggcctgctgtggcagatcatcaagatcggcctgttcgccgacatcgagctgagcagaaacgaggccctggccgccctgctgagagacggcgagaccctggaggagctgatgaagctgagccccgaggagctgctgctgagatgggccaacttccacctggagaacagcggctggcagaagatcaacaacttcagcgccgacatcaaggacagcaaggcctacttccacctgctgaaccagatcgcccccaagggccagaaggagggcgagcccagaatcgacatcaacatgagcggcttcaacgagaccgacgacctgaagagagccgagagcatgctgcagcaggccgacaagctgggctgcagacagttcgtgacccccgccgacgtggtgagcggcaaccccaagctgaacctggccttcgtggccaacctgttcaacaagtaccccgccctgaccaagcccgagaaccaggacatcgactggaccctgctggagggcgagaccagagaggagagaaccttcagaaactggatgaacagcctgggcgtgaacccccacgtgaaccacctgtacgccgacctgcaggacgccctggtgatcctgcagctgtacgagagaatcaaggtgcccgtggactggagcaaggtgaacaagcccccctaccccaagctgggcgccaacatgaagaagctggagaactgcaactacgccgtggagctgggcaagcaccccgccaagttcagcctggtgggcatcggcggccaggacctgaacgacggcaaccagaccctgaccctggccctggtgtggcagctgatgagaagatacaccctgaacgtgctggaggacctgggcgacggccagaaggccaacgacgacatcatcgtgaactgggtgaacagaaccctgagcgaggccggcaagagcaccagcatccagagcttcaaggacaagaccatcagcagcagcctggccgtggtggacctgatcgacgccatccagcccggctgcatcaactacgacctggtgaagagcggcaacctgaccgaggacgacaagcacaacaacgccaagtacgccgtgagcatggccagaagaatcggcgccagagtgtacgccctgcccgaggacctggtggaggtgaagcccaagatggtgatgaccgtgttcgcctgcctgatgggcagaggcatgaagagagtgtag

SEQ ID NO: 93520 - DNA, 1893 bp, synthetic construct; identical to SEQ ID NO: 93519
  misc_feature 1..1893: note = Description of Artificial Sequence: Synthetic coding sequence
  source 1..1893: mol_type = other DNA

SEQ ID NO: 93521 - DNA, 1854 bp, synthetic construct
  misc_feature 1..1854: note = Description of Artificial Sequence: Synthetic coding sequence
  source 1..1854: mol_type = other DNA
atggaggacctgaacagcaacggcttcatctgcgactacgagctgcacgagctgttcaaggaggccaacatgcccctgcccggctacaaggtgagagagatcatccagaagctgatgctggacggcgacagaaacaaggacggcaagatcagcttcgacgagttcgtgtacatcttccaggaggtgaagagcagcgacatcgccaagaccttcagaaaggccatcaacagaaaggagggcatctgcgccctgggcggcaccagcgagctgagcagcgagggcacccagcacagctacagcgaggaggagaagtacgccttcgtgaactggatcaacaaggccctggagaacgaccccgactgcagacacgtgatccccatgaaccccaacaccgacgacctgttcaaggccgtgggcgacggcatcgtgctgtgcaagatgatcaacctgagcgtgcccgacaccatcgacgagagagccatcaacaagaagaagctgacccccttcatcatccaggagaacctgaacctggccctgaacagcgccagcgccatcggctgccacgtggtgaacatcggcgccgaggacctgagagccggcaagccccacctggtgctgggcctgctgtggcagatcatcaagatcggcctgttcgccgacatcgagctgagcagaaacgaggccctggccgccctgctgagagacggcgagaccctggaggagctgatgaagctgagccccgaggagctgctgctgagatgggccaacttccacctggagaacagcggctggcagaagatcaacaacttcagcgccgacatcaagctgatcgacttcagcaacagcgtgaaggacagcaaggcctacttccacctgctgaaccagatcgcccccaagggccagaaggagggcgagcccagaatcgacatcaacatgagcggcttcaacgagaccgacgacctgaagagagccgagagcatgctgcagcaggccgacaagctgggctgcagacagttcgtgacccccgccgacgtggtgagcggcaaccccaagctgaacctggccttcgtggccaacctgttcaacaagtaccccgccctgaccaagcccgagaaccaggacatcgactggaccctgctggagggcgagaccagagaggagagaaccttcagaaactggatgaacagcctgggcgtgaacccccacgtgaaccacctgtacgccgacctgcaggacgccctggtgatcctgcagctgtacgagagaatcaaggtgcccgtggactggagcaaggtgaacaagcccccctaccccaagctgggcgccaacatgaagaagctggagaactgcaactacgccgtggagctgggcaagcaccccgccaagttcagcctggtgggcatcggcggccaggacctgaacgacggcaaccagaccctgaccctggccctggtgtggcagctgatgagaagatacaccctgaacgtgctggaggacctgggcgacggccagaaggccaacgacgacatcatcgtgaactgggtgaacagaaccctgagcgaggccggcaagagcaccagcatccagagcttcaaggacaagaccatcagcagcagcctggccgtggtggacctgatcgacgccatccagcccggctgcatcaactacgacctggtgaagagcggcaacctgaccgaggacgacaagcacaacaacgccaagtacgccgtgagcatggccagaagaatcggcgccagagtgtacgccctgcccgaggacctggtggaggtgaagcccaagatggtgatgaccgtgttcgcctgcctgatgggcagaggcatgaagagagtgtag

SEQ ID NO: 93522 - DNA, 1758 bp, synthetic construct
  misc_feature 1..1758: note = Description of Artificial Sequence: Synthetic coding sequence
  source 1..1758: mol_type = other DNA
atgcccctgcccggctacaaggtgagagagatcatccagaagctgatgctggacggcgacagaaacaaggacggcaagatcagcttcgacgagttcgtgtacatcttccaggaggtgaagagcagcgacatcgccaagaccttcagaaaggccatcaacagaaaggagggcatctgcgccctgggcggcaccagcgagctgagcagcgagggcacccagcacagctacagcgaggaggagaagtacgccttcgtgaactggatcaacaaggccctggagaacgaccccgactgcagacacgtgatccccatgaaccccaacaccgacgacctgttcaaggccgtgggcgacggcatcgtgctgtgcaagatgatcaacctgagcgtgcccgacaccatcgacgagagagccatcaacaagaagaagctgacccccttcatcatccaggagaacctgaacctggccctgaacagcgccagcgccatcggctgccacgtggtgaacatcggcgccgaggacctgagagccggcaagccccacctggtgctgggcctgctgtggcagatcatcaagatcggcctgttcgccgacatcgagctgagcagaaacgaggccctggccgccctgctgagagacggcgagaccctggaggagctgatgaagctgagccccgaggagctgctgctgagatgggccaacttccacctggagaacagcggctggcagaagatcaacaacttcagcgccgacatcaaggacagcaaggcctacttccacctgctgaaccagatcgcccccaagggccagaaggagggcgagcccagaatcgacatcaacatgagcggcttcaacgagaccgacgacctgaagagagccgagagcatgctgcagcaggccgacaagctgggctgcagacagttcgtgacccccgccgacgtggtgagcggcaaccccaagctgaacctggccttcgtggccaacctgttcaacaagtaccccgccctgaccaagcccgagaaccaggacatcgactggaccctgctggagggcgagaccagagaggagagaaccttcagaaactggatgaacagcctgggcgtgaacccccacgtgaaccacctgtacgccgacctgcaggacgccctggtgatcctgcagctgtacgagagaatcaaggtgcccgtggactggagcaaggtgaacaagcccccctaccccaagctgggcgccaacatgaagaagctggagaactgcaactacgccgtggagctgggcaagcaccccgccaagttcagcctggtgggcatcggcggccaggacctgaacgacggcaaccagaccctgaccctggccctggtgtggcagctgatgagaagatacaccctgaacgtgctggaggacctgggcgacggccagaaggccaacgacgacatcatcgtgaactgggtgaacagaaccctgagcgaggccggcaagagcaccagcatccagagcttcaaggacaagaccatcagcagcagcctggccgtggtggacctgatcgacgccatccagcccggctgcatcaactacgacctggtgaagagcggcaacctgaccgaggacgacaagcacaacaacgccaagtacgccgtgagcatggccagaagaatcggcgccagagtgtacgccctgcccgaggacctggtggaggtgaagcccaagatggtgatgaccgtgttcgcctgcctgatgggcagaggcatgaagagagtgtag

SEQ ID NO: 93523 - DNA, 675 bp, synthetic construct
  misc_feature 1..675: note = Description of Artificial Sequence: Synthetic coding sequence
  source 1..675: mol_type = other DNA
atgaacagcctgggcgtgaacccccacgtgaaccacctgtacgccgacctgcaggacgccctggtgatcctgcagctgtacgagagaatcaaggtgcccgtggactggagcaaggtgaacaagcccccctaccccaagctgggcgccaacatgaagaagctggagaactgcaactacgccgtggagctgggcaagcaccccgccaagttcagcctggtgggcatcggcggccaggacctgaacgacggcaaccagaccctgaccctggccctggtgtggcagctgatgagaagatacaccctgaacgtgctggaggacctgggcgacggccagaaggccaacgacgacatcatcgtgaactgggtgaacagaaccctgagcgaggccggcaagagcaccagcatccagagcttcaaggacaagaccatcagcagcagcctggccgtggtggacctgatcgacgccatccagcccggctgcatcaactacgacctggtgaagagcggcaacctgaccgaggacgacaagcacaacaacgccaagtacgccgtgagcatggccagaagaatcggcgccagagtgtacgccctgcccgaggacctggtggaggtgaagcccaagatggtgatgaccgtgttcgcctgcctgatgggcagaggcatgaagagagtgtag

SEQ ID NO: 93524 - DNA, 306 bp, synthetic construct
  misc_feature 1..306: note = Description of Artificial Sequence: Synthetic coding sequence
  source 1..306: mol_type = other DNA
atgagcagcgccgccggcttctgcgccagcagacccggcctgctgttcctgggcctgctgctgctgcccctggtggtggccttcgccagcgccgaggccgaggaggacggcgacctgcagtgcctgtgcgtgaagaccaccagccaggtgagacccagacacatcaccagcctggaggtgatcaaggccggcccccactgccccaccgcccagctgatcgccaccctgaagaacggcagaaagatctgcctggacctgcaggcccccctgtacaagaagatcatcaagaagctgctggagagctag

SEQ ID NO: 93525 - DNA, 405 bp, synthetic construct
  misc_feature 1..405: note = Description of Artificial Sequence: Synthetic coding sequence
  source 1..405: mol_type = other DNA
atgaagagcctgacctggatcctgggcctgtgggccctggccgcctgcttcacccccggcgagagccagagaggccccagaggcccctacccccccggccccctggccccccccccccccccctgcttccccttcggcaccggcttcgtgccccccccccacccccccccctacggccccggcagattccccccccccctgagccccccctacggccccggcagaatcccccccagccccccccccccctacggccccggcagaatccagagccacagcctgccccccccctacggccccggctacccccagccccccagccagcccagaccctacccccccggcccccccttcttccccgtgaacagccccaccgaccccgccctgcccacccccgccccctag

SEQ ID NO: 93526 - DNA, 399 bp, synthetic construct
  misc_feature 1..399: note = Description of Artificial Sequence: Synthetic coding sequence
  source 1..399: mol_type = other DNA
atgagccagggcgacagcaaccccgccgccatcccccacgccgccgaggacatccagggcgacgacagatggatgagccagcacaacagattcgtgctggactgcaaggacaaggagcccgacgtgctgttcgtgggcgacagcatggtgcagctgatgcagcagtacgagatctggagagagctgttcagccccctgcacgccctgaacttcggcatcggcggcgacaccaccagacacgtgctgtggagactgaagaacggcgagctggagaacatcaagcccaaggtgatcgtggtgtgggtgggcaccaacaaccacgagaacaccgccgaggaggtggccggcggcatcgaggccatcgtgcagctgatcaacaccagacagccccaggcctag

SEQ ID NO: 93527 - DNA, 690 bp, synthetic construct
  misc_feature 1..690: note = Description of Artificial Sequence: Synthetic coding sequence
  source 1..690: mol_type = other DNA
atgagccagggcgacagcaaccccgccgccatcccccacgccgccgaggacatccagggcgacgacagatggatgagccagcacaacagattcgtgctggactgcaaggacaaggagcccgacgtgctgttcgtgggcgacagcatggtgcagctgatgcagcagtacgagatctggagagagctgttcagccccctgcacgccctgaacttcggcatcggcggcgacaccaccagacacgtgctgtggagactgaagaacggcgagctggagaacatcaagcccaaggtgatcgtggtgtgggtgggcaccaacaaccacgagaacaccgccgaggaggtggccggcggcatcgaggccatcgtgcagctgatcaacaccagacagccccaggccaagatcatcgtgctgggcctgctgcccagaggcgagaagcccaaccccctgagacagaagaacgccaaggtgaaccagctgctgaaggtgagcctgcccaagctggccaacgtgcagctgctggacaccgacggcggcttcgtgcacagcgacggcgccatcagctgccacgacatgttcgacttcctgcacctgaccggcggcggctacgccaagatctgcaagcccctgcacgagctgatcatgcagctgctggaggagacccccgaggagaagcagaccaccatcgcctag

SEQ ID NO: 93528 - DNA, 468 bp, synthetic construct
  misc_feature 1..468: note = Description of Artificial Sequence: Synthetic coding sequence
  source 1..468: mol_type = other DNA
atgagccagggcgacagcaaccccgccgccatcccccacgccgccgaggacatccagggcgacgacagatggatgagccagcacaacagattcgtgctggactgcaaggacaaggagcccgacgtgctgttcgtgggcgacagcatggtgcagctgatgcagcagtacgagatctggagagagctgttcagccccctgcacgccctgaacttcggcatcggcggcgacaccaccagacacgtgctgtggagactgaagaacggcgagctggagaacatcaagcccaaggtgatcgtggtgtgggtgggcaccaacaaccacgagaacaccgccgaggaggtggccggcggcatcgaggccatcgtgcagctgatcaacaccagacagccccaggccaagatcatcgtgctgatcatctactggcaggacgagcaggactaccacgagagaaaggtgcagatggactag

SEQ ID NO: 93529 - DNA, 609 bp, synthetic construct
  misc_feature 1..609: note = Description of Artificial Sequence: Synthetic coding sequence
  source 1..609: mol_type = other DNA
atgagccagggcgacagcaaccccgccgccatcccccacgccgccgaggacatccagggcgacgacagatggatgagccagcacaacagattcgtgctggactgcaaggacaaggagcccgacgtgctgttcgtgggcgacagcatggtgcagctgatgcagcagtacgagatctggagagagctgttcagccccctgcacgccctgaacttcggcatcggcggcgacaccaccagacacgtgctgtggagactgaagaacggcgagctggagaacatcaagcccaaggtgatcgtggtgtgggtgggcaccaacaaccacgagaacaccgccgaggaggtggccggcggcatcgaggccatcgtgcagctgatcaacaccagacagccccaggccaagatcatcgtgctgggcaaggccgccgccagcaagtacagcatcagcgagatcgtgagactggagcagggcagcgtgaactggagcatcggcacctaccccgacgacacccccgccaccaccagacccgccatcctgcagctgttcaccggcaagatgagcagaatcaccatgaaggagaagagcagatggaccgaggagatcctgcactag

SEQ ID NO: 93530 - DNA, 696 bp, synthetic construct
  misc_feature 1..696: note = Description of Artificial Sequence: Synthetic coding sequence
  source 1..696: mol_type = other DNA
atgagcggcgaggagaaccccgccagcaagcccacccccgtgcaggacgtgcagggcgacggcagatggatgagcctgcaccacagattcgtggccgacagcaaggacaaggagcccgaggtggtgttcatcggcgacagcctggtgcagctgatgcaccagtgcgagatctggagagagctgttcagccccctgcacgccctgaacttcggcatcggcggcgacggcacccagcacgtgctgtggagactggagaacggcgagctggagcacatcagacccaagatcgtggtggtgtgggtgggcaccaacaaccacggccacaccgccgagcaggtgaccggcggcatcaaggccatcgtgcagctggtgaacgagagacagccccaggccagagtggtggtgctgggcctgctgcccagaggccagcaccccaaccccctgagagagaagaacagacaggtgaacgagctggtgagagccgccctggccggccaccccagagcccacttcctggacgccgaccccggcttcgtgcacagcgacggcaccatcagccaccacgacatgtacgactacctgcacctgagcagactgggctacacccccgtgtgcagagccctgcacagcctgctgctgagactgctggcccaggaccagggccagggcgcccccctgctggagcccgccccctag

SEQ ID NO: 93531 - DNA, 696 bp, synthetic construct; identical to SEQ ID NO: 93530
  misc_feature 1..696: note = Description of Artificial Sequence: Synthetic coding sequence
  source 1..696: mol_type = other DNA

SEQ ID NO: 93532 - DNA, 720 bp, synthetic construct
  misc_feature 1..720: note = Description of Artificial Sequence: Synthetic coding sequence
  source 1..720: mol_type = other DNA
atgaccatcaagctgtgggacttccagggcttcgagtgcatcagaaccatgcacggccacgaccacaacgtgagcagcgtggccatcatgcccaacggcgaccacatcgtgagcgccagcagagacaagaccatcaagatgtgggaggtgcagaccggctactgcgtgaagaccttcaccggccacagagagtgggtgagaatggtgagacccaaccaggacggcaccctgatcgccagctgcagcaacgaccagaccgtgagagtgtgggtggtggccaccaaggagtgcaaggccgagctgagagagcacgagcacgtggtggagtgcatcagctgggcccccgagagcagctacagcagcatcagcgaggccaccggcagcgagaccaagaagagcggcaagcccggccccttcctgctgagcggcagcagagacaagaccatcaagatgtgggacgtgagcaccggcatgtgcctgatgaccctggtgggccacgacaactgggtgagaggcgtgctgttccacagcggcggcaagttcatcctgagctgcgccgacgacaagaccctgagagtgtgggactacaagaacaagagatgcatgaagaccctgaacgcccacgagcacttcgtgaccagcctggacttccacaagaccgccccctacgtggtgaccggcagcgtggaccagaccgtgaaggtgtgggagtgcagatag

SEQ ID NO: 93533 - DNA, 1233 bp, synthetic construct
  misc_feature 1..1233: note = Description of Artificial Sequence: Synthetic coding sequence
  source 1..1233: mol_type = other DNA
atggtgctgagccagagacagagagacgagctgaacagagccatcgccgactacctgagaagcaacggctacgaggaggcctacagcgtgttcaagaaggaggccgagctggacgtgaacgaggagctggacaagaagtacgccggcctgctggagaagaagtggaccagcgtgatcagactgcagaagaaggtgatggagctggagagcaagctgaacgaggccaaggaggagttcaccagcggcggccccctgggccagaagagagaccccaaggagtggatccccagaccccccgagaagtacgccctgagcggccacagaagccccgtgaccagagtgatcttccaccccgtgttcagcgtgatggtgagcgccagcgaggacgccaccatcaaggtgtgggactacgagaccggcgacttcgagagaaccctgaagggccacaccgacagcgtgcaggacatcagcttcgaccacagcggcaagctgctggccagctgcagcgccgacatgaccatcaagctgtgggacttccagggcttcgagtgcatcagaaccatgcacggccacgaccacaacgtgagcagcgtggccatcatgcccaacggcgaccacatcgtgagcgccagcagagacaagaccatcaagatgtgggaggtgcagaccggctactgcgtgaagaccttcaccggccacagagagtgggtgagaatggtgagacccaaccaggacggcaccctgatcgccagctgcagcaacgaccagaccgtgagagtgtgggtggtggccaccaaggagtgcaaggccgagctgagagagcacgagcacgtggtggagtgcatcagctgggcccccgagagcagctacagcagcatcagcgaggccaccggcagcgagaccaagaagagcggcaagcccggccccttcctgctgagcggcagcagagacaagaccatcaagatgtgggacgtgagcaccggcatgtgcctgatgaccctggtgggccacgacaactgggtgagaggcgtgctgttccacagcggcggcaagttcatcctgagctgcgccgacgacaagaccctgagagtgtgggactacaagaacaagagatgcatgaagaccctgaacgcccacgagcacttcgtgaccagcctggacttccacaagaccgccccctacgtggtgaccggcagcgtggaccagaccgtgaaggtgtgggagtgcagatag

SEQ ID NO: 93534 - DNA, 618 bp, synthetic construct
  misc_feature 1..618: note = Description of Artificial Sequence: Synthetic coding sequence
  source 1..618: mol_type = other DNA
atgaccatcaagctgtgggacttccagggcttcgagtgcatcagaaccatgcacggccacgaccacaacgtgagcagcgtggccatcatgcccaacggcgaccacatcgtgagcgccagcagagacaagaccatcaagatgtgggaggtgcagaccggctactgcgtgaagaccttcaccggccacagagagtgggtgagaatggtgagacccaaccaggacggcaccctgatcgccagctgcagcaacgaccagaccgtgagagtgtgggtggtggccaccaaggagtgcaaggccgagctgagagagcacgagcacgtggtggagtgcatcagctgggcccccgagagcagctacagcagcatcagcgaggccaccggcagcgaggtgggccacgacaactgggtgagaggcgtgctgttccacagcggcggcaagttcatcctgagctgcgccgacgacaagaccctgagagtgtgggactacaagaacaagagatgcatgaagaccctgaacgcccacgagcacttcgtgaccagcctggacttccacaagaccgccccctacgtggtgaccggcagcgtggaccagaccgtgaaggtgtgggagtgcagatag

SEQ ID NO: 93535 - DNA, 1029 bp, synthetic construct
  misc_feature 1..1029: note = Description of Artificial Sequence: Synthetic coding sequence
  source 1..1029: mol_type = other DNA
atggagccccacgacagcagccacatggacagcgagttcagatacaccctgttccccatcgtgtacagcatcatcttcgtgctgggcgtgatcgccaacggctacgtgctgtgggtgttcgccagactgtacccctgcaagaagttcaacgagatcaagatcttcatggtgaacctgaccatggccgacatgctgttcctgatcaccctgcccctgtggatcgtgtactaccagaaccagggcaactggatcctgcccaagttcctgtgcaacgtggccggctgcctgttcttcatcaacacctactgcagcgtggccttcctgggcgtgatcacctacaacagattccaggccgtgaccagacccatcaagaccgcccaggccaacaccagaaagagaggcatcagcctgagcctggtgatctgggtggccatcgtgggcgccgccagctacttcctgatcctggacagcaccaacaccgtgcccgacagcgccggcagcggcaacgtgaccagatgcttcgagcactacgagaagggcagcgtgcccgtgctgatcatccacatcttcatcgtgttcagcttcttcctggtgttcctgatcatcctgttctgcaacctggtgatcatcagaaccctgctgatgcagcccgtgcagcagcagagaaacgccgaggtgaagagaagagccctgtggatggtgtgcaccgtgctggccgtgttcatcatctgcttcgtgccccaccacgtggtgcagctgccctggaccctggccgagctgggcttccaggacagcaagttccaccaggccatcaacgacgcccaccaggtgaccctgtgcctgctgagcaccaactgcgtgctggaccccgtgatctactgcttcctgaccaagaagttcagaaagcacctgaccgagaagttctacagcatgagaagcagcagaaagtgcagcagagccaccaccgacaccgtgaccgaggtggtggtgcccttcaaccagatccccggcaacagcctgaagaactag

SEQ ID NO: 93536 - DNA, 1029 bp, synthetic construct; identical to SEQ ID NO: 93535
  misc_feature 1..1029: note = Description of Artificial Sequence: Synthetic coding sequence
  source 1..1029: mol_type = other DNA

SEQ ID NO: 93537 - DNA, 1029 bp, synthetic construct; identical to SEQ ID NO: 93535
  misc_feature 1..1029: note = Description of Artificial Sequence: Synthetic coding sequence
  source 1..1029: mol_type = other DNA

SEQ ID NO: 93538 - DNA, 1128 bp, synthetic construct
  misc_feature 1..1128: note = Description of Artificial Sequence: Synthetic coding sequence
  source 1..1128: mol_type = other DNA
atgaaggtgtggctgctgctgggcctgctgctggtgcacgaggccctggaggacgtgaccggccagcacctgcccaagaacaagagacccaaggagcccggcgagaacagaatcaagcccaccaacaagaaggtgaagcccaagatccccaagatgaaggacagagacagcgccaacagcgcccccaagacccagagcatcatgatgcaggtgctggacaagggcagattccagaagcccgccgccaccctgagcctgctggccggccagaccgtggagctgagatgcaagggcagcagaatcggctggagctaccccgcctacctggacaccttcaaggacagcagactgagcgtgaagcagaacgagagatacggccagctgaccctggtgaacagcaccagcgccgacaccggcgagttcagctgctgggtgcagctgtgcagcggctacatctgcagaaaggacgaggccaagaccggcagcacctacatcttcttcaccgagaagggcgagctgttcgtgcccagccccagctacttcgacgtggtgtacctgaaccccgacagacaggccgtggtgccctgcagagtgaccgtgctgagcgccaaggtgaccctgcacagagagttccccgccaaggagatccccgccaacggcaccgacatcgtgtacgacatgaagagaggcttcgtgtacctgcagccccacagcgagcaccagggcgtggtgtactgcagagccgaggccggcggcagaagccagatcagcgtgaagtaccagctgctgtacgtggccgtgcccagcggcccccccagcaccaccatcctggccagcagcaacaaggtgaagagcggcgacgacatcagcgtgctgtgcaccgtgctgggcgagcccgacgtggaggtggagttcacctggatcttccccggccagaaggacgagagacccgtgaccatccaggacacctggagactgatccacagaggcctgggccacaccaccagaatcagccagagcgtgatcaccgtggaggacttcgagaccatcgacgccggctactacatctgcaccgcccagaacctgcagggccagaccaccgtggccaccaccgtggagttcagctag

SEQ ID NO: 93539 - DNA, 1128 bp, synthetic construct; identical to SEQ ID NO: 93538
  misc_feature 1..1128: note = Description of Artificial Sequence: Synthetic coding sequence
  source 1..1128: mol_type = other DNA

SEQ ID NO: 93540 - DNA, 1128 bp, synthetic construct; identical to SEQ ID NO: 93538
  misc_feature 1..1128: note = Description of Artificial Sequence: Synthetic coding sequence
  source 1..1128: mol_type = other DNA

SEQ ID NO: 93541 - DNA, 3075 bp, synthetic construct
  misc_feature 1..3075: note = Description of Artificial Sequence: Synthetic coding sequence
  source 1..3075: mol_type = other DNA
atggcccagggcgccatgagattctgcagcgagggcgactgcgccatcagcccccccagatgccccagaagatggctgcccgagggccccgtgccccagagcccccccgccagcatgtacggcagcaccggcagcctgctgagaagagtggccggccccggccccagaggcagagagctgggcagagtgaccgccccctgcacccccctgagaggcccccccagccccagagtggcccccagcccctgggcccccagcagccccaccggccagcccccccccggcgcccagagcagcgtggtgatcttcagattcgtggagaaggccagcgtgagacccctgaacggcctgcccgcccccggcggcctgagcagaagctgggacctgggcggcgtgagcccccccagacccacccccgccctgggccccggcagcaacagaaagctgagactggaggccagcaccagcgaccccctgcccgccagaggcggcagcgccctgcccggcagcagaaacctggtgcacggcccccccgcccccccccaggtgggcgccgacggcctgtacagcagcctgcccaacggcctgggcggcccccccgagagactggccaccctgttcggcggccccgccgacaccggcttcctgaaccagggcgacacctggagcagccccagagaggtgagcagccacgcccagagaatcgccagagccaagtgggagttcttctacggcagcctggacccccccagcagcggcgccaagccccccgagcaggccccccccagcccccccggcgtgggcagcagacagggcagcggcgtggccgtgggcagagccgccaagtacagcgagaccgacctggacaccgtgcccctgagatgctacagagagaccgacatcgacgaggtgctggccgagagagaggaggccgacagcgccatcgagagccagcccagcagcgagggcccccccggcaccgcctacccccccgcccccagacccggccccctgcccggcccccaccccagcctgggcagcggcaacgaggacgaggacgacgacgaggccggcggcgaggaggacgtggacgacgaggtgttcgaggccagcgagggcgccagacccggcagcagaatgcccctgaagagccccgtgcccttcctgcccggcaccagccccagcgccgacggccccgacagcttcagctgcgtgttcgaggccatcctggagagccacagagccaagggcaccagctacaccagcctggccagcctggaggccctggccagccccggccccacccagagccccttcttcaccttcgagctgcccccccagccccccgcccccagacccgacccccccgcccccgcccccctggcccccctggagcccgacagcggcaccagcagcgccgccgacggcccctggacccagagaggcgaggaggaggaggccgaggccagagccaagctggcccccggcagagagccccccagcccctgccacagcgaggacagcctgggcctgggcgccgcccccctgggcagcgagccccccctgagccagctggtgagcgacagcgacagcgagctggacagcaccgagagactggccctgggcagcaccgacaccctgagcaacggccagaaggccgacctggaggccgcccagagactggccaagagactgtacagactggacggcttcagaaaggccgacgtggccagacacctgggcaagaacaacgacttcagcaagctggtggccggcgagtacctgaagttcttcgtgttcaccggcatgaccctggaccaggccctgagagtgttcctgaaggagctggccctgatgggcgagacccaggagagagagagagtgctggcccacttcagccagagatacttccagtgcaaccccgaggccctgagcagcgaggacggcgcccacaccctgacctgcgccctgatgctgctgaacaccgacctgcacggccacaacatcggcaagagaatgacctgcggcgacttcatcggcaacctggagggcctgaacgacggcggcgacttccccagagagctgctgaaggccctgtacagcagcatcaagaacgagaagctgcagtgggccatcgacgaggaggagctgagaagaagcctgagcgagctggccgaccccaaccccaaggtgatcaagagaatcagcggcggcagcggcagcggcagcagccccttcctggacctgacccccgagcccggcgccgccgtgtacaagcacggcgccctggtgagaaaggtgcacgccgaccccgactgcagaaagacccccagaggcaagagaggctggaagagcttccacggcatcctgaagggcatgatcctgtacctgcagaaggaggagtacaagcccggcaaggccctgagcgagaccgagctgaagaacgccatcagcatccaccacgccctggccaccagagccagcgactacagcaagagaccccacgtgttctacctgagaaccgccgactggagagtgttcctgttccaggcccccagcctggagcagatgcagagctggatcaccagaatcaacgtggtggccgccatgttcagcgccccccccttccccgccgccgtgagcagccagaagaagttcagcagacccctgctgcccagcgccgccaccagactgagccaggaggagcaggtgagaacccacgaggccaagctgaaggccatggccagcgagctgagagagcacagagccgcccagctgggcaagaagggcagaggcaaggaggccgaggagcagagacagaaggaggcctacctggagttcgagaagagcagatacagcacctacgccgccctgctgagagtgaagctgaaggccggcagcgaggagctggacgccgtggaggccgccctggcccaggccggcagcaccgaggacggcctgccccccagccacagcagccccagcctgcagcccaagcccagcagccagcccagagcccagagacacagcagcgagcccagacccggcgccggcagcggcagaagaaagccctag

SEQ ID NO: 93542 - DNA, 3075 bp, synthetic construct; identical to SEQ ID NO: 93541
  misc_feature 1..3075: note = Description of Artificial Sequence: Synthetic coding sequence
  source 1..3075: mol_type = other DNA

SEQ ID NO: 93543 - DNA, 2784 bp, synthetic construct
  misc_feature 1..2784: note = Description of Artificial Sequence: Synthetic coding sequence
  source 1..2784: mol_type = other DNA
cagatctggagatgccccctgcagcaccacgccgagagcgccccccccctgcccgccctgagctgggcccagcccctgctgtgcctgagcagcgtgagcgccctgggcgagcagagacccacccccgccctgggccccggcagcaacagaaagctgagactggaggccagcaccagcgaccccctgcccgccagaggcggcagcgccctgcccggcagcagaaacctggtgcacggcccccccgcccccccccaggtgggcgccgacggcctgtacagcagcctgcccaacggcctgggcggcccccccgagagactggccaccctgttcggcggccccgccgacaccggcttcctgaaccagggcgacacctggagcagccccagagaggtgagcagccacgcccagagaatcgccagagccaagtgggagttcttctacggcagcctggacccccccagcagcggcgccaagccccccgagcaggccccccccagcccccccggcgtgggcagcagacagggcagcggcgtggccgtgggcagagccgccaagtacagcgagaccgacctggacaccgtgcccctgagatgctacagagagaccgacatcgacgaggtgctggccgagagagaggaggccgacagcgccatcgagagccagcccagcagcgagggcccccccggcaccgcctacccccccgcccccagacccggccccctgcccggcccccaccccagcctgggcagcggcaacgaggacgaggacgacgacgaggccggcggcgaggaggacgtggacgacgaggtgttcgaggccagcgagggcgccagacccggcagcagaatgcccctgaagagccccgtgcccttcctgcccggcaccagccccagcgccgacggccccgacagcttcagctgcgtgttcgaggccatcctggagagccacagagccaagggcaccagctacaccagcctggccagcctggaggccctggccagccccggccccacccagagccccttcttcaccttcgagctgcccccccagccccccgcccccagacccgacccccccgcccccgcccccctggcccccctggagcccgacagcggcaccagcagcgccgccgacggcccctggacccagagaggcgaggaggaggaggccgaggccagagccaagctggcccccggcagagagccccccagcccctgccacagcgaggacagcctgggcctgggcgccgcccccctgggcagcgagccccccctgagccagctggtgagcgacagcgacagcgagctggacagcaccgagagactggccctgggcagcaccgacaccctgagcaacggccagaaggccgacctggaggccgcccagagactggccaagagactgtacagactggacggcttcagaaaggccgacgtggccagacacctgggcaagaacaacgacttcagcaagctggtggccggcgagtacctgaagttcttcgtgttcaccggcatgaccctggaccaggccctgagagtgttcctgaaggagctggccctgatgggcgagacccaggagagagagagagtgctggcccacttcagccagagatacttccagtgcaaccccgaggccctgagcagcgaggacggcgcccacaccctgacctgcgccctgatgctgctgaacaccgacctgcacggccacaacatcggcaagagaatgacctgcggcgacttcatcggcaacctggagggcctgaacgacggcggcgacttccccagagagctgctgaaggccctgtacagcagcatcaagaacgagaagctgcagtgggccatcgacgaggaggagctgagaagaagcctgagcgagctggccgaccccaaccccaaggtgatcaagagaatcagcggcggcagcggcagcggcagcagccccttcctggacctgacccccgagcccggcgccgccgtgtacaagcacggcgccctggtgagaaaggtgcacgccgaccccgactgcagaaagacccccagaggcaagagaggctggaagagcttccacggcatcctgaagggcatgatcctgtacctgcagaaggaggagtacaagcccggcaaggccctgagcgagaccgagctgaagaacgccatcagcatccaccacgccctggccaccagagccagcgactacagcaagagaccccacgtgttctacctgagaaccgccgactggagagtgttcctgttccaggcccccagcctggagcagatgcagagctggatcaccagaatcaacgtggtggccgccatgttcagcgccccccccttccccgccgccgtgagcagccagaagaagttcagcagacccctgctgcccagcgccgccaccagactgagccaggaggagcaggtgagaacccacgaggccaagctgaaggccatggccagcgagctgagagagcacagagccgcccagctgggcaagaagggcagaggcaaggaggccgaggagcagagacagaaggaggcctacctggagttcgagaagagcagatacagcacctacgccgccctgctgagagtgaagctgaaggccggcagcgaggagctggacgccgtggaggccgccctggcccaggccggcagcaccgaggacggcctgccccccagccacagcagccccagcctgcagcccaagcccagcagccagcccagagcccagagacacagcagcgagcccagacccggcgccggcagcggcagaagaaagccctag

SEQ ID NO: 93544 - DNA, 1542 bp, synthetic construct
  misc_feature 1..1542: note = Description of Artificial Sequence: Synthetic coding sequence
  source 1..1542: mol_type = other DNA
atgggcagcagctggtgcctgtacggctgctgcaacgccggcgtgaagaccaccagactggaggcccacagcgagatgggcagcaccgagatcctggagaaggagacccccgagaacctgagcaacggcaccagcagcaacgtggaggccgccaagagactggccaagagactgtaccagctggacagattcaagagaagcgacgtggccaagcacctgggcaagaacaacgagttcagcaagctggtggccgaggagtacctgaagttcttcgacttcaccggcatgaccctggaccagagcctgagatacttcttcaaggccttcagcctggtgggcgagacccaggagagagagagagtgctgatccacttcagcaacagatacttctactgcaaccccgacaccatcgccagccaggacggcgtgcactgcctgacctgcgccatcatgctgctgaacaccgacctgcacggccacaacatcggcaagaagatgacctgccaggagttcatcgccaacctgcagggcgtgaacgagggcgtggacttcagcaaggacctgctgaaggccctgtacaacagcatcaagaacgagaagctggagtgggccgtggacgacgaggagaagaagaagagccccagcgagagcaccgaggagaaggccaacggcacccaccccaagaccatcagcagaatcggcagcaccaccaaccccttcctggacatcccccacgaccccaacgccgccgtgtacaagagcggcttcctggccagaaagatccacgccgacatggacggcaagaagacccccagaggcaagagaggctggaagaccttctacgccgtgctgaagggcaccgtgctgtacctgcagaaggacgagtacaagcccgagaaggccctgagcgaggaggacctgaagaacgccgtgagcgtgcaccacgccctggccagcaaggccaccgactacgagaagaagcccaacgtgttcaagctgaagaccgccgactggagagtgctgctgttccagacccagagccccgaggagatgcagggctggatcaacaagatcaactgcgtggccgccgtgttcagcgccccccccttccccgccgccatcggcagccagaagaagttcagcagacccctgctgcccgccaccaccaccaagctgagccaggaggagcagctgaagagccacgagagcaagctgaagcagatcaccaccgagctggccgagcacagaagctacccccccgacaagaaggtgaaggccaaggacgtggacgagtacaagctgaaggaccactacctggagttcgagaagaccagatacgagatgtacgtgagcatcctgaaggagggcggcaaggagctgctgagcaacgacgagagcgaggccgccggcctgaagaagagccacagcagccccagcctgaaccccgacaccagccccatcaccgccaaggtgaagagaaacgtgagcgagagaaaggaccacagacccgagacccccagcatcaagcagaaggtgacctag

SEQ ID NO: 93545 - DNA, 3144 bp, synthetic construct
  misc_feature 1..3144: note = Description of Artificial Sequence: Synthetic coding sequence
  source 1..3144: mol_type = other DNA
atggagggcagaagcgccgccgccgagaccttcgtgtgggtgaacaacgccagcgcccacagccagagcgtggccaaggccaagtacgagttcctgttcggcagaagcgagggcaaggcccccgacaccagcgaccacggcggcagcaccctgctgccccccaacgtgaccaacgagttccccgagtacggcaccatggaggagggcggcgagggcctgagagccagcctggagttcgacggcgaggccctgccctgccacccccaggagcagcagggcgtgcagcccctgaccggctgccacagcggcctggacagcgtgaccgagggccccaaggacgtgagagaggcccccagccagagccacctgaaggagcagagcctgcagcccatcgacagcctgatcagcgccctgaaggccaccgaggccagaatcatcagcggcaccctgcaggccaccaaggtgctggaccaggacgccgtgagcagcttcagcgtgcagcaggtggagaaggagctggacaccgccagcagaaagacccagagagtgaacaagaccctgcccgccggccagaagaacctgcccgagatccccctgagcgccgaggtgaccaccgaggagagcttctacctgagcatccagaaggacctgaccgccctgctgaccggcgacacccaggccgagatcagccagatcatgaacaacggcagaaagggcgccgtgtgcgtgcaggagcccagctgccccctggccagcctgggcagcagcgccgtgacctgccacagcgccggcagcgtgggcttcctgaaggagcagagaagcgccctgggcagagagcaccccggcggctgcgacagaagcagcagcatgggcagacccggcagagtgaagcacgtggagttccagggcgtggagatcctgtggaccggcggcgacaagagagagacccagcaccccatcgacttcgagaccagcctgcagagaaccgccagccccgacagcaaggagagcagcaaggtgcccagacacctgatcagcagcgccggcctgtgcaacagcagcagcctgaccgagaacgtgtgggacgagagctggaaggcccccagcgagagacccggcaccagcagcggcaccttcagccccgtgagactggacgagagcggcgaggacgaggtgttcctgcaggagaacaagcagcacctggagaagacccccaagcccgagagagacagagagagaatcagcgagcaggaggagcacgtgaagggcgaggacgaggacatcctgggccccggctacaccgaggacagcaccgacgtgtacagcagccagttcgagaccatcctggacaacaccagcctgtactacagcgccgagagcctggagaccctgtacagcgagcccgacagctacttcagcttcgagatgcccctgacccccatgatccagcagagaatcaaggagggcggccagttcctggagagaaccagcggcggcggccaccaggacatcctgagcgtgagcgccgacggcggcatcgtgatgggctacagcagcggcgtgaccaacggcctgaacgacgccagcgacagcatctacaccaagggcacccccgagatcgccttctggggcagcaacgccggcgtgaagaccaccagactggaggcccacagcgagatgggcagcaccgagatcctggagaaggagacccccgagaacctgagcaacggcaccagcagcaacgtggaggccgccaagagactggccaagagactgtaccagctggacagattcaagagaagcgacgtggccaagcacctgggcaagaacaacgagttcagcaagctggtggccgaggagtacctgaagttcttcgacttcaccggcatgaccctggaccagagcctgagatacttcttcaaggccttcagcctggtgggcgagacccaggagagagagagagtgctgatccacttcagcaacagatacttctactgcaaccccgacaccatcgccagccaggacggcgtgcactgcctgacctgcgccatcatgctgctgaacaccgacctgcacggccacaacatcggcaagaagatgacctgccaggagttcatcgccaacctgcagggcgtgaacgagggcgtggacttcagcaaggacctgctgaaggccctgtacaacagcatcaagaacgagaagctggagtgggccgtggacgacgaggagaagaagaagagccccagcgagagcaccgaggagaaggccaacggcacccaccccaagaccatcagcagaatcggcagcaccaccaaccccttcctggacatcccccacgaccccaacgccgccgtgtacaagagcggcttcctggccagaaagatccacgccgacatggacggcaagaagacccccagaggcaagagaggctggaagaccttctacgccgtgctgaagggcaccgtgctgtacctgcagaaggacgagtacaagcccgagaaggccctgagcgaggaggacctgaagaacgccgtgagcgtgcaccacgccctggccagcaaggccaccgactacgagaagaagcccaacgtgttcaagctgaagaccgccgactggagagtgctgctgttccagacccagagccccgaggagatgcagggctggatcaacaagatcaactgcgtggccgccgtgttcagcgccccccccttccccgccgccatcggcagccagaagaagttcagcagacccctgctgcccgccaccaccaccaagctgagccaggaggagcagctgaagagccacgagagcaagctgaagcagatcaccaccgagctggccgagcacagaagctacccccccgacaagaaggtgaaggccaaggacgtggacgagtacaagctgaaggaccactacctggagttcgagaagaccagatacgagatgtacgtgagcatcctgaaggagggcggcaaggagctgctgagcaacgacgagagcgaggccgccggcctgaagaagagccacagcagccccagcctgaaccccgacaccagccccatcaccgccaaggtgaagagaaacgtgagcgagagaaaggaccacagacccgagacccccagcatcaagcagaaggtgacctag

SEQ ID NO: 93546 - DNA, 810 bp, synthetic construct
  misc_feature 1..810: note = Description of Artificial Sequence: Synthetic coding sequence
  source 1..810: mol_type = other DNA
atgatcggcgtgaacagcgtgcagagcgccagcaaggtgagagtgagaaccagcggcagcgtgaagtacagcagagaggacagcatcagaagacagagccacagaagcaagagcatgaagatcagcaacagcagcgagttcagcgccaaggagaacaaggccctgtacaacagcatcaagaacgagaagctggagtgggccgtggacgacgaggagaagaagaagagccccagcgagagcaccgaggagaaggccaacggcacccaccccaagaccatcagcagaatcggcagcaccaccaaccccttcctggacatcccccacgaccccaacgccgccgtgtacaagagcggcttcctggccagaaagatccacgccgacatggacggcaagaagacccccagaggcaagagaggctggaagaccttctacgccgtgctgaagggcaccgtgctgtacctgcagaagcacgagagcaagctgaagcagatcaccaccgagctggccgagcacagaagctacccccccgacaagaaggtgaaggccaaggacgtggacgagtacaagctgaaggaccactacctggagttcgagaagaccagatacgagatgtacgtgagcatcctgaaggagggcggcaaggagctgctgagcaacgacgagagcgaggccgccggcctgaagaagagccacagcagccccagcctgaaccccgacaccagccccatcaccgccaaggtgaagagaaacgtgagcgagagaaaggaccacagacccgagacccccagcatcaagcagaaggtgacctag

SEQ ID NO: 93547 - DNA, 3150 bp, synthetic construct
  misc_feature 1..3150: note = Description of Artificial Sequence: Synthetic coding sequence
  source 1..3150: mol_type = other DNA
atggagggcagaagcgccgccgccgagaccttcgtgtgggtgaacaacgccagcgcccacagccagagcgtggccaaggccaagtacgagttcctgttcggcagaagcgagggcaaggcccccgacaccagcgaccacggcggcagcaccctgctgccccccaacgtgaccaacgagttccccgagtacggcaccatggaggagggcggcgagggcctgagagccagcctggagttcgacggcgaggccctgccctgccacccccaggagcagcagggcgtgcagcccctgaccggctgccacagcggcctggacagcgtgaccgagggccccaaggacgtgagagaggcccccagccagagccacctgaaggagcagagcctgcagcccatcgacagcctgatcagcgccctgaaggccaccgaggccagaatcatcagcggcaccctgcaggccaccaaggtgctggaccaggacgccgtgagcagcttcagcgtgcagcaggtggagaaggagctggacaccgccagcagaaagacccagagagtgaacaagaccctgcccgccggccagaagaacctgcccgagatccccctgagcgccgaggtgaccaccgaggagagcttctacctgagcatccagaaggacctgaccgccctgctgaccggcgacacccaggccgagatcagccagatcatgaacaacggcagaaagggcgccgtgtgcgtgcaggagcccagctgccccctggccagcctgggcagcagcgccgtgacctgccacagcgccggcagcgtgggcttcctgaaggagcagagaagcgccctgggcagagagcaccccggcggctgcgacagaagcagcagcatgggcagacccggcagagtgaagcacgtggagttccagggcgtggagatcctgtggaccggcggcgacaagagagagacccagcaccccatcgacttcgagaccagcctgcagagaaccgccagccccgacagcaaggagagcagcaaggtgcccagacacctgatcagcagcgccggcctgtgcaacagcagcagcctgaccgagaacgtgtgggacgagagctggaaggcccccagcgagagacccggcaccagcagcggcaccttcagccccgtgagactggacgagagcggcgaggacgaggtgttcctgcaggagaacaagcagcacctggagaagacccccaagcccgagagagacagagagagaatcagcgagcaggaggagcacgtgaagggcgaggacgaggacatcctgggccccggctacaccgaggacagcaccgacgtgtacagcagccagttcgagaccatcctggacaacaccagcctgtactacagcgccgagagcctggagaccctgtacagcgagcccgacagctacttcagcttcgagatgcccctgacccccatgatccagcagagaatcaaggagggcggccagttcctggagagaaccagcggcggcggccaccaggacatcctgagcgtgagcgccgacggcggcatcgtgatgggctacagcagcggcgtgaccaacggcctgaacgacgccagcgacagcatctacaccaagggcacccccgagatcgccttctggggcagcaacgccggcgtgaagaccaccagactggaggcccacagcgagatgggcagcaccgagatcctggagaaggagacccccgagaacctgagcaacggcaccagcagcaacgtggaggccgccaagagactggccaagagactgtaccagctggacagattcaagagaagcgacgtggccaagcacctgggcaagaacaacgagttcagcaagctggtggccgaggagtacctgaagttcttcgacttcaccggcatgaccctggaccagagcctgagatacttcttcaaggccttcagcctggtgggcgagacccaggagagagagagagtgctgatccacttcagcaacagatacttctactgcaaccccgacaccatcgccagccaggacggcgtgcactgcctgacctgcgccatcatgctgctgaacaccgacctgcacggccacgtgagcaacatcggcaagaagatgacctgccaggagttcatcgccaacctgcagggcgtgaacgagggcgtggacttcagcaaggacctgctgaaggccctgtacaacagcatcaagaacgagaagctggagtgggccgtggacgacgaggagaagaagaagagccccagcgagagcaccgaggagaaggccaacggcacccaccccaagaccatcagcagaatcggcagcaccaccaaccccttcctggacatcccccacgaccccaacgccgccgtgtacaagagcggcttcctggccagaaagatccacgccgacatggacggcaagaagacccccagaggcaagagaggctggaagaccttctacgccgtgctgaagggcaccgtgctgtacctgcagaaggacgagtacaagcccgagaaggccctgagcgaggaggacctgaagaacgccgtgagcgtgcaccacgccctggccagcaaggccaccgactacgagaagaagcccaacgtgttcaagctgaagaccgccgactggagagtgctgctgttccagacccagagccccgaggagatgcagggctggatcaacaagatcaactgcgtggccgccgtgttcagcgccccccccttccccgccgccatcggcagccagaagaagttcagcagacccctgctgcccgccaccaccaccaagctgagccaggaggagcagctgaagagccacgagagcaagctgaagcagatcaccaccgagctggccgagcacagaagctacccccccgacaagaaggtgaaggccaaggacgtggacgagtacaagctgaaggaccactacctggagttcgagaagaccagatacgagatgtacgtgagcatcctgaaggagggcggcaaggagctgctgagcaacgacgagagcgaggccgccggcctgaagaagagccacagcagccccagcctgaaccccgacaccagccccatcaccgccaaggtgaagagaaacgtgagcgagagaaaggaccacagacccgagacccccagcatcaagcagaaggtgacctag

SEQ ID NO: 93548 - DNA, 3171 bp, synthetic construct
  misc_feature 1..3171: note = Description of Artificial Sequence: Synthetic coding sequence
  source 1..3171: mol_type = other DNA
atgatgggcgactacagactgcccgaccacccccagcccatggagatcctgaacctgtacctgggcgacagcctggagccccaccccggcgagtgccccagagagacctgcagccacgaggacccccccgagcccttcgaggagcagacctgggccaccgacccccccgagcccaccagacagaacgtgcccccctggggcagcggcgtggagctgacccacctgggcagctgggtgcaccaggacggcctggagccctgccaggagcagaccagagccaccgacccccccgagagcaccagacaggacgcccccccctggggcagcggcgtggagctgacccacctgggcagccccagcgcccagagagagcacagacagaacaccgccagccccggcagccccgtgaacagccacctgcccggcagccccaagcagaacagaagcaccagcacccaggtggtgttctgggccggcatcctgcaggcccagatgtgcgtgctggacctggaggaggagctggagaagaccgagggcctgaaggccggcctgaagtgctgcctgcccaccccccccgtggacctgcccggcgacaccggcctgcacagcagcccccccgagaacgaggacagcggcgaggacagcagcgagcccgagggcgagggccaggcctggctgagagagggcacccccgacagcagcccccagtggggcgccgaggaggagagcatgttcttcagcaaccccctgttcctggccagcccctgcagcgagaacagcgccagcggcgagtgcttcagctggggcgccagcgacagccacgccggcgtgagaaccggccccgagagccccgccaccctggagccccccctgcccgaggacaccgtgctgtgggagctggagagcgagcccgacctgggcgacggcgccgccatcagcggccactgcaccccccccttccccgtgcccatctacaagccccacagcatctgctgggccagcgtggccgccgccgagggcgcccccgccgccccccccggccacggcgagagcgagggcgacagactgggccccgcccccagcgccgccccctgcgtggacgaggccctgacctgggagagcggctgcgtgggcagcgacctgggccccgccgcccaccccgtgcagccctgggccagcctgagccccgagggctggcagagaggcggccccttctggccccaggtgaccctgaacagccaggacagagacgagagagagggcggccacccccaggagagcctgccctgcaccctggccccctgcccctggagaagccccgccagcagccccgagcccagcagccccgagagcgagagcagaggccccggccccagacccagccccgccagcagccaggagggcagcccccagctgcagcaccacagcagcggcatcctgcccaagtggaccctggacgccagccagagcagcctgctggagaccgacggcgagcagcccagcagcctgaagaagaaggaggccggcgaggcccccaagcccggcgaggaggtgaagagcgagggcaccgccagacccgccgagaccggcgacgtgcagcccgacatccacctgaccagcgccgagcacgagaacctgagaacccccatgaacagcagctggctgcccggcagccccatgccccaggcccagagccccgaggagggccagagaccccccgccggcgacaagctggccaacggcgtgagaaacaacaaggtggcctggaacctggccagcagactgtacagactggagggcttcagaaagagcgaggtggccgcctacctgcagaagaacaacgacttcagcagagccgtggccgaggagtacctgagcttcttccagttcggcggccagagcctggacagagccctgagaagcttcctgcaggccctggtgctgagcggcgagacccaggagagagagagaatcctgtaccagttcagcagaagattccaccactgcaaccccggcatcttccccagcgtggacagcgtgcacaccctgacctgcgccatcatgctgctgaacaccgacctgcacggccagaacatcggcaagagcatgagctgccaggagttcatcaccaacctgaacggcctgagagacggcggcaacttccccaaggagctgctgaaggccctgtactggagcatcagaagcgagaagctggagtgggccgtggacgaggaggacaccgccagacccgagaaggcccagcccagcctgcccgccggcaagatgagcaagcccttcctgcagctggcccaggaccccaccgtgcccacctacaagcagggcatcctggccagaaagatgcaccaggacgccgacggcaagaagaccccctggggcaagagaggctggaagatgttccacaccctgctgagaggcatggtgctgtacttcctgaagcagggcgaggaccactgcctggagggcgagagcctggtgggccagatggtggacgagcccgtgggcgtgcaccacagcctggccacccccgccacccactacaccaagaagccccacgtgttccagctgagaaccgccgactggagactgtacctgttccaggcccccaccgccaaggagatgagcagctggatcgccagaatcaacctggccgccgccacccacagcgccccccccttccccgccgccgtgggcagccagagaagattcgtgagacccatcctgcccgtgggccccgcccagagcagcctggaggagcagcacagaagccacgagaactgcctggacgccgccgccgacgacctgctggacctgcagagaaacctgcccgagagaagaggcagaggcagagagctggaggagcacagactgagaaaggagtacctggagtacgagaagaccagatacgagacctacgtgcagctgctggtggccagactgcactgccccagcgacgccctggacctgtgggaggagcagctgggcagagaggccggcggcaccagagagcccaagctgagcctgaagaagagccacagcagccccagcctgcaccaggacgaggcccccaccaccgccaaggtgaagagaaacatcagcgagagaagaacctacagaaagatcatccccaagagaaacagaaaccagctgtag

SEQ ID NO: 93549 - DNA, 1152 bp, synthetic construct
  misc_feature 1..1152: note = Description of Artificial Sequence: Synthetic coding sequence
  source 1..1152: mol_type = other DNA
atgccctacgtggacagacagaacagaatctgcggcttcctggacatcgaggagaacgagaacagcggcaagttcctgagaagatacttcatcctggacaccagagaggacagcttcgtgtggtacatggacaacccccagaacctgcccagcggcagcagcagagtgggcgccatcaagctgacctacatcagcaaggtgagcgacgccaccaagctgagacccaaggccgagttctgcttcgtgatgaacgccggcatgagaaagtacttcctgcaggccaacgaccagcaggacctggtggagtgggtgaacgtgctgaacaaggccatcaagatcaccgtgcccaagcagagcgacagccagcccaacagcgacaacctgagcagacacggcgagtgcggcaagaagcaggtgagctacagaaccgacatcgtgggcggcgtgcccatcatcacccccacccagaaggaggaggtgaacgagtgcggcgagagcatcgacagaaacaacctgaagagaagccagagccacctgccctacttcacccccaagcccccccaggacagcgccgtgatcaaggccggctactgcgtgaagcagggcgccgtgatgaagaactggaagagaagatacttccagctggacgagaacaccatcggctacttcaagagcgagctggagaaggagcccctgagagtgatccccctgaaggaggtgcacaaggtgcaggagtgcaagcagagcgacatcatgatgagagacaacctgttcgagatcgtgaccaccagcagaaccttctacgtgcaggccgacagccccgaggagatgcacagctggatcaaggccgtgagcggcgccatcgtggcccagagaggccccggcagaagcgccagcagcatgagacaggccagaagactgagcaacccctgcatccagagaagcatcccccccgtgctgcagaaccccaacaccctgagcgtgctgcccacccagcccccccccccccacatcccccagcccctggccgccaccctgtggagccagcccctgccctggagaagcgaggacttcaccagcctgctgcccagaagcagccagggcaccagcagaagcagactgagcctgcaggagaaccagctgcccaagtag

SEQ ID NO: 93550 - DNA, 1152 bp, synthetic construct; identical to SEQ ID NO: 93549
  misc_feature 1..1152: note = Description of Artificial Sequence: Synthetic coding sequence
  source 1..1152: mol_type = other DNA

SEQ ID NO: 93551 - DNA, 1215 bp, synthetic construct
  misc_feature 1..1215: note = Description of Artificial Sequence: Synthetic coding sequence
  source 1..1215: mol_type = other DNA
atgccctacgtggacagacagaacagaatctgcggcttcctggacatcgaggagaacgagaacagcggcaagttcctgagaagatacttcatcctggacaccagagaggacagcttcgtgtggtacatggacaacccccagaacctgcccagcggcagcagcagagtgggcgccatcaagctgacctacatcagcaaggtgagcgacgccaccaagctgagacccaaggccgagttctgcttcgtgatgaacgccggcatgagaaagtacttcctgcaggccaacgaccagcaggacctggtggagtgggtgaacgtgctgaacaaggccatcaagatcaccgtgcccaagcagagcgacagccagcccaacagcgacaacctgagcagacacggcgagtgcggcaagaagcaggtgagctacagaaccgacatcgtgggcggcgtgcccatcatcacccccacccagaaggaggaggtgaacgagtgcggcgagagcatcgacagaaacaacctgaagagaagccagagccacctgccctacttcacccccaagcccccccaggacagcgccgtgatcaaggccggctactgcgtgaagcagggcgccgtgatgaagaactggaagagaagatacttccagctggacgagaacaccatcggctacttcaagagcgagctggagaaggagcccctgagagtgatccccctgaaggaggtgcacaaggtgcaggagtgcaagcagagcgacatcatgatgagagacaacctgttcgagatcgtgaccaccagcagaaccttctacgtgcaggccgacagccccgaggagatgcacagctggatcaaggccgtgagcggcgccatcgtggcccagagaggccccggcagaagcgccagcagcgagcacccccccggccccagcgagagcaagcacgccttcagacccaccaacgccgccaccgccaccagccacagcaccgccagcagaagcaacagcctggtgagcaccttcaccatggagaagagaggcttctacgagagcctggccaaggtgaagcccggcaacttcaaggtgcagaccgtgagccccagagagcccgccagcaaggtgaccgagcaggccctgctgagaccccagagcaagaacggcccccaggagaaggactgcgacctggtggacctggacgacgccagcctgcccgtgagcgacgtgtag

SEQ ID NO: 93552 - DNA, 345 bp, synthetic construct
  misc_feature 1..345: note = Description of Artificial Sequence: Synthetic coding sequence
  source 1..345: mol_type = other DNA
atgccctacgtggacagacagaacagaatctgcggcttcctggacatcgaggagaacgagaacagcggcaagttcctgagaagatacttcatcctggacaccagagaggacagcttcgtgtggtacatggacaacccccagaacctgcccagcggcagcagcagagtgggcgccatcaagctgacctacatcagcaaggtgagcgacgccaccaagctgagacccaaggccgagttctgcttcgtgatgaacgccggcatgagaaagtacttcctgcaggccaacgaccagcaggacctggtggagtgggtgaacgtgctgaacaaggccatcaagatcacctag

SEQ ID NO: 93553 - DNA, 1215 bp, synthetic construct; identical to SEQ ID NO: 93551
  misc_feature 1..1215: note = Description of Artificial Sequence: Synthetic coding sequence
  source 1..1215: mol_type = other DNA

SEQ ID NO: 93554 - DNA, 1215 bp, synthetic construct; identical to SEQ ID NO: 93551
  misc_feature 1..1215: note = Description of Artificial Sequence: Synthetic coding sequence
  source 1..1215: mol_type = other DNA

SEQ ID NO: 93555 - DNA, 1005 bp, synthetic construct
  misc_feature 1..1005: note = Description of Artificial Sequence: Synthetic coding sequence
  source 1..1005: mol_type = other DNA
atgccctacgtggacagacagaacagaatctgcggcttcctggacatcgaggagaacgagaacagcggcaagttcctgagaagatacttcatcctggacaccagagaggacagcttcgtgtggtacatggacaacccccagaacctgcccagcggcagcagcagagtgggcgccatcaagctgacctacatcagcaaggtgagcgacgccaccaagctgagacccaaggccgagttctgcttcgtgatgaacgccggcatgagaaagtacttcctgcaggccaacgaccagcaggacctggtggagtgggtgaacgtgctgaacaaggccatcaagatcaccgtgcccaagcagagcgacagccagcccaacagcgacaacctgagcagacacggcgagtgcggcaagaagcaggtgagctacagaaccgacatcgtgggcggcgtgcccatcatcacccccacccagaaggaggaggtgaacgagtgcggcgagagcatcgacagaaacaacctgaagagaagccagagccacctgccctacttcacccccaagcccccccaggacagcgccgtgatcaaggccggctactgcgtgaagcagggcgccgtgatgaagaactggaagagaagatacttccagctggacgagaacaccatcggctacttcaagagcgagctggagaaggagcccctgagagtgatccccctgaaggaggtgcacaaggtgcaggagtgcaagcagagcgacatcatgatgagagacaacctgttcgagatcgtgaccaccagcagaaccttctacgtgcaggccgacagccccgaggagatgcacagctggatcaaggccgtgagcggcgccatcgtggcccagagaggccccggcagaagcgccagcagcatgagacaggccagaagactgagcaacccctgcatccagagatacaccagcagagccggcgagtgcagcacctacgtgggcagccacgccaacgtgcccagctag

SEQ ID NO: 93556 - DNA, 1278 bp, synthetic construct
  misc_feature 1..1278: note = Description of Artificial Sequence: Synthetic coding sequence
  source 1..1278: mol_type = other DNA
atgccctacgtggacagacagaacagaatctgcggcttcctggacatcgaggagcacgagaacagcggcaagttcctgagaagatacttcatcctggacacccaggccaactgcctgctgtggtacatggacaacccccagaacctggccatgggcgccggcgccgtgggcgccctgcagctgacctacatcagcaaggtgagcatcgccacccccaagcagaagcccaagacccccttctgcttcgtgatcaacgccctgagccagagatacttcctgcaggccaacgaccagaaggacatgaaggactgggtggaggccctgaaccaggccagcaagatcaccgtgcccaagggcggcggcctgcccatgaccaccgaggtgctgaagagcctggccgccccccccgccctggagaagaagccccaggtggcctacaagaccgagatcatcggcggcgtggtggtgcacacccccatcagccagaacggcggcgacggccaggagggcagcgagcccggcagccacaccatcctgagaagaagccagagctacatccccaccagcggctgcagagccagcaccggcccccccctgatcaagagcggctactgcgtgaagcagggcaacgtgagaaagagctggaagagaagattcttcgccctggacgacttcaccatctgctacttcaagtgcgagcaggacagagagcccctgagaaccatcttcctgaaggacgtgctgaagacccacgagtgcctggtgaagagcggcgacctgctgatgagagacaacctgttcgagatcatcaccagcagcagaaccttctacgtgcaggccgacagccccgaggacatgcacagctggatcaaggagatcggcgccgccgtgcaggccctgaagtgccaccccagagagaccagcttcagcagaagcatcagcctgaccagacccggcagcagcagcctgagcagcggccccaacagcatcctgtgcagaggcagaccccccctggaggagaagaaggccctgtgcaaggcccccagcgtggccagcagctggcagccctggacccccgtgccccaggccggcgagaagctgctgccccccggcgacaccagcgaggacagcctgttcacccccagacccggcgagggcagcgcccccggcgtgctgcccagcagcagaatcagacacagaagcgagccccagcaccccaaggagaagcccttcatgttcaacctggacgacgagaacatcagaaccagcgacgtgtag

SEQ ID NO: 93557 - DNA, 348 bp, synthetic construct
  misc_feature 1..348: note = Description of Artificial Sequence: Synthetic coding sequence
  source 1..348: mol_type = other DNA
atgccctacgtggacagacagaacagaatctgcggcttcctggacatcgaggagcacgagaacagcggcaagttcctgagaagatacttcatcctggacacccaggccaactgcctgctgtggtacatggacaacccccagaacctggccatgggcgccggcgccgtgggcgccctgcagctgacctacatcagcaaggtgagcatcgccacccccaagcagaagcccaagacccccttctgcttcgtgatcaacgccctgagccagagatacttcctgcaggccaacgaccagaaggacatgaaggactgggtggaggccctgaaccaggccagcaagatcacctag

SEQ ID NO: 93558 - DNA, 1128 bp, synthetic construct
  misc_feature 1..1128: note = Description of Artificial Sequence: Synthetic coding sequence
  source 1..1128: mol_type = other DNA
atgggcgccggcgccgtgggcgccctgcagctgacctacatcagcaaggtgagcatcgccacccccaagcagaagcccaagacccccttctgcttcgtgatcaacgccctgagccagagatacttcctgcaggccaacgaccagaaggacatgaaggactgggtggaggccctgaaccaggccagcaagatcaccgtgcccaagggcggcggcctgcccatgaccaccgaggtgctgaagagcctggccgccccccccgccctggagaagaagccccaggtggcctacaagaccgagatcatcggcggcgtggtggtgcacacccccatcagccagaacggcggcgacggccaggagggcagcgagcccggcagccacaccatcctgagaagaagccagagctacatccccaccagcggctgcagagccagcaccggcccccccctgatcaagagcggctactgcgtgaagcagggcaacgtgagaaagagctggaagagaagattcttcgccctggacgacttcaccatctgctacttcaagtgcgagcaggacagagagcccctgagaaccatcttcctgaaggacgtgctgaagacccacgagtgcctggtgaagagcggcgacctgctgatgagagacaacctgttcgagatcatcaccagcagcagaaccttctacgtgcaggccgacagccccgaggacatgcacagctggatcaaggagatcggcgccgccgtgcaggccctgaagtgccaccccagagagaccagcttcagcagaagcatcagcctgaccagacccggcagcagcagcctgagcagcggccccaacagcatcctgtgcagaggcagaccccccctggaggagaagaaggccctgtgcaaggcccccagcgtggccagcagctggcagccctggacccccgtgccccaggccggcgagaagctgctgccccccggcgacaccagcgaggacagcctgttcacccccagacccggcgagggcagcgcccccggcgtgctgcccagcagcagaatcagacacagaagcgagccccagcaccccaaggagaagcccttcatgttcaacctggacgacgagaacatcagaaccagcgacgtgtag

SEQ ID NO: 93559 - DNA, 4083 bp, synthetic construct
  misc_feature 1..4083: note = Description of Artificial Sequence: Synthetic coding sequence
  source 1..4083: mol_type = other DNA
atgagcagacagagcaccctgtacagcttcttccccaagagccccgccctgagcgacgccaacaaggccagcgccagagccagcagagagggcggcagagccgccgccgcccccggcgccagccccagccccggcggcgacgccgcctggagcgaggccggccccggccccagacccctggccagaagcgccagcccccccaaggccaagaacctgaacggcggcctgagaagaagcgtggcccccgccgcccccaccagctgcgacttcagccccggcgacctggtgtgggccaagatggagggctacccctggtggccctgcctggtgtacaaccaccccttcgacggcaccttcatcagagagaagggcaagagcgtgagagtgcacgtgcagttcttcgacgacagccccaccagaggctgggtgagcaagagactgctgaagccctacaccggcagcaagagcaaggaggcccagaagggcggccacttctacagcgccaagcccgagatcctgagagccatgcagagagccgacgaggccctgaacaaggacaagatcaagagactggagctggccgtgtgcgacgagcccagcgagcccgaggaggaggaggagatggaggtgggcaccacctacgtgaccgacaagagcgaggaggacaacgagatcgagagcgaggaggaggtgcagcccaagacccagggcagcagaagaagcagcagacagatcaagaagagaagagtgatcagcgacagcgagagcgacatcggcggcagcgacgtggagttcaagcccgacaccaaggaggagggcagcagcgacgagatcagcagcggcgtgggcgacagcgagagcgagggcctgaacagccccgtgaaggtggccagaaagagaaagagaatggtgaccggcaacggcagcctgaagagaaagagcagcagaaaggagacccccagcgccaccaagcaggccaccagcatcagcagcgagaccaagaacaccctgagagccttcagcgccccccagaacagcgagagccaggcccacgtgagcggcggcggcgacgacagcagcagacccaccgtgtggtaccacgagaccctggagtggctgaaggaggagaagagaagagacgagcacagaagaagacccgaccaccccgacttcgacgccagcaccctgtacgtgcccgaggacttcctgaacagctgcacccccggcatgagaaagtggtggcagatcaagagccagaacttcgacctggtgatctgctacaaggtgggcaagttctacgagctgtaccacatggacgccctgatcggcgtgagcgagctgggcctggtgttcatgaagggcaactgggcccacagcggcttccccgagatcgccttcggcagatacagcgacagcctggtgcagaagggctacaaggtggccagagtggagcagaccgagacccccgagatgatggaggccagatgcagaaagatggcccacatcagcaagtacgacagagtggtgagaagagagatctgcagaatcatcaccaagggcacccagacctacagcgtgctggagggcgaccccagcgagaactacagcaagtacctgctgagcctgaaggagaaggaggaggacagcagcggccacaccagagcctacggcgtgtgcttcgtggacaccagcctgggcaagttcttcatcggccagttcagcgacgacagacactgcagcagattcagaaccctggtggcccactacccccccgtgcaggtgctgttcgagaagggcaacctgagcaaggagaccaagaccatcctgaagagcagcctgagctgcagcctgcaggagggcctgatccccggcagccagttctgggacgccagcaagaccctgagaaccctgctggaggaggagtacttcagagagaagctgagcgacggcatcggcgtgatgctgccccaggtgctgaagggcatgaccagcgagagcgacagcatcggcctgacccccggcgagaagagcgagctggccctgagcgccctgggcggctgcgtgttctacctgaagaagtgcctgatcgaccaggagctgctgagcatggccaacttcgaggagtacatccccctggacagcgacaccgtgagcaccaccagaagcggcgccatcttcaccaaggcctaccagagaatggtgctggacgccgtgaccctgaacaacctggagatcttcctgaacggcaccaacggcagcaccgagggcaccctgctggagagagtggacacctgccacacccccttcggcaagagactgctgaagcagtggctgtgcgcccccctgtgcaaccactacgccatcaacgacagactggacgccatcgaggacctgatggtggtgcccgacaagatcagcgaggtggtggagctgctgaagaagctgcccgacctggagagactgctgagcaagatccacaacgtgggcagccccctgaagagccagaaccaccccgacagcagagccatcatgtacgaggagaccacctacagcaagaagaagatcatcgacttcctgagcgccctggagggcttcaaggtgatgtgcaagatcatcggcatcatggaggaggtggccgacggcttcaagagcaagatcctgaagcaggtgatcagcctgcagaccaagaaccccgagggcagattccccgacctgaccgtggagctgaacagatgggacaccgccttcgaccacgagaaggccagaaagaccggcctgatcacccccaaggccggcttcgacagcgactacgaccaggccctggccgacatcagagagaacgagcagagcctgctggagtacctggagaagcagagaaacagaatcggctgcagaaccatcgtgtactggggcatcggcagaaacagataccagctggagatccccgagaacttcaccaccagaaacctgcccgaggagtacgagctgaagagcaccaagaagggctgcaagagatactggaccaagaccatcgagaagaagctggccaacctgatcaacgccgaggagagaagagacgtgagcctgaaggactgcatgagaagactgttctacaacttcgacaagaactacaaggactggcagagcgccgtggagtgcatcgccgtgctggacgtgctgctgtgcctggccaactacagcagaggcggcgacggccccatgtgcagacccgtgatcctgctgcccgaggacaccccccccttcctggagctgaagggcagcagacacccctgcatcaccaagaccttcttcggcgacgacttcatccccaacgacatcctgatcggctgcgaggaggaggagcaggagaacggcaaggcctactgcgtgctggtgaccggccccaacatgggcggcaagagcaccctgatgagacaggccggcctgctggccgtgatggcccagatgggctgctacgtgcccgccgaggtgtgcagactgacccccatcgacagagtgttcaccagactgggcgccagcgacagaatcatgagcggcgagagcaccttcttcgtggagctgagcgagaccgccagcatcctgatgcacgccaccgcccacagcctggtgctggtggacgagctgggcagaggcaccgccaccttcgacggcaccgccatcgccaacgccgtggtgaaggagctggccgagaccatcaagtgcagaaccctgttcagcacccactaccacagcctggtggaggactacagccagaacgtggccgtgagactgggccacatggcctgcatggtggagaacgagtgcgaggaccccagccaggagaccatcaccttcctgtacaagttcatcaagggcgcctgccccaagagctacggcttcaacgccgccagactggccaacctgcccgaggaggtgatccagaagggccacagaaaggccagagagttcgagaagatgaaccagagcctgagactgttcagagaggtgtgcctggccagcgagagaagcaccgtggacgccgaggccgtgcacaagctgctgaccctgatcaaggagctgtag

SEQ ID NO: 93560 - DNA, 2340 bp, synthetic construct
  misc_feature 1..2340: note = Description of Artificial Sequence: Synthetic coding sequence
  source 1..2340: mol_type = other DNA
atggagggcagcagacccagaagcagcctgagcctggccagcagcgccagcaccatcagcagcctgagcagcctgagccccaagaagcccaccagagccgtgaacaagatccacgccttcggcaagagaggcaacgccctgagaagagaccccaacctgcccgtgcacatcagaggctggctgcacaagcaggacagcagcggcctgagactgtggaagagaagatggttcgtgctgagcggccactgcctgttctactacaaggacagcagagaggagagcgtgctgggcagcgtgctgctgcccagctacaacatcagacccgacggccccggcgcccccagaggcagaagattcaccttcaccgccgagcaccccggcatgagaacctacgtgctggccgccgacaccctggaggacctgagaggctggctgagagccctgggcagagccagcagagccgagggcgacgactacggccagcccagaagccccgccagaccccagcccggcgagggccccggcggccccggcggcccccccgaggtgagcagaggcgaggagggcagaatcagcgagagccccgaggtgaccagactgagcagaggcagaggcagacccagactgctgacccccagccccaccaccgacctgcacagcggcctgcagatgagaagagccagaagccccgacctgttcacccccctgagcagaccccccagccccctgagcctgcccagacccagaagcgcccccgccagaagaccccccgcccccagcggcgacaccgccccccccgccagaccccacacccccctgagcagaatcgacgtgagaccccccctggactggggcccccagagacagaccctgagcagaccccccacccccagaagaggcccccccagcgaggccggcggcggcaagccccccagaagcccccagcactggagccaggagcccagaacccaggcccacagcggcagccccacctacctgcagctgccccccagaccccccggcaccagagccagcatggtgctgctgcccggcccccccctggagagcaccttccaccagagcctggagaccgacaccctgctgaccaagctgtgcggccaggacagactgctgagaagactgcaggaggagatcgaccagaagcaggaggagaaggagcagctggaggccgccctggagctgaccagacagcagctgggccaggccaccagagaggccggcgcccccggcagagcctggggcagacagagactgctgcaggacagactggtgagcgtgagagccaccctgtgccacctgacccaggagagagagagagtgtgggacacctacagcggcctggagcaggagctgggcaccctgagagagaccctggagtacctgctgcacctgggcagcccccaggacagagtgagcgcccagcagcagctgtggatggtggaggacaccctggccggcctgggcggcccccagaagccccccccccacaccgagcccgacagccccagccccgtgctgcagggcgaggagagcagcgagagagagagcctgcccgagagcctggagctgagcagccccagaagccccgagaccgactggggcagaccccccggcggcgacaaggacctggccagcccccacctgggcctgggcagccccagagtgagcagagccagcagccccgagggcagacacctgcccagcccccagctgggcaccaaggcccccgtggccagacccagaatgagcgcccaggagcagctggagagaatgagaagaaaccaggagtgcggcagacccttccccagacccaccagccccagactgctgaccctgggcagaaccctgagccccgccagaagacagcccgacgtggagcagagacccgtggtgggccacagcggcgcccagaagtggctgagaagcagcggcagctggagcagccccagaaacaccaccccctacctgcccaccagcgagggccacagagagagagtgctgagcctgagccaggccctggccaccgaggccagccagtggcacagaatgatgaccggcggcaacctggacagccagggcgaccccctgcccggcgtgcccctgccccccagcgaccccaccagacaggagacccccccccccagaagcccccccgtggccaacagcggcagcaccggcttcagcagaagaggcagcggcagaggcggcggccccaccccctggggccccgcctgggacgccggcatcgccccccccgtgctgccccaggacgagggcgcctggcccctgagagtgaccctgctgcagagcagcttctag

SEQ ID NO: 93561 - DNA, 1752 bp, synthetic construct
  misc_feature 1..1752: note = Description of Artificial Sequence: Synthetic coding sequence
  source 1..1752: mol_type = other DNA
atggagggcagcagacccagaagcagcctgagcctggccagcagcgccagcaccatcagcagcctgagcagcctgagccccaagaagcccaccagagccgtgaacaagatccacgccttcggcaagagaggcaacgccctgagaagagaccccaacctgcccgtgcacatcagaggctggctgcacaagcaggacagcagcggcctgagactgtggaagagaagatggttcgtgctgagcggccactgcctgttctactacaaggacagcagagaggagagcgtgctgggcagcgtgctgctgcccagctacaacatcagacccgacggccccggcgcccccagaggcagaagattcaccttcaccgccgagcaccccggcatgagaacctacgtgctggccgccgacaccctggaggacctgagaggctggctgagagccctgggcagagccagcagagccgagggcgacgactacggccagcccagaagccccgccagaccccagcccggcgagggccccggcggccccggcggcccccccgaggtgagcagaggcgaggagggcagaatcagcgagagccccgaggtgaccagactgagcagaggcagaggcagacccagactgctgacccccagccccaccaccgacctgcacagcggcctgcagatgagaagagccagaagccccgacctgttcacccccctgagcagaccccccagccccctgagcctgcccagacccagaagcgcccccgccagaagaccccccgcccccagcggcgacaccgccccccccgccagaccccacacccccctgagcagaatcgacgtgagaccccccctggactggggcccccagagacagaccctgagcagaccccccacccccagaagaggcccccccagcgaggccggcggcggcaagccccccagaagcccccagcactggagccaggagcccagaacccagcccggcccccccctggagagcaccttccaccagagcctggagaccgacaccctgctgaccaagctgtgcggccaggacagactgctgagaagactgcaggaggagatcgaccagaagcaggaggagaaggagcagctggaggccgccctggagctgaccagacagcagctgggccaggccaccagagaggccggcgcccccggcagagcctggggcagacagagactgctgcaggacagactggtgagcgtgagagccaccctgtgccacctgacccaggagagagagagagtgtgggacacctacagcggcctggagcaggagctgggcaccctgagagagaccctggagtacctgctgcacctgggcagcccccaggacagagtgagcgcccagcagcagctgtggatggtggaggacaccctggccggcctgggcggcccccagaagccccccccccacaccgagcccgacagccccagccccgtgctgcagggcgaggagagcagcgagagagagagcctgcccgagagcctggagctgagcagccccagaagccccgagaccgactggggcagaccccccggcggcgacaaggacctggccagcccccacctgggcctgggcagccccagagtgagcagagccagcagccccgagggcagacacctgcccagcccccagctgggcaccaagagcaaggagcaccaccccctgctggccgacttcagaagaagccccggcgccggcagccagcccctgcccagccccggctactag

SEQ ID NO: 93562 - DNA, 3366 bp, synthetic construct
  misc_feature 1..3366: note = Description of Artificial Sequence: Synthetic coding sequence
  source 1..3366: mol_type = other DNA
atggccgccgccaccgtgggcagagacaccctgcccgagcactggagctacggcgtgtgcagagacggcagagtgttcttcatcaacgaccagctgagatgcaccacctggctgcaccccagaaccggcgagcccgtgaacagcggccacatgatcagaagcgacctgcccagaggctgggaggagggcttcaccgaggagggcgccagctacttcatcgaccacaaccagcagaccaccgccttcagacaccccgtgaccggccagttcagccccgagaacagcgagttcatcctgcaggaggagcccaacccccacatgagcaagcaggacagaaaccagagacccagcagcatggtgagcgagaccagcaccgccggcaccgccagcaccctggaggccaagcccggccccaagatcatcaagagcagcagcaaggtgcacagcttcggcaagagagaccaggccatcagaagaaaccccaacgtgcccgtggtggtgagaggctggctgcacaagcaggacagcagcggcatgagactgtggaagagaagatggttcgtgctggccgactactgcctgttctactacaaggacagcagagaggaggccgtgctgggcagcatccccctgcccagctacgtgatcagccccgtggcccccgaggacagaatcagcagaaagtacagcttcaaggccgtgcacaccggcatgagagccctgatctacaacagcagcaccgccggcagccaggccgagcagagcggcatgagaacctactacttcagcgccgacacccaggaggacatgaacgcctgggtgagagccatgaaccaggccgcccaggtgctgagcagaagcagcctgaagagagacatggagaaggtggagagacaggccgtgccccaggccaaccacaccgagagctgccacgagtgcggcagagtgggccccggccacaccagagactgcccccacagaggccacgacgacatcgtgaacttcgagagacaggagcaggagggcgagcagtacagaagccagagagaccccctggagggcaagagagacagaagcaaggccagaagcccctacagccccgccgaggaggacgccctgttcatggacctgcccaccggccccagaggccagcaggcccagccccagagagccgagaagaacggcatgctgcccgccagctacggccccggcgagcagaacggcaccggcggctaccagagagccttcccccccagaaccaaccccgagaagcacagccagagaaagagcaacctggcccaggtggagcactgggccagagcccagaagggcgacagcagaagcctgcccctggaccagaccctgcccagacagggccccggccagagcctgagcttccccgagaactaccagaccctgcccaagagcaccagacaccccagcggcggcagcagccccccccccagaaacctgcccagcgactacaagtacgcccaggacagagccagccacctgaagatgagcagcgaggagagaagagcccacagagacggcaccgtgtggcagctgtacgagtggcagcagagacagcagttcagacacggcagccccaccgcccccatctgcctgggcagccccgagttcaccgaccagggcagaagcagaagcatgctggaggtgcccagaagcatcagcgtgccccccagccccagcgacatccccccccccggcccccccagagtgttcccccccagaagaccccacacccccgccgagagagtgaccgtgaagccccccgaccagagaagaagcgtggacatcagcctgggcgacagccccagaagagccagaggccacgccgtgaagaacagcagccacgtggacagaagaagcatgcccagcatgggctacatgacccacaccgtgagcgcccccagcctgcacggcaagagcgccgacgacacctacctgcagctgaagaaggacctggagtacctggacctgaagatgaccggcagagacctgctgaaggacagaagcctgaagcccgtgaagatcgccgagagcgacaccgacgtgaagctgagcatcttctgcgagcaggacagagtgctgcaggacctggaggacaagatcagagccctgaaggagaacaaggaccagctggagagcgtgctggaggtgctgcacagacagatggagcagtacagagaccagccccagcacctggagaagatcgcctaccagcagaagctgctgcaggaggacctggtgcacatcagagccgagctgagcagagagagcaccgagatggagaacgcctggaacgagtacctgaagctggagaacgacgtggagcagctgaagcagaccctgcaggagcagcacagaagagccttcttcttccaggagaagagccagatccagaaggacctgtggagaatcgaggacgtgaccgccggcctgagcgccaacaaggagaacttcagaatcctggtggagagcgtgaagaaccccgagagaaagaccgtgcccctgttcccccacccccccgtgcccagcctgagcaccagcgagagcaagccccccccccagcccagcccccccaccagccccgtgagaacccccctggaggtgagactgttcccccagctgcagacctacgtgccctacagaccccaccccccccagctgagaaaggtgaccagccccctgcagagccccaccaaggccaagcccaaggtggaggacgaggccccccccagaccccccctgcccgagctgtacagccccgaggaccagccccccgccgtgccccccctgcccagagaggccaccatcatcagacacaccagcgtgagaggcctgaagagacagagcgacgagagaaagagagacagagagctgggccagtgcgtgaacggcgacagcagagtggagctgagaagctacgtgagcgagcccgagctggccaccctgagcggcgacatggcccagcccagcctgggcctggtgggccccgagagcagataccagaccctgcccggcagaggcctgagcggcagcaccagcagactgcagcagagcagcaccatcgccccctacgtgaccctgagaagaggcctgaacgccgagagcagcaaggccaccttccccagacccaagagcgccctggagagactgtacagcggcgaccaccagagaggcaagatgagcgccgaggagcagctggagagaatgaagagacaccagaaggccctggtgagagagagaaagagaaccctgggccagggcgagagaaccggcctgcccagcagcagatacctgagcagacccctgcccggcgacctgggcagcgtgtgctag

SEQ ID NO: 93563 - DNA, 3369 bp, synthetic construct
  misc_feature 1..3369: note = Description of Artificial Sequence: Synthetic coding sequence
  source 1..3369: mol_type = other DNA
atggccgccgccaccgtgggcagagacaccctgcccgagcactggagctacggcgtgtgcagagacggcagagtgttcttcatcaacgaccagctgagatgcaccacctggctgcaccccagaaccggcgagcccgtgaacagcggccacatgatcagaagcgacctgcccagaggctgggaggagggcttcaccgaggagggcgccagctacttcatcgaccacaaccagcagaccaccgccttcagacaccccgtgaccggccagttcagccccgagaacagcgagttcatcctgcaggaggagcccaacccccacatgagcaagcaggacagaaaccagagacccagcagcatggtgagcgagaccagcaccgccggcaccgccagcaccctggaggccaagcccggccccaagatcatcaagagcagcagcaaggtgcacagcttcggcaagagagaccaggccatcagaagaaaccccaacgtgcccgtggtggtgagaggctggctgcacaagcaggacagcagcggcatgagactgtggaagagaagatggttcgtgctggccgactactgcctgttctactacaaggacagcagagaggaggccgtgctgggcagcatccccctgcccagctacgtgatcagccccgtggcccccgaggacagaatcagcagaaagtacagcttcaaggccgtgcacaccggcatgagagccctgatctacaacagcagcaccgccggcagccaggccgagcagagcggcatgagaacctactacttcagcgccgacacccaggaggacatgaacgcctgggtgagagccatgaaccaggccgcccaggtgctgagcagaagcagcctgaagagagacatggagaaggtggagagacaggccgtgccccaggccaaccacaccgagagctgccacgagtgcggcagagtgggccccggccacaccagagactgcccccacagaggccacgacgacatcgtgaacttcgagagacaggagcaggagggcgagcagtacagaagccagagagaccccctggagggcaagagagacagaagcaaggccagaagcccctacagccccgccgaggaggacgccctgttcatggacctgcccaccggccccagaggccagcaggcccagccccagagagccgagaagaacggcatgctgcccgccagctacggccccggcgagcagaacggcaccggcggctaccagagagccttcccccccagaaccaaccccgagaagcacagccagagaaagagcaacctggcccaggtggagcactgggccagagcccagaagggcgacagcagaagcctgcccctggaccagaccctgcccagacagggccccggccagagcctgagcttccccgagaactaccagaccctgcccaagagcaccagacaccccagcggcggcagcagccccccccccagaaacctgcccagcgactacaagtacgcccaggacagagccagccacctgaagatgagcagcgaggagagaagagcccacagagacggcaccgtgtggcagctgtacgagtggcagcagagacagcagttcagacacggcagccccaccgcccccatctgcctgggcagccccgagttcaccgaccagggcagaagcagaagcatgctggaggtgcccagaagcatcagcgtgccccccagccccagcgacatccccccccccggcccccccagagtgttcccccccagaagaccccacacccccgccgagagagtgaccgtgaagccccccgaccagagaagaagcgtggacatcagcctgggcgacagccccagaagagccagaggccacgccgtgaagaacagcagccacgtggacagaagaagcatgcccagcatgggctacatgacccacaccgtgagcgcccccagcctgcacggcaagagcgccgacgacacctacctgcagctgaagaaggacctggagtacctggacctgaagatgaccggcagagacctgctgaaggacagaagcctgaagcccgtgaagatcgccgagagcgacaccgacgtgaagctgagcatcttctgcgagcaggacagagtgctgcaggacctggaggacaagatcagagccctgaaggagaacaaggaccagctggagagcgtgctggaggtgctgcacagacagatggagcagtacagagaccagccccagcacctggagaagatcgcctaccagcagaagctgctgcaggaggacctggtgcacatcagagccgagctgagcagagagagcaccgagatggagaacgcctggaacgagtacctgaagctggagaacgacgtggagcagctgaagcagaccctgcaggagcagcacagaagagccttcttcttccaggagaagagccagatccagaaggacctgtggagaatcgaggacgtgaccgccggcctgagcgccaacaaggagaacttcagaatcctggtggagagcgtgaagaaccccgagagaaagaccgtgcccctgttcccccacccccccgtgcccagcctgagcaccagcgagagcaagccccccccccagcccagcccccccaccagccccgtgagaacccccctggaggtgagactgttcccccagctgcagacctacgtgccctacagaccccaccccccccagctgagaaaggtgaccagccccctgcagagccccaccaaggccaagcccaaggtgcaggaggacgaggccccccccagaccccccctgcccgagctgtacagccccgaggaccagccccccgccgtgccccccctgcccagagaggccaccatcatcagacacaccagcgtgagaggcctgaagagacagagcgacgagagaaagagagacagagagctgggccagtgcgtgaacggcgacagcagagtggagctgagaagctacgtgagcgagcccgagctggccaccctgagcggcgacatggcccagcccagcctgggcctggtgggccccgagagcagataccagaccctgcccggcagaggcctgagcggcagcaccagcagactgcagcagagcagcaccatcgccccctacgtgaccctgagaagaggcctgaacgccgagagcagcaaggccaccttccccagacccaagagcgccctggagagactgtacagcggcgaccaccagagaggcaagatgagcgccgaggagcagctggagagaatgaagagacaccagaaggccctggtgagagagagaaagagaaccctgggccagggcgagagaaccggcctgcccagcagcagatacctgagcagacccctgcccggcgacctgggcagcgtgtgctag

SEQ ID NO: 93564 - DNA, 2262 bp, synthetic construct
  misc_feature 1..2262: note = Description of Artificial Sequence: Synthetic coding sequence
  source 1..2262: mol_type = other DNA
tgagacgccctgttcatggacctgcccaccggccccagaggccagcaggcccagccccagagagccgagaagaacggcatgctgcccgccagctacggccccggcgagcagaacggcaccggcggctaccagagagccttcccccccagaaccaaccccgagaagcacagccagagaaagagcaacctggcccaggtggagcactgggccagagcccagaagggcgacagcagaagcctgcccctggaccagaccctgcccagacagggccccggccagagcctgagcttccccgagaactaccagaccctgcccaagagcaccagacaccccagcggcggcagcagccccccccccagaaacctgcccagcgactacaagtacgcccaggacagagccagccacctgaagatgagcagcgaggagagaagagcccacagagacggcaccgtgtggcagctgtacgagtggcagcagagacagcagttcagacacggcagccccaccgcccccatctgcctgggcagccccgagttcaccgaccagggcagaagcagaagcatgctggaggtgcccagaagcatcagcgtgccccccagccccagcgacatccccccccccggcccccccagagtgttcccccccagaagaccccacacccccgccgagagagtgaccgtgaagccccccgaccagagaagaagcgtggacatcagcctgggcgacagccccagaagagccagaggccacgccgtgaagaacagcagccacgtggacagaagaagcatgcccagcatgggctacatgacccacaccgtgagcgcccccagcctgcacggcaagagcgccgacgacacctacctgcagctgaagaaggacctggagtacctggacctgaagatgaccggcagagacctgctgaaggacagaagcctgaagcccgtgaagatcgccgagagcgacaccgacgtgaagctgagcatcttctgcgagcaggacagagtgctgcaggacctggaggacaagatcagagccctgaaggagaacaaggaccagctggagagcgtgctggaggtgctgcacagacagatggagcagtacagagaccagccccagcacctggagaagatcgcctaccagcagaagctgctgcaggaggacctggtgcacatcagagccgagctgagcagagagagcaccgagatggagaacgcctggaacgagtacctgaagctggagaacgacgtggagcagctgaagcagaccctgcaggagcagcacagaagagccttcttcttccaggagaagagccagatccagaaggacctgtggagaatcgaggacgtgaccgccggcctgagcgccaacaaggagaacttcagaatcctggtggagagcgtgaagaaccccgagagaaagaccgtgcccctgttcccccacccccccgtgcccagcctgagcaccagcgagagcaagccccccccccagcccagcccccccaccagccccgtgagaacccccctggaggtgagactgttcccccagctgcagacctacgtgccctacagaccccaccccccccagctgagaaaggtgaccagccccctgcagagccccaccaaggccaagcccaaggtgcaggaggacgaggccccccccagaccccccctgcccgagctgtacagccccgaggaccagccccccgccgtgccccccctgcccagagaggccaccatcatcagacacaccagcgtgagaggcctgaagagacagagcgacgagagaaagagagacagagagctgggccagtgcgtgaacggcgacagcagagtggagctgagaagctacgtgagcgagcccgagctggccaccctgagcggcgacatggcccagcccagcctgggcctggtgggccccgagagcagataccagaccctgcccggcagaggcctgagcggcagcaccagcagactgcagcagagcagcaccatcgccccctacgtgaccctgagaagaggcctgaacgccgagagcagcaaggccaccttccccagacccaagagcgccctggagagactgtacagcggcgaccaccagagaggcaagatgagcgccgaggagcagctggagagaatgaagagacaccagaaggccctggtgagagagagaaagagaaccctgggccagggcgagagaaccggcctgcccagcagcagatacctgagcagacccctgcccggcgacctgggcagcgtgtgctag

SEQ ID NO: 93565 - DNA, 816 bp, synthetic construct
  misc_feature 1..816: note = Description of Artificial Sequence: Synthetic coding sequence
  source 1..816: mol_type = other DNA
atgctgcaggcctgcaagatggagggcttccccctggtgcccccccagcccagcgaggacctggtgccctacgacaccgacctgtaccagagacagacccacgagtactacccctacctgagcagcgacggcgagagccacagcgaccactactgggacttccacccccaccacgtgcacagcgagttcgagagcttcgccgagaacaacttcaccgagctgcagagcgtgcagcccccccagctgcagcagctgtacagacacatggagctggagcagatgcacgtgctggacacccccatggtgcccccccaccccagcctgggccaccaggtgagctacctgcccagaatgtgcctgcagtaccccagcctgagccccgcccagcccagcagcgacgaggaggagggcgagagacagagcccccccctggaggtgagcgacggcgaggccgacggcctggagcccggccccggcctgctgcccggcgagaccggcagcaagaagaagatcagactgtaccagttcctgctggacctgctgagaagcggcgacatgaaggacagcatctggtgggtggacaaggacaagggcaccttccagttcagcagcaagcacaaggaggccctggcccacagatggggcatccagaagggcaacagaaagaagatgacctaccagaagatggccagagccctgagaaactacggcaagaccggcgaggtgaagaaggtgaagaagaagctgacctaccagttcagcggcgaggtgctgggcagaggcggcctggccgagagaagacaccccccccactag

SEQ ID NO: 93566 - DNA, 732 bp, synthetic construct
  misc_feature 1..732: note = Description of Artificial Sequence: Synthetic coding sequence
  source 1..732: mol_type = other DNA
atgagccccgccgcccccgtgccccccgacagcgccctggagagccccttcgaggagatggccctggtgagaggcggctggctgtggagacagagcagcatcctgagaagatggaagagaaactggttcgccctgtggctggacggcaccctgggctactaccacgacgagaccgcccaggacgaggaggacagagtgctgatccacttcaacgtgagagacatcaagatcggccccgagtgccacgacgtgcagccccccgagggcagaagcagagacggcctgctgaccgtgaacctgagagagggcggcagactgcacctgtgcgccgagaccaaggacgacgccctggcctggaagaccgccctgctggaggccaacagcacccccgcccccgccggcgccaccgtgccccccagaagcagaagagtgtgcagcaaggtgagatgcgtgaccagaagctggagcccctgcaaggtggagagaagaatctgggtgagagtgtacagcccctaccaggactactacgaggtggtgccccccaacgcccacgaggccacctacgtgagaagctactacggccccccctacgccggccccggcgtgacccacgtgatcgtgagagaggacccctgctacagcgccggcgcccccctggccatgggcatgctggccggcgccgccaccggcgccgccctgggcagcctgatgtggagcccctgctggttctag

SEQ ID NO: 93567 - DNA, 627 bp, synthetic construct
  misc_feature 1..627: note = Description of Artificial Sequence: Synthetic coding sequence
  source 1..627: mol_type = other DNA
atgagccccgccgcccccgtgccccccgacagcgccctggagagccccttcgaggagatggccctggtgagaggcggctggctgtggagacagagcagcatcctgagaagatggaagagaaactggttcgccctgtggctggacggcaccctgggctactaccacgacgagaccgcccaggacgaggaggacagagtgctgatccacttcaacgtgagagacatcaagatcggccccgagtgccacgacgtgcagccccccgagggcagaagcagagacggcctgctgaccgtgaacctgagagagggcggcagactgcacctgtgcgccgagaccaaggacgacgccctggcctggaagaccgccctgctggaggccaacagcacccccgtgagagtgtacagcccctaccaggactactacgaggtggtgccccccaacgcccacgaggccacctacgtgagaagctactacggccccccctacgccggccccggcgtgacccacgtgatcgtgagagaggacccctgctacagcgccggcgcccccctggccatgggcatgctggccggcgccgccaccggcgccgccctgggcagcctgatgtggagcccctgctggttctag

SEQ ID NO: 93568 - DNA, 675 bp, synthetic construct
  misc_feature 1..675: note = Description of Artificial Sequence: Synthetic coding sequence
  source 1..675: mol_type = other DNA
atggccctggtgagaggcggctggctgtggagacagagcagcatcctgagaagatggaagagaaactggttcgccctgtggctggacggcaccctgggctactaccacgacgagaccgcccaggacgaggaggacagagtgctgatccacttcaacgtgagagacatcaagatcggccccgagtgccacgacgtgcagccccccgagggcagaagcagagacggcctgctgaccgtgaacctgagagagggcggcagactgcacctgtgcgccgagaccaaggacgacgccctggcctggaagaccgccctgctggaggccaacagcacccccgcccccgccggcgccaccgtgccccccagaagcagaagagtgtgcagcaaggtgagatgcgtgaccagaagctggagcccctgcaaggtggagagaagaatctgggtgagagtgtacagcccctaccaggactactacgaggtggtgccccccaacgcccacgaggccacctacgtgagaagctactacggccccccctacgccggccccggcgtgacccacgtgatcgtgagagaggacccctgctacagcgccggcgcccccctggccatgggcatgctggccggcgccgccaccggcgccgccctgggcagcctgatgtggagcccctgctggttctag

SEQ ID NO: 93569 - DNA, 570 bp, synthetic construct; identical to SEQ ID NO: 77789
  misc_feature 1..570: note = Description of Artificial Sequence: Synthetic coding sequence
  source 1..570: mol_type = other DNA

SEQ ID NO: 93570 - DNA, 354 bp, synthetic construct
  misc_feature 1..354: note = Description of Artificial Sequence: Synthetic coding sequence
  source 1..354: mol_type = other DNA
atggccctggtgagaggcggctggctgtggagacagagcagcatcctgagaagatggaagagaaactggttcgccctgtggctggacggcaccctgggctactaccacgacgagaccgcccaggacgaggaggacagagtgctgatccacttcaacgtgagagacatcaagatcggccccgagtgccacgacgtgcagccccccgagggcagaagcagagacggcctgctgaccgtgaacctgagagagggcggcagactgcacctgtgcgccgagaccaaggacgacgccctggcctggaagaccgccctgctggaggccaacagcacccccgtgagagtgtacagcccctag

SEQ ID NO: 93571 - DNA, 492 bp, synthetic construct
  misc_feature 1..492: note = Description of Artificial Sequence: Synthetic coding sequence
  source 1..492: mol_type = other DNA
atggccctggtgagaggcggctggctgtggagacagagcagcatcctgagaagatggaagagaaactggttcgccctgtggctggacggcaccctgggctactaccacgacgagaccgcccaggacgaggaggacagagtgctgatccacttcaacgtgagagacatcaagatcggccccgagtgccacgacgtgcagccccccgagggcagaagcagagacggcctgctgaccgtgaacctgagagagggcggcagactgcacctgtgcgccgagaccaaggacgacgccctggcctggaagaccgccctgctggaggccaacagcacccccgtgagagtgtacagcccctaccaggactactacgaggtggtgccccccaacgcccacgaggccacctacgtgagaagctactacggccccccctacgccggccccggcgtgacccacgtgatcgtgagagaggacccctgctacagcgccggcgcctag

SEQ ID NO: 93572 - DNA, 480 bp, synthetic construct
  misc_feature 1..480: note = Description of Artificial Sequence: Synthetic coding sequence
  source 1..480: mol_type = other DNA
atggccctggtgagaggcggctggctgtggagacagagcagcatcctgagaagatggaagagaaactggttcgccctgtggctggacggcaccctgggctactaccacgacgagaccgcccaggacgaggaggacagagtgctgatccacttcaacgtgagagacatcaagatcggccccgagtgccacgacgtgcagccccccgagggcagaagcagagacggcctgctgaccgtgaacctgagagagggcggcagactgcacctgtgcgccgagaccaaggacgacgccctggcctggaagaccgccctgctggaggccaacagcacccccatgatcagactgaagctgatccacccccacaacaagtacctgctgagctgctacagcgccggcgcccccctggccatgggcatgctggccggcgccgccaccggcgccgccctgggcagcctgatgtggagcccctgctggttctag

SEQ ID NO: 93573 - DNA, 483 bp, synthetic construct
  misc_feature 1..483: note = Description of Artificial Sequence: Synthetic coding sequence
  source 1..483: mol_type = other DNA
atggccctggtgagaggcggctggctgtggagacagagcagcatcctgagaagatggaagagaaactggttcgccctgtggctggacggcaccctgggctactaccacgacgagaccgcccaggacgaggaggacagagtgctgatccacttcaacgtgagagacatcaagatcggccccgagtgccacgacgtgcagccccccgagggcagaagcagagacggcctgctgaccgtgaacctgagagagggcggcagactgcacctgtgcgccgagaccaaggacgacgccctggcctggaagaccgccctgctggaggccaacagcacccccgcccccgccggcgccaccgtgccccccagaagcagaagagtgtgcagcaaggtgagatgcgtgaccagaagctggagcccctgcaaggtggagagaagaatctgggtgagagtgtacagcccctaccaggactactacgaggtggtgtag

SEQ ID NO: 93574 - DNA, 465 bp, synthetic construct
  misc_feature 1..465: note = Description of Artificial Sequence: Synthetic coding sequence
  source 1..465: mol_type = other DNA
atggccctggtgagaggcggctggctgtggagacagagcagcatcctgagaagatggaagagaaactggttcgccctgtggctggacggcaccctgggctactaccacgacgagaccgcccaggacgaggaggacagagtgctgatccacttcaacgtgagagacatcaagatcggccccgagtgccacgacgtgcagccccccgagggcagaagcagagacggcctgctgaccgtgaacctgagagagggcggcagactgcacctgtgcgccgagaccaaggacgacgccctggcctggaagaccgccctgctggaggccaacagcacccccgtgagagtgtacagcccctaccaggactactacgaggtggtgccccccaacgcccacgaggccacctacgtgagaagctactacggccccccctacgccggccccggcgtgacccacgtgatcgtgagatag

SEQ ID NO: 93575 - DNA, 258 bp, synthetic construct
  misc_feature 1..258: note = Description of Artificial Sequence: Synthetic coding sequence
  source 1..258: mol_type = other DNA
atggccctggtgagaggcggctggctgtggagacagagcagcatcctgagaagatggaagagaaactggttcgccctgtggctggacggcaccctgggctactaccacgacgagaccgcccaggacgaggaggacagagtgctgatccacttcaacgtgagagacatcaagatcggccccgagtgccacgacgtgcagccccccgagggcagaagcagagacggcctgctgaccgtgaacctgagagagggcggctag

SEQ ID NO: 93576 - DNA, 3576 bp, synthetic construct
  misc_feature 1..3576: note = Description of Artificial Sequence: Synthetic coding sequence
  source 1..3576: mol_type = other DNA
atggagagacccctggagaacggcgacgagagccccgacagccagggccacgccaccgactggagattcgccgtgtgcagcttcagagacgcctgggaggaggaggagcccgccagccagatgcacgtgaaggaccccggcccccccagaccccccgccggcgccacccaggacgaggagctgcagggcagccccctgagcagaaagttccagctgccccccgccgccgacgagagcggcgacgcccagagaggcaccgtggagagcagcagcgtgctgagcgagggccccggccccagcggcgtggagagcctgctgtgccccatgagcagccacctgagcctggcccagggcgagagcgacacccccggcgtgggcctggtgggcgaccccggccccagcagagccatgcccagcggcctgagccccggcgccctggacagcgaccccgtgggcctgggcgaccccctgagcgagatcagcaagctgctggaggccgcccccagcggcagcggcctgcccaagcccgccgactgcctgctggcccaggacctgtgctgggagctgctggccagcggcatggccaccctgcccggcaccagagacgtgcagggcagagccgtgctgctgctgtgcgcccacagccccgcctggctgcagagcgagtgcagcagccaggagctgatcagactgctgctgtacctgagaagcatccccagacccgaggtgcaggccctgggcctgaccgtgctggtggacgccagaatctgcgcccccagcagcagcctgttcagcggcctgagccagctgcaggaggccgcccccggcgccgtgtaccaggtgctgctggtgggcagcaccctgctgaaggaggtgcccagcggcctgcagctggagcagctgcccagccagagcctgctgacccacatccccaccgccggcctgcccaccagcctgggcggcggcctgccctactgccaccaggcctggctggacttcagaagaagactggaggccctgctgcagaactgccaggccgcctgcgccctgctgcagggcgccatcgagagcgtgaaggccgtgccccagcccatggagcccggcgaggtgggccagctgctgcagcagaccgaggtgctgatgcagcaggtgctggacagcccctggctggcctggctgcagtgccagggcggcagagagctgacctggctgaagcaggaggtgcccgaggtgaccctgagccccgactacagaaccgccatggacaaggccgacgagctgtacgacagagtggacggcctgctgcaccagctgaccctgcagagcaaccagagaatccaggccctggagctggtgcagaccctggaggccagagagagcggcctgcaccagatcgaggtgtggctgcagcaggtgggctggcccgccctggaggaggccggcgagcccagcctggacatgctgctgcaggcccagggcagcttccaggagctgtaccaggtggcccaggagcaggtgagacagggcgagaagttcctgcagcccctgaccggctgggaggccgccgagctggacccccccggcgccagattcctggccctgagagcccagctgaccgagttcagcagagccctggcccagagatgccagagactggccgacgccgagagactgttccagctgttcagagaggccctgacctgggccgaggagggccagagagtgctggccgagctggagcaggagagacccggcgtggtgctgcagcagctgcagctgcactggaccagacaccccgacctgccccccgcccacttcagaaagatgtgggccctggccaccggcctgggcagcgaggccatcagacaggagtgcagatgggcctgggccagatgccaggacacctggctggccctggaccagaagctggaggccagcctgaagctgccccccgtgggcagcaccgccagcctgtgcgtgagccaggtgcccgccgcccccgcccacccccccctgagaaaggcctacagcttcgacagaaacctgggccagagcctgagcgagcccgcctgccactgccaccacgccgccaccatcgccgcctgcagaagacccgaggccggcggcggcgccctgccccaggccagccccaccgtgcccccccccggcagcagcgaccccagaagcctgaacagactgcagctggtgctggccgagatggtggccaccgagagagagtacgtgagagccctggagtacaccatggagaactacttccccgagctggacagacccgacgtgccccagggcctgagaggccagagagcccacctgttcggcaacctggagaagctgagagacttccactgccacttcttcctgagagagctggaggcctgcaccagacacccccccagagtggcctacgccttcctgagacacagagtgcagttcggcatgtacgccctgtacagcaagaacaagcccagaagcgacgccctgatgagcagctacggccacaccttcttcaaggacaagcagcaggccctgggcgaccacctggacctggccagctacctgctgaagcccatccagagaatgggcaagtacgccctgctgctgcaggagctggccagagcctgcggcggccccacccaggagctgagcgccctgagagaggcccagagcctggtgcacttccagctgagacacggcaacgacctgctggccatggacgccatccagggctgcgacgtgaacctgaaggagcagggccagctggtgagacaggacgagttcgtggtgagaaccggcagacacaagagcgtgagaagaatcttcctgttcgaggagctgctgctgttcagcaagcccagacacggccccaccggcgtggacaccttcgcctacaagagaagcttcaagatggccgacctgggcctgaccgagtgctgcggcaacagcaacctgagattcgagatctggttcagaagaagaaaggccagagacaccttcgtgctgcaggccagcagcctggccatcaagcaggcctggaccgccgacatcagccacctgctgtggagacaggccgtgcacaacaaggaggtgagaatggccgagatggtgagcatgggcgtgggcaacaaggccttcagagacatcgcccccagcgaggaggccatcaacgacagaaccgtgaactacgtgctgaagtgcagagaggtgagaagcagagccagcatcgccgtggcccccttcgaccacgacagcctgtacctgggcgccagcaacagcctgcccggcgaccccgccagctgcagcgtgctgggcagcctgaacctgcacctgtacagagaccccgccctgctgggcctgagatgccccctgtaccccagcttccccgaggaggccgccctggaggccgaggccgagctgggcggccagcccagcctgaccgccgaggacagcgagatcagcagccagtgccccagcgccagcggcagcagcggcagcgacagcagctgcgtgagcggccaggccctgggcagaggcctggaggacctgccctgcgtgtag

SEQ ID NO: 93577 - DNA, 3576 bp, synthetic construct; identical to SEQ ID NO: 93576
  misc_feature 1..3576: note = Description of Artificial Sequence: Synthetic coding sequence
  source 1..3576: mol_type = other DNA

SEQ ID NO: 93578 - DNA, 582 bp, synthetic construct
  misc_feature 1..582: note = Description of Artificial Sequence: Synthetic coding sequence
  source 1..582: mol_type = other DNA
atggagagacccctggagaacggcgacgagagccccgacagccagggccacgccaccgactggagattcgccgtgtgcagcttcagagacgcctgggaggaggaggagcccgccagccagatgcacgtgaaggaccccggcccccccagaccccccgccggcgccacccaggacgaggagctgcagggcagccccctgagcagaaagttccagctgccccccgccgccgacgagagcggcgacgcccagagaggcaccgtggagagcagcagcgtgctgagcgagggccccggccccagcggcgtggagagcctgctgtgccccatgagcagccacctgagcctggcccagggcgagagcgacacccccggcgtgggcctggtgggcgaccccggccccagcagagccatgcccagcggcctgagccccggcgccctggacagcgaccccgtgggcctgggcgaccccctgagcgagatcagcaagctgctggaggccggcaaggagggctgggccagagaggtgtgggagggcaacggcgacgcctggagagacgagtgccaggacttcggcggcctgtag

SEQ ID NO: 93579 - DNA, 3576 bp, synthetic construct; identical to SEQ ID NO: 93576
  misc_feature 1..3576: note = Description of Artificial Sequence: Synthetic coding sequence
  source 1..3576: mol_type = other DNA

SEQ ID NO: 93580 - DNA, 3333 bp, synthetic construct
  misc_feature 1..3333: note = Description of Artificial Sequence: Synthetic coding sequence
  source 1..3333: mol_type = other DNA
atggagagacccctggagaacggcgacgagagccccgacagccagggccacgccaccgactggagattcgccgtgtgcagcttcagagacgcctgggaggaggaggagcccgccagccagatgcacgtgaaggaccccggcccccccagaccccccgccggcgccacccaggacgaggagctgcagggcagccccctgagcagaaagttccagctgccccccgccgccgacgagagcggcgacgcccagagaggcaccgtggagagcagcagcgtgctgagcgagggccccggccccagcggcgtggagagcctgctgtgccccatgagcagccacctgagcctggcccagggcaccagagacgtgcagggcagagccgtgctgctgctgtgcgcccacagccccgcctggctgcagagcgagtgcagcagccaggagctgatcagactgctgctgtacctgagaagcatccccagacccgaggtgcaggccctgggcctgaccgtgctggtggacgccagaatctgcgcccccagcagcagcctgttcagcggcctgagccagctgcaggaggccgcccccggcgccgtgtaccaggtgctgctggtgggcagcaccctgctgaaggaggtgcccagcggcctgcagctggagcagctgcccagccagagcctgctgacccacatccccaccgccggcctgcccaccagcctgggcggcggcctgccctactgccaccaggcctggctggacttcagaagaagactggaggccctgctgcagaactgccaggccgcctgcgccctgctgcagggcgccatcgagagcgtgaaggccgtgccccagcccatggagcccggcgaggtgggccagctgctgcagcagaccgaggtgctgatgcagcaggtgctggacagcccctggctggcctggctgcagtgccagggcggcagagagctgacctggctgaagcaggaggtgcccgaggtgaccctgagccccgactacagaaccgccatggacaaggccgacgagctgtacgacagagtggacggcctgctgcaccagctgaccctgcagagcaaccagagaatccaggccctggagctggtgcagaccctggaggccagagagagcggcctgcaccagatcgaggtgtggctgcagcaggtgggctggcccgccctggaggaggccggcgagcccagcctggacatgctgctgcaggcccagggcagcttccaggagctgtaccaggtggcccaggagcaggtgagacagggcgagaagttcctgcagcccctgaccggctgggaggccgccgagctggacccccccggcgccagattcctggccctgagagcccagctgaccgagttcagcagagccctggcccagagatgccagagactggccgacgccgagagactgttccagctgttcagagaggccctgacctgggccgaggagggccagagagtgctggccgagctggagcaggagagacccggcgtggtgctgcagcagctgcagctgcactggaccagacaccccgacctgccccccgcccacttcagaaagatgtgggccctggccaccggcctgggcagcgaggccatcagacaggagtgcagatgggcctgggccagatgccaggacacctggctggccctggaccagaagctggaggccagcctgaagctgccccccgtgggcagcaccgccagcctgtgcgtgagccaggtgcccgccgcccccgcccacccccccctgagaaaggcctacagcttcgacagaaacctgggccagagcctgagcgagcccgcctgccactgccaccacgccgccaccatcgccgcctgcagaagacccgaggccggcggcggcgccctgccccaggccagccccaccgtgcccccccccggcagcagcgaccccagaagcctgaacagactgcagctggtgctggccgagatggtggccaccgagagagagtacgtgagagccctggagtacaccatggagaactacttccccgagctggacagacccgacgtgccccagggcctgagaggccagagagcccacctgttcggcaacctggagaagctgagagacttccactgccacttcttcctgagagagctggaggcctgcaccagacacccccccagagtggcctacgccttcctgagacacagagtgcagttcggcatgtacgccctgtacagcaagaacaagcccagaagcgacgccctgatgagcagctacggccacaccttcttcaaggacaagcagcaggccctgggcgaccacctggacctggccagctacctgctgaagcccatccagagaatgggcaagtacgccctgctgctgcaggagctggccagagcctgcggcggccccacccaggagctgagcgccctgagagaggcccagagcctggtgcacttccagctgagacacggcaacgacctgctggccatggacgccatccagggctgcgacgtgaacctgaaggagcagggccagctggtgagacaggacgagttcgtggtgagaaccggcagacacaagagcgtgagaagaatcttcctgttcgaggagctgctgctgttcagcaagcccagacacggccccaccggcgtggacaccttcgcctacaagagaagcttcaagatggccgacctgggcctgaccgagtgctgcggcaacagcaacctgagattcgagatctggttcagaagaagaaaggccagagacaccttcgtgctgcaggccagcagcctggccatcaagcaggcctggaccgccgacatcagccacctgctgtggagacaggccgtgcacaacaaggaggtgagaatggccgagatggtgagcatgggcgtgggcaacaaggccttcagagacatcgcccccagcgaggaggccatcaacgacagaaccgtgaactacgtgctgaagtgcagagaggtgagaagcagagccagcatcgccgtggcccccttcgaccacgacagcctgtacctgggcgccagcaacagcctgcccggcgaccccgccagctgcagcgtgctgggcagcctgaacctgcacctgtacagagaccccgccctgctgggcctgagatgccccctgtaccccagcttccccgaggaggccgccctggaggccgaggccgagctgggcggccagcccagcctgaccgccgaggacagcgagatcagcagccagtgccccagcgccagcggcagcagcggcagcgacagcagctgcgtgagcggccaggccctgggcagaggcctggaggacctgccctgcgtgtag

SEQ ID NO: 93581 - DNA, 3021 bp, synthetic construct
  misc_feature 1..3021: note = Description of Artificial Sequence: Synthetic coding sequence
  source 1..3021: mol_type = other DNA
atgcactacgacggccacgtgagattcgacctgcccccccagggcagcgtgctggccagaaacgtgagcaccagaagctgcccccccagaaccagccccgccgtggacctggaggaggaggaggaggagagcagcgtggacggcaagggcgacagaaagagcaccggcctgaagctgagcaagaagaaggccagaagaagacacaccgacgaccccagcaaggagtgcttcaccctgaagttcgacctgaacgtggacatcgagaccgagatcgtgcccgccatgaagaagaagagcctgggcgaggtgctgctgcccgtgttcgagagaaagggcatcgccctgggcaaggtggacatctacctggaccagagcaacacccccctgagcctgaccttcgaggcctacagattcggcggccactacctgagagtgaaggcccccgccaagcccggcgacgagggcaaggtggagcagggcatgaaggacagcaagagcctgagcctgcccatcctgagacccgccggcaccggcccccccgccctggagagagtggacgcccagagcagaagagagagcctggacatcctggcccccggcagaagaagaaagaacatgagcgagttcctgggcgaggccagcatccccggccaggagccccccacccccagcagctgcagcctgcccagcggcagcagcggcagcaccaacaccggcgacagctggaagaacagagccgccagcagattcagcggcttcttcagcagcggccccagcaccagcgccttcggcagagaggtggacaagatggagcagctggagggcaagctgcacacctacagcctgttcggcctgcccagactgcccagaggcctgagattcgaccacgacagctgggaggaggagtacgacgaggacgaggacgaggacaacgcctgcctgagactggaggacagctggagagagctgatcgacggccacgagaagctgaccagaagacagtgccaccagcaggaggccgtgtgggagctgctgcacaccgaggccagctacatcagaaagctgagagtgatcatcaacctgttcctgtgctgcctgctgaacctgcaggagagcggcctgctgtgcgaggtggaggccgagagactgttcagcaacatccccgagatcgcccagctgcacagaagactgtgggccagcgtgatggcccccgtgctggagaaggccagaagaaccagagccctgctgcagcccggcgacttcctgaagggcttcaagatgttcggcagcctgttcaagccctacatcagatactgcatggaggaggagggctgcatggagtacatgagaggcctgctgagagacaacgacctgttcagagcctacatcacctgggccgagaagcacccccagtgccagagactgaagctgagcgacatgctggccaagccccaccagagactgaccaagtaccccctgctgctgaagagcgtgctgagaaagaccgaggagcccagagccaaggaggccgtggtggccatgatcggcagcgtggagagattcatccaccacgtgaacgcctgcatgagacagagacaggagagacagagactggccgccgtggtgagcagaatcgacgcctacgaggtggtggagagcagcagcgacgaggtggacaagctgctgaaggagttcctgcacctggacctgaccgcccccatccccggcgccagccccgaggagaccagacagctgctgctggagggcagcctgagaatgaaggagggcaaggacagcaagatggacgtgtactgcttcctgttcaccgacctgctgctggtgaccaaggccgtgaagaaggccgagagaaccagagtgatcagaccccccctgctggtggacaagatcgtgtgcagagagctgagagaccccggcagcttcctgctgatctacctgaacgagttccacagcgccgtgggcgcctacaccttccaggccagcggccaggccctgtgcagaggctgggtggacaccatctacaacgcccagaaccagctgcagcagctgagagcccaggagccccccggcagccagcagcccctgcagagcctggaggaggaggaggacgagcaggaggaggaggaggaggaggaggaggaggaggaggagggcgaggacagcggcaccagcgccgccagcagccccaccatcatgagaaagagcagcggcagccccgacagccagcactgcgccagcgacggcagcaccgagaccctggccatggtggtggtggagcccggcgacaccctgagcagccccgagttcgacagcggccccttcagcagccagagcgacgagaccagcctgagcaccaccgccagcagcgccacccccaccagcgagctgctgcccctgggccccgtggacggcagaagctgcagcatggacagcgcctacggcaccctgagccccaccagcctgcaggacttcgtggcccccggccccatggccgagctggtgcccagagcccccgagagccccagagtgcccagccccccccccagccccagactgagaagaagaacccccgtgcagctgctgagctgccccccccacctgctgaagagcaagagcgaggccagcctgctgcagctgctggccggcgccggcacccacggcacccccagcgcccccagcagaagcctgagcgagctgtgcctggccgtgcccgcccccggcatcagaacccagggcagcccccaggaggccggccccagctgggactgcagaggcgcccccagccccggcagcggccccggcctggtgggctgcctggccggcgagcccgccggcagccacagaaagagatgcggcgacctgcccagcggcgccagccccagagtgcagcccgagcccccccccggcgtgagcgcccagcacagaaagctgaccctggcccagctgtacagaatcagaaccaccctgctgctgaacagcaccctgaccgccagcgaggtgtag

SEQ ID NO: 93582 - DNA, 2793 bp, synthetic construct
  misc_feature 1..2793: note = Description of Artificial Sequence: Synthetic coding sequence
  source 1..2793: mol_type = other DNA
atgcactacgacggccacgtgagattcgacctgcccccccagggcagcgtgctggccagaaacgtgagcaccagaagctgcccccccagaaccagccccgccgtggacctggaggaggaggaggaggagagcagcgtggacggcaagggcgacagaaagagcaccggcctgaagctgagcaagaagaaggccagaagaagacacaccgacgaccccagcaaggagtgcttcaccctgaagttcgacctgaacgtggacatcgagaccgagatcgtgcccgccatgaagaagaagagcctgggcgaggtgctgctgcccgtgttcgagagaaagggcatcgccctgggcaaggtggacatctacctggaccagagcaacacccccctgagcctgaccttcgaggcctacagattcggcggccactacctgagagtgaaggcccccgccaagcccggcgacgagggcaaggtggagcagggcatgaaggacagcaagagcctgagcctgcccatcctgagacccgccggcaccggcccccccgccctggagagagtggacgcccagagcagaagagagagcctggacatcctggcccccggcagaagaagaaagaacatgagcgagttcctgggcgaggccagcatccccggccaggagccccccacccccagcagctgcagcctgcccagcggcagcagcggcagcaccaacaccggcgacagctggaagaacagagccgccagcagattcagcggcttcttcagcagcggccccagcaccagcgccttcggcagagaggtggacaagatggagcagctggagggcaagctgcacacctacagcctgttcggcctgcccagactgcccagaggcctgagattcgaccacgacagctgggaggaggagtacgacgaggacgaggacgaggacaacgcctgcctgagactggaggacagctggagagagctgatcgacggccacgagaagctgaccagaagacagtgccaccagcaggaggccgtgtgggagctgctgcacaccgaggccagctacatcagaaagctgagagtgatcatcaacctgttcctgtgctgcctgctgaacctgcaggagagcggcctgctgtgcgaggtggaggccgagagactgttcagcaacatccccgagatcgcccagctgcacagaagactgtgggccagcgtgatggcccccgtgctggagaaggccagaagaaccagagccctgctgcagcccggcgacttcctgaagggcttcaagatgttcggcagcctgttcaagccctacatcagatactgcatggaggaggagggctgcatggagtacatgagaggcctgctgagagacaacgacctgttcagagcctacatcacctgggccgagaagcacccccagtgccagagactgaagctgagcgacatgctggccaagccccaccagagactgaccaagtaccccctgctgctgaagagcgtgctgagaaagaccgaggagcccagagccaaggaggccgtggtggccatgatcggcagcgtggagagattcatccaccacgtgaacgcctgcatgagacagagacaggagagacagagactggccgccgtggtgagcagaatcgacgcctacgaggtggtggagagcagcagcgacgaggtggacaagctgctgaaggagttcctgcacctggacctgaccgcccccatccccggcgccagccccgaggagaccagacagctgctgctggagggcagcctgagaatgaaggagggcaaggacagcaagatggacgtgtactgcttcctgttcaccgacctgctgctggtgaccaaggccgtgaagaaggccgagagaaccagagtgatcagaccccccctgctggtggacaagatcgtgtgcagagagctgagagaccccggcagcttcctgctgatctacctgaacgagttccacagcgccgtgggcgcctacaccttccaggccagcggccaggccctgtgcagaggctgggtggacaccatctacaacgcccagaaccagctgcagcagctgagagcccaggagccccccggcagccagcagcccctgcagagcctggaggaggaggaggacgagcaggaggaggaggaggaggaggaggaggaggaggaggagggcgaggacagcggcaccagcgccgccagcagccccaccatcatgagaaagagcagcggcagccccgacagccagcactgcgccagcgacggcagcaccgagaccctggccatggtggtggtggagcccggcgacaccctgagcagccccgagttcgacagcggccccttcagcagccagagcgacgagaccagcctgagcaccaccgccagcagcgccacccccaccagcgagctgctgcccctgggccccgtggacggcagaagctgcagcatggacagcgcctacggcaccctgagccccaccagcctgcaggacttcgtggcccccggccccatggccgagctggtgcccagagcccccgagagccccagagtgcccagccccccccccagccccagactgagaagaagaacccccgtgcagctgctgagctgccccccccacctgctgaagagcaagagcgaggccagcctgctgcagctgctggccggcgccggcacccacggcacccccagcgcccccagcagaagcctgagcgagctgtgcctggccgtgcccgcccccgcccaggaggccgaccccggccccgccctgcccaaccaggaccaccccgccgcctag

SEQ ID NO: 93583 - DNA, 3021 bp, synthetic construct; identical to SEQ ID NO: 93581
  misc_feature 1..3021: note = Description of Artificial Sequence: Synthetic coding sequence
  source 1..3021: mol_type = other DNA

SEQ ID NO: 93584 - DNA, 3132 bp, synthetic construct
  misc_feature 1..3132: note = Description of Artificial Sequence: Synthetic coding sequence
  source 1..3132: mol_type = other DNA
atggacaagggcagagccgccaaggtgtgccaccacgccgactgccagcagctgcacagaagaggccccctgaacctgtgcgaggcctgcgacagcaagttccacagcaccatgcactacgacggccacgtgagattcgacctgcccccccagggcagcgtgctggccagaaacgtgagcaccagaagctgcccccccagaaccagccccgccgtggacctggaggaggaggaggaggagagcagcgtggacggcaagggcgacagaaagagcaccggcctgaagctgagcaagaagaaggccagaagaagacacaccgacgaccccagcaaggagtgcttcaccctgaagttcgacctgaacgtggacatcgagaccgagatcgtgcccgccatgaagaagaagagcctgggcgaggtgctgctgcccgtgttcgagagaaagggcatcgccctgggcaaggtggacatctacctggaccagagcaacacccccctgagcctgaccttcgaggcctacagattcggcggccactacctgagagtgaaggcccccgccaagcccggcgacgagggcaaggtggagcagggcatgaaggacagcaagagcctgagcctgcccatcctgagacccgccggcaccggcccccccgccctggagagagtggacgcccagagcagaagagagagcctggacatcctggcccccggcagaagaagaaagaacatgagcgagttcctgggcgaggccagcatccccggccaggagccccccacccccagcagctgcagcctgcccagcggcagcagcggcagcaccaacaccggcgacagctggaagaacagagccgccagcagattcagcggcttcttcagcagcggccccagcaccagcgccttcggcagagaggtggacaagatggagcagctggagggcaagctgcacacctacagcctgttcggcctgcccagactgcccagaggcctgagattcgaccacgacagctgggaggaggagtacgacgaggacgaggacgaggacaacgcctgcctgagactggaggacagctggagagagctgatcgacggccacgagaagctgaccagaagacagtgccaccagcaggaggccgtgtgggagctgctgcacaccgaggccagctacatcagaaagctgagagtgatcatcaacctgttcctgtgctgcctgctgaacctgcaggagagcggcctgctgtgcgaggtggaggccgagagactgttcagcaacatccccgagatcgcccagctgcacagaagactgtgggccagcgtgatggcccccgtgctggagaaggccagaagaaccagagccctgctgcagcccggcgacttcctgaagggcttcaagatgttcggcagcctgttcaagccctacatcagatactgcatggaggaggagggctgcatggagtacatgagaggcctgctgagagacaacgacctgttcagagcctacatcacctgggccgagaagcacccccagtgccagagactgaagctgagcgacatgctggccaagccccaccagagactgaccaagtaccccctgctgctgaagagcgtgctgagaaagaccgaggagcccagagccaaggaggccgtggtggccatgatcggcagcgtggagagattcatccaccacgtgaacgcctgcatgagacagagacaggagagacagagactggccgccgtggtgagcagaatcgacgcctacgaggtggtggagagcagcagcgacgaggtggacaagctgctgaaggagttcctgcacctggacctgaccgcccccatccccggcgccagccccgaggagaccagacagctgctgctggagggcagcctgagaatgaaggagggcaaggacagcaagatggacgtgtactgcttcctgttcaccgacctgctgctggtgaccaaggccgtgaagaaggccgagagaaccagagtgatcagaccccccctgctggtggacaagatcgtgtgcagagagctgagagaccccggcagcttcctgctgatctacctgaacgagttccacagcgccgtgggcgcctacaccttccaggccagcggccaggccctgtgcagaggctgggtggacaccatctacaacgcccagaaccagctgcagcagctgagagcccaggagccccccggcagccagcagcccctgcagagcctggaggaggaggaggacgagcaggaggaggaggaggaggaggaggaggaggaggaggagggcgaggacagcggcaccagcgccgccagcagccccaccatcatgagaaagagcagcggcagccccgacagccagcactgcgccagcgacggcagcaccgagaccctggccatggtggtggtggagcccggcgacaccctgagcagccccgagttcgacagcggccccttcagcagccagagcgacgagaccagcctgagcaccaccgccagcagcgccacccccaccagcgagctgctgcccctgggccccgtggacggcagaagctgcagcatggacagcgcctacggcaccctgagccccaccagcctgcaggacttcgtggcccccggccccatggccgagctggtgcccagagcccccgagagccccagagtgcccagccccccccccagccccagactgagaagaagaacccccgtgcagctgctgagctgccccccccacctgctgaagagcaagagcgaggccagcctgctgcagctgctggccggcgccggcacccacggcacccccagcgcccccagcagaagcctgagcgagctgtgcctggccgtgcccgcccccggcatcagaacccagggcagcccccaggaggccggccccagctgggactgcagaggcgcccccagccccggcagcggccccggcctggtgggctgcctggccggcgagcccgccggcagccacagaaagagatgcggcgacctgcccagcggcgccagccccagagtgcagcccgagcccccccccggcgtgagcgcccagcacagaaagctgaccctggcccagctgtacagaatcagaaccaccctgctgctgaacagcaccctgaccgccagcgaggtgtag

SEQ ID NO: 93585 - DNA, 3021 bp, synthetic construct; identical to SEQ ID NO: 93581
  misc_feature 1..3021: note = Description of Artificial Sequence: Synthetic coding sequence
  source 1..3021: mol_type = other DNA

SEQ ID NO: 93586 - DNA, 2559 bp, synthetic construct
  misc_feature 1..2559: note = Description of Artificial Sequence: Synthetic coding sequence
  source 1..2559: mol_type = other DNA
atgaacagcgtgctgaccaagcacggcagcccccccagaagctggctgagcctgtgcagcggcaccgacgaccagagccccgccgagaagaagggcctgagatgccagaaccccgcctgcatggacaagggcagagccgccaaggtgtgccaccacgccgactgccagcagctgcacagaagaggccccctgaacctgtgcgaggcctgcgacagcaagttccacagcaccatgcactacgacggccacgtgagattcgacctgcccccccagggcagcgtgctggccagaaacgtgagcaccagaagctgcccccccagaaccagccccgccgtggacctggaggaggaggaggaggagagcagcgtggacggcaagggcgacagaaagagcaccggcctgaagctgagcaagaagaaggccagaagaagacacaccgacgaccccagcaaggagtgcttcaccctgaagttcgacctgaacgtggacatcgagaccgagatcgtgcccgccatgaagaagaagagcctgggcgaggtgctgctgcccgtgttcgagagaaagggcatcgccctgggcaaggtggacatctacctggaccagagcaacacccccctgagcctgaccttcgaggcctacagattcggcggccactacctgagagtgaaggcccccgccaagcccggcgacgagggcaaggtggagcagggcatgaaggacagcaagagcctgagcctgcccatcctgagacccgccggcaccggcccccccgccctggagagagtggacgcccagagcagaagagagagcctggacatcctggcccccggcagaagaagaaagaacatgagcgagttcctgggcgaggccagcatccccggccaggagccccccacccccagcagctgcagcctgcccagcggcagcagcggcagcaccaacaccggcgacagctggaagaacagagccgccagcagattcagcggcttcttcagcagcggccccagcaccagcgccttcggcagagaggtggacaagatggagcagctggagggcaagctgcacacctacagcctgttcggcctgcccagactgcccagaggcctgagattcgaccacgacagctgggaggaggagtacgacgaggacgaggacgaggacaacgcctgcctgagactggaggacagctggagagagctgatcgacggccacgagaagctgaccagaagacagtgccaccagcaggaggccgtgtgggagctgctgcacaccgaggccagctacatcagaaagctgagagtgatcatcaacctgttcctgtgctgcctgctgaacctgcaggagagcggcctgctgtgcgaggtggaggccgagagactgttcagcaacatccccgagatcgcccagctgcacagaagactgtgggccagcgtgatggcccccgtgctggagaaggccagaagaaccagagccctgctgcagcccggcgacttcctgaagggcttcaagatgttcggcagcctgttcaagccctacatcagatactgcatggaggaggagggctgcatggagtacatgagaggcctgctgagagacaacgacctgttcagagcctacatcacctgggccgagaagcacccccagtgccagagactgaagctgagcgacatgctggccaagccccaccagagactgaccaagtaccccctgctgctgaagagcgtgctgagaaagaccgaggagcccagagccaaggaggccgtggtggccatgatcggcagcgtggagagattcatccaccacgtgaacgcctgcatgagacagagacaggagagacagagactggccgccgtggtgagcagaatcgacgcctacgaggtggtggagagcagcagcgacgaggtggacaagctgctgaaggagttcctgcacctggacctgaccgcccccatccccggcgccagccccgaggagaccagacagctgctgctggagggcagcctgagaatgaaggagggcaaggacagcaagatggacgtgtactgcttcctgttcaccgacctgctgctggtgaccaaggccgtgaagaaggccgagagaaccagagtgatcagaccccccctgctggtggacaagatcgtgtgcagagagctgagagaccccggcagcttcctgctgatctacctgaacgagttccacagcgccgtgggcgcctacaccttccaggccagcggccaggccctgtgcagaggctgggtggacaccatctacaacgcccagaaccagctgcagcagctgagagcccaggagccccccggcagccagcagcccctgcagagcctggaggaggaggaggacgagcaggaggaggaggaggaggaggaggaggaggaggaggagggcgaggacagcggcaccagcgccgccagcagccccaccatcatgagaaagagcagcggcagccccgacagccagcactggaagctgaccctggcccagctgtacagaatcagaaccaccctgctgctgaacagcaccctgaccgccagcgaggtgtag

SEQ ID NO: 93587 - DNA, 3252 bp, synthetic construct
  misc_feature 1..3252: note = Description of Artificial Sequence: Synthetic coding sequence
  source 1..3252: mol_type = other DNA
atgaacagcgtgctgaccaagcacggcagcccccccagaagctggctgagcctgtgcagcggcaccgacgaccagagccccgccgagaagaagggcctgagatgccagaaccccgcctgcatggacaagggcagagccgccaaggtgtgccaccacgccgactgccagcagctgcacagaagaggccccctgaacctgtgcgaggcctgcgacagcaagttccacagcaccatgcactacgacggccacgtgagattcgacctgcccccccagggcagcgtgctggccagaaacgtgagcaccagaagctgcccccccagaaccagccccgccgtggacctggaggaggaggaggaggagagcagcgtggacggcaagggcgacagaaagagcaccggcctgaagctgagcaagaagaaggccagaagaagacacaccgacgaccccagcaaggagtgcttcaccctgaagttcgacctgaacgtggacatcgagaccgagatcgtgcccgccatgaagaagaagagcctgggcgaggtgctgctgcccgtgttcgagagaaagggcatcgccctgggcaaggtggacatctacctggaccagagcaacacccccctgagcctgaccttcgaggcctacagattcggcggccactacctgagagtgaaggcccccgccaagcccggcgacgagggcaaggtggagcagggcatgaaggacagcaagagcctgagcctgcccatcctgagacccgccggcaccggcccccccgccctggagagagtggacgcccagagcagaagagagagcctggacatcctggcccccggcagaagaagaaagaacatgagcgagttcctgggcgaggccagcatccccggccaggagccccccacccccagcagctgcagcctgcccagcggcagcagcggcagcaccaacaccggcgacagctggaagaacagagccgccagcagattcagcggcttcttcagcagcggccccagcaccagcgccttcggcagagaggtggacaagatggagcagctggagggcaagctgcacacctacagcctgttcggcctgcccagactgcccagaggcctgagattcgaccacgacagctgggaggaggagtacgacgaggacgaggacgaggacaacgcctgcctgagactggaggacagctggagagagctgatcgacggccacgagaagctgaccagaagacagtgccaccagcaggaggccgtgtgggagctgctgcacaccgaggccagctacatcagaaagctgagagtgatcatcaacctgttcctgtgctgcctgctgaacctgcaggagagcggcctgctgtgcgaggtggaggccgagagactgttcagcaacatccccgagatcgcccagctgcacagaagactgtgggccagcgtgatggcccccgtgctggagaaggccagaagaaccagagccctgctgcagcccggcgacttcctgaagggcttcaagatgttcggcagcctgttcaagccctacatcagatactgcatggaggaggagggctgcatggagtacatgagaggcctgctgagagacaacgacctgttcagagcctacatcacctgggccgagaagcacccccagtgccagagactgaagctgagcgacatgctggccaagccccaccagagactgaccaagtaccccctgctgctgaagagcgtgctgagaaagaccgaggagcccagagccaaggaggccgtggtggccatgatcggcagcgtggagagattcatccaccacgtgaacgcctgcatgagacagagacaggagagacagagactggccgccgtggtgagcagaatcgacgcctacgaggtggtggagagcagcagcgacgaggtggacaagctgctgaaggagttcctgcacctggacctgaccgcccccatccccggcgccagccccgaggagaccagacagctgctgctggagggcagcctgagaatgaaggagggcaaggacagcaagatggacgtgtactgcttcctgttcaccgacctgctgctggtgaccaaggccgtgaagaaggccgagagaaccagagtgatcagaccccccctgctggtggacaagatcgtgtgcagagagctgagagaccccggcagcttcctgctgatctacctgaacgagttccacagcgccgtgggcgcctacaccttccaggccagcggccaggccctgtgcagaggctgggtggacaccatctacaacgcccagaaccagctgcagcagctgagagcccaggagccccccggcagccagcagcccctgcagagcctggaggaggaggaggacgagcaggaggaggaggaggaggaggaggaggaggaggaggagggcgaggacagcggcaccagcgccgccagcagccccaccatcatgagaaagagcagcggcagccccgacagccagcactgcgccagcgacggcagcaccgagaccctggccatggtggtggtggagcccggcgacaccctgagcagccccgagttcgacagcggccccttcagcagccagagcgacgagaccagcctgagcaccaccgccagcagcgccacccccaccagcgagctgctgcccctgggccccgtggacggcagaagctgcagcatggacagcgcctacggcaccctgagccccaccagcctgcaggacttcgtggcccccggccccatggccgagctggtgcccagagcccccgagagccccagagtgcccagccccccccccagccccagactgagaagaagaacccccgtgcagctgctgagctgccccccccacctgctgaagagcaagagcgaggccagcctgctgcagctgctggccggcgccggcacccacggcacccccagcgcccccagcagaagcctgagcgagctgtgcctggccgtgcccgcccccggcatcagaacccagggcagcccccaggaggccggccccagctgggactgcagaggcgcccccagccccggcagcggccccggcctggtgggctgcctggccggcgagcccgccggcagccacagaaagagatgcggcgacctgcccagcggcgccagccccagagtgcagcccgagcccccccccggcgtgagcgcccagcacagaaagctgaccctggcccagctgtacagaatcagaaccaccctgctgctgaacagcaccctgaccgccagcgaggtgtag

SEQ ID NO: 93588 - DNA, 3021 bp, synthetic construct; identical to SEQ ID NO: 93581
  misc_feature 1..3021: note = Description of Artificial Sequence: Synthetic coding sequence
  source 1..3021: mol_type = other DNA

SEQ ID NO: 93589 - DNA, 3189 bp, synthetic construct
  misc_feature 1..3189: note = Description of Artificial Sequence: Synthetic coding sequence
  source 1..3189: mol_type = other DNA
atggacgaccagagccccgccgagaagaagggcctgagatgccagaaccccgcctgcatggacaagggcagagccgccaaggtgtgccaccacgccgactgccagcagctgcacagaagaggccccctgaacctgtgcgaggcctgcgacagcaagttccacagcaccatgcactacgacggccacgtgagattcgacctgcccccccagggcagcgtgctggccagaaacgtgagcaccagaagctgcccccccagaaccagccccgccgtggacctggaggaggaggaggaggagagcagcgtggacggcaagggcgacagaaagagcaccggcctgaagctgagcaagaagaaggccagaagaagacacaccgacgaccccagcaaggagtgcttcaccctgaagttcgacctgaacgtggacatcgagaccgagatcgtgcccgccatgaagaagaagagcctgggcgaggtgctgctgcccgtgttcgagagaaagggcatcgccctgggcaaggtggacatctacctggaccagagcaacacccccctgagcctgaccttcgaggcctacagattcggcggccactacctgagagtgaaggcccccgccaagcccggcgacgagggcaaggtggagcagggcatgaaggacagcaagagcctgagcctgcccatcctgagacccgccggcaccggcccccccgccctggagagagtggacgcccagagcagaagagagagcctggacatcctggcccccggcagaagaagaaagaacatgagcgagttcctgggcgaggccagcatccccggccaggagccccccacccccagcagctgcagcctgcccagcggcagcagcggcagcaccaacaccggcgacagctggaagaacagagccgccagcagattcagcggcttcttcagcagcggccccagcaccagcgccttcggcagagaggtggacaagatggagcagctggagggcaagctgcacacctacagcctgttcggcctgcccagactgcccagaggcctgagattcgaccacgacagctgggaggaggagtacgacgaggacgaggacgaggacaacgcctgcctgagactggaggacagctggagagagctgatcgacggccacgagaagctgaccagaagacagtgccaccagcaggaggccgtgtgggagctgctgcacaccgaggccagctacatcagaaagctgagagtgatcatcaacctgttcctgtgctgcctgctgaacctgcaggagagcggcctgctgtgcgaggtggaggccgagagactgttcagcaacatccccgagatcgcccagctgcacagaagactgtgggccagcgtgatggcccccgtgctggagaaggccagaagaaccagagccctgctgcagcccggcgacttcctgaagggcttcaagatgttcggcagcctgttcaagccctacatcagatactgcatggaggaggagggctgcatggagtacatgagaggcctgctgagagacaacgacctgttcagagcctacatcacctgggccgagaagcacccccagtgccagagactgaagctgagcgacatgctggccaagccccaccagagactgaccaagtaccccctgctgctgaagagcgtgctgagaaagaccgaggagcccagagccaaggaggccgtggtggccatgatcggcagcgtggagagattcatccaccacgtgaacgcctgcatgagacagagacaggagagacagagactggccgccgtggtgagcagaatcgacgcctacgaggtggtggagagcagcagcgacgaggtggacaagctgctgaaggagttcctgcacctggacctgaccgcccccatccccggcgccagccccgaggagaccagacagctgctgctggagggcagcctgagaatgaaggagggcaaggacagcaagatggacgtgtactgcttcctgttcaccgacctgctgctggtgaccaaggccgtgaagaaggccgagagaaccagagtgatcagaccccccctgctggtggacaagatcgtgtgcagagagctgagagaccccggcagcttcctgctgatctacctgaacgagttccacagcgccgtgggcgcctacaccttccaggccagcggccaggccctgtgcagaggctgggtggacaccatctacaacgcccagaaccagctgcagcagctgagagcccaggagccccccggcagccagcagcccctgcagagcctggaggaggaggaggacgagcaggaggaggaggaggaggaggaggaggaggaggaggagggcgaggacagcggcaccagcgccgccagcagccccaccatcatgagaaagagcagcggcagccccgacagccagcactgcgccagcgacggcagcaccgagaccctggccatggtggtggtggagcccggcgacaccctgagcagccccgagttcgacagcggccccttcagcagccagagcgacgagaccagcctgagcaccaccgccagcagcgccacccccaccagcgagctgctgcccctgggccccgtggacggcagaagctgcagcatggacagcgcctacggcaccctgagccccaccagcctgcaggacttcgtggcccccggccccatggccgagctggtgcccagagcccccgagagccccagagtgcccagccccccccccagccccagactgagaagaagaacccccgtgcagctgctgagctgccccccccacctgctgaagagcaagagcgaggccagcctgctgcagctgctggccggcgccggcacccacggcacccccagcgcccccagcagaagcctgagcgagctgtgcctggccgtgcccgcccccggcatcagaacccagggcagcccccaggaggccggccccagctgggactgcagaggcgcccccagccccggcagcggccccggcctggtgggctgcctggccggcgagcccgccggcagccacagaaagagatgcggcgacctgcccagcggcgccagccccagagtgcagcccgagcccccccccggcgtgagcgcccagcacagaaagctgaccctggcccagctgtacagaatcagaaccaccctgctgctgaacagcaccctgaccgccagcgaggtgtag

SEQ ID NO: 93590 - DNA, 3228 bp, synthetic construct
  misc_feature 1..3228: note = Description of Artificial Sequence: Synthetic coding sequence
  source 1..3228: mol_type = other DNA
atgggcaccggccccggcgtgagcggcagactggccgccagcagacccggccccggcctgcccctgagagacagcgagcccagctgggccggcggcagagccagagacggcgacagccaggtgtgccaccacgccgactgccagcagctgcacagaagaggccccctgaacctgtgcgaggcctgcgacagcaagttccacagcaccatgcactacgacggccacgtgagattcgacctgcccccccagggcagcgtgctggccagaaacgtgagcaccagaagctgcccccccagaaccagccccgccgtggacctggaggaggaggaggaggagagcagcgtggacggcaagggcgacagaaagagcaccggcctgaagctgagcaagaagaaggccagaagaagacacaccgacgaccccagcaaggagtgcttcaccctgaagttcgacctgaacgtggacatcgagaccgagatcgtgcccgccatgaagaagaagagcctgggcgaggtgctgctgcccgtgttcgagagaaagggcatcgccctgggcaaggtggacatctacctggaccagagcaacacccccctgagcctgaccttcgaggcctacagattcggcggccactacctgagagtgaaggcccccgccaagcccggcgacgagggcaaggtggagcagggcatgaaggacagcaagagcctgagcctgcccatcctgagacccgccggcaccggcccccccgccctggagagagtggacgcccagagcagaagagagagcctggacatcctggcccccggcagaagaagaaagaacatgagcgagttcctgggcgaggccagcatccccggccaggagccccccacccccagcagctgcagcctgcccagcggcagcagcggcagcaccaacaccggcgacagctggaagaacagagccgccagcagattcagcggcttcttcagcagcggccccagcaccagcgccttcggcagagaggtggacaagatggagcagctggagggcaagctgcacacctacagcctgttcggcctgcccagactgcccagaggcctgagattcgaccacgacagctgggaggaggagtacgacgaggacgaggacgaggacaacgcctgcctgagactggaggacagctggagagagctgatcgacggccacgagaagctgaccagaagacagtgccaccagcaggaggccgtgtgggagctgctgcacaccgaggccagctacatcagaaagctgagagtgatcatcaacctgttcctgtgctgcctgctgaacctgcaggagagcggcctgctgtgcgaggtggaggccgagagactgttcagcaacatccccgagatcgcccagctgcacagaagactgtgggccagcgtgatggcccccgtgctggagaaggccagaagaaccagagccctgctgcagcccggcgacttcctgaagggcttcaagatgttcggcagcctgttcaagccctacatcagatactgcatggaggaggagggctgcatggagtacatgagaggcctgctgagagacaacgacctgttcagagcctacatcacctgggccgagaagcacccccagtgccagagactgaagctgagcgacatgctggccaagccccaccagagactgaccaagtaccccctgctgctgaagagcgtgctgagaaagaccgaggagcccagagccaaggaggccgtggtggccatgatcggcagcgtggagagattcatccaccacgtgaacgcctgcatgagacagagacaggagagacagagactggccgccgtggtgagcagaatcgacgcctacgaggtggtggagagcagcagcgacgaggtggacaagctgctgaaggagttcctgcacctggacctgaccgcccccatccccggcgccagccccgaggagaccagacagctgctgctggagggcagcctgagaatgaaggagggcaaggacagcaagatggacgtgtactgcttcctgttcaccgacctgctgctggtgaccaaggccgtgaagaaggccgagagaaccagagtgatcagaccccccctgctggtggacaagatcgtgtgcagagagctgagagaccccggcagcttcctgctgatctacctgaacgagttccacagcgccgtgggcgcctacaccttccaggccagcggccaggccctgtgcagaggctgggtggacaccatctacaacgcccagaaccagctgcagcagctgagagcccaggagccccccggcagccagcagcccctgcagagcctggaggaggaggaggacgagcaggaggaggaggaggaggaggaggaggaggaggaggagggcgaggacagcggcaccagcgccgccagcagccccaccatcatgagaaagagcagcggcagccccgacagccagcactgcgccagcgacggcagcaccgagaccctggccatggtggtggtggagcccggcgacaccctgagcagccccgagttcgacagcggccccttcagcagccagagcgacgagaccagcctgagcaccaccgccagcagcgccacccccaccagcgagctgctgcccctgggccccgtggacggcagaagctgcagcatggacagcgcctacggcaccctgagccccaccagcctgcaggacttcgtggcccccggccccatggccgagctggtgcccagagcccccgagagccccagagtgcccagccccccccccagccccagactgagaagaagaacccccgtgcagctgctgagctgccccccccacctgctgaagagcaagagcgaggccagcctgctgcagctgctggccggcgccggcacccacggcacccccagcgcccccagcagaagcctgagcgagctgtgcctggccgtgcccgcccccggcatcagaacccagggcagcccccaggaggccggccccagctgggactgcagaggcgcccccagccccggcagcggccccggcctggtgggctgcctggccggcgagcccgccggcagccacagaaagagatgcggcgacctgcccagcggcgccagccccagagtgcagcccgagcccccccccggcgtgagcgcccagcacagaaagctgaccctggcccagctgtacagaatcagaaccaccctgctgctgaacagcaccctgaccgccagcgaggtgtag

SEQ ID NO: 93591 - DNA, 2739 bp, synthetic construct
  misc_feature 1..2739: note = Description of Artificial Sequence: Synthetic coding sequence
  source 1..2739: mol_type = other DNA
atgaagaagaagagcctgggcgaggtgctgctgcccgtgttcgagagaaagggcatcgccctgggcaaggtggacatctacctggaccagagcaacacccccctgagcctgaccttcgaggcctacagattcggcggccactacctgagagtgaaggcccccgccaagcccggcgacgagggcaaggtggagcagggcatgaaggacagcaagagcctgagcctgcccatcctgagacccgccggcaccggcccccccgccctggagagagtggacgcccagagcagaagagagagcctggacatcctggcccccggcagaagaagaaagaacatgagcgagttcctgggcgaggccagcatccccggccaggagccccccacccccagcagctgcagcctgcccagcggcagcagcggcagcaccaacaccggcgacagctggaagaacagagccgccagcagattcagcggcttcttcagcagcggccccagcaccagcgccttcggcagagaggtggacaagatggagcagctggagggcaagctgcacacctacagcctgttcggcctgcccagactgcccagaggcctgagattcgaccacgacagctgggaggaggagtacgacgaggacgaggacgaggacaacgcctgcctgagactggaggacagctggagagagctgatcgacggccacgagaagctgaccagaagacagtgccaccagcaggaggccgtgtgggagctgctgcacaccgaggccagctacatcagaaagctgagagtgatcatcaacctgttcctgtgctgcctgctgaacctgcaggagagcggcctgctgtgcgaggtggaggccgagagactgttcagcaacatccccgagatcgcccagctgcacagaagactgtgggccagcgtgatggcccccgtgctggagaaggccagaagaaccagagccctgctgcagcccggcgacttcctgaagggcttcaagatgttcggcagcctgttcaagccctacatcagatactgcatggaggaggagggctgcatggagtacatgagaggcctgctgagagacaacgacctgttcagagcctacatcacctgggccgagaagcacccccagtgccagagactgaagctgagcgacatgctggccaagccccaccagagactgaccaagtaccccctgctgctgaagagcgtgctgagaaagaccgaggagcccagagccaaggaggccgtggtggccatgatcggcagcgtggagagattcatccaccacgtgaacgcctgcatgagacagagacaggagagacagagactggccgccgtggtgagcagaatcgacgcctacgaggtggtggagagcagcagcgacgaggtggacaagctgctgaaggagttcctgcacctggacctgaccgcccccatccccggcgccagccccgaggagaccagacagctgctgctggagggcagcctgagaatgaaggagggcaaggacagcaagatggacgtgtactgcttcctgttcaccgacctgctgctggtgaccaaggccgtgaagaaggccgagagaaccagagtgatcagaccccccctgctggtggacaagatcgtgtgcagagagctgagagaccccggcagcttcctgctgatctacctgaacgagttccacagcgccgtgggcgcctacaccttccaggccagcggccaggccctgtgcagaggctgggtggacaccatctacaacgcccagaaccagctgcagcagctgagagcccaggagccccccggcagccagcagcccctgcagagcctggaggaggaggaggacgagcaggaggaggaggaggaggaggaggaggaggaggaggagggcgaggacagcggcaccagcgccgccagcagccccaccatcatgagaaagagcagcggcagccccgacagccagcactgcgccagcgacggcagcaccgagaccctggccatggtggtggtggagcccggcgacaccctgagcagccccgagttcgacagcggccccttcagcagccagagcgacgagaccagcctgagcaccaccgccagcagcgccacccccaccagcgagctgctgcccctgggccccgtggacggcagaagctgcagcatggacagcgcctacggcaccctgagccccaccagcctgcaggacttcgtggcccccggccccatggccgagctggtgcccagagcccccgagagccccagagtgcccagccccccccccagccccagactgagaagaagaacccccgtgcagctgctgagctgccccccccacctgctgaagagcaagagcgaggccagcctgctgcagctgctggccggcgccggcacccacggcacccccagcgcccccagcagaagcctgagcgagctgtgcctggccgtgcccgcccccggcatcagaacccagggcagcccccaggaggccggccccagctgggactgcagaggcgcccccagccccggcagcggccccggcctggtgggctgcctggccggcgagcccgccggcagccacagaaagagatgcggcgacctgcccagcggcgccagccccagagtgcagcccgagcccccccccggcgtgagcgcccagcacagaaagctgaccctggcccagctgtacagaatcagaaccaccctgctgctgaacagcaccctgaccgccagcgaggtgtag

SEQ ID NO: 93592 - DNA, 3258 bp, synthetic construct
  misc_feature 1..3258: note = Description of Artificial Sequence: Synthetic coding sequence
  source 1..3258: mol_type = other DNA
atgagcctgggcgagagaggcagcccccagaccttcggcggcagcagcgtgagcaagggcagcgacgccggccacgaccagagccccgccgagaagaagggcctgagatgccagaaccccgcctgcatggacaagggcagagccgccaaggtgtgccaccacgccgactgccagcagctgcacagaagaggccccctgaacctgtgcgaggcctgcgacagcaagttccacagcaccatgcactacgacggccacgtgagattcgacctgcccccccagggcagcgtgctggccagaaacgtgagcaccagaagctgcccccccagaaccagccccgccgtggacctggaggaggaggaggaggagagcagcgtggacggcaagggcgacagaaagagcaccggcctgaagctgagcaagaagaaggccagaagaagacacaccgacgaccccagcaaggagtgcttcaccctgaagttcgacctgaacgtggacatcgagaccgagatcgtgcccgccatgaagaagaagagcctgggcgaggtgctgctgcccgtgttcgagagaaagggcatcgccctgggcaaggtggacatctacctggaccagagcaacacccccctgagcctgaccttcgaggcctacagattcggcggccactacctgagagtgaaggcccccgccaagcccggcgacgagggcaaggtggagcagggcatgaaggacagcaagagcctgagcctgcccatcctgagacccgccggcaccggcccccccgccctggagagagtggacgcccagagcagaagagagagcctggacatcctggcccccggcagaagaagaaagaacatgagcgagttcctgggcgaggccagcatccccggccaggagccccccacccccagcagctgcagcctgcccagcggcagcagcggcagcaccaacaccggcgacagctggaagaacagagccgccagcagattcagcggcttcttcagcagcggccccagcaccagcgccttcggcagagaggtggacaagatggagcagctggagggcaagctgcacacctacagcctgttcggcctgcccagactgcccagaggcctgagattcgaccacgacagctgggaggaggagtacgacgaggacgaggacgaggacaacgcctgcctgagactggaggacagctggagagagctgatcgacggccacgagaagctgaccagaagacagtgccaccagcaggaggccgtgtgggagctgctgcacaccgaggccagctacatcagaaagctgagagtgatcatcaacctgttcctgtgctgcctgctgaacctgcaggagagcggcctgctgtgcgaggtggaggccgagagactgttcagcaacatccccgagatcgcccagctgcacagaagactgtgggccagcgtgatggcccccgtgctggagaaggccagaagaaccagagccctgctgcagcccggcgacttcctgaagggcttcaagatgttcggcagcctgttcaagccctacatcagatactgcatggaggaggagggctgcatggagtacatgagaggcctgctgagagacaacgacctgttcagagcctacatcacctgggccgagaagcacccccagtgccagagactgaagctgagcgacatgctggccaagccccaccagagactgaccaagtaccccctgctgctgaagagcgtgctgagaaagaccgaggagcccagagccaaggaggccgtggtggccatgatcggcagcgtggagagattcatccaccacgtgaacgcctgcatgagacagagacaggagagacagagactggccgccgtggtgagcagaatcgacgcctacgaggtggtggagagcagcagcgacgaggtggacaagctgctgaaggagttcctgcacctggacctgaccgcccccatccccggcgccagccccgaggagaccagacagctgctgctggagggcagcctgagaatgaaggagggcaaggacagcaagatggacgtgtactgcttcctgttcaccgacctgctgctggtgaccaaggccgtgaagaaggccgagagaaccagagtgatcagaccccccctgctggtggacaagatcgtgtgcagagagctgagagaccccggcagcttcctgctgatctacctgaacgagttccacagcgccgtgggcgcctacaccttccaggccagcggccaggccctgtgcagaggctgggtggacaccatctacaacgcccagaaccagctgcagcagctgagagcccaggagccccccggcagccagcagcccctgcagagcctggaggaggaggaggacgagcaggaggaggaggaggaggaggaggaggaggaggaggagggcgaggacagcggcaccagcgccgccagcagccccaccatcatgagaaagagcagcggcagccccgacagccagcactgcgccagcgacggcagcaccgagaccctggccatggtggtggtggagcccggcgacaccctgagcagccccgagttcgacagcggccccttcagcagccagagcgacgagaccagcctgagcaccaccgccagcagcgccacccccaccagcgagctgctgcccctgggccccgtggacggcagaagctgcagcatggacagcgcctacggcaccctgagccccaccagcctgcaggacttcgtggcccccggccccatggccgagctggtgcccagagcccccgagagccccagagtgcccagccccccccccagccccagactgagaagaagaacccccgtgcagctgctgagctgccccccccacctgctgaagagcaagagcgaggccagcctgctgcagctgctggccggcgccggcacccacggcacccccagcgcccccagcagaagcctgagcgagctgtgcctggccgtgcccgcccccggcatcagaacccagggcagcccccaggaggccggccccagctgggactgcagaggcgcccccagccccggcagcggccccggcctggtgggctgcctggccggcgagcccgccggcagccacagaaagagatgcggcgacctgcccagcggcgccagccccagagtgcagcccgagcccccccccggcgtgagcgcccagcacagaaagctgaccctggcccagctgtacagaatcagaaccaccctgctgctgaacagcaccctgaccgccagcgaggtgtag

SEQ ID NO: 93593 - DNA, 2793 bp, synthetic construct; identical to SEQ ID NO: 93582
  misc_feature 1..2793: note = Description of Artificial Sequence: Synthetic coding sequence
  source 1..2793: mol_type = other DNA

SEQ ID NO: 93594 - DNA, 2373 bp, synthetic construct
  misc_feature 1..2373: note = Description of Artificial Sequence: Synthetic coding sequence
  source 1..2373: mol_type = other DNA
atgaaggccttcggccccccccacgagggccccctgcagggcctggtggccagcagaatcgagacctacggcggcagacacagagccagcgcccagagcaccgccggcagactgtaccccagaggctaccccgtgctggaccccagcagaagaagactgcagcagtacgtgcccttcgccagaggcagcggccaggccagaggcctgagccccatgagactgagagaccccgagcccgagaagagacacggcggccacgtgggcgccggcctgctgcacagccccaagctgaaggagctgaccaaggcccacgagctggaggtgagactgcacaccttcagcatgttcggcatgcccagactgccccccgaggacagaagacactgggagatcggcgagggcggcgacagcggcctgaccatcgagaagagctggagagagctggtgcccggccacaaggagatgagccaggagctgtgccaccagcaggaggccctgtgggagctgctgaccaccgagctgatctacgtgagaaagctgaagatcatgaccgacctgctggccgccggcctgctgaacctgcagagagtgggcctgctgatggaggtgagcgccgagaccctgttcggcaacgtgcccagcctgatcagaacccacagaagcttctgggacgaggtgctgggccccaccctggaggagaccagagccagcggccagcccctggaccccatcggcctgcagagcggcttcctgaccttcggccagagattccacccctacgtgcagtactgcctgagagtgaagcagaccatggcctacgccagagagcagcaggagaccaaccccctgttccacgccttcgtgcagtggtgcgagaagcacaagagaagcggcagacagatgctgtgcgacctgctgatcaagccccaccagagaatcaccaagtaccccctgctgctgcacgccgtgctgaagagaagccccgaggccagagcccaggaggccctgaacgccatgatcgaggccgtggagagcttcctgagacacatcaacggccaggtgagacagggcgaggagcaggagagcctggccgccgccgcccagagaatcggcccctacgaggtgctggagccccccagcgacgaggtggagaagaacctgagacccttcagcaccctggacctgaccagccccatgctgggcgtggccagcgagcacaccagacagctgctgctggagggccccgtgagagtgaaggagggcagagagggcaagctggacgtgtacctgttcctgttcagcgacgtgctgctggtgaccaagccccagagaaaggccgacaaggccaaggtgatcagaccccccctgatgctggagaagctggtgtgccagcccctgagagaccccaacagcttcctgctgatccacctgaccgagttccagtgcgtgagcagcgccctgctggtgcactgccccagccccaccgacagagcccagtggctggagaagacccagcaggcccaggccgccctgcagaagctgaaggccgaggagtacgtgcagcagaagagagagctgctgaccctgtacagagaccaggacagagagagccccagcaccagacccagcacccccagcctggagggcagccagagcagcgccgagggcagaacccccgagttcagcaccatcatcccccacctggtggtgaccgaggacaccgacgaggacgcccccctggtgcccgacgacaccagcgacagcggctacggcaccctgatccccggcacccccaccggcagcagaagccccctgagcagactgagacagagagccctgagaagagaccccagactgaccttcagcaccctggagctgagagacatccccctgagaccccacccccccgacccccaggccccccagagaagaagcgcccccgagctgcccgagggcatcctgaagggcggcagcctgccccaggaggacccccccacctggagcgaggaggaggacggcgccagcgagagaggcaacgtggtggtggagaccctgcacagagccagactgagaggccagctgcccagcagccccacccacgccgacagcgccggcgagagcccctgggagagcagcggcgaggaggaggaggagggccccctgttcctgaaggccggccacaccagcctgagacccatgagagccgaggacatgctgagagagatcagagaggagctggccagccagagaatcgagggcgccgaggagcccagagacagcagacccagaaagctgaccagagcccagctgcagagaatgagaggcccccacatcatccagctggacacccccctgagcgccagcgaggtgtag

SEQ ID NO: 93595 - DNA, 963 bp, synthetic construct
  misc_feature 1..963: note = Description of Artificial Sequence: Synthetic coding sequence
  source 1..963: mol_type = other DNA
atgtgccccagagagggcggcagagccagcaccatccaccagaagaccgagaaggccttcggccagctgctgtgccagcccctgggcgagcccaagatccagcaccccctgaaggccgccctgcagaagctgaaggccgaggagtacgtgcagcagaagagagagctgctgaccctgtacagagaccaggacagagagagccccagcaccagacccagcacccccagcctggagggcagccagagcagcgccgagggcagaacccccgagttcagcaccatcatcccccacctggtggtgaccgaggacaccgacgaggacgcccccctggtgcccgacgacaccagcgacagcggctacggcaccctgatccccggcacccccaccggcagcagaagccccctgagcagactgagacagagagccctgagaagagaccccagactgaccttcagcaccctggagctgagagacatccccctgagaccccacccccccgacccccaggccccccagagaagaagcgcccccgagctgcccgagggcatcctgaagggcggcagcctgccccaggaggacccccccacctggagcgaggaggaggacggcgccagcgagagaggcaacgtggtggtggagaccctgcacagagccagactgagaggccagctgcccagcagccccacccacgccgacagcgccggcgagagcccctgggagagcagcggcgaggaggaggaggagggccccctgttcctgaaggccggccacaccagcctgagacccatgagagccgaggacatgctgagagagatcagagaggagctggccagccagagaatcgagggcgccgaggagcccagagacagcagacccagaaagctgaccagagcccagctgcagagaatgagaggcccccacatcatccagctggacacccccctgagcgccagcgaggtgtag

SEQ ID NO: 93596 - DNA, 2373 bp, synthetic construct; identical to SEQ ID NO: 93594
  misc_feature 1..2373: note = Description of Artificial Sequence: Synthetic coding sequence
  source 1..2373: mol_type = other DNA

SEQ ID NO: 93597 - DNA, 2277 bp, synthetic construct
  misc_feature 1..2277: note = Description of Artificial Sequence: Synthetic coding sequence
  source 1..2277: mol_type = other DNA
atgggctgcagactgcacgcccccggcgagaaggccgcccacgaccccagcagaagaagactgcagcagtacgtgcccttcgccagaggcagcggccaggccagaggcctgagccccatgagactgagagaccccgagcccgagaagagacacggcggccacgtgggcgccggcctgctgcacagccccaagctgaaggagctgaccaaggcccacgagctggaggtgagactgcacaccttcagcatgttcggcatgcccagactgccccccgaggacagaagacactgggagatcggcgagggcggcgacagcggcctgaccatcgagaagagctggagagagctggtgcccggccacaaggagatgagccaggagctgtgccaccagcaggaggccctgtgggagctgctgaccaccgagctgatctacgtgagaaagctgaagatcatgaccgacctgctggccgccggcctgctgaacctgcagagagtgggcctgctgatggaggtgagcgccgagaccctgttcggcaacgtgcccagcctgatcagaacccacagaagcttctgggacgaggtgctgggccccaccctggaggagaccagagccagcggccagcccctggaccccatcggcctgcagagcggcttcctgaccttcggccagagattccacccctacgtgcagtactgcctgagagtgaagcagaccatggcctacgccagagagcagcaggagaccaaccccctgttccacgccttcgtgcagtggtgcgagaagcacaagagaagcggcagacagatgctgtgcgacctgctgatcaagccccaccagagaatcaccaagtaccccctgctgctgcacgccgtgctgaagagaagccccgaggccagagcccaggaggccctgaacgccatgatcgaggccgtggagagcttcctgagacacatcaacggccaggtgagacagggcgaggagcaggagagcctggccgccgccgcccagagaatcggcccctacgaggtgctggagccccccagcgacgaggtggagaagaacctgagacccttcagcaccctggacctgaccagccccatgctgggcgtggccagcgagcacaccagacagctgctgctggagggccccgtgagagtgaaggagggcagagagggcaagctggacgtgtacctgttcctgttcagcgacgtgctgctggtgaccaagccccagagaaaggccgacaaggccaaggtgatcagaccccccctgatgctggagaagctggtgtgccagcccctgagagaccccaacagcttcctgctgatccacctgaccgagttccagtgcgtgagcagcgccctgctggtgcactgccccagccccaccgacagagcccagtggctggagaagacccagcaggcccaggccgccctgcagaagctgaaggccgaggagtacgtgcagcagaagagagagctgctgaccctgtacagagaccaggacagagagagccccagcaccagacccagcacccccagcctggagggcagccagagcagcgccgagggcagaacccccgagttcagcaccatcatcccccacctggtggtgaccgaggacaccgacgaggacgcccccctggtgcccgacgacaccagcgacagcggctacggcaccctgatccccggcacccccaccggcagcagaagccccctgagcagactgagacagagagccctgagaagagaccccagactgaccttcagcaccctggagctgagagacatccccctgagaccccacccccccgacccccaggccccccagagaagaagcgcccccgagctgcccgagggcatcctgaagggcggcagcctgccccaggaggacccccccacctggagcgaggaggaggacggcgccagcgagagaggcaacgtggtggtggagaccctgcacagagccagactgagaggccagctgcccagcagccccacccacgccgacagcgccggcgagagcccctgggagagcagcggcgaggaggaggaggagggccccctgttcctgaaggccggccacaccagcctgagacccatgagagccgaggacatgctgagagagatcagagaggagctggccagccagagaatcgagggcgccgaggagcccagagacagcagacccagaaagctgaccagagcccagctgcagagaatgagaggcccccacatcatccagctggacacccccctgagcgccagcgaggtgtag

SEQ ID NO: 93598 - DNA, 4482 bp, synthetic construct
  misc_feature 1..4482: note = Description of Artificial Sequence: Synthetic coding sequence
  source 1..4482: mol_type = other DNA
atggccgagctgagcgagcccgagggccccgtggactggaaggagagatgcgtggccctggagagccagctgatgaagttcagagtgcaggccagcaagatcagagagctgctggccgagaagatgcagcagctggagagacaggtgatcgacgccgagagacaggccgagaaggccttccagcaggtgcaggtgatggaggacaagctgaaggccgccaacatccagaccagcgagagcgagaccagactgtacaacaagtgccaggacctggagagcctgatccaggagaaggacgacgtgatccagaacctggagctgcagctggaggagcagaagcagatcagaatccaggaggccaagatcatcgaggagaaggccgccaagatcaaggagtgggtgaccgtgaagctgaacgagctggagctggagaaccagaacctgagactgatcaaccagaaccagaccgaggagatcagaaccatgcagagcaagctgcaggaggtgcagggcaagaagagcagcaccgtgagcaccctgaagctgagcgagggccagagactgagcagcctgaccttcggctgcttcctgagcagagccagaagccccccccaggtggtgaagagcgaggagatgagcaagatcagcagcaaggagcccgagttcaccgagggcaaggacatggaggagatggagatccccgagaagagcgtggacaaccaggtgctggagaacaacagaggccagagaaccctgcaccagaccccctgcggcagcgagcagaacagaaagaccagaaccagcttcgccaccgacggcggcatcagccagaacagcggcgcccccgtgagcgactggagcagcgacgaggaggacggcagcaagggcagaagcaagagcagatgcaccagcaccctgagcagccacaccagcgaggagggcgtgcagtgcagcagaatgggcagcgagatgtacctgaccgccagcgacgacagcagcagcatcttcgaggaggagaccttcggcatcaagagacccgagcacaagaagctgtacagctggcagcaggaggcccagtggaaggccctgaacagccccctgggcaagggcaacagcgagctgagcaagaaggagcaggacagcagcagcgacgagctgaacaagaagttccagagccagagactggactacagcagcagcagcagcgaggccaacacccccagccccatcctgacccccgccctgatgcccaagcaccccaacagcctgagcggcaagggcacccagctggtgcccagcagccacctgcccccccccaagctgagaatccccaacgtgttcagcatcagcgtggccctggccaagagacacctgagccagccccagctgagcagcgacagaatgttcggcaccaacagaaacgccatcagcatgatcagacccctgagaccccaggagaccgacctggacctggtggacggcgacagcaccgaggtgctggagaacatggacaccagctgcgacgacggcctgttcagctacgacagcctggacagccccaacagcgacgaccaggagcactgcgacagcgccaagaaggtggcctacagcaagccccccaccccccccctgcacagattccccagctgggagagcagaatctacgccgtggccaagagcggcatcagaatgagcgaggccttcaacatggagagcgtgaacaagaacagcgccgccaccctgagctacaccaccagcggcctgtacaccagcctgatctacaagaacatgaccacccccgtgtacaccaccctgaagggcaaggccacccagatcagcagcagccccttcctggacgacagcagcggcagcgaggaggaggacagcagcagaagcagcagcagaaccagcgagagcgacagcagaagcagaagcggccccggcagccccagagccatgaagagaggcgtgagcctgagcagcgtggccagcgagagcgactacgccatcccccccgacgcctacagcaccgacaccgagtacagccagcccgagcagaagctgcccaagacctgcagcagcagcagcgacaacggcaagaacgagcccctggagaagagcggctacctgctgaagatgagcggcaaggtgaagagctggaagagaagatggttcgtgctgaagggcggcgagctgctgtactacaagagccccagcgacgtgatcagaaagccccagggccacatcgagctgagcgccagctgcagcatcctgagaggcgacaacaagcagaccgtgcagctgaccaccgagaagcacacctactacctgaccgccgacagccccaacatcctggaggagtggatcaaggtgctgcagaacgtgctgagagtgcaggccgccaaccccctgagcctgcagcccgagggcaagcccaccatgaagggcctgctgaccaaggtgaagcacggctacagcaagagagtgtggtgcaccctgatcggcaagaccctgtactacttcagaagccaggaggacaagttccccctgggccagatcaagctgtgggaggccaaggtggaggaggtggacagaagctgcgacagcgacgaggactacgaggccagcggcagaagcctgctgagcacccactacaccatcgtgatccaccccaaggaccagggccccacctacctgctgatcggcagcaagcacgagaaggacacctggctgtaccacctgaccgtggccgccggcagcaacaacgtgaacgtgggcagcgagttcgagcagctggtgtgcaagctgctgaacatcgacggcgagcccagcagccagatctggagacaccccaccctgtgccacagcaaggagggcatcatcagccccctgaccaccctgcccagcgaggccctgcagaccgaggccatcaagctgttcaagacctgccagctgttcatcaacgccgccgtggacagccccgccatcgactaccacatcagcctggcccagagcgccctgcagatctgcctgacccaccccgagctgcagaacgagatctgctgccagctgatcaagcagaccagaagaagacagccccagaaccagcccggccccctgcagggctggcagctgctggccctgtgcgtgggcctgttcctgccccaccaccccttcctgtggctgctgagactgcacctgaagagaaacgccgacagcagaaccgagttcggcaagtacgccatctactgccagagatgcgtggagagaacccagcagaacggcgacagagaggccagacccagcagaatggagatcctgagcaccctgctgagaaacccctaccaccacagcctgcccttcagcatccccgtgcacttcatgaacggcatctaccaggtggtgggcttcgacgccagcaccaccgtggaggagttcctgaacaccctgaaccaggacaccggcatgagaaagcccgcccagagcggcttcgccctgttcaccgacgaccccagcggcagagacctggagcactgcctgcagggcaacatcaagatctgcgacatcatcagcaagtgggagcaggccagcaaggagcagcagcccggcaagtgcgagggcaccagaaccgtgagactgacctacaagaacagactgtacttcagcgtgcaggccagaggcgagaccgacagagagaagctgctgctgatgtaccagaccaacgaccagatcatcaacggcctgttccccctgaacaaggacctggccctggagatggccgccctgctgagccaggtggagatcggcgacttcgagagacccttcagcacccccgccggccacgtgaccaaccagtgcaaggtgaaccagaccctgaagcaggtgatcgagaagttctaccccaagagatacagagacggctgcagcgaggagcagctgagacagctgtgccagagactgagcaccagatggatggccctgagaggccacagcgccgccgactgcgtgagaatctacctgaccgtggccagaaagtggcccttcttcggcgccaagctgttcctggccaagcccatcacccccagcagcctgggcagcaccttcctgtggctggccgtgcacgaggacggcctgagcctgctggagtacaacagcatgagactgatcgtgagctacgtgtacaagagcctgatgaccttcggcggctaccaggacgacttcatggtggtgatcaacaacacccacagcaaggacaagcccaccgagaagctgctgttcgccatggccaagcccaagatcctggagatcaccctgctgatcgccagctacatcaacaacttccaccagcagaaggccgccttccaccacctgagcgcccccgccctgctgagcgcccagaccagaggcccccaggccagaatgatgggcagccagcccctgctgagcagcagcagacccaccaagggccccaccctgctgtag

SEQ ID NO: 93599 - DNA, 2904 bp, synthetic construct
  misc_feature 1..2904: note = Description of Artificial Sequence: Synthetic coding sequence
  source 1..2904: mol_type = other DNA
atggactggacccccagactgcccagcagacacatcatcagcgagctggagcacctgaccttcgtgaacaccgacgtgggcagatgcagagcctggctgagactggccctgaacgacggcctgatggagtgctacctgaagctgctgctgcaggagcaggccagactgcacgagtactaccagcccaccgccctgctgagagacgccgaggagggcgagttcctgctgagcttcctgcagggcctgaccagcctgagcttcgagctgagctacaagagcgccatcctgaacgagtggaccctgacccccctggccctgagcggcctgtgccccctgagcgagctggaccccctgagcaccagcggcgccgagctgcagagaaaggagagcctggacagcatcagccacagcagcggcagcgaggacatcgaggtgcaccacagcggccacaagatcagaagaaaccagaagctgaccgccagcagcctgagcctggacaccgccagcagcagccagctgagctgcagcctgaacagcgacagctgcctgctgcaggagaacggcagcaagagccccgaccactgcgaggagcccatgagctgcgacagcgacctgggcaccgccaacgccgaggacagcgacagaagcctgcaggaggtgctgctggagttcagcaaggcccaggtgaacagcgtgcccaccaacggcctgagccaggagaccgagatccccaccccccaggccagcctgagcctgcacggcctgaacaccagcacctacctgcactgcgaggcccccgccgagcccctgcccgcccaggccgccagcggcacccaggacggcgtgcacgtgcaggagcccagaccccaggcccccagccccctggacctgcagcagcccgtggagagcaccagcggccagcagcccagcagcaccgtgagcgagaccgccagagaggtgggccagggcaacggcctgcagaaggcccaggcccacgacggcgccggcctgaagctggtggtgagcagccccaccagccccaagaacaagagctggatcagcgaggacgacttctacagacccagcagagagcagcccctggagagcgccagcgaccaccccatcgccagctacagaggcacccccggcagcagacccggcctgcacagacacttcagccaggagcccagaaagaactgcagcctgggcgccctggaccaggcctgcgtgcccagccccggcagaagacaggcccaggccgcccccagccagggccacaagagcttcagagtggtgcacagaagacagatgggcctgagcaaccccttcagaggcctgatgaagctgggcaccgtggagagaagaggcgccatgggcatctggaaggagctgttctgcgagctgagccccctggagttcagactgtacctgagcaacgaggagcacacctgcgtggagaactgcagcctgctgagatgcgagagcgtgggccccgcccacagcgacggcagattcgagctggtgttcagcggcaagaagctggccctgagagccagcagccaggacgaggccgaggactggctggacagagtgagagaggccctgcagaaggtgagaccccagcaggaggacgagtgggtgaacgtgcagtaccccgaccagcccgaggagccccccgaggccccccagggctgcctgagccccagcgacctgctgagcgagcccgccgccctgcagggcacccagttcgactggagcagcgcccaggtgcccgagcccgacgccatcaaggagagcctgctgtacctgtacatggacagaacctggatgccctacatcttcagcctgagcctggaggccctgaagtgcttcagaatcagaaacaacgagaagatgctgagcgacagccacggcgtggagaccatcagagacatcctgcccgacaccagcctgggcggccccagcttcttcaagatcatcaccgccaaggccgtgctgaagctgcaggccggcaacgccgaggaggccgccctgtggagagacctggtgagaaaggtgctggccagctacctggagaccgccgaggaggccgtgaccctgggcggcagcctggacgagaactgccaggaggtgctgaagttcgccaccagagagaacggcttcctgctgcagtacctggtggccatccccatggagaagggcctggacagccagggctgcttctgcgccggctgcagcagacagatcggcttcagcttcgtgagacccaagctgtgcgccttcagcggcctgtactactgcgacatctgccaccaggacgacgccagcgtgatccccgccagaatcatccacaactgggacctgaccaagagacccatctgcagacaggccctgaagttcctgacccagatcagagcccagcccctgatcaacctgcagatggtgaacgccagcctgtacgagcacgtggagagaatgcacctgatcggcagaagaagagagcagctgaagctgctgggcgactacctgggcctgtgcagaagcggcgccctgaaggagctgagcaagagactgaaccacagaaactacctgctggagagcccccacagattcagcgtggccgacctgcagcagatcgccgacggcgtgtacgagggcttcctgaaggccctgatcgagttcgccagccagcacgtgtaccactgcgacctgtgcacccagagaggcttcatctgccagatctgccagcaccacgacatcatcttccccttcgagttcgacaccaccgtgagatgcgccgagtgcaagaccgtgttccaccagagctgccaggccgtggtgaagaagggctgccccagatgcgccagaagaagaaagtaccaggagcagaacatcttcgcctag

SEQ ID NO: 93600 - DNA, 3171 bp, synthetic construct
  misc_feature 1..3171: note = Description of Artificial Sequence: Synthetic coding sequence
  source 1..3171: mol_type = other DNA
atgctgagcgtggtggagaacggcctggacccccaggccgccatccccgtgatcaagaagaagctggtgggcagcgtgaaggccctgcagaagcagtacgtgagcctggacaccgtggtgaccagcgaggacggcgacgccaacaccatgtgcagcgccctggaggccgtgttcatccacggcctgcacgccaagcacatcagagccgaggccggcggcaagagaaagaagagcgcccaccagaagcccctgccccagcccgtgttctggcccctgctgaaggccgtgacccacaagcacatcatcagcgagctggagcacctgaccttcgtgaacaccgacgtgggcagatgcagagcctggctgagactggccctgaacgacggcctgatggagtgctacctgaagctgctgctgcaggagcaggccagactgcacgagtactaccagcccaccgccctgctgagagacgccgaggagggcgagttcctgctgagcttcctgcagggcctgaccagcctgagcttcgagctgagctacaagagcgccatcctgaacgagtggaccctgacccccctggccctgagcggcctgtgccccctgagcgagctggaccccctgagcaccagcggcgccgagctgcagagaaaggagagcctggacagcatcagccacagcagcggcagcgaggacatcgaggtgcaccacagcggccacaagatcagaagaaaccagaagctgaccgccagcagcctgagcctggacaccgccagcagcagccagctgagctgcagcctgaacagcgacagctgcctgctgcaggagaacggcagcaagagccccgaccactgcgaggagcccatgagctgcgacagcgacctgggcaccgccaacgccgaggacagcgacagaagcctgcaggaggtgctgctggagttcagcaaggcccaggtgaacagcgtgcccaccaacggcctgagccaggagaccgagatccccaccccccaggccagcctgagcctgcacggcctgaacaccagcacctacctgcactgcgaggcccccgccgagcccctgcccgcccaggccgccagcggcacccaggacggcgtgcacgtgcaggagcccagaccccaggcccccagccccctggacctgcagcagcccgtggagagcaccagcggccagcagcccagcagcaccgtgagcgagaccgccagagaggtgggccagggcaacggcctgcagaaggcccaggcccacgacggcgccggcctgaagctggtggtgagcagccccaccagccccaagaacaagagctggatcagcgaggacgacttctacagacccagcagagagcagcccctggagagcgccagcgaccaccccatcgccagctacagaggcacccccggcagcagacccggcctgcacagacacttcagccaggagcccagaaagaactgcagcctgggcgccctggaccaggcctgcgtgcccagccccggcagaagacaggcccaggccgcccccagccagggccacaagagcttcagagtggtgcacagaagacagatgggcctgagcaaccccttcagaggcctgatgaagctgggcaccgtggagagaagaggcgccatgggcatctggaaggagctgttctgcgagctgagccccctggagttcagactgtacctgagcaacgaggagcacacctgcgtggagaactgcagcctgctgagatgcgagagcgtgggccccgcccacagcgacggcagattcgagctggtgttcagcggcaagaagctggccctgagagccagcagccaggacgaggccgaggactggctggacagagtgagagaggccctgcagaaggtgagaccccagcaggaggacgagtgggtgaacgtgcagtaccccgaccagcccgaggagccccccgaggccccccagggctgcctgagccccagcgacctgctgagcgagcccgccgccctgcagggcacccagttcgactggagcagcgcccaggtgcccgagcccgacgccatcaaggagagcctgctgtacctgtacatggacagaacctggatgccctacatcttcagcctgagcctggaggccctgaagtgcttcagaatcagaaacaacgagaagatgctgagcgacagccacggcgtggagaccatcagagacatcctgcccgacaccagcctgggcggccccagcttcttcaagatcatcaccgccaaggccgtgctgaagctgcaggccggcaacgccgaggaggccgccctgtggagagacctggtgagaaaggtgctggccagctacctggagaccgccgaggaggccgtgaccctgggcggcagcctggacgagaactgccaggaggtgctgaagttcgccaccagagagaacggcttcctgctgcagtacctggtggccatccccatggagaagggcctggacagccagggctgcttctgcgccggctgcagcagacagatcggcttcagcttcgtgagacccaagctgtgcgccttcagcggcctgtactactgcgacatctgccaccaggacgacgccagcgtgatccccgccagaatcatccacaactgggacctgaccaagagacccatctgcagacaggccctgaagttcctgacccagatcagagcccagcccctgatcaacctgcagatggtgaacgccagcctgtacgagcacgtggagagaatgcacctgatcggcagaagaagagagcagctgaagctgctgggcgactacctgggcctgtgcagaagcggcgccctgaaggagctgagcaagagactgaaccacagaaactacctgctggagagcccccacagattcagcgtggccgacctgcagcagatcgccgacggcgtgtacgagggcttcctgaaggccctgatcgagttcgccagccagcacgtgtaccactgcgacctgtgcacccagagaggcttcatctgccagatctgccagcaccacgacatcatcttccccttcgagttcgacaccaccgtgagatgcgccgagtgcaagaccgtgttccaccagagctgccaggccgtggtgaagaagggctgccccagatgcgccagaagaagaaagtaccaggagcagaacatcttcgcctag

SEQ ID NO: 93601 - DNA, 3003 bp, synthetic construct
  misc_feature 1..3003: note = Description of Artificial Sequence: Synthetic coding sequence
  source 1..3003: mol_type = other DNA
atggtggagtgcttcgagagcggcggcaccagactgagcctgagcagcttcaacgtgagctgcgacagcctgagagagcagctgagagagtggagatgcttccagtggtggagaatggactggacccccagactgcccagcagacacatcatcagcgagctggagcacctgaccttcgtgaacaccgacgtgggcagatgcagagcctggctgagactggccctgaacgacggcctgatggagtgctacctgaagctgctgctgcaggagcaggccagactgcacgagtactaccagcccaccgccctgctgagagacgccgaggagggcgagttcctgctgagcttcctgcagggcctgaccagcctgagcttcgagctgagctacaagagcgccatcctgaacgagtggaccctgacccccctggccctgagcggcctgtgccccctgagcgagctggaccccctgagcaccagcggcgccgagctgcagagaaaggagagcctggacagcatcagccacagcagcggcagcgaggacatcgaggtgcaccacagcggccacaagatcagaagaaaccagaagctgaccgccagcagcctgagcctggacaccgccagcagcagccagctgagctgcagcctgaacagcgacagctgcctgctgcaggagaacggcagcaagagccccgaccactgcgaggagcccatgagctgcgacagcgacctgggcaccgccaacgccgaggacagcgacagaagcctgcaggaggtgctgctggagttcagcaaggcccaggtgaacagcgtgcccaccaacggcctgagccaggagaccgagatccccaccccccaggccagcctgagcctgcacggcctgaacaccagcacctacctgcactgcgaggcccccgccgagcccctgcccgcccaggccgccagcggcacccaggacggcgtgcacgtgcaggagcccagaccccaggcccccagccccctggacctgcagcagcccgtggagagcaccagcggccagcagcccagcagcaccgtgagcgagaccgccagagaggtgggccagggcaacggcctgcagaaggcccaggcccacgacggcgccggcctgaagctggtggtgagcagccccaccagccccaagaacaagagctggatcagcgaggacgacttctacagacccagcagagagcagcccctggagagcgccagcgaccaccccatcgccagctacagaggcacccccggcagcagacccggcctgcacagacacttcagccaggagcccagaaagaactgcagcctgggcgccctggaccaggcctgcgtgcccagccccggcagaagacaggcccaggccgcccccagccagggccacaagagcttcagagtggtgcacagaagacagatgggcctgagcaaccccttcagaggcctgatgaagctgggcaccgtggagagaagaggcgccatgggcatctggaaggagctgttctgcgagctgagccccctggagttcagactgtacctgagcaacgaggagcacacctgcgtggagaactgcagcctgctgagatgcgagagcgtgggccccgcccacagcgacggcagattcgagctggtgttcagcggcaagaagctggccctgagagccagcagccaggacgaggccgaggactggctggacagagtgagagaggccctgcagaaggtgagaccccagcaggaggacgagtgggtgaacgtgcagtaccccgaccagcccgaggagccccccgaggccccccagggctgcctgagccccagcgacctgctgagcgagcccgccgccctgcagggcacccagttcgactggagcagcgcccaggtgcccgagcccgacgccatcaaggagagcctgctgtacctgtacatggacagaacctggatgccctacatcttcagcctgagcctggaggccctgaagtgcttcagaatcagaaacaacgagaagatgctgagcgacagccacggcgtggagaccatcagagacatcctgcccgacaccagcctgggcggccccagcttcttcaagatcatcaccgccaaggccgtgctgaagctgcaggccggcaacgccgaggaggccgccctgtggagagacctggtgagaaaggtgctggccagctacctggagaccgccgaggaggccgtgaccctgggcggcagcctggacgagaactgccaggaggtgctgaagttcgccaccagagagaacggcttcctgctgcagtacctggtggccatccccatggagaagggcctggacagccagggctgcttctgcgccggctgcagcagacagatcggcttcagcttcgtgagacccaagctgtgcgccttcagcggcctgtactactgcgacatctgccaccaggacgacgccagcgtgatccccgccagaatcatccacaactgggacctgaccaagagacccatctgcagacaggccctgaagttcctgacccagatcagagcccagcccctgatcaacctgcagatggtgaacgccagcctgtacgagcacgtggagagaatgcacctgatcggcagaagaagagagcagctgaagctgctgggcgactacctgggcctgtgcagaagcggcgccctgaaggagctgagcaagagactgaaccacagaaactacctgctggagagcccccacagattcagcgtggccgacctgcagcagatcgccgacggcgtgtacgagggcttcagccccaaggtgcccagcgaggccgccggcctgagaccctggggcgccagaagccccgaggccgccagcgccttcagatgcatcgacagcagcagactgcccagcctgagaaaggtggtgcccaccctgttcctgaagtgctacttcatgcagtacaccgtgcccagcgagcagggcagcggccccgaggagagcctgcagtgcatcgagggcatcgccgccgtgtag

SEQ ID NO: 93602 - DNA, 5466 bp, synthetic construct
  misc_feature 1..5466: note = Description of Artificial Sequence: Synthetic coding sequence
  source 1..5466: mol_type = other DNA
atgagctgcgagagaaagggcctgagcgagctgagaagcgagctgtacttcctgatcgccagattcctggaggacggcccctgccagcaggccgcccaggtgctgatcagagaggtggccgagaaggagctgctgcccagaagaaccgactggaccggcaaggagcaccccagaacctaccagaacctggtgaagtactacagacacctggcccccgaccacctgctgcagatctgccacagactgggccccctgctggagcaggagatcccccagagcgtgcccggcgtgcagaccctgctgggcgccggcagacagagcctgctgagaaccaacaagagctgcaagcacgtggtgtggaagggcagcgccctggccgccctgcactgcggcagaccccccgagagccccgtgaactacggcagcccccccagcatcgccgacaccctgttcagcagaaagctgaacggcaagtacagactggagagactggtgcccaccgccgtgtaccagcacatgaagatgcacaagagaatcctgggccacctgagcagcgtgtactgcgtgaccttcgacagaaccggcagaagaatcttcaccggcagcgacgactgcctggtgaagatctgggccaccgacgacggcagactgctggccaccctgagaggccacgccgccgagatcagcgacatggccgtgaactacgagaacaccatgatcgccgccggcagctgcgacaagatgatcagagtgtggtgcctgagaacctgcgcccccctggccgtgctgcagggccacagcgccagcatcaccagcctgcagttcagccccctgtgcagcggcagcaagagatacctgagcagcaccggcgccgacggcaccatctgcttctggctgtgggacgccggcaccctgaagatcaaccccagacccgccaagttcaccgagagacccagacccggcgtgcagatgatctgcagcagcttcagcgccggcggcatgttcctggccaccggcagcaccgaccacatcatcagagtgtacttcttcggcagcggccagcccgagaagatcagcgagctggagttccacaccgacaaggtggacagcatccagttcagcaacaccagcaacagattcgtgagcggcagcagagacggcaccgccagaatctggcagttcaagagaagagagtggaagagcatcctgctggacatggccaccagacccgccggccagaacctgcagggcatcgaggacaagatcaccaagatgaaggtgaccatggtggcctgggacagacacgacaacaccgtgatcaccgccgtgaacaacatgaccctgaaggtgtggaacagctacaccggccagctgatccacgtgctgatgggccacgaggacgaggtgttcgtgctggagccccaccccttcgaccccagagtgctgttcagcgccggccacgacggcaacgtgatcgtgtgggacctggccagaggcgtgaagatcagaagctacttcaacatgatcgagggccagggccacggcgccgtgttcgactgcaagtgcagccccgacggccagcacttcgcctgcaccgacagccacggccacctgctgatcttcggcttcggcagcagcagcaagtacgacaagatcgccgaccagatgttcttccacagcgactacagacccctgatcagagacgccaacaacttcgtgctggacgagcagacccagcaggccccccacctgatgcccccccccttcctggtggacgtggacggcaacccccaccccagcagataccagagactggtgcccggcagagagaactgcagagaggagcagctgatcccccagatgggcgtgaccagcagcggcctgaaccaggtgctgagccagcaggccaaccaggagatcagccccctggacagcatgatccagagactgcagcaggagcaggacctgagaagaagcggcgaggccgtgatcagcaacaccagcagactgagcagaggcagcatcagcagcaccagcgaggtgcacagcccccccaacgtgggcctgagaagaagcggccagatcgagggcgtgagacagatgcacagcaacgcccccagaagcgagatcgccaccgagagagacctggtggcctggagcagaagagtggtggtgcccgagctgagcgccggcgtggccagcagacaggaggagtggagaaccgccaagggcgaggaggagatcaagacctacagaagcgaggagaagagaaagcacctgaccgtgcccaaggagaacaagatccccaccgtgagcaagaaccacgcccacgagcacttcctggacctgggcgagagcaagaagcagcagaccaaccagcacaactacagaaccagaagcgccctggaggagacccccagacccagcgaggagatcgagaacggcagcagcagcagcgacgagggcgaggtggtggccgtgagcggcggcaccagcgaggaggaggagagagcctggcacagcgacggcagcagcagcgactacagcagcgactacagcgactggaccgccgacgccggcatcaacctgcagccccccaagaaggtgcccaagaacaagaccaagaaggccgagagcagcagcgacgaggaggaggagagcgagaagcagaagcagaagcagatcaagaaggagaagaagaaggtgaacgaggagaaggacggccccatcagccccaagaagaagaagcccaaggagagaaagcagaagagactggccgtgggcgagctgaccgagaacggcctgaccctggaggagtggctgcccagcacctggatcaccgacaccatccccagaagatgccccttcgtgccccagatgggcgacgaggtgtactacttcagacagggccacgaggcctacgtggagatggccagaaagaacaagatctacagcatcaaccccaagaagcagccctggcacaagatggagctgagagagcaggagctgatgaagatcgtgggcatcaagtacgaggtgggcctgcccaccctgtgctgcctgaagctggccttcctggaccccgacaccggcaagctgaccggcggcagcttcaccatgaagtaccacgacatgcccgacgtgatcgacttcctggtgctgagacagcagttcgacgacgccaagtacagaagatggaacatcggcgacagattcagaagcgtgatcgacgacgcctggtggttcggcaccatcgagagccaggagcccctgcagctggagtaccccgacagcctgttccagtgctacaacgtgtgctgggacaacggcgacaccgagaagatgagcccctgggacatggagctgatccccaacaacgccgtgttccccgaggagctgggcaccagcgtgcccctgaccgacggcgagtgcagaagcctgatctacaagcccctggacggcgagtggggcaccaaccccagagacgaggagtgcgagagaatcgtggccggcatcaaccagctgatgaccctggacatcgccagcgccttcgtggcccccgtggacctgcaggcctaccccatgtactgcaccgtggtggcctaccccaccgacctgagcaccatcaagcagagactggagaacagattctacagaagagtgagcagcctgatgtgggaggtgagatacatcgagcacaacaccagaaccttcaacgagcccggcagccccatcgtgaagagcgccaagttcgtgaccgacctgctgctgcacttcatcaaggaccagacctgctacaacatcatccccctgtacaacagcatgaagaagaaggtgctgagcgacagcgaggacgaggagaaggacgccgacgtgcccggcaccagcaccagaaagagaaaggaccaccagcccagaagaagactgagaaacagagcccagagctacgacatccaggcctggaagaagcagtgcgaggagctgctgaacctgatcttccagtgcgaggacagcgagcccttcagacagcccgtggacctgctggagtaccccgactacagagacatcatcgacacccccatggacttcgccaccgtgagagagaccctggaggccggcaactacgagagccccatggagctgtgcaaggacgtgagactgatcttcagcaacagcaaggcctacacccccagcaagagaagcagaatctacagcatgagcctgagactgagcgccttcttcgaggagcacatcagcagcgtgctgagcgactacaagagcgccctgagattccacaagagaaacaccatcaccaagagaagaaagaagagaaacagaagcagcagcgtgagcagcagcgccgccagcagccccgagagaaagaagagaatcctgaagccccagctgaagagcgagagcagcaccagcgccttcagcacccccaccagaagcatcccccccagacacaacgccgcccagatcaacggcaagaccgagagcagcagcgtggtgagaaccagaagcaacagagtggtggtggaccccgtggtgaccgagcagcccagcaccagcagcgccgccaagaccttcatcaccaaggccaacgccagcgccatccccggcaagaccatcctggagaacagcgtgaagcacagcaaggccctgaacaccctgagcagccccggccagagcagcttcagccacggcaccagaaacaacagcgccaaggagaacatggagaaggagaagcccgtgaagagaaagatgaagagcagcgtgctgcccaaggccagcaccctgagcaagagcagcgccgtgatcgagcagggcgactgcaagaacaacgccctggtgcccggcaccatccaggtgaacggccacggcggccagcccagcaagctggtgaagagaggccccggcagaaagcccaaggtggaggtgaacaccaacagcggcgagatcatccacaagaagagaggcagaaagcccaagaagctgcagtacgccaagcccgaggacctggagcagaacaacgtgcaccccatcagagacgaggtgctgcccagcagcacctgcaacttcctgagcgagaccaacaacgtgaaggaggacctgctgcagaagaagaacagaggcggcagaaagcccaagagaaagatgaagacccagaagctggacgccgacctgctggtgcccgccagcgtgaaggtgctgagaagaagcaacagaaagaagatcgacgaccccatcgacgaggaggaggagttcgaggagctgaagggcagcgagccccacatgagaaccagaaaccagggcagaagaaccgccttctacaacgaggacgacagcgaggaggagcagagacagctgctgttcgaggacaccagcctgaccttcggcaccagcagcagaggcagagtgagaaagctgaccgagaaggccaaggccaacctgatcggctggtag

SEQ ID NO: 93603 - DNA, 1197 bp, synthetic construct
  misc_feature 1..1197: note = Description of Artificial Sequence: Synthetic coding sequence
  source 1..1197: mol_type = other DNA
atgaagaagaaggtgctgagcgacagcgaggacgaggagaaggacgccgacgtgcccggcaccagcaccagaaagagaaaggaccaccagcccagaagaagactgagaaacagagcccagagctacgacatccaggcctggaagaagcagtgcgaggagctgctgaacctgatcttccagtgcgaggacagcgagcccttcagacagcccgtggacctgctggagtaccccgactacagagacatcatcgacacccccatggacttcgccaccgtgagagagaccctggaggccggcaactacgagagccccatggagctgtgcaaggacgtgagactgatcttcagcaacagcaaggcctacacccccagcaagagaagcagaatctacagcatgagcctgagactgagcgccttcttcgaggagcacatcagcagcgtgctgagcgactacaagagcgccctgagattccacaagagaaacaccatcaccaagagaagaaagaagagaaacagaagcagcagcgtgagcagcagcgccgccagcagccccgagagaaagaagagaatcctgaagccccagctgaagagcgagagcagcaccagcgccttcagcacccccaccagaagcatcccccccagacacaacgccgcccagatcaacggcaagaccgagagcagcagcgtggtgagaaccagaagcaacagagtggtggtggaccccgtggtgaccgagcagcccagcaccagcagcgccgccaagaccttcatcaccaaggccaacgccagcgccatccccggcaagaccatcctggagaacagcgtgaagcacagcaaggccctgaacaccctgagcagccccggccagagcagcttcagccacggcaccagaaacaacagcgccaaggagaacatggagaaggagaagcccgtgaagagaaagatgaagagcagcgtgctgcccaaggccagcaccctgagcaagagcagcgccgtgatcgagcagggcgactgcaagaacaacgccctggtgcccggcaccatccaggtgaacggccacggcggccagcccagcaagctggtgaagagaggccccggcagaaagcccaaggtggaggtgaacatcgtggtgaagctgtacaccagaaagggcgtggagagccccaagagctacagcatgcagagccagaagatctag

SEQ ID NO: 93604 - DNA, 1206 bp, synthetic construct
  misc_feature 1..1206: note = Description of Artificial Sequence: Synthetic coding sequence
  source 1..1206: mol_type = other DNA
atgagaagagcccccgccgccgagagactgctggagctgggcttcccccccagatgcggcagacaggagccccccttccccctgggcgtgaccagaggctggggcagatggcccatccagaagagaagagagggcgccagacccgtgcccttcagcgagagaagccaggaggacggcagaggccccgccgccagaagcagcggcaccctgtggagaatcagaaccagactgagcctgtgcagagaccccgagccccccccccccctgtgcctgctgagagtgagcctgctgtgcgccctgagagccggcggcagaggcagcagatggggcgaggacggcgccagactgctgctgctgccccccgccagagccgccggcaacggcgaggccgagcccagcggcggccccagctacgccggcagaatgctggagagcagcggctgcaaggccctgaaggagggcgtgctggagaagagaagcgacggcctgctgcagctgtggaagaagaagtgctgcatcctgaccgaggagggcctgctgctgatcccccccaagcagctgcagcaccagcagcagcagcagcagcagcagcagcagcagcagcagcagcagcccggccagggccccgccgagcccagccagcccagcggccccgccgtggccagcctggagccccccgtgaagctgaaggagctgcacttcagcaacatgaagaccgtggactgcgtggagagaaagggcaagtacatgtacttcaccgtggtgatggccgagggcaaggagatcgacttcagatgcccccaggaccagggctggaacgccgagatcaccctgcagatggtgcagtacaagaacagacaggccatcctggccgtgaagagcaccagacagaagcagcagcacctggtgcagcagcagccccccagccagccccagccccagccccagctgcagccccagccccagccccagccccagccccagccccagccccagagccagccccagccccagccccagcccaagccccagccccagcagctgcacccctacccccacccccacccccacccccacagccacccccacagccacccccacccccacccccacccccacccccaccagatcccccacccccacccccagccccacagccagccccacggccacagactgctgagaagcaccagcaacagcgcctag

SEQ ID NO: 93605 - DNA, 660 bp, synthetic construct
  misc_feature 1..660: note = Description of Artificial Sequence: Synthetic coding sequence
  source 1..660: mol_type = other DNA
atgctggagagcagcggctgcaaggccctgaaggagggcgtgctggagaagagaagcgacggcctgctgcagctgtggaagaagaagtgctgcatcctgaccgaggagggcctgctgctgatcccccccaagcagctgcagcaccagcagcagcagcagcagcagcagcagcagcagcagcagcagcagcccggccagggccccgccgagcccagccagcccagcggccccgccgtggccagcctggagccccccgtgaagctgaaggagctgcacttcagcaacatgaagaccgtggactgcgtggagagaaagggcaagtacatgtacttcaccgtggtgatggccgagggcaaggagatcgacttcagatgcccccaggaccagggctggaacgccgagatcaccctgcagatggtgcagtacaagaacagacaggccatcctggccgtgaagagcaccagacagaagcagcagcacctggtgcagcagcagctgcacccctacccccacccccacccccacccccacagccacccccacagccacccccacccccacccccacccccacccccaccagatcccccacccccacccccagccccacagccagccccacggccacagactgctgagaagcaccagcaacagcgcctag

SEQ ID NO: 93606 - DNA, 459 bp, synthetic construct
  misc_feature 1..459: note = Description of Artificial Sequence: Synthetic coding sequence
  source 1..459: mol_type = other DNA
atgaagagccccgacgaggtgctgagagagggcgagctggagaagagaagcgacagcctgttccagctgtggaagaagaagagaggcgtgctgaccagcgacagactgagcctgttccccgccagccccagagccagacccaaggagctgagattccacagcatcctgaaggtggactgcgtggagagaaccggcaagtacgtgtacttcaccatcgtgaccaccgaccacaaggagatcgacttcagatgcgccggcgagagctgctggaacgccgccatcgccctggccctgatcgacttccagaacagaagagccctgcaggacttcagaagcagacaggagagaaccgcccccgccgcccccgccgaggacgccgtggccgccgccgccgccgcccccagcgagcccagcgagcccagcagacccagcccccagcccaagcccagaaccccctag

SEQ ID NO: 93607 - DNA, 3960 bp, synthetic construct
  misc_feature 1..3960: note = Description of Artificial Sequence: Synthetic coding sequence
  source 1..3960: mol_type = other DNA
atggacgccctgaacagaaaccagatcggccccggctgccagacccagaccatggtgcagaagggccccctggacctgatcgagaccggcaagggcctgaaggtgcagaccgacaagccccacctggtgagcctgggcagcggcagactgagcaccgccatcaccctgctgcccctggaggagggcagaaccgtgatcggcagcgccgccagagacatcagcctgcagggccccggcctggcccccgagcactgctacatcgagaacctgagaggcaccctgaccctgtacccctgcggcaacgcctgcaccatcgacggcctgcccgtgagacagcccaccagactgacccagggctgcatgctgtgcctgggccagagcaccttcctgagattcaaccaccccgccgaggccaagtggatgaagagcatgatccccgccggcggcagagcccccggccccccctacagccccgtgcccgccgagagcgagagcctggtgaacggcaaccacaccccccagaccgccaccagaggccccagcgcctgcgccagccacagcagcctggtgagcagcatcgagaaggacctgcaggagatcatggacagcctggtgctggaggagcccggcgccgccggcaagaagcccgccgccaccagccccctgagccccatggccaacggcggcagatacctgctgagcccccccaccagccccggcgccatgagcgtgggcagcagctacgagaacaccagccccgccttcagccccctgagcagccccgccagcagcggcagctgcgccagccacagccccagcggccaggagcccggccccagcgtgccccccctggtgcccgccagaagcagcagctaccacctggccctgcagcccccccagagcagacccagcggcgccagaagcgagagccccagactgagcagaaagggcggccacgagagaccccccagccccggcctgagaggcctgctgaccgacagccccgccgccaccgtgctggccgaggccagaagagccaccgagagccccagactgggcggccagctgcccgtggtggccatcagcctgagcgagtaccccgccagcggcgccctgagccagcccaccagcatccccggcagccccaagttccagccccccgtgcccgcccccagaaacaagatcggcaccctgcaggacagaccccccagccccttcagagagccccccggcagcgagagagtgctgaccaccagccccagcagacagctggtgggcagaaccttcagcgacggcctggccaccagaaccctgcagccccccgagagccccagactgggcagaagaggcctggacagcatgagagagctgccccccctgagccccagcctgagcagaagagccctgagccccctgcccaccagaaccacccccgaccccaagctgaacagagaggtggccgagagccccagacccagaagatgggccgcccacggcgccagccccgaggacttcagcctgaccctgggcgccagaggcagaagaaccagaagccccagccccaccctgggcgagagcctggccccccacaagggcagcttcagcggcagactgagccccgcctacagcctgggcagcctgaccggcgccagcccctgccagagcccctgcgtgcagagaaagctgagcagcggcgacctgagagtgcccgtgaccagagagagaaagaacagcatcaccgagatcagcgacaacgaggacgacctgctggagtaccacagaagacagagacaggagagactgagagagcaggagatggagagactggagagacagagactggagaccatcctgaacctgtgcgccgagtacagcagagccgacggcggccccgaggccggcgagctgcccagcatcggcgaggccaccgccgccctggccctggccggcagaagacccagcagaggcctggccggcgccagcggcagaagcagcgaggagcccggcgtggccacccagagactgtgggagagcatggagagaagcgacgaggagaacctgaaggaggagtgcagcagcaccgagagcacccagcaggagcacgaggacgcccccagcaccaagctgcagggcgaggtgctggccctggaggaggagagagcccaggtgctgggccacgtggagcagctgaaggtgagagtgaaggagctggagcagcagctgcaggagagcgccagagaggccgagatggagagagccctgctgcagggcgagagagaggccgagagagccctgctgcagaaggagcagaaggccgtggaccagctgcaggagaagctggtggccctggagaccggcatccagaaggagagagacaaggaggccgaggccctggagaccgagaccaagctgttcgaggacctggagttccagcagctggagagagagagcagagtggaggaggagagagagctggccggccagggcctgctgagaagcaaggccgagctgctgagaagcatcgccaagagaaaggagagactggccatcctggacagccaggccggccagatcagagcccaggccgtgcaggagagcgagagactggccagagacaagaacgccagcctgcagctgctgcagaaggagaaggagaagctgaccgtgctggagagaagataccacagcctgaccggcggcagacccttccccaagaccaccagcaccctgaaggaggtgtacagaagcaagatggacggcgaggccaccagccccctgcccagaaccagaagcggccccctgcccagcagcagcggcagcagcagcagcagcagccagctgagcgtggccaccctgggcagaagccccagccccaagagcgccctgctgacccagaacggcaccggcagcctgcccagaaacctggccgccaccctgcaggacatcgagaccaagagacagctggccctgcagcagaagggccagcaggtgatcgaggagcagagaagaagactggccgagctgaagcagaaggccgccgccgaggcccagtgccagtgggacgccctgcacggcgccgcccccttccccgccggccccagcggcttcccccccctgatgcaccacagcatcctgcaccacctgcccgccggcagagagagaggcgaggagggcgagcacgcctacgacaccctgagcctggagagcagcgacagcatggagaccagcatcagcaccggcggcaacagcgcctgcagccccgacaacatgagcagcgccagcggcctggacatgggcaagatcgaggagatggagaagatgctgaaggaggcccacgccgagaagaacagactgatggagagcagagagagagagatggagctgagaagacaggccctggaggaggagagaagaagaagagagcaggtggagagaagactgcagagcgagagcgccagaagacagcagctggtggagaaggaggtgaagatgagagagaagcagttcagccaggccagacccctgaccagatacctgcccatcagaaaggaggacttcgacctgaagacccacatcgagagcagcggccacggcgtggacacctgcctgcacgtggtgctgagcagcaaggtgtgcagaggctacctggtgaagatgggcggcaagatcaagagctggaagaagagatggttcgtgttcgacagactgaagagaaccctgagctactacgtggacaagcacgagaccaagctgaagggcgtgatctacttccaggccatcgaggaggtgtactacgaccacctgagaagcgccgccaagagccccaaccccgccctgaccttctgcgtgaagacccacgacagactgtactacatggtggcccccagcgccgaggccatgagaatctggatggacgtgatcgtgaccggcgccgagggctacacccagttcatgaactag

SEQ ID NO: 93608 - DNA, 2193 bp, synthetic construct
  misc_feature 1..2193: note = Description of Artificial Sequence: Synthetic coding sequence
  source 1..2193: mol_type = other DNA
atggagagaagcgacgaggagaacctgaaggaggagtgcagcagcaccgagagcacccagcaggagcacgaggacgcccccagcaccaagctgcagggcgaggtgctggccctggaggaggagagagcccaggtgctgggccacgtggagcagctgaaggtgagagtgaaggagctggagcagcagctgcaggagagcgccagagaggccgagatggagagagccctgctgcagggcgagagagaggccgagagagccctgctgcagaaggagcagaaggccgtggaccagctgcaggagaagctggtggccctggagaccggcatccagaaggagagagacaaggagagagccgagctggccgccggcagaagacacctggccagacaggccctgtacgccgagctgcagacccagctggacaactgccccgagagcgtgagagagcagctgcaggagcagctgagaagagaggccgaggccctggagaccgagaccaagctgttcgaggacctggagttccagcagctggagagagagagcagagtggaggaggagagagagctggccggccagggcctgctgagaagcaaggccgagctgctgagaagcatcgccaagagaaaggagagactggccatcctggacagccaggccggccagatcagagcccaggccgtgcaggagagcgagagactggccagagacaagaacgccagcctgcagctgctgcagaaggagaaggagaagctgaccgtgctggagagaagataccacagcctgaccggcggcagacccttccccaagaccaccagcaccctgaaggagatggagaagctgctgctgcccgccgtggacctggagcagtggtaccaggagctgatggccggcctgggcaccggccccgccgccgccagcccccacagcagccccccccccctgcccgccaaggccagcagacagctgcaggtgtacagaagcaagatggacggcgaggccaccagccccctgcccagaaccagaagcggccccctgcccagcagcagcggcagcagcagcagcagcagccagctgagcgtggccaccctgggcagaagccccagccccaagagcgccctgctgacccagaacggcaccggcagcctgcccagaaacctggccgccaccctgcaggacatcgagaccaagagacagctggccctgcagcagaagggccagcaggtgatcgaggagcagagaagaagactggccgagctgaagcagaaggccgccgccgaggcccagtgccagtgggacgccctgcacggcgccgcccccttccccgccggccccagcggcttcccccccctgatgcaccacagcatcctgcaccacctgcccgccggcagagagagaggcgaggagggcgagcacgcctacgacaccctgagcctggagagcagcgacagcatggagaccagcatcagcaccggcggcaacagcgcctgcagccccgacaacatgagcagcgccagcggcctggacatgggcaagatcgaggagatggagaagatgctgaaggaggcccacgccgagaagaacagactgatggagagcagagagagagagatggagctgagaagacaggccctggaggaggagagaagaagaagagagcaggtggagagaagactgcagagcgagagcgccagaagacagcagctggtggagaaggaggtgaagatgagagagaagcagttcagccaggccagacccctgaccagatacctgcccatcagaaaggaggacttcgacctgaagacccacatcgagagcagcggccacggcgtggacacctgcctgcacgtggtgctgagcagcaaggtgtgcagaggctacctggtgaagatgggcggcaagatcaagagctggaagaagagatggttcgtgttcgacagactgaagagaaccctgagctactacgtggacaagcacgagaccaagctgaagggcgtgatctacttccaggccatcgaggaggtgtactacgaccacctgagaagcgccgccaagagccccaaccccgccctgaccttctgcgtgaagacccacgacagactgtactacatggtggcccccagcgccgaggccatgagaatctggatggacgtgatcgtgaccggcgccgagggctacacccagttcatgaactag

SEQ ID NO: 93609 - DNA, 4134 bp, synthetic construct
  misc_feature 1..4134: note = Description of Artificial Sequence: Synthetic coding sequence
  source 1..4134: mol_type = other DNA
atggacgccctgaacagaaaccagatcggccccggctgccagacccagaccatggtgcagaagggccccctggacctgatcgagaccggcaagggcctgaaggtgcagaccgacaagccccacctggtgagcctgggcagcggcagactgagcaccgccatcaccctgctgcccctggaggagggcagaaccgtgatcggcagcgccgccagagacatcagcctgcagggccccggcctggcccccgagcactgctacatcgagaacctgagaggcaccctgaccctgtacccctgcggcaacgcctgcaccatcgacggcctgcccgtgagacagcccaccagactgacccagggctgcatgctgtgcctgggccagagcaccttcctgagattcaaccaccccgccgaggccaagtggatgaagagcatgatccccgccggcggcagagcccccggccccccctacagccccgtgcccgccgagagcgagagcctggtgaacggcaaccacaccccccagaccgccaccagaggccccagcgcctgcgccagccacagcagcctggtgagcagcatcgagaaggacctgcaggagatcatggacagcctggtgctggaggagcccggcgccgccggcaagaagcccgccgccaccagccccctgagccccatggccaacggcggcagatacctgctgagcccccccaccagccccggcgccatgagcgtgggcagcagctacgagaacaccagccccgccttcagccccctgagcagccccgccagcagcggcagctgcgccagccacagccccagcggccaggagcccggccccagcgtgccccccctggtgcccgccagaagcagcagctaccacctggccctgcagcccccccagagcagacccagcggcgccagaagcgagagccccagactgagcagaaagggcggccacgagagaccccccagccccggcctgagaggcctgctgaccgacagccccgccgccaccgtgctggccgaggccagaagagccaccgagagccccagactgggcggccagctgcccgtggtggccatcagcctgagcgagtaccccgccagcggcgccctgagccagcccaccagcatccccggcagccccaagttccagccccccgtgcccgcccccagaaacaagatcggcaccctgcaggacagaccccccagccccttcagagagccccccggcagcgagagagtgctgaccaccagccccagcagacagctggtgggcagaaccttcagcgacggcctggccaccagaaccctgcagccccccgagagccccagactgggcagaagaggcctggacagcatgagagagctgccccccctgagccccagcctgagcagaagagccctgagccccctgcccaccagaaccacccccgaccccaagctgaacagagaggtggccgagagccccagacccagaagatgggccgcccacggcgccagccccgaggacttcagcctgaccctgggcgccagaggcagaagaaccagaagccccagccccaccctgggcgagagcctggccccccacaagggcagcttcagcggcagactgagccccgcctacagcctgggcagcctgaccggcgccagcccctgccagagcccctgcgtgcagagaaagctgagcagcggcgacctgagagtgcccgtgaccagagagagaaagaacagcatcaccgagatcagcgacaacgaggacgacctgctggagtaccacagaagacagagacaggagagactgagagagcaggagatggagagactggagagacagagactggagaccatcctgaacctgtgcgccgagtacagcagagccgacggcggccccgaggccggcgagctgcccagcatcggcgaggccaccgccgccctggccctggccggcagaagacccagcagaggcctggccggcgccagcggcagaagcagcgaggagcccggcgtggccacccagagactgtgggagagcatggagagaagcgacgaggagaacctgaaggaggagtgcagcagcaccgagagcacccagcaggagcacgaggacgcccccagcaccaagctgcagggcgaggtgctggccctggaggaggagagagcccaggtgctgggccacgtggagcagctgaaggtgagagtgaaggagctggagcagcagctgcaggagagcgccagagaggccgagatggagagagccctgctgcagggcgagagagaggccgagagagccctgctgcagaaggagcagaaggccgtggaccagctgcaggagaagctggtggccctggagaccggcatccagaaggagagagacaaggaggccgaggccctggagaccgagaccaagctgttcgaggacctggagttccagcagctggagagagagagcagagtggaggaggagagagagctggccggccagggcctgctgagaagcaaggccgagctgctgagaagcatcgccaagagaaaggagagactggccatcctggacagccaggccggccagatcagagcccaggccgtgcaggagagcgagagactggccagagacaagaacgccagcctgcagctgctgcagaaggagaaggagaagctgaccgtgctggagagaagataccacagcctgaccggcggcagacccttccccaagaccaccagcaccctgaaggagatggagaagctgctgctgcccgccgtggacctggagcagtggtaccaggagctgatggccggcctgggcaccggccccgccgccgccagcccccacagcagccccccccccctgcccgccaaggccagcagacagctgcaggtgtacagaagcaagatggacggcgaggccaccagccccctgcccagaaccagaagcggccccctgcccagcagcagcggcagcagcagcagcagcagccagctgagcgtggccaccctgggcagaagccccagccccaagagcgccctgctgacccagaacggcaccggcagcctgcccagaaacctggccgccaccctgcaggacatcgagaccaagagacagctggccctgcagcagaagggccagcaggtgatcgaggagcagagaagaagactggccgagctgaagcagaaggccgccgccgaggcccagtgccagtgggacgccctgcacggcgccgcccccttccccgccggccccagcggcttcccccccctgatgcaccacagcatcctgcaccacctgcccgccggcagagagagaggcgaggagggcgagcacgcctacgacaccctgagcctggagagcagcgacagcatggagaccagcatcagcaccggcggcaacagcgcctgcagccccgacaacatgagcagcgccagcggcctggacatgggcaagatcgaggagatggagaagatgctgaaggaggcccacgccgagaagaacagactgatggagagcagagagagagagatggagctgagaagacaggccctggaggaggagagaagaagaagagagcaggtggagagaagactgcagagcgagagcgccagaagacagcagctggtggagaaggaggtgaagatgagagagaagcagttcagccaggccagacccctgaccagatacctgcccatcagaaaggaggacttcgacctgaagacccacatcgagagcagcggccacggcgtggacacctgcctgcacgtggtgctgagcagcaaggtgtgcagaggctacctggtgaagatgggcggcaagatcaagagctggaagaagagatggttcgtgttcgacagactgaagagaaccctgagctactacgtggacaagcacgagaccaagctgaagggcgtgatctacttccaggccatcgaggaggtgtactacgaccacctgagaagcgccgccaagaagagattcttcagattcaccatggtgaccgagagccccaaccccgccctgaccttctgcgtgaagacccacgacagactgtactacatggtggcccccagcgccgaggccatgagaatctggatggacgtgatcgtgaccggcgccgagggctacacccagttcatgaactag

SEQ ID NO: 93610 - DNA, 3423 bp, synthetic construct
  misc_feature 1..3423: note = Description of Artificial Sequence: Synthetic coding sequence
  source 1..3423: mol_type = other DNA
atgagcgtgggcagcagctacgagaacaccagccccgccttcagccccctgagcagccccgccagcagcggcagctgcgccagccacagccccagcggccaggagcccggccccagcgtgccccccctggtgcccgccagaagcagcagctaccacctggccctgcagcccccccagagcagacccagcggcgccagaagcgagagccccagactgagcagaaagggcggccacgagagaccccccagccccggcctgagaggcctgctgaccgacagccccgccgccaccgtgctggccgaggccagaagagccaccgagagccccagactgggcggccagctgcccgtggtggccatcagcctgagcgagtaccccgccagcggcgccctgagccagcccaccagcatccccggcagccccaagttccagccccccgtgcccgcccccagaaacaagatcggcaccctgcaggacagaccccccagccccttcagagagccccccggcagcgagagagtgctgaccaccagccccagcagacagctggtgggcagaaccttcagcgacggcctggccaccagaaccctgcagccccccgagagccccagactgggcagaagaggcctggacagcatgagagagctgccccccctgagccccagcctgagcagaagagccctgagccccctgcccaccagaaccacccccgaccccaagctgaacagagaggtggccgagagccccagacccagaagatgggccgcccacggcgccagccccgaggacttcagcctgaccctgggcgccagaggcagaagaaccagaagccccagccccaccctgggcgagagcctggccccccacaagggcagcttcagcggcagactgagccccgcctacagcctgggcagcctgaccggcgccagcccctgccagagcccctgcgtgcagagaaagctgagcagcggcgacctgagagtgcccgtgaccagagagagaaagaacagcatcaccgagatcagcgacaacgaggacgacctgctggagtaccacagaagacagagacaggagagactgagagagcaggagatggagagactggagagacagagactggagaccatcctgaacctgtgcgccgagtacagcagagccgacggcggccccgaggccggcgagctgcccagcatcggcgaggccaccgccgccctggccctggccggcagaagacccagcagaggcctggccggcgccagcggcagaagcagcgaggagcccggcgtggccacccagagactgtgggagagcatggagagaagcgacgaggagaacctgaaggaggagtgcagcagcaccgagagcacccagcaggagcacgaggacgcccccagcaccaagctgcagggcgaggtgctggccctggaggaggagagagcccaggtgctgggccacgtggagcagctgaaggtgagagtgaaggagctggagcagcagctgcaggagagcgccagagaggccgagatggagagagccctgctgcagggcgagagagaggccgagagagccctgctgcagaaggagcagaaggccgtggaccagctgcaggagaagctggtggccctggagaccggcatccagaaggagagagacaaggaggccgaggccctggagaccgagaccaagctgttcgaggacctggagttccagcagctggagagagagagcagagtggaggaggagagagagctggccggccagggcctgctgagaagcaaggccgagctgctgagaagcatcgccaagagaaaggagagactggccatcctggacagccaggccggccagatcagagcccaggccgtgcaggagagcgagagactggccagagacaagaacgccagcctgcagctgctgcagaaggagaaggagaagctgaccgtgctggagagaagataccacagcctgaccggcggcagacccttccccaagaccaccagcaccctgaaggagatggagaagctgctgctgcccgccgtggacctggagcagtggtaccaggagctgatggccggcctgggcaccggccccgccgccgccagcccccacagcagccccccccccctgcccgccaaggccagcagacagctgcaggtgtacagaagcaagatggacggcgaggccaccagccccctgcccagaaccagaagcggccccctgcccagcagcagcggcagcagcagcagcagcagccagctgagcgtggccaccctgggcagaagccccagccccaagagcgccctgctgacccagaacggcaccggcagcctgcccagaaacctggccgccaccctgcaggacatcgagaccaagagacagctggccctgcagcagaaggtggagagcctgcccgccgagcccctgcccaccgacgaccccgccggccagcaggtgatcgaggagcagagaagaagactggccgagctgaagcagaaggccgccgccgaggcccagtgccagtgggacgccctgcacggcgccgcccccttccccgccggccccagcggcttcccccccctgatgcaccacagcatcctgcaccacctgcccgccggcagagagagaggcgaggagggcgagcacgcctacgacaccctgagcctggagagcagcgacagcatggagaccagcatcagcaccggcggcaacagcgcctgcagccccgacaacatgagcagcgccagcggcctggacatgggcaagatcgaggagatggagaagatgctgaaggaggcccacgccgagaagaacagactgatggagagcagagagagagagatggagctgagaagacaggccctggaggaggagagaagaagaagagagcaggtggagagaagactgcagagcgagagcgccagaagacagcagctggtggagaaggaggtgaagatgagagagaagcagttcagccaggccagacccctgaccagatacctgcccatcagaaaggaggacttcgacctgaagacccacatcgagagcagcggccacggcgtggacacctgcctgcacgtggtgctgagcagcaaggtgtgcagaggctacctggtgaagatgggcggcaagatcaagagctggaagaagagatggttcgtgttcgacagactgaagagaaccctgagctactacgtggacaagcacgagaccaagctgaagggcgtgatctacttccaggccatcgaggaggtgtactacgaccacctgagaagcgccgccaagagccccaaccccgccctgaccttctgcgtgaagacccacgacagactgtactacatggtggcccccagcgccgaggccatgagaatctggatggacgtgatcgtgaccggcgccgagggctacacccagttcatgaactag

SEQ ID NO: 93611 - DNA, 306 bp, synthetic construct
  misc_feature 1..306: note = Description of Artificial Sequence: Synthetic coding sequence
  source 1..306: mol_type = other DNA
atgggcggcaagatcaagagctggaagaagagatggttcgtgttcgacagactgaagagaaccctgagctactacgtggacaagcacgagaccaagctgaagggcgtgatctacttccaggccatcgaggaggtgtactacgaccacctgagaagcgccgccaagagccccaaccccgccctgaccttctgcgtgaagacccacgacagactgtactacatggtggcccccagcgccgaggccatgagaatctggatggacgtgatcgtgaccggcgccgagggctacacccagttcatgaactag

SEQ ID NO: 93612 - DNA, 1119 bp, synthetic construct
  misc_feature 1..1119: note = Description of Artificial Sequence: Synthetic coding sequence
  source 1..1119: mol_type = other DNA
atggacgccctgaacagaaaccagatcggccccggctgccagacccagaccatggtgcagaagggccccctggacctgatcgagaccggcaagggcctgaaggtgcagaccgacaagccccacctggtgagcctgggcagcggcagactgagcaccgccatcaccctgctgcccctggaggagggcagaaccgtgatcggcagcgccgccagagacatcagcctgcagggccccggcctggcccccgagcactgctacatcgagaacctgagaggcaccctgaccctgtacccctgcggcaacgcctgcaccatcgacggcctgcccgtgagacagcccaccagactgacccagggctgcatgctgtgcctgggccagagcaccttcctgagattcaaccaccccgccgaggccaagtggatgaagagcatgatccccgccggcggcagagcccccggccccccctacagccccgtgcccgagagcgagagcctggtgaacggcaaccacaccccccagaccgccaccagaggccccagcgcctgcgccagccacagcagcctggtgagcagcatcgagaaggacctgcaggagatcatggacagcctggtgctggaggagcccggcgccgccggcaagaagcccgccgccaccagccccctgagccccatggccaacggcggcagatacctgctgagcccccccaccagccccggcgccatgagcgtgggcagcagctacgagaacaccagccccgccttcagccccctgagcagccccgccagcagcggcagctgcgccagccacagccccagcggccaggagcccggccccagcgtgccccccctggtgcccgccagaagcagcagctaccacctggccctgcagcccccccagagcagacccagcggcgccagaagcgagagccccagactgagcagaaagggcggccacgagagaccccccagccccggcctgagaggcctgctgaccgacagccccgccgccaccgtgctggccgaggccagaagagccaccgagagccccagactgggcggccagctgcccgtggtggccatcagcctgagcgagtaccccgccgccagaagatgcacctag

SEQ ID NO: 93613 - DNA, 744 bp, synthetic construct
  misc_feature 1..744: note = Description of Artificial Sequence: Synthetic coding sequence
  source 1..744: mol_type = other DNA
atggacgccctgaacagaaaccagatcggccccggctgccagacccagaccatggtgcagaagggccccctggacctgatcgagaccggcaagggcctgaaggtgcagaccgacaagccccacctggtgagcctgggcagcggcagactgagcaccgccatcaccctgctgcccctggaggagggcagaaccgtgatcggcagcgccgccagagacatcagcctgcagggccccggcctggcccccgagcactgctacatcgagaacctgagaggcaccctgaccctgtacccctgcggcaacgcctgcaccatcgacggcctgcccgtgagacagcccaccagactgacccagggctgcatgctgtgcctgggccagagcaccttcctgagattcaaccaccccgccgaggccaagtggatgaagagcatgatccccgccggcggcagagcccccggccccccctacagccccgtgcccgccgagagcgagagcctggtgaacggcaaccacaccccccagaccgccaccagaggccccagcgcctgcgccagccacagcagcctggtgagcagcatcgagaaggacctgcaggagatcatggacagcctggtgctggaggagcccggcgccgccggcaagaagcccgccgccaccagccccctgagccccatggccaacggcggcagatacctgctgagcccccccaccagccccggccacgtgtgcggcctgcagctgtag

SEQ ID NO: 93614 - DNA, 14055 bp, synthetic construct
  misc_feature 1..14055: note = Description of Artificial Sequence: Synthetic coding sequence
  source 1..14055: mol_type = other DNA
atggtggccggcatgctgatgcccagagaccagctgagagccatctacgaggtgctgttcagagagggcgtgatggtggccaagaaggacagaagacccagaagcctgcacccccacgtgcccggcgtgaccaacctgcaggtgatgagagccatggccagcctgagagccagaggcctggtgagagagaccttcgcctggtgccacttctactggtacctgaccaacgagggcatcgcccacctgagacagtacctgcacctgccccccgagatcgtgcccgccagcctgcagagagtgagaagacccgtggccatggtgatgcccgccagaagaaccccccacgtgcaggccgtgcagggccccctgggcagcccccccaagagaggccccctgcccaccgaggagcagagagtgtacagaagaaaggagctggaggaggtgagccccgagacccccgtggtgcccgccaccacccagagaaccctggccagacccggccccgagcccgcccccgccaccgacgagagagacagagtgcagaagaagaccttcaccaagtgggtgaacaagcacctgatcaaggcccagagacacatcagcgacctgtacgaggacctgagagacggccacaacctgatcagcctgctggaggtgctgagcggcgacagcctgcccagagagaagggcagaatgagattccacaagctgcagaacgtgcagatcgccctggactacctgagacacagacaggtgaagctggtgaacatcagaaacgacgacatcgccgacggcaaccccaagctgaccctgggcctgatctggaccatcatcctgcacttccagatcagcgacatccaggtgagcggccagagcgaggacatgaccgccaaggagaagctgctgctgtggagccagagaatggtggagggctaccagggcctgagatgcgacaacttcaccagcagctggagagacggcagactgttcaacgccatcatccacagacacaagcccctgctgatcgacatgaacaaggtgtacagacagaccaacctggagaacctggaccaggccttcagcgtggccgagagagacctgggcgtgaccagactgctggaccccgaggacgtggacgtgccccagcccgacgagaagagcatcatcacctacgtgagcagcctgtacgacgccatgcccagagtgcccgacgtgcaggacggcgtgagagccaacgagctgcagctgagatggcaggagtacagagagctggtgctgctgctgctgcagtggatgagacaccacaccgccgccttcgaggagagaagattccccagcagcttcgaggagatcgagatcctgtggagccagttcctgaagttcaaggagatggagctgcccgccaaggaggccgacaagaacagaagcaagggcatctaccagagcctggagggcgccgtgcaggccggccagctgaaggtgccccccggctaccaccccctggacgtggagaaggagtggggcaagctgcacgtggccatcctggagagagagaagcagctgagaagcgagttcgagagactggagtgcctgcagagaatcgtgaccaagctgcagatggaggccggcctgtgcgaggagcagctgaaccaggccgacgccctgctgcagagcgacgtgagactgctggccgccggcaaggtgccccagagagccggcgaggtggagagagacctggacaaggccgacagcatgatcagactgctgttcaacgacgtgcagaccctgaaggacggcagacacccccagggcgagcagatgtacagaagagtgtacagactgcacgagagactggtggccatcagaaccgagtacaacctgagactgaaggccggcgtggccgcccccgccacccaggtggcccaggtgaccctgcagagcgtgcagagaagacccgagctggaggacagcaccctgagatacctgcaggacctgctggcctgggtggaggagaaccagcacagagtggacggcgccgagtggggcgtggacctgcccagcgtggaggcccagctgggcagccacagaggcctgcaccagagcatcgaggagttcagagccaagatcgagagagccagaagcgacgagggccagctgagccccgccaccagaggcgcctacagagactgcctgggcagactggacctgcagtacgccaagctgctgaacagcagcaaggccagactgagaagcctggagagcctgcacagcttcgtggccgccgccaccaaggagctgatgtggctgaacgagaaggaggaggaggaggtgggcttcgactggagcgacagaaacaccaacatgaccgccaagaaggagagctacagcgccctgatgagagagctggagctgaaggagaagaagatcaaggagctgcagaacgccggcgacagactgctgagagaggaccaccccgccagacccaccgtggagagcttccaggccgccctgcagacccagtggagctggatgctgcagctgtgctgctgcatcgaggcccacctgaaggagaacgccgcctacttccagttcttcagcgacgtgagagaggccgagggccagctgcagaagctgcaggaggccctgagaagaaagtacagctgcgacagaagcgccaccgtgaccagactggaggacctgctgcaggacgcccaggacgagaaggagcagctgaacgagtacaagggccacctgagcggcctggccaagagagccaaggccgtggtgcagctgaagcccagacaccccgcccaccccatgagaggcagactgcccctgctggccgtgtgcgactacaagcaggtggaggtgaccgtgcacaagggcgacgagtgccagctggtgggccccgcccagcccagccactggaaggtgctgagcagcagcggcagcgaggccgccgtgcccagcgtgtgcttcctggtgcccccccccaaccaggaggcccaggaggccgtgaccagactggaggcccagcaccaggccctggtgaccctgtggcaccagctgcacgtggacatgaagagcctgctggcctggcagagcctgagaagagacgtgcagctgatcagaagctggagcctggccaccttcagaaccctgaagcccgaggagcagagacaggccctgcacagcctggagctgcactaccaggccttcctgagagacagccaggacgccggcggcttcggccccgaggacagactgatggccgagagagagtacggcagctgcagccaccactaccagcagctgctgcagagcctggagcagggcgcccaggaggagagcagatgccagagatgcatcagcgagctgaaggacatcagactgcagctggaggcctgcgagaccagaaccgtgcacagactgagactgcccctggacaaggagcccgccagagagtgcgcccagagaatcgccgagcagcagaaggcccaggccgaggtggagggcctgggcaagggcgtggccagactgagcgccgaggccgagaaggtgctggccctgcccgagcccagccccgccgcccccaccctgagaagcgagctggagctgaccctgggcaagctggagcaggtgagaagcctgagcgccatctacctggagaagctgaagaccatcagcctggtgatcagaggcacccagggcgccgaggaggtgctgagagcccacgaggagcagctgaaggaggcccaggccgtgcccgccaccctgcccgagctggaggccaccaaggccagcctgaagaagctgagagcccaggccgaggcccagcagcccaccttcgacgccctgagagacgagctgagaggcgcccaggaggtgggcgagagactgcagcagagacacggcgagagagacgtggaggtggagagatggagagagagagtggcccagctgctggagagatggcaggccgtgctggcccagaccgacgtgagacagagagagctggagcagctgggcagacagctgagatactacagagagagcgccgaccccctgggcgcctggctgcaggacgccagaagaagacaggagcagatccaggccatgcccctggccgacagccaggccgtgagagagcagctgagacaggagcaggccctgctggaggagatcgagagacacggcgagaaggtggaggagtgccagagattcgccaagcagtacatcaacgccatcaaggactacgagctgcagctggtgacctacaaggcccagctggagcccgtggccagccccgccaagaagcccaaggtgcagagcggcagcgagagcgtgatccaggagtacgtggacctgagaacccactacagcgagctgaccaccctgaccagccagtacatcaagttcatcagcgagaccctgagaagaatggaggaggaggagagactggccgagcagcagagagccgaggagagagagagactggccgaggtggaggccgccctggagaagcagagacagctggccgaggcccacgcccaggccaaggcccaggccgagagagaggccaaggagctgcagcagagaatgcaggaggaggtggtgagaagagaggaggccgccgtggacgcccagcagcagaagagaagcatccaggaggagctgcagcagctgagacagagcagcgaggccgagatccaggccaaggccagacaggccgaggccgccgagagaagcagactgagaatcgaggaggagatcagagtggtgagactgcagctggaggccaccgagagacagagaggcggcgccgagggcgagctgcaggccctgagagccagagccgaggaggccgaggcccagaagagacaggcccaggaggaggccgagagactgagaagacaggtgcaggacgagagccagagaaagagacaggccgaggtggagctggccagcagagtgaaggccgaggccgaggccgccagagagaagcagagagccctgcaggccctggaggagctgagactgcaggccgaggaggccgagagaagactgagacaggccgaggtggagagagccagacaggtgcaggtggccctggagaccgcccagagaagcgccgaggccgagctgcagagcaagagagccagcttcgccgagaagaccgcccagctggagagaagcctgcaggaggagcacgtggccgtggcccagctgagagaggaggccgagagaagagcccagcagcaggccgaggccgagagagccagagaggaggccgagagagagctggagagatggcagctgaaggccaacgaggccctgagactgagactgcaggccgaggaggtggcccagcagaagagcctggcccaggccgaggccgagaagcagaaggaggaggccgagagagaggccagaagaagaggcaaggccgaggagcaggccgtgagacagagagagctggccgagcaggagctggagaagcagagacagctggccgagggcaccgcccagcagagactggccgccgagcaggagctgatcagactgagagccgagaccgagcagggcgagcagcagagacagctgctggaggaggagctggccagactgcagagagaggccgccgccgccacccagaagagacaggagctggaggccgagctggccaaggtgagagccgagatggaggtgctgctggccagcaaggccagagccgaggaggagagcagaagcaccagcgagaagagcaagcagagactggaggccgaggccggcagattcagagagctggccgaggaggccgccagactgagagccctggccgaggaggccaagagacagagacagctggccgaggaggacgccgccagacagagagccgaggccgagagagtgctggccgagaagctggccgccatcggcgaggccaccagactgaagaccgaggccgagatcgccctgaaggagaaggaggccgagaacgagagactgagaagactggccgaggacgaggccttccagagaagaagactggaggagcaggccgcccagcacaaggccgacatcgaggagagactggcccagctgagaaaggccagcgacagcgagctggagagacagaagggcctggtggaggacaccctgagacagagaagacaggtggaggaggagatcctggccctgaaggccagcttcgagaaggccgccgccggcaaggccgagctggagctggagctgggcagaatcagaagcaacgccgaggacaccctgagaagcaaggagcaggccgagctggaggccgccagacagagacagctggccgccgaggaggagagaagaagaagagaggccgaggagagagtgcagaagagcctggccgccgaggaggaggccgccagacagagaaaggccgccctggaggaggtggagagactgaaggccaaggtggaggaggccagaagactgagagagagagccgagcaggagagcgccagacagctgcagctggcccaggaggccgcccagaagagactgcaggccgaggagaaggcccacgccttcgccgtgcagcagaaggagcaggagctgcagcagaccctgcagcaggagcagagcgtgctggaccagctgagaggcgaggccgaggccgccagaagagccgccgaggaggccgaggaggccagagtgcaggccgagagagaggccgcccagagcagaagacaggtggaggaggccgagagactgaagcagagcgccgaggagcaggcccaggccagagcccaggcccaggccgccgccgagaagctgagaaaggaggccgagcaggaggccgccagaagagcccaggccgagcaggccgccctgagacagaagcaggccgccgacgccgagatggagaagcacaagaagttcgccgagcagaccctgagacagaaggcccaggtggagcaggagctgaccaccctgagactgcagctggaggagaccgaccaccagaagaacctgctggacgaggagctgcagagactgaaggccgaggccaccgaggccgccagacagagaagccaggtggaggaggagctgttcagcgtgagagtgcagatggaggagctgagcaagctgaaggccagaatcgaggccgagaacagagccctgatcctgagagacaaggacaacacccagagattcctgcaggaggaggccgagaagatgaagcaggtggccgaggaggccgccagactgagcgtggccgcccaggaggccgccagactgagacagctggccgaggaggacctggcccagcagagagccctggccgagaagatgctgaaggagaagatgcaggccgtgcaggaggccaccagactgaaggccgaggccgagctgctgcagcagcagaaggagctggcccaggagcaggccagaagactgcaggaggacaaggagcagatggcccagcagctggccgaggagacccagggcttccagagaaccctggaggccgagagacagagacagctggagatgagcgccgaggccgagagactgaagctgagagtggccgagatgagcagagcccaggccagagccgaggaggacgcccagagattcagaaagcaggccgaggagatcggcgagaagctgcacagaaccgagctggccacccaggagaaggtgaccctggtgcagaccctggagatccagagacagcagagcgaccacgacgccgagagactgagagaggccatcgccgagctggagagagagaaggagaagctgcagcaggaggccaagctgctgcagctgaagagcgaggagatgcagaccgtgcagcaggagcagctgctgcaggagacccaggccctgcagcagagcttcctgagcgagaaggacagcctgctgcagagagagagattcatcgagcaggagaaggccaagctggagcagctgttccaggacgaggtggccaaggcccagcagctgagagaggagcagcagagacagcagcagcagatggagcaggagagacagagactggtggccagcatggaggaggccagaagaagacagcacgaggccgaggagggcgtgagaagaaagcaggaggagctgcagcagctggagcagcagagaagacagcaggaggagctgctggccgaggagaaccagagactgagagagcagctgcagctgctggaggagcagcacagagccgccctggcccacagcgaggaggtgaccgccagccaggtggccgccaccaagaccctgcccaacggcagagacgccctggacggccccgccgccgaggccgagcccgagcacagcttcgacggcctgagaagaaaggtgagcgcccagagactgcaggaggccggcatcctgagcgccgaggagctgcagagactggcccagggccacaccaccgtggacgagctggccagaagagaggacgtgagacactacctgcagggcagaagcagcatcgccggcctgctgctgaaggccaccaacgagaagctgagcgtgtacgccgccctgcagagacagctgctgagccccggcaccgccctgatcctgctggaggcccaggccgccagcggcttcctgctggaccccgtgagaaacagaagactgaccgtgaacgaggccgtgaaggagggcgtggtgggccccgagctgcaccacaagctgctgagcgccgagagagccgtgaccggctacaaggacccctacaccggccagcagatcagcctgttccaggccatgcagaagggcctgatcgtgagagagcacggcatcagactgctggaggcccagatcgccaccggcggcgtgatcgaccccgtgcacagccacagagtgcccgtggacgtggcctacagaagaggctacttcgacgaggagatgaacagagtgctggccgaccccagcgacgacaccaagggcttcttcgaccccaacacccacgagaacctgacctacctgcagctgctggagagatgcgtggaggaccccgagaccggcctgtgcctgctgcccctgaccgacaaggccgccaagggcggcgagctggtgtacaccgacagcgaggccagagacgtgttcgagaaggccaccgtgagcgcccccttcggcaagttccagggcaagaccgtgaccatctgggagatcatcaacagcgagtacttcaccgccgagcagagaagagacctgctgagacagttcagaaccggcagaatcaccgtggagaagatcatcaagatcatcatcaccgtggtggaggagcaggagcagaagggcagactgtgcttcgagggcctgagaagcctggtgcccgccgccgagctgctggagagcagagtgatcgacagagagctgtaccagcagctgcagagaggcgagagaagcgtgagagacgtggccgaggtggacaccgtgagaagagccctgagaggcgccaacgtgatcgccggcgtgtggctggaggaggccggccagaagctgagcatctacaacgccctgaagaaggacctgctgcccagcgacatggccgtggccctgctggaggcccaggccggcaccggccacatcatcgaccccgccaccagcgccagactgaccgtggacgaggccgtgagagccggcctggtgggccccgagttccacgagaagctgctgagcgccgagaaggccgtgaccggctacagagacccctacaccggccagagcgtgagcctgttccaggccctgaagaagggcctgatccccagagagcagggcctgagactgctggacgcccagctgagcaccggcggcatcgtggaccccagcaagagccacagagtgcccctggacgtggcctgcgccagaggctgcctggacgaggagaccagcagagccctgagcgcccccagagccgacgccaaggcctacagcgaccccagcaccggcgagcccgccacctacggcgagctgcagcagagatgcagacccgaccagctgaccggcctgagcctgctgcccctgagcgagaaggccgccagagccagacaggaggagctgtacagcgagctgcaggccagagagaccttcgagaagacccccgtggaggtgcccgtgggcggcttcaagggcagaaccgtgaccgtgtgggagctgatcagcagcgagtacttcaccgccgagcagagacaggagctgctgagacagttcagaaccggcaaggtgaccgtggagaaggtgatcaagatcctgatcaccatcgtggaggaggtggagaccctgagacaggagagactgagcttcagcggcctgagagcccccgtgcccgccagcgagctgctggccagcggcgtgctgagcagagcccagttcgagcagctgaaggacggcaagaccaccgtgaaggacctgagcgagctgggcagcgtgagaaccctgctgcagggcagcggctgcctggccggcatctacctggaggacaccaaggagaaggtgagcatctacgaggccatgagaagaggcctgctgagagccaccaccgccgccctgctgctggaggcccaggccgccaccggcttcctggtggaccccgtgagaaaccagagactgtacgtgcacgaggccgtgaaggccggcgtggtgggccccgagctgcacgagcagctgctgagcgccgagaaggccgtgaccggctacagagacccctacagcggcagcaccatcagcctgttccaggccatgcagaagggcctggtgctgagacagcacggcatcagactgctggaggcccagatcgccaccggcggcatcatcgaccccgtgcacagccacagagtgcccgtggacgtggcctaccagagaggctacttcagcgaggagatgaacagagtgctggccgaccccagcgacgacaccaagggcttcttcgaccccaacacccacgagaacctgacctacagacagctgctggagagatgcgtggaggaccccgagaccggcctgagactgctgcccctgaagggcgccgagaaggccgaggtggtggagaccacccaggtgtacaccgaggaggagaccagaagagccttcgaggagacccagatcgacatccccggcggcggcagccacggcggcagcaccatgagcctgtgggaggtgatgcagagcgacctgatccccgaggagcagagagcccagctgatggccgacttccaggccggcagagtgaccaaggagagaatgatcatcatcatcatcgagatcatcgagaagaccgagatcatcagacagcagggcctggccagctacgactacgtgagaagaagactgaccgccgaggacctgttcgaggccagaatcatcagcctggagacctacaacctgctgagagagggcaccagaagcctgagagaggccctggaggccgagagcgcctggtgctacctgtacggcaccggcagcgtggccggcgtgtacctgcccggcagcagacagaccctgagcatctaccaggccctgaagaagggcctgctgagcgccgaggtggccagactgctgctggaggcccaggccgccaccggcttcctgctggaccccgtgaagggcgagagactgaccgtggacgaggccgtgagaaagggcctggtgggccccgagctgcacgacagactgctgagcgccgagagagccgtgaccggctacagagacccctacaccgagcagaccatcagcctgttccaggccatgaagaaggagctgatccccaccgaggaggccctgagactgctggacgcccagctggccaccggcggcatcgtggaccccagactgggcttccacctgcccctggaggtggcctaccagagaggctacctgaacaaggacacccacgaccagctgagcgagcccagcgaggtgagaagctacgtggaccccagcaccgacgagagactgagctacacccagctgctgagaagatgcagaagagacgacggcaccggccagctgctgctgcccctgagcgacgccagaaagctgaccttcagaggcctgagaaagcagatcaccatggaggagctggtgagaagccaggtgatggacgaggccaccgccctgcagctgagagagggcctgaccagcatcgaggaggtgaccaagaacctgcagaagttcctggagggcaccagctgcatcgccggcgtgttcgtggacgccaccaaggagagactgagcgtgtaccaggccatgaagaagggcatcatcagacccggcaccgccttcgagctgctggaggcccaggccgccaccggctacgtgatcgaccccatcaagggcctgaagctgaccgtggaggaggccgtgagaatgggcatcgtgggccccgagttcaaggacaagctgctgagcgccgagagagccgtgaccggctacaaggacccctacagcggcaagctgatcagcctgttccaggccatgaagaagggcctgatcctgaaggaccacggcatcagactgctggaggcccagatcgccaccggcggcatcatcgaccccgaggagagccacagactgcccgtggaggtggcctacaagagaggcctgttcgacgaggagatgaacgagatcctgaccgaccccagcgacgacaccaagggcttcttcgaccccaacaccgaggagaacctgacctacctgcagctgatggagagatgcatcaccgacccccagaccggcctgtgcctgctgcccctgaaggagaagaagagagagagaaagaccagcagcaagagcagcgtgagaaagagaagagtggtgatcgtggaccccgagaccggcaaggagatgagcgtgtacgaggcctacagaaagggcctgatcgaccaccagacctacctggagctgagcgagcaggagtgcgagtgggaggagatcaccatcagcagcagcgacggcgtggtgaagagcatgatcatcgacagaagaagcggcagacagtacgacatcgacgacgccatcgccaagaacctgatcgacagaagcgccctggaccagtacagagccggcaccctgagcatcaccgagttcgccgacatgctgagcggcaacgccggcggcttcagaagcagaagcagcagcgtgggcagcagcagcagctaccccatcagccccgccgtgagcagaacccagctggccagctggagcgaccccaccgaggagaccggccccgtggccggcatcctggacaccgagaccctggagaaggtgagcatcaccgaggccatgcacagaaacctggtggacaacatcaccggccagagactgctggaggcccaggcctgcaccggcggcatcatcgaccccagcaccggcgagagattccccgtgaccgacgccgtgaacaagggcctggtggacaagatcatggtggacagaatcaacctggcccagaaggccttctgcggcttcgaggaccccagaaccaagaccaagatgagcgccgcccaggccctgaagaagggctggctgtactacgaggccggccagagattcctggaggtgcagtacctgaccggcggcctgatcgagcccgacacccccggcagagtgcccctggacgaggccctgcagagaggcaccgtggacgccagaaccgcccagaagctgagagacgtgggcgcctacagcaagtacctgacctgccccaagaccaagctgaagatcagctacaaggacgccctggacagaagcatggtggaggagggcaccggcctgagactgctggaggccgccgcccagagcaccaagggctactacagcccctacagcgtgagcggcagcggcagcaccgccggcagcagaaccggcagcagaaccggcagcagagccggcagcagaagaggcagcttcgacgccaccggcagcggcttcagcatgaccttcagcagcagcagctacagcagcagcggctacggcagaagatacgccagcggcagcagcgccagcctgggcggccccgagagcgccgtggcctag

SEQ ID NO: 93615 - DNA, 13644 bp, synthetic construct
  misc_feature 1..13644: note = Description of Artificial Sequence: Synthetic coding sequence
  source 1..13644: mol_type = other DNA
atgagccagcaccagctgagagtgccccagcccgagggcctgggcagaaagagaaccagcagcgaggacaacctgtacctggccgtgctgagagccagcgagggcaagaaggacgagagagacagagtgcagaagaagaccttcaccaagtgggtgaacaagcacctgatcaaggcccagagacacatcagcgacctgtacgaggacctgagagacggccacaacctgatcagcctgctggaggtgctgagcggcgacagcctgcccagagagaagggcagaatgagattccacaagctgcagaacgtgcagatcgccctggactacctgagacacagacaggtgaagctggtgaacatcagaaacgacgacatcgccgacggcaaccccaagctgaccctgggcctgatctggaccatcatcctgcacttccagatcagcgacatccaggtgagcggccagagcgaggacatgaccgccaaggagaagctgctgctgtggagccagagaatggtggagggctaccagggcctgagatgcgacaacttcaccagcagctggagagacggcagactgttcaacgccatcatccacagacacaagcccctgctgatcgacatgaacaaggtgtacagacagaccaacctggagaacctggaccaggccttcagcgtggccgagagagacctgggcgtgaccagactgctggaccccgaggacgtggacgtgccccagcccgacgagaagagcatcatcacctacgtgagcagcctgtacgacgccatgcccagagtgcccgacgtgcaggacggcgtgagagccaacgagctgcagctgagatggcaggagtacagagagctggtgctgctgctgctgcagtggatgagacaccacaccgccgccttcgaggagagaagattccccagcagcttcgaggagatcgagatcctgtggagccagttcctgaagttcaaggagatggagctgcccgccaaggaggccgacaagaacagaagcaagggcatctaccagagcctggagggcgccgtgcaggccggccagctgaaggtgccccccggctaccaccccctggacgtggagaaggagtggggcaagctgcacgtggccatcctggagagagagaagcagctgagaagcgagttcgagagactggagtgcctgcagagaatcgtgaccaagctgcagatggaggccggcctgtgcgaggagcagctgaaccaggccgacgccctgctgcagagcgacgtgagactgctggccgccggcaaggtgccccagagagccggcgaggtggagagagacctggacaaggccgacagcatgatcagactgctgttcaacgacgtgcagaccctgaaggacggcagacacccccagggcgagcagatgtacagaagagtgtacagactgcacgagagactggtggccatcagaaccgagtacaacctgagactgaaggccggcgtggccgcccccgccacccaggtggcccaggtgaccctgcagagcgtgcagagaagacccgagctggaggacagcaccctgagatacctgcaggacctgctggcctgggtggaggagaaccagcacagagtggacggcgccgagtggggcgtggacctgcccagcgtggaggcccagctgggcagccacagaggcctgcaccagagcatcgaggagttcagagccaagatcgagagagccagaagcgacgagggccagctgagccccgccaccagaggcgcctacagagactgcctgggcagactggacctgcagtacgccaagctgctgaacagcagcaaggccagactgagaagcctggagagcctgcacagcttcgtggccgccgccaccaaggagctgatgtggctgaacgagaaggaggaggaggaggtgggcttcgactggagcgacagaaacaccaacatgaccgccaagaaggagagctacagcgccctgatgagagagctggagctgaaggagaagaagatcaaggagctgcagaacgccggcgacagactgctgagagaggaccaccccgccagacccaccgtggagagcttccaggccgccctgcagacccagtggagctggatgctgcagctgtgctgctgcatcgaggcccacctgaaggagaacgccgcctacttccagttcttcagcgacgtgagagaggccgagggccagctgcagaagctgcaggaggccctgagaagaaagtacagctgcgacagaagcgccaccgtgaccagactggaggacctgctgcaggacgcccaggacgagaaggagcagctgaacgagtacaagggccacctgagcggcctggccaagagagccaaggccgtggtgcagctgaagcccagacaccccgcccaccccatgagaggcagactgcccctgctggccgtgtgcgactacaagcaggtggaggtgaccgtgcacaagggcgacgagtgccagctggtgggccccgcccagcccagccactggaaggtgctgagcagcagcggcagcgaggccgccgtgcccagcgtgtgcttcctggtgcccccccccaaccaggaggcccaggaggccgtgaccagactggaggcccagcaccaggccctggtgaccctgtggcaccagctgcacgtggacatgaagagcctgctggcctggcagagcctgagaagagacgtgcagctgatcagaagctggagcctggccaccttcagaaccctgaagcccgaggagcagagacaggccctgcacagcctggagctgcactaccaggccttcctgagagacagccaggacgccggcggcttcggccccgaggacagactgatggccgagagagagtacggcagctgcagccaccactaccagcagctgctgcagagcctggagcagggcgcccaggaggagagcagatgccagagatgcatcagcgagctgaaggacatcagactgcagctggaggcctgcgagaccagaaccgtgcacagactgagactgcccctggacaaggagcccgccagagagtgcgcccagagaatcgccgagcagcagaaggcccaggccgaggtggagggcctgggcaagggcgtggccagactgagcgccgaggccgagaaggtgctggccctgcccgagcccagccccgccgcccccaccctgagaagcgagctggagctgaccctgggcaagctggagcaggtgagaagcctgagcgccatctacctggagaagctgaagaccatcagcctggtgatcagaggcacccagggcgccgaggaggtgctgagagcccacgaggagcagctgaaggaggcccaggccgtgcccgccaccctgcccgagctggaggccaccaaggccagcctgaagaagctgagagcccaggccgaggcccagcagcccaccttcgacgccctgagagacgagctgagaggcgcccaggaggtgggcgagagactgcagcagagacacggcgagagagacgtggaggtggagagatggagagagagagtggcccagctgctggagagatggcaggccgtgctggcccagaccgacgtgagacagagagagctggagcagctgggcagacagctgagatactacagagagagcgccgaccccctgggcgcctggctgcaggacgccagaagaagacaggagcagatccaggccatgcccctggccgacagccaggccgtgagagagcagctgagacaggagcaggccctgctggaggagatcgagagacacggcgagaaggtggaggagtgccagagattcgccaagcagtacatcaacgccatcaaggactacgagctgcagctggtgacctacaaggcccagctggagcccgtggccagccccgccaagaagcccaaggtgcagagcggcagcgagagcgtgatccaggagtacgtggacctgagaacccactacagcgagctgaccaccctgaccagccagtacatcaagttcatcagcgagaccctgagaagaatggaggaggaggagagactggccgagcagcagagagccgaggagagagagagactggccgaggtggaggccgccctggagaagcagagacagctggccgaggcccacgcccaggccaaggcccaggccgagagagaggccaaggagctgcagcagagaatgcaggaggaggtggtgagaagagaggaggccgccgtggacgcccagcagcagaagagaagcatccaggaggagctgcagcagctgagacagagcagcgaggccgagatccaggccaaggccagacaggccgaggccgccgagagaagcagactgagaatcgaggaggagatcagagtggtgagactgcagctggaggccaccgagagacagagaggcggcgccgagggcgagctgcaggccctgagagccagagccgaggaggccgaggcccagaagagacaggcccaggaggaggccgagagactgagaagacaggtgcaggacgagagccagagaaagagacaggccgaggtggagctggccagcagagtgaaggccgaggccgaggccgccagagagaagcagagagccctgcaggccctggaggagctgagactgcaggccgaggaggccgagagaagactgagacaggccgaggtggagagagccagacaggtgcaggtggccctggagaccgcccagagaagcgccgaggccgagctgcagagcaagagagccagcttcgccgagaagaccgcccagctggagagaagcctgcaggaggagcacgtggccgtggcccagctgagagaggaggccgagagaagagcccagcagcaggccgaggccgagagagccagagaggaggccgagagagagctggagagatggcagctgaaggccaacgaggccctgagactgagactgcaggccgaggaggtggcccagcagaagagcctggcccaggccgaggccgagaagcagaaggaggaggccgagagagaggccagaagaagaggcaaggccgaggagcaggccgtgagacagagagagctggccgagcaggagctggagaagcagagacagctggccgagggcaccgcccagcagagactggccgccgagcaggagctgatcagactgagagccgagaccgagcagggcgagcagcagagacagctgctggaggaggagctggccagactgcagagagaggccgccgccgccacccagaagagacaggagctggaggccgagctggccaaggtgagagccgagatggaggtgctgctggccagcaaggccagagccgaggaggagagcagaagcaccagcgagaagagcaagcagagactggaggccgaggccggcagattcagagagctggccgaggaggccgccagactgagagccctggccgaggaggccaagagacagagacagctggccgaggaggacgccgccagacagagagccgaggccgagagagtgctggccgagaagctggccgccatcggcgaggccaccagactgaagaccgaggccgagatcgccctgaaggagaaggaggccgagaacgagagactgagaagactggccgaggacgaggccttccagagaagaagactggaggagcaggccgcccagcacaaggccgacatcgaggagagactggcccagctgagaaaggccagcgacagcgagctggagagacagaagggcctggtggaggacaccctgagacagagaagacaggtggaggaggagatcctggccctgaaggccagcttcgagaaggccgccgccggcaaggccgagctggagctggagctgggcagaatcagaagcaacgccgaggacaccctgagaagcaaggagcaggccgagctggaggccgccagacagagacagctggccgccgaggaggagagaagaagaagagaggccgaggagagagtgcagaagagcctggccgccgaggaggaggccgccagacagagaaaggccgccctggaggaggtggagagactgaaggccaaggtggaggaggccagaagactgagagagagagccgagcaggagagcgccagacagctgcagctggcccaggaggccgcccagaagagactgcaggccgaggagaaggcccacgccttcgccgtgcagcagaaggagcaggagctgcagcagaccctgcagcaggagcagagcgtgctggaccagctgagaggcgaggccgaggccgccagaagagccgccgaggaggccgaggaggccagagtgcaggccgagagagaggccgcccagagcagaagacaggtggaggaggccgagagactgaagcagagcgccgaggagcaggcccaggccagagcccaggcccaggccgccgccgagaagctgagaaaggaggccgagcaggaggccgccagaagagcccaggccgagcaggccgccctgagacagaagcaggccgccgacgccgagatggagaagcacaagaagttcgccgagcagaccctgagacagaaggcccaggtggagcaggagctgaccaccctgagactgcagctggaggagaccgaccaccagaagaacctgctggacgaggagctgcagagactgaaggccgaggccaccgaggccgccagacagagaagccaggtggaggaggagctgttcagcgtgagagtgcagatggaggagctgagcaagctgaaggccagaatcgaggccgagaacagagccctgatcctgagagacaaggacaacacccagagattcctgcaggaggaggccgagaagatgaagcaggtggccgaggaggccgccagactgagcgtggccgcccaggaggccgccagactgagacagctggccgaggaggacctggcccagcagagagccctggccgagaagatgctgaaggagaagatgcaggccgtgcaggaggccaccagactgaaggccgaggccgagctgctgcagcagcagaaggagctggcccaggagcaggccagaagactgcaggaggacaaggagcagatggcccagcagctggccgaggagacccagggcttccagagaaccctggaggccgagagacagagacagctggagatgagcgccgaggccgagagactgaagctgagagtggccgagatgagcagagcccaggccagagccgaggaggacgcccagagattcagaaagcaggccgaggagatcggcgagaagctgcacagaaccgagctggccacccaggagaaggtgaccctggtgcagaccctggagatccagagacagcagagcgaccacgacgccgagagactgagagaggccatcgccgagctggagagagagaaggagaagctgcagcaggaggccaagctgctgcagctgaagagcgaggagatgcagaccgtgcagcaggagcagctgctgcaggagacccaggccctgcagcagagcttcctgagcgagaaggacagcctgctgcagagagagagattcatcgagcaggagaaggccaagctggagcagctgttccaggacgaggtggccaaggcccagcagctgagagaggagcagcagagacagcagcagcagatggagcaggagagacagagactggtggccagcatggaggaggccagaagaagacagcacgaggccgaggagggcgtgagaagaaagcaggaggagctgcagcagctggagcagcagagaagacagcaggaggagctgctggccgaggagaaccagagactgagagagcagctgcagctgctggaggagcagcacagagccgccctggcccacagcgaggaggtgaccgccagccaggtggccgccaccaagaccctgcccaacggcagagacgccctggacggccccgccgccgaggccgagcccgagcacagcttcgacggcctgagaagaaaggtgagcgcccagagactgcaggaggccggcatcctgagcgccgaggagctgcagagactggcccagggccacaccaccgtggacgagctggccagaagagaggacgtgagacactacctgcagggcagaagcagcatcgccggcctgctgctgaaggccaccaacgagaagctgagcgtgtacgccgccctgcagagacagctgctgagccccggcaccgccctgatcctgctggaggcccaggccgccagcggcttcctgctggaccccgtgagaaacagaagactgaccgtgaacgaggccgtgaaggagggcgtggtgggccccgagctgcaccacaagctgctgagcgccgagagagccgtgaccggctacaaggacccctacaccggccagcagatcagcctgttccaggccatgcagaagggcctgatcgtgagagagcacggcatcagactgctggaggcccagatcgccaccggcggcgtgatcgaccccgtgcacagccacagagtgcccgtggacgtggcctacagaagaggctacttcgacgaggagatgaacagagtgctggccgaccccagcgacgacaccaagggcttcttcgaccccaacacccacgagaacctgacctacctgcagctgctggagagatgcgtggaggaccccgagaccggcctgtgcctgctgcccctgaccgacaaggccgccaagggcggcgagctggtgtacaccgacagcgaggccagagacgtgttcgagaaggccaccgtgagcgcccccttcggcaagttccagggcaagaccgtgaccatctgggagatcatcaacagcgagtacttcaccgccgagcagagaagagacctgctgagacagttcagaaccggcagaatcaccgtggagaagatcatcaagatcatcatcaccgtggtggaggagcaggagcagaagggcagactgtgcttcgagggcctgagaagcctggtgcccgccgccgagctgctggagagcagagtgatcgacagagagctgtaccagcagctgcagagaggcgagagaagcgtgagagacgtggccgaggtggacaccgtgagaagagccctgagaggcgccaacgtgatcgccggcgtgtggctggaggaggccggccagaagctgagcatctacaacgccctgaagaaggacctgctgcccagcgacatggccgtggccctgctggaggcccaggccggcaccggccacatcatcgaccccgccaccagcgccagactgaccgtggacgaggccgtgagagccggcctggtgggccccgagttccacgagaagctgctgagcgccgagaaggccgtgaccggctacagagacccctacaccggccagagcgtgagcctgttccaggccctgaagaagggcctgatccccagagagcagggcctgagactgctggacgcccagctgagcaccggcggcatcgtggaccccagcaagagccacagagtgcccctggacgtggcctgcgccagaggctgcctggacgaggagaccagcagagccctgagcgcccccagagccgacgccaaggcctacagcgaccccagcaccggcgagcccgccacctacggcgagctgcagcagagatgcagacccgaccagctgaccggcctgagcctgctgcccctgagcgagaaggccgccagagccagacaggaggagctgtacagcgagctgcaggccagagagaccttcgagaagacccccgtggaggtgcccgtgggcggcttcaagggcagaaccgtgaccgtgtgggagctgatcagcagcgagtacttcaccgccgagcagagacaggagctgctgagacagttcagaaccggcaaggtgaccgtggagaaggtgatcaagatcctgatcaccatcgtggaggaggtggagaccctgagacaggagagactgagcttcagcggcctgagagcccccgtgcccgccagcgagctgctggccagcggcgtgctgagcagagcccagttcgagcagctgaaggacggcaagaccaccgtgaaggacctgagcgagctgggcagcgtgagaaccctgctgcagggcagcggctgcctggccggcatctacctggaggacaccaaggagaaggtgagcatctacgaggccatgagaagaggcctgctgagagccaccaccgccgccctgctgctggaggcccaggccgccaccggcttcctggtggaccccgtgagaaaccagagactgtacgtgcacgaggccgtgaaggccggcgtggtgggccccgagctgcacgagcagctgctgagcgccgagaaggccgtgaccggctacagagacccctacagcggcagcaccatcagcctgttccaggccatgcagaagggcctggtgctgagacagcacggcatcagactgctggaggcccagatcgccaccggcggcatcatcgaccccgtgcacagccacagagtgcccgtggacgtggcctaccagagaggctacttcagcgaggagatgaacagagtgctggccgaccccagcgacgacaccaagggcttcttcgaccccaacacccacgagaacctgacctacagacagctgctggagagatgcgtggaggaccccgagaccggcctgagactgctgcccctgaagggcgccgagaaggccgaggtggtggagaccacccaggtgtacaccgaggaggagaccagaagagccttcgaggagacccagatcgacatccccggcggcggcagccacggcggcagcaccatgagcctgtgggaggtgatgcagagcgacctgatccccgaggagcagagagcccagctgatggccgacttccaggccggcagagtgaccaaggagagaatgatcatcatcatcatcgagatcatcgagaagaccgagatcatcagacagcagggcctggccagctacgactacgtgagaagaagactgaccgccgaggacctgttcgaggccagaatcatcagcctggagacctacaacctgctgagagagggcaccagaagcctgagagaggccctggaggccgagagcgcctggtgctacctgtacggcaccggcagcgtggccggcgtgtacctgcccggcagcagacagaccctgagcatctaccaggccctgaagaagggcctgctgagcgccgaggtggccagactgctgctggaggcccaggccgccaccggcttcctgctggaccccgtgaagggcgagagactgaccgtggacgaggccgtgagaaagggcctggtgggccccgagctgcacgacagactgctgagcgccgagagagccgtgaccggctacagagacccctacaccgagcagaccatcagcctgttccaggccatgaagaaggagctgatccccaccgaggaggccctgagactgctggacgcccagctggccaccggcggcatcgtggaccccagactgggcttccacctgcccctggaggtggcctaccagagaggctacctgaacaaggacacccacgaccagctgagcgagcccagcgaggtgagaagctacgtggaccccagcaccgacgagagactgagctacacccagctgctgagaagatgcagaagagacgacggcaccggccagctgctgctgcccctgagcgacgccagaaagctgaccttcagaggcctgagaaagcagatcaccatggaggagctggtgagaagccaggtgatggacgaggccaccgccctgcagctgagagagggcctgaccagcatcgaggaggtgaccaagaacctgcagaagttcctggagggcaccagctgcatcgccggcgtgttcgtggacgccaccaaggagagactgagcgtgtaccaggccatgaagaagggcatcatcagacccggcaccgccttcgagctgctggaggcccaggccgccaccggctacgtgatcgaccccatcaagggcctgaagctgaccgtggaggaggccgtgagaatgggcatcgtgggccccgagttcaaggacaagctgctgagcgccgagagagccgtgaccggctacaaggacccctacagcggcaagctgatcagcctgttccaggccatgaagaagggcctgatcctgaaggaccacggcatcagactgctggaggcccagatcgccaccggcggcatcatcgaccccgaggagagccacagactgcccgtggaggtggcctacaagagaggcctgttcgacgaggagatgaacgagatcctgaccgaccccagcgacgacaccaagggcttcttcgaccccaacaccgaggagaacctgacctacctgcagctgatggagagatgcatcaccgacccccagaccggcctgtgcctgctgcccctgaaggagaagaagagagagagaaagaccagcagcaagagcagcgtgagaaagagaagagtggtgatcgtggaccccgagaccggcaaggagatgagcgtgtacgaggcctacagaaagggcctgatcgaccaccagacctacctggagctgagcgagcaggagtgcgagtgggaggagatcaccatcagcagcagcgacggcgtggtgaagagcatgatcatcgacagaagaagcggcagacagtacgacatcgacgacgccatcgccaagaacctgatcgacagaagcgccctggaccagtacagagccggcaccctgagcatcaccgagttcgccgacatgctgagcggcaacgccggcggcttcagaagcagaagcagcagcgtgggcagcagcagcagctaccccatcagccccgccgtgagcagaacccagctggccagctggagcgaccccaccgaggagaccggccccgtggccggcatcctggacaccgagaccctggagaaggtgagcatcaccgaggccatgcacagaaacctggtggacaacatcaccggccagagactgctggaggcccaggcctgcaccggcggcatcatcgaccccagcaccggcgagagattccccgtgaccgacgccgtgaacaagggcctggtggacaagatcatggtggacagaatcaacctggcccagaaggccttctgcggcttcgaggaccccagaaccaagaccaagatgagcgccgcccaggccctgaagaagggctggctgtactacgaggccggccagagattcctggaggtgcagtacctgaccggcggcctgatcgagcccgacacccccggcagagtgcccctggacgaggccctgcagagaggcaccgtggacgccagaaccgcccagaagctgagagacgtgggcgcctacagcaagtacctgacctgccccaagaccaagctgaagatcagctacaaggacgccctggacagaagcatggtggaggagggcaccggcctgagactgctggaggccgccgcccagagcaccaagggctactacagcccctacagcgtgagcggcagcggcagcaccgccggcagcagaaccggcagcagaaccggcagcagagccggcagcagaagaggcagcttcgacgccaccggcagcggcttcagcatgaccttcagcagcagcagctacagcagcagcggctacggcagaagatacgccagcggcagcagcgccagcctgggcggccccgagagcgccgtggcctag

SEQ ID NO: 93616 - DNA, 13644 bp, synthetic construct
  misc_feature 1..13644: note = Description of Artificial Sequence: Synthetic coding sequence
  source 1..13644: mol_type = other DNA
atggagcccagcggcagcctgttccccagcctggtggtggtgggccacgtggtgaccctggccgccgtgtggcactggagaagaggcagaagatgggcccaggacgagcaggacgagagagacagagtgcagaagaagaccttcaccaagtgggtgaacaagcacctgatcaaggcccagagacacatcagcgacctgtacgaggacctgagagacggccacaacctgatcagcctgctggaggtgctgagcggcgacagcctgcccagagagaagggcagaatgagattccacaagctgcagaacgtgcagatcgccctggactacctgagacacagacaggtgaagctggtgaacatcagaaacgacgacatcgccgacggcaaccccaagctgaccctgggcctgatctggaccatcatcctgcacttccagatcagcgacatccaggtgagcggccagagcgaggacatgaccgccaaggagaagctgctgctgtggagccagagaatggtggagggctaccagggcctgagatgcgacaacttcaccagcagctggagagacggcagactgttcaacgccatcatccacagacacaagcccctgctgatcgacatgaacaaggtgtacagacagaccaacctggagaacctggaccaggccttcagcgtggccgagagagacctgggcgtgaccagactgctggaccccgaggacgtggacgtgccccagcccgacgagaagagcatcatcacctacgtgagcagcctgtacgacgccatgcccagagtgcccgacgtgcaggacggcgtgagagccaacgagctgcagctgagatggcaggagtacagagagctggtgctgctgctgctgcagtggatgagacaccacaccgccgccttcgaggagagaagattccccagcagcttcgaggagatcgagatcctgtggagccagttcctgaagttcaaggagatggagctgcccgccaaggaggccgacaagaacagaagcaagggcatctaccagagcctggagggcgccgtgcaggccggccagctgaaggtgccccccggctaccaccccctggacgtggagaaggagtggggcaagctgcacgtggccatcctggagagagagaagcagctgagaagcgagttcgagagactggagtgcctgcagagaatcgtgaccaagctgcagatggaggccggcctgtgcgaggagcagctgaaccaggccgacgccctgctgcagagcgacgtgagactgctggccgccggcaaggtgccccagagagccggcgaggtggagagagacctggacaaggccgacagcatgatcagactgctgttcaacgacgtgcagaccctgaaggacggcagacacccccagggcgagcagatgtacagaagagtgtacagactgcacgagagactggtggccatcagaaccgagtacaacctgagactgaaggccggcgtggccgcccccgccacccaggtggcccaggtgaccctgcagagcgtgcagagaagacccgagctggaggacagcaccctgagatacctgcaggacctgctggcctgggtggaggagaaccagcacagagtggacggcgccgagtggggcgtggacctgcccagcgtggaggcccagctgggcagccacagaggcctgcaccagagcatcgaggagttcagagccaagatcgagagagccagaagcgacgagggccagctgagccccgccaccagaggcgcctacagagactgcctgggcagactggacctgcagtacgccaagctgctgaacagcagcaaggccagactgagaagcctggagagcctgcacagcttcgtggccgccgccaccaaggagctgatgtggctgaacgagaaggaggaggaggaggtgggcttcgactggagcgacagaaacaccaacatgaccgccaagaaggagagctacagcgccctgatgagagagctggagctgaaggagaagaagatcaaggagctgcagaacgccggcgacagactgctgagagaggaccaccccgccagacccaccgtggagagcttccaggccgccctgcagacccagtggagctggatgctgcagctgtgctgctgcatcgaggcccacctgaaggagaacgccgcctacttccagttcttcagcgacgtgagagaggccgagggccagctgcagaagctgcaggaggccctgagaagaaagtacagctgcgacagaagcgccaccgtgaccagactggaggacctgctgcaggacgcccaggacgagaaggagcagctgaacgagtacaagggccacctgagcggcctggccaagagagccaaggccgtggtgcagctgaagcccagacaccccgcccaccccatgagaggcagactgcccctgctggccgtgtgcgactacaagcaggtggaggtgaccgtgcacaagggcgacgagtgccagctggtgggccccgcccagcccagccactggaaggtgctgagcagcagcggcagcgaggccgccgtgcccagcgtgtgcttcctggtgcccccccccaaccaggaggcccaggaggccgtgaccagactggaggcccagcaccaggccctggtgaccctgtggcaccagctgcacgtggacatgaagagcctgctggcctggcagagcctgagaagagacgtgcagctgatcagaagctggagcctggccaccttcagaaccctgaagcccgaggagcagagacaggccctgcacagcctggagctgcactaccaggccttcctgagagacagccaggacgccggcggcttcggccccgaggacagactgatggccgagagagagtacggcagctgcagccaccactaccagcagctgctgcagagcctggagcagggcgcccaggaggagagcagatgccagagatgcatcagcgagctgaaggacatcagactgcagctggaggcctgcgagaccagaaccgtgcacagactgagactgcccctggacaaggagcccgccagagagtgcgcccagagaatcgccgagcagcagaaggcccaggccgaggtggagggcctgggcaagggcgtggccagactgagcgccgaggccgagaaggtgctggccctgcccgagcccagccccgccgcccccaccctgagaagcgagctggagctgaccctgggcaagctggagcaggtgagaagcctgagcgccatctacctggagaagctgaagaccatcagcctggtgatcagaggcacccagggcgccgaggaggtgctgagagcccacgaggagcagctgaaggaggcccaggccgtgcccgccaccctgcccgagctggaggccaccaaggccagcctgaagaagctgagagcccaggccgaggcccagcagcccaccttcgacgccctgagagacgagctgagaggcgcccaggaggtgggcgagagactgcagcagagacacggcgagagagacgtggaggtggagagatggagagagagagtggcccagctgctggagagatggcaggccgtgctggcccagaccgacgtgagacagagagagctggagcagctgggcagacagctgagatactacagagagagcgccgaccccctgggcgcctggctgcaggacgccagaagaagacaggagcagatccaggccatgcccctggccgacagccaggccgtgagagagcagctgagacaggagcaggccctgctggaggagatcgagagacacggcgagaaggtggaggagtgccagagattcgccaagcagtacatcaacgccatcaaggactacgagctgcagctggtgacctacaaggcccagctggagcccgtggccagccccgccaagaagcccaaggtgcagagcggcagcgagagcgtgatccaggagtacgtggacctgagaacccactacagcgagctgaccaccctgaccagccagtacatcaagttcatcagcgagaccctgagaagaatggaggaggaggagagactggccgagcagcagagagccgaggagagagagagactggccgaggtggaggccgccctggagaagcagagacagctggccgaggcccacgcccaggccaaggcccaggccgagagagaggccaaggagctgcagcagagaatgcaggaggaggtggtgagaagagaggaggccgccgtggacgcccagcagcagaagagaagcatccaggaggagctgcagcagctgagacagagcagcgaggccgagatccaggccaaggccagacaggccgaggccgccgagagaagcagactgagaatcgaggaggagatcagagtggtgagactgcagctggaggccaccgagagacagagaggcggcgccgagggcgagctgcaggccctgagagccagagccgaggaggccgaggcccagaagagacaggcccaggaggaggccgagagactgagaagacaggtgcaggacgagagccagagaaagagacaggccgaggtggagctggccagcagagtgaaggccgaggccgaggccgccagagagaagcagagagccctgcaggccctggaggagctgagactgcaggccgaggaggccgagagaagactgagacaggccgaggtggagagagccagacaggtgcaggtggccctggagaccgcccagagaagcgccgaggccgagctgcagagcaagagagccagcttcgccgagaagaccgcccagctggagagaagcctgcaggaggagcacgtggccgtggcccagctgagagaggaggccgagagaagagcccagcagcaggccgaggccgagagagccagagaggaggccgagagagagctggagagatggcagctgaaggccaacgaggccctgagactgagactgcaggccgaggaggtggcccagcagaagagcctggcccaggccgaggccgagaagcagaaggaggaggccgagagagaggccagaagaagaggcaaggccgaggagcaggccgtgagacagagagagctggccgagcaggagctggagaagcagagacagctggccgagggcaccgcccagcagagactggccgccgagcaggagctgatcagactgagagccgagaccgagcagggcgagcagcagagacagctgctggaggaggagctggccagactgcagagagaggccgccgccgccacccagaagagacaggagctggaggccgagctggccaaggtgagagccgagatggaggtgctgctggccagcaaggccagagccgaggaggagagcagaagcaccagcgagaagagcaagcagagactggaggccgaggccggcagattcagagagctggccgaggaggccgccagactgagagccctggccgaggaggccaagagacagagacagctggccgaggaggacgccgccagacagagagccgaggccgagagagtgctggccgagaagctggccgccatcggcgaggccaccagactgaagaccgaggccgagatcgccctgaaggagaaggaggccgagaacgagagactgagaagactggccgaggacgaggccttccagagaagaagactggaggagcaggccgcccagcacaaggccgacatcgaggagagactggcccagctgagaaaggccagcgacagcgagctggagagacagaagggcctggtggaggacaccctgagacagagaagacaggtggaggaggagatcctggccctgaaggccagcttcgagaaggccgccgccggcaaggccgagctggagctggagctgggcagaatcagaagcaacgccgaggacaccctgagaagcaaggagcaggccgagctggaggccgccagacagagacagctggccgccgaggaggagagaagaagaagagaggccgaggagagagtgcagaagagcctggccgccgaggaggaggccgccagacagagaaaggccgccctggaggaggtggagagactgaaggccaaggtggaggaggccagaagactgagagagagagccgagcaggagagcgccagacagctgcagctggcccaggaggccgcccagaagagactgcaggccgaggagaaggcccacgccttcgccgtgcagcagaaggagcaggagctgcagcagaccctgcagcaggagcagagcgtgctggaccagctgagaggcgaggccgaggccgccagaagagccgccgaggaggccgaggaggccagagtgcaggccgagagagaggccgcccagagcagaagacaggtggaggaggccgagagactgaagcagagcgccgaggagcaggcccaggccagagcccaggcccaggccgccgccgagaagctgagaaaggaggccgagcaggaggccgccagaagagcccaggccgagcaggccgccctgagacagaagcaggccgccgacgccgagatggagaagcacaagaagttcgccgagcagaccctgagacagaaggcccaggtggagcaggagctgaccaccctgagactgcagctggaggagaccgaccaccagaagaacctgctggacgaggagctgcagagactgaaggccgaggccaccgaggccgccagacagagaagccaggtggaggaggagctgttcagcgtgagagtgcagatggaggagctgagcaagctgaaggccagaatcgaggccgagaacagagccctgatcctgagagacaaggacaacacccagagattcctgcaggaggaggccgagaagatgaagcaggtggccgaggaggccgccagactgagcgtggccgcccaggaggccgccagactgagacagctggccgaggaggacctggcccagcagagagccctggccgagaagatgctgaaggagaagatgcaggccgtgcaggaggccaccagactgaaggccgaggccgagctgctgcagcagcagaaggagctggcccaggagcaggccagaagactgcaggaggacaaggagcagatggcccagcagctggccgaggagacccagggcttccagagaaccctggaggccgagagacagagacagctggagatgagcgccgaggccgagagactgaagctgagagtggccgagatgagcagagcccaggccagagccgaggaggacgcccagagattcagaaagcaggccgaggagatcggcgagaagctgcacagaaccgagctggccacccaggagaaggtgaccctggtgcagaccctggagatccagagacagcagagcgaccacgacgccgagagactgagagaggccatcgccgagctggagagagagaaggagaagctgcagcaggaggccaagctgctgcagctgaagagcgaggagatgcagaccgtgcagcaggagcagctgctgcaggagacccaggccctgcagcagagcttcctgagcgagaaggacagcctgctgcagagagagagattcatcgagcaggagaaggccaagctggagcagctgttccaggacgaggtggccaaggcccagcagctgagagaggagcagcagagacagcagcagcagatggagcaggagagacagagactggtggccagcatggaggaggccagaagaagacagcacgaggccgaggagggcgtgagaagaaagcaggaggagctgcagcagctggagcagcagagaagacagcaggaggagctgctggccgaggagaaccagagactgagagagcagctgcagctgctggaggagcagcacagagccgccctggcccacagcgaggaggtgaccgccagccaggtggccgccaccaagaccctgcccaacggcagagacgccctggacggccccgccgccgaggccgagcccgagcacagcttcgacggcctgagaagaaaggtgagcgcccagagactgcaggaggccggcatcctgagcgccgaggagctgcagagactggcccagggccacaccaccgtggacgagctggccagaagagaggacgtgagacactacctgcagggcagaagcagcatcgccggcctgctgctgaaggccaccaacgagaagctgagcgtgtacgccgccctgcagagacagctgctgagccccggcaccgccctgatcctgctggaggcccaggccgccagcggcttcctgctggaccccgtgagaaacagaagactgaccgtgaacgaggccgtgaaggagggcgtggtgggccccgagctgcaccacaagctgctgagcgccgagagagccgtgaccggctacaaggacccctacaccggccagcagatcagcctgttccaggccatgcagaagggcctgatcgtgagagagcacggcatcagactgctggaggcccagatcgccaccggcggcgtgatcgaccccgtgcacagccacagagtgcccgtggacgtggcctacagaagaggctacttcgacgaggagatgaacagagtgctggccgaccccagcgacgacaccaagggcttcttcgaccccaacacccacgagaacctgacctacctgcagctgctggagagatgcgtggaggaccccgagaccggcctgtgcctgctgcccctgaccgacaaggccgccaagggcggcgagctggtgtacaccgacagcgaggccagagacgtgttcgagaaggccaccgtgagcgcccccttcggcaagttccagggcaagaccgtgaccatctgggagatcatcaacagcgagtacttcaccgccgagcagagaagagacctgctgagacagttcagaaccggcagaatcaccgtggagaagatcatcaagatcatcatcaccgtggtggaggagcaggagcagaagggcagactgtgcttcgagggcctgagaagcctggtgcccgccgccgagctgctggagagcagagtgatcgacagagagctgtaccagcagctgcagagaggcgagagaagcgtgagagacgtggccgaggtggacaccgtgagaagagccctgagaggcgccaacgtgatcgccggcgtgtggctggaggaggccggccagaagctgagcatctacaacgccctgaagaaggacctgctgcccagcgacatggccgtggccctgctggaggcccaggccggcaccggccacatcatcgaccccgccaccagcgccagactgaccgtggacgaggccgtgagagccggcctggtgggccccgagttccacgagaagctgctgagcgccgagaaggccgtgaccggctacagagacccctacaccggccagagcgtgagcctgttccaggccctgaagaagggcctgatccccagagagcagggcctgagactgctggacgcccagctgagcaccggcggcatcgtggaccccagcaagagccacagagtgcccctggacgtggcctgcgccagaggctgcctggacgaggagaccagcagagccctgagcgcccccagagccgacgccaaggcctacagcgaccccagcaccggcgagcccgccacctacggcgagctgcagcagagatgcagacccgaccagctgaccggcctgagcctgctgcccctgagcgagaaggccgccagagccagacaggaggagctgtacagcgagctgcaggccagagagaccttcgagaagacccccgtggaggtgcccgtgggcggcttcaagggcagaaccgtgaccgtgtgggagctgatcagcagcgagtacttcaccgccgagcagagacaggagctgctgagacagttcagaaccggcaaggtgaccgtggagaaggtgatcaagatcctgatcaccatcgtggaggaggtggagaccctgagacaggagagactgagcttcagcggcctgagagcccccgtgcccgccagcgagctgctggccagcggcgtgctgagcagagcccagttcgagcagctgaaggacggcaagaccaccgtgaaggacctgagcgagctgggcagcgtgagaaccctgctgcagggcagcggctgcctggccggcatctacctggaggacaccaaggagaaggtgagcatctacgaggccatgagaagaggcctgctgagagccaccaccgccgccctgctgctggaggcccaggccgccaccggcttcctggtggaccccgtgagaaaccagagactgtacgtgcacgaggccgtgaaggccggcgtggtgggccccgagctgcacgagcagctgctgagcgccgagaaggccgtgaccggctacagagacccctacagcggcagcaccatcagcctgttccaggccatgcagaagggcctggtgctgagacagcacggcatcagactgctggaggcccagatcgccaccggcggcatcatcgaccccgtgcacagccacagagtgcccgtggacgtggcctaccagagaggctacttcagcgaggagatgaacagagtgctggccgaccccagcgacgacaccaagggcttcttcgaccccaacacccacgagaacctgacctacagacagctgctggagagatgcgtggaggaccccgagaccggcctgagactgctgcccctgaagggcgccgagaaggccgaggtggtggagaccacccaggtgtacaccgaggaggagaccagaagagccttcgaggagacccagatcgacatccccggcggcggcagccacggcggcagcaccatgagcctgtgggaggtgatgcagagcgacctgatccccgaggagcagagagcccagctgatggccgacttccaggccggcagagtgaccaaggagagaatgatcatcatcatcatcgagatcatcgagaagaccgagatcatcagacagcagggcctggccagctacgactacgtgagaagaagactgaccgccgaggacctgttcgaggccagaatcatcagcctggagacctacaacctgctgagagagggcaccagaagcctgagagaggccctggaggccgagagcgcctggtgctacctgtacggcaccggcagcgtggccggcgtgtacctgcccggcagcagacagaccctgagcatctaccaggccctgaagaagggcctgctgagcgccgaggtggccagactgctgctggaggcccaggccgccaccggcttcctgctggaccccgtgaagggcgagagactgaccgtggacgaggccgtgagaaagggcctggtgggccccgagctgcacgacagactgctgagcgccgagagagccgtgaccggctacagagacccctacaccgagcagaccatcagcctgttccaggccatgaagaaggagctgatccccaccgaggaggccctgagactgctggacgcccagctggccaccggcggcatcgtggaccccagactgggcttccacctgcccctggaggtggcctaccagagaggctacctgaacaaggacacccacgaccagctgagcgagcccagcgaggtgagaagctacgtggaccccagcaccgacgagagactgagctacacccagctgctgagaagatgcagaagagacgacggcaccggccagctgctgctgcccctgagcgacgccagaaagctgaccttcagaggcctgagaaagcagatcaccatggaggagctggtgagaagccaggtgatggacgaggccaccgccctgcagctgagagagggcctgaccagcatcgaggaggtgaccaagaacctgcagaagttcctggagggcaccagctgcatcgccggcgtgttcgtggacgccaccaaggagagactgagcgtgtaccaggccatgaagaagggcatcatcagacccggcaccgccttcgagctgctggaggcccaggccgccaccggctacgtgatcgaccccatcaagggcctgaagctgaccgtggaggaggccgtgagaatgggcatcgtgggccccgagttcaaggacaagctgctgagcgccgagagagccgtgaccggctacaaggacccctacagcggcaagctgatcagcctgttccaggccatgaagaagggcctgatcctgaaggaccacggcatcagactgctggaggcccagatcgccaccggcggcatcatcgaccccgaggagagccacagactgcccgtggaggtggcctacaagagaggcctgttcgacgaggagatgaacgagatcctgaccgaccccagcgacgacaccaagggcttcttcgaccccaacaccgaggagaacctgacctacctgcagctgatggagagatgcatcaccgacccccagaccggcctgtgcctgctgcccctgaaggagaagaagagagagagaaagaccagcagcaagagcagcgtgagaaagagaagagtggtgatcgtggaccccgagaccggcaaggagatgagcgtgtacgaggcctacagaaagggcctgatcgaccaccagacctacctggagctgagcgagcaggagtgcgagtgggaggagatcaccatcagcagcagcgacggcgtggtgaagagcatgatcatcgacagaagaagcggcagacagtacgacatcgacgacgccatcgccaagaacctgatcgacagaagcgccctggaccagtacagagccggcaccctgagcatcaccgagttcgccgacatgctgagcggcaacgccggcggcttcagaagcagaagcagcagcgtgggcagcagcagcagctaccccatcagccccgccgtgagcagaacccagctggccagctggagcgaccccaccgaggagaccggccccgtggccggcatcctggacaccgagaccctggagaaggtgagcatcaccgaggccatgcacagaaacctggtggacaacatcaccggccagagactgctggaggcccaggcctgcaccggcggcatcatcgaccccagcaccggcgagagattccccgtgaccgacgccgtgaacaagggcctggtggacaagatcatggtggacagaatcaacctggcccagaaggccttctgcggcttcgaggaccccagaaccaagaccaagatgagcgccgcccaggccctgaagaagggctggctgtactacgaggccggccagagattcctggaggtgcagtacctgaccggcggcctgatcgagcccgacacccccggcagagtgcccctggacgaggccctgcagagaggcaccgtggacgccagaaccgcccagaagctgagagacgtgggcgcctacagcaagtacctgacctgccccaagaccaagctgaagatcagctacaaggacgccctggacagaagcatggtggaggagggcaccggcctgagactgctggaggccgccgcccagagcaccaagggctactacagcccctacagcgtgagcggcagcggcagcaccgccggcagcagaaccggcagcagaaccggcagcagagccggcagcagaagaggcagcttcgacgccaccggcagcggcttcagcatgaccttcagcagcagcagctacagcagcagcggctacggcagaagatacgccagcggcagcagcgccagcctgggcggccccgagagcgccgtggcctag

SEQ ID NO: 93617 - DNA, 13578 bp, synthetic construct
  misc_feature 1..13578: note = Description of Artificial Sequence: Synthetic coding sequence
  source 1..13578: mol_type = other DNA
atggaccccagcagagccatccagaacgagatcagcagcctgaaggacgagagagacagagtgcagaagaagaccttcaccaagtgggtgaacaagcacctgatcaaggcccagagacacatcagcgacctgtacgaggacctgagagacggccacaacctgatcagcctgctggaggtgctgagcggcgacagcctgcccagagagaagggcagaatgagattccacaagctgcagaacgtgcagatcgccctggactacctgagacacagacaggtgaagctggtgaacatcagaaacgacgacatcgccgacggcaaccccaagctgaccctgggcctgatctggaccatcatcctgcacttccagatcagcgacatccaggtgagcggccagagcgaggacatgaccgccaaggagaagctgctgctgtggagccagagaatggtggagggctaccagggcctgagatgcgacaacttcaccagcagctggagagacggcagactgttcaacgccatcatccacagacacaagcccctgctgatcgacatgaacaaggtgtacagacagaccaacctggagaacctggaccaggccttcagcgtggccgagagagacctgggcgtgaccagactgctggaccccgaggacgtggacgtgccccagcccgacgagaagagcatcatcacctacgtgagcagcctgtacgacgccatgcccagagtgcccgacgtgcaggacggcgtgagagccaacgagctgcagctgagatggcaggagtacagagagctggtgctgctgctgctgcagtggatgagacaccacaccgccgccttcgaggagagaagattccccagcagcttcgaggagatcgagatcctgtggagccagttcctgaagttcaaggagatggagctgcccgccaaggaggccgacaagaacagaagcaagggcatctaccagagcctggagggcgccgtgcaggccggccagctgaaggtgccccccggctaccaccccctggacgtggagaaggagtggggcaagctgcacgtggccatcctggagagagagaagcagctgagaagcgagttcgagagactggagtgcctgcagagaatcgtgaccaagctgcagatggaggccggcctgtgcgaggagcagctgaaccaggccgacgccctgctgcagagcgacgtgagactgctggccgccggcaaggtgccccagagagccggcgaggtggagagagacctggacaaggccgacagcatgatcagactgctgttcaacgacgtgcagaccctgaaggacggcagacacccccagggcgagcagatgtacagaagagtgtacagactgcacgagagactggtggccatcagaaccgagtacaacctgagactgaaggccggcgtggccgcccccgccacccaggtggcccaggtgaccctgcagagcgtgcagagaagacccgagctggaggacagcaccctgagatacctgcaggacctgctggcctgggtggaggagaaccagcacagagtggacggcgccgagtggggcgtggacctgcccagcgtggaggcccagctgggcagccacagaggcctgcaccagagcatcgaggagttcagagccaagatcgagagagccagaagcgacgagggccagctgagccccgccaccagaggcgcctacagagactgcctgggcagactggacctgcagtacgccaagctgctgaacagcagcaaggccagactgagaagcctggagagcctgcacagcttcgtggccgccgccaccaaggagctgatgtggctgaacgagaaggaggaggaggaggtgggcttcgactggagcgacagaaacaccaacatgaccgccaagaaggagagctacagcgccctgatgagagagctggagctgaaggagaagaagatcaaggagctgcagaacgccggcgacagactgctgagagaggaccaccccgccagacccaccgtggagagcttccaggccgccctgcagacccagtggagctggatgctgcagctgtgctgctgcatcgaggcccacctgaaggagaacgccgcctacttccagttcttcagcgacgtgagagaggccgagggccagctgcagaagctgcaggaggccctgagaagaaagtacagctgcgacagaagcgccaccgtgaccagactggaggacctgctgcaggacgcccaggacgagaaggagcagctgaacgagtacaagggccacctgagcggcctggccaagagagccaaggccgtggtgcagctgaagcccagacaccccgcccaccccatgagaggcagactgcccctgctggccgtgtgcgactacaagcaggtggaggtgaccgtgcacaagggcgacgagtgccagctggtgggccccgcccagcccagccactggaaggtgctgagcagcagcggcagcgaggccgccgtgcccagcgtgtgcttcctggtgcccccccccaaccaggaggcccaggaggccgtgaccagactggaggcccagcaccaggccctggtgaccctgtggcaccagctgcacgtggacatgaagagcctgctggcctggcagagcctgagaagagacgtgcagctgatcagaagctggagcctggccaccttcagaaccctgaagcccgaggagcagagacaggccctgcacagcctggagctgcactaccaggccttcctgagagacagccaggacgccggcggcttcggccccgaggacagactgatggccgagagagagtacggcagctgcagccaccactaccagcagctgctgcagagcctggagcagggcgcccaggaggagagcagatgccagagatgcatcagcgagctgaaggacatcagactgcagctggaggcctgcgagaccagaaccgtgcacagactgagactgcccctggacaaggagcccgccagagagtgcgcccagagaatcgccgagcagcagaaggcccaggccgaggtggagggcctgggcaagggcgtggccagactgagcgccgaggccgagaaggtgctggccctgcccgagcccagccccgccgcccccaccctgagaagcgagctggagctgaccctgggcaagctggagcaggtgagaagcctgagcgccatctacctggagaagctgaagaccatcagcctggtgatcagaggcacccagggcgccgaggaggtgctgagagcccacgaggagcagctgaaggaggcccaggccgtgcccgccaccctgcccgagctggaggccaccaaggccagcctgaagaagctgagagcccaggccgaggcccagcagcccaccttcgacgccctgagagacgagctgagaggcgcccaggaggtgggcgagagactgcagcagagacacggcgagagagacgtggaggtggagagatggagagagagagtggcccagctgctggagagatggcaggccgtgctggcccagaccgacgtgagacagagagagctggagcagctgggcagacagctgagatactacagagagagcgccgaccccctgggcgcctggctgcaggacgccagaagaagacaggagcagatccaggccatgcccctggccgacagccaggccgtgagagagcagctgagacaggagcaggccctgctggaggagatcgagagacacggcgagaaggtggaggagtgccagagattcgccaagcagtacatcaacgccatcaaggactacgagctgcagctggtgacctacaaggcccagctggagcccgtggccagccccgccaagaagcccaaggtgcagagcggcagcgagagcgtgatccaggagtacgtggacctgagaacccactacagcgagctgaccaccctgaccagccagtacatcaagttcatcagcgagaccctgagaagaatggaggaggaggagagactggccgagcagcagagagccgaggagagagagagactggccgaggtggaggccgccctggagaagcagagacagctggccgaggcccacgcccaggccaaggcccaggccgagagagaggccaaggagctgcagcagagaatgcaggaggaggtggtgagaagagaggaggccgccgtggacgcccagcagcagaagagaagcatccaggaggagctgcagcagctgagacagagcagcgaggccgagatccaggccaaggccagacaggccgaggccgccgagagaagcagactgagaatcgaggaggagatcagagtggtgagactgcagctggaggccaccgagagacagagaggcggcgccgagggcgagctgcaggccctgagagccagagccgaggaggccgaggcccagaagagacaggcccaggaggaggccgagagactgagaagacaggtgcaggacgagagccagagaaagagacaggccgaggtggagctggccagcagagtgaaggccgaggccgaggccgccagagagaagcagagagccctgcaggccctggaggagctgagactgcaggccgaggaggccgagagaagactgagacaggccgaggtggagagagccagacaggtgcaggtggccctggagaccgcccagagaagcgccgaggccgagctgcagagcaagagagccagcttcgccgagaagaccgcccagctggagagaagcctgcaggaggagcacgtggccgtggcccagctgagagaggaggccgagagaagagcccagcagcaggccgaggccgagagagccagagaggaggccgagagagagctggagagatggcagctgaaggccaacgaggccctgagactgagactgcaggccgaggaggtggcccagcagaagagcctggcccaggccgaggccgagaagcagaaggaggaggccgagagagaggccagaagaagaggcaaggccgaggagcaggccgtgagacagagagagctggccgagcaggagctggagaagcagagacagctggccgagggcaccgcccagcagagactggccgccgagcaggagctgatcagactgagagccgagaccgagcagggcgagcagcagagacagctgctggaggaggagctggccagactgcagagagaggccgccgccgccacccagaagagacaggagctggaggccgagctggccaaggtgagagccgagatggaggtgctgctggccagcaaggccagagccgaggaggagagcagaagcaccagcgagaagagcaagcagagactggaggccgaggccggcagattcagagagctggccgaggaggccgccagactgagagccctggccgaggaggccaagagacagagacagctggccgaggaggacgccgccagacagagagccgaggccgagagagtgctggccgagaagctggccgccatcggcgaggccaccagactgaagaccgaggccgagatcgccctgaaggagaaggaggccgagaacgagagactgagaagactggccgaggacgaggccttccagagaagaagactggaggagcaggccgcccagcacaaggccgacatcgaggagagactggcccagctgagaaaggccagcgacagcgagctggagagacagaagggcctggtggaggacaccctgagacagagaagacaggtggaggaggagatcctggccctgaaggccagcttcgagaaggccgccgccggcaaggccgagctggagctggagctgggcagaatcagaagcaacgccgaggacaccctgagaagcaaggagcaggccgagctggaggccgccagacagagacagctggccgccgaggaggagagaagaagaagagaggccgaggagagagtgcagaagagcctggccgccgaggaggaggccgccagacagagaaaggccgccctggaggaggtggagagactgaaggccaaggtggaggaggccagaagactgagagagagagccgagcaggagagcgccagacagctgcagctggcccaggaggccgcccagaagagactgcaggccgaggagaaggcccacgccttcgccgtgcagcagaaggagcaggagctgcagcagaccctgcagcaggagcagagcgtgctggaccagctgagaggcgaggccgaggccgccagaagagccgccgaggaggccgaggaggccagagtgcaggccgagagagaggccgcccagagcagaagacaggtggaggaggccgagagactgaagcagagcgccgaggagcaggcccaggccagagcccaggcccaggccgccgccgagaagctgagaaaggaggccgagcaggaggccgccagaagagcccaggccgagcaggccgccctgagacagaagcaggccgccgacgccgagatggagaagcacaagaagttcgccgagcagaccctgagacagaaggcccaggtggagcaggagctgaccaccctgagactgcagctggaggagaccgaccaccagaagaacctgctggacgaggagctgcagagactgaaggccgaggccaccgaggccgccagacagagaagccaggtggaggaggagctgttcagcgtgagagtgcagatggaggagctgagcaagctgaaggccagaatcgaggccgagaacagagccctgatcctgagagacaaggacaacacccagagattcctgcaggaggaggccgagaagatgaagcaggtggccgaggaggccgccagactgagcgtggccgcccaggaggccgccagactgagacagctggccgaggaggacctggcccagcagagagccctggccgagaagatgctgaaggagaagatgcaggccgtgcaggaggccaccagactgaaggccgaggccgagctgctgcagcagcagaaggagctggcccaggagcaggccagaagactgcaggaggacaaggagcagatggcccagcagctggccgaggagacccagggcttccagagaaccctggaggccgagagacagagacagctggagatgagcgccgaggccgagagactgaagctgagagtggccgagatgagcagagcccaggccagagccgaggaggacgcccagagattcagaaagcaggccgaggagatcggcgagaagctgcacagaaccgagctggccacccaggagaaggtgaccctggtgcagaccctggagatccagagacagcagagcgaccacgacgccgagagactgagagaggccatcgccgagctggagagagagaaggagaagctgcagcaggaggccaagctgctgcagctgaagagcgaggagatgcagaccgtgcagcaggagcagctgctgcaggagacccaggccctgcagcagagcttcctgagcgagaaggacagcctgctgcagagagagagattcatcgagcaggagaaggccaagctggagcagctgttccaggacgaggtggccaaggcccagcagctgagagaggagcagcagagacagcagcagcagatggagcaggagagacagagactggtggccagcatggaggaggccagaagaagacagcacgaggccgaggagggcgtgagaagaaagcaggaggagctgcagcagctggagcagcagagaagacagcaggaggagctgctggccgaggagaaccagagactgagagagcagctgcagctgctggaggagcagcacagagccgccctggcccacagcgaggaggtgaccgccagccaggtggccgccaccaagaccctgcccaacggcagagacgccctggacggccccgccgccgaggccgagcccgagcacagcttcgacggcctgagaagaaaggtgagcgcccagagactgcaggaggccggcatcctgagcgccgaggagctgcagagactggcccagggccacaccaccgtggacgagctggccagaagagaggacgtgagacactacctgcagggcagaagcagcatcgccggcctgctgctgaaggccaccaacgagaagctgagcgtgtacgccgccctgcagagacagctgctgagccccggcaccgccctgatcctgctggaggcccaggccgccagcggcttcctgctggaccccgtgagaaacagaagactgaccgtgaacgaggccgtgaaggagggcgtggtgggccccgagctgcaccacaagctgctgagcgccgagagagccgtgaccggctacaaggacccctacaccggccagcagatcagcctgttccaggccatgcagaagggcctgatcgtgagagagcacggcatcagactgctggaggcccagatcgccaccggcggcgtgatcgaccccgtgcacagccacagagtgcccgtggacgtggcctacagaagaggctacttcgacgaggagatgaacagagtgctggccgaccccagcgacgacaccaagggcttcttcgaccccaacacccacgagaacctgacctacctgcagctgctggagagatgcgtggaggaccccgagaccggcctgtgcctgctgcccctgaccgacaaggccgccaagggcggcgagctggtgtacaccgacagcgaggccagagacgtgttcgagaaggccaccgtgagcgcccccttcggcaagttccagggcaagaccgtgaccatctgggagatcatcaacagcgagtacttcaccgccgagcagagaagagacctgctgagacagttcagaaccggcagaatcaccgtggagaagatcatcaagatcatcatcaccgtggtggaggagcaggagcagaagggcagactgtgcttcgagggcctgagaagcctggtgcccgccgccgagctgctggagagcagagtgatcgacagagagctgtaccagcagctgcagagaggcgagagaagcgtgagagacgtggccgaggtggacaccgtgagaagagccctgagaggcgccaacgtgatcgccggcgtgtggctggaggaggccggccagaagctgagcatctacaacgccctgaagaaggacctgctgcccagcgacatggccgtggccctgctggaggcccaggccggcaccggccacatcatcgaccccgccaccagcgccagactgaccgtggacgaggccgtgagagccggcctggtgggccccgagttccacgagaagctgctgagcgccgagaaggccgtgaccggctacagagacccctacaccggccagagcgtgagcctgttccaggccctgaagaagggcctgatccccagagagcagggcctgagactgctggacgcccagctgagcaccggcggcatcgtggaccccagcaagagccacagagtgcccctggacgtggcctgcgccagaggctgcctggacgaggagaccagcagagccctgagcgcccccagagccgacgccaaggcctacagcgaccccagcaccggcgagcccgccacctacggcgagctgcagcagagatgcagacccgaccagctgaccggcctgagcctgctgcccctgagcgagaaggccgccagagccagacaggaggagctgtacagcgagctgcaggccagagagaccttcgagaagacccccgtggaggtgcccgtgggcggcttcaagggcagaaccgtgaccgtgtgggagctgatcagcagcgagtacttcaccgccgagcagagacaggagctgctgagacagttcagaaccggcaaggtgaccgtggagaaggtgatcaagatcctgatcaccatcgtggaggaggtggagaccctgagacaggagagactgagcttcagcggcctgagagcccccgtgcccgccagcgagctgctggccagcggcgtgctgagcagagcccagttcgagcagctgaaggacggcaagaccaccgtgaaggacctgagcgagctgggcagcgtgagaaccctgctgcagggcagcggctgcctggccggcatctacctggaggacaccaaggagaaggtgagcatctacgaggccatgagaagaggcctgctgagagccaccaccgccgccctgctgctggaggcccaggccgccaccggcttcctggtggaccccgtgagaaaccagagactgtacgtgcacgaggccgtgaaggccggcgtggtgggccccgagctgcacgagcagctgctgagcgccgagaaggccgtgaccggctacagagacccctacagcggcagcaccatcagcctgttccaggccatgcagaagggcctggtgctgagacagcacggcatcagactgctggaggcccagatcgccaccggcggcatcatcgaccccgtgcacagccacagagtgcccgtggacgtggcctaccagagaggctacttcagcgaggagatgaacagagtgctggccgaccccagcgacgacaccaagggcttcttcgaccccaacacccacgagaacctgacctacagacagctgctggagagatgcgtggaggaccccgagaccggcctgagactgctgcccctgaagggcgccgagaaggccgaggtggtggagaccacccaggtgtacaccgaggaggagaccagaagagccttcgaggagacccagatcgacatccccggcggcggcagccacggcggcagcaccatgagcctgtgggaggtgatgcagagcgacctgatccccgaggagcagagagcccagctgatggccgacttccaggccggcagagtgaccaaggagagaatgatcatcatcatcatcgagatcatcgagaagaccgagatcatcagacagcagggcctggccagctacgactacgtgagaagaagactgaccgccgaggacctgttcgaggccagaatcatcagcctggagacctacaacctgctgagagagggcaccagaagcctgagagaggccctggaggccgagagcgcctggtgctacctgtacggcaccggcagcgtggccggcgtgtacctgcccggcagcagacagaccctgagcatctaccaggccctgaagaagggcctgctgagcgccgaggtggccagactgctgctggaggcccaggccgccaccggcttcctgctggaccccgtgaagggcgagagactgaccgtggacgaggccgtgagaaagggcctggtgggccccgagctgcacgacagactgctgagcgccgagagagccgtgaccggctacagagacccctacaccgagcagaccatcagcctgttccaggccatgaagaaggagctgatccccaccgaggaggccctgagactgctggacgcccagctggccaccggcggcatcgtggaccccagactgggcttccacctgcccctggaggtggcctaccagagaggctacctgaacaaggacacccacgaccagctgagcgagcccagcgaggtgagaagctacgtggaccccagcaccgacgagagactgagctacacccagctgctgagaagatgcagaagagacgacggcaccggccagctgctgctgcccctgagcgacgccagaaagctgaccttcagaggcctgagaaagcagatcaccatggaggagctggtgagaagccaggtgatggacgaggccaccgccctgcagctgagagagggcctgaccagcatcgaggaggtgaccaagaacctgcagaagttcctggagggcaccagctgcatcgccggcgtgttcgtggacgccaccaaggagagactgagcgtgtaccaggccatgaagaagggcatcatcagacccggcaccgccttcgagctgctggaggcccaggccgccaccggctacgtgatcgaccccatcaagggcctgaagctgaccgtggaggaggccgtgagaatgggcatcgtgggccccgagttcaaggacaagctgctgagcgccgagagagccgtgaccggctacaaggacccctacagcggcaagctgatcagcctgttccaggccatgaagaagggcctgatcctgaaggaccacggcatcagactgctggaggcccagatcgccaccggcggcatcatcgaccccgaggagagccacagactgcccgtggaggtggcctacaagagaggcctgttcgacgaggagatgaacgagatcctgaccgaccccagcgacgacaccaagggcttcttcgaccccaacaccgaggagaacctgacctacctgcagctgatggagagatgcatcaccgacccccagaccggcctgtgcctgctgcccctgaaggagaagaagagagagagaaagaccagcagcaagagcagcgtgagaaagagaagagtggtgatcgtggaccccgagaccggcaaggagatgagcgtgtacgaggcctacagaaagggcctgatcgaccaccagacctacctggagctgagcgagcaggagtgcgagtgggaggagatcaccatcagcagcagcgacggcgtggtgaagagcatgatcatcgacagaagaagcggcagacagtacgacatcgacgacgccatcgccaagaacctgatcgacagaagcgccctggaccagtacagagccggcaccctgagcatcaccgagttcgccgacatgctgagcggcaacgccggcggcttcagaagcagaagcagcagcgtgggcagcagcagcagctaccccatcagccccgccgtgagcagaacccagctggccagctggagcgaccccaccgaggagaccggccccgtggccggcatcctggacaccgagaccctggagaaggtgagcatcaccgaggccatgcacagaaacctggtggacaacatcaccggccagagactgctggaggcccaggcctgcaccggcggcatcatcgaccccagcaccggcgagagattccccgtgaccgacgccgtgaacaagggcctggtggacaagatcatggtggacagaatcaacctggcccagaaggccttctgcggcttcgaggaccccagaaccaagaccaagatgagcgccgcccaggccctgaagaagggctggctgtactacgaggccggccagagattcctggaggtgcagtacctgaccggcggcctgatcgagcccgacacccccggcagagtgcccctggacgaggccctgcagagaggcaccgtggacgccagaaccgcccagaagctgagagacgtgggcgcctacagcaagtacctgacctgccccaagaccaagctgaagatcagctacaaggacgccctggacagaagcatggtggaggagggcaccggcctgagactgctggaggccgccgcccagagcaccaagggctactacagcccctacagcgtgagcggcagcggcagcaccgccggcagcagaaccggcagcagaaccggcagcagagccggcagcagaagaggcagcttcgacgccaccggcagcggcttcagcatgaccttcagcagcagcagctacagcagcagcggctacggcagaagatacgccagcggcagcagcgccagcctgggcggccccgagagcgccgtggcctag

SEQ ID NO: 93618 - DNA, 13602 bp, synthetic construct
  misc_feature 1..13602: note = Description of Artificial Sequence: Synthetic coding sequence
  source 1..13602: mol_type = other DNA
atggccggccccctgcccgacgagcaggacttcatccaggcctacgaggaggtgagagagaagtacaaggacgagagagacagagtgcagaagaagaccttcaccaagtgggtgaacaagcacctgatcaaggcccagagacacatcagcgacctgtacgaggacctgagagacggccacaacctgatcagcctgctggaggtgctgagcggcgacagcctgcccagagagaagggcagaatgagattccacaagctgcagaacgtgcagatcgccctggactacctgagacacagacaggtgaagctggtgaacatcagaaacgacgacatcgccgacggcaaccccaagctgaccctgggcctgatctggaccatcatcctgcacttccagatcagcgacatccaggtgagcggccagagcgaggacatgaccgccaaggagaagctgctgctgtggagccagagaatggtggagggctaccagggcctgagatgcgacaacttcaccagcagctggagagacggcagactgttcaacgccatcatccacagacacaagcccctgctgatcgacatgaacaaggtgtacagacagaccaacctggagaacctggaccaggccttcagcgtggccgagagagacctgggcgtgaccagactgctggaccccgaggacgtggacgtgccccagcccgacgagaagagcatcatcacctacgtgagcagcctgtacgacgccatgcccagagtgcccgacgtgcaggacggcgtgagagccaacgagctgcagctgagatggcaggagtacagagagctggtgctgctgctgctgcagtggatgagacaccacaccgccgccttcgaggagagaagattccccagcagcttcgaggagatcgagatcctgtggagccagttcctgaagttcaaggagatggagctgcccgccaaggaggccgacaagaacagaagcaagggcatctaccagagcctggagggcgccgtgcaggccggccagctgaaggtgccccccggctaccaccccctggacgtggagaaggagtggggcaagctgcacgtggccatcctggagagagagaagcagctgagaagcgagttcgagagactggagtgcctgcagagaatcgtgaccaagctgcagatggaggccggcctgtgcgaggagcagctgaaccaggccgacgccctgctgcagagcgacgtgagactgctggccgccggcaaggtgccccagagagccggcgaggtggagagagacctggacaaggccgacagcatgatcagactgctgttcaacgacgtgcagaccctgaaggacggcagacacccccagggcgagcagatgtacagaagagtgtacagactgcacgagagactggtggccatcagaaccgagtacaacctgagactgaaggccggcgtggccgcccccgccacccaggtggcccaggtgaccctgcagagcgtgcagagaagacccgagctggaggacagcaccctgagatacctgcaggacctgctggcctgggtggaggagaaccagcacagagtggacggcgccgagtggggcgtggacctgcccagcgtggaggcccagctgggcagccacagaggcctgcaccagagcatcgaggagttcagagccaagatcgagagagccagaagcgacgagggccagctgagccccgccaccagaggcgcctacagagactgcctgggcagactggacctgcagtacgccaagctgctgaacagcagcaaggccagactgagaagcctggagagcctgcacagcttcgtggccgccgccaccaaggagctgatgtggctgaacgagaaggaggaggaggaggtgggcttcgactggagcgacagaaacaccaacatgaccgccaagaaggagagctacagcgccctgatgagagagctggagctgaaggagaagaagatcaaggagctgcagaacgccggcgacagactgctgagagaggaccaccccgccagacccaccgtggagagcttccaggccgccctgcagacccagtggagctggatgctgcagctgtgctgctgcatcgaggcccacctgaaggagaacgccgcctacttccagttcttcagcgacgtgagagaggccgagggccagctgcagaagctgcaggaggccctgagaagaaagtacagctgcgacagaagcgccaccgtgaccagactggaggacctgctgcaggacgcccaggacgagaaggagcagctgaacgagtacaagggccacctgagcggcctggccaagagagccaaggccgtggtgcagctgaagcccagacaccccgcccaccccatgagaggcagactgcccctgctggccgtgtgcgactacaagcaggtggaggtgaccgtgcacaagggcgacgagtgccagctggtgggccccgcccagcccagccactggaaggtgctgagcagcagcggcagcgaggccgccgtgcccagcgtgtgcttcctggtgcccccccccaaccaggaggcccaggaggccgtgaccagactggaggcccagcaccaggccctggtgaccctgtggcaccagctgcacgtggacatgaagagcctgctggcctggcagagcctgagaagagacgtgcagctgatcagaagctggagcctggccaccttcagaaccctgaagcccgaggagcagagacaggccctgcacagcctggagctgcactaccaggccttcctgagagacagccaggacgccggcggcttcggccccgaggacagactgatggccgagagagagtacggcagctgcagccaccactaccagcagctgctgcagagcctggagcagggcgcccaggaggagagcagatgccagagatgcatcagcgagctgaaggacatcagactgcagctggaggcctgcgagaccagaaccgtgcacagactgagactgcccctggacaaggagcccgccagagagtgcgcccagagaatcgccgagcagcagaaggcccaggccgaggtggagggcctgggcaagggcgtggccagactgagcgccgaggccgagaaggtgctggccctgcccgagcccagccccgccgcccccaccctgagaagcgagctggagctgaccctgggcaagctggagcaggtgagaagcctgagcgccatctacctggagaagctgaagaccatcagcctggtgatcagaggcacccagggcgccgaggaggtgctgagagcccacgaggagcagctgaaggaggcccaggccgtgcccgccaccctgcccgagctggaggccaccaaggccagcctgaagaagctgagagcccaggccgaggcccagcagcccaccttcgacgccctgagagacgagctgagaggcgcccaggaggtgggcgagagactgcagcagagacacggcgagagagacgtggaggtggagagatggagagagagagtggcccagctgctggagagatggcaggccgtgctggcccagaccgacgtgagacagagagagctggagcagctgggcagacagctgagatactacagagagagcgccgaccccctgggcgcctggctgcaggacgccagaagaagacaggagcagatccaggccatgcccctggccgacagccaggccgtgagagagcagctgagacaggagcaggccctgctggaggagatcgagagacacggcgagaaggtggaggagtgccagagattcgccaagcagtacatcaacgccatcaaggactacgagctgcagctggtgacctacaaggcccagctggagcccgtggccagccccgccaagaagcccaaggtgcagagcggcagcgagagcgtgatccaggagtacgtggacctgagaacccactacagcgagctgaccaccctgaccagccagtacatcaagttcatcagcgagaccctgagaagaatggaggaggaggagagactggccgagcagcagagagccgaggagagagagagactggccgaggtggaggccgccctggagaagcagagacagctggccgaggcccacgcccaggccaaggcccaggccgagagagaggccaaggagctgcagcagagaatgcaggaggaggtggtgagaagagaggaggccgccgtggacgcccagcagcagaagagaagcatccaggaggagctgcagcagctgagacagagcagcgaggccgagatccaggccaaggccagacaggccgaggccgccgagagaagcagactgagaatcgaggaggagatcagagtggtgagactgcagctggaggccaccgagagacagagaggcggcgccgagggcgagctgcaggccctgagagccagagccgaggaggccgaggcccagaagagacaggcccaggaggaggccgagagactgagaagacaggtgcaggacgagagccagagaaagagacaggccgaggtggagctggccagcagagtgaaggccgaggccgaggccgccagagagaagcagagagccctgcaggccctggaggagctgagactgcaggccgaggaggccgagagaagactgagacaggccgaggtggagagagccagacaggtgcaggtggccctggagaccgcccagagaagcgccgaggccgagctgcagagcaagagagccagcttcgccgagaagaccgcccagctggagagaagcctgcaggaggagcacgtggccgtggcccagctgagagaggaggccgagagaagagcccagcagcaggccgaggccgagagagccagagaggaggccgagagagagctggagagatggcagctgaaggccaacgaggccctgagactgagactgcaggccgaggaggtggcccagcagaagagcctggcccaggccgaggccgagaagcagaaggaggaggccgagagagaggccagaagaagaggcaaggccgaggagcaggccgtgagacagagagagctggccgagcaggagctggagaagcagagacagctggccgagggcaccgcccagcagagactggccgccgagcaggagctgatcagactgagagccgagaccgagcagggcgagcagcagagacagctgctggaggaggagctggccagactgcagagagaggccgccgccgccacccagaagagacaggagctggaggccgagctggccaaggtgagagccgagatggaggtgctgctggccagcaaggccagagccgaggaggagagcagaagcaccagcgagaagagcaagcagagactggaggccgaggccggcagattcagagagctggccgaggaggccgccagactgagagccctggccgaggaggccaagagacagagacagctggccgaggaggacgccgccagacagagagccgaggccgagagagtgctggccgagaagctggccgccatcggcgaggccaccagactgaagaccgaggccgagatcgccctgaaggagaaggaggccgagaacgagagactgagaagactggccgaggacgaggccttccagagaagaagactggaggagcaggccgcccagcacaaggccgacatcgaggagagactggcccagctgagaaaggccagcgacagcgagctggagagacagaagggcctggtggaggacaccctgagacagagaagacaggtggaggaggagatcctggccctgaaggccagcttcgagaaggccgccgccggcaaggccgagctggagctggagctgggcagaatcagaagcaacgccgaggacaccctgagaagcaaggagcaggccgagctggaggccgccagacagagacagctggccgccgaggaggagagaagaagaagagaggccgaggagagagtgcagaagagcctggccgccgaggaggaggccgccagacagagaaaggccgccctggaggaggtggagagactgaaggccaaggtggaggaggccagaagactgagagagagagccgagcaggagagcgccagacagctgcagctggcccaggaggccgcccagaagagactgcaggccgaggagaaggcccacgccttcgccgtgcagcagaaggagcaggagctgcagcagaccctgcagcaggagcagagcgtgctggaccagctgagaggcgaggccgaggccgccagaagagccgccgaggaggccgaggaggccagagtgcaggccgagagagaggccgcccagagcagaagacaggtggaggaggccgagagactgaagcagagcgccgaggagcaggcccaggccagagcccaggcccaggccgccgccgagaagctgagaaaggaggccgagcaggaggccgccagaagagcccaggccgagcaggccgccctgagacagaagcaggccgccgacgccgagatggagaagcacaagaagttcgccgagcagaccctgagacagaaggcccaggtggagcaggagctgaccaccctgagactgcagctggaggagaccgaccaccagaagaacctgctggacgaggagctgcagagactgaaggccgaggccaccgaggccgccagacagagaagccaggtggaggaggagctgttcagcgtgagagtgcagatggaggagctgagcaagctgaaggccagaatcgaggccgagaacagagccctgatcctgagagacaaggacaacacccagagattcctgcaggaggaggccgagaagatgaagcaggtggccgaggaggccgccagactgagcgtggccgcccaggaggccgccagactgagacagctggccgaggaggacctggcccagcagagagccctggccgagaagatgctgaaggagaagatgcaggccgtgcaggaggccaccagactgaaggccgaggccgagctgctgcagcagcagaaggagctggcccaggagcaggccagaagactgcaggaggacaaggagcagatggcccagcagctggccgaggagacccagggcttccagagaaccctggaggccgagagacagagacagctggagatgagcgccgaggccgagagactgaagctgagagtggccgagatgagcagagcccaggccagagccgaggaggacgcccagagattcagaaagcaggccgaggagatcggcgagaagctgcacagaaccgagctggccacccaggagaaggtgaccctggtgcagaccctggagatccagagacagcagagcgaccacgacgccgagagactgagagaggccatcgccgagctggagagagagaaggagaagctgcagcaggaggccaagctgctgcagctgaagagcgaggagatgcagaccgtgcagcaggagcagctgctgcaggagacccaggccctgcagcagagcttcctgagcgagaaggacagcctgctgcagagagagagattcatcgagcaggagaaggccaagctggagcagctgttccaggacgaggtggccaaggcccagcagctgagagaggagcagcagagacagcagcagcagatggagcaggagagacagagactggtggccagcatggaggaggccagaagaagacagcacgaggccgaggagggcgtgagaagaaagcaggaggagctgcagcagctggagcagcagagaagacagcaggaggagctgctggccgaggagaaccagagactgagagagcagctgcagctgctggaggagcagcacagagccgccctggcccacagcgaggaggtgaccgccagccaggtggccgccaccaagaccctgcccaacggcagagacgccctggacggccccgccgccgaggccgagcccgagcacagcttcgacggcctgagaagaaaggtgagcgcccagagactgcaggaggccggcatcctgagcgccgaggagctgcagagactggcccagggccacaccaccgtggacgagctggccagaagagaggacgtgagacactacctgcagggcagaagcagcatcgccggcctgctgctgaaggccaccaacgagaagctgagcgtgtacgccgccctgcagagacagctgctgagccccggcaccgccctgatcctgctggaggcccaggccgccagcggcttcctgctggaccccgtgagaaacagaagactgaccgtgaacgaggccgtgaaggagggcgtggtgggccccgagctgcaccacaagctgctgagcgccgagagagccgtgaccggctacaaggacccctacaccggccagcagatcagcctgttccaggccatgcagaagggcctgatcgtgagagagcacggcatcagactgctggaggcccagatcgccaccggcggcgtgatcgaccccgtgcacagccacagagtgcccgtggacgtggcctacagaagaggctacttcgacgaggagatgaacagagtgctggccgaccccagcgacgacaccaagggcttcttcgaccccaacacccacgagaacctgacctacctgcagctgctggagagatgcgtggaggaccccgagaccggcctgtgcctgctgcccctgaccgacaaggccgccaagggcggcgagctggtgtacaccgacagcgaggccagagacgtgttcgagaaggccaccgtgagcgcccccttcggcaagttccagggcaagaccgtgaccatctgggagatcatcaacagcgagtacttcaccgccgagcagagaagagacctgctgagacagttcagaaccggcagaatcaccgtggagaagatcatcaagatcatcatcaccgtggtggaggagcaggagcagaagggcagactgtgcttcgagggcctgagaagcctggtgcccgccgccgagctgctggagagcagagtgatcgacagagagctgtaccagcagctgcagagaggcgagagaagcgtgagagacgtggccgaggtggacaccgtgagaagagccctgagaggcgccaacgtgatcgccggcgtgtggctggaggaggccggccagaagctgagcatctacaacgccctgaagaaggacctgctgcccagcgacatggccgtggccctgctggaggcccaggccggcaccggccacatcatcgaccccgccaccagcgccagactgaccgtggacgaggccgtgagagccggcctggtgggccccgagttccacgagaagctgctgagcgccgagaaggccgtgaccggctacagagacccctacaccggccagagcgtgagcctgttccaggccctgaagaagggcctgatccccagagagcagggcctgagactgctggacgcccagctgagcaccggcggcatcgtggaccccagcaagagccacagagtgcccctggacgtggcctgcgccagaggctgcctggacgaggagaccagcagagccctgagcgcccccagagccgacgccaaggcctacagcgaccccagcaccggcgagcccgccacctacggcgagctgcagcagagatgcagacccgaccagctgaccggcctgagcctgctgcccctgagcgagaaggccgccagagccagacaggaggagctgtacagcgagctgcaggccagagagaccttcgagaagacccccgtggaggtgcccgtgggcggcttcaagggcagaaccgtgaccgtgtgggagctgatcagcagcgagtacttcaccgccgagcagagacaggagctgctgagacagttcagaaccggcaaggtgaccgtggagaaggtgatcaagatcctgatcaccatcgtggaggaggtggagaccctgagacaggagagactgagcttcagcggcctgagagcccccgtgcccgccagcgagctgctggccagcggcgtgctgagcagagcccagttcgagcagctgaaggacggcaagaccaccgtgaaggacctgagcgagctgggcagcgtgagaaccctgctgcagggcagcggctgcctggccggcatctacctggaggacaccaaggagaaggtgagcatctacgaggccatgagaagaggcctgctgagagccaccaccgccgccctgctgctggaggcccaggccgccaccggcttcctggtggaccccgtgagaaaccagagactgtacgtgcacgaggccgtgaaggccggcgtggtgggccccgagctgcacgagcagctgctgagcgccgagaaggccgtgaccggctacagagacccctacagcggcagcaccatcagcctgttccaggccatgcagaagggcctggtgctgagacagcacggcatcagactgctggaggcccagatcgccaccggcggcatcatcgaccccgtgcacagccacagagtgcccgtggacgtggcctaccagagaggctacttcagcgaggagatgaacagagtgctggccgaccccagcgacgacaccaagggcttcttcgaccccaacacccacgagaacctgacctacagacagctgctggagagatgcgtggaggaccccgagaccggcctgagactgctgcccctgaagggcgccgagaaggccgaggtggtggagaccacccaggtgtacaccgaggaggagaccagaagagccttcgaggagacccagatcgacatccccggcggcggcagccacggcggcagcaccatgagcctgtgggaggtgatgcagagcgacctgatccccgaggagcagagagcccagctgatggccgacttccaggccggcagagtgaccaaggagagaatgatcatcatcatcatcgagatcatcgagaagaccgagatcatcagacagcagggcctggccagctacgactacgtgagaagaagactgaccgccgaggacctgttcgaggccagaatcatcagcctggagacctacaacctgctgagagagggcaccagaagcctgagagaggccctggaggccgagagcgcctggtgctacctgtacggcaccggcagcgtggccggcgtgtacctgcccggcagcagacagaccctgagcatctaccaggccctgaagaagggcctgctgagcgccgaggtggccagactgctgctggaggcccaggccgccaccggcttcctgctggaccccgtgaagggcgagagactgaccgtggacgaggccgtgagaaagggcctggtgggccccgagctgcacgacagactgctgagcgccgagagagccgtgaccggctacagagacccctacaccgagcagaccatcagcctgttccaggccatgaagaaggagctgatccccaccgaggaggccctgagactgctggacgcccagctggccaccggcggcatcgtggaccccagactgggcttccacctgcccctggaggtggcctaccagagaggctacctgaacaaggacacccacgaccagctgagcgagcccagcgaggtgagaagctacgtggaccccagcaccgacgagagactgagctacacccagctgctgagaagatgcagaagagacgacggcaccggccagctgctgctgcccctgagcgacgccagaaagctgaccttcagaggcctgagaaagcagatcaccatggaggagctggtgagaagccaggtgatggacgaggccaccgccctgcagctgagagagggcctgaccagcatcgaggaggtgaccaagaacctgcagaagttcctggagggcaccagctgcatcgccggcgtgttcgtggacgccaccaaggagagactgagcgtgtaccaggccatgaagaagggcatcatcagacccggcaccgccttcgagctgctggaggcccaggccgccaccggctacgtgatcgaccccatcaagggcctgaagctgaccgtggaggaggccgtgagaatgggcatcgtgggccccgagttcaaggacaagctgctgagcgccgagagagccgtgaccggctacaaggacccctacagcggcaagctgatcagcctgttccaggccatgaagaagggcctgatcctgaaggaccacggcatcagactgctggaggcccagatcgccaccggcggcatcatcgaccccgaggagagccacagactgcccgtggaggtggcctacaagagaggcctgttcgacgaggagatgaacgagatcctgaccgaccccagcgacgacaccaagggcttcttcgaccccaacaccgaggagaacctgacctacctgcagctgatggagagatgcatcaccgacccccagaccggcctgtgcctgctgcccctgaaggagaagaagagagagagaaagaccagcagcaagagcagcgtgagaaagagaagagtggtgatcgtggaccccgagaccggcaaggagatgagcgtgtacgaggcctacagaaagggcctgatcgaccaccagacctacctggagctgagcgagcaggagtgcgagtgggaggagatcaccatcagcagcagcgacggcgtggtgaagagcatgatcatcgacagaagaagcggcagacagtacgacatcgacgacgccatcgccaagaacctgatcgacagaagcgccctggaccagtacagagccggcaccctgagcatcaccgagttcgccgacatgctgagcggcaacgccggcggcttcagaagcagaagcagcagcgtgggcagcagcagcagctaccccatcagccccgccgtgagcagaacccagctggccagctggagcgaccccaccgaggagaccggccccgtggccggcatcctggacaccgagaccctggagaaggtgagcatcaccgaggccatgcacagaaacctggtggacaacatcaccggccagagactgctggaggcccaggcctgcaccggcggcatcatcgaccccagcaccggcgagagattccccgtgaccgacgccgtgaacaagggcctggtggacaagatcatggtggacagaatcaacctggcccagaaggccttctgcggcttcgaggaccccagaaccaagaccaagatgagcgccgcccaggccctgaagaagggctggctgtactacgaggccggccagagattcctggaggtgcagtacctgaccggcggcctgatcgagcccgacacccccggcagagtgcccctggacgaggccctgcagagaggcaccgtggacgccagaaccgcccagaagctgagagacgtgggcgcctacagcaagtacctgacctgccccaagaccaagctgaagatcagctacaaggacgccctggacagaagcatggtggaggagggcaccggcctgagactgctggaggccgccgcccagagcaccaagggctactacagcccctacagcgtgagcggcagcggcagcaccgccggcagcagaaccggcagcagaaccggcagcagagccggcagcagaagaggcagcttcgacgccaccggcagcggcttcagcatgaccttcagcagcagcagctacagcagcagcggctacggcagaagatacgccagcggcagcagcgccagcctgggcggccccgagagcgccgtggcctag

SEQ ID NO: 93619 - DNA, 13656 bp, synthetic construct
  misc_feature 1..13656: note = Description of Artificial Sequence: Synthetic coding sequence
  source 1..13656: mol_type = other DNA
atgagcggcgccggcggcgccttcgccagccccagagaggtgctgctggagagaccctgctggctggacggcggctgcgagcccgccagaagaggctacctgtaccagcagctgtgctgcgtggacgagagagacagagtgcagaagaagaccttcaccaagtgggtgaacaagcacctgatcaaggcccagagacacatcagcgacctgtacgaggacctgagagacggccacaacctgatcagcctgctggaggtgctgagcggcgacagcctgcccagagagaagggcagaatgagattccacaagctgcagaacgtgcagatcgccctggactacctgagacacagacaggtgaagctggtgaacatcagaaacgacgacatcgccgacggcaaccccaagctgaccctgggcctgatctggaccatcatcctgcacttccagatcagcgacatccaggtgagcggccagagcgaggacatgaccgccaaggagaagctgctgctgtggagccagagaatggtggagggctaccagggcctgagatgcgacaacttcaccagcagctggagagacggcagactgttcaacgccatcatccacagacacaagcccctgctgatcgacatgaacaaggtgtacagacagaccaacctggagaacctggaccaggccttcagcgtggccgagagagacctgggcgtgaccagactgctggaccccgaggacgtggacgtgccccagcccgacgagaagagcatcatcacctacgtgagcagcctgtacgacgccatgcccagagtgcccgacgtgcaggacggcgtgagagccaacgagctgcagctgagatggcaggagtacagagagctggtgctgctgctgctgcagtggatgagacaccacaccgccgccttcgaggagagaagattccccagcagcttcgaggagatcgagatcctgtggagccagttcctgaagttcaaggagatggagctgcccgccaaggaggccgacaagaacagaagcaagggcatctaccagagcctggagggcgccgtgcaggccggccagctgaaggtgccccccggctaccaccccctggacgtggagaaggagtggggcaagctgcacgtggccatcctggagagagagaagcagctgagaagcgagttcgagagactggagtgcctgcagagaatcgtgaccaagctgcagatggaggccggcctgtgcgaggagcagctgaaccaggccgacgccctgctgcagagcgacgtgagactgctggccgccggcaaggtgccccagagagccggcgaggtggagagagacctggacaaggccgacagcatgatcagactgctgttcaacgacgtgcagaccctgaaggacggcagacacccccagggcgagcagatgtacagaagagtgtacagactgcacgagagactggtggccatcagaaccgagtacaacctgagactgaaggccggcgtggccgcccccgccacccaggtggcccaggtgaccctgcagagcgtgcagagaagacccgagctggaggacagcaccctgagatacctgcaggacctgctggcctgggtggaggagaaccagcacagagtggacggcgccgagtggggcgtggacctgcccagcgtggaggcccagctgggcagccacagaggcctgcaccagagcatcgaggagttcagagccaagatcgagagagccagaagcgacgagggccagctgagccccgccaccagaggcgcctacagagactgcctgggcagactggacctgcagtacgccaagctgctgaacagcagcaaggccagactgagaagcctggagagcctgcacagcttcgtggccgccgccaccaaggagctgatgtggctgaacgagaaggaggaggaggaggtgggcttcgactggagcgacagaaacaccaacatgaccgccaagaaggagagctacagcgccctgatgagagagctggagctgaaggagaagaagatcaaggagctgcagaacgccggcgacagactgctgagagaggaccaccccgccagacccaccgtggagagcttccaggccgccctgcagacccagtggagctggatgctgcagctgtgctgctgcatcgaggcccacctgaaggagaacgccgcctacttccagttcttcagcgacgtgagagaggccgagggccagctgcagaagctgcaggaggccctgagaagaaagtacagctgcgacagaagcgccaccgtgaccagactggaggacctgctgcaggacgcccaggacgagaaggagcagctgaacgagtacaagggccacctgagcggcctggccaagagagccaaggccgtggtgcagctgaagcccagacaccccgcccaccccatgagaggcagactgcccctgctggccgtgtgcgactacaagcaggtggaggtgaccgtgcacaagggcgacgagtgccagctggtgggccccgcccagcccagccactggaaggtgctgagcagcagcggcagcgaggccgccgtgcccagcgtgtgcttcctggtgcccccccccaaccaggaggcccaggaggccgtgaccagactggaggcccagcaccaggccctggtgaccctgtggcaccagctgcacgtggacatgaagagcctgctggcctggcagagcctgagaagagacgtgcagctgatcagaagctggagcctggccaccttcagaaccctgaagcccgaggagcagagacaggccctgcacagcctggagctgcactaccaggccttcctgagagacagccaggacgccggcggcttcggccccgaggacagactgatggccgagagagagtacggcagctgcagccaccactaccagcagctgctgcagagcctggagcagggcgcccaggaggagagcagatgccagagatgcatcagcgagctgaaggacatcagactgcagctggaggcctgcgagaccagaaccgtgcacagactgagactgcccctggacaaggagcccgccagagagtgcgcccagagaatcgccgagcagcagaaggcccaggccgaggtggagggcctgggcaagggcgtggccagactgagcgccgaggccgagaaggtgctggccctgcccgagcccagccccgccgcccccaccctgagaagcgagctggagctgaccctgggcaagctggagcaggtgagaagcctgagcgccatctacctggagaagctgaagaccatcagcctggtgatcagaggcacccagggcgccgaggaggtgctgagagcccacgaggagcagctgaaggaggcccaggccgtgcccgccaccctgcccgagctggaggccaccaaggccagcctgaagaagctgagagcccaggccgaggcccagcagcccaccttcgacgccctgagagacgagctgagaggcgcccaggaggtgggcgagagactgcagcagagacacggcgagagagacgtggaggtggagagatggagagagagagtggcccagctgctggagagatggcaggccgtgctggcccagaccgacgtgagacagagagagctggagcagctgggcagacagctgagatactacagagagagcgccgaccccctgggcgcctggctgcaggacgccagaagaagacaggagcagatccaggccatgcccctggccgacagccaggccgtgagagagcagctgagacaggagcaggccctgctggaggagatcgagagacacggcgagaaggtggaggagtgccagagattcgccaagcagtacatcaacgccatcaaggactacgagctgcagctggtgacctacaaggcccagctggagcccgtggccagccccgccaagaagcccaaggtgcagagcggcagcgagagcgtgatccaggagtacgtggacctgagaacccactacagcgagctgaccaccctgaccagccagtacatcaagttcatcagcgagaccctgagaagaatggaggaggaggagagactggccgagcagcagagagccgaggagagagagagactggccgaggtggaggccgccctggagaagcagagacagctggccgaggcccacgcccaggccaaggcccaggccgagagagaggccaaggagctgcagcagagaatgcaggaggaggtggtgagaagagaggaggccgccgtggacgcccagcagcagaagagaagcatccaggaggagctgcagcagctgagacagagcagcgaggccgagatccaggccaaggccagacaggccgaggccgccgagagaagcagactgagaatcgaggaggagatcagagtggtgagactgcagctggaggccaccgagagacagagaggcggcgccgagggcgagctgcaggccctgagagccagagccgaggaggccgaggcccagaagagacaggcccaggaggaggccgagagactgagaagacaggtgcaggacgagagccagagaaagagacaggccgaggtggagctggccagcagagtgaaggccgaggccgaggccgccagagagaagcagagagccctgcaggccctggaggagctgagactgcaggccgaggaggccgagagaagactgagacaggccgaggtggagagagccagacaggtgcaggtggccctggagaccgcccagagaagcgccgaggccgagctgcagagcaagagagccagcttcgccgagaagaccgcccagctggagagaagcctgcaggaggagcacgtggccgtggcccagctgagagaggaggccgagagaagagcccagcagcaggccgaggccgagagagccagagaggaggccgagagagagctggagagatggcagctgaaggccaacgaggccctgagactgagactgcaggccgaggaggtggcccagcagaagagcctggcccaggccgaggccgagaagcagaaggaggaggccgagagagaggccagaagaagaggcaaggccgaggagcaggccgtgagacagagagagctggccgagcaggagctggagaagcagagacagctggccgagggcaccgcccagcagagactggccgccgagcaggagctgatcagactgagagccgagaccgagcagggcgagcagcagagacagctgctggaggaggagctggccagactgcagagagaggccgccgccgccacccagaagagacaggagctggaggccgagctggccaaggtgagagccgagatggaggtgctgctggccagcaaggccagagccgaggaggagagcagaagcaccagcgagaagagcaagcagagactggaggccgaggccggcagattcagagagctggccgaggaggccgccagactgagagccctggccgaggaggccaagagacagagacagctggccgaggaggacgccgccagacagagagccgaggccgagagagtgctggccgagaagctggccgccatcggcgaggccaccagactgaagaccgaggccgagatcgccctgaaggagaaggaggccgagaacgagagactgagaagactggccgaggacgaggccttccagagaagaagactggaggagcaggccgcccagcacaaggccgacatcgaggagagactggcccagctgagaaaggccagcgacagcgagctggagagacagaagggcctggtggaggacaccctgagacagagaagacaggtggaggaggagatcctggccctgaaggccagcttcgagaaggccgccgccggcaaggccgagctggagctggagctgggcagaatcagaagcaacgccgaggacaccctgagaagcaaggagcaggccgagctggaggccgccagacagagacagctggccgccgaggaggagagaagaagaagagaggccgaggagagagtgcagaagagcctggccgccgaggaggaggccgccagacagagaaaggccgccctggaggaggtggagagactgaaggccaaggtggaggaggccagaagactgagagagagagccgagcaggagagcgccagacagctgcagctggcccaggaggccgcccagaagagactgcaggccgaggagaaggcccacgccttcgccgtgcagcagaaggagcaggagctgcagcagaccctgcagcaggagcagagcgtgctggaccagctgagaggcgaggccgaggccgccagaagagccgccgaggaggccgaggaggccagagtgcaggccgagagagaggccgcccagagcagaagacaggtggaggaggccgagagactgaagcagagcgccgaggagcaggcccaggccagagcccaggcccaggccgccgccgagaagctgagaaaggaggccgagcaggaggccgccagaagagcccaggccgagcaggccgccctgagacagaagcaggccgccgacgccgagatggagaagcacaagaagttcgccgagcagaccctgagacagaaggcccaggtggagcaggagctgaccaccctgagactgcagctggaggagaccgaccaccagaagaacctgctggacgaggagctgcagagactgaaggccgaggccaccgaggccgccagacagagaagccaggtggaggaggagctgttcagcgtgagagtgcagatggaggagctgagcaagctgaaggccagaatcgaggccgagaacagagccctgatcctgagagacaaggacaacacccagagattcctgcaggaggaggccgagaagatgaagcaggtggccgaggaggccgccagactgagcgtggccgcccaggaggccgccagactgagacagctggccgaggaggacctggcccagcagagagccctggccgagaagatgctgaaggagaagatgcaggccgtgcaggaggccaccagactgaaggccgaggccgagctgctgcagcagcagaaggagctggcccaggagcaggccagaagactgcaggaggacaaggagcagatggcccagcagctggccgaggagacccagggcttccagagaaccctggaggccgagagacagagacagctggagatgagcgccgaggccgagagactgaagctgagagtggccgagatgagcagagcccaggccagagccgaggaggacgcccagagattcagaaagcaggccgaggagatcggcgagaagctgcacagaaccgagctggccacccaggagaaggtgaccctggtgcagaccctggagatccagagacagcagagcgaccacgacgccgagagactgagagaggccatcgccgagctggagagagagaaggagaagctgcagcaggaggccaagctgctgcagctgaagagcgaggagatgcagaccgtgcagcaggagcagctgctgcaggagacccaggccctgcagcagagcttcctgagcgagaaggacagcctgctgcagagagagagattcatcgagcaggagaaggccaagctggagcagctgttccaggacgaggtggccaaggcccagcagctgagagaggagcagcagagacagcagcagcagatggagcaggagagacagagactggtggccagcatggaggaggccagaagaagacagcacgaggccgaggagggcgtgagaagaaagcaggaggagctgcagcagctggagcagcagagaagacagcaggaggagctgctggccgaggagaaccagagactgagagagcagctgcagctgctggaggagcagcacagagccgccctggcccacagcgaggaggtgaccgccagccaggtggccgccaccaagaccctgcccaacggcagagacgccctggacggccccgccgccgaggccgagcccgagcacagcttcgacggcctgagaagaaaggtgagcgcccagagactgcaggaggccggcatcctgagcgccgaggagctgcagagactggcccagggccacaccaccgtggacgagctggccagaagagaggacgtgagacactacctgcagggcagaagcagcatcgccggcctgctgctgaaggccaccaacgagaagctgagcgtgtacgccgccctgcagagacagctgctgagccccggcaccgccctgatcctgctggaggcccaggccgccagcggcttcctgctggaccccgtgagaaacagaagactgaccgtgaacgaggccgtgaaggagggcgtggtgggccccgagctgcaccacaagctgctgagcgccgagagagccgtgaccggctacaaggacccctacaccggccagcagatcagcctgttccaggccatgcagaagggcctgatcgtgagagagcacggcatcagactgctggaggcccagatcgccaccggcggcgtgatcgaccccgtgcacagccacagagtgcccgtggacgtggcctacagaagaggctacttcgacgaggagatgaacagagtgctggccgaccccagcgacgacaccaagggcttcttcgaccccaacacccacgagaacctgacctacctgcagctgctggagagatgcgtggaggaccccgagaccggcctgtgcctgctgcccctgaccgacaaggccgccaagggcggcgagctggtgtacaccgacagcgaggccagagacgtgttcgagaaggccaccgtgagcgcccccttcggcaagttccagggcaagaccgtgaccatctgggagatcatcaacagcgagtacttcaccgccgagcagagaagagacctgctgagacagttcagaaccggcagaatcaccgtggagaagatcatcaagatcatcatcaccgtggtggaggagcaggagcagaagggcagactgtgcttcgagggcctgagaagcctggtgcccgccgccgagctgctggagagcagagtgatcgacagagagctgtaccagcagctgcagagaggcgagagaagcgtgagagacgtggccgaggtggacaccgtgagaagagccctgagaggcgccaacgtgatcgccggcgtgtggctggaggaggccggccagaagctgagcatctacaacgccctgaagaaggacctgctgcccagcgacatggccgtggccctgctggaggcccaggccggcaccggccacatcatcgaccccgccaccagcgccagactgaccgtggacgaggccgtgagagccggcctggtgggccccgagttccacgagaagctgctgagcgccgagaaggccgtgaccggctacagagacccctacaccggccagagcgtgagcctgttccaggccctgaagaagggcctgatccccagagagcagggcctgagactgctggacgcccagctgagcaccggcggcatcgtggaccccagcaagagccacagagtgcccctggacgtggcctgcgccagaggctgcctggacgaggagaccagcagagccctgagcgcccccagagccgacgccaaggcctacagcgaccccagcaccggcgagcccgccacctacggcgagctgcagcagagatgcagacccgaccagctgaccggcctgagcctgctgcccctgagcgagaaggccgccagagccagacaggaggagctgtacagcgagctgcaggccagagagaccttcgagaagacccccgtggaggtgcccgtgggcggcttcaagggcagaaccgtgaccgtgtgggagctgatcagcagcgagtacttcaccgccgagcagagacaggagctgctgagacagttcagaaccggcaaggtgaccgtggagaaggtgatcaagatcctgatcaccatcgtggaggaggtggagaccctgagacaggagagactgagcttcagcggcctgagagcccccgtgcccgccagcgagctgctggccagcggcgtgctgagcagagcccagttcgagcagctgaaggacggcaagaccaccgtgaaggacctgagcgagctgggcagcgtgagaaccctgctgcagggcagcggctgcctggccggcatctacctggaggacaccaaggagaaggtgagcatctacgaggccatgagaagaggcctgctgagagccaccaccgccgccctgctgctggaggcccaggccgccaccggcttcctggtggaccccgtgagaaaccagagactgtacgtgcacgaggccgtgaaggccggcgtggtgggccccgagctgcacgagcagctgctgagcgccgagaaggccgtgaccggctacagagacccctacagcggcagcaccatcagcctgttccaggccatgcagaagggcctggtgctgagacagcacggcatcagactgctggaggcccagatcgccaccggcggcatcatcgaccccgtgcacagccacagagtgcccgtggacgtggcctaccagagaggctacttcagcgaggagatgaacagagtgctggccgaccccagcgacgacaccaagggcttcttcgaccccaacacccacgagaacctgacctacagacagctgctggagagatgcgtggaggaccccgagaccggcctgagactgctgcccctgaagggcgccgagaaggccgaggtggtggagaccacccaggtgtacaccgaggaggagaccagaagagccttcgaggagacccagatcgacatccccggcggcggcagccacggcggcagcaccatgagcctgtgggaggtgatgcagagcgacctgatccccgaggagcagagagcccagctgatggccgacttccaggccggcagagtgaccaaggagagaatgatcatcatcatcatcgagatcatcgagaagaccgagatcatcagacagcagggcctggccagctacgactacgtgagaagaagactgaccgccgaggacctgttcgaggccagaatcatcagcctggagacctacaacctgctgagagagggcaccagaagcctgagagaggccctggaggccgagagcgcctggtgctacctgtacggcaccggcagcgtggccggcgtgtacctgcccggcagcagacagaccctgagcatctaccaggccctgaagaagggcctgctgagcgccgaggtggccagactgctgctggaggcccaggccgccaccggcttcctgctggaccccgtgaagggcgagagactgaccgtggacgaggccgtgagaaagggcctggtgggccccgagctgcacgacagactgctgagcgccgagagagccgtgaccggctacagagacccctacaccgagcagaccatcagcctgttccaggccatgaagaaggagctgatccccaccgaggaggccctgagactgctggacgcccagctggccaccggcggcatcgtggaccccagactgggcttccacctgcccctggaggtggcctaccagagaggctacctgaacaaggacacccacgaccagctgagcgagcccagcgaggtgagaagctacgtggaccccagcaccgacgagagactgagctacacccagctgctgagaagatgcagaagagacgacggcaccggccagctgctgctgcccctgagcgacgccagaaagctgaccttcagaggcctgagaaagcagatcaccatggaggagctggtgagaagccaggtgatggacgaggccaccgccctgcagctgagagagggcctgaccagcatcgaggaggtgaccaagaacctgcagaagttcctggagggcaccagctgcatcgccggcgtgttcgtggacgccaccaaggagagactgagcgtgtaccaggccatgaagaagggcatcatcagacccggcaccgccttcgagctgctggaggcccaggccgccaccggctacgtgatcgaccccatcaagggcctgaagctgaccgtggaggaggccgtgagaatgggcatcgtgggccccgagttcaaggacaagctgctgagcgccgagagagccgtgaccggctacaaggacccctacagcggcaagctgatcagcctgttccaggccatgaagaagggcctgatcctgaaggaccacggcatcagactgctggaggcccagatcgccaccggcggcatcatcgaccccgaggagagccacagactgcccgtggaggtggcctacaagagaggcctgttcgacgaggagatgaacgagatcctgaccgaccccagcgacgacaccaagggcttcttcgaccccaacaccgaggagaacctgacctacctgcagctgatggagagatgcatcaccgacccccagaccggcctgtgcctgctgcccctgaaggagaagaagagagagagaaagaccagcagcaagagcagcgtgagaaagagaagagtggtgatcgtggaccccgagaccggcaaggagatgagcgtgtacgaggcctacagaaagggcctgatcgaccaccagacctacctggagctgagcgagcaggagtgcgagtgggaggagatcaccatcagcagcagcgacggcgtggtgaagagcatgatcatcgacagaagaagcggcagacagtacgacatcgacgacgccatcgccaagaacctgatcgacagaagcgccctggaccagtacagagccggcaccctgagcatcaccgagttcgccgacatgctgagcggcaacgccggcggcttcagaagcagaagcagcagcgtgggcagcagcagcagctaccccatcagccccgccgtgagcagaacccagctggccagctggagcgaccccaccgaggagaccggccccgtggccggcatcctggacaccgagaccctggagaaggtgagcatcaccgaggccatgcacagaaacctggtggacaacatcaccggccagagactgctggaggcccaggcctgcaccggcggcatcatcgaccccagcaccggcgagagattccccgtgaccgacgccgtgaacaagggcctggtggacaagatcatggtggacagaatcaacctggcccagaaggccttctgcggcttcgaggaccccagaaccaagaccaagatgagcgccgcccaggccctgaagaagggctggctgtactacgaggccggccagagattcctggaggtgcagtacctgaccggcggcctgatcgagcccgacacccccggcagagtgcccctggacgaggccctgcagagaggcaccgtggacgccagaaccgcccagaagctgagagacgtgggcgcctacagcaagtacctgacctgccccaagaccaagctgaagatcagctacaaggacgccctggacagaagcatggtggaggagggcaccggcctgagactgctggaggccgccgcccagagcaccaagggctactacagcccctacagcgtgagcggcagcggcagcaccgccggcagcagaaccggcagcagaaccggcagcagagccggcagcagaagaggcagcttcgacgccaccggcagcggcttcagcatgaccttcagcagcagcagctacagcagcagcggctacggcagaagatacgccagcggcagcagcgccagcctgggcggccccgagagcgccgtggcctag

SEQ ID NO: 93620 - DNA, 13548 bp, synthetic construct
  misc_feature 1..13548: note = Description of Artificial Sequence: Synthetic coding sequence
  source 1..13548: mol_type = other DNA
atgaagatcgtgcccgacgagagagacagagtgcagaagaagaccttcaccaagtgggtgaacaagcacctgatcaaggcccagagacacatcagcgacctgtacgaggacctgagagacggccacaacctgatcagcctgctggaggtgctgagcggcgacagcctgcccagagagaagggcagaatgagattccacaagctgcagaacgtgcagatcgccctggactacctgagacacagacaggtgaagctggtgaacatcagaaacgacgacatcgccgacggcaaccccaagctgaccctgggcctgatctggaccatcatcctgcacttccagatcagcgacatccaggtgagcggccagagcgaggacatgaccgccaaggagaagctgctgctgtggagccagagaatggtggagggctaccagggcctgagatgcgacaacttcaccagcagctggagagacggcagactgttcaacgccatcatccacagacacaagcccctgctgatcgacatgaacaaggtgtacagacagaccaacctggagaacctggaccaggccttcagcgtggccgagagagacctgggcgtgaccagactgctggaccccgaggacgtggacgtgccccagcccgacgagaagagcatcatcacctacgtgagcagcctgtacgacgccatgcccagagtgcccgacgtgcaggacggcgtgagagccaacgagctgcagctgagatggcaggagtacagagagctggtgctgctgctgctgcagtggatgagacaccacaccgccgccttcgaggagagaagattccccagcagcttcgaggagatcgagatcctgtggagccagttcctgaagttcaaggagatggagctgcccgccaaggaggccgacaagaacagaagcaagggcatctaccagagcctggagggcgccgtgcaggccggccagctgaaggtgccccccggctaccaccccctggacgtggagaaggagtggggcaagctgcacgtggccatcctggagagagagaagcagctgagaagcgagttcgagagactggagtgcctgcagagaatcgtgaccaagctgcagatggaggccggcctgtgcgaggagcagctgaaccaggccgacgccctgctgcagagcgacgtgagactgctggccgccggcaaggtgccccagagagccggcgaggtggagagagacctggacaaggccgacagcatgatcagactgctgttcaacgacgtgcagaccctgaaggacggcagacacccccagggcgagcagatgtacagaagagtgtacagactgcacgagagactggtggccatcagaaccgagtacaacctgagactgaaggccggcgtggccgcccccgccacccaggtggcccaggtgaccctgcagagcgtgcagagaagacccgagctggaggacagcaccctgagatacctgcaggacctgctggcctgggtggaggagaaccagcacagagtggacggcgccgagtggggcgtggacctgcccagcgtggaggcccagctgggcagccacagaggcctgcaccagagcatcgaggagttcagagccaagatcgagagagccagaagcgacgagggccagctgagccccgccaccagaggcgcctacagagactgcctgggcagactggacctgcagtacgccaagctgctgaacagcagcaaggccagactgagaagcctggagagcctgcacagcttcgtggccgccgccaccaaggagctgatgtggctgaacgagaaggaggaggaggaggtgggcttcgactggagcgacagaaacaccaacatgaccgccaagaaggagagctacagcgccctgatgagagagctggagctgaaggagaagaagatcaaggagctgcagaacgccggcgacagactgctgagagaggaccaccccgccagacccaccgtggagagcttccaggccgccctgcagacccagtggagctggatgctgcagctgtgctgctgcatcgaggcccacctgaaggagaacgccgcctacttccagttcttcagcgacgtgagagaggccgagggccagctgcagaagctgcaggaggccctgagaagaaagtacagctgcgacagaagcgccaccgtgaccagactggaggacctgctgcaggacgcccaggacgagaaggagcagctgaacgagtacaagggccacctgagcggcctggccaagagagccaaggccgtggtgcagctgaagcccagacaccccgcccaccccatgagaggcagactgcccctgctggccgtgtgcgactacaagcaggtggaggtgaccgtgcacaagggcgacgagtgccagctggtgggccccgcccagcccagccactggaaggtgctgagcagcagcggcagcgaggccgccgtgcccagcgtgtgcttcctggtgcccccccccaaccaggaggcccaggaggccgtgaccagactggaggcccagcaccaggccctggtgaccctgtggcaccagctgcacgtggacatgaagagcctgctggcctggcagagcctgagaagagacgtgcagctgatcagaagctggagcctggccaccttcagaaccctgaagcccgaggagcagagacaggccctgcacagcctggagctgcactaccaggccttcctgagagacagccaggacgccggcggcttcggccccgaggacagactgatggccgagagagagtacggcagctgcagccaccactaccagcagctgctgcagagcctggagcagggcgcccaggaggagagcagatgccagagatgcatcagcgagctgaaggacatcagactgcagctggaggcctgcgagaccagaaccgtgcacagactgagactgcccctggacaaggagcccgccagagagtgcgcccagagaatcgccgagcagcagaaggcccaggccgaggtggagggcctgggcaagggcgtggccagactgagcgccgaggccgagaaggtgctggccctgcccgagcccagccccgccgcccccaccctgagaagcgagctggagctgaccctgggcaagctggagcaggtgagaagcctgagcgccatctacctggagaagctgaagaccatcagcctggtgatcagaggcacccagggcgccgaggaggtgctgagagcccacgaggagcagctgaaggaggcccaggccgtgcccgccaccctgcccgagctggaggccaccaaggccagcctgaagaagctgagagcccaggccgaggcccagcagcccaccttcgacgccctgagagacgagctgagaggcgcccaggaggtgggcgagagactgcagcagagacacggcgagagagacgtggaggtggagagatggagagagagagtggcccagctgctggagagatggcaggccgtgctggcccagaccgacgtgagacagagagagctggagcagctgggcagacagctgagatactacagagagagcgccgaccccctgggcgcctggctgcaggacgccagaagaagacaggagcagatccaggccatgcccctggccgacagccaggccgtgagagagcagctgagacaggagcaggccctgctggaggagatcgagagacacggcgagaaggtggaggagtgccagagattcgccaagcagtacatcaacgccatcaaggactacgagctgcagctggtgacctacaaggcccagctggagcccgtggccagccccgccaagaagcccaaggtgcagagcggcagcgagagcgtgatccaggagtacgtggacctgagaacccactacagcgagctgaccaccctgaccagccagtacatcaagttcatcagcgagaccctgagaagaatggaggaggaggagagactggccgagcagcagagagccgaggagagagagagactggccgaggtggaggccgccctggagaagcagagacagctggccgaggcccacgcccaggccaaggcccaggccgagagagaggccaaggagctgcagcagagaatgcaggaggaggtggtgagaagagaggaggccgccgtggacgcccagcagcagaagagaagcatccaggaggagctgcagcagctgagacagagcagcgaggccgagatccaggccaaggccagacaggccgaggccgccgagagaagcagactgagaatcgaggaggagatcagagtggtgagactgcagctggaggccaccgagagacagagaggcggcgccgagggcgagctgcaggccctgagagccagagccgaggaggccgaggcccagaagagacaggcccaggaggaggccgagagactgagaagacaggtgcaggacgagagccagagaaagagacaggccgaggtggagctggccagcagagtgaaggccgaggccgaggccgccagagagaagcagagagccctgcaggccctggaggagctgagactgcaggccgaggaggccgagagaagactgagacaggccgaggtggagagagccagacaggtgcaggtggccctggagaccgcccagagaagcgccgaggccgagctgcagagcaagagagccagcttcgccgagaagaccgcccagctggagagaagcctgcaggaggagcacgtggccgtggcccagctgagagaggaggccgagagaagagcccagcagcaggccgaggccgagagagccagagaggaggccgagagagagctggagagatggcagctgaaggccaacgaggccctgagactgagactgcaggccgaggaggtggcccagcagaagagcctggcccaggccgaggccgagaagcagaaggaggaggccgagagagaggccagaagaagaggcaaggccgaggagcaggccgtgagacagagagagctggccgagcaggagctggagaagcagagacagctggccgagggcaccgcccagcagagactggccgccgagcaggagctgatcagactgagagccgagaccgagcagggcgagcagcagagacagctgctggaggaggagctggccagactgcagagagaggccgccgccgccacccagaagagacaggagctggaggccgagctggccaaggtgagagccgagatggaggtgctgctggccagcaaggccagagccgaggaggagagcagaagcaccagcgagaagagcaagcagagactggaggccgaggccggcagattcagagagctggccgaggaggccgccagactgagagccctggccgaggaggccaagagacagagacagctggccgaggaggacgccgccagacagagagccgaggccgagagagtgctggccgagaagctggccgccatcggcgaggccaccagactgaagaccgaggccgagatcgccctgaaggagaaggaggccgagaacgagagactgagaagactggccgaggacgaggccttccagagaagaagactggaggagcaggccgcccagcacaaggccgacatcgaggagagactggcccagctgagaaaggccagcgacagcgagctggagagacagaagggcctggtggaggacaccctgagacagagaagacaggtggaggaggagatcctggccctgaaggccagcttcgagaaggccgccgccggcaaggccgagctggagctggagctgggcagaatcagaagcaacgccgaggacaccctgagaagcaaggagcaggccgagctggaggccgccagacagagacagctggccgccgaggaggagagaagaagaagagaggccgaggagagagtgcagaagagcctggccgccgaggaggaggccgccagacagagaaaggccgccctggaggaggtggagagactgaaggccaaggtggaggaggccagaagactgagagagagagccgagcaggagagcgccagacagctgcagctggcccaggaggccgcccagaagagactgcaggccgaggagaaggcccacgccttcgccgtgcagcagaaggagcaggagctgcagcagaccctgcagcaggagcagagcgtgctggaccagctgagaggcgaggccgaggccgccagaagagccgccgaggaggccgaggaggccagagtgcaggccgagagagaggccgcccagagcagaagacaggtggaggaggccgagagactgaagcagagcgccgaggagcaggcccaggccagagcccaggcccaggccgccgccgagaagctgagaaaggaggccgagcaggaggccgccagaagagcccaggccgagcaggccgccctgagacagaagcaggccgccgacgccgagatggagaagcacaagaagttcgccgagcagaccctgagacagaaggcccaggtggagcaggagctgaccaccctgagactgcagctggaggagaccgaccaccagaagaacctgctggacgaggagctgcagagactgaaggccgaggccaccgaggccgccagacagagaagccaggtggaggaggagctgttcagcgtgagagtgcagatggaggagctgagcaagctgaaggccagaatcgaggccgagaacagagccctgatcctgagagacaaggacaacacccagagattcctgcaggaggaggccgagaagatgaagcaggtggccgaggaggccgccagactgagcgtggccgcccaggaggccgccagactgagacagctggccgaggaggacctggcccagcagagagccctggccgagaagatgctgaaggagaagatgcaggccgtgcaggaggccaccagactgaaggccgaggccgagctgctgcagcagcagaaggagctggcccaggagcaggccagaagactgcaggaggacaaggagcagatggcccagcagctggccgaggagacccagggcttccagagaaccctggaggccgagagacagagacagctggagatgagcgccgaggccgagagactgaagctgagagtggccgagatgagcagagcccaggccagagccgaggaggacgcccagagattcagaaagcaggccgaggagatcggcgagaagctgcacagaaccgagctggccacccaggagaaggtgaccctggtgcagaccctggagatccagagacagcagagcgaccacgacgccgagagactgagagaggccatcgccgagctggagagagagaaggagaagctgcagcaggaggccaagctgctgcagctgaagagcgaggagatgcagaccgtgcagcaggagcagctgctgcaggagacccaggccctgcagcagagcttcctgagcgagaaggacagcctgctgcagagagagagattcatcgagcaggagaaggccaagctggagcagctgttccaggacgaggtggccaaggcccagcagctgagagaggagcagcagagacagcagcagcagatggagcaggagagacagagactggtggccagcatggaggaggccagaagaagacagcacgaggccgaggagggcgtgagaagaaagcaggaggagctgcagcagctggagcagcagagaagacagcaggaggagctgctggccgaggagaaccagagactgagagagcagctgcagctgctggaggagcagcacagagccgccctggcccacagcgaggaggtgaccgccagccaggtggccgccaccaagaccctgcccaacggcagagacgccctggacggccccgccgccgaggccgagcccgagcacagcttcgacggcctgagaagaaaggtgagcgcccagagactgcaggaggccggcatcctgagcgccgaggagctgcagagactggcccagggccacaccaccgtggacgagctggccagaagagaggacgtgagacactacctgcagggcagaagcagcatcgccggcctgctgctgaaggccaccaacgagaagctgagcgtgtacgccgccctgcagagacagctgctgagccccggcaccgccctgatcctgctggaggcccaggccgccagcggcttcctgctggaccccgtgagaaacagaagactgaccgtgaacgaggccgtgaaggagggcgtggtgggccccgagctgcaccacaagctgctgagcgccgagagagccgtgaccggctacaaggacccctacaccggccagcagatcagcctgttccaggccatgcagaagggcctgatcgtgagagagcacggcatcagactgctggaggcccagatcgccaccggcggcgtgatcgaccccgtgcacagccacagagtgcccgtggacgtggcctacagaagaggctacttcgacgaggagatgaacagagtgctggccgaccccagcgacgacaccaagggcttcttcgaccccaacacccacgagaacctgacctacctgcagctgctggagagatgcgtggaggaccccgagaccggcctgtgcctgctgcccctgaccgacaaggccgccaagggcggcgagctggtgtacaccgacagcgaggccagagacgtgttcgagaaggccaccgtgagcgcccccttcggcaagttccagggcaagaccgtgaccatctgggagatcatcaacagcgagtacttcaccgccgagcagagaagagacctgctgagacagttcagaaccggcagaatcaccgtggagaagatcatcaagatcatcatcaccgtggtggaggagcaggagcagaagggcagactgtgcttcgagggcctgagaagcctggtgcccgccgccgagctgctggagagcagagtgatcgacagagagctgtaccagcagctgcagagaggcgagagaagcgtgagagacgtggccgaggtggacaccgtgagaagagccctgagaggcgccaacgtgatcgccggcgtgtggctggaggaggccggccagaagctgagcatctacaacgccctgaagaaggacctgctgcccagcgacatggccgtggccctgctggaggcccaggccggcaccggccacatcatcgaccccgccaccagcgccagactgaccgtggacgaggccgtgagagccggcctggtgggccccgagttccacgagaagctgctgagcgccgagaaggccgtgaccggctacagagacccctacaccggccagagcgtgagcctgttccaggccctgaagaagggcctgatccccagagagcagggcctgagactgctggacgcccagctgagcaccggcggcatcgtggaccccagcaagagccacagagtgcccctggacgtggcctgcgccagaggctgcctggacgaggagaccagcagagccctgagcgcccccagagccgacgccaaggcctacagcgaccccagcaccggcgagcccgccacctacggcgagctgcagcagagatgcagacccgaccagctgaccggcctgagcctgctgcccctgagcgagaaggccgccagagccagacaggaggagctgtacagcgagctgcaggccagagagaccttcgagaagacccccgtggaggtgcccgtgggcggcttcaagggcagaaccgtgaccgtgtgggagctgatcagcagcgagtacttcaccgccgagcagagacaggagctgctgagacagttcagaaccggcaaggtgaccgtggagaaggtgatcaagatcctgatcaccatcgtggaggaggtggagaccctgagacaggagagactgagcttcagcggcctgagagcccccgtgcccgccagcgagctgctggccagcggcgtgctgagcagagcccagttcgagcagctgaaggacggcaagaccaccgtgaaggacctgagcgagctgggcagcgtgagaaccctgctgcagggcagcggctgcctggccggcatctacctggaggacaccaaggagaaggtgagcatctacgaggccatgagaagaggcctgctgagagccaccaccgccgccctgctgctggaggcccaggccgccaccggcttcctggtggaccccgtgagaaaccagagactgtacgtgcacgaggccgtgaaggccggcgtggtgggccccgagctgcacgagcagctgctgagcgccgagaaggccgtgaccggctacagagacccctacagcggcagcaccatcagcctgttccaggccatgcagaagggcctggtgctgagacagcacggcatcagactgctggaggcccagatcgccaccggcggcatcatcgaccccgtgcacagccacagagtgcccgtggacgtggcctaccagagaggctacttcagcgaggagatgaacagagtgctggccgaccccagcgacgacaccaagggcttcttcgaccccaacacccacgagaacctgacctacagacagctgctggagagatgcgtggaggaccccgagaccggcctgagactgctgcccctgaagggcgccgagaaggccgaggtggtggagaccacccaggtgtacaccgaggaggagaccagaagagccttcgaggagacccagatcgacatccccggcggcggcagccacggcggcagcaccatgagcctgtgggaggtgatgcagagcgacctgatccccgaggagcagagagcccagctgatggccgacttccaggccggcagagtgaccaaggagagaatgatcatcatcatcatcgagatcatcgagaagaccgagatcatcagacagcagggcctggccagctacgactacgtgagaagaagactgaccgccgaggacctgttcgaggccagaatcatcagcctggagacctacaacctgctgagagagggcaccagaagcctgagagaggccctggaggccgagagcgcctggtgctacctgtacggcaccggcagcgtggccggcgtgtacctgcccggcagcagacagaccctgagcatctaccaggccctgaagaagggcctgctgagcgccgaggtggccagactgctgctggaggcccaggccgccaccggcttcctgctggaccccgtgaagggcgagagactgaccgtggacgaggccgtgagaaagggcctggtgggccccgagctgcacgacagactgctgagcgccgagagagccgtgaccggctacagagacccctacaccgagcagaccatcagcctgttccaggccatgaagaaggagctgatccccaccgaggaggccctgagactgctggacgcccagctggccaccggcggcatcgtggaccccagactgggcttccacctgcccctggaggtggcctaccagagaggctacctgaacaaggacacccacgaccagctgagcgagcccagcgaggtgagaagctacgtggaccccagcaccgacgagagactgagctacacccagctgctgagaagatgcagaagagacgacggcaccggccagctgctgctgcccctgagcgacgccagaaagctgaccttcagaggcctgagaaagcagatcaccatggaggagctggtgagaagccaggtgatggacgaggccaccgccctgcagctgagagagggcctgaccagcatcgaggaggtgaccaagaacctgcagaagttcctggagggcaccagctgcatcgccggcgtgttcgtggacgccaccaaggagagactgagcgtgtaccaggccatgaagaagggcatcatcagacccggcaccgccttcgagctgctggaggcccaggccgccaccggctacgtgatcgaccccatcaagggcctgaagctgaccgtggaggaggccgtgagaatgggcatcgtgggccccgagttcaaggacaagctgctgagcgccgagagagccgtgaccggctacaaggacccctacagcggcaagctgatcagcctgttccaggccatgaagaagggcctgatcctgaaggaccacggcatcagactgctggaggcccagatcgccaccggcggcatcatcgaccccgaggagagccacagactgcccgtggaggtggcctacaagagaggcctgttcgacgaggagatgaacgagatcctgaccgaccccagcgacgacaccaagggcttcttcgaccccaacaccgaggagaacctgacctacctgcagctgatggagagatgcatcaccgacccccagaccggcctgtgcctgctgcccctgaaggagaagaagagagagagaaagaccagcagcaagagcagcgtgagaaagagaagagtggtgatcgtggaccccgagaccggcaaggagatgagcgtgtacgaggcctacagaaagggcctgatcgaccaccagacctacctggagctgagcgagcaggagtgcgagtgggaggagatcaccatcagcagcagcgacggcgtggtgaagagcatgatcatcgacagaagaagcggcagacagtacgacatcgacgacgccatcgccaagaacctgatcgacagaagcgccctggaccagtacagagccggcaccctgagcatcaccgagttcgccgacatgctgagcggcaacgccggcggcttcagaagcagaagcagcagcgtgggcagcagcagcagctaccccatcagccccgccgtgagcagaacccagctggccagctggagcgaccccaccgaggagaccggccccgtggccggcatcctggacaccgagaccctggagaaggtgagcatcaccgaggccatgcacagaaacctggtggacaacatcaccggccagagactgctggaggcccaggcctgcaccggcggcatcatcgaccccagcaccggcgagagattccccgtgaccgacgccgtgaacaagggcctggtggacaagatcatggtggacagaatcaacctggcccagaaggccttctgcggcttcgaggaccccagaaccaagaccaagatgagcgccgcccaggccctgaagaagggctggctgtactacgaggccggccagagattcctggaggtgcagtacctgaccggcggcctgatcgagcccgacacccccggcagagtgcccctggacgaggccctgcagagaggcaccgtggacgccagaaccgcccagaagctgagagacgtgggcgcctacagcaagtacctgacctgccccaagaccaagctgaagatcagctacaaggacgccctggacagaagcatggtggaggagggcaccggcctgagactgctggaggccgccgcccagagcaccaagggctactacagcccctacagcgtgagcggcagcggcagcaccgccggcagcagaaccggcagcagaaccggcagcagagccggcagcagaagaggcagcttcgacgccaccggcagcggcttcagcatgaccttcagcagcagcagctacagcagcagcggctacggcagaagatacgccagcggcagcagcgccagcctgggcggccccgagagcgccgtggcctag

SEQ ID NO: 93621 - DNA, 13725 bp, synthetic construct
  misc_feature 1..13725: note = Description of Artificial Sequence: Synthetic coding sequence
  source 1..13725: mol_type = other DNA
atgagcggcgaggacgccgaggtgagagccgtgagcgaggacgtgagcaacggcagcagcggcagccccagccccggcgacaccctgccctggaacctgggcaagacccagagaagcagaagaagcggcggcggcgccggcagcaacggcagcgtgctggaccccgccgagagagccgtgatcagaatcgccgacgagagagacagagtgcagaagaagaccttcaccaagtgggtgaacaagcacctgatcaaggcccagagacacatcagcgacctgtacgaggacctgagagacggccacaacctgatcagcctgctggaggtgctgagcggcgacagcctgcccagagagaagggcagaatgagattccacaagctgcagaacgtgcagatcgccctggactacctgagacacagacaggtgaagctggtgaacatcagaaacgacgacatcgccgacggcaaccccaagctgaccctgggcctgatctggaccatcatcctgcacttccagatcagcgacatccaggtgagcggccagagcgaggacatgaccgccaaggagaagctgctgctgtggagccagagaatggtggagggctaccagggcctgagatgcgacaacttcaccagcagctggagagacggcagactgttcaacgccatcatccacagacacaagcccctgctgatcgacatgaacaaggtgtacagacagaccaacctggagaacctggaccaggccttcagcgtggccgagagagacctgggcgtgaccagactgctggaccccgaggacgtggacgtgccccagcccgacgagaagagcatcatcacctacgtgagcagcctgtacgacgccatgcccagagtgcccgacgtgcaggacggcgtgagagccaacgagctgcagctgagatggcaggagtacagagagctggtgctgctgctgctgcagtggatgagacaccacaccgccgccttcgaggagagaagattccccagcagcttcgaggagatcgagatcctgtggagccagttcctgaagttcaaggagatggagctgcccgccaaggaggccgacaagaacagaagcaagggcatctaccagagcctggagggcgccgtgcaggccggccagctgaaggtgccccccggctaccaccccctggacgtggagaaggagtggggcaagctgcacgtggccatcctggagagagagaagcagctgagaagcgagttcgagagactggagtgcctgcagagaatcgtgaccaagctgcagatggaggccggcctgtgcgaggagcagctgaaccaggccgacgccctgctgcagagcgacgtgagactgctggccgccggcaaggtgccccagagagccggcgaggtggagagagacctggacaaggccgacagcatgatcagactgctgttcaacgacgtgcagaccctgaaggacggcagacacccccagggcgagcagatgtacagaagagtgtacagactgcacgagagactggtggccatcagaaccgagtacaacctgagactgaaggccggcgtggccgcccccgccacccaggtggcccaggtgaccctgcagagcgtgcagagaagacccgagctggaggacagcaccctgagatacctgcaggacctgctggcctgggtggaggagaaccagcacagagtggacggcgccgagtggggcgtggacctgcccagcgtggaggcccagctgggcagccacagaggcctgcaccagagcatcgaggagttcagagccaagatcgagagagccagaagcgacgagggccagctgagccccgccaccagaggcgcctacagagactgcctgggcagactggacctgcagtacgccaagctgctgaacagcagcaaggccagactgagaagcctggagagcctgcacagcttcgtggccgccgccaccaaggagctgatgtggctgaacgagaaggaggaggaggaggtgggcttcgactggagcgacagaaacaccaacatgaccgccaagaaggagagctacagcgccctgatgagagagctggagctgaaggagaagaagatcaaggagctgcagaacgccggcgacagactgctgagagaggaccaccccgccagacccaccgtggagagcttccaggccgccctgcagacccagtggagctggatgctgcagctgtgctgctgcatcgaggcccacctgaaggagaacgccgcctacttccagttcttcagcgacgtgagagaggccgagggccagctgcagaagctgcaggaggccctgagaagaaagtacagctgcgacagaagcgccaccgtgaccagactggaggacctgctgcaggacgcccaggacgagaaggagcagctgaacgagtacaagggccacctgagcggcctggccaagagagccaaggccgtggtgcagctgaagcccagacaccccgcccaccccatgagaggcagactgcccctgctggccgtgtgcgactacaagcaggtggaggtgaccgtgcacaagggcgacgagtgccagctggtgggccccgcccagcccagccactggaaggtgctgagcagcagcggcagcgaggccgccgtgcccagcgtgtgcttcctggtgcccccccccaaccaggaggcccaggaggccgtgaccagactggaggcccagcaccaggccctggtgaccctgtggcaccagctgcacgtggacatgaagagcctgctggcctggcagagcctgagaagagacgtgcagctgatcagaagctggagcctggccaccttcagaaccctgaagcccgaggagcagagacaggccctgcacagcctggagctgcactaccaggccttcctgagagacagccaggacgccggcggcttcggccccgaggacagactgatggccgagagagagtacggcagctgcagccaccactaccagcagctgctgcagagcctggagcagggcgcccaggaggagagcagatgccagagatgcatcagcgagctgaaggacatcagactgcagctggaggcctgcgagaccagaaccgtgcacagactgagactgcccctggacaaggagcccgccagagagtgcgcccagagaatcgccgagcagcagaaggcccaggccgaggtggagggcctgggcaagggcgtggccagactgagcgccgaggccgagaaggtgctggccctgcccgagcccagccccgccgcccccaccctgagaagcgagctggagctgaccctgggcaagctggagcaggtgagaagcctgagcgccatctacctggagaagctgaagaccatcagcctggtgatcagaggcacccagggcgccgaggaggtgctgagagcccacgaggagcagctgaaggaggcccaggccgtgcccgccaccctgcccgagctggaggccaccaaggccagcctgaagaagctgagagcccaggccgaggcccagcagcccaccttcgacgccctgagagacgagctgagaggcgcccaggaggtgggcgagagactgcagcagagacacggcgagagagacgtggaggtggagagatggagagagagagtggcccagctgctggagagatggcaggccgtgctggcccagaccgacgtgagacagagagagctggagcagctgggcagacagctgagatactacagagagagcgccgaccccctgggcgcctggctgcaggacgccagaagaagacaggagcagatccaggccatgcccctggccgacagccaggccgtgagagagcagctgagacaggagcaggccctgctggaggagatcgagagacacggcgagaaggtggaggagtgccagagattcgccaagcagtacatcaacgccatcaaggactacgagctgcagctggtgacctacaaggcccagctggagcccgtggccagccccgccaagaagcccaaggtgcagagcggcagcgagagcgtgatccaggagtacgtggacctgagaacccactacagcgagctgaccaccctgaccagccagtacatcaagttcatcagcgagaccctgagaagaatggaggaggaggagagactggccgagcagcagagagccgaggagagagagagactggccgaggtggaggccgccctggagaagcagagacagctggccgaggcccacgcccaggccaaggcccaggccgagagagaggccaaggagctgcagcagagaatgcaggaggaggtggtgagaagagaggaggccgccgtggacgcccagcagcagaagagaagcatccaggaggagctgcagcagctgagacagagcagcgaggccgagatccaggccaaggccagacaggccgaggccgccgagagaagcagactgagaatcgaggaggagatcagagtggtgagactgcagctggaggccaccgagagacagagaggcggcgccgagggcgagctgcaggccctgagagccagagccgaggaggccgaggcccagaagagacaggcccaggaggaggccgagagactgagaagacaggtgcaggacgagagccagagaaagagacaggccgaggtggagctggccagcagagtgaaggccgaggccgaggccgccagagagaagcagagagccctgcaggccctggaggagctgagactgcaggccgaggaggccgagagaagactgagacaggccgaggtggagagagccagacaggtgcaggtggccctggagaccgcccagagaagcgccgaggccgagctgcagagcaagagagccagcttcgccgagaagaccgcccagctggagagaagcctgcaggaggagcacgtggccgtggcccagctgagagaggaggccgagagaagagcccagcagcaggccgaggccgagagagccagagaggaggccgagagagagctggagagatggcagctgaaggccaacgaggccctgagactgagactgcaggccgaggaggtggcccagcagaagagcctggcccaggccgaggccgagaagcagaaggaggaggccgagagagaggccagaagaagaggcaaggccgaggagcaggccgtgagacagagagagctggccgagcaggagctggagaagcagagacagctggccgagggcaccgcccagcagagactggccgccgagcaggagctgatcagactgagagccgagaccgagcagggcgagcagcagagacagctgctggaggaggagctggccagactgcagagagaggccgccgccgccacccagaagagacaggagctggaggccgagctggccaaggtgagagccgagatggaggtgctgctggccagcaaggccagagccgaggaggagagcagaagcaccagcgagaagagcaagcagagactggaggccgaggccggcagattcagagagctggccgaggaggccgccagactgagagccctggccgaggaggccaagagacagagacagctggccgaggaggacgccgccagacagagagccgaggccgagagagtgctggccgagaagctggccgccatcggcgaggccaccagactgaagaccgaggccgagatcgccctgaaggagaaggaggccgagaacgagagactgagaagactggccgaggacgaggccttccagagaagaagactggaggagcaggccgcccagcacaaggccgacatcgaggagagactggcccagctgagaaaggccagcgacagcgagctggagagacagaagggcctggtggaggacaccctgagacagagaagacaggtggaggaggagatcctggccctgaaggccagcttcgagaaggccgccgccggcaaggccgagctggagctggagctgggcagaatcagaagcaacgccgaggacaccctgagaagcaaggagcaggccgagctggaggccgccagacagagacagctggccgccgaggaggagagaagaagaagagaggccgaggagagagtgcagaagagcctggccgccgaggaggaggccgccagacagagaaaggccgccctggaggaggtggagagactgaaggccaaggtggaggaggccagaagactgagagagagagccgagcaggagagcgccagacagctgcagctggcccaggaggccgcccagaagagactgcaggccgaggagaaggcccacgccttcgccgtgcagcagaaggagcaggagctgcagcagaccctgcagcaggagcagagcgtgctggaccagctgagaggcgaggccgaggccgccagaagagccgccgaggaggccgaggaggccagagtgcaggccgagagagaggccgcccagagcagaagacaggtggaggaggccgagagactgaagcagagcgccgaggagcaggcccaggccagagcccaggcccaggccgccgccgagaagctgagaaaggaggccgagcaggaggccgccagaagagcccaggccgagcaggccgccctgagacagaagcaggccgccgacgccgagatggagaagcacaagaagttcgccgagcagaccctgagacagaaggcccaggtggagcaggagctgaccaccctgagactgcagctggaggagaccgaccaccagaagaacctgctggacgaggagctgcagagactgaaggccgaggccaccgaggccgccagacagagaagccaggtggaggaggagctgttcagcgtgagagtgcagatggaggagctgagcaagctgaaggccagaatcgaggccgagaacagagccctgatcctgagagacaaggacaacacccagagattcctgcaggaggaggccgagaagatgaagcaggtggccgaggaggccgccagactgagcgtggccgcccaggaggccgccagactgagacagctggccgaggaggacctggcccagcagagagccctggccgagaagatgctgaaggagaagatgcaggccgtgcaggaggccaccagactgaaggccgaggccgagctgctgcagcagcagaaggagctggcccaggagcaggccagaagactgcaggaggacaaggagcagatggcccagcagctggccgaggagacccagggcttccagagaaccctggaggccgagagacagagacagctggagatgagcgccgaggccgagagactgaagctgagagtggccgagatgagcagagcccaggccagagccgaggaggacgcccagagattcagaaagcaggccgaggagatcggcgagaagctgcacagaaccgagctggccacccaggagaaggtgaccctggtgcagaccctggagatccagagacagcagagcgaccacgacgccgagagactgagagaggccatcgccgagctggagagagagaaggagaagctgcagcaggaggccaagctgctgcagctgaagagcgaggagatgcagaccgtgcagcaggagcagctgctgcaggagacccaggccctgcagcagagcttcctgagcgagaaggacagcctgctgcagagagagagattcatcgagcaggagaaggccaagctggagcagctgttccaggacgaggtggccaaggcccagcagctgagagaggagcagcagagacagcagcagcagatggagcaggagagacagagactggtggccagcatggaggaggccagaagaagacagcacgaggccgaggagggcgtgagaagaaagcaggaggagctgcagcagctggagcagcagagaagacagcaggaggagctgctggccgaggagaaccagagactgagagagcagctgcagctgctggaggagcagcacagagccgccctggcccacagcgaggaggtgaccgccagccaggtggccgccaccaagaccctgcccaacggcagagacgccctggacggccccgccgccgaggccgagcccgagcacagcttcgacggcctgagaagaaaggtgagcgcccagagactgcaggaggccggcatcctgagcgccgaggagctgcagagactggcccagggccacaccaccgtggacgagctggccagaagagaggacgtgagacactacctgcagggcagaagcagcatcgccggcctgctgctgaaggccaccaacgagaagctgagcgtgtacgccgccctgcagagacagctgctgagccccggcaccgccctgatcctgctggaggcccaggccgccagcggcttcctgctggaccccgtgagaaacagaagactgaccgtgaacgaggccgtgaaggagggcgtggtgggccccgagctgcaccacaagctgctgagcgccgagagagccgtgaccggctacaaggacccctacaccggccagcagatcagcctgttccaggccatgcagaagggcctgatcgtgagagagcacggcatcagactgctggaggcccagatcgccaccggcggcgtgatcgaccccgtgcacagccacagagtgcccgtggacgtggcctacagaagaggctacttcgacgaggagatgaacagagtgctggccgaccccagcgacgacaccaagggcttcttcgaccccaacacccacgagaacctgacctacctgcagctgctggagagatgcgtggaggaccccgagaccggcctgtgcctgctgcccctgaccgacaaggccgccaagggcggcgagctggtgtacaccgacagcgaggccagagacgtgttcgagaaggccaccgtgagcgcccccttcggcaagttccagggcaagaccgtgaccatctgggagatcatcaacagcgagtacttcaccgccgagcagagaagagacctgctgagacagttcagaaccggcagaatcaccgtggagaagatcatcaagatcatcatcaccgtggtggaggagcaggagcagaagggcagactgtgcttcgagggcctgagaagcctggtgcccgccgccgagctgctggagagcagagtgatcgacagagagctgtaccagcagctgcagagaggcgagagaagcgtgagagacgtggccgaggtggacaccgtgagaagagccctgagaggcgccaacgtgatcgccggcgtgtggctggaggaggccggccagaagctgagcatctacaacgccctgaagaaggacctgctgcccagcgacatggccgtggccctgctggaggcccaggccggcaccggccacatcatcgaccccgccaccagcgccagactgaccgtggacgaggccgtgagagccggcctggtgggccccgagttccacgagaagctgctgagcgccgagaaggccgtgaccggctacagagacccctacaccggccagagcgtgagcctgttccaggccctgaagaagggcctgatccccagagagcagggcctgagactgctggacgcccagctgagcaccggcggcatcgtggaccccagcaagagccacagagtgcccctggacgtggcctgcgccagaggctgcctggacgaggagaccagcagagccctgagcgcccccagagccgacgccaaggcctacagcgaccccagcaccggcgagcccgccacctacggcgagctgcagcagagatgcagacccgaccagctgaccggcctgagcctgctgcccctgagcgagaaggccgccagagccagacaggaggagctgtacagcgagctgcaggccagagagaccttcgagaagacccccgtggaggtgcccgtgggcggcttcaagggcagaaccgtgaccgtgtgggagctgatcagcagcgagtacttcaccgccgagcagagacaggagctgctgagacagttcagaaccggcaaggtgaccgtggagaaggtgatcaagatcctgatcaccatcgtggaggaggtggagaccctgagacaggagagactgagcttcagcggcctgagagcccccgtgcccgccagcgagctgctggccagcggcgtgctgagcagagcccagttcgagcagctgaaggacggcaagaccaccgtgaaggacctgagcgagctgggcagcgtgagaaccctgctgcagggcagcggctgcctggccggcatctacctggaggacaccaaggagaaggtgagcatctacgaggccatgagaagaggcctgctgagagccaccaccgccgccctgctgctggaggcccaggccgccaccggcttcctggtggaccccgtgagaaaccagagactgtacgtgcacgaggccgtgaaggccggcgtggtgggccccgagctgcacgagcagctgctgagcgccgagaaggccgtgaccggctacagagacccctacagcggcagcaccatcagcctgttccaggccatgcagaagggcctggtgctgagacagcacggcatcagactgctggaggcccagatcgccaccggcggcatcatcgaccccgtgcacagccacagagtgcccgtggacgtggcctaccagagaggctacttcagcgaggagatgaacagagtgctggccgaccccagcgacgacaccaagggcttcttcgaccccaacacccacgagaacctgacctacagacagctgctggagagatgcgtggaggaccccgagaccggcctgagactgctgcccctgaagggcgccgagaaggccgaggtggtggagaccacccaggtgtacaccgaggaggagaccagaagagccttcgaggagacccagatcgacatccccggcggcggcagccacggcggcagcaccatgagcctgtgggaggtgatgcagagcgacctgatccccgaggagcagagagcccagctgatggccgacttccaggccggcagagtgaccaaggagagaatgatcatcatcatcatcgagatcatcgagaagaccgagatcatcagacagcagggcctggccagctacgactacgtgagaagaagactgaccgccgaggacctgttcgaggccagaatcatcagcctggagacctacaacctgctgagagagggcaccagaagcctgagagaggccctggaggccgagagcgcctggtgctacctgtacggcaccggcagcgtggccggcgtgtacctgcccggcagcagacagaccctgagcatctaccaggccctgaagaagggcctgctgagcgccgaggtggccagactgctgctggaggcccaggccgccaccggcttcctgctggaccccgtgaagggcgagagactgaccgtggacgaggccgtgagaaagggcctggtgggccccgagctgcacgacagactgctgagcgccgagagagccgtgaccggctacagagacccctacaccgagcagaccatcagcctgttccaggccatgaagaaggagctgatccccaccgaggaggccctgagactgctggacgcccagctggccaccggcggcatcgtggaccccagactgggcttccacctgcccctggaggtggcctaccagagaggctacctgaacaaggacacccacgaccagctgagcgagcccagcgaggtgagaagctacgtggaccccagcaccgacgagagactgagctacacccagctgctgagaagatgcagaagagacgacggcaccggccagctgctgctgcccctgagcgacgccagaaagctgaccttcagaggcctgagaaagcagatcaccatggaggagctggtgagaagccaggtgatggacgaggccaccgccctgcagctgagagagggcctgaccagcatcgaggaggtgaccaagaacctgcagaagttcctggagggcaccagctgcatcgccggcgtgttcgtggacgccaccaaggagagactgagcgtgtaccaggccatgaagaagggcatcatcagacccggcaccgccttcgagctgctggaggcccaggccgccaccggctacgtgatcgaccccatcaagggcctgaagctgaccgtggaggaggccgtgagaatgggcatcgtgggccccgagttcaaggacaagctgctgagcgccgagagagccgtgaccggctacaaggacccctacagcggcaagctgatcagcctgttccaggccatgaagaagggcctgatcctgaaggaccacggcatcagactgctggaggcccagatcgccaccggcggcatcatcgaccccgaggagagccacagactgcccgtggaggtggcctacaagagaggcctgttcgacgaggagatgaacgagatcctgaccgaccccagcgacgacaccaagggcttcttcgaccccaacaccgaggagaacctgacctacctgcagctgatggagagatgcatcaccgacccccagaccggcctgtgcctgctgcccctgaaggagaagaagagagagagaaagaccagcagcaagagcagcgtgagaaagagaagagtggtgatcgtggaccccgagaccggcaaggagatgagcgtgtacgaggcctacagaaagggcctgatcgaccaccagacctacctggagctgagcgagcaggagtgcgagtgggaggagatcaccatcagcagcagcgacggcgtggtgaagagcatgatcatcgacagaagaagcggcagacagtacgacatcgacgacgccatcgccaagaacctgatcgacagaagcgccctggaccagtacagagccggcaccctgagcatcaccgagttcgccgacatgctgagcggcaacgccggcggcttcagaagcagaagcagcagcgtgggcagcagcagcagctaccccatcagccccgccgtgagcagaacccagctggccagctggagcgaccccaccgaggagaccggccccgtggccggcatcctggacaccgagaccctggagaaggtgagcatcaccgaggccatgcacagaaacctggtggacaacatcaccggccagagactgctggaggcccaggcctgcaccggcggcatcatcgaccccagcaccggcgagagattccccgtgaccgacgccgtgaacaagggcctggtggacaagatcatggtggacagaatcaacctggcccagaaggccttctgcggcttcgaggaccccagaaccaagaccaagatgagcgccgcccaggccctgaagaagggctggctgtactacgaggccggccagagattcctggaggtgcagtacctgaccggcggcctgatcgagcccgacacccccggcagagtgcccctggacgaggccctgcagagaggcaccgtggacgccagaaccgcccagaagctgagagacgtgggcgcctacagcaagtacctgacctgccccaagaccaagctgaagatcagctacaaggacgccctggacagaagcatggtggaggagggcaccggcctgagactgctggaggccgccgcccagagcaccaagggctactacagcccctacagcgtgagcggcagcggcagcaccgccggcagcagaaccggcagcagaaccggcagcagagccggcagcagaagaggcagcttcgacgccaccggcagcggcttcagcatgaccttcagcagcagcagctacagcagcagcggctacggcagaagatacgccagcggcagcagcgccagcctgggcggccccgagagcgccgtggcctag

SEQ ID NO: 93622 - DNA, 13713 bp, synthetic construct
  misc_feature 1..13713: note = Description of Artificial Sequence: Synthetic coding sequence
  source 1..13713: mol_type = other DNA
atgagcggcgaggacgccgaggtgagagccgtgagcgaggacgtgagcaacggcagcagcggcagccccagccccggcgacaccctgccctggaacctgggcaagacccagagaagcagaagaagcggcggcggcgccggcagcaacggcagcgtgctggaccccgccgagagagccgtgatcagaatcgccgacgagagagacagagtgcagaagaagaccttcaccaagtgggtgaacaagcacctgatcaaggcccagagacacatcagcgacctgtacgaggacctgagagacggccacaacctgatcagcctgctggaggtgctgagcggcgacagcctgcccagagagaagggcagaatgagattccacaagctgcagaacgtgcagatcgccctggactacctgagacacagacaggtgaagctggtgaacatcagaaacgacgacatcgccgacggcaaccccaagctgaccctgggcctgatctggaccatcatcctgcacttccagatcagcgacatccaggtgagcggccagagcgaggacatgaccgccaaggagaagctgctgctgtggagccagagaatggtggagggctaccagggcctgagatgcgacaacttcaccagcagctggagagacggcagactgttcaacgccatcatccacagacacaagcccctgctgatcgacatgaacaaggtgtacagacagaccaacctggagaacctggaccaggccttcagcgtggccgagagagacctgggcgtgaccagactgctggaccccgaggacgtggacgtgccccagcccgacgagaagagcatcatcacctacgtgagcagcctgtacgacgccatgcccagagtgcccgacgtgcaggacggcgagctgcagctgagatggcaggagtacagagagctggtgctgctgctgctgcagtggatgagacaccacaccgccgccttcgaggagagaagattccccagcagcttcgaggagatcgagatcctgtggagccagttcctgaagttcaaggagatggagctgcccgccaaggaggccgacaagaacagaagcaagggcatctaccagagcctggagggcgccgtgcaggccggccagctgaaggtgccccccggctaccaccccctggacgtggagaaggagtggggcaagctgcacgtggccatcctggagagagagaagcagctgagaagcgagttcgagagactggagtgcctgcagagaatcgtgaccaagctgcagatggaggccggcctgtgcgaggagcagctgaaccaggccgacgccctgctgcagagcgacgtgagactgctggccgccggcaaggtgccccagagagccggcgaggtggagagagacctggacaaggccgacagcatgatcagactgctgttcaacgacgtgcagaccctgaaggacggcagacacccccagggcgagcagatgtacagaagagtgtacagactgcacgagagactggtggccatcagaaccgagtacaacctgagactgaaggccggcgtggccgcccccgccacccaggtggcccaggtgaccctgcagagcgtgcagagaagacccgagctggaggacagcaccctgagatacctgcaggacctgctggcctgggtggaggagaaccagcacagagtggacggcgccgagtggggcgtggacctgcccagcgtggaggcccagctgggcagccacagaggcctgcaccagagcatcgaggagttcagagccaagatcgagagagccagaagcgacgagggccagctgagccccgccaccagaggcgcctacagagactgcctgggcagactggacctgcagtacgccaagctgctgaacagcagcaaggccagactgagaagcctggagagcctgcacagcttcgtggccgccgccaccaaggagctgatgtggctgaacgagaaggaggaggaggaggtgggcttcgactggagcgacagaaacaccaacatgaccgccaagaaggagagctacagcgccctgatgagagagctggagctgaaggagaagaagatcaaggagctgcagaacgccggcgacagactgctgagagaggaccaccccgccagacccaccgtggagagcttccaggccgccctgcagacccagtggagctggatgctgcagctgtgctgctgcatcgaggcccacctgaaggagaacgccgcctacttccagttcttcagcgacgtgagagaggccgagggccagctgcagaagctgcaggaggccctgagaagaaagtacagctgcgacagaagcgccaccgtgaccagactggaggacctgctgcaggacgcccaggacgagaaggagcagctgaacgagtacaagggccacctgagcggcctggccaagagagccaaggccgtggtgcagctgaagcccagacaccccgcccaccccatgagaggcagactgcccctgctggccgtgtgcgactacaagcaggtggaggtgaccgtgcacaagggcgacgagtgccagctggtgggccccgcccagcccagccactggaaggtgctgagcagcagcggcagcgaggccgccgtgcccagcgtgtgcttcctggtgcccccccccaaccaggaggcccaggaggccgtgaccagactggaggcccagcaccaggccctggtgaccctgtggcaccagctgcacgtggacatgaagagcctgctggcctggcagagcctgagaagagacgtgcagctgatcagaagctggagcctggccaccttcagaaccctgaagcccgaggagcagagacaggccctgcacagcctggagctgcactaccaggccttcctgagagacagccaggacgccggcggcttcggccccgaggacagactgatggccgagagagagtacggcagctgcagccaccactaccagcagctgctgcagagcctggagcagggcgcccaggaggagagcagatgccagagatgcatcagcgagctgaaggacatcagactgcagctggaggcctgcgagaccagaaccgtgcacagactgagactgcccctggacaaggagcccgccagagagtgcgcccagagaatcgccgagcagcagaaggcccaggccgaggtggagggcctgggcaagggcgtggccagactgagcgccgaggccgagaaggtgctggccctgcccgagcccagccccgccgcccccaccctgagaagcgagctggagctgaccctgggcaagctggagcaggtgagaagcctgagcgccatctacctggagaagctgaagaccatcagcctggtgatcagaggcacccagggcgccgaggaggtgctgagagcccacgaggagcagctgaaggaggcccaggccgtgcccgccaccctgcccgagctggaggccaccaaggccagcctgaagaagctgagagcccaggccgaggcccagcagcccaccttcgacgccctgagagacgagctgagaggcgcccaggaggtgggcgagagactgcagcagagacacggcgagagagacgtggaggtggagagatggagagagagagtggcccagctgctggagagatggcaggccgtgctggcccagaccgacgtgagacagagagagctggagcagctgggcagacagctgagatactacagagagagcgccgaccccctgggcgcctggctgcaggacgccagaagaagacaggagcagatccaggccatgcccctggccgacagccaggccgtgagagagcagctgagacaggagcaggccctgctggaggagatcgagagacacggcgagaaggtggaggagtgccagagattcgccaagcagtacatcaacgccatcaaggactacgagctgcagctggtgacctacaaggcccagctggagcccgtggccagccccgccaagaagcccaaggtgcagagcggcagcgagagcgtgatccaggagtacgtggacctgagaacccactacagcgagctgaccaccctgaccagccagtacatcaagttcatcagcgagaccctgagaagaatggaggaggaggagagactggccgagcagcagagagccgaggagagagagagactggccgaggtggaggccgccctggagaagcagagacagctggccgaggcccacgcccaggccaaggcccaggccgagagagaggccaaggagctgcagcagagaatgcaggaggaggtggtgagaagagaggaggccgccgtggacgcccagcagcagaagagaagcatccaggaggagctgcagcagctgagacagagcagcgaggccgagatccaggccaaggccagacaggccgaggccgccgagagaagcagactgagaatcgaggaggagatcagagtggtgagactgcagctggaggccaccgagagacagagaggcggcgccgagggcgagctgcaggccctgagagccagagccgaggaggccgaggcccagaagagacaggcccaggaggaggccgagagactgagaagacaggtgcaggacgagagccagagaaagagacaggccgaggtggagctggccagcagagtgaaggccgaggccgaggccgccagagagaagcagagagccctgcaggccctggaggagctgagactgcaggccgaggaggccgagagaagactgagacaggccgaggtggagagagccagacaggtgcaggtggccctggagaccgcccagagaagcgccgaggccgagctgcagagcaagagagccagcttcgccgagaagaccgcccagctggagagaagcctgcaggaggagcacgtggccgtggcccagctgagagaggaggccgagagaagagcccagcagcaggccgaggccgagagagccagagaggaggccgagagagagctggagagatggcagctgaaggccaacgaggccctgagactgagactgcaggccgaggaggtggcccagcagaagagcctggcccaggccgaggccgagaagcagaaggaggaggccgagagagaggccagaagaagaggcaaggccgaggagcaggccgtgagacagagagagctggccgagcaggagctggagaagcagagacagctggccgagggcaccgcccagcagagactggccgccgagcaggagctgatcagactgagagccgagaccgagcagggcgagcagcagagacagctgctggaggaggagctggccagactgcagagagaggccgccgccgccacccagaagagacaggagctggaggccgagctggccaaggtgagagccgagatggaggtgctgctggccagcaaggccagagccgaggaggagagcagaagcaccagcgagaagagcaagcagagactggaggccgaggccggcagattcagagagctggccgaggaggccgccagactgagagccctggccgaggaggccaagagacagagacagctggccgaggaggacgccgccagacagagagccgaggccgagagagtgctggccgagaagctggccgccatcggcgaggccaccagactgaagaccgaggccgagatcgccctgaaggagaaggaggccgagaacgagagactgagaagactggccgaggacgaggccttccagagaagaagactggaggagcaggccgcccagcacaaggccgacatcgaggagagactggcccagctgagaaaggccagcgacagcgagctggagagacagaagggcctggtggaggacaccctgagacagagaagacaggtggaggaggagatcctggccctgaaggccagcttcgagaaggccgccgccggcaaggccgagctggagctggagctgggcagaatcagaagcaacgccgaggacaccctgagaagcaaggagcaggccgagctggaggccgccagacagagacagctggccgccgaggaggagagaagaagaagagaggccgaggagagagtgcagaagagcctggccgccgaggaggaggccgccagacagagaaaggccgccctggaggaggtggagagactgaaggccaaggtggaggaggccagaagactgagagagagagccgagcaggagagcgccagacagctgcagctggcccaggaggccgcccagaagagactgcaggccgaggagaaggcccacgccttcgccgtgcagcagaaggagcaggagctgcagcagaccctgcagcaggagcagagcgtgctggaccagctgagaggcgaggccgaggccgccagaagagccgccgaggaggccgaggaggccagagtgcaggccgagagagaggccgcccagagcagaagacaggtggaggaggccgagagactgaagcagagcgccgaggagcaggcccaggccagagcccaggcccaggccgccgccgagaagctgagaaaggaggccgagcaggaggccgccagaagagcccaggccgagcaggccgccctgagacagaagcaggccgccgacgccgagatggagaagcacaagaagttcgccgagcagaccctgagacagaaggcccaggtggagcaggagctgaccaccctgagactgcagctggaggagaccgaccaccagaagaacctgctggacgaggagctgcagagactgaaggccgaggccaccgaggccgccagacagagaagccaggtggaggaggagctgttcagcgtgagagtgcagatggaggagctgagcaagctgaaggccagaatcgaggccgagaacagagccctgatcctgagagacaaggacaacacccagagattcctgcaggaggaggccgagaagatgaagcaggtggccgaggaggccgccagactgagcgtggccgcccaggaggccgccagactgagacagctggccgaggaggacctggcccagcagagagccctggccgagaagatgctgaaggagaagatgcaggccgtgcaggaggccaccagactgaaggccgaggccgagctgctgcagcagcagaaggagctggcccaggagcaggccagaagactgcaggaggacaaggagcagatggcccagcagctggccgaggagacccagggcttccagagaaccctggaggccgagagacagagacagctggagatgagcgccgaggccgagagactgaagctgagagtggccgagatgagcagagcccaggccagagccgaggaggacgcccagagattcagaaagcaggccgaggagatcggcgagaagctgcacagaaccgagctggccacccaggagaaggtgaccctggtgcagaccctggagatccagagacagcagagcgaccacgacgccgagagactgagagaggccatcgccgagctggagagagagaaggagaagctgcagcaggaggccaagctgctgcagctgaagagcgaggagatgcagaccgtgcagcaggagcagctgctgcaggagacccaggccctgcagcagagcttcctgagcgagaaggacagcctgctgcagagagagagattcatcgagcaggagaaggccaagctggagcagctgttccaggacgaggtggccaaggcccagcagctgagagaggagcagcagagacagcagcagcagatggagcaggagagacagagactggtggccagcatggaggaggccagaagaagacagcacgaggccgaggagggcgtgagaagaaagcaggaggagctgcagcagctggagcagcagagaagacagcaggaggagctgctggccgaggagaaccagagactgagagagcagctgcagctgctggaggagcagcacagagccgccctggcccacagcgaggaggtgaccgccagccaggtggccgccaccaagaccctgcccaacggcagagacgccctggacggccccgccgccgaggccgagcccgagcacagcttcgacggcctgagaagaaaggtgagcgcccagagactgcaggaggccggcatcctgagcgccgaggagctgcagagactggcccagggccacaccaccgtggacgagctggccagaagagaggacgtgagacactacctgcagggcagaagcagcatcgccggcctgctgctgaaggccaccaacgagaagctgagcgtgtacgccgccctgcagagacagctgctgagccccggcaccgccctgatcctgctggaggcccaggccgccagcggcttcctgctggaccccgtgagaaacagaagactgaccgtgaacgaggccgtgaaggagggcgtggtgggccccgagctgcaccacaagctgctgagcgccgagagagccgtgaccggctacaaggacccctacaccggccagcagatcagcctgttccaggccatgcagaagggcctgatcgtgagagagcacggcatcagactgctggaggcccagatcgccaccggcggcgtgatcgaccccgtgcacagccacagagtgcccgtggacgtggcctacagaagaggctacttcgacgaggagatgaacagagtgctggccgaccccagcgacgacaccaagggcttcttcgaccccaacacccacgagaacctgacctacctgcagctgctggagagatgcgtggaggaccccgagaccggcctgtgcctgctgcccctgaccgacaaggccgccaagggcggcgagctggtgtacaccgacagcgaggccagagacgtgttcgagaaggccaccgtgagcgcccccttcggcaagttccagggcaagaccgtgaccatctgggagatcatcaacagcgagtacttcaccgccgagcagagaagagacctgctgagacagttcagaaccggcagaatcaccgtggagaagatcatcaagatcatcatcaccgtggtggaggagcaggagcagaagggcagactgtgcttcgagggcctgagaagcctggtgcccgccgccgagctgctggagagcagagtgatcgacagagagctgtaccagcagctgcagagaggcgagagaagcgtgagagacgtggccgaggtggacaccgtgagaagagccctgagaggcgccaacgtgatcgccggcgtgtggctggaggaggccggccagaagctgagcatctacaacgccctgaagaaggacctgctgcccagcgacatggccgtggccctgctggaggcccaggccggcaccggccacatcatcgaccccgccaccagcgccagactgaccgtggacgaggccgtgagagccggcctggtgggccccgagttccacgagaagctgctgagcgccgagaaggccgtgaccggctacagagacccctacaccggccagagcgtgagcctgttccaggccctgaagaagggcctgatccccagagagcagggcctgagactgctggacgcccagctgagcaccggcggcatcgtggaccccagcaagagccacagagtgcccctggacgtggcctgcgccagaggctgcctggacgaggagaccagcagagccctgagcgcccccagagccgacgccaaggcctacagcgaccccagcaccggcgagcccgccacctacggcgagctgcagcagagatgcagacccgaccagctgaccggcctgagcctgctgcccctgagcgagaaggccgccagagccagacaggaggagctgtacagcgagctgcaggccagagagaccttcgagaagacccccgtggaggtgcccgtgggcggcttcaagggcagaaccgtgaccgtgtgggagctgatcagcagcgagtacttcaccgccgagcagagacaggagctgctgagacagttcagaaccggcaaggtgaccgtggagaaggtgatcaagatcctgatcaccatcgtggaggaggtggagaccctgagacaggagagactgagcttcagcggcctgagagcccccgtgcccgccagcgagctgctggccagcggcgtgctgagcagagcccagttcgagcagctgaaggacggcaagaccaccgtgaaggacctgagcgagctgggcagcgtgagaaccctgctgcagggcagcggctgcctggccggcatctacctggaggacaccaaggagaaggtgagcatctacgaggccatgagaagaggcctgctgagagccaccaccgccgccctgctgctggaggcccaggccgccaccggcttcctggtggaccccgtgagaaaccagagactgtacgtgcacgaggccgtgaaggccggcgtggtgggccccgagctgcacgagcagctgctgagcgccgagaaggccgtgaccggctacagagacccctacagcggcagcaccatcagcctgttccaggccatgcagaagggcctggtgctgagacagcacggcatcagactgctggaggcccagatcgccaccggcggcatcatcgaccccgtgcacagccacagagtgcccgtggacgtggcctaccagagaggctacttcagcgaggagatgaacagagtgctggccgaccccagcgacgacaccaagggcttcttcgaccccaacacccacgagaacctgacctacagacagctgctggagagatgcgtggaggaccccgagaccggcctgagactgctgcccctgaagggcgccgagaaggccgaggtggtggagaccacccaggtgtacaccgaggaggagaccagaagagccttcgaggagacccagatcgacatccccggcggcggcagccacggcggcagcaccatgagcctgtgggaggtgatgcagagcgacctgatccccgaggagcagagagcccagctgatggccgacttccaggccggcagagtgaccaaggagagaatgatcatcatcatcatcgagatcatcgagaagaccgagatcatcagacagcagggcctggccagctacgactacgtgagaagaagactgaccgccgaggacctgttcgaggccagaatcatcagcctggagacctacaacctgctgagagagggcaccagaagcctgagagaggccctggaggccgagagcgcctggtgctacctgtacggcaccggcagcgtggccggcgtgtacctgcccggcagcagacagaccctgagcatctaccaggccctgaagaagggcctgctgagcgccgaggtggccagactgctgctggaggcccaggccgccaccggcttcctgctggaccccgtgaagggcgagagactgaccgtggacgaggccgtgagaaagggcctggtgggccccgagctgcacgacagactgctgagcgccgagagagccgtgaccggctacagagacccctacaccgagcagaccatcagcctgttccaggccatgaagaaggagctgatccccaccgaggaggccctgagactgctggacgcccagctggccaccggcggcatcgtggaccccagactgggcttccacctgcccctggaggtggcctaccagagaggctacctgaacaaggacacccacgaccagctgagcgagcccagcgaggtgagaagctacgtggaccccagcaccgacgagagactgagctacacccagctgctgagaagatgcagaagagacgacggcaccggccagctgctgctgcccctgagcgacgccagaaagctgaccttcagaggcctgagaaagcagatcaccatggaggagctggtgagaagccaggtgatggacgaggccaccgccctgcagctgagagagggcctgaccagcatcgaggaggtgaccaagaacctgcagaagttcctggagggcaccagctgcatcgccggcgtgttcgtggacgccaccaaggagagactgagcgtgtaccaggccatgaagaagggcatcatcagacccggcaccgccttcgagctgctggaggcccaggccgccaccggctacgtgatcgaccccatcaagggcctgaagctgaccgtggaggaggccgtgagaatgggcatcgtgggccccgagttcaaggacaagctgctgagcgccgagagagccgtgaccggctacaaggacccctacagcggcaagctgatcagcctgttccaggccatgaagaagggcctgatcctgaaggaccacggcatcagactgctggaggcccagatcgccaccggcggcatcatcgaccccgaggagagccacagactgcccgtggaggtggcctacaagagaggcctgttcgacgaggagatgaacgagatcctgaccgaccccagcgacgacaccaagggcttcttcgaccccaacaccgaggagaacctgacctacctgcagctgatggagagatgcatcaccgacccccagaccggcctgtgcctgctgcccctgaaggagaagaagagagagagaaagaccagcagcaagagcagcgtgagaaagagaagagtggtgatcgtggaccccgagaccggcaaggagatgagcgtgtacgaggcctacagaaagggcctgatcgaccaccagacctacctggagctgagcgagcaggagtgcgagtgggaggagatcaccatcagcagcagcgacggcgtggtgaagagcatgatcatcgacagaagaagcggcagacagtacgacatcgacgacgccatcgccaagaacctgatcgacagaagcgccctggaccagtacagagccggcaccctgagcatcaccgagttcgccgacatgctgagcggcaacgccggcggcttcagaagcagaagcagcagcgtgggcagcagcagcagctaccccatcagccccgccgtgagcagaacccagctggccagctggagcgaccccaccgaggagaccggccccgtggccggcatcctggacaccgagaccctggagaaggtgagcatcaccgaggccatgcacagaaacctggtggacaacatcaccggccagagactgctggaggcccaggcctgcaccggcggcatcatcgaccccagcaccggcgagagattccccgtgaccgacgccgtgaacaagggcctggtggacaagatcatggtggacagaatcaacctggcccagaaggccttctgcggcttcgaggaccccagaaccaagaccaagatgagcgccgcccaggccctgaagaagggctggctgtactacgaggccggccagagattcctggaggtgcagtacctgaccggcggcctgatcgagcccgacacccccggcagagtgcccctggacgaggccctgcagagaggcaccgtggacgccagaaccgcccagaagctgagagacgtgggcgcctacagcaagtacctgacctgccccaagaccaagctgaagatcagctacaaggacgccctggacagaagcatggtggaggagggcaccggcctgagactgctggaggccgccgcccagagcaccaagggctactacagcccctacagcgtgagcggcagcggcagcaccgccggcagcagaaccggcagcagaaccggcagcagagccggcagcagaagaggcagcttcgacgccaccggcagcggcttcagcatgaccttcagcagcagcagctacagcagcagcggctacggcagaagatacgccagcggcagcagcgccagcctgggcggccccgagagcgccgtggcctag

SEQ ID NO: 93623 - DNA, 1503 bp, synthetic construct
  misc_feature 1..1503: note = Description of Artificial Sequence: Synthetic coding sequence
  source 1..1503: mol_type = other DNA
atggccaccgtgatccccggcgacctgagcgaggtgagagacacccagaaggtgcccagcggcaagagaaagagaggcgagaccaagcccagaaagaacttcccctgccagctgtgcgacaaggccttcaacagcgtggagaagctgaaggtgcacagctacagccacaccggcgagagaccctacaagtgcatccagcaggactgcaccaaggccttcgtgagcaagtacaagctgcagagacacatggccacccacagccccgagaagacccacaagtgcaactactgcgagaagatgttccacagaaaggaccacctgaagaaccacctgcacacccacgaccccaacaaggagaccttcaagtgcgaggagtgcggcaagaactacaacaccaagctgggcttcaagagacacctggccctgcacgccgccaccagcggcgacctgacctgcaaggtgtgcctgcagaccttcgagagcaccggcgtgctgctggagcacctgaagagccacgccggcaagagcagcggcggcgtgaaggagaagaagcaccagtgcgagcactgcgacagaagattctacaccagaaaggacgtgagaagacacatggtggtgcacaccggcagaaaggacttcctgtgccagtactgcgcccagagattcggcagaaaggaccacctgaccagacacatgaagaagagccacaaccaggagctgctgaaggtgaagaccgagcccgtggacttcctggaccccttcacctgcaacgtgagcgtgcccatcaaggacgagctgctgcccgtgatgagcctgcccagcagcgagctgctgagcaagcccttcaccaacaccctgcagctgaacctgtacaacacccccttccagagcatgcagagcagcggcagcgcccaccagatgatcaccaccctgcccctgggcatgacctgccccatcgacatggacaccgtgcaccccagccaccacctgagcttcaagtaccccttcagcagcaccagctacgccatcagcatccccgagaaggagcagcccctgaagggcgagatcgagagctacctgatggagctgcagggcggcgtgcccagcagcagccaggacagccaggccagcagcagcagcaagctgggcctggacccccagatcggcagcctggacgacggcgccggcgacctgagcctgagcaagagcagcatcagcatcagcgaccccctgaacacccccgccctggacttcagccagctgttcaacttcatccccctgaacggccccccctacaaccccctgagcgtgggcagcctgggcatgagctacagccaggaggaggcccacagcagcgtgagccagctgcccccccagacccaggacctgcaggaccccgccaacaccatcggcctgggcagcctgcacagcctgagcgccgccttcaccagcagcctgagcaccagcaccaccctgcccagattccaccaggccttccagtag

SEQ ID NO: 93624 - DNA, 1257 bp, synthetic construct
  misc_feature 1..1257: note = Description of Artificial Sequence: Synthetic coding sequence
  source 1..1257: mol_type = other DNA
atggccacccacagccccgagaagacccacaagtgcaactactgcgagaagatgttccacagaaaggaccacctgaagaaccacctgcacacccacgaccccaacaaggagaccttcaagtgcgaggagtgcggcaagaactacaacaccaagctgggcttcaagagacacctggccctgcacgccgccaccagcggcgacctgacctgcaaggtgtgcctgcagaccttcgagagcaccggcgtgctgctggagcacctgaagagccacgccggcaagagcagcggcggcgtgaaggagaagaagcaccagtgcgagcactgcgacagaagattctacaccagaaaggacgtgagaagacacatggtggtgcacaccggcagaaaggacttcctgtgccagtactgcgcccagagattcggcagaaaggaccacctgaccagacacatgaagaagagccacaaccaggagctgctgaaggtgaagaccgagcccgtggacttcctggaccccttcacctgcaacgtgagcgtgcccatcaaggacgagctgctgcccgtgatgagcctgcccagcagcgagctgctgagcaagcccttcaccaacaccctgcagctgaacctgtacaacacccccttccagagcatgcagagcagcggcagcgcccaccagatgatcaccaccctgcccctgggcatgacctgccccatcgacatggacaccgtgcaccccagccaccacctgagcttcaagtaccccttcagcagcaccagctacgccatcagcatccccgagaaggagcagcccctgaagggcgagatcgagagctacctgatggagctgcagggcggcgtgcccagcagcagccaggacagccaggccagcagcagcagcaagctgggcctggacccccagatcggcagcctggacgacggcgccggcgacctgagcctgagcaagagcagcatcagcatcagcgaccccctgaacacccccgccctggacttcagccagctgttcaacttcatccccctgaacggccccccctacaaccccctgagcgtgggcagcctgggcatgagctacagccaggaggaggcccacagcagcgtgagccagctgcccccccagacccaggacctgcaggaccccgccaacaccatcggcctgggcagcctgcacagcctgagcgccgccttcaccagcagcctgagcaccagcaccaccctgcccagattccaccaggccttccagtag

SEQ ID NO: 93625 - DNA, 1503 bp, synthetic construct; identical to SEQ ID NO: 93623
  misc_feature 1..1503: note = Description of Artificial Sequence: Synthetic coding sequence
  source 1..1503: mol_type = other DNA

SEQ ID NO: 93626 - DNA, 1392 bp, synthetic construct
  misc_feature 1..1392: note = Description of Artificial Sequence: Synthetic coding sequence
  source 1..1392: mol_type = other DNA
atggccaccttcccctgccagctgtgcggcaagaccttcctgaccctggagaagttcaccatccacaactacagccacagcagagagagaccctacaagtgcgtgcagcccgactgcggcaaggccttcgtgagcagatacaagctgatgagacacatggccacccacagcccccagaagagccaccagtgcgcccactgcgagaagaccttcaacagaaaggaccacctgaagaaccacctgcagacccacgaccccaacaagatggccttcggctgcgaggagtgcggcaagaagtacaacaccatgctgggctacaagagacacctggccctgcacgccgccagcagcggcgacctgacctgcggcgtgtgcgccctggagctgggcagcaccgaggtgctgctggaccacctgaaggcccacgccgaggagaagccccccagcggcaccaaggagaagaagcaccagtgcgaccactgcgagagatgcttctacaccagaaaggacgtgagaagacacctggtggtgcacaccggctgcaaggacttcctgtgccagttctgcgcccagagattcggcagaaaggaccacctgaccagacacaccaagaagacccacagccaggagctgatgaaggagagcctgcagaccggcgacctgctgagcaccttccacaccatcagccccagcttccagctgaaggccgccgccctgccccccttccccctgggcgccagcgcccagaacggcctggccagcagcctgcccgccgaggtgcacagcctgaccctgagcccccccgagcaggccgcccagcccatgcagcccctgcccgagagcctggccagcctgcaccccagcgtgagccccggcagcccccccccccccctgcccaaccacaagtacaacaccaccagcaccagctacagccccctggccagcctgcccctgaaggccgacaccaagggcttctgcaacatcagcctgttcgaggacctgcccctgcaggagccccagagcccccagaagctgaaccccggcttcgacctggccaagggcaacgccggcaaggtgaacctgcccaaggagctgcccgccgacgccgtgaacctgaccatccccgccagcctggacctgagccccctgctgggcttctggcagctgcccccccccgccacccagaacaccttcggcaacagcaccctggccctgggccccggcgagagcctgccccacagactgagctgcctgggccagcagcagcaggagccccccctggccatgggcaccgtgagcctgggccagctgcccctgccccccatcccccacgtgttcagcgccggcaccggcagcgccatcctgccccacttccaccacgccttcagatag

SEQ ID NO: 93627 - DNA, 1392 bp, synthetic construct; identical to SEQ ID NO: 93626
  misc_feature 1..1392: note = Description of Artificial Sequence: Synthetic coding sequence
  source 1..1392: mol_type = other DNA

SEQ ID NO: 93628 - DNA, 1392 bp, synthetic construct; identical to SEQ ID NO: 93626
  misc_feature 1..1392: note = Description of Artificial Sequence: Synthetic coding sequence
  source 1..1392: mol_type = other DNA

SEQ ID NO: 93629 - DNA, 1236 bp, synthetic construct
  misc_feature 1..1236: note = Description of Artificial Sequence: Synthetic coding sequence
  source 1..1236: mol_type = other DNA
atggccacccacagcccccagaagagccaccagtgcgcccactgcgagaagaccttcaacagaaaggaccacctgaagaaccacctgcagacccacgaccccaacaagatggccttcggctgcgaggagtgcggcaagaagtacaacaccatgctgggctacaagagacacctggccctgcacgccgccagcagcggcgacctgacctgcggcgtgtgcgccctggagctgggcagcaccgaggtgctgctggaccacctgaaggcccacgccgaggagaagccccccagcggcaccaaggagaagaagcaccagtgcgaccactgcgagagatgcttctacaccagaaaggacgtgagaagacacctggtggtgcacaccggctgcaaggacttcctgtgccagttctgcgcccagagattcggcagaaaggaccacctgaccagacacaccaagaagacccacagccaggagctgatgaaggagagcctgcagaccggcgacctgctgagcaccttccacaccatcagccccagcttccagctgaaggccgccgccctgccccccttccccctgggcgccagcgcccagaacggcctggccagcagcctgcccgccgaggtgcacagcctgaccctgagcccccccgagcaggccgcccagcccatgcagcccctgcccgagagcctggccagcctgcaccccagcgtgagccccggcagcccccccccccccctgcccaaccacaagtacaacaccaccagcaccagctacagccccctggccagcctgcccctgaaggccgacaccaagggcttctgcaacatcagcctgttcgaggacctgcccctgcaggagccccagagcccccagaagctgaaccccggcttcgacctggccaagggcaacgccggcaaggtgaacctgcccaaggagctgcccgccgacgccgtgaacctgaccatccccgccagcctggacctgagccccctgctgggcttctggcagctgcccccccccgccacccagaacaccttcggcaacagcaccctggccctgggccccggcgagagcctgccccacagactgagctgcctgggccagcagcagcaggagccccccctggccatgggcaccgtgagcctgggccagctgcccctgccccccatcccccacgtgttcagcgccggcaccggcagcgccatcctgccccacttccaccacgccttcagatag

SEQ ID NO: 93630 - DNA, 1236 bp, synthetic construct; identical to SEQ ID NO: 93629
  misc_feature 1..1236: note = Description of Artificial Sequence: Synthetic coding sequence
  source 1..1236: mol_type = other DNA

SEQ ID NO: 93631 - DNA, 1392 bp, synthetic construct; identical to SEQ ID NO: 93626
  misc_feature 1..1392: note = Description of Artificial Sequence: Synthetic coding sequence
  source 1..1392: mol_type = other DNA

SEQ ID NO: 93632 - DNA, 1392 bp, synthetic construct; identical to SEQ ID NO: 93626
  misc_feature 1..1392: note = Description of Artificial Sequence: Synthetic coding sequence
  source 1..1392: mol_type = other DNA

SEQ ID NO: 93633 - DNA, 531 bp, synthetic construct
  misc_feature 1..531: note = Description of Artificial Sequence: Synthetic coding sequence
  source 1..531: mol_type = other DNA
atggccacccacagcccccagaagagccaccagtgcgcccactgcgagaagaccttcaacagaaaggaccacctgaagaaccacctgcagacccacgaccccaacaagatggccttcggctgcgaggagtgcggcaagaagtacaacaccatgctgggctacaagagacacctggccctgcacgccgccagcagcggcgacctgacctgcggcgtgtgcgccctggagctgggcagcaccgaggtgctgctggaccacctgaaggcccacgccgaggagaagccccccagcggcaccaaggagaagaagcaccagtgcgaccactgcgagagatgcttctacaccagaaaggacgtgagaagacacctggtggtgcacaccggctgcaaggacttcctgtgccagttctgcgcccagagattcggcagaaaggaccacctgaccagacacaccaagaagacccacagccaggagctgatgaaggagagcctgcagaccggcgacctgctgagcaccttccacaccatctag

SEQ ID NO: 93634 - DNA, 1392 bp, synthetic construct; identical to SEQ ID NO: 93626
  misc_feature 1..1392: note = Description of Artificial Sequence: Synthetic coding sequence
  source 1..1392: mol_type = other DNA

SEQ ID NO: 93635 - DNA, 1236 bp, synthetic construct; identical to SEQ ID NO: 93629
  misc_feature 1..1236: note = Description of Artificial Sequence: Synthetic coding sequence
  source 1..1236: mol_type = other DNA

SEQ ID NO: 93636 - DNA, 1392 bp, synthetic construct; identical to SEQ ID NO: 93626
  misc_feature 1..1392: note = Description of Artificial Sequence: Synthetic coding sequence
  source 1..1392: mol_type = other DNA

SEQ ID NO: 93637 - DNA, 759 bp, synthetic construct
  misc_feature 1..759: note = Description of Artificial Sequence: Synthetic coding sequence
  source 1..759: mol_type = other DNA
atgaaggagagcctgcagaccggcgacctgctgagcaccttccacaccatcagccccagcttccagctgaaggccgccgccctgccccccttccccctgggcgccagcgcccagaacggcctggccagcagcctgcccgccgaggtgcacagcctgaccctgagcccccccgagcaggccgcccagcccatgcagcccctgcccgagagcctggccagcctgcaccccagcgtgagccccggcagcccccccccccccctgcccaaccacaagtacaacaccaccagcaccagctacagccccctggccagcctgcccctgaaggccgacaccaagggcttctgcaacatcagcctgttcgaggacctgcccctgcaggagccccagagcccccagaagctgaaccccggcttcgacctggccaagggcaacgccggcaaggtgaacctgcccaaggagctgcccgccgacgccgtgaacctgaccatccccgccagcctggacctgagccccctgctgggcttctggcagctgcccccccccgccacccagaacaccttcggcaacagcaccctggccctgggccccggcgagagcctgccccacagactgagctgcctgggccagcagcagcaggagccccccctggccatgggcaccgtgagcctgggccagctgcccctgccccccatcccccacgtgttcagcgccggcaccggcagcgccatcctgccccacttccaccacgccttcagatag

SEQ ID NO: 93638 - DNA, 1491 bp, synthetic construct
  misc_feature 1..1491: note = Description of Artificial Sequence: Synthetic coding sequence
  source 1..1491: mol_type = other DNA
atgaccaccttcttcaccagcgtgcccccctggatccaggacgccaagcaggaggaggaggtgggctggaagctggtgcccagacccagaggcagagaggccgagagccaggtgaagtgccagtgcgagatcagcggcacccccttcagcaacggcgagaagctgagaccccacagcctgccccagcccgagcagagaccctacagctgcccccagctgcactgcggcaaggccttcgccagcaagtacaagctgtacagacacatggccacccacagcgcccagaagccccaccagtgcatgtactgcgacaagatgttccacagaaaggaccacctgagaaaccacctgcagacccacgaccccaacaaggaggccctgcactgcagcgagtgcggcaagaactacaacaccaagctgggctacagaagacacctggccatgcacgccgccagcagcggcgacctgagctgcaaggtgtgcctgcagaccttcgagagcacccaggccctgctggagcacctgaaggcccacagcagaagagtggccggcggcgccaaggagaagaagcacccctgcgaccactgcgacagaagattctacaccagaaaggacgtgagaagacacctggtggtgcacaccggcagaaaggacttcctgtgccagtactgcgcccagagattcggcagaaaggaccacctgaccagacacgtgaagaagagccacagccaggagctgctgaagatcaagaccgagcccgtggacatgctgggcctgctgagctgcagcagcaccgtgagcgtgaaggaggagctgagccccgtgctgtgcatggccagcagagacgtgatgggcaccaaggccttccccggcatgctgcccatgggcatgtacggcgcccacatccccaccatgcccagcaccggcgtgccccacagcctggtgcacaacaccctgcccatgggcatgagctaccccctggagagcagccccatcagcagccccgcccagctgccccccaagtaccagctgggcagcaccagctacctgcccgacaagctgcccaaggtggaggtggacagcttcctggccgagctgcccggcagcctgagcctgagcagcgccgagccccagcccgccagcccccagcccgccgccgccgccgccctgctggacgaggccctgctggccaagagccccgccaacctgagcgaggccctgtgcgccgccaacgtggacttcagccacctgctgggcttcctgcccctgaacctgcccccctgcaacccccccggcgccaccggcggcctggtgatgggctacagccaggccgaggcccagcccctgctgaccaccctgcaggcccagccccaggacagccccggcgccggcggccccctgaacttcggccccctgcacagcctgccccccgtgttcaccagcggcctgagcagcaccaccctgcccagattccaccaggccttccagtag

SEQ ID NO: 93639 - DNA, 507 bp, synthetic construct
  misc_feature 1..507: note = Description of Artificial Sequence: Synthetic coding sequence
  source 1..507: mol_type = other DNA
atgcaggcccagcagtaccagcagcagagaagaaagttcgccgccgccttcctggccttcatcttcatcctggccgccgtggacaccgccgaggccggcaagaaggagaagcccgagaagaaggtgaagaagagcgactgcggcgagtggcagtggagcgtgtgcgtgcccaccagcggcgactgcggcctgggcaccagagagggcaccagaaccggcgccgagtgcaagcagaccatgaagacccagagatgcaagatcccctgcaactggaagaagcagttcggcgccgagtgcaagtaccagttccaggcctggggcgagtgcgacctgaacaccgccctgaagaccagaaccggcagcctgaagagagccctgcacaacgccgagtgccagaagaccgtgaccatcagcaagccctgcggcaagctgaccaagcccaagccccaggccgagagcaagaagaagaagaaggagggcaagaagcaggagaagatgctggactag

SEQ ID NO: 93640 - DNA, 1518 bp, synthetic construct
  misc_feature 1..1518: note = Description of Artificial Sequence: Synthetic coding sequence
  source 1..1518: mol_type = other DNA
atggtggaggaggtgcagaagcacagcgtgcacaccctggtgttcagaagcctgaagagaacccacgacatgttcgtggccgacaacggcaagcccgtgcccctggacgaggagagccacaagagaaagatggccatcaagctgagaaacgagtacggccccgtgctgcacatgcccaccagcaaggagaacctgaaggagaagggcccccagaacgccaccgacagctacgtgcacaagcagtaccccgccaaccagggccaggaggtggagtacttcgtggccggcgtggccctgaccgccgacaccaagatccagagaatgcccagcgagagcgccgcccagagcctggccgtggccctgcccctgcagaccaaggccgacgccaacagaaccgcccccagcggcagcgagtacagacaccccggcgccagcgacagaccccagcccaccgccatgaacagcatcgtgatggagaccggcaacaccaagaacagcgccctgatggccaagaaggcccccaccatgcccaagccccagtggcaccccccctggaagctgtacagagtgatcagcggccacctgggctgggtgagatgcatcgccgtggagcccggcaaccagtggttcgtgaccggcagcgccgacagaaccatcaagatctgggacctggccagcggcaagctgaagctgagcctgaccggccacatcagcaccgtgagaggcgtgatcgtgagcaccagaagcccctacctgttcagctgcggcgaggacaagcaggtgaagtgctgggacctggagtacaacaaggtgatcagacactaccacggccacctgagcgccgtgtacggcctggacctgcaccccaccatcgacgtgctggtgacctgcagcagagacagcaccgccagaatctgggacgtgagaaccaaggccagcgtgcacaccctgagcggccacaccaacgccgtggccaccgtgagatgccaggccgccgagccccagatcatcaccggcagccacgacaccaccatcagactgtgggacctggtggccggcaagaccagagtgaccctgaccaaccacaagaagagcgtgagagccgtggtgctgcaccccagacactacaccttcgccagcggcagccccgacaacatcaagcagtggaagttccccgacggcagcttcatccagaacctgagcggccacaacgccatcatcaacaccctgaccgtgaacagcgacggcgtgctggtgagcggcgccgacaacggcaccatgcacctgtgggactggagaaccggctacaacttccagagagtgcacgccgccgtgcagcccggcagcctggacagcgagagcggcatcttcgcctgcgccttcgaccagagcgagagcagactgctgaccgccgaggccgacaagaccatcaaggtgtacagagaggacgacaccgccaccgaggagacccaccccgtgagctggaagcccgagatcatcaagagaaagagattctag

SEQ ID NO: 93641 - DNA, 1545 bp, synthetic construct
  misc_feature 1..1545: note = Description of Artificial Sequence: Synthetic coding sequence
  source 1..1545: mol_type = other DNA
atgatctgcgaggtgcagaagcacagcgtgcacaccctggtgttcagaagcctgaagagaacccacgacatgttcgtggccgacaacggcaagcccgtgcccctggacgaggagagccacaagagaaagatggccatcaagctgagaaacgagtacggccccgtgctgcacatgcccaccagcaaggagaacctgaaggagaagggcccccagaacgccaccgacagctacgtgcacaagcagtaccccgccaaccagggccaggaggtggagtacttcgtggccggcacccacccctacccccccggccccggcgtggccctgaccgccgacaccaagatccagagaatgcccagcgagagcgccgcccagagcctggccgtggccctgcccctgcagaccaaggccgacgccaacagaaccgcccccagcggcagcgagtacagacaccccggcgccagcgacagaccccagcccaccgccatgaacagcatcgtgatggagaccggcaacaccaagaacagcgccctgatggccaagaaggcccccaccatgcccaagccccagtggcaccccccctggaagctgtacagagtgatcagcggccacctgggctgggtgagatgcatcgccgtggagcccggcaaccagtggttcgtgaccggcagcgccgacagaaccatcaagatctgggacctggccagcggcaagctgaagctgagcctgaccggccacatcagcaccgtgagaggcgtgatcgtgagcaccagaagcccctacctgttcagctgcggcgaggacaagcaggtgaagtgctgggacctggagtacaacaaggtgatcagacactaccacggccacctgagcgccgtgtacggcctggacctgcaccccaccatcgacgtgctggtgacctgcagcagagacagcaccgccagaatctgggacgtgagaaccaaggccagcgtgcacaccctgagcggccacaccaacgccgtggccaccgtgagatgccaggccgccgagccccagatcatcaccggcagccacgacaccaccatcagactgtgggacctggtggccggcaagaccagagtgaccctgaccaaccacaagaagagcgtgagagccgtggtgctgcaccccagacactacaccttcgccagcggcagccccgacaacatcaagcagtggaagttccccgacggcagcttcatccagaacctgagcggccacaacgccatcatcaacaccctgaccgtgaacagcgacggcgtgctggtgagcggcgccgacaacggcaccatgcacctgtgggactggagaaccggctacaacttccagagagtgcacgccgccgtgcagcccggcagcctggacagcgagagcggcatcttcgcctgcgccttcgaccagagcgagagcagactgctgaccgccgaggccgacaagaccatcaaggtgtacagagaggacgacaccgccaccgaggagacccaccccgtgagctggaagcccgagatcatcaagagaaagagattctag

SEQ ID NO: 93642 - DNA, 1545 bp, synthetic construct
  misc_feature 1..1545: note = Description of Artificial Sequence: Synthetic coding sequence
  source 1..1545: mol_type = other DNA
atggtggaggaggtgcagaagcacagcgtgcacaccctggtgttcagaagcctgaagagaacccacgacatgttcgtggccgacaacggcaagcccgtgcccctggacgaggagagccacaagagaaagatggccatcaagctgagaaacgagtacggccccgtgctgcacatgcccaccagcaaggagaacctgaaggagaagggcccccagaacgccaccgacagctacgtgcacaagcagtaccccgccaaccagggccaggaggtggagtacttcgtggccggcacccacccctacccccccggccccggcgtggccctgaccgccgacaccaagatccagagaatgcccagcgagagcgccgcccagagcctggccgtggccctgcccctgcagaccaaggccgacgccaacagaaccgcccccagcggcagcgagtacagacaccccggcgccagcgacagaccccagcccaccgccatgaacagcatcgtgatggagaccggcaacaccaagaacagcgccctgatggccaagaaggcccccaccatgcccaagccccagtggcaccccccctggaagctgtacagagtgatcagcggccacctgggctgggtgagatgcatcgccgtggagcccggcaaccagtggttcgtgaccggcagcgccgacagaaccatcaagatctgggacctggccagcggcaagctgaagctgagcctgaccggccacatcagcaccgtgagaggcgtgatcgtgagcaccagaagcccctacctgttcagctgcggcgaggacaagcaggtgaagtgctgggacctggagtacaacaaggtgatcagacactaccacggccacctgagcgccgtgtacggcctggacctgcaccccaccatcgacgtgctggtgacctgcagcagagacagcaccgccagaatctgggacgtgagaaccaaggccagcgtgcacaccctgagcggccacaccaacgccgtggccaccgtgagatgccaggccgccgagccccagatcatcaccggcagccacgacaccaccatcagactgtgggacctggtggccggcaagaccagagtgaccctgaccaaccacaagaagagcgtgagagccgtggtgctgcaccccagacactacaccttcgccagcggcagccccgacaacatcaagcagtggaagttccccgacggcagcttcatccagaacctgagcggccacaacgccatcatcaacaccctgaccgtgaacagcgacggcgtgctggtgagcggcgccgacaacggcaccatgcacctgtgggactggagaaccggctacaacttccagagagtgcacgccgccgtgcagcccggcagcctggacagcgagagcggcatcttcgcctgcgccttcgaccagagcgagagcagactgctgaccgccgaggccgacaagaccatcaaggtgtacagagaggacgacaccgccaccgaggagacccaccccgtgagctggaagcccgagatcatcaagagaaagagattctag

SEQ ID NO: 93643 - DNA, 5622 bp, synthetic construct
  misc_feature 1..5622: note = Description of Artificial Sequence: Synthetic coding sequence
  source 1..5622: mol_type = other DNA
atgtgggccgaggccggcctgcccagagccggcggcggcagccagccccccttcagaaccttcagcgccagcgactggggcctgacccacctggtggtgcacgagcagaccggcgaggtgtacgtgggcgccgtgaacagaatctacaagctgagcggcaacctgaccctgctgagagcccacgtgaccggccccgtggaggacaacgagaagtgctaccccccccccagcgtgcagagctgcccccacggcctgggcagcaccgacaacgtgaacaagctgctgctgctggactacgccgccaacagactgctggcctgcggcagcgccagccagggcatctgccagttcctgagactggacgacctgttcaagctgggcgagccccaccacagaaaggagcactacctgagcagcgtgcaggaggccggcagcatggccggcgtgctgatcgccggcccccccggccagggccaggccaagctgttcgtgggcacccccatcgacggcaagagcgagtacttccccaccctgagcagcagaagactgatggccaacgaggaggacgccgacatgttcggcttcgtgtaccaggacgagttcgtgagcagccagctgaagatccccagcgacaccctgagcaagttccccgccttcgacatctactacgtgtacagcttcagaagcgagcagttcgtgtactacctgaccctgcagctggacacccagctgaccagccccgacgccgccggcgagcacttcttcaccagcaagatcgtgagactgtgcgtggacgaccccaagttctacagctacgtggagttccccatcggctgcgagcaggccggcgtggagtacagactggtgcaggacgcctacctgagcagacccggcagagccctggcccaccagctgggcctggccgaggacgaggacgtgctgttcaccgtgttcgcccagggccagaagaacagagtgaagccccccaaggagagcgccctgtgcctgttcaccctgagagccatcaaggagaagatcaaggagagaatccagagctgctacagaggcgagggcaagctgagcctgccctggctgctgaacaaggagctgggctgcatcaacagccccctgcagatcgacgacgacttctgcggccaggacttcaaccagcccctgggcggcaccgtgaccatcgagggcacccccctgttcgtggacaaggacgacggcctgaccgccgtggccgcctacgactacagaggcagaaccgtggtgttcgccggcaccagaagcggcagaatcagaaagatcctggtggacctgagcaaccccggcggcagacccgccctggcctacgagagcgtggtggcccaggagggcagccccatcctgagagacctggtgctgagccccaaccaccagtacctgtacgccatgaccgagaagcaggtgaccagagtgcccgtggagagctgcgtgcagtacaccagctgcgagctgtgcctgggcagcagagacccccactgcggctggtgcgtgctgcacagcatctgcagcagaagagacgcctgcgagagagccgacgagccccagagattcgccgccgacctgctgcagtgcgtgcagctgaccgtgcagcccagaaacgtgagcgtgaccatgagccaggtgcccctggtgctgcaggcctggaacgtgcccgacctgagcgccggcgtgaactgcagcttcgaggacttcaccgagagcgagagcgtgctggaggacggcagaatccactgcagaagccccagcgccagagaggtggcccccatcaccagaggccagggcgaccagagagtggtgaagctgtacctgaagagcaaggagaccggcaagaagttcgccagcgtggacttcgtgttctacaactgcagcgtgcaccagagctgcctgagctgcgtgaacggcagcttcccctgccactggtgcaagtacagacacgtgtgcacccacaacgtggccgactgcgccttcctggagggcagagtgaacgtgagcgaggactgcccccagatcctgcccagcacccagatctacgtgcccgtgggcgtggtgaagcccatcaccctggccgccagaaacctgccccagccccagagcggccagagaggctacgagtgcctgttccacatccccggcagccccgccagagtgaccgccctgagattcaacagcagcagcctgcagtgccagaacagcagctacagctacgagggcaacgacgtgagcgacctgcccgtgaacctgagcgtggtgtggaacggcaacttcgtgatcgacaacccccagaacatccaggcccacctgtacaagtgccccgccctgagagagagctgcggcctgtgcctgaaggccgaccccagattcgagtgcggctggtgcgtggccgagagaagatgcagcctgagacaccactgcgccgccgacacccccgccagctggatgcacgccagacacggcagcagcagatgcaccgaccccaagatcctgaagctgagccccgagaccggccccagacagggcggcaccagactgaccatcaccggcgagaacctgggcctgagattcgaggacgtgagactgggcgtgagagtgggcaaggtgctgtgcagccccgtggagagcgagtacatcagcgccgagcagatcgtgtgcgagatcggcgacgccagcagcgtgagagcccacgacgccctggtggaggtgtgcgtgagagactgcagcccccactacagagccctgagccccaagagattcaccttcgtgacccccaccttctacagagtgagccccagcagaggccccctgagcggcggcacctggatcggcatcgagggcagccacctgaacgccggcagcgacgtggccgtgagcgtgggcggcagaccctgcagcttcagctggagaaacagcagagagatcagatgcctgaccccccccggccagagccccggcagcgcccccatcatcatcaacatcaacagagcccagctgaccaaccccgaggtgaagtacaactacaccgaggaccccaccatcctgagaatcgaccccgagtggagcatcaacagcggcggcaccctgctgaccgtgaccggcaccaacctggccaccgtgagagagcccagaatcagagccaagtacggcggcatcgagagagagaacggctgcctggtgtacaacgacaccaccatggtgtgcagagcccccagcgtggccaaccccgtgagaagcccccccgagctgggcgagagacccgacgagctgggcttcgtgatggacaacgtgagaagcctgctggtgctgaacagcaccagcttcctgtactaccccgaccccgtgctggagcccctgagccccaccggcctgctggagctgaagcccagcagccccctgatcctgaagggcagaaacctgctgccccccgcccccggcaacagcagactgaactacaccgtgctgatcggcagcaccccctgcaccctgaccgtgagcgagacccagctgctgtgcgaggcccccaacctgaccggccagcacaaggtgaccgtgagagccggcggcttcgagttcagccccggcaccctgcaggtgtacagcgacagcctgctgaccctgcccgccatcgtgggcatcggcggcggcggcggcctgctgctgctggtgatcgtggccgtgctgatcgcctacaagagaaagagcagagacgccgacagaaccctgaagagactgcagctgcagatggacaacctggagagcagagtggccctggagtgcaaggaggccttcgccgagctgcagaccgacatccacgagctgaccaacgacctggacggcgccggcatccccttcctggactacagaacctacgccatgagagtgctgttccccggcatcgaggaccaccccgtgctgaaggagatggaggtgcaggccaacgtggagaagagcctgaccctgttcggccagctgctgaccaagaagcacttcctgctgaccttcatcagaaccctggaggcccagagaagcttcagcatgagagacagaggcaacgtggccagcctgatcatgaccgccctgcagggcgagatggagtacgccaccggcgtgctgaagcagctgctgagcgacctgatcgagaagaacctggagagcaagaaccaccccaagctgctgctgagaagaaccgagagcgtggccgagaagatgctgaccaactggttcaccttcctgctgtacaagttcctgaaggagtgcgccggcgagcccctgttcatgctgtactgcgccatcaagcagcagatggagaagggccccatcgacgccatcaccggcgaggccagatacagcctgagcgaggacaagctgatcagacagcagatcgactacaagaccctgaccctgaactgcgtgaaccccgagaacgagaacgcccccgaggtgcccgtgaagggcctggactgcgacaccgtgacccaggccaaggagaagctgctggacgccgcctacaagggcgtgccctacagccagagacccaaggccgccgacatggacctggagtggagacagggcagaatggccagaatcatcctgcaggacgaggacgtgaccaccaagatcgacaacgactggaagagactgaacaccctggcccactaccaggtgaccgacggcagcagcgtggccctggtgcccaagcagaccagcgcctacaacatcagcaacagcagcaccttcaccaagagcctgagcagatacgagagcatgctgagaaccgccagcagccccgacagcctgagaagcagaacccccatgatcacccccgacctggagagcggcaccaagctgtggcacctggtgaagaaccacgaccacctggaccagagagagggcgacagaggcagcaagatggtgagcgagatctacctgaccagactgctggccaccaagggcaccctgcagaagttcgtggacgacctgttcgagaccatcttcagcaccgcccacagaggcagcgccctgcccctggccatcaagtacatgttcgacttcctggacgagcaggccgacaagcaccagatccacgacgccgacgtgagacacacctggaagagcaactgcctgcccctgagattctgggtgaacgtgatcaagaacccccagttcgtgttcgacatccacaagaacagcatcaccgacgcctgcctgagcgtggtggcccagaccttcatggacagctgcagcaccagcgagcacaagctgggcaaggacagccccagcaacaagctgctgtacgccaaggacatccccaactacaagagctgggtggagagatactacgccgacatcgccaagatgcccgccatcagcgaccaggacatgagcgcctacctggccgagcagagcagactgcacctgagccagttcaacagcatgagcgccctgcacgagatctacagctacatcaccaagtacaaggacgagatcctggccgccctggagaaggacgagcaggccagaagacagagactgagaagcaagctggagcaggtggtggacaccatggccctgagcagctag

SEQ ID NO: 93644 - DNA, 5691 bp, synthetic construct
  misc_feature 1..5691: note = Description of Artificial Sequence: Synthetic coding sequence
  source 1..5691: mol_type = other DNA
atgcccctgccccccagaagcctgcaggtgctgctgctgctgctgctgctgctgctgctgctgcccggcatgtgggccgaggccggcctgcccagagccggcggcggcagccagccccccttcagaaccttcagcgccagcgactggggcctgacccacctggtggtgcacgagcagaccggcgaggtgtacgtgggcgccgtgaacagaatctacaagctgagcggcaacctgaccctgctgagagcccacgtgaccggccccgtggaggacaacgagaagtgctaccccccccccagcgtgcagagctgcccccacggcctgggcagcaccgacaacgtgaacaagctgctgctgctggactacgccgccaacagactgctggcctgcggcagcgccagccagggcatctgccagttcctgagactggacgacctgttcaagctgggcgagccccaccacagaaaggagcactacctgagcagcgtgcaggaggccggcagcatggccggcgtgctgatcgccggcccccccggccagggccaggccaagctgttcgtgggcacccccatcgacggcaagagcgagtacttccccaccctgagcagcagaagactgatggccaacgaggaggacgccgacatgttcggcttcgtgtaccaggacgagttcgtgagcagccagctgaagatccccagcgacaccctgagcaagttccccgccttcgacatctactacgtgtacagcttcagaagcgagcagttcgtgtactacctgaccctgcagctggacacccagctgaccagccccgacgccgccggcgagcacttcttcaccagcaagatcgtgagactgtgcgtggacgaccccaagttctacagctacgtggagttccccatcggctgcgagcaggccggcgtggagtacagactggtgcaggacgcctacctgagcagacccggcagagccctggcccaccagctgggcctggccgaggacgaggacgtgctgttcaccgtgttcgcccagggccagaagaacagagtgaagccccccaaggagagcgccctgtgcctgttcaccctgagagccatcaaggagaagatcaaggagagaatccagagctgctacagaggcgagggcaagctgagcctgccctggctgctgaacaaggagctgggctgcatcaacagccccctgcagatcgacgacgacttctgcggccaggacttcaaccagcccctgggcggcaccgtgaccatcgagggcacccccctgttcgtggacaaggacgacggcctgaccgccgtggccgcctacgactacagaggcagaaccgtggtgttcgccggcaccagaagcggcagaatcagaaagatcctggtggacctgagcaaccccggcggcagacccgccctggcctacgagagcgtggtggcccaggagggcagccccatcctgagagacctggtgctgagccccaaccaccagtacctgtacgccatgaccgagaagcaggtgaccagagtgcccgtggagagctgcgtgcagtacaccagctgcgagctgtgcctgggcagcagagacccccactgcggctggtgcgtgctgcacagcatctgcagcagaagagacgcctgcgagagagccgacgagccccagagattcgccgccgacctgctgcagtgcgtgcagctgaccgtgcagcccagaaacgtgagcgtgaccatgagccaggtgcccctggtgctgcaggcctggaacgtgcccgacctgagcgccggcgtgaactgcagcttcgaggacttcaccgagagcgagagcgtgctggaggacggcagaatccactgcagaagccccagcgccagagaggtggcccccatcaccagaggccagggcgaccagagagtggtgaagctgtacctgaagagcaaggagaccggcaagaagttcgccagcgtggacttcgtgttctacaactgcagcgtgcaccagagctgcctgagctgcgtgaacggcagcttcccctgccactggtgcaagtacagacacgtgtgcacccacaacgtggccgactgcgccttcctggagggcagagtgaacgtgagcgaggactgcccccagatcctgcccagcacccagatctacgtgcccgtgggcgtggtgaagcccatcaccctggccgccagaaacctgccccagccccagagcggccagagaggctacgagtgcctgttccacatccccggcagccccgccagagtgaccgccctgagattcaacagcagcagcctgcagtgccagaacagcagctacagctacgagggcaacgacgtgagcgacctgcccgtgaacctgagcgtggtgtggaacggcaacttcgtgatcgacaacccccagaacatccaggcccacctgtacaagtgccccgccctgagagagagctgcggcctgtgcctgaaggccgaccccagattcgagtgcggctggtgcgtggccgagagaagatgcagcctgagacaccactgcgccgccgacacccccgccagctggatgcacgccagacacggcagcagcagatgcaccgaccccaagatcctgaagctgagccccgagaccggccccagacagggcggcaccagactgaccatcaccggcgagaacctgggcctgagattcgaggacgtgagactgggcgtgagagtgggcaaggtgctgtgcagccccgtggagagcgagtacatcagcgccgagcagatcgtgtgcgagatcggcgacgccagcagcgtgagagcccacgacgccctggtggaggtgtgcgtgagagactgcagcccccactacagagccctgagccccaagagattcaccttcgtgacccccaccttctacagagtgagccccagcagaggccccctgagcggcggcacctggatcggcatcgagggcagccacctgaacgccggcagcgacgtggccgtgagcgtgggcggcagaccctgcagcttcagctggagaaacagcagagagatcagatgcctgaccccccccggccagagccccggcagcgcccccatcatcatcaacatcaacagagcccagctgaccaaccccgaggtgaagtacaactacaccgaggaccccaccatcctgagaatcgaccccgagtggagcatcaacagcggcggcaccctgctgaccgtgaccggcaccaacctggccaccgtgagagagcccagaatcagagccaagtacggcggcatcgagagagagaacggctgcctggtgtacaacgacaccaccatggtgtgcagagcccccagcgtggccaaccccgtgagaagcccccccgagctgggcgagagacccgacgagctgggcttcgtgatggacaacgtgagaagcctgctggtgctgaacagcaccagcttcctgtactaccccgaccccgtgctggagcccctgagccccaccggcctgctggagctgaagcccagcagccccctgatcctgaagggcagaaacctgctgccccccgcccccggcaacagcagactgaactacaccgtgctgatcggcagcaccccctgcaccctgaccgtgagcgagacccagctgctgtgcgaggcccccaacctgaccggccagcacaaggtgaccgtgagagccggcggcttcgagttcagccccggcaccctgcaggtgtacagcgacagcctgctgaccctgcccgccatcgtgggcatcggcggcggcggcggcctgctgctgctggtgatcgtggccgtgctgatcgcctacaagagaaagagcagagacgccgacagaaccctgaagagactgcagctgcagatggacaacctggagagcagagtggccctggagtgcaaggaggccttcgccgagctgcagaccgacatccacgagctgaccaacgacctggacggcgccggcatccccttcctggactacagaacctacgccatgagagtgctgttccccggcatcgaggaccaccccgtgctgaaggagatggaggtgcaggccaacgtggagaagagcctgaccctgttcggccagctgctgaccaagaagcacttcctgctgaccttcatcagaaccctggaggcccagagaagcttcagcatgagagacagaggcaacgtggccagcctgatcatgaccgccctgcagggcgagatggagtacgccaccggcgtgctgaagcagctgctgagcgacctgatcgagaagaacctggagagcaagaaccaccccaagctgctgctgagaagaaccgagagcgtggccgagaagatgctgaccaactggttcaccttcctgctgtacaagttcctgaaggagtgcgccggcgagcccctgttcatgctgtactgcgccatcaagcagcagatggagaagggccccatcgacgccatcaccggcgaggccagatacagcctgagcgaggacaagctgatcagacagcagatcgactacaagaccctgaccctgaactgcgtgaaccccgagaacgagaacgcccccgaggtgcccgtgaagggcctggactgcgacaccgtgacccaggccaaggagaagctgctggacgccgcctacaagggcgtgccctacagccagagacccaaggccgccgacatggacctggagtggagacagggcagaatggccagaatcatcctgcaggacgaggacgtgaccaccaagatcgacaacgactggaagagactgaacaccctggcccactaccaggtgaccgacggcagcagcgtggccctggtgcccaagcagaccagcgcctacaacatcagcaacagcagcaccttcaccaagagcctgagcagatacgagagcatgctgagaaccgccagcagccccgacagcctgagaagcagaacccccatgatcacccccgacctggagagcggcaccaagctgtggcacctggtgaagaaccacgaccacctggaccagagagagggcgacagaggcagcaagatggtgagcgagatctacctgaccagactgctggccaccaagggcaccctgcagaagttcgtggacgacctgttcgagaccatcttcagcaccgcccacagaggcagcgccctgcccctggccatcaagtacatgttcgacttcctggacgagcaggccgacaagcaccagatccacgacgccgacgtgagacacacctggaagagcaactgcctgcccctgagattctgggtgaacgtgatcaagaacccccagttcgtgttcgacatccacaagaacagcatcaccgacgcctgcctgagcgtggtggcccagaccttcatggacagctgcagcaccagcgagcacaagctgggcaaggacagccccagcaacaagctgctgtacgccaaggacatccccaactacaagagctgggtggagagatactacgccgacatcgccaagatgcccgccatcagcgaccaggacatgagcgcctacctggccgagcagagcagactgcacctgagccagttcaacagcatgagcgccctgcacgagatctacagctacatcaccaagtacaaggacgagatcctggccgccctggagaaggacgagcaggccagaagacagagactgagaagcaagctggagcaggtggtggacaccatggccctgagcagctag

SEQ ID NO: 93645 - DNA, 5685 bp, synthetic construct
  misc_feature 1..5685: note = Description of Artificial Sequence: Synthetic coding sequence
  source 1..5685: mol_type = other DNA
atggagcagagaagaccctggcccagagccctggaggtggacagcagaagcgtggtgctgctgagcgtggtgtgggtgctgctggccccccccgccgccggcatgccccagttcagcaccttccacagcgagaacagagactggaccttcaaccacctgaccgtgcaccagggcaccggcgccgtgtacgtgggcgccatcaacagagtgtacaagctgaccggcaacctgaccatccaggtggcccacaagaccggccccgaggaggacaacaagagctgctacccccccctgatcgtgcagccctgcagcgaggtgctgaccctgaccaacaacgtgaacaagctgctgatcatcgactacagcgagaacagactgctggcctgcggcagcctgtaccagggcgtgtgcaagctgctgagactggacgacctgttcatcctggtggagcccagccacaagaaggagcactacctgagcagcgtgaacaagaccggcaccatgtacggcgtgatcgtgagaagcgagggcgaggacggcaagctgttcatcggcaccgccgtggacggcaagcaggactacttccccaccctgagcagcagaaagctgcccagagaccccgagagcagcgccatgctggactacgagctgcacagcgacttcgtgagcagcctgatcaagatccccagcgacaccctggccctggtgagccacttcgacatcttctacatctacggcttcgccagcggcggcttcgtgtacttcctgaccgtgcagcccgagacccccgagggcgtggccatcaacagcgccggcgacctgttctacaccagcagaatcgtgagactgtgcaaggacgaccccaagttccacagctacgtgagcctgcccttcggctgcaccagagccggcgtggagtacagactgctgcaggccgcctacctggccaagcccggcgacagcctggcccaggccttcaacatcaccagccaggacgacgtgctgttcgccatcttcagcaagggccagaagcagtaccaccacccccccgacgacagcgccctgtgcgccttccccatcagagccatcaacctgcagatcaaggagagactgcagagctgctaccagggcgagggcaacctggagctgaactggctgctgggcaaggacgtgcagtgcaccaaggcccccgtgcccatcgacgacaacttctgcggcctggacatcaaccagcccctgggcggcagcacccccgtggagggcctgaccctgtacaccaccagcagagacagaatgaccagcgtggccagctacgtgtacaacggctacagcgtggtgttcgtgggcaccaagagcggcaagctgaagaagatcagagccgacggccccccccacggcggcgtgcagtacgagatggtgagcgtgctgaaggacggcagccccatcctgagagacatggccttcagcatcgaccagagatacctgtacgtgatgagcgagagacaggtgaccagagtgcccgtggagagctgcgagcagtacaccacctgcggcgagtgcctgagcagcggcgacccccactgcggctggtgcgccctgcacaacatgtgcagcagaagagacaagtgccagcaggcctgggagcccaacagattcgccgccagcatcagccagtgcgtgagcctggccgtgcaccccagcagcatcagcgtgagcgagcacagcagactgctgagcctggtggtgagcgacgcccccgacctgagcgccggcatcgcctgcgccttcggcaacctgaccgaggtggagggccaggtgagcggcagccaggtgatctgcatcagccccggccccaaggacgtgcccgtgatccccctggaccaggactggttcggcctggagctgcagctgagaagcaaggagaccggcaagatcttcgtgagcaccgagttcaagttctacaactgcagcgcccaccagctgtgcctgagctgcgtgaacagcgccttcagatgccactggtgcaagtacagaaacctgtgcacccacgaccccaccacctgcagcttccaggagggcagaatcaacatcagcgaggactgcccccagctggtgcccaccgaggagatcctgatccccgtgggcgaggtgaagcccatcaccctgaaggccagaaacctgccccagccccagagcggccagagaggctacgagtgcgtgctgaacatccagggcgccatccacagagtgcccgccctgagattcaacagcagcagcgtgcagtgccagaacagcagctaccagtacgacggcatggacatcagcaacctggccgtggacttcgccgtggtgtggaacggcaacttcatcatcgacaacccccaggacctgaaggtgcacctgtacaagtgcgccgcccagagagagagctgcggcctgtgcctgaaggccgacagaaagttcgagtgcggctggtgcagcggcgagagaagatgcaccctgcaccagcactgcaccagccccagcagcccctggctggactggagcagccacaacgtgaagtgcagcaacccccagatcaccgagatcctgaccgtgagcggcccccccgagggcggcaccagagtgaccatccacggcgtgaacctgggcctggacttcagcgagatcgcccaccacgtgcaggtggccggcgtgccctgcacccccctgcccggcgagtacatcatcgccgagcagatcgtgtgcgagatgggccacgccctggtgggcaccaccagcggccccgtgagactgtgcatcggcgagtgcaagcccgagttcatgaccaagagccaccagcagtacaccttcgtgaaccccagcgtgctgagcctgaaccccatcagaggccccgagagcggcggcaccatggtgaccatcaccggccactacctgggcgccggcagcagcgtggccgtgtacctgggcaaccagacctgcgagttctacggcagaagcatgagcgagatcgtgtgcgtgagcccccccagcagcaacggcctgggccccgtgcccgtgagcgtgagcgtggacagagcccacgtggacagcaacctgcagttcgagtacatcgacgaccccagagtgcagagaatcgagcccgagtggagcatcgccagcggccacacccccctgaccatcaccggcttcaacctggacgtgatccaggagcccagaatcagagtgaagttcaacggcaaggagagcgtgaacgtgtgcaaggtggtgaacaccaccaccctgacctgcctggcccccagcctgaccaccgactacagacccggcctggacaccgtggagagacccgacgagttcggcttcgtgttcaacaacgtgcagagcctgctgatctacaacgacaccaagttcatctactaccccaaccccaccttcgagctgctgagccccaccggcgtgctggaccagaagcccggcagccccatcatcctgaagggcaagaacctgtgcccccccgccagcggcggcgccaagctgaactacaccgtgctgatcggcgagaccccctgcgccgtgaccgtgagcgagacccagctgctgtgcgagccccccaacctgaccggccagcacaaggtgatggtgcacgtgggcggcatggtgttcagccccggcagcgtgagcgtgatcagcgacagcctgctgaccctgcccgccatcgtgagcatcgccgccggcggcagcctgctgctgatcatcgtgatcatcgtgctgatcgcctacaagagaaagagcagagagaacgacctgaccctgaagagactgcagatgcagatggacaacctggagagcagagtggccctggagtgcaaggaggccttcgccgagctgcagaccgacatcaacgagctgaccagcgacctggacagaagcggcatcccctacctggactacagaacctacgccatgagagtgctgttccccggcatcgaggaccaccccgtgctgagagagctggaggtgcagggcaacggccagcagcacgtggagaaggccctgaagctgttcgcccagctgatcaacaacaaggtgttcctgctgaccttcatcagaaccctggagctgcagagaagcttcagcatgagagacagaggcaacgtggccagcctgatcatgaccggcctgcagggcagactggagtacgccaccgacgtgctgaagcagctgctgagcgacctgatcgacaagaacctggagaacaagaaccaccccaagctgctgctgagaagaaccgagagcgtggccgagaagatgctgaccaactggttcgccttcctgctgcacaagttcctgaaggagtgcgccggcgagcccctgttcatgctgtactgcgccatcaagcagcagatggagaagggccccatcgacgccatcaccggcgaggccagatacagcctgagcgaggacaagctgatcagacagcagatcgagtacaagaccctgatcctgaactgcgtgaaccccgacaacgagaacagccccgagatccccgtgaaggtgctgaactgcgacaccatcacccaggtgaaggagaagatcctggacgccgtgtacaagaacgtgccctacagccagagacccagagccgtggacatggacctggagtggagacagggcagaatcgccagagtggtgctgcaggacgaggacatcaccaccaagatcgagggcgactggaagagactgaacaccctgatgcactaccaggtgagcgacagaagcgtggtggccctggtgcccaagcagaccagcagctacaacatccccgccagcgccagcatcagcagaaccagcatcagcagatacgacagcagcttcagatacaccggcagccccgacagcctgagaagcagagcccccatgatcacccccgacctggagagcggcgtgaaggtgtggcacctggtgaagaaccacgaccacggcgaccagaaggagggcgacagaggcagcaagatggtgagcgagatctacctgaccagactgctggccaccaagggcaccctgcagaagttcgtggacgacctgttcgagaccctgttcagcaccgtgcacagaggcagcgccctgcccctggccatcaagtacatgttcgacttcctggacgagcaggccgacagacacagcatccacgacaccgacgtgagacacacctggaagagcaactgcctgcccctgagattctgggtgaacgtgatcaagaacccccagttcgtgttcgacatccacaagggcagcatcaccgacgcctgcctgagcgtggtggcccagaccttcatggacagctgcagcaccagcgagcacagactgggcaaggacagccccagcaacaagctgctgtacgccaaggacatccccagctacaagagctgggtggagagatactacgccgacatcgccaagctgcccgccatcagcgaccaggacatgaacgcctacctggccgagcagagcagactgcacgccgtggagttcaacatgctgagcgccctgaacgagatctacagctacgtgagcaagtacagcgaggagctgatcggcgccctggagcaggacgagcaggccagaagacagagactggcctacaaggtggagcagctgatcaacgccatgagcatcgagagctag

SEQ ID NO: 93646 - DNA, 5685 bp, synthetic construct
  misc_feature 1..5685: note = Description of Artificial Sequence: Synthetic coding sequence
  source 1..5685: mol_type = other DNA
atgaaggccatgccctggaactggacctgcctgctgagccacctgctgatggtgggcatgggcagcagcaccctgctgaccagacagcccgcccccctgagccagaagcagagaagcttcgtgaccttcagaggcgagcccgccgagggcttcaaccacctggtggtggacgagagaaccggccacatctacctgggcgccgtgaacagaatctacaagctgagcagcgacctgaaggtgctggtgacccacgagaccggccccgacgaggacaaccccaagtgctacccccccagaatcgtgcagacctgcaacgagcccctgaccaccaccaacaacgtgaacaagatgctgctgatcgactacaaggagaacagactgatcgcctgcggcagcctgtaccagggcatctgcaagctgctgagactggaggacctgttcaagctgggcgagccctaccacaagaaggagcactacctgagcggcgtgaacgagagcggcagcgtgttcggcgtgatcgtgagctacagcaacctggacgacaagctgttcatcgccaccgccgtggacggcaagcccgagtacttccccaccatcagcagcagaaagctgaccaagaacagcgaggccgacggcatgttcgcctacgtgttccacgacgagttcgtggccagcatgatcaagatccccagcgacaccttcaccatcatccccgacttcgacatctactacgtgtacggcttcagcagcggcaacttcgtgtacttcctgaccctgcagcccgagatggtgagcccccccggcagcaccaccaaggagcaggtgtacaccagcaagctggtgagactgtgcaaggaggacaccgccttcaacagctacgtggaggtgcccatcggctgcgagagaagcggcgtggagtacagactgctgcaggccgcctacctgagcaaggccggcgccgtgctgggcagaaccctgggcgtgcaccccgacgacgacctgctgttcaccgtgttcagcaagggccagaagagaaagatgaagagcctggacgagagcgccctgtgcatcttcatcctgaagcagatcaacgacagaatcaaggagagactgcagagctgctacagaggcgagggcaccctggacctggcctggctgaaggtgaaggacatcccctgcagcagcgccctgctgaccatcgacgacaacttctgcggcctggacatgaacgcccccctgggcgtgagcgacatggtgagaggcatccccgtgttcaccgaggacagagacagaatgaccagcgtgatcgcctacgtgtacaagaaccacagcctggccttcgtgggcaccaagagcggcaagctgaagaagatcagagtggacggccccagaggcaacgccctgcagtacgagaccgtgcaggtggtggaccccggccccgtgctgagagacatggccttcagcaaggaccacgagcagctgtacatcatgagcgagagacagctgaccagagtgcccgtggagagctgcggccagtaccagagctgcggcgagtgcctgggcagcggcgacccccactgcggctggtgcgtgctgcacaacacctgcaccagaaaggagagatgcgagagaagcaaggagcccagaagattcgccagcgagatgaagcagtgcgtgagactgaccgtgcaccccaacaacatcagcgtgagccagtacaacgtgctgctggtgctggagacctacaacgtgcccgagctgagcgccggcgtgaactgcaccttcgaggacctgagcgagatggacggcctggtggtgggcaaccagatccagtgctacagccccgccgccaaggaggtgcccagaatcatcaccgagaacggcgaccaccacgtggtgcagctgcagctgaagagcaaggagaccggcatgaccttcgccagcaccagcttcgtgttctacaactgcagcgtgcacaacagctgcctgagctgcgtggagagcccctacagatgccactggtgcaagtacagacacgtgtgcacccacgaccccaagacctgcagcttccaggagggcagagtgaagctgcccgaggactgcccccagctgctgagagtggacaagatcctggtgcccgtggaggtgatcaagcccatcaccctgaaggccaagaacctgccccagccccagagcggccagagaggctacgagtgcatcctgaacatccagggcagcgagcagagagtgcccgccctgagattcaacagcagcagcgtgcagtgccagaacaccagctacagctacgagggcatggagatcaacaacctgcccgtggagctgaccgtggtgtggaacggccacttcaacatcgacaaccccgcccagaacaaggtgcacctgtacaagtgcggcgccatgagagagagctgcggcctgtgcctgaaggccgaccccgacttcgcctgcggctggtgccagggccccggccagtgcaccctgagacagcactgccccgcccaggagagccagtggctggagctgagcggcgccaagagcaagtgcaccaaccccagaatcaccgagatcatccccgtgaccggccccagagagggcggcaccaaggtgaccatcagaggcgagaacctgggcctggagttcagagacatcgccagccacgtgaaggtggccggcgtggagtgcagccccctggtggacggctacatccccgccgagcagatcgtgtgcgagatgggcgaggccaagcccagccagcacgccggcttcgtggagatctgcgtggccgtgtgcagacccgagttcatggccagaagcagccagctgtactacttcatgaccctgaccctgagcgacctgaagcccagcagaggccccatgagcggcggcacccaggtgaccatcaccggcaccaacctgaacgccggcagcaacgtggtggtgatgttcggcaagcagccctgcctgttccacagaagaagccccagctacatcgtgtgcaacaccaccagcagcgacgaggtgctggagatgaaggtgagcgtgcaggtggacagagccaagatccaccaggacctggtgttccagtacgtggaggaccccaccatcgtgagaatcgagcccgagtggagcatcgtgagcggcaacacccccatcgccgtgtggggcacccacctggacctgatccagaacccccagatcagagccaagcacggcggcaaggagcacatcaacatctgcgaggtgctgaacgccaccgagatgacctgccaggcccccgccctggccctgggccccgaccaccagagcgacctgaccgagagacccgaggagttcggcttcatcctggacaacgtgcagagcctgctgatcctgaacaagaccaacttcacctactaccccaaccccgtgttcgaggccttcggccccagcggcatcctggagctgaagcccggcacccccatcatcctgaagggcaagaacctgatcccccccgtggccggcggcaacgtgaagctgaactacaccgtgctggtgggcgagaagccctgcaccgtgaccgtgagcgacgtgcagctgctgtgcgagagccccaacctgatcggcagacacaaggtgatggccagagtgggcggcatggagtacagccccggcatggtgtacatcgcccccgacagccccctgagcctgcccgccatcgtgagcatcgccgtggccggcggcctgctgatcatcttcatcgtggccgtgctgatcgcctacaagagaaagagcagagagagcgacctgaccctgaagagactgcagatgcagatggacaacctggagagcagagtggccctggagtgcaaggaggccttcgccgagctgcagaccgacatccacgagctgaccagcgacctggacggcgccggcatccccttcctggactacagaacctacaccatgagagtgctgttccccggcatcgaggaccaccccgtgctgagagacctggaggtgcccggctacagacaggagagagtggagaagggcctgaagctgttcgcccagctgatcaacaacaaggtgttcctgctgagcttcatcagaaccctggagagccagagaagcttcagcatgagagacagaggcaacgtggccagcctgatcatgaccgtgctgcagagcaagctggagtacgccaccgacgtgctgaagcagctgctggccgacctgatcgacaagaacctggagagcaagaaccaccccaagctgctgctgagaagaaccgagagcgtggccgagaagatgctgaccaactggttcaccttcctgctgtacaagttcctgaaggagtgcgccggcgagcccctgttcagcctgttctgcgccatcaagcagcagatggagaagggccccatcgacgccatcaccggcgaggccagatacagcctgagcgaggacaagctgatcagacagcagatcgactacaagaccctggtgctgagctgcgtgagccccgacaacgccaacagccccgaggtgcccgtgaagatcctgaactgcgacaccatcacccaggtgaaggagaagatcctggacgccatcttcaagaacgtgccctgcagccacagacccaaggccgccgacatggacctggagtggagacagggcagcggcgccagaatgatcctgcaggacgaggacatcaccaccaagatcgagaacgactggaagagactgaacaccctggcccactaccaggtgcccgacggcagcgtggtggccctggtgagcaagcaggtgaccgcctacaacgccgtgaacaacagcaccgtgagcagaaccagcgccagcaagtacgagaacatgatcagatacaccggcagccccgacagcctgagaagcagaacccccatgatcacccccgacctggagagcggcgtgaagatgtggcacctggtgaagaaccacgagcacggcgaccagaaggagggcgacagaggcagcaagatggtgagcgagatctacctgaccagactgctggccaccaagggcaccctgcagaagttcgtggacgacctgttcgagaccatcttcagcaccgcccacagaggcagcgccctgcccctggccatcaagtacatgttcgacttcctggacgagcaggccgacaagcacggcatccacgacccccacgtgagacacacctggaagagcaactgcctgcccctgagattctgggtgaacatgatcaagaacccccagttcgtgttcgacatccacaagaacagcatcaccgacgcctgcctgagcgtggtggcccagaccttcatggacagctgcagcaccagcgagcacagactgggcaaggacagccccagcaacaagctgctgtacgccaaggacatccccagctacaagaactgggtggagagatactacagcgacatcggcaagatgcccgccatcagcgaccaggacatgaacgcctacctggccgagcagagcagaatgcacatgaacgagttcaacaccatgagcgccctgagcgagatcttcagctacgtgggcaagtacagcgaggagatcctgggccccctggaccacgacgaccagtgcggcaagcagaagctggcctacaagctggagcaggtgatcaccctgatgagcctggacagctag

SEQ ID NO: 93647 - DNA, 5685 bp, synthetic construct; identical to SEQ ID NO: 93646
  misc_feature 1..5685: note = Description of Artificial Sequence: Synthetic coding sequence
  source 1..5685: mol_type = other DNA

SEQ ID NO: 93648 - DNA, 1569 bp, synthetic construct
  misc_feature 1..1569: note = Description of Artificial Sequence: Synthetic coding sequence
  source 1..1569: mol_type = other DNA
atgaaggccatgccctggaactggacctgcctgctgagccacctgctgatggtgggcatgggcagcagcaccctgctgaccagacagcccgcccccctgagccagaagcagagaagcttcgtgaccttcagaggcgagcccgccgagggcttcaaccacctggtggtggacgagagaaccggccacatctacctgggcgccgtgaacagaatctacaagctgagcagcgacctgaaggtgctggtgacccacgagaccggccccgacgaggacaaccccaagtgctacccccccagaatcgtgcagacctgcaacgagcccctgaccaccaccaacaacgtgaacaagatgctgctgatcgactacaaggagaacagactgatcgcctgcggcagcctgtaccagggcatctgcaagctgctgagactggaggacctgttcaagctgggcgagccctaccacaagaaggagcactacctgagcggcgtgaacgagagcggcagcgtgttcggcgtgatcgtgagctacagcaacctggacgacaagctgttcatcgccaccgccgtggacggcaagcccgagtacttccccaccatcagcagcagaaagctgaccaagaacagcgaggccgacggcatgttcgcctacgtgttccacgacgagttcgtggccagcatgatcaagatccccagcgacaccttcaccatcatccccgacttcgacatctactacgtgtacggcttcagcagcggcaacttcgtgtacttcctgaccctgcagcccgagatggtgagcccccccggcagcaccaccaaggagcaggtgtacaccagcaagctggtgagactgtgcaaggaggacaccgccttcaacagctacgtggaggtgcccatcggctgcgagagaagcggcgtggagtacagactgctgcaggccgcctacctgagcaaggccggcgccgtgctgggcagaaccctgggcgtgcaccccgacgacgacctgctgttcaccgtgttcagcaagggccagaagagaaagatgaagagcctggacgagagcgccctgtgcatcttcatcctgaagcagatcaacgacagaatcaaggagagactgcagagctgctacagaggcgagggcaccctggacctggcctggctgaaggtgaaggacatcccctgcagcagcgccctgctgaccatcgacgacaacttctgcggcctggacatgaacgcccccctgggcgtgagcgacatggtgagaggcatccccgtgttcaccgaggacagagacagaatgaccagcgtgatcgcctacgtgtacaagaaccacagcctggccttcgtgggcaccaagagcggcaagctgaagaagagcttcggcaccggcccccagggcggcatcacccaggagtggatcggcgtggagggcgacccccccggcgccaacatcgccagccaggagcagatgctgtgcgtgtacctgcagtgcagcagccacaaggccatcagcgaccagagagtgcagcccctgctgtgctgcttcctgaacgtgcccggcaacagcagctag

SEQ ID NO: 93649 - DNA, 1479 bp, synthetic construct
  misc_feature 1..1479: note = Description of Artificial Sequence: Synthetic coding sequence
  source 1..1479: mol_type = other DNA
atgaaggccatgccctggaactggacctgcctgctgagccacctgctgatggtgggcatgggcagcagcaccctgctgaccagacagcccgcccccctgagccagaagcagagaagcttcgtgaccttcagaggcgagcccgccgagggcttcaaccacctggtggtggacgagagaaccggccacatctacctgggcgccgtgaacagaatctacaagctgagcagcgacctgaaggtgctggtgacccacgagaccggccccgacgaggacaaccccaagtgctacccccccagaatcgtgcagacctgcaacgagcccctgaccaccaccaacaacgtgaacaagatgctgctgatcgactacaaggagaacagactgatcgcctgcggcagcctgtaccagggcatctgcaagctgctgagactggaggacctgttcaagctgggcgagccctaccacaagaaggagcactacctgagcggcgtgaacgagagcggcagcgtgttcggcgtgatcgtgagctacagcaacctggacgacaagctgttcatcgccaccgccgtggacggcaagcccgagtacttccccaccatcagcagcagaaagctgaccaagaacagcgaggccgacggcatgttcgcctacgtgttccacgacgagttcgtggccagcatgatcaagatccccagcgacaccttcaccatcatccccgacttcgacatctactacgtgtacggcttcagcagcggcaacttcgtgtacttcctgaccctgcagcccgagatggtgagcccccccggcagcaccaccaaggagcaggtgtacaccagcaagctggtgagactgtgcaaggaggacaccgccttcaacagctacgtggaggtgcccatcggctgcgagagaagcggcgtggagtacagactgctgcaggccgcctacctgagcaaggccggcgccgtgctgggcagaaccctgggcgtgcaccccgacgacgacctgctgttcaccgtgttcagcaagggccagaagagaaagatgaagagcctggacgagagcgccctgtgcatcttcatcctgaagcagatcaacgacagaatcaaggagagactgcagagctgctacagaggcgagggcaccctggacctggcctggctgaaggtgaaggacatcccctgcagcagcgccctgctgaccatcgacgacaacttctgcggcctggacatgaacgcccccctgggcgtgagcgacatggtgagaggcatccccgtgttcaccgaggacagagacagaatgaccagcgtgatcgcctacgtgtacaagaaccacagcctggccttcgtgggcaccaagagcggcaagctgaagaagatgcccggcaccagcctgtgccccaccctggagctgcagaccggccccagaagccacagagccaccgtgaccctggagctgctgttcagcagctgcagcagcaactag

SEQ ID NO: 93650 - DNA, 5517 bp, synthetic construct
  misc_feature 1..5517: note = Description of Artificial Sequence: Synthetic coding sequence
  source 1..5517: mol_type = other DNA
atggccctgcagctgtgggccctgaccctgctgggcctgctgggcgccggcgccagcctgagacccagaaagctggacttcttcagaagcgagaaggagctgaaccacctggccgtggacgaggccagcggcgtggtgtacctgggcgccgtgaacgccctgtaccagctggacgccaagctgcagctggagcagcaggtggccaccggccccgccctggacaacaagaagtgcaccccccccatcgaggccagccagtgccacgaggccgagatgaccgacaacgtgaaccagctgctgctgctggacccccccagaaagagactggtggagtgcggcagcctgttcaagggcatctgcgccctgagagccctgagcaacatcagcctgagactgttctacgaggacggcagcggcgagaagagcttcgtggccagcaacgacgagggcgtggccaccgtgggcctggtgagcagcaccggccccggcggcgacagagtgctgttcgtgggcaagggcaacggcccccacgacaacggcatcatcgtgagcaccagactgctggacagaaccgacagcagagaggccttcgaggcctacaccgaccacgccacctacaaggccggctacctgagcaccaacacccagcagttcgtggccgccttcgaggacggcccctacgtgttcttcgtgttcaaccagcaggacaagcaccccgccagaaacagaaccctgctggccagaatgtgcagagaggaccccaactactacagctacctggagatggacctgcagtgcagagaccccgacatccacgccgccgccttcggcacctgcctggccgccagcgtggccgcccccggcagcggcagagtgctgtacgccgtgttcagcagagacagcagaagcagcggcggccccggcgccggcctgtgcctgttccccctggacaaggtgcacgccaagatggaggccaacagaaacgcctgctacaccggcaccagagaggccagagacatcttctacaagcccttccacggcgacatccagtgcggcggccacgcccccggcagcagcaagagcttcccctgcggcagcgagcacctgccctaccccctgggcagcagagacggcctgagaggcaccgccgtgctgcagagaggcggcctgaacctgaccgccgtgaccgtggccgccgagaacaaccacaccgtggccttcctgggcaccagcgacggcagaatcctgaaggtgtacctgacccccgacggcaccagcagcgagtacgacagcatcctggtggagatcaacaagagagtgaagagagacctggtgctgagcggcgacctgggcagcctgtacgccatgacccaggacaaggtgttcagactgcccgtgcaggagtgcctgagctaccccacctgcacccagtgcagagacagccaggacccctactgcggctggtgcgtggtggagggcagatgcaccagaaaggccgagtgccccagagccgaggaggccagccactggctgtggagcagaagcaagagctgcgtggccgtgaccagcgcccagccccagaacatgagcagaagagcccagggcgaggtgcagctgaccgtgagccccctgcccgccctgagcgaggaggacgagctgctgtgcctgttcggcgagagccccccccaccccgccagagtggagggcgaggccgtgatctgcaacagccccagcagcatccccgtgaccccccccggccaggaccacgtggccgtgaccatccagctgctgctgagaagaggcaacatcttcctgaccagctaccagtaccccttctacgactgcagacaggccatgagcctggaggagaacctgccctgcatcagctgcgtgagcaacagatggacctgccagtgggacctgagataccacgagtgcagagaggccagccccaaccccgaggacggcatcgtgagagcccacatggaggacagctgcccccagttcctgggccccagccccctggtgatccccatgaaccacgagaccgacgtgaacttccagggcaagaacctggacaccgtgaagggcagcagcctgcacgtgggcagcgacctgctgaagttcatggagcccgtgaccatgcaggagagcggcaccttcgccttcagaacccccaagctgagccacgacgccaacgagaccctgcccctgcacctgtacgtgaagagctacggcaagaacatcgacagcaagctgcacgtgaccctgtacaactgcagcttcggcagaagcgactgcagcctgtgcagagccgccaaccccgactacagatgcgcctggtgcggcggccagagcagatgcgtgtacgaggccctgtgcaacaccaccagcgagtgccccccccccgtgatcaccagaatccagcccgagaccggccccctgggcggcggcatcagaatcaccatcctgggcagcaacctgggcgtgcaggccggcgacatccagagaatcagcgtggccggcagaaactgcagcttccagcccgagagatacagcgtgagcaccagaatcgtgtgcgtgatcgaggccgccgagacccccttcaccggcggcgtggaggtggacgtgttcggcaagctgggcagaagcccccccaacgtgcagttcaccttccagcagcccaagcccctgagcgtggagccccagcagggcccccaggccggcggcaccaccctgaccatccacggcacccacctggacaccggcagccaggaggacgtgagagtgaccctgaacggcgtgccctgcaaggtgaccaagttcggcgcccagctgcagtgcgtgaccggcccccaggccaccagaggccagatgctgctggaggtgagctacggcggcagccccgtgcccaaccccggcatcttcttcacctacagagagaaccccgtgctgagagccttcgagcccctgagaagcttcgccagcggcggcagaagcatcaacgtgaccggccagggcttcagcctgatccagagattcgccatggtggtgatcgccgagcccctgcagagctggcagccccccagagaggccgagagcctgcagcccatgaccgtggtgggcaccgactacgtgttccacaacgacaccaaggtggtgttcctgagccccgccgtgcccgaggagcccgaggcctacaacctgaccgtgctgatcgagatggacggccacagagccctgctgagaaccgaggccggcgccttcgagtacgtgcccgaccccaccttcgagaacttcaccggcggcgtgaagaagcaggtgaacaagctgatccacgccagaggcaccaacctgaacaaggccatgaccctgcaggaggccgaggccttcgtgggcgccgagagatgcaccatgaagaccctgaccgagaccgacctgtactgcgagccccccgaggtgcagcccccccccaagagaagacagaagagagacaccacccacaacctgcccgagttcatcgtgaagttcggcagcagagagtgggtgctgggcagagtggagtacgacaccagagtgagcgacgtgcccctgagcctgatcctgcccctggtgatcgtgcccatggtggtggtgatcgccgtgagcgtgtactgctactggagaaagagccagcaggccgagagagagtacgagaagatcaagagccagctggagggcctggaggagagcgtgagagacagatgcaagaaggagttcaccgacctgatgatcgagatggaggaccagaccaacgacgtgcacgaggccggcatccccgtgctggactacaagacctacaccgacagagtgttcttcctgcccagcaaggacggcgacaaggacgtgatgatcaccggcaagctggacatccccgagcccagaagacccgtggtggagcaggccctgtaccagttcagcaacctgctgaacagcaagagcttcctgatcaacttcatccacaccctggagaaccagagagagttcagcgccagagccaaggtgtacttcgccagcctgctgaccgtggccctgcacggcaagctggagtactacaccgacatcatgcacaccctgttcctggagctgctggagcagtacgtggtggccaagaaccccaagctgatgctgagaagaagcgagaccgtggtggagagaatgctgagcaactggatgagcatctgcctgtaccagtacctgaaggacagcgccggcgagcccctgtacaagctgttcaaggccatcaagcaccaggtggagaagggccccgtggacgccgtgcagaagaaggccaagtacaccctgaacgacaccggcctgctgggcgacgacgtggagtacgcccccctgaccgtgagcgtgatcgtgcaggacgagggcgtggacgccatccccgtgaaggtgctgaactgcgacaccatcagccaggtgaaggagaagatcatcgaccaggtgtacagaggccagccctgcagctgctggcccagacccgacagcgtggtgctggagtggagacccggcagcaccgcccagatcctgagcgacctggacctgaccagccagagagagggcagatggaagagagtgaacaccctgatgcactacaacgtgagagacggcgccaccctgatcctgagcaaggtgggcgtgagccagcagcccgaggacagccagcaggacctgcccggcgagagacacgccctgctggaggaggagaacagagtgtggcacctggtgagacccaccgacgaggtggacgagggcaagagcaagagaggcagcgtgaaggagaaggagagaaccaaggccatcaccgagatctacctgaccagactgctgagcgtgaagggcaccctgcagcagttcgtggacaacttcttccagagcgtgctggcccccggccacgccgtgccccccgccgtgaagtacttcttcgacttcctggacgagcaggccgagaagcacaacatccaggacgaggacaccatccacatctggaagaccaacagcctgcccctgagattctgggtgaacatcctgaagaacccccacttcatcttcgacgtgcacgtgcacgaggtggtggacgccagcctgagcgtgatcgcccagaccttcatggacgcctgcaccagaaccgagcacaagctgagcagagacagccccagcaacaagctgctgtacgccaaggagatcagcacctacaagaagatggtggaggactactacaagggcatcagacagatggtgcaggtgagcgaccaggacatgaacacccacctggccgagatcagcagagcccacaccgacagcctgaacaccctggtggccctgcaccagctgtaccagtacacccagaagtactacgacgagatcatcaacgccctggaggaggaccccgccgcccagaagatgcagctggccttcagactgcagcagatcgccgccgccctggagaacaaggtgaccgacctgtag

SEQ ID NO: 93651 - DNA, 1044 bp, synthetic construct
  misc_feature 1..1044: note = Description of Artificial Sequence: Synthetic coding sequence
  source 1..1044: mol_type = other DNA
atgcacaccctgttcctggagctgctggagcagtacgtggtggccaagaaccccaagctgatgctgagaagaagcgagaccgtggtggagagaatgctgagcaactggatgagcatctgcctgtaccagtacctgaaggacagcgccggcgagcccctgtacaagctgttcaaggccatcaagcaccaggtggagaagggccccgtggacgccgtgcagaagaaggccaagtacaccctgaacgacaccggcctgctgggcgacgacgtggagtacgcccccctgaccgtgagcgtgatcgtgcaggacgagggcgtggacgccatccccgtgaaggtgctgaactgcgacaccatcagccaggtgaaggagaagatcatcgaccaggtgtacagaggccagccctgcagctgcggccccggccagaccgcctggagctggagcggcgtgagagccccccagagaagaagcgtgggccccggccccgacgtgaccgccggcggccccgtggaggccagacagcacccctacgccctgcagtgccccggctggagccacccccaccccgtgcagggcggcggcctgcccgccgccggcggccagcccgccggccccgcctggagcgccatgccccccggcggcggcgagcccggcgtggcccccggcgccgccgacagaagaggcggcagaggccaggtgcaggagagacagagagagagagagggcgccgacgagggccaccacagagacctgcccgacgccgccgccctgagccagggccacaccgccgccgtgtgcggccagctgctgcccgagagagccggcgcctggcacgccgtgccccccgccgtgaagtacttcttcgacttcctggacgagcaggccgagaagcacaacatccaggacgaggacaccatccacatctggaagaccaacagcctgcccctgagattctgggtgaacatcctgaagaacccccacttcatcttcgacgtgcacgtgaccagatggtggacccccagatgccagagcagcagaagatag

SEQ ID NO: 93652 - DNA, 483 bp, synthetic construct
  misc_feature 1..483: note = Description of Artificial Sequence: Synthetic coding sequence
  source 1..483: mol_type = other DNA
ggccccgacgtgaccgccggcggccccgtggaggccagacagcacccctacgccctgcagtgccccggctggagccacccccaccccgtgcagggcggcggcctgcccgccgccggcggccagcccgccggccccgcctggggcgccccctgcccccccggcggcggcgagcccggcgtggcccccggcgccgccgacagaagaggcggcagaggccaggtgcaggagagacagagagagagagagggcgccgacgagggccaccacagagacctgcccgacgccgccgccctgagccagggccacaccgccgccgtgtgcggccagctgctgcccgagagagccggcctgggcaccagatgccacctgcagagcagcaccagcagcaccagctggaccagcagacagagaagcaccaccagcagaatgaagacccccagcaccagcggcagaagaaccgcctacagaagcggcagcggctag

SEQ ID NO: 93653 - DNA, 1569 bp, synthetic construct
  misc_feature 1..1569: note = Description of Artificial Sequence: Synthetic coding sequence
  source 1..1569: mol_type = other DNA
atggccctgcagctgtgggccctgaccctgctgggcctgctgggcgccggcgccagcctgagacccagaaagctggacttcttcagaagcgagaaggagctgaaccacctggccgtggacgaggccagcggcgtggtgtacctgggcgccgtgaacgccctgtaccagctggacgccaagctgcagctggagcagcaggtggccaccggccccgccctggacaacaagaagtgcaccccccccatcgaggccagccagtgccacgaggccgagatgaccgacaacgtgaaccagctgctgctgctggacccccccagaaagagactggtggagtgcggcagcctgttcaagggcatctgcgccctgagagccctgagcaacatcagcctgagactgttctacgaggacggcagcggcgagaagagcttcgtggccagcaacgacgagggcgtggccaccgtgggcctggtgagcagcaccggccccggcggcgacagagtgctgttcgtgggcaagggcaacggcccccacgacaacggcatcatcgtgagcaccagactgctggacagaaccgacagcagagaggccttcgaggcctacaccgaccacgccacctacaaggccggctacctgagcaccaacacccagcagttcgtggccgccttcgaggacggcccctacgtgttcttcgtgttcaaccagcaggacaagcaccccgccagaaacagaaccctgctggccagaatgtgcagagaggaccccaactactacagctacctggagatggacctgcagtgcagagaccccgacatccacgccgccgccttcggcacctgcctggccgccagcgtggccgcccccggcagcggcagagtgctgtacgccgtgttcagcagagacagcagaagcagcggcggccccggcgccggcctgtgcctgttccccctggacaaggtgcacgccaagatggaggccaacagaaacgcctgctacaccggcaccagagaggccagagacatcttctacaagcccttccacggcgacatccagtgcggcggccacgcccccggcagcagcaagagcttcccctgcggcagcgagcacctgccctaccccctgggcagcagagacggcctgagaggcaccgccgtgctgcagagaggcggcctgaacctgaccgccgtgaccgtggccgccgagaacaaccacaccgtggccttcctgggcaccagcgacggcagaatcctgaaggtgtacctgacccccgacggcaccagcagcgagtacgacagcatcctggtggagatcaacaagagagtgaagagagacctggtgctgagcggcgacctgggcagcctgtacgccatgacccaggacaaggtgttcagactgcccgtgcaggagtgcctgagctaccccacctgcacccagctgccccccgccgccgagcccgccagcggcgtgcactgcagagtgagcagcgacctgaagatgtgcctgaccctgcccagatggggccagctggccagcgccagcgcccacgcccccgccgccgccagcatgccctag

SEQ ID NO: 93654 - DNA, 489 bp, synthetic construct
  misc_feature 1..489: note = Description of Artificial Sequence: Synthetic coding sequence
  source 1..489: mol_type = other DNA
atggccctgcagctgtgggccctgaccctgctgggcctgctgggcgccggcgccagcctgagacccagaaagctggacttcttcagaagcgagaaggagctgaaccacctggccgtggacgaggccagcggcgtggtgtacctgggcgccgtgaacgccctgtaccagctggacgccaagctgcagctggagcagcaggtggccaccggccccgccctggacaacaagaagtgcaccccccccatcgaggccagccagtgccacgaggccgagatgaccgacaacgtgaaccagctgctgctgctggacccccccagaaagagactggtggagtgcggcagcctgttcaagggcatctgcgccctgagagccctgagcaacatcagcctgagactgttctacgaggacggcagcggcgagaagagcttcgtggccagcaacgacgagggcgtggccaccgtgggcctggtgagcagcaccggcccctag

SEQ ID NO: 93655 - DNA, 1434 bp, synthetic construct
  misc_feature 1..1434: note = Description of Artificial Sequence: Synthetic coding sequence
  source 1..1434: mol_type = other DNA
atggccctgcagctgtgggccctgaccctgctgggcctgctgggcgccggcgccagcctgagacccagaaagctggacttcttcagaagcgagaaggagctgaaccacctggccgtggacgaggccagcggcgtggtgtacctgggcgccgtgaacgccctgtaccagctggacgccaagctgcagctggagcagcaggtggccaccggccccgccctggacaacaagaagtgcaccccccccatcgaggccagccagtgccacgaggccgagatgaccgacaacgtgaaccagctgctgctgctggacccccccagaaagagactggtggagtgcggcagcctgttcaagggcatctgcgccctgagagccctgagcaacatcagcctgagactgttctacgaggacggcagcggcgagaagagcttcgtggccagcaacgacgagggcgtggccaccgtgggcctggtgagcagcaccggccccggcggcgacagagtgctgttcgtgggcaagggcaacggcccccacgacaacggcatcatcgtgagcaccagactgctggacagaaccgacagcagagaggccttcgaggcctacaccgaccacgccacctacaaggccggctacctgagcaccaacacccagcagttcgtggccgccttcgaggacggcccctacgtgttcttcgtgttcaaccagcaggacaagcaccccgccagaaacagaaccctgctggccagaatgtgcagagaggaccccaactactacagctacctggagatggacctgcagtgcagagaccccgacatccacgccgccgccttcggcacctgcctggccgccagcgtggccgcccccggcagcggcagagtgctgtacgccgtgttcagcagagacagcagaagcagcggcggccccggcgccggcctgtgcctgttccccctggacaaggtgcacgccaagatggaggccaacagaaacgcctgctacaccggcaccagagaggccagagacatcttctacaagcccttccacggcgacatccagtgcggcggccacgcccccggcagcagcaagagcttcccctgcggcagcgagcacctgccctaccccctgggcagcagagacggcctgagaggcaccgccgtgctgcagagaggcggcctgaacctgaccgccgtgaccgtggccgccgagaacaaccacaccgtggccttcctgggcaccagcgacggcagaatcctgaaggtgtacctgacccccgacggcaccagcagcgagtacgacagcatcctggtggagatcaacaagagagtgaagagagacctggtgctgagcggcgacctgggcagcctgtacgccatgacccaggacaaggtgttcagactgcccgtgcaggagtgcctgagctaccccacctgcacccagtag

SEQ ID NO: 93656 - DNA, 5517 bp, synthetic construct; identical to SEQ ID NO: 93650
  misc_feature 1..5517: note = Description of Artificial Sequence: Synthetic coding sequence
  source 1..5517: mol_type = other DNA

SEQ ID NO: 93657 - DNA, 5730 bp, synthetic construct
  misc_feature 1..5730: note = Description of Artificial Sequence: Synthetic coding sequence
  source 1..5730: mol_type = other DNA
atgtgccacgccgcccaggagacccccctgctgcaccacttcatggcccccgtgatggccagatggccccccttcggcctgtgcctgctgctgctgctgctgagccccccccccctgcccctgaccggcgcccacagattcagcgcccccaacaccaccctgaaccacctggccctggcccccggcagaggcaccctgtacgtgggcgccgtgaacagactgttccagctgagccccgagctgcagctggaggccgtggccgtgaccggccccgtgatcgacagccccgactgcgtgcccttcagagaccccgccgagtgcccccaggcccagctgaccgacaacgccaaccagctgctgctggtgagcagcagagcccaggagctggtggcctgcggccaggtgagacagggcgtgtgcgagaccagaagactgggcgacgtggccgaggtgctgtaccaggccgaggaccccggcgacggccagttcgtggccgccaacacccccggcgtggccaccgtgggcctggtggtgcccctgcccggcagagacctgctgctggtggccagaggcctggccggcaagctgagcgccggcgtgccccccctggccatcagacagctggccggcagccagcccttcagcagcgagggcctgggcagactggtggtgggcgacttcagcgactacaacaacagctacgtgggcgccttcgccgacgccagaagcgcctacttcgtgttcagaagaagaggcgccagagcccaggccgagtacagaagctacgtggccagagtgtgcctgggcgacaccaacctgtacagctacgtggaggtgcccctggcctgccagggccagggcctgatccaggccgccttcctggcccccggcaccctgctgggcgtgttcgccgccggccccagaggcacccaggccgccctgtgcgccttccccatggtggagctgggcgccagcatggagcaggccagaagactgtgctacaccgccggcggcagaggccccagcggcgccgaggaggccaccgtggagtacggcgtgaccagcagatgcgtgaccctgcccctggacagccccgagagctacccctgcggcgacgagcacacccccagccccatcgccggcagacagcccctggaggtgcagcccctgctgaagctgggccagcccgtgagcgccgtggccgccctgcaggccgacggccacatgatcgccttcctgggcgacacccagggccagctgtacaaggtgttcctgcacggcagccagggccaggtgtaccacagccagcaggtgggcccccccggcagcgccatcagccccgacctgctgctggacagcagcggcagccacctgtacgtgctgaccgcccaccaggtggacagaatccccgtggccgcctgcccccagttccccgactgcgccagctgcctgcaggcccaggaccccctgtgcggctggtgcgtgctgcagggcagatgcaccagaaagggccagtgcggcagagccggccagctgaaccagtggctgtggagctacgaggaggacagccactgcctgcacatccagagcctgctgcccggccaccaccccagacaggagcagggccaggtgaccctgagcgtgcccagactgcccatcctggacgccgacgagtacttccactgcgccttcggcgactacgacagcctggcccacgtggagggcccccacgtggcctgcgtgacccccccccaggaccaggtgcccctgaacccccccggcaccgaccacgtgaccgtgcccctggccctgatgttcgaggacgtgaccgtggccgccaccaacttcagcttctacgactgcagcgccgtgcaggccctggaggccgccgccccctgcagagcctgcgtgggcagcatctggagatgccactggtgcccccagagcagccactgcgtgtacggcgagcactgccccgagggcgagagaaccatctacagcgcccaggaggtggacatccaggtgagaggccccggcgcctgcccccaggtggagggcctggccggcccccacctggtgcccgtgggctgggagagccacctggccctgagagtgagaaacctgcagcacttcagaggcctgcccgccagcttccactgctggctggagctgcccggcgagctgagaggcctgcccgccaccctggaggagaccgccggcgacagcggcctgatccactgccaggcccaccagttctaccccagcatgagccagagagagctgcccgtgcccatctacgtgacccagggcgaggcccagagactggacaacacccacgccctgtacgtgatcctgtacgactgcgccatgggccaccccgactgcagccactgccaggccgccaacagaagcctgggctgcctgtggtgcgccgacggccagcccgcctgcagatacggccccctgtgcccccccggcgccgtggagctgctgtgccccgcccccagcatcgacgccgtggagcccctgaccggcccccccgagggcggcctggccctgaccatcctgggcagcaacctgggcagagccttcgccgacgtgcagtacgccgtgagcgtggccagcagaccctgcaaccccgagcccagcctgtacagaaccagcgccagaatcgtgtgcgtgaccagccccgcccccaacggcaccaccggccccgtgagagtggccatcaagagccagccccccggcatcagcagccagcacttcacctaccaggaccccgtgctgctgagcctgagccccagatggggcccccaggccggcggcacccagctgaccatcagaggccagcacctgcagaccggcggcaacaccagcgccttcgtgggcggccagccctgccccatcctggagcccgtgtgccccgaggccatcgtgtgcagaaccagaccccaggccgcccccggcgaggccgccgtgctggtggtgttcggccacgcccagagaaccctgctggccagccccttcagatacaccgccaacccccagctggtggccgccgagcccagcgccagcttcagaggcggcggcagactgatcagagtgagaggcaccggcctggacgtggtgcagagacccctgctgagcgtgtggctggaggccgacgccgaggtgcaggccagcagagcccagccccaggacccccagcccagaagaagctgcggcgcccccgccgccgacccccaggcctgcatccagctgggcggcggcctgctgcagtgcagcaccgtgtgcagcgtgaacagcagcagcctgctgctgtgcagaagccccgccgtgcccgacagagcccacccccagagagtgttcttcaccctggacaacgtgcaggtggacttcgccagcgccagcggcggccagggcttcctgtaccagcccaaccccagactggcccccctgagcagagagggccccgccagaccctacagactgaagcccggccacgtgctggacgtggagggcgagggcctgaacctgggcatcagcaaggaggaggtgagagtgcacatcggcagaggcgagtgcctggtgaagaccctgaccagaacccacctgtactgcgagccccccgcccacgccccccagcccgccaacggcagcggcctgccccagttcgtggtgcagatgggcaacgtgcagctggccctgggccccgtgcagtacgaggccgagccccccctgagcgccttccccgtggaggcccaggccggcgtgggcatgggcgccgccgtgctgatcgccgccgtgctgctgctgaccctgatgtacagacacaagagcaagcaggccctgagagactaccagaaggtgctggtgcagctggagagcctggagaccggcgtgggcgaccagtgcagaaaggagttcaccgacctgatgaccgagatgaccgacctgagcagcgacctggagggcagcggcatccccttcctggactacagaacctacgccgagagagccttcttccccggccacggcggctgccccctgcagcccaagcccgagggccccggcgaggacggccactgcgccaccgtgagacagggcctgacccagctgagcaacctgctgaacagcaagctgttcctgctgaccctgatccacaccctggaggagcagcccagcttcagccagagagacagatgccacgtggccagcctgctgagcctggccctgcacggcaagctggagtacctgaccgacatcatgagaaccctgctgggcgacctggccgcccactacgtgcacagaaaccccaagctgatgctgagaagaaccgagaccatggtggagaagctgctgaccaactggctgagcatctgcctgtacgccttcctgagagaggtggccggcgagcccctgtacatgctgttcagagccatccagtaccaggtggacaagggccccgtggacgccgtgaccggcaaggccaagagaaccctgaacgacagcagactgctgagagaggacgtggagttccagcccctgaccctgatggtgctggtgggccccggcgccggcggcgccgccggcagcagcgagatgcagagagtgcccgccagagtgctggacaccgacaccatcacccaggtgaaggagaaggtgctggaccaggtgtacaagggcacccccttcagccagagacccagcgtgcacgccctggacctggagtggagaagcggcctggccggccacctgaccctgagcgacgaggacctgaccagcgtgacccagaaccactggaagagactgaacaccctgcagcactacaaggtgcccgacggcgccaccgtgggcctggtgccccagctgcacagaggcagcaccatcagccagagcctggcccagagatgccccctgggcgagaacatccccaccctggaggacggcgaggagggcggcgtgtgcctgtggcacctggtgaaggccaccgaggagcccgagggcgccaaggtgagatgcagcagcctgagagagagagagcccgccagagccaaggccatccccgagatctacctgaccagactgctgagcatgaagggcaccctgcagaagttcgtggacgacaccttccaggccatcctgagcgtgaacagacccatccccatcgccgtgaagtacctgttcgacctgctggacgagctggccgagaagcacggcatcgaggaccccggcaccctgcacatctggaagaccaacagcctgctgctgagattctgggtgaacgccctgaagaacccccagctgatcttcgacgtgagagtgagcgacaacgtggacgccatcctggccgtgatcgcccagaccttcatcgacagctgcaccaccagcgagcacaaggtgggcagagacagccccgtgaacaagctgctgtacgccagagagatccccagatacaagcagatggtggagagatactacgccgacatcagacagagcagccccgccagctaccaggagatgaacagcgccctggccgagctgagcggcaactacaccagcgccccccactgcctggaggccctgcaggagctgtacaaccacatccacagatactacgaccagatcatcagcgccctggaggaggaccccgtgggccagaagctgcagctggcctgcagactgcagcaggtggccgccctggtggagaacaaggtgaccgacctgtag

SEQ ID NO: 93658 - DNA, 777 bp, synthetic construct
  misc_feature 1..777: note = Description of Artificial Sequence: Synthetic coding sequence
  source 1..777: mol_type = other DNA
tgaagcctggagaccggcgtgggcgaccagtgcagaaaggagttcaccgacctgatgaccgagatgaccgacctgagcagcgacctggagggcagcggcatccccttcctggactacagaacctacgccgagagagccttcttccccggccacggcggctgccccctgcagcccaagcccgagggccccggcgaggacggccactgcgccaccgtgagacagggcctgacccagctgagcaacctgctgaacagcaagctgttcctgctgaccctgatccacaccctggaggagcagcccagcttcagccagagagacagatgccacgtggccagcctgctgagcctggccctgcacggcaagctggagtacctgaccgacatcatgagaaccctgctgggcgacctggccgcccactacgtgcacagaaaccccaagctgatgctgagaagaaccgagaccatggtggagaagctgctgaccaactggctgagcatctgcctgtacgccttcctgagagaggtggccggcgagcccctgtacatgctgttcagagccatccagtaccaggtggacaagggccccgtggacgccgtgaccgagtggagaagcggcctggccggccacctgaccctgagcgacgaggacctgaccagcgtgacccagaaccactggaagagactgaacaccctgcagcactacaaggtgcccgacggcgccaccgtgggcctggtgccccagctgcacagaggcagcaccatcagccagagcctgtag

SEQ ID NO: 93659 - DNA, 531 bp, synthetic construct
  misc_feature 1..531: note = Description of Artificial Sequence: Synthetic coding sequence
  source 1..531: mol_type = other DNA
tgagccagccagggcaccctgcagaagttcgtggacgacaccttccaggccatcctgagcgtgaacagacccatccccatcgccgtgaagtacctgttcgacctgctggacgagctggccgagaagcacggcatcgaggaccccggcaccctgcacatctggaagaccaacagcctgctgctgagattctgggtgaacgccctgaagaacccccagctgatcttcgacgtgagagtgagcgacaacgtggacgccatcctggccgtgatcgcccagaccttcatcgacagctgcaccaccagcgagcacaaggtgggcagagtgagagccgtgcccgccgccgccgccggcagaggcctgagaagaaagggcctgtggggcaagcccagaggcctgtgcaccgagctgtgggtgggcagcggcagcatcatgggcgcccccagcccccccagcagctgcctggccccccccctgccccccgagcaggacagccccgtgaacaagctgctgtacgccagagagatcccctag

SEQ ID NO: 93660 - DNA, 492 bp, synthetic construct
  misc_feature 1..492: note = Description of Artificial Sequence: Synthetic coding sequence
  source 1..492: mol_type = other DNA
tgaaagagaaccctgaacgacagcagactgctgagagaggacgtggagttccagcccctgaccctgatggtgctggtgggccccggcgccggcggcgccgccggcagcagcgagatgcagagagtgcccgccagagtgctggacaccgacaccatcacccaggtgaaggagaaggtgctggaccaggtgtacaagggcacccccttcagccagagacccagcgtgcacgccctggacctggagtggagaagcggcctggccggccacctgaccctgagcgacgaggacctgaccagcgtgacccagaaccactggaagagactgaacaccctgcagcactacaaggtgcccgacggcgccaccgtgggcctggtgccccagctgcacagaggcagcaccatcagccagagcctggcccagagatgccccctgggcgagagcgagagcctgggccccgacctgggccccctggagagcagactgggcagatag

SEQ ID NO: 93661 - DNA, 2967 bp, synthetic construct
  misc_feature 1..2967: note = Description of Artificial Sequence: Synthetic coding sequence
  source 1..2967: mol_type = other DNA
atgtgccacgccgcccaggagacccccctgctgcaccacttcatggacagccccgagagctacccctgcggcgacgagcacacccccagccccatcgccggcagacagcccctggaggtgcagcccctgctgaagctgggccagcccgtgagcgccgtggccgccctgcaggccgacggccacatgatcgccttcctgggcgacacccagggccagctgtacaaggtggacagaatccccgtggccgcctgcccccagttccccgactgcgccagctgcctgcaggcccaggaccccctgtgcggctggtgcgtgctgcagggcagatgcaccagaaagggccagtgcggcagagccggccagctgaaccagtggctgtggagctacgaggaggacagccactgcctgcacatccagagcctgctgcccggccaccaccccagacaggagcagggccaggtgaccctgagcgtgcccagactgcccatcctggacgccgacgagtacttccactgcgccttcggcgactacgacagcctggcccacgtggagggcccccacgtggcctgcgtgacccccccccaggaccaggtgcccctgaacccccccggcaccgaccacgtgaccgtgcccctggccctgatgttcgaggacgtgaccgtggccgccaccaacttcagcttctacgactgcagcgccgtgcaggccctggaggccgccgccccctgcagagcctgcgtgggcagcatctggagatgccactggtgcccccagagcagccactgcgtgtacggcgagcactgccccgagggcgagagaaccatctacagcgcccaggaggtggacatccaggtgagaggccccggcgcctgcccccaggtggagggcctggccggcccccacctggtgcccgtgggctgggagagccacctggccctgagagtgagaaacctgcagcacttcagaggcctgcccgccagcttccactgctggctggagctgcccggcgagctgagaggcctgcccgccaccctggaggagaccgccggcgacagcggcctgatccactgccaggcccaccagttctaccccagcatgagccagagagagctgcccgtgcccatctacgtgacccagggcgaggcccagagactggacaacacccacgccctgtacgtgatcctgtacgactgcgccatgggccaccccgactgcagccactgccaggccgccaacagaagcctgggctgcctgtggtgcgccgacggccagcccgcctgcagatacggccccctgtgcccccccggcgccgtggagctgctgtgccccgcccccagcatcgacgccgtggagcccctgaccggcccccccgagggcggcctggccctgaccatcctgggcagcaacctgggcagagccttcgccgacgtgcagtacgccgtgagcgtggccagcagaccctgcaaccccgagcccagcctgtacagaaccagcgccagaatcgtgtgcgtgaccagccccgcccccaacggcaccaccggccccgtgagagtggccatcaagagccagccccccggcatcagcagccagcacttcacctaccaggaccccgtgctgctgagcctgagccccagatggggcccccaggccggcggcacccagctgaccatcagaggccagcacctgcagaccggcggcaacaccagcgccttcgtgggcggccagccctgccccatcctggagcccgtgtgccccgaggccatcgtgtgcagaaccagaccccaggccgcccccggcgaggccgccgtgctggtggtgttcggccacgcccagagaaccctgctggccagccccttcagatacaccgccaacccccagctggtggccgccgagcccagcgccagcttcagaggcggcggcagactgatcagagtgagaggcaccggcctggacgtggtgcagagacccctgctgagcgtgtggctggaggccgacgccgaggtgcaggccagcagagcccagccccaggacccccagcccagaagaagctgcggcgcccccgccgccgacccccaggcctgcatccagctgggcggcggcctgctgcagtgcagcaccgtgtgcagcgtgaacagcagcagcctgctgctgtgcagaagccccgccgtgcccgacagagcccacccccagagagtgttcttcaccctggacaacgtgcaggtggacttcgccagcgccagcggcggccagggcttcctgtaccagcccaaccccagactggcccccctgagcagagagggccccgccagaccctacagactgaagcccggccacgtgctggacgtggagggcgagggcctgaacctgggcatcagcaaggaggaggtgagagtgcacatcggcagaggcgagtgcctggtgaagaccctgaccagaacccacctgtactgcgagccccccgcccacgccccccagcccgccaacggcagcggcctgccccagttcgtggtgcagatgggcaacgtgcagctggccctgggccccgtgcagtacgaggccgagccccccctgagcgccttccccgtggaggcccaggccggcgtgggcatgggcgccgccgtgctgatcgccgccgtgctgctgctgaccctgatgtacagacacaagagcaagcaggccctgagagactaccagaaggtgctggtgcagctggagagcctggagaccggcgtgggcgaccagtgcagaaaggagttcaccggcggctgcggcggcggcggcaccggctaccccagaggcctgaacagccacctgggcgccagctggcccagaagaccccacgacggcgacgacagaccccagcagagacccggcggccagagagaccccctgcccggcctgccccacctgagaagagccagactgctgccctggccctggagactgcccgccgccgcccaggcctag

SEQ ID NO: 93662 - DNA, 675 bp, synthetic construct
  misc_feature 1..675: note = Description of Artificial Sequence: Synthetic coding sequence
  source 1..675: mol_type = other DNA
atgtgccacgccgcccaggagacccccctgctgcaccacttcatggtggacagaatccccgtggccgcctgcccccagttccccgactgcgccagctgcctgcaggcccaggaccccctgtgcggctggtgcgtgctgcagggcagatgcaccagaaagggccagtgcggcagagccggccagctgaaccagtggctgtggagctacgaggaggacagccactgcctgcacatccagagcctgctgcccggccaccaccccagacaggagcagggccaggtgaccctgagcgtgcccagactgcccatcctggacgccgacgagtacttccactgcgccttcggcgactacgacagcctggcccacgtggagggcccccacgtggcctgcgtgacccccccccaggaccaggtgcccctgaacccccccggcaccgaccacgtgaccgtgcccctggccctgatgttcgaggacgtgaccgtggccgccaccaacttcagcttctacgactgcagcgccgtgcaggccctggaggccgccgcccccgcctgcctgccccccagcaccgccggctggagctgcctggagaacttcggcgactgcagacccccctggagaagacagcagggcatccaggccagcagcaccgccagacccaccagaagcagcccctag

SEQ ID NO: 93663 - DNA, 4689 bp, synthetic construct
  misc_feature 1..4689: note = Description of Artificial Sequence: Synthetic coding sequence
  source 1..4689: mol_type = other DNA
atgtgccacgccgcccaggagacccccctgctgcaccacttcatggacagccccgagagctacccctgcggcgacgagcacacccccagccccatcgccggcagacagcccctggaggtgcagcccctgctgaagctgggccagcccgtgagcgccgtggccgccctgcaggccgacggccacatgatcgccttcctgggcgacacccagggccagctgtacaaggtgttcctgcacggcagccagggccaggtgtaccacagccagcaggtgggcccccccggcagcgccatcagccccgacctgctgctggacagcagcggcagccacctgtacgtgctgaccgcccaccaggtggacagaatccccgtggccgcctgcccccagttccccgactgcgccagctgcctgcaggcccaggaccccctgtgcggctggtgcgtgctgcagggcagatgcaccagaaagggccagtgcggcagagccggccagctgaaccagtggctgtggagctacgaggaggacagccactgcctgcacatccagagcctgctgcccggccaccaccccagacaggagcagggccaggtgaccctgagcgtgcccagactgcccatcctggacgccgacgagtacttccactgcgccttcggcgactacgacagcctggcccacgtggagggcccccacgtggcctgcgtgacccccccccaggaccaggtgcccctgaacccccccggcaccgaccacgtgaccgtgcccctggccctgatgttcgaggacgtgaccgtggccgccaccaacttcagcttctacgactgcagcgccgtgcaggccctggaggccgccgccccctgcagagcctgcgtgggcagcatctggagatgccactggtgcccccagagcagccactgcgtgtacggcgagcactgccccgagggcgagagaaccatctacagcgcccaggaggtggacatccaggtgagaggccccggcgcctgcccccaggtggagggcctggccggcccccacctggtgcccgtgggctgggagagccacctggccctgagagtgagaaacctgcagcacttcagaggcctgcccgccagcttccactgctggctggagctgcccggcgagctgagaggcctgcccgccaccctggaggagaccgccggcgacagcggcctgatccactgccaggcccaccagttctaccccagcatgagccagagagagctgcccgtgcccatctacgtgacccagggcgaggcccagagactggacaacacccacgccctgtacgtgatcctgtacgactgcgccatgggccaccccgactgcagccactgccaggccgccaacagaagcctgggctgcctgtggtgcgccgacggccagcccgcctgcagatacggccccctgtgcccccccggcgccgtggagctgctgtgccccgcccccagcatcgacgccgtggagcccctgaccggcccccccgagggcggcctggccctgaccatcctgggcagcaacctgggcagagccttcgccgacgtgcagtacgccgtgagcgtggccagcagaccctgcaaccccgagcccagcctgtacagaaccagcgccagaatcgtgtgcgtgaccagccccgcccccaacggcaccaccggccccgtgagagtggccatcaagagccagccccccggcatcagcagccagcacttcacctaccaggaccccgtgctgctgagcctgagccccagatggggcccccaggccggcggcacccagctgaccatcagaggccagcacctgcagaccggcggcaacaccagcgccttcgtgggcggccagccctgccccatcctggagcccgtgtgccccgaggccatcgtgtgcagaaccagaccccaggccgcccccggcgaggccgccgtgctggtggtgttcggccacgcccagagaaccctgctggccagccccttcagatacaccgccaacccccagctggtggccgccgagcccagcgccagcttcagaggcggcggcagactgatcagagtgagaggcaccggcctggacgtggtgcagagacccctgctgagcgtgtggctggaggccgacgccgaggtgcaggccagcagagcccagccccaggacccccagcccagaagaagctgcggcgcccccgccgccgacccccaggcctgcatccagctgggcggcggcctgctgcagtgcagcaccgtgtgcagcgtgaacagcagcagcctgctgctgtgcagaagccccgccgtgcccgacagagcccacccccagagagtgttcttcaccctggacaacgtgcaggtggacttcgccagcgccagcggcggccagggcttcctgtaccagcccaaccccagactggcccccctgagcagagagggccccgccagaccctacagactgaagcccggccacgtgctggacgtggagggcgagggcctgaacctgggcatcagcaaggaggaggtgagagtgcacatcggcagaggcgagtgcctggtgaagaccctgaccagaacccacctgtactgcgagccccccgcccacgccccccagcccgccaacggcagcggcctgccccagttcgtggtgcagatgggcaacgtgcagctggccctgggccccgtgcagtacgaggccgagccccccctgagcgccttccccgtggaggcccaggccggcgtgggcatgggcgccgccgtgctgatcgccgccgtgctgctgctgaccctgatgtacagacacaagagcaagcaggccctgagagactaccagaaggtgctggtgcagctggagagcctggagaccggcgtgggcgaccagtgcagaaaggagttcaccgacctgatgaccgagatgaccgacctgagcagcgacctggagggcagcggcatccccttcctggactacagaacctacgccgagagagccttcttccccggccacggcggctgccccctgcagcccaagcccgagggccccggcgaggacggccactgcgccaccgtgagacagggcctgacccagctgagcaacctgctgaacagcaagctgttcctgctgaccctgatccacaccctggaggagcagcccagcttcagccagagagacagatgccacgtggccagcctgctgagcctggccctgcacggcaagctggagtacctgaccgacatcatgagaaccctgctgggcgacctggccgcccactacgtgcacagaaaccccaagctgatgctgagaagaaccgagaccatggtggagaagctgctgaccaactggctgagcatctgcctgtacgccttcctgagagaggtggccggcgagcccctgtacatgctgttcagagccatccagtaccaggtggacaagggccccgtggacgccgtgaccggcaaggccaagagaaccctgaacgacagcagactgctgagagaggacgtggagttccagcccctgaccctgatggtgctggtgggccccggcgccggcggcgccgccggcagcagcgagatgcagagagtgcccgccagagtgctggacaccgacaccatcacccaggtgaaggagaaggtgctggaccaggtgtacaagggcacccccttcagccagagacccagcgtgcacgccctggacctggagtggagaagcggcctggccggccacctgaccctgagcgacgaggacctgaccagcgtgacccagaaccactggaagagactgaacaccctgcagcactacaaggtgcccgacggcgccaccgtgggcctggtgccccagctgcacagaggcagcaccatcagccagagcctggcccagagatgccccctgggcgagaacatccccaccctggaggacggcgaggagggcggcgtgtgcctgtggcacctggtgaaggccaccgaggagcccgagggcgccaaggtgagatgcagcagcctgagagagagagagcccgccagagccaaggccatccccgagatctacctgaccagactgctgagcatgaagggcaccctgcagaagttcgtggacgacaccttccaggccatcctgagcgtgaacagacccatccccatcgccgtgaagtacctgttcgacctgctggacgagctggccgagaagcacggcatcgaggaccccggcaccctgcacatctggaagaccaacagcctgctgctgagattctgggtgaacgccctgaagaacccccagctgatcttcgacgtgagagtgagcgacaacgtggacgccatcctggccgtgatcgcccagaccttcatcgacagctgcaccaccagcgagcacaaggtgggcagagacagccccgtgaacaagctgctgtacgccagagagatccccagatacaagcagatggtggagagatactacgccgacatcagacagagcagccccgccagctaccaggagatgaacagcgccctggccgagctgagcggcaactacaccagcgccccccactgcctggaggccctgcaggagctgtacaaccacatccacagatactacgaccagatcatcagcgccctggaggaggaccccgtgggccagaagctgcagctggcctgcagactgcagcaggtggccgccctggtggagaacaaggtgaccgacctgtag

SEQ ID NO: 93664 - DNA, 5799 bp, synthetic construct
  misc_feature 1..5799: note = Description of Artificial Sequence: Synthetic coding sequence
  source 1..5799: mol_type = other DNA
atggagctgacccccgccagcagcctgacctgcagcctgctgagccccagactgcccggcagcttcccccagctgagaagagtgcccccctgcagcagaccctggctgcccaaggcccccgtgatggccagatggccccccttcggcctgtgcctgctgctgctgctgctgagccccccccccctgcccctgaccggcgcccacagattcagcgcccccaacaccaccctgaaccacctggccctggcccccggcagaggcaccctgtacgtgggcgccgtgaacagactgttccagctgagccccgagctgcagctggaggccgtggccgtgaccggccccgtgatcgacagccccgactgcgtgcccttcagagaccccgccgagtgcccccaggcccagctgaccgacaacgccaaccagctgctgctggtgagcagcagagcccaggagctggtggcctgcggccaggtgagacagggcgtgtgcgagaccagaagactgggcgacgtggccgaggtgctgtaccaggccgaggaccccggcgacggccagttcgtggccgccaacacccccggcgtggccaccgtgggcctggtggtgcccctgcccggcagagacctgctgctggtggccagaggcctggccggcaagctgagcgccggcgtgccccccctggccatcagacagctggccggcagccagcccttcagcagcgagggcctgggcagactggtggtgggcgacttcagcgactacaacaacagctacgtgggcgccttcgccgacgccagaagcgcctacttcgtgttcagaagaagaggcgccagagcccaggccgagtacagaagctacgtggccagagtgtgcctgggcgacaccaacctgtacagctacgtggaggtgcccctggcctgccagggccagggcctgatccaggccgccttcctggcccccggcaccctgctgggcgtgttcgccgccggccccagaggcacccaggccgccctgtgcgccttccccatggtggagctgggcgccagcatggagcaggccagaagactgtgctacaccgccggcggcagaggccccagcggcgccgaggaggccaccgtggagtacggcgtgaccagcagatgcgtgaccctgcccctggacagccccgagagctacccctgcggcgacgagcacacccccagccccatcgccggcagacagcccctggaggtgcagcccctgctgaagctgggccagcccgtgagcgccgtggccgccctgcaggccgacggccacatgatcgccttcctgggcgacacccagggccagctgtacaaggtgttcctgcacggcagccagggccaggtgtaccacagccagcaggtgggcccccccggcagcgccatcagccccgacctgctgctggacagcagcggcagccacctgtacgtgctgaccgcccaccaggtggacagaatccccgtggccgcctgcccccagttccccgactgcgccagctgcctgcaggcccaggaccccctgtgcggctggtgcgtgctgcagggcagatgcaccagaaagggccagtgcggcagagccggccagctgaaccagtggctgtggagctacgaggaggacagccactgcctgcacatccagagcctgctgcccggccaccaccccagacaggagcagggccaggtgaccctgagcgtgcccagactgcccatcctggacgccgacgagtacttccactgcgccttcggcgactacgacagcctggcccacgtggagggcccccacgtggcctgcgtgacccccccccaggaccaggtgcccctgaacccccccggcaccgaccacgtgaccgtgcccctggccctgatgttcgaggacgtgaccgtggccgccaccaacttcagcttctacgactgcagcgccgtgcaggccctggaggccgccgccccctgcagagcctgcgtgggcagcatctggagatgccactggtgcccccagagcagccactgcgtgtacggcgagcactgccccgagggcgagagaaccatctacagcgcccaggaggtggacatccaggtgagaggccccggcgcctgcccccaggtggagggcctggccggcccccacctggtgcccgtgggctgggagagccacctggccctgagagtgagaaacctgcagcacttcagaggcctgcccgccagcttccactgctggctggagctgcccggcgagctgagaggcctgcccgccaccctggaggagaccgccggcgacagcggcctgatccactgccaggcccaccagttctaccccagcatgagccagagagagctgcccgtgcccatctacgtgacccagggcgaggcccagagactggacaacacccacgccctgtacgtgatcctgtacgactgcgccatgggccaccccgactgcagccactgccaggccgccaacagaagcctgggctgcctgtggtgcgccgacggccagcccgcctgcagatacggccccctgtgcccccccggcgccgtggagctgctgtgccccgcccccagcatcgacgccgtggagcccctgaccggcccccccgagggcggcctggccctgaccatcctgggcagcaacctgggcagagccttcgccgacgtgcagtacgccgtgagcgtggccagcagaccctgcaaccccgagcccagcctgtacagaaccagcgccagaatcgtgtgcgtgaccagccccgcccccaacggcaccaccggccccgtgagagtggccatcaagagccagccccccggcatcagcagccagcacttcacctaccaggaccccgtgctgctgagcctgagccccagatggggcccccaggccggcggcacccagctgaccatcagaggccagcacctgcagaccggcggcaacaccagcgccttcgtgggcggccagccctgccccatcctggagcccgtgtgccccgaggccatcgtgtgcagaaccagaccccaggccgcccccggcgaggccgccgtgctggtggtgttcggccacgcccagagaaccctgctggccagccccttcagatacaccgccaacccccagctggtggccgccgagcccagcgccagcttcagaggcggcggcagactgatcagagtgagaggcaccggcctggacgtggtgcagagacccctgctgagcgtgtggctggaggccgacgccgaggtgcaggccagcagagcccagccccaggacccccagcccagaagaagctgcggcgcccccgccgccgacccccaggcctgcatccagctgggcggcggcctgctgcagtgcagcaccgtgtgcagcgtgaacagcagcagcctgctgctgtgcagaagccccgccgtgcccgacagagcccacccccagagagtgttcttcaccctggacaacgtgcaggtggacttcgccagcgccagcggcggccagggcttcctgtaccagcccaaccccagactggcccccctgagcagagagggccccgccagaccctacagactgaagcccggccacgtgctggacgtggagggcgagggcctgaacctgggcatcagcaaggaggaggtgagagtgcacatcggcagaggcgagtgcctggtgaagaccctgaccagaacccacctgtactgcgagccccccgcccacgccccccagcccgccaacggcagcggcctgccccagttcgtggtgcagatgggcaacgtgcagctggccctgggccccgtgcagtacgaggccgagccccccctgagcgccttccccgtggaggcccaggccggcgtgggcatgggcgccgccgtgctgatcgccgccgtgctgctgctgaccctgatgtacagacacaagagcaagcaggccctgagagactaccagaaggtgctggtgcagctggagagcctggagaccggcgtgggcgaccagtgcagaaaggagttcaccgacctgatgaccgagatgaccgacctgagcagcgacctggagggcagcggcatccccttcctggactacagaacctacgccgagagagccttcttccccggccacggcggctgccccctgcagcccaagcccgagggccccggcgaggacggccactgcgccaccgtgagacagggcctgacccagctgagcaacctgctgaacagcaagctgttcctgctgaccctgatccacaccctggaggagcagcccagcttcagccagagagacagatgccacgtggccagcctgctgagcctggccctgcacggcaagctggagtacctgaccgacatcatgagaaccctgctgggcgacctggccgcccactacgtgcacagaaaccccaagctgatgctgagaagaaccgagaccatggtggagaagctgctgaccaactggctgagcatctgcctgtacgccttcctgagagaggtggccggcgagcccctgtacatgctgttcagagccatccagtaccaggtggacaagggccccgtggacgccgtgaccggcaaggccaagagaaccctgaacgacagcagactgctgagagaggacgtggagttccagcccctgaccctgatggtgctggtgggccccggcgccggcggcgccgccggcagcagcgagatgcagagagtgcccgccagagtgctggacaccgacaccatcacccaggtgaaggagaaggtgctggaccaggtgtacaagggcacccccttcagccagagacccagcgtgcacgccctggacctggagtggagaagcggcctggccggccacctgaccctgagcgacgaggacctgaccagcgtgacccagaaccactggaagagactgaacaccctgcagcactacaaggtgcccgacggcgccaccgtgggcctggtgccccagctgcacagaggcagcaccatcagccagagcctggcccagagatgccccctgggcgagaacatccccaccctggaggacggcgaggagggcggcgtgtgcctgtggcacctggtgaaggccaccgaggagcccgagggcgccaaggtgagatgcagcagcctgagagagagagagcccgccagagccaaggccatccccgagatctacctgaccagactgctgagcatgaagggcaccctgcagaagttcgtggacgacaccttccaggccatcctgagcgtgaacagacccatccccatcgccgtgaagtacctgttcgacctgctggacgagctggccgagaagcacggcatcgaggaccccggcaccctgcacatctggaagaccaacagcctgctgctgagattctgggtgaacgccctgaagaacccccagctgatcttcgacgtgagagtgagcgacaacgtggacgccatcctggccgtgatcgcccagaccttcatcgacagctgcaccaccagcgagcacaaggtgggcagagacagccccgtgaacaagctgctgtacgccagagagatccccagatacaagcagatggtggagagatactacgccgacatcagacagagcagccccgccagctaccaggagatgaacagcgccctggccgagctgagcggcaactacaccagcgccccccactgcctggaggccctgcaggagctgtacaaccacatccacagatactacgaccagatcatcagcgccctggaggaggaccccgtgggccagaagctgcagctggcctgcagactgcagcaggtggccgccctggtggagaacaaggtgaccgacctgtag

SEQ ID NO: 93665 - DNA, 5778 bp, synthetic construct
  misc_feature 1..5778: note = Description of Artificial Sequence: Synthetic coding sequence
  source 1..5778: mol_type = other DNA
atggcccccagagccgccggcggcgcccccctgagcgccagagccgccgccgccagccccccccccttccagaccccccccagatgccccgtgcccctgctgctgctgctgctgctgggcgccgccagagccggcgccctggagatccagagaagattccccagccccacccccaccaacaacttcgccctggacggcgccgccggcaccgtgtacctggccgccgtgaacagactgtaccagctgagcggcgccaacctgagcctggaggccgaggccgccgtgggccccgtgcccgacagccccctgtgccacgccccccagctgccccaggccagctgcgagcaccccagaagactgaccgacaactacaacaagatcctgcagctggaccccggccagggcctggtggtggtgtgcggcagcatctaccagggcttctgccagctgagaagaagaggcaacatcagcgccgtggccgtgagattcccccccgccgccccccccgccgagcccgtgaccgtgttccccagcatgctgaacgtggccgccaaccaccccaacgccagcaccgtgggcctggtgctgccccccgccgccggcgccggcggcagcagactgctggtgggcgccacctacaccggctacggcagcagcttcttccccagaaacagaagcctggaggaccacagattcgagaacacccccgagatcgccatcagaagcctggacaccagaggcgacctggccaagctgttcaccttcgacctgaaccccagcgacgacaacatcctgaagatcaagcagggcgccaaggagcagcacaagctgggcttcgtgagcgccttcctgcaccccagcgaccccccccccggcgcccagagctacgcctacctggccctgaacagcgaggccagagccggcgacaaggagagccaggccagaagcctgctggccagaatctgcctgccccacggcgccggcggcgacgccaagaagctgaccgagagctacatccagctgggcctgcagtgcgccggcggcgccggcagaggcgacctgtacagcagactggtgagcgtgttccccgccagagagagactgttcgccgtgttcgagagaccccagggcagccccgccgccagagccgcccccgccgccctgtgcgccttcagattcgccgacgtgagagccgccatcagagccgccagaaccgcctgcttcgtggagcccgcccccgacgtggtggccgtgctggacagcgtggtgcagggcaccggccccgcctgcgagagaaagctgaacatccagctgcagcccgagcagctggactgcggcgccgcccacctgcagcaccccctgagcatcctgcagcccctgaaggccacccccgtgttcagagcccccggcctgaccagcgtggccgtggccagcgtgaacaactacaccgccgtgttcctgggcaccgtgaacggcagactgctgaagatcaacctgaacgagagcatgcaggtggtgagcagaagagtggtgaccgtggcctacggcgagcccgtgcaccacgtgatgcagttcgaccccgccgacagcggctacctgtacctgatgaccagccaccagatggccagagtgaaggtggccgcctgcaacgtgcacagcacctgcggcgactgcgtgggcgccgccgacgcctactgcggctggtgcgccctggagaccagatgcaccctgcagcaggactgcaccaacagcagccagcagcacttctggaccagcgccagcgagggccccagcagatgccccgccatgaccgtgctgcccagcgagatcgacgtgagacaggagtaccccggcatgatcctgcagatcagcggcagcctgcccagcctgagcggcatggagatggcctgcgactacggcaacaacatcagaaccgtggccagagtgcccggccccgccttcggccaccagatcgcctactgcaacctgctgcccagagaccagttcccccccttcccccccaaccaggaccacgtgaccgtggagatgagcgtgagagtgaacggcagaaacatcgtgaaggccaacttcaccatctacgactgcagcagaaccgcccaggtgtacccccacaccgcctgcaccagctgcctgagcgcccagtggccctgcttctggtgcagccagcagcacagctgcgtgagcaaccagagcagatgcgaggccagccccaaccccaccagcccccaggactgccccagaaccctgctgagccccctggcccccgtgcccaccggcggcagccagaacatcctggtgcccctggccaacaccgccttcttccagggcgccgccctggagtgcagcttcggcctggaggagatcttcgaggccgtgtgggtgaacgagagcgtggtgagatgcgaccaggtggtgctgcacaccaccagaaagagccaggtgttccccctgagcctgcagctgaagggcagacccgccagattcctggacagccccgagcccatgaccgtgatggtgtacaactgcgccatgggcagccccgactgcagccagtgcctgggcagagaggacctgggccacctgtgcatgtggagcgacggctgcagactgagaggccccctgcagcccatggccggcacctgccccgcccccgagatccacgccatcgagcccctgagcggccccctggacggcggcaccctgctgaccatcagaggcagaaacctgggcagaagactgagcgacgtggcccacggcgtgtggatcggcggcgtggcctgcgagcccctgcccgacagatacaccgtgagcgaggagatcgtgtgcgtgaccggccccgcccccggccccctgagcggcgtggtgaccgtgaacgccagcaaggagggcaagagcagagacagattcagctacgtgctgcccctggtgcacagcctggagcccaccatgggccccaaggccggcggcaccagaatcaccatccacggcaacgacctgcacgtgggcagcgagctgcaggtgctggtgaacgacaccgacccctgcaccgagctgatgagaaccgacaccagcatcgcctgcaccatgcccgagggcgccctgcccgcccccgtgcccgtgtgcgtgagattcgagagaagaggctgcgtgcacggcaacctgaccttctggtacatgcagaaccccgtgatcaccgccatcagccccagaagaagccccgtgagcggcggcagaaccatcaccgtggccggcgagagattccacatggtgcagaacgtgagcatggccgtgcaccacatcggcagagagcccaccctgtgcaaggtgctgaacagcaccctgatcacctgccccagccccggcgccctgagcaacgccagcgcccccgtggacttcttcatcaacggcagagcctacgccgacgaggtggccgtggccgaggagctgctggaccccgaggaggcccagagaggcagcagattcagactggactacctgcccaacccccagttcagcaccgccaagagagagaagtggatcaagcaccaccccggcgagcccctgaccctggtgatccacaaggagcaggacagcctgggcctgcagagccacgagtacagagtgaagatcggccaggtgagctgcgacatccagatcgtgagcgacagaatcatccactgcagcgtgaacgagagcctgggcgccgccgtgggccagctgcccatcaccatccaggtgggcaacttcaaccagaccatcgccaccctgcagctgggcggcagcgagaccgccatcatcgtgagcatcgtgatctgcagcgtgctgctgctgctgagcgtggtggccctgttcgtgttctgcaccaagagcagaagagccgagagatactggcagaagaccctgctgcagatggaggagatggagagccagatcagagaggagatcagaaagggcttcgccgagctgcagaccgacatgaccgacctgaccaaggagctgaacagaagccagggcatccccttcctggagtacaagcacttcgtgaccagaaccttcttccccaagtgcagcagcctgtacgaggagagatacgtgctgcccagccagaccctgaacagccagggcagcagccaggcccaggagacccaccccctgctgggcgagtggaagatccccgagagctgcagacccaacatggaggagggcatcagcctgttcagcagcctgctgaacaacaagcacttcctgatcgtgttcgtgcacgccctggagcagcagaaggacttcgccgtgagagacagatgcagcctggccagcctgctgaccatcgccctgcacggcaagctggagtactacaccagcatcatgaaggagctgctggtggacctgatcgacgccagcgccgccaagaaccccaagctgatgctgagaagaaccgagagcgtggtggagaagatgctgaccaactggatgagcatctgcatgtacagctgcctgagagagaccgtgggcgagcccttcttcctgctgctgtgcgccatcaagcagcagatcaacaagggcagcatcgacgccatcaccggcaaggccagatacaccctgagcgaggagtggctgctgagagagaacatcgaggccaagcccagaaacctgaacgtgagcttccagggctgcggcatggacagcctgagcgtgagagccatggacaccgacaccctgacccaggtgaaggagaagatcctggaggccttctgcaagaacgtgccctacagccagtggcccagagccgaggacgtggacctggagtggttcgccagcagcacccagagctacatcctgagagacctggacgacaccagcgtggtggaggacggcagaaagaagctgaacaccctggcccactacaagatccccgagggcgccagcctggccatgagcctgatcgacaagaaggacaacaccctgggcagagtgaaggacctggacaccgagaagtacttccacctggtgctgcccaccgacgagctggccgagcccaagaagagccacagacagagccacagaaagaaggtgctgcccgagatctacctgaccagactgctgagcaccaagggcaccctgcagaagttcctggacgacctgttcaaggccatcctgagcatcagagaggacaagccccccctggccgtgaagtacttcttcgacttcctggaggagcaggccgagaagagaggcatcagcgaccccgacaccctgcacatctggaagaccaacagcctgcccctgagattctgggtgaacatcctgaagaacccccagttcgtgttcgacatcgacaagaccgaccacatcgacgcctgcctgagcgtgatcgcccaggccttcatcgacgcctgcagcatcagcgacctgcagctgggcaaggacagccccaccaacaagctgctgtacgccaaggagatccccgagtacagaaagatcgtgcagagatactacaagcagatccaggacatgacccccctgagcgagcaggagatgaacgcccacctggccgaggagagcagaaagtaccagaacgagttcaacaccaacgtggccatggccgagatctacaagtacgccaagagatacagaccccagatcatggccgccctggaggccaaccccaccgccagaagaacccagctgcagcacaagttcgagcaggtggtggccctgatggaggacaacatctacgagtgctacagcgaggcctag

SEQ ID NO: 93666 - DNA, 5358 bp, synthetic construct
  misc_feature 1..5358: note = Description of Artificial Sequence: Synthetic coding sequence
  source 1..5358: mol_type = other DNA
atggcccccagagccgccggcggcgcccccctgagcgccagagccgccgccgccagccccccccccttccagaccccccccagatgccccgtgcccctgctgctgctgctgctgctgggcgccgccagagccggcgccctggagatccagagaagattccccagccccacccccaccaacaacttcgccctggacggcgccgccggcaccgtgtacctggccgccgtgaacagactgtaccagctgagcggcgccaacctgagcctggaggccgaggccgccgtgggccccgtgcccgacagccccctgtgccacgccccccagctgccccaggccagctgcgagcaccccagaagactgaccgacaactacaacaagatcctgcagctggaccccggccagggcctggtggtggtgtgcggcagcatctaccagggcttctgccagctgagaagaagaggcaacatcagcgccgtggccgtgagattcccccccgccgccccccccgccgagcccgtgaccgtgttccccagcatgctgaacgtggccgccaaccaccccaacgccagcaccgtgggcctggtgctgccccccgccgccggcgccggcggcagcagactgctggtgggcgccacctacaccggctacggcagcagcttcttccccagaaacagaagcctggaggaccacagattcgagaacacccccgagatcgccatcagaagcctggacaccagaggcgacctggccaagctgttcaccttcgacctgaaccccagcgacgacaacatcctgaagatcaagcagggcgccaaggagcagcacaagctgggcttcgtgagcgccttcctgcaccccagcgaccccccccccggcgcccagagctacgcctacctggccctgaacagcgaggccagagccggcgacaaggagagccaggccagaagcctgctggccagaatctgcctgccccacggcgccggcggcgacgccaagaagctgaccgagagctacatccagctgggcctgcagtgcgccggcggcgccggcagaggcgacctgtacagcagactggtgagcgtgttccccgccagagagagactgttcgccgtgttcgagagaccccagggcagccccgccgccagagccgcccccgccgccctgtgcgccttcagattcgccgacgtgagagccgccatcagagccgccagaaccgcctgcttcgtggagcccgcccccgacgtggtggccgtgctggacagcgtggtgcagggcaccggccccgcctgcgagagaaagctgaacatccagctgcagcccgagcagctggactgcggcgccgcccacctgcagcaccccctgagcatcctgcagcccctgaaggccacccccgtgttcagagcccccggcctgaccagcgtggccgtggccagcgtgaacaactacaccgccgtgttcctgggcaccgtgaacggcagactgctgaagatcaacctgaacgagagcatgcaggtggtgagcagaagagtggtgaccgtggcctacggcgagcccgtgcaccacgtgatgcagttcgaccccgccgacagcggctacctgtacctgatgaccagccaccagatggccagagtgaaggtggccgcctgcaacgtgcacagcacctgcggcgactgcgtgggcgccgccgacgcctactgcggctggtgcgccctggagaccagatgcaccctgcagcaggactgcaccaacagcagccagcagcacttctggaccagcgccagcgagggccccagcagatgccccgccatgaccgtgctgcccagcgagatcgacgtgagacaggagtaccccggcatgatcctgcagatcagcggcagcctgcccagcctgagcggcatggagatggcctgcgactacggcaacaacatcagaaccgtggccagagtgcccggccccgccttcggccaccagatcgcctactgcaacctgctgcccagagaccagttcccccccttcccccccaaccaggaccacgtgaccgtggagatgagcgtgagagtgaacggcagaaacatcgtgaaggccaacttcaccatctacgactgcagcagaaccgcccaggtgtacccccacaccgcctgcaccagctgcctgagcgcccagtggccctgcttctggtgcagccagcagcacagctgcgtgagcaaccagagcagatgcgaggccagccccaaccccaccagcccccaggactgccccagaaccctgctgagccccctggcccccgtgcccaccggcggcagccagaacatcctggtgcccctggccaacaccgccttcttccagggcgccgccctggagtgcagcttcggcctggaggagatcttcgaggccgtgtgggtgaacgagagcgtggtgagatgcgaccaggtggtgctgcacaccaccagaaagagccaggtgttccccctgagcctgcagctgaagggcagacccgccagattcctggacagccccgagcccatgaccgtgatggtgtacaactgcgccatgggcagccccgactgcagccagtgcctgggcagagaggacctgggccacctgtgcatgtggagcgacggctgcagactgagaggccccctgcagcccatggccggcacctgccccgcccccgagatccacgccatcgagcccctgagcggccccctggacggcggcaccctgctgaccatcagaggcagaaacctgggcagaagactgagcgacgtggcccacggcgtgtggatcggcggcgtggcctgcgagcccctgcccgacagatacaccgtgagcgaggagatcgtgtgcgtgaccggccccgcccccggccccctgagcggcgtggtgaccgtgaacgccagcaaggagggcaagagcagagacagattcagctacgtgctgcccctggtgcacagcctggagcccaccatgggccccaaggccggcggcaccagaatcaccatccacggcaacgacctgcacgtgggcagcgagctgcaggtgctggtgaacgacaccgacccctgcaccgagctgatgagaaccgacaccagcatcgcctgcaccatgcccgagggcgccctgcccgcccccgtgcccgtgtgcgtgagattcgagagaagaggctgcgtgcacggcaacctgaccttctggtacatgcagaaccccgtgatcaccgccatcagccccagaagaagccccgtgagcggcggcagaaccatcaccgtggccggcgagagattccacatggtgcagaacgtgagcatggccgtgcaccacatcggcagagagcccaccctgtgcaaggtgctgaacagcaccctgatcacctgccccagccccggcgccctgagcaacgccagcgcccccgtggacttcttcatcaacggcagagcctacgccgacgaggtggccgtggccgaggagctgctggaccccgaggaggcccagagaggcagcagattcagactggactacctgcccaacccccagttcagcaccgccaagagagagaagtggatcaagcaccaccccggcgagcccctgaccctggtgatccacaaggagcaggacagcctgggcctgcagagccacgagtacagagtgaagatcggccaggtgagctgcgacatccagatcgtgagcgacagaatcatccactgcagcgtgaacgagagcctgggcgccgccgtgggccagctgcccatcaccatccaggtgggcaacttcaaccagaccatcgccaccctgcagctgggcggcagcgagaccgccatcatcgtgagcatcgtgatctgcagcgtgctgctgctgctgagcgtggtggccctgttcgtgttctgcaccaagagcagaagagccgagagatactggcagaagaccctgctgcagatggaggagatggagagccagatcagagaggagatcagaaagggcttcgccgagctgcagaccgacatgaccgacctgaccaaggagctgaacagaagccagggcatccccttcctggagtacaagcacttcgtgaccagaaccttcttccccaagtgcagcagcctgtacgaggagagatacgtgctgcccagccagaccctgaacagccagggcagcagccaggcccaggagacccaccccctgctgggcgagtggaagatccccgagagctgcagacccaacatggaggagggcatcagcctgttcagcagcctgctgaacaacaagcacttcctgatcgtgttcgtgcacgccctggagcagcagaaggacttcgccgtgagagacagatgcagcctggccagcctgctgaccatcgccctgcacggcaagctggagtactacaccagcatcatgaaggagctgctggtggacctgatcgacgccagcgccgccaagaaccccaagctgatgctgagaagaaccgagagcgtggtggagaagatgctgaccaactggatgagcatctgcatgtacagctgcctgagagagaccgtgggcgagcccttcttcctgctgctgtgcgccatcaagcagcagatcaacaagggcagcatcgacgccatcaccggcaaggccagatacaccctgagcgaggagtggctgctgagagagaacatcgaggccaagcccagaaacctgaacgtgagcttccagggctgcggcatggacagcctgagcgtgagagccatggacaccgacaccctgacccaggtgaaggagaagatcctggaggccttctgcaagaacgtgccctacagccagtggcccagagccgaggacgtggacctggagtggttcgccagcagcacccagagctacatcctgagagacctggacgacaccagcgtggtggaggacggcagaaagaagctgaacaccctggcccactacaagatccccgagggcgccagcctggccatgagcctgatcgacaagaaggacaacaccctgggcagagtgaaggacctggacaccgagaagtacttccacctggtgctgcccaccgacgagctggccgagcccaagaagagccacagacagagccacagaaagaaggtgctgcccgagatctacctgaccagactgctgagcaccaagggcaccctgcagaagttcctggacgacctgttcaaggccatcctgagcatcagagaggacaagccccccctggccgtgaagtacttcttcgacttcctggaggagcaggccgagaagagaggcatcagcgaccccgacaccctgcacatctggaagaccaacagatggagacccagcagccccgtgctgggcgagcaccccgaggagccccccgtgtgcctgtag

SEQ ID NO: 93667 - DNA, 1503 bp, synthetic construct
  misc_feature 1..1503: note = Description of Artificial Sequence: Synthetic coding sequence
  source 1..1503: mol_type = other DNA
atgagaggcgagctgtggctgctggtgctggtgctgagagaggccgccagagccctgagcccccagcccggcgccggccacgacgagggccccggcagcggctgggccgccaagggcaccgtgagaggctggaacagaagagccagagagagccccggccacgtgagcgagcccgacagaacccagctgagccaggacctgggcggcggcaccctggccatggacaccctgcccgacaacagaaccagagtggtggaggacaaccacagctactacgtgagcagactgtacggccccagcgagccccacagcagagagctgtgggtggacgtggccgaggccaacagaagccaggtgaagatccacaccatcctgagcaacacccacagacaggccagcagagtggtgctgagcttcgacttccccttctacggccaccccctgagacagatcaccatcgccaccggcggcttcatcttcatgggcgacgtgatccacagaatgctgaccgccacccagtacgtggcccccctgatggccaacttcaaccccggctacagcgacaacagcaccgtggtgtacttcgacaacggcaccgtgttcgtggtgcagtgggaccacgtgtacctgcagggctgggaggacaagggcagcttcaccttccaggccgccctgcaccacgacggcagaatcgtgttcgcctacaaggagatccccatgagcgtgcccgagatcagcagcagccagcaccccgtgaagaccggcctgagcgacgccttcatgatcctgaaccccagccccgacgtgcccgagagcagaagaagaagcatcttcgagtaccacagaatcgagctggaccccagcaaggtgaccagcatgagcgccgtggagttcacccccctgcccacctgcctgcagcacagaagctgcgacgcctgcatgagcagcgacctgaccttcaactgcagctggtgccacgtgctgcagagatgcagcagcggcttcgacagatacagacaggagtggatggactacggctgcgcccaggaggccgagggcagaatgtgcgaggacttccaggacgaggaccacgacagcgccagccccgacaccagcttcagcccctacgacggcgacctgaccaccaccagcagcagcctgttcatcgacagcctgaccaccgaggacgacaccaagctgaacccctacgccggcggcgacggcctgcagaacaacctgagccccaagaccaagggcacccccgtgcacctgggcaccatcgtgggcatcgtgctggccgtgctgctggtggccgccatcatcctggccggcatctacatcaacggccaccccaccagcaacgccgccctgttcttcatcgagagaagaccccaccactggcccgccatgaagttcagaagccaccccgaccacagcacctacgccgaggtggagcccagcggccacgagaaggagggcttcatggaggccgagcagtgctag

SEQ ID NO: 93668 - DNA, 1014 bp, synthetic construct
  misc_feature 1..1014: note = Description of Artificial Sequence: Synthetic coding sequence
  source 1..1014: mol_type = other DNA
atgagaggcgagctgtggctgctggtgctggtgctgagagaggccgccagagccctgagcccccagcccggcgccggccacgacgagggccccggcagcggctgggccgccaagggcaccgtgagaggctggaacagaagagccagagagagccccggccacgtgagcgagcccgacagaacccagctgagccaggacctgggcggcggcaccctggccatggacaccctgcccgacaacagaaccagagtggtggaggacaaccacagctactacgtgagcagactgtacggccccagcgagccccacagcagagagctgtgggtggacgtggccgaggccaacagaagccaggtgaagatccacaccatcctgagcaacacccacagacaggccagcagagtggtgctgagcttcgacttccccttctacggccaccccctgagacagatcaccatcgccaccggcggcttcatcttcatgggcgacgtgatccacagaatgctgaccgccacccagtacgtggcccccctgatggccaacttcaaccccggctacagcgacaacagcaccgtggtgtacttcgacaacggcaccgtgttcgtggtgcagtgggaccacgtgtacctgcagggctgggaggacaagggcagcttcaccttccaggccgccctgcaccacgacggcagaatcgtgttcgcctacaaggagatccccatgagcgtgcccgagatcagcagcagccagcaccccgtgaagaccggcctgagcgacgccttcatgatcctgaaccccagccccgacgtgcccgagagcagaagaagaagcatcttcgagtaccacagaatcgagctggaccccagcaaggtgaccagcatgagcgccgtggagttcacccccctgcccacctgcctgcagcacagaagctgcgacgcctgcatgagcagcgacctgaccttcaactgcagctggtgccacgtgctgcagagcagagacgaggtgagcccctgctag

SEQ ID NO: 93669 - DNA, 1284 bp, synthetic construct
  misc_feature 1..1284: note = Description of Artificial Sequence: Synthetic coding sequence
  source 1..1284: mol_type = other DNA
atggacaccctgcccgacaacagaaccagagtggtggaggacaaccacagctactacgtgagcagactgtacggccccagcgagccccacagcagagagctgtgggtggacgtggccgaggccaacagaagccaggtgaagatccacaccatcctgagcaacacccacagacaggccagcagagtggtgctgagcttcgacttccccttctacggccaccccctgagacagatcaccatcgccaccggcggcttcatcttcatgggcgacgtgatccacagaatgctgaccgccacccagtacgtggcccccctgatggccaacttcaaccccggctacagcgacaacagcaccgtggtgtacttcgacaacggcaccgtgttcgtggtgcagtgggaccacgtgtacctgcagggctgggaggacaagggcagcttcaccttccaggccgccctgcaccacgacggcagaatcgtgttcgcctacaaggagatccccatgagcgtgcccgagatcagcagcagccagcaccccgtgaagaccggcctgagcgacgccttcatgatcctgaaccccagccccgacgtgcccgagagcagaagaagaagcatcttcgagtaccacagaatcgagctggaccccagcaaggtgaccagcatgagcgccgtggagttcacccccctgcccacctgcctgcagcacagaagctgcgacgcctgcatgagcagcgacctgaccttcaactgcagctggtgccacgtgctgcagagaagcctgaacaaccaggacgagaacacctacgtgaactgcctggacagccagcagtgccacggcagcagcgagagcagaagacccttccaggacgaggaccacgacagcgccagccccgacaccagcttcagcccctacgacggcgacctgaccaccaccagcagcagcctgttcatcgacagcctgaccaccgaggacgacaccaagctgaacccctacgccggcggcgacggcctgcagaacaacctgagccccaagaccaagggcacccccgtgcacctgggcaccatcgtgggcatcgtgctggccgtgctgctggtggccgccatcatcctggccggcatctacatcaacggccaccccaccagcaacgccgccctgttcttcatcgagagaagaccccaccactggcccgccatgaagttcagaagccaccccgaccacagcacctacgccgaggtggagcccagcggccacgagaaggagggcttcatggaggccgagcagtgctag

SEQ ID NO: 93670 - DNA, 375 bp, synthetic construct
  misc_feature 1..375: note = Description of Artificial Sequence: Synthetic coding sequence
  source 1..375: mol_type = other DNA
atggacaccctgcccgacaacagaaccagagtggtggaggacaaccacagctactacgtgagcagactgtacggccccagcgagccccacagcagagagctgtgggtggacgtggccgaggccaacagaagccaggtgaagatccacaccatcctgagcaacacccacagacaggccagcagagtggtgctgagcttcgacttccccttctacggccaccccctgagacagatcaccatcgccaccggcggcttcatcttcatgggcgacgtgatccacagaatgctgaccgccacccagtacgtggcccccctgatggccaacttcaaccccggctacagcgacaacagcaccgtggtgtacttcgacaactag

SEQ ID NO: 93671 - DNA, 669 bp, synthetic construct
  misc_feature 1..669: note = Description of Artificial Sequence: Synthetic coding sequence
  source 1..669: mol_type = other DNA
atggacaccctgcccgacaacagaaccagagtggtggaggacaaccacagctactacgtgagcagactgtacggccccagcgagccccacagcagagagctgtgggtggacgtggccgaggccaacagaagccaggtgaagatccacaccatcctgagcaacacccacagacaggccagcagagtggtgctgagcttcgacttccccttctacggccaccccctgagacagatcaccatcgccaccggcggcttcatcttcatgggcgacgtgatccacagaatgctgaccgccacccagtacgtggcccccctgatggccaacttcaaccccggctacagcgacaacagcaccgtggtgtacttcgacaacggcaccgtgttcgtggtgcagtgggaccacgtgtacctgcagggctgggaggacaagggcagcttcaccttccaggccgccctgcaccacgacggcagaatcgtgttcgcctacaaggagatccccatgagcgtgcccgagatcagcagcagccagcaccccgtgaagaccggcctgagcgacgccttcatgatcctgaaccccagccccgacgtgcccgagagcagaagaagaagcatcttcgagtaccacagaatcgagctggaccccagcaaggtgaccagcatgagcgcctag

SEQ ID NO: 93672 - DNA, 198 bp, synthetic construct
  misc_feature 1..198: note = Description of Artificial Sequence: Synthetic coding sequence
  source 1..198: mol_type = other DNA
tgaagcttcaccttccaggccgccctgcaccacgacggcagaatcgtgttcgcctacaaggagatccccatgagcgtgcccgagatcagcagcagccagcaccccgtgaagaccggcctgagcgacgccttcatgatcctgaaccccagccccgacgtgcccggcttcagcgccgagagcgccaagcacctgtggtag

SEQ ID NO: 93673 - DNA, 1383 bp, synthetic construct
  misc_feature 1..1383: note = Description of Artificial Sequence: Synthetic coding sequence
  source 1..1383: mol_type = other DNA
atggccctgagcgtgagaaccctgcccctgagaggcttcctggtgcccagaccccagcccaccagaagccaggacgcccccagccccagactgcccctgagcagcgcccccgccccctgcagacacaagaacgaggaggacaaccacagctactacgtgagcagactgtacggccccagcgagccccacagcagagagctgtgggtggacgtggccgaggccaacagaagccaggtgaagatccacaccatcctgagcaacacccacagacaggccagcagagtggtgctgagcttcgacttccccttctacggccaccccctgagacagatcaccatcgccaccggcggcttcatcttcatgggcgacgtgatccacagaatgctgaccgccacccagtacgtggcccccctgatggccaacttcaaccccggctacagcgacaacagcaccgtggtgtacttcgacaacggcaccgtgttcgtggtgcagtgggaccacgtgtacctgcagggctgggaggacaagggcagcttcaccttccaggccgccctgcaccacgacggcagaatcgtgttcgcctacaaggagatccccatgagcgtgcccgagatcagcagcagccagcaccccgtgaagaccggcctgagcgacgccttcatgatcctgaaccccagccccgacgtgcccgagagcagaagaagaagcatcttcgagtaccacagaatcgagctggaccccagcaaggtgaccagcatgagcgccgtggagttcacccccctgcccacctgcctgcagcacagaagctgcgacgcctgcatgagcagcgacctgaccttcaactgcagctggtgccacgtgctgcagagatgcagcagcggcttcgacagatacagacaggagtggatggactacggctgcgcccaggaggccgagggcagaatgtgcgaggacttccaggacgaggaccacgacagcgccagccccgacaccagcttcagcccctacgacggcgacctgaccaccaccagcagcagcctgttcatcgacagcctgaccaccgaggacgacaccaagctgaacccctacgccggcggcgacggcctgcagaacaacctgagccccaagaccaagggcacccccgtgcacctgggcaccatcgtgggcatcgtgctggccgtgctgctggtggccgccatcatcctggccggcatctacatcaacggccaccccaccagcaacgccgccctgttcttcatcgagagaagaccccaccactggcccgccatgaagttcagaagccaccccgaccacagcacctacgccgaggtggagcccagcggccacgagaaggagggcttcatggaggccgagcagtgctag

SEQ ID NO: 93674 - DNA, 723 bp, synthetic construct
  misc_feature 1..723: note = Description of Artificial Sequence: Synthetic coding sequence
  source 1..723: mol_type = other DNA
atggacaccctgcccgacaacagaaccagagtggtggaggacaaccacagctactacgtgagcagactgtacggccccagcgagccccacagcagagagctgtgggtggacgtggccgaggccaacagaagccaggtgaagatccacaccatcctgagcaacacccacagacaggccagcagagtggtgctgagcttcgacttccccttctacggccaccccctgagacagatcaccatcgccaccggcggcttcatcttcatgggcgacgtgatccacagaatgctgaccgccacccagtacgtggcccccctgatggccaacttcaaccccggctacagcgacaacagcaccgtggtgtacttcgacaacggcaccgtgttcgtggtgcagtgggaccacgtgtacctgcagggctgggaggacaagggcagcttcaccttccaggccgccctgcaccacgacggcagaatcgtgttcgcctacaaggagatccccatgagcgtgcccgagatcagcagcagccagcaccccgtgaagaccggcctgagcgacgccttcatgatcctgaaccccagccccgacgtgcccgagagcagaagaagaagcatcttcgagtaccacagaatcgagctggaccccagcaaggtgaccagcatgagcgccgtggagttcacccccctgcccagccccagcaccaccagaatgaagaccagaatgtag

SEQ ID NO: 93675 - DNA, 1179 bp, synthetic construct
  misc_feature 1..1179: note = Description of Artificial Sequence: Synthetic coding sequence
  source 1..1179: mol_type = other DNA
atggagaaggacaaggtgaagatccacggcatcctgagcaacacccacagacaggccgccagagtgaacctgagcttcgacttccccttctacggccacttcctgagagagatcaccgtggccaccggcggcttcatctacaccggcgaggtggtgcacagaatgctgaccgccacccagtacatcgcccccctgatggccaacttcgaccccagcgtgagcagaaacagcaccgtgagatacttcgacaacggcaccgccctggtggtgcagtgggaccacgtgcacctgcaggacaactacaacctgggcagcttcaccttccaggccaccctgctgatggacggcagaatcatcttcggctacaaggagatccccgtgctggtgacccagatcagcagcaccaaccaccccgtgaaggtgggcctgagcgacgccttcgtggtggtgcacagaatccagcagatccccaacgtgagaagaagaaccatctacgagtaccacagagtggagctgcagatgagcaagatcaccaacatcagcgccgtggagatgacccccctgcccacctgcctgcagttcaacagatgcggcccctgcgtgagcagccagatcggcttcaactgcagctggtgcagcaagctgcagagatgcagcagcggcttcgacagacacagacaggactgggtggacagcggctgccccgaggagagcaaggagaagatgtgcgagaacaccgagcccgtggagaccagcagcagaaccaccaccaccgtgggcgccaccaccacccagttcagagtgctgaccaccaccagaagagccgtgaccagccagttccccaccagcctgcccaccgaggacgacaccaagatcgccctgcacctgaaggacaacggcgccagcaccgacgacagcgccgccgagaagaagggcggcaccctgcacgccggcctgatcatcggcatcctgatcctggtgctgatcgtggccaccgccatcctggtgaccgtgtacatgtaccaccaccccaccagcgccgccagcatcttcttcatcgagagaagacccagcagatggcccgccatgaagttcagaagaggcagcggccaccccgcctacgccgaggtggagcccgtgggcgagaaggagggcttcatcgtgagcgagcagtgctag

SEQ ID NO: 93676 - DNA, 1443 bp, synthetic construct
  misc_feature 1..1443: note = Description of Artificial Sequence: Synthetic coding sequence
  source 1..1443: mol_type = other DNA
atggccagattccccaaggccgacctggccgccgccggcgtgatgctgctgtgccacttcttcaccgaccagttccagttcgccgacggcaagcccggcgaccagatcctggactggcagtacggcgtgacccaggccttcccccacaccgaggaggaggtggaggtggacagccacgcctacagccacagatggaagagaaacctggacttcctgaaggccgtggacaccaacagagccagcgtgggccaggacagccccgagcccagaagcttcaccgacctgctgctggacgacggccaggacaacaacacccagatcgagagagtgaacctgagcttcgacttccccttctacggccacttcctgagagagatcaccgtggccaccggcggcttcatctacaccggcgaggtggtgcacagaatgctgaccgccacccagtacatcgcccccctgatggccaacttcgaccccagcgtgagcagaaacagcaccgtgagatacttcgacaacggcaccgccctggtggtgcagtgggaccacgtgcacctgcaggacaactacaacctgggcagcttcaccttccaggccaccctgctgatggacggcagaatcatcttcggctacaaggagatccccgtgctggtgacccagatcagcagcaccaaccaccccgtgaaggtgggcctgagcgacgccttcgtggtggtgcacagaatccagcagatccccaacgtgagaagaagaaccatctacgagtaccacagagtggagctgcagatgagcaagatcaccaacatcagcgccgtggagatgacccccctgcccacctgcctgcagttcaacagatgcggcccctgcgtgagcagccagatcggcttcaactgcagctggtgcagcaagctgcagagatgcagcagcggcttcgacagacacagacaggactgggtggacagcggctgccccgaggagagcaaggagaagatgtgcgagaacaccgagcccgtggagaccagcagcagaaccaccaccaccgtgggcgccaccaccacccagttcagagtgctgaccaccaccagaagagccgtgaccagccagttccccaccagcctgcccaccgaggacgacaccaagatcgccctgcacctgaaggacaacggcgccagcaccgacgacagcgccgccgagaagaagggcggcaccctgcacgccggcctgatcatcggcatcctgatcctggtgctgatcgtggccaccgccatcctggtgaccgtgtacatgtaccaccaccccaccagcgccgccagcatcttcttcatcgagagaagacccagcagatggcccgccatgaagttcagaagaggcagcggccaccccgcctacgccgaggtggagcccgtgggcgagaaggagggcttcatcgtgagcgagcagtgctag

SEQ ID NO: 93677 - DNA, 1590 bp, synthetic construct
  misc_feature 1..1590: note = Description of Artificial Sequence: Synthetic coding sequence
  source 1..1590: mol_type = other DNA
atggccagattccccaaggccgacctggccgccgccggcgtgatgctgctgtgccacttcttcaccgaccagttccagttcgccgacggcaagcccggcgaccagatcctggactggcagtacggcgtgacccaggccttcccccacaccgaggaggaggtggaggtggacagccacgcctacagccacagatggaagagaaacctggacttcctgaaggccgtggacaccaacagagccagcgtgggccaggacagccccgagcccagaagcttcaccgacctgctgctggacgacggccaggacaacaacacccagatcgaggaggacaccgaccacaactactacatcagcagaatctacggccccagcgacagcgccagcagagacctgtgggtgaacatcgaccagatggagaaggacaaggtgaagatccacggcatcctgagcaacacccacagacaggccgccagagtgaacctgagcttcgacttccccttctacggccacttcctgagagagatcaccgtggccaccggcggcttcatctacaccggcgaggtggtgcacagaatgctgaccgccacccagtacatcgcccccctgatggccaacttcgaccccagcgtgagcagaaacagcaccgtgagatacttcgacaacggcaccgccctggtggtgcagtgggaccacgtgcacctgcaggacaactacaacctgggcagcttcaccttccaggccaccctgctgatggacggcagaatcatcttcggctacaaggagatccccgtgctggtgacccagatcagcagcaccaaccaccccgtgaaggtgggcctgagcgacgccttcgtggtggtgcacagaatccagcagatccccaacgtgagaagaagaaccatctacgagtaccacagagtggagctgcagatgagcaagatcaccaacatcagcgccgtggagatgacccccctgcccacctgcctgcagttcaacagatgcggcccctgcgtgagcagccagatcggcttcaactgcagctggtgcagcaagctgcagagatgcagcagcggcttcgacagacacagacaggactgggtggacagcggctgccccgaggagagcaaggagaagatgtgcgagaacaccgagcccgtggagaccagcagcagaaccaccaccaccgtgggcgccaccaccacccagttcagagtgctgaccaccaccagaagagccgtgaccagccagttccccaccagcctgcccaccgaggacgacaccaagatcgccctgcacctgaaggacaacggcgccagcaccgacgacagcgccgccgagaagaagggcggcaccctgcacgccggcctgatcatcggcatcctgatcctggtgctgatcgtggccaccgccatcctggtgaccgtgtacatgtaccaccaccccaccagcgccgccagcatcttcttcatcgagagaagacccagcagatggcccgccatgaagttcagaagaggcagcggccaccccgcctacgccgaggtggagcccgtgggcgagaaggagggcttcatcgtgagcgagcagtgctag

SEQ ID NO: 93678 - DNA, 1548 bp, synthetic construct
  misc_feature 1..1548: note = Description of Artificial Sequence: Synthetic coding sequence
  source 1..1548: mol_type = other DNA
atgctgctgtgccacttcttcaccgaccagttccagttcgccgacggcaagcccggcgaccagatcctggactggcagtacggcgtgacccaggccttcccccacaccgaggaggaggtggaggtggacagccacgcctacagccacagatggaagagaaacctggacttcctgaaggccgtggacaccaacagagccagcgtgggccaggacagccccgagcccagaagcttcaccgacctgctgctggacgacggccaggacaacaacacccagatcgaggaggacaccgaccacaactactacatcagcagaatctacggccccagcgacagcgccagcagagacctgtgggtgaacatcgaccagatggagaaggacaaggtgaagatccacggcatcctgagcaacacccacagacaggccgccagagtgaacctgagcttcgacttccccttctacggccacttcctgagagagatcaccgtggccaccggcggcttcatctacaccggcgaggtggtgcacagaatgctgaccgccacccagtacatcgcccccctgatggccaacttcgaccccagcgtgagcagaaacagcaccgtgagatacttcgacaacggcaccgccctggtggtgcagtgggaccacgtgcacctgcaggacaactacaacctgggcagcttcaccttccaggccaccctgctgatggacggcagaatcatcttcggctacaaggagatccccgtgctggtgacccagatcagcagcaccaaccaccccgtgaaggtgggcctgagcgacgccttcgtggtggtgcacagaatccagcagatccccaacgtgagaagaagaaccatctacgagtaccacagagtggagctgcagatgagcaagatcaccaacatcagcgccgtggagatgacccccctgcccacctgcctgcagttcaacagatgcggcccctgcgtgagcagccagatcggcttcaactgcagctggtgcagcaagctgcagagatgcagcagcggcttcgacagacacagacaggactgggtggacagcggctgccccgaggagagcaaggagaagatgtgcgagaacaccgagcccgtggagaccagcagcagaaccaccaccaccgtgggcgccaccaccacccagttcagagtgctgaccaccaccagaagagccgtgaccagccagttccccaccagcctgcccaccgaggacgacaccaagatcgccctgcacctgaaggacaacggcgccagcaccgacgacagcgccgccgagaagaagggcggcaccctgcacgccggcctgatcatcggcatcctgatcctggtgctgatcgtggccaccgccatcctggtgaccgtgtacatgtaccaccaccccaccagcgccgccagcatcttcttcatcgagagaagacccagcagatggcccgccatgaagttcagaagaggcagcggccaccccgcctacgccgaggtggagcccgtgggcgagaaggagggcttcatcgtgagcgagcagtgctag

SEQ ID NO: 93679 - DNA, 1581 bp, synthetic construct
  misc_feature 1..1581: note = Description of Artificial Sequence: Synthetic coding sequence
  source 1..1581: mol_type = other DNA
atgagatgcgccctggccctgagcgccctgctgctgctgctgagcaccccccccctgctgcccagcagccccagccccagccccagccccagccagaacgccacccagaccaccaccgacagcagcaacaagaccgcccccacccccgccagcagcgtgaccatcatggccaccgacaccgcccagcagagcaccgtgcccaccagcaaggccaacgagatcctggccagcgtgaaggccaccaccctgggcgtgagcagcgacagccccggcaccaccaccctggcccagcaggtgagcggccccgtgaacaccaccgtggccagaggcggcggcagcggcaaccccaccaccaccatcgagagccccaagagcaccaagagcgccgacaccaccaccgtggccaccagcaccgccaccgccaagcccaacaccaccagcagccagaacggcgccgaggacaccaccaacagcggcggcaagagcagccacagcgtgaccaccgacctgaccagcaccaaggccgagcacctgaccaccccccaccccaccagccccctgagccccagacagcccaccagcacccaccccgtggccacccccaccagcagcggccacgaccacctgatgaagatcagcagcagcagcagcaccgtggccatccccggctacaccttcaccagccccggcatgaccaccaccctgcccagcagcgtgatcagccagagaacccagcagaccagcagccagatgcccgccagcagcaccgcccccagcagccaggagaccgtgcagcccaccagccccgccaccgccctgagaacccccaccctgcccgagaccatgagcagcagccccaccgccgccagcaccacccacagataccccaagacccccagccccaccgtggcccacgagagcaactgggccaagtgcgaggacctggagacccagacccagagcgagaagcagctggtgctgaacctgaccggcaacaccctgtgcgccggcggcgccagcgacgagaagctgatcagcctgatctgcagagccgtgaaggccaccttcaaccccgcccaggacaagtgcggcatcagactggccagcgtgcccggcagccagaccgtggtggtgaaggagatcaccatccacaccaagctgcccgccaaggacgtgtacgagagactgaaggacaagtgggacgagctgaaggaggccggcgtgagcgacatgaagctgggcgaccagggcccccccgaggaggccgaggacagattcagcatgcccctgatcatcaccatcgtgtgcatggccagcttcctgctgctggtggccgccctgtacggctgctgccaccagagactgagccagagaaaggaccagcagagactgaccgaggagctgcagaccgtggagaacggctaccacgacaaccccaccctggaggtgatggagaccagcagcgagatgcaggagaagaaggtggtgagcctgaacggcgagctgggcgacagctggatcgtgcccctggacaacctgaccaaggacgacctggacgaggaggaggacacccacctgtag

SEQ ID NO: 93680 - DNA, 1677 bp, synthetic construct
  misc_feature 1..1677: note = Description of Artificial Sequence: Synthetic coding sequence
  source 1..1677: mol_type = other DNA
atgagatgcgccctggccctgagcgccctgctgctgctgctgagcaccccccccctgctgcccagcagccccagccccagccccagccccagccagaacgccacccagaccaccaccgacagcagcaacaagaccgcccccacccccgccagcagcgtgaccatcatggccaccgacaccgcccagcagagcaccgtgcccaccagcaaggccaacgagatcctggccagcgtgaaggccaccaccctgggcgtgagcagcgacagccccggcaccaccaccctggcccagcaggtgagcggccccgtgaacaccaccgtggccagaggcggcggcagcggcaaccccaccaccaccatcgagagccccaagagcaccaagagcgccgacaccaccaccgtggccaccagcaccgccaccgccaagcccaacaccaccagcagccagaacggcgccgaggacaccaccaacagcggcggcaagagcagccacagcgtgaccaccgacctgaccagcaccaaggccgagcacctgaccaccccccaccccaccagccccctgagccccagacagcccaccagcacccaccccgtggccacccccaccagcagcggccacgaccacctgatgaagatcagcagcagcagcagcaccgtggccatccccggctacaccttcaccagccccggcatgaccaccaccctgctggagaccgtgttccaccacgtgagccaggccggcctggagctgctgaccagcggcgacctgcccaccctggccagccagagcgccggcatcaccgccagcagcgtgatcagccagagaacccagcagaccagcagccagatgcccgccagcagcaccgcccccagcagccaggagaccgtgcagcccaccagccccgccaccgccctgagaacccccaccctgcccgagaccatgagcagcagccccaccgccgccagcaccacccacagataccccaagacccccagccccaccgtggcccacgagagcaactgggccaagtgcgaggacctggagacccagacccagagcgagaagcagctggtgctgaacctgaccggcaacaccctgtgcgccggcggcgccagcgacgagaagctgatcagcctgatctgcagagccgtgaaggccaccttcaaccccgcccaggacaagtgcggcatcagactggccagcgtgcccggcagccagaccgtggtggtgaaggagatcaccatccacaccaagctgcccgccaaggacgtgtacgagagactgaaggacaagtgggacgagctgaaggaggccggcgtgagcgacatgaagctgggcgaccagggcccccccgaggaggccgaggacagattcagcatgcccctgatcatcaccatcgtgtgcatggccagcttcctgctgctggtggccgccctgtacggctgctgccaccagagactgagccagagaaaggaccagcagagactgaccgaggagctgcagaccgtggagaacggctaccacgacaaccccaccctggaggtgatggagaccagcagcgagatgcaggagaagaaggtggtgagcctgaacggcgagctgggcgacagctggatcgtgcccctggacaacctgaccaaggacgacctggacgaggaggaggacacccacctgtag

SEQ ID NO: 93681 - DNA, 1581 bp, synthetic construct
  misc_feature 1..1581: note = Description of Artificial Sequence: Synthetic coding sequence
  source 1..1581: mol_type = other DNA
atgagatgcgccctggccctgagcgccctgctgctgctgctgagcaccccccccctgctgcccagcagccccagccccagccccagccccagccagaacgccacccagaccaccaccgacagcagcaacaagaccgcccccacccccgccagcagcgtgaccatcatggccaccgacaccgcccagcagagcaccgtgcccaccagcaaggccaacgagatcctggccagcgtgaaggccaccaccctgggcgtgagcagcgacagccccggcaccaccaccctggcccagcaggtgagcggccccgtgaacaccaccgtggccagaggcggcggcagcggcaaccccaccaccaccatcgagagccccaagagcaccaagagcgccgacaccaccaccgtggccaccagcaccgccaccgccaagcccaacaccaccagcagccagaacggcgccgaggacaccaccaacagcggcggcaagagcagccacagcgtgaccaccgacctgaccagcaccaaggccgagcacctgaccaccccccaccccaccagccccctgagccccagacagcccaccagcacccaccccgtggccacccccaccagcagcggccacgaccacctgatgaagatcagcagcagcagcagcaccgtggccatccccggctacaccttcaccagccccggcatgaccaccaccctgcccagcagcgtgatcagccagagaacccagcagaccagcagccagatgcccgccagcagcaccgcccccagcagccaggagaccgtgcagcccaccagccccgccaccgccctgagaacccccaccctgcccgagaccatgagcagcagccccaccgccgccagcaccacccacagataccccaagacccccagccccaccgtggcccacgagagcaactgggtgacccccgccggcgtgggcacccagaccagagtggaggaggccctgagacaggccctgacccacagcctgctgcccgccggcggcgccagcgacgagaagctgatcagcctgatctgcagagccgtgaaggccaccttcaaccccgcccaggacaagtgcggcatcagactggccagcgtgcccggcagccagaccgtggtggtgaaggagatcaccatccacaccaagctgcccgccaaggacgtgtacgagagactgaaggacaagtgggacgagctgaaggaggccggcgtgagcgacatgaagctgggcgaccagggcccccccgaggaggccgaggacagattcagcatgcccctgatcatcaccatcgtgtgcatggccagcttcctgctgctggtggccgccctgtacggctgctgccaccagagactgagccagagaaaggaccagcagagactgaccgaggagctgcagaccgtggagaacggctaccacgacaaccccaccctggaggtgatggagaccagcagcgagatgcaggagaagaaggtggtgagcctgaacggcgagctgggcgacagctggatcgtgcccctggacaacctgaccaaggacgacctggacgaggaggaggacacccacctgtag

SEQ ID NO: 93682 - DNA, 1683 bp, synthetic construct
  misc_feature 1..1683: note = Description of Artificial Sequence: Synthetic coding sequence
  source 1..1683: mol_type = other DNA
atgagatgcgccctggccctgagcgccctgctgctgctgctgagcaccccccccctgctgcccagcagccccagccccagccccagccccagccagaacgagaccgccacccagaccaccaccgacagcagcaacaagaccgcccccacccccgccagcagcgtgaccatcatggccaccgacaccgcccagcagagcaccgtgcccaccagcaaggccaacgagatcctggccagcgtgaaggccaccaccctgggcgtgagcagcgacagccccggcaccaccaccctggcccagcaggtgagcggccccgtgaacaccaccgtggccagaggcggcggcagcggcaaccccaccaccaccatcgagagccccaagagcaccaagagcgccgacaccaccaccgtggccaccagcaccgccaccgccaagcccaacaccaccagcagccagaacggcgccgaggacaccaccaacagcggcggcaagagcagccacagcgtgaccaccgacctgaccagcaccaaggccgagcacctgaccaccccccaccccaccagccccctgagccccagacagcccaccagcacccaccccgtggccacccccaccagcagcggccacgaccacctgatgaagatcagcagcagcagcagcaccgtggccatccccggctacaccttcaccagccccggcatgaccaccaccctgctggagaccgtgttccaccacgtgagccaggccggcctggagctgctgaccagcggcgacctgcccaccctggccagccagagcgccggcatcaccgccagcagcgtgatcagccagagaacccagcagaccagcagccagatgcccgccagcagcaccgcccccagcagccaggagaccgtgcagcccaccagccccgccaccgccctgagaacccccaccctgcccgagaccatgagcagcagccccaccgccgccagcaccacccacagataccccaagacccccagccccaccgtggcccacgagagcaactgggccaagtgcgaggacctggagacccagacccagagcgagaagcagctggtgctgaacctgaccggcaacaccctgtgcgccggcggcgccagcgacgagaagctgatcagcctgatctgcagagccgtgaaggccaccttcaaccccgcccaggacaagtgcggcatcagactggccagcgtgcccggcagccagaccgtggtggtgaaggagatcaccatccacaccaagctgcccgccaaggacgtgtacgagagactgaaggacaagtgggacgagctgaaggaggccggcgtgagcgacatgaagctgggcgaccagggcccccccgaggaggccgaggacagattcagcatgcccctgatcatcaccatcgtgtgcatggccagcttcctgctgctggtggccgccctgtacggctgctgccaccagagactgagccagagaaaggaccagcagagactgaccgaggagctgcagaccgtggagaacggctaccacgacaaccccaccctggaggtgatggagaccagcagcgagatgcaggagaagaaggtggtgagcctgaacggcgagctgggcgacagctggatcgtgcccctggacaacctgaccaaggacgacctggacgaggaggaggacacccacctgtag

SEQ ID NO: 93683 - DNA, 1551 bp, synthetic construct
  misc_feature 1..1551: note = Description of Artificial Sequence: Synthetic coding sequence
  source 1..1551: mol_type = other DNA
atgagatgcgccctggccctgagcgccctgctgctgctgctgagcaccagccccagccccagccagaacgccacccagaccaccaccgacagcagcaacaagaccgcccccacccccgccagcagcgtgaccatcatggccaccgacaccgcccagcagagcaccgtgcccaccagcaaggccaacgagatcctggccagcgtgaaggccaccaccctgggcgtgagcagcgacagccccggcaccaccaccctggcccagcaggtgagcggccccgtgaacaccaccgtggccagaggcggcggcagcggcaaccccaccaccaccatcgagagccccaagagcaccaagagcgccgacaccaccaccgtggccaccagcaccgccaccgccaagcccaacaccaccagcagccagaacggcgccgaggacaccaccaacagcggcggcaagagcagccacagcgtgaccaccgacctgaccagcaccaaggccgagcacctgaccaccccccaccccaccagccccctgagccccagacagcccaccagcacccaccccgtggccacccccaccagcagcggccacgaccacctgatgaagatcagcagcagcagcagcaccgtggccatccccggctacaccttcaccagccccggcatgaccaccaccctgcccagcagcgtgatcagccagagaacccagcagaccagcagccagatgcccgccagcagcaccgcccccagcagccaggagaccgtgcagcccaccagccccgccaccgccctgagaacccccaccctgcccgagaccatgagcagcagccccaccgccgccagcaccacccacagataccccaagacccccagccccaccgtggcccacgagagcaactgggccaagtgcgaggacctggagacccagacccagagcgagaagcagctggtgctgaacctgaccggcaacaccctgtgcgccggcggcgccagcgacgagaagctgatcagcctgatctgcagagccgtgaaggccaccttcaaccccgcccaggacaagtgcggcatcagactggccagcgtgcccggcagccagaccgtggtggtgaaggagatcaccatccacaccaagctgcccgccaaggacgtgtacgagagactgaaggacaagtgggacgagctgaaggaggccggcgtgagcgacatgaagctgggcgaccagggcccccccgaggaggccgaggacagattcagcatgcccctgatcatcaccatcgtgtgcatggccagcttcctgctgctggtggccgccctgtacggctgctgccaccagagactgagccagagaaaggaccagcagagactgaccgaggagctgcagaccgtggagaacggctaccacgacaaccccaccctggaggtgatggagaccagcagcgagatgcaggagaagaaggtggtgagcctgaacggcgagctgggcgacagctggatcgtgcccctggacaacctgaccaaggacgacctggacgaggaggaggacacccacctgtag

SEQ ID NO: 93684 - DNA, 1986 bp, synthetic construct
  misc_feature 1..1986: note = Description of Artificial Sequence: Synthetic coding sequence
  source 1..1986: mol_type = other DNA
atggagggcgccagagccagaggcgcccagctgagactgggcgagagagtgagacccgtgggcagaagaagcgcccccggcagaagcagattcagacagccctggagacccggcgccagcgacagcgccccccccgccggcaccatggcccagagcagagtgctgctgctgctgctgctgctgcccccccagctgcacctgggccccgtgctggccgtgagagcccccggcttcggcagaagcggcggccacagcctgagccccgaggagaacgagttcgccgaggaggagcccgtgctggtgctgagccccgaggagcccggccccggccccgccgccgtgagctgccccagagactgcgcctgcagccaggagggcgtggtggactgcggcggcatcgacctgagagagttccccggcgacctgcccgagcacaccaaccacctgagcctgcagaacaaccagctggagaagatctaccccgaggagctgagcagactgcacagactggagaccctgaacctgcagaacaacagactgaccagcagaggcctgcccgagaaggccttcgagcacctgaccaacctgaactacctgtacctggccaacaacaagctgaccctggcccccagattcctgcccaacgccctgatcagcgtggacttcgccgccaactacctgaccaagatctacggcctgaccttcggccagaagcccaacctgagaagcgtgtacctgcacaacaacaagctggccgacgccggcctgcccgacaacatgttcaacggcagcagcaacgtggaggtgctgatcctgagcagcaacttcctgagacacgtgcccaagcacctgccccccgccctgtacaagctgcacctgaagaacaacaagctggagaagatcccccccggcgccttcagcgagctgagcagcctgagagagctgtacctgcagaacaactacctgaccgacgagggcctggacaacgagaccttctggaagctgagcagcctggagtacctggacctgagcagcaacaacctgagcagagtgcccgccggcctgcccagaagcctggtgctgctgcacctggagaagaacgccatcagaagcgtggacgccaacgtgctgacccccatcagaagcctggagtacctgctgctgcacagcaaccagctgagagagcagggcatccaccccctggccttccagggcctgaagagactgcacaccgtgcacctgtacaacaacgccctggagagagtgcccagcggcctgcccagaagagtgagaaccctgatgatcctgcacaaccagatcaccggcatcggcagagaggacttcgccaccacctacttcctggaggagctgaacctgagctacaacagaatcaccagcccccaggtgcacagagacgccttcagaaagctgagactgctgagaagcctggacctgagcggcaacagactgcacaccctgccccccggcctgcccagaaacgtgcacgtgctgaaggtgaagagaaacgagctggccgccctggccagaggcgccctggtgggcatggcccagctgagagagctgtacctgaccagcaacagactgagaagcagagccctgggccccagagcctgggtggacctggcccacctgcagctgctggacatcgccggcaaccagctgaccgagatccccgagggcctgcccgagagcctggagtacctgtacctgcagaacaacaagatcagcgccgtgcccgccaacgccttcgacagcacccccaacctgaagggcatcttcctgagattcaacaagctggccgtgggcagcgtggtggacagcgccttcagaagactgaagcacctgcaggtgctggacatcgagggcaacctggagttcggcgacatcagcaaggacagaggcagactgggcaaggagaaggaggaggaggaggaggaggaggaggaggaggaggagaccagatag

SEQ ID NO: 93685 - DNA, 1929 bp, synthetic construct
  misc_feature 1..1929: note = Description of Artificial Sequence: Synthetic coding sequence
  source 1..1929: mol_type = other DNA
atggagggcgaggaggccgagcagcccgcctggttcagacagccctggagacccggcgccagcgacagcgccccccccgccggcaccatggcccagagcagagtgctgctgctgctgctgctgctgcccccccagctgcacctgggccccgtgctggccgtgagagcccccggcttcggcagaagcggcggccacagcctgagccccgaggagaacgagttcgccgaggaggagcccgtgctggtgctgagccccgaggagcccggccccggccccgccgccgtgagctgccccagagactgcgcctgcagccaggagggcgtggtggactgcggcggcatcgacctgagagagttccccggcgacctgcccgagcacaccaaccacctgagcctgcagaacaaccagctggagaagatctaccccgaggagctgagcagactgcacagactggagaccctgaacctgcagaacaacagactgaccagcagaggcctgcccgagaaggccttcgagcacctgaccaacctgaactacctgtacctggccaacaacaagctgaccctggcccccagattcctgcccaacgccctgatcagcgtggacttcgccgccaactacctgaccaagatctacggcctgaccttcggccagaagcccaacctgagaagcgtgtacctgcacaacaacaagctggccgacgccggcctgcccgacaacatgttcaacggcagcagcaacgtggaggtgctgatcctgagcagcaacttcctgagacacgtgcccaagcacctgccccccgccctgtacaagctgcacctgaagaacaacaagctggagaagatcccccccggcgccttcagcgagctgagcagcctgagagagctgtacctgcagaacaactacctgaccgacgagggcctggacaacgagaccttctggaagctgagcagcctggagtacctggacctgagcagcaacaacctgagcagagtgcccgccggcctgcccagaagcctggtgctgctgcacctggagaagaacgccatcagaagcgtggacgccaacgtgctgacccccatcagaagcctggagtacctgctgctgcacagcaaccagctgagagagcagggcatccaccccctggccttccagggcctgaagagactgcacaccgtgcacctgtacaacaacgccctggagagagtgcccagcggcctgcccagaagagtgagaaccctgatgatcctgcacaaccagatcaccggcatcggcagagaggacttcgccaccacctacttcctggaggagctgaacctgagctacaacagaatcaccagcccccaggtgcacagagacgccttcagaaagctgagactgctgagaagcctggacctgagcggcaacagactgcacaccctgccccccggcctgcccagaaacgtgcacgtgctgaaggtgaagagaaacgagctggccgccctggccagaggcgccctggtgggcatggcccagctgagagagctgtacctgaccagcaacagactgagaagcagagccctgggccccagagcctgggtggacctggcccacctgcagctgctggacatcgccggcaaccagctgaccgagatccccgagggcctgcccgagagcctggagtacctgtacctgcagaacaacaagatcagcgccgtgcccgccaacgccttcgacagcacccccaacctgaagggcatcttcctgagattcaacaagctggccgtgggcagcgtggtggacagcgccttcagaagactgaagcacctgcaggtgctggacatcgagggcaacctggagttcggcgacatcagcaaggacagaggcagactgggcaaggagaaggaggaggaggaggaggaggaggaggaggaggaggagaccagatag

SEQ ID NO: 93686 - DNA, 1560 bp, synthetic construct
  misc_feature 1..1560: note = Description of Artificial Sequence: Synthetic coding sequence
  source 1..1560: mol_type = other DNA
atggagggcgccagagccagaggcgcccagctgagactgggcgagagagtgagacccgtgggcagaagaagcgcccccggcagaagcagattcagacagccctggagacccggcgccagcgacagcgccccccccgccggcaccatggcccagagcagagtgctgctgctgctgctgctgctgcccccccagctgcacctgggccccgtgctggccgtgagagcccccggcttcggcagaagcggcggccacagcctgagccccgaggagaacgagttcgccgaggaggagcccgtgctggtgctgagccccgaggagcccggccccggccccgccgccgtgagctgccccagagactgcgcctgcagccaggagggcgtggtggactgcggcggcatcgacctgagagagttccccggcgacctgcccgagcacaccaaccacctgagcctgcagaacaacaagctggagaagatcccccccggcgccttcagcgagctgagcagcctgagagagctgtacctgcagaacaactacctgaccgacgagggcctggacaacgagaccttctggaagctgagcagcctggagtacctggacctgagcagcaacaacctgagcagagtgcccgccggcctgcccagaagcctggtgctgctgcacctggagaagaacgccatcagaagcgtggacgccaacgtgctgacccccatcagaagcctggagtacctgctgctgcacagcaaccagctgagagagcagggcatccaccccctggccttccagggcctgaagagactgcacaccgtgcacctgtacaacaacgccctggagagagtgcccagcggcctgcccagaagagtgagaaccctgatgatcctgcacaaccagatcaccggcatcggcagagaggacttcgccaccacctacttcctggaggagctgaacctgagctacaacagaatcaccagcccccaggtgcacagagacgccttcagaaagctgagactgctgagaagcctggacctgagcggcaacagactgcacaccctgccccccggcctgcccagaaacgtgcacgtgctgaaggtgaagagaaacgagctggccgccctggccagaggcgccctggtgggcatggcccagctgagagagctgtacctgaccagcaacagactgagaagcagagccctgggccccagagcctgggtggacctggcccacctgcagctgctggacatcgccggcaaccagctgaccgagatccccgagggcctgcccgagagcctggagtacctgtacctgcagaacaacaagatcagcgccgtgcccgccaacgccttcgacagcacccccaacctgaagggcatcttcctgagattcaacaagctggccgtgggcagcgtggtggacagcgccttcagaagactgaagcacctgcaggtgctggacatcgagggcaacctggagttcggcgacatcagcaaggacagaggcagactgggcaaggagaaggaggaggaggaggaggaggaggaggaggaggaggagaccagatag

SEQ ID NO: 93687 - DNA, 1095 bp, synthetic construct
  misc_feature 1..1095: note = Description of Artificial Sequence: Synthetic coding sequence
  source 1..1095: mol_type = other DNA
atggccagagccatggccgccgcctggcccctgctgctggtggccctgctggtgctgagctggcccccccccggcaccggcgacgtggtggtgcaggcccccacccaggtgcccggcttcctgggcgacagcgtgaccctgccctgctacctgcaggtgcccaacatggaggtgacccacgtgagccagctgacctgggccagacacggcgagagcggcagcatggccgtgttccaccagacccagggccccagctacagcgagagcaagagactggagttcgtggccgccagactgggcgccgagctgagaaacgccagcctgagaatgttcggcctgagagtggaggacgagggcaactacacctgcctgttcgtgaccttcccccagggcagcagaagcgtggacatctggctgagagtgctggccaagccccagaacaccgccgaggtgcagaaggtgcagctgaccggcgagcccgtgcccatggccagatgcgtgagcaccggcggcagaccccccgcccagatcacctggcacagcgacctgggcggcatgcccaacaccagccaggtgcccggcttcctgagcggcaccgtgaccgtgaccagcctgtggatcctggtgcccagcagccaggtggacggcaagaacgtgacctgcaaggtggagcacgagagcttcgagaagccccagctgctgaccgtgaacctgaccgtgtactacccccccgaggtgagcatcagcggctacgacaacaactggtacctgggccagaacgaggccaccctgacctgcgacgccagaagcaaccccgagcccaccggctacaactggagcaccaccatgggccccctgccccccttcgccgtggcccagggcgcccagctgctgatcagacccgtggacaagcccatcaacaccaccctgatctgcaacgtgaccaacgccctgggcgccagacaggccgagctgaccgtgcaggtgaagggcaccgagcacgccagcgccagcgccaacggccacgtgagctacagcgccgtgagcagagagaacagcagcagccaggacccccagaccgagggcaccagatag

SEQ ID NO: 93688 - DNA, 1119 bp, synthetic construct
  misc_feature 1..1119: note = Description of Artificial Sequence: Synthetic coding sequence
  source 1..1119: mol_type = other DNA
atggccagagccatggccgccgcctggcccctgctgctggtggccctgctggtgctgagctggcccccccccggcaccggcgacgtggtggtgcaggcccccacccaggtgcccggcttcctgggcgacagcgtgaccctgccctgctacctgcaggtgcccaacatggaggtgacccacgtgagccagctgacctgggccagacacggcgagagcggcagcatggccgtgttccaccagacccagggccccagctacagcgagagcaagagactggagttcgtggccgccagactgggcgccgagctgagaaacgccagcctgagaatgttcggcctgagagtggaggacgagggcaactacacctgcctgttcgtgaccttcccccagggcagcagaagcgtggacatctggctgagagtgctggccaagccccagaacaccgccgaggtgcagaaggtgcagctgaccggcgagcccgtgcccatggccagatgcgtgagcaccggcggcagaccccccgcccagatcacctggcacagcgacctgggcggcatgcccaacaccagccaggtgcccggcttcctgagcggcaccgtgaccgtgaccagcctgtggatcctggtgcccagcagccaggtggacggcaagaacgtgacctgcaaggtggagcacgagagcttcgagaagccccagctgctgaccgtgaacctgaccgtgtactacccccccgaggtgagcatcagcggctacgacaacaactggtacctgggccagaacgaggccaccctgacctgcgacgccagaagcaaccccgagcccaccggctacaactggagcaccaccatgggccccctgccccccttcgccgtggcccagggcgcccagctgctgatcagacccgtggacaagcccatcaacaccaccctgatctgcaacgtgaccaacgccctgggcgccagacaggccgagctgaccgtgcaggtgaaggagggcccccccagcgagcacagcggcaccgagcacgccagcgccagcgccaacggccacgtgagctacagcgccgtgagcagagagaacagcagcagccaggacccccagaccgagggcaccagatag

SEQ ID NO: 93689 - DNA, 1179 bp, synthetic construct
  misc_feature 1..1179: note = Description of Artificial Sequence: Synthetic coding sequence
  source 1..1179: mol_type = other DNA
atggccagagccatggccgccgcctggcccctgctgctggtggccctgctggtgctgagctggcccccccccggcaccggcgacgtggtggtgcaggcccccacccaggtgcccggcttcctgggcgacagcgtgaccctgccctgctacctgcaggtgcccaacatggaggtgacccacgtgagccagctgacctgggccagacacggcgagagcggcagcatggccgtgttccaccagacccagggccccagctacagcgagagcaagagactggagttcgtggccgccagactgggcgccgagctgagaaacgccagcctgagaatgttcggcctgagagtggaggacgagggcaactacacctgcctgttcgtgaccttcccccagggcagcagaagcgtggacatctggctgagagtgctggccaagccccagaacaccgccgaggtgcagaaggtgcagctgaccggcgagcccgtgcccatggccagatgcgtgagcaccggcggcagaccccccgcccagatcacctggcacagcgacctgggcggcatgcccaacaccagccaggtgcccggcttcctgagcggcaccgtgaccgtgaccagcctgtggatcctggtgcccagcagccaggtggacggcaagaacgtgacctgcaaggtggagcacgagagcttcgagaagccccagctgctgaccgtgaacctgaccgtgtactacccccccgaggtgagcatcagcggctacgacaacaactggtacctgggccagaacgaggccaccctgacctgcgacgccagaagcaaccccgagcccaccggctacaactggagcaccaccatgggccccctgccccccttcgccgtggcccagggcgcccagctgctgatcagacccgtggacaagcccatcaacaccaccctgatctgcaacgtgaccaacgccctgggcgccagacaggccgagctgaccgtgcaggtgaaggagggcccccccagcgagcacagcggcatcagcagaaacgccatcatcttcctggtgctgggcatcctggtgttcctgatcctgctgggcatcggcatctacttctactggagcaagtgcagcagagaggtgctgtggcactgccacctgtgccccagcagcgagcaccaccagagctgcagaaactag

SEQ ID NO: 93690 - DNA, 1254 bp, synthetic construct
  misc_feature 1..1254: note = Description of Artificial Sequence: Synthetic coding sequence
  source 1..1254: mol_type = other DNA
atggccagagccatggccgccgcctggcccctgctgctggtggccctgctggtgctgagctggcccccccccggcaccggcgacgtggtggtgcaggcccccacccaggtgcccggcttcctgggcgacagcgtgaccctgccctgctacctgcaggtgcccaacatggaggtgacccacgtgagccagctgacctgggccagacacggcgagagcggcagcatggccgtgttccaccagacccagggccccagctacagcgagagcaagagactggagttcgtggccgccagactgggcgccgagctgagaaacgccagcctgagaatgttcggcctgagagtggaggacgagggcaactacacctgcctgttcgtgaccttcccccagggcagcagaagcgtggacatctggctgagagtgctggccaagccccagaacaccgccgaggtgcagaaggtgcagctgaccggcgagcccgtgcccatggccagatgcgtgagcaccggcggcagaccccccgcccagatcacctggcacagcgacctgggcggcatgcccaacaccagccaggtgcccggcttcctgagcggcaccgtgaccgtgaccagcctgtggatcctggtgcccagcagccaggtggacggcaagaacgtgacctgcaaggtggagcacgagagcttcgagaagccccagctgctgaccgtgaacctgaccgtgtactacccccccgaggtgagcatcagcggctacgacaacaactggtacctgggccagaacgaggccaccctgacctgcgacgccagaagcaaccccgagcccaccggctacaactggagcaccaccatgggccccctgccccccttcgccgtggcccagggcgcccagctgctgatcagacccgtggacaagcccatcaacaccaccctgatctgcaacgtgaccaacgccctgggcgccagacaggccgagctgaccgtgcaggtgaaggagggcccccccagcgagcacagcggcatcagcagaaacgccatcatcttcctggtgctgggcatcctggtgttcctgatcctgctgggcatcggcatctacttctactggagcaagtgcagcagagaggtgctgtggcactgccacctgtgccccagcagcaccgagcacgccagcgccagcgccaacggccacgtgagctacagcgccgtgagcagagagaacagcagcagccaggacccccagaccgagggcaccagatag

SEQ ID NO: 93691 - DNA, 1554 bp, synthetic construct
  misc_feature 1..1554: note = Description of Artificial Sequence: Synthetic coding sequence
  source 1..1554: mol_type = other DNA
atggccagaatgggcctggccggcgccgccggcagatggtggggcctggccctgggcctgaccgccttcttcctgcccggcgtgcacagccaggtggtgcaggtgaacgacagcatgtacggcttcatcggcaccgacgtggtgctgcactgcagcttcgccaaccccctgcccagcgtgaagatcacccaggtgacctggcagaagagcaccaacggcagcaagcagaacgtggccatctacaaccccagcatgggcgtgagcgtgctggccccctacagagagagagtggagttcctgagacccagcttcaccgacggcaccatcagactgagcagactggagctggaggacgagggcgtgtacatctgcgagttcgccaccttccccaccggcaacagagagagccagctgaacctgaccgtgatggccaagcccaccaactggatcgagggcacccaggccgtgctgagagccaagaagggccaggacgacaaggtgctggtggccacctgcaccagcgccaacggcaagccccccagcgtggtgagctgggagaccagactgaagggcgaggccgagtaccaggagatcagaaaccccaacggcaccgtgaccgtgatcagcagatacagactggtgcccagcagagaggcccaccagcagagcctggcctgcatcgtgaactaccacatggacagattcaaggagagcctgaccctgaacgtgcagtacgagcccgaggtgaccatcgagggcttcgacggcaactggtacctgcagagaatggacgtgaagctgacctgcaaggccgacgccaacccccccgccaccgagtaccactggaccaccctgaacggcagcctgcccaagggcgtggaggcccagaacagaaccctgttcttcaagggccccatcaactacagcctggccggcacctacatctgcgaggccaccaaccccatcggcaccagaagcggccaggtggaggtgaacatcaccgagttcccctacacccccagcccccccgagcacggcagaagagccggccccgtgcccaccgccatcatcggcggcgtggccggcagcatcctgctggtgctgatcgtggtgggcggcatcgtggtggccctgagaagaagaagacacaccttcaagggcgactacagcaccaagaagcacgtgtacggcaacggctacagcaaggccggcatcccccagcaccacccccccatggcccagaacctgcagtaccccgacgacagcgacgacgagaagaaggccggccccctgggcggcagcagctacgaggaggaggaggaggaggaggagggcggcggcggcggcgagagaaaggtgggcggcccccaccccaagtacgacgaggacgccaagagaccctacttcaccgtggacgaggccgaggccagacaggacggctacggcgacagaaccctgggctaccagtacgaccccgagcagctggacctggccgagaacatggtgagccagaacgacggcagcttcatcagcaagaaggagtggtacgtgtag

SEQ ID NO: 93692 - DNA, 1059 bp, synthetic construct
  misc_feature 1..1059: note = Description of Artificial Sequence: Synthetic coding sequence
  source 1..1059: mol_type = other DNA
atggccagaatgggcctggccggcgccgccggcagatggtggggcctggccctgggcctgaccgccttcttcctgcccggcgtgcacagccaggtggtgcaggtgaacgacagcatgtacggcttcatcggcaccgacgtggtgctgcactgcagcttcgccaaccccctgcccagcgtgaagatcacccaggtgacctggcagaagagcaccaacggcagcaagcagaacgtggccatctacaaccccagcatgggcgtgagcgtgctggccccctacagagagagagtggagttcctgagacccagcttcaccgacggcaccatcagactgagcagactggagctggaggacgagggcgtgtacatctgcgagttcgccaccttccccaccggcaacagagagagccagctgaacctgaccgtgatggccaagcccaccaactggatcgagggcacccaggccgtgctgagagccaagaagggccaggacgacaaggtgctggtggccacctgcaccagcgccaacggcaagccccccagcgtggtgagctgggagaccagactgaagggcgaggccgagtaccaggagatcagaaaccccaacggcaccgtgaccgtgatcagcagatacagactggtgcccagcagagaggcccaccagcagagcctggcctgcatcgtgaactaccacatggacagattcaaggagagcctgaccctgaacgtgcagtacgagcccgaggtgaccatcgagggcttcgacggcaactggtacctgcagagaatggacgtgaagctgacctgcaaggccgacgccaacccccccgccaccgagtaccactggaccaccctgaacggcagcctgcccaagggcgtggaggcccagaacagaaccctgttcttcaagggccccatcaactacagcctggccggcacctacatctgcgaggccaccaaccccatcggcaccagaagcggccaggtggaggtgaacatcaccgccttctgccagctgatctaccccggcaagggcagaaccagagccagaatgttctag

SEQ ID NO: 93693 - DNA, 1377 bp, synthetic construct
  misc_feature 1..1377: note = Description of Artificial Sequence: Synthetic coding sequence
  source 1..1377: mol_type = other DNA
atggccagaatgggcctggccggcgccgccggcagatggtggggcctggccctgggcctgaccgccttcttcctgcccggcgtgcacagccaggtggtgcaggtgaacgacagcatgtacggcttcatcggcaccgacgtggtgctgcactgcagcttcgccaaccccctgcccagcgtgaagatcacccaggtgacctggcagaagagcaccaacggcagcaagcagaacgtggccatctacaaccccagcatgggcgtgagcgtgctggccccctacagagagagagtggagttcctgagacccagcttcaccgacggcaccatcagactgagcagactggagctggaggacgagggcgtgtacatctgcgagttcgccaccttccccaccggcaacagagagagccagctgaacctgaccgtgatggccaagcccaccaactggatcgagggcacccaggccgtgctgagagccaagaagggccaggacgacaaggtgctggtggccacctgcaccagcgccaacggcaagccccccagcgtggtgagctgggagaccagactgaagggcgaggccgagtaccaggagatcagaaaccccaacggcaccgtgaccgtgatcagcagatacagactggtgcccagcagagaggcccaccagcagagcctggcctgcatcgtgaactaccacatggacagattcaaggagagcctgaccctgaacgtgcagtacgagcccgaggtgaccatcgagggcttcgacggcaactggtacctgcagagaatggacgtgaagctgacctgcaaggccgacgccaacccccccgccaccgagtaccactggaccaccctgaacggcagcctgcccaagggcgtggaggcccagaacagaaccctgttcttcaagggccccatcaactacagcctggccggcacctacatctgcgaggccaccaaccccatcggcaccagaagcggccaggtggaggtgaacatcaccgagaagcccagaccccagagaggcctgggcagcgccgccagactgctggccggcaccgtggccgtgttcctgatcctggtggccgtgctgaccgtgttcttcctgtacaacagacagcagaagagcccccccgagaccgacggcgccggcaccgaccagcccctgagccagaagcccgagcccagccccagcagacagagcagcctggtgcccgaggacatccaggtggtgcacctggaccccggcagacagcagcagcaggaggaggaggacctgcagaagctgagcctgcagcccccctactacgacctgggcgtgagccccagctaccaccccagcgtgagaaccaccgagcccagaggcgagtgcccctag

SEQ ID NO: 93694 - DNA, 1617 bp, synthetic construct
  misc_feature 1..1617: note = Description of Artificial Sequence: Synthetic coding sequence
  source 1..1617: mol_type = other DNA
atggccagagccgccgccctgctgcccagcagaagcccccccacccccctgctgtggcccctgctgctgctgctgctgctggagaccggcgcccaggacgtgagagtgcaggtgctgcccgaggtgagaggccagctgggcggcaccgtggagctgccctgccacctgctgccccccgtgcccggcctgtacatcagcctggtgacctggcagagacccgacgcccccgccaaccaccagaacgtggccgccttccaccccaagatgggccccagcttccccagccccaagcccggcagcgagagactgagcttcgtgagcgccaagcagagcaccggccaggacaccgaggccgagctgcaggacgccaccctggccctgcacggcctgaccgtggaggacgagggcaactacacctgcgagttcgccaccttccccaagggcagcgtgagaggcatgacctggctgagagtgatcgccaagcccaagaaccaggccgaggcccagaaggtgaccttcagccaggaccccaccaccgtggccctgtgcatcagcaaggagggcagaccccccgccagaatcagctggctgagcagcctggactgggaggccaaggagacccaggtgagcggcaccctggccggcaccgtgaccgtgaccagcagattcaccctggtgcccagcggcagagccgacggcgtgaccgtgacctgcaaggtggagcacgagagcttcgaggagcccgccctgatccccgtgaccctgagcgtgagatacccccccgaggtgagcatcagcggctacgacgacaactggtacctgggcagaaccgacgccaccctgagctgcgacgtgagaagcaaccccgagcccaccggctacgactggagcaccaccagcggcaccttccccaccagcgccgtggcccagggcagccagctggtgatccacgccgtggacagcctgttcaacaccaccttcgtgtgcaccgtgaccaacgccgtgggcatgggcagagccgagcaggtgatcttcgtgagagagacccccaacaccgccggcgccggcgccaccggcggcatcatcggcggcatcatcgccgccatcatcgccaccgccgtggccgccaccggcatcctgatctgcagacagcagagaaaggagcagaccctgcagggcgccgaggaggacgaggacctggagggcccccccagctacaagccccccacccccaaggccaagctggaggcccaggagatgcccagccagctgttcaccctgggcgccagcgagcacagccccctgaagaccccctacttcgacgccggcgccagctgcaccgagcaggagatgcccagataccacgagctgcccaccctggaggagagaagcggccccctgcaccccggcgccaccagcctgggcagccccatccccgtgccccccggcccccccgccgtggaggacgtgagcctggacctggaggacgaggagggcgaggaggaggaggagtacctggacaagatcaaccccatctacgacgccctgagctacagcagccccagcgacagctaccagggcaagggcttcgtgatgagcagagccatgtacgtgtag

SEQ ID NO: 93695 - DNA, 1440 bp, synthetic construct
  misc_feature 1..1440: note = Description of Artificial Sequence: Synthetic coding sequence
  source 1..1440: mol_type = other DNA
atggccagagccgccgccctgctgcccagcagaagcccccccacccccctgctgtggcccctgctgctgctgctgctgctggagaccggcgcccaggacgtgagagtgcaggtgctgcccgaggtgagaggccagctgggcggcaccgtggagctgccctgccacctgctgccccccgtgcccggcctgtacatcagcctggtgacctggcagagacccgacgcccccgccaaccaccagaacgtggccgccttccaccccaagatgggccccagcttccccagccccaagcccggcagcgagagactgagcttcgtgagcgccaagcagagcaccggccaggacaccgaggccgagctgcaggacgccaccctggccctgcacggcctgaccgtggaggacgagggcaactacacctgcgagttcgccaccttccccaagggcagcgtgagaggcatgacctggctgagagtgatcgccaagcccaagaaccaggccgaggcccagaaggtgaccttcagccaggaccccaccaccgtggccctgtgcatcagcaaggagggcagaccccccgccagaatcagctggctgagcagcctggactgggaggccaaggagacccaggtgagcggcaccctggccggcaccgtgaccgtgaccagcagattcaccctggtgcccagcggcagagccgacggcgtgaccgtgacctgcaaggtggagcacgagagcttcgaggagcccgccctgatccccgtgaccctgagcgtgagatacccccccgaggtgagcatcagcggctacgacgacaactggtacctgggcagaaccgacgccaccctgagctgcgacgtgagaagcaaccccgagcccaccggctacgactggagcaccaccagcggcaccttccccaccagcgccgtggcccagggcagccagctggtgatccacgccgtggacagcctgttcaacaccaccttcgtgtgcaccgtgaccaacgccgtgggcatgggcagagccgagcaggtgatcttcgtgagagagacccccagagccagccccagagacgtgggccccctggtgtggggcgccgtgggcggcaccctgctggtgctgctgctgctggccggcggcagcctggccttcatcctgctgagagtgagaagaagaagaaagagccccggcggcgccggcggcggcgccagcggcgacggcggcttctacgaccccaaggcccaggtgctgggcaacggcgaccccgtgttctggacccccgtggtgcccggccccatggagcccgacggcaaggacgaggaggaggaggaggaggaggagaaggccgagaagggcctgatgctgccccccccccccgccctggaggacgacatggagagccagctggacggcagcctgatcagcagaagagccgtgtacgtgtag

SEQ ID NO: 93696 - DNA, 1101 bp, synthetic construct
  misc_feature 1..1101: note = Description of Artificial Sequence: Synthetic coding sequence
  source 1..1101: mol_type = other DNA
atggccagaaccctgagacccagccccctgtgccccggcggcggcaaggcccagctgagcagcgccagcctgctgggcgccggcctgctgctgcagccccccacccccccccccctgctgctgctgctgttccccctgctgctgttcagcagactgtgcggcgccctggccggccccatcatcgtggagccccacgtgaccgccgtgtggggcaagaacgtgagcctgaagtgcctgatcgaggtgaacgagaccatcacccagatcagctgggagaagatccacggcaagagcagccagaccgtggccgtgcaccacccccagtacggcttcagcgtgcagggcgagtaccagggcagagtgctgttcaagaactacagcctgaacgacgccaccatcaccctgcacaacatcggcttcagcgacagcggcaagtacatctgcaaggccgtgaccttccccctgggcaacgcccagagcagcaccaccgtgaccgtgctggtggagcccaccgtgagcctgatcaagggccccgacagcctgatcgacggcggcaacgagaccgtggccgccatctgcatcgccgccaccggcaagcccgtggcccacatcgactgggagggcgacctgggcgagatggagagcaccaccaccagcttccccaacgagaccgccaccatcatcagccagtacaagctgttccccaccagattcgccagaggcagaagaatcacctgcgtggtgaagcaccccgccctggagaaggacatcagatacagcttcatcctggacatccagtacgcccccgaggtgagcgtgaccggctacgacggcaactggttcgtgggcagaaagggcgtgaacctgaagtgcaacgccgacgccaaccccccccccttcaagagcgtgtggagcagactggacggccagtggcccgacggcctgctggccagcgacaacaccctgcacttcgtgcaccccctgaccttcaactacagcggcgtgtacatctgcaaggtgaccaacagcctgggccagagaagcgaccagaaggtgatctacatcagcgcctacaacagcgtggccagcctgaactgctag

SEQ ID NO: 93697 - DNA, 1650 bp, synthetic construct
  misc_feature 1..1650: note = Description of Artificial Sequence: Synthetic coding sequence
  source 1..1650: mol_type = other DNA
atggccagaaccctgagacccagccccctgtgccccggcggcggcaaggcccagctgagcagcgccagcctgctgggcgccggcctgctgctgcagccccccacccccccccccctgctgctgctgctgttccccctgctgctgttcagcagactgtgcggcgccctggccggccccatcatcgtggagccccacgtgaccgccgtgtggggcaagaacgtgagcctgaagtgcctgatcgaggtgaacgagaccatcacccagatcagctgggagaagatccacggcaagagcagccagaccgtggccgtgcaccacccccagtacggcttcagcgtgcagggcgagtaccagggcagagtgctgttcaagaactacagcctgaacgacgccaccatcaccctgcacaacatcggcttcagcgacagcggcaagtacatctgcaaggccgtgaccttccccctgggcaacgcccagagcagcaccaccgtgaccgtgctggtggagcccaccgtgagcctgatcaagggccccgacagcctgatcgacggcggcaacgagaccgtggccgccatctgcatcgccgccaccggcaagcccgtggcccacatcgactgggagggcgacctgggcgagatggagagcaccaccaccagcttccccaacgagaccgccaccatcatcagccagtacaagctgttccccaccagattcgccagaggcagaagaatcacctgcgtggtgaagcaccccgccctggagaaggacatcagatacagcttcatcctggacatccagtacgcccccgaggtgagcgtgaccggctacgacggcaactggttcgtgggcagaaagggcgtgaacctgaagtgcaacgccgacgccaaccccccccccttcaagagcgtgtggagcagactggacggccagtggcccgacggcctgctggccagcgacaacaccctgcacttcgtgcaccccctgaccttcaactacagcggcgtgtacatctgcaaggtgaccaacagcctgggccagagaagcgaccagaaggtgatctacatcagcgacccccccaccaccaccaccctgcagcccaccatccagtggcaccccagcaccgccgacatcgaggacctggccaccgagcccaagaagctgcccttccccctgagcaccctggccaccatcaaggacgacaccatcgccaccatcatcgccagcgtggtgggcggcgccctgttcatcgtgctggtgagcgtgctggccggcatcttctgctacagaagaagaagaaccttcagaggcgactacttcgccaagaactacatcccccccagcgacatgcagaaggagagccagatcgacgtgctgcagcaggacgagctggacagctaccccgacagcgtgaagaaggagaacaagaaccccgtgaacaacctgatcagaaaggactacctggaggagcccgagaagacccagtggaacaacgtggagaacctgaacagattcgagagacccatggactactacgaggacctgaagatgggcatgaagttcgtgagcgacgagcactacgacgagaacgaggacgacctggtgagccacgtggacggcagcgtgatcagcagaagagagtggtacgtgtag

SEQ ID NO: 93698 - DNA, 1464 bp, synthetic construct
  misc_feature 1..1464: note = Description of Artificial Sequence: Synthetic coding sequence
  source 1..1464: mol_type = other DNA
atggccgagggctggagatggtgcttcgtgagaagaacccccggcctgctgagaggccccctgctgcccagaagcttcagcggcaaccccagagccctggccggccccatcatcgtggagccccacgtgaccgccgtgtggggcaagaacgtgagcctgaagtgcctgatcgaggtgaacgagaccatcacccagatcagctgggagaagatccacggcaagagcagccagaccgtggccgtgcaccacccccagtacggcttcagcgtgcagggcgagtaccagggcagagtgctgttcaagaactacagcctgaacgacgccaccatcaccctgcacaacatcggcttcagcgacagcggcaagtacatctgcaaggccgtgaccttccccctgggcaacgcccagagcagcaccaccgtgaccgtgctggtggagcccaccgtgagcctgatcaagggccccgacagcctgatcgacggcggcaacgagaccgtggccgccatctgcatcgccgccaccggcaagcccgtggcccacatcgactgggagggcgacctgggcgagatggagagcaccaccaccagcttccccaacgagaccgccaccatcatcagccagtacaagctgttccccaccagattcgccagaggcagaagaatcacctgcgtggtgaagcaccccgccctggagaaggacatcagatacagcttcatcctggacatccagtacgcccccgaggtgagcgtgaccggctacgacggcaactggttcgtgggcagaaagggcgtgaacctgaagtgcaacgccgacgccaaccccccccccttcaagagcgtgtggagcagactggacggccagtggcccgacggcctgctggccagcgacaacaccctgcacttcgtgcaccccctgaccttcaactacagcggcgtgtacatctgcaaggtgaccaacagcctgggccagagaagcgaccagaaggtgatctacatcagcgacgtgcccttcaagcagaccagcagcatcgccgtggccggcgccgtgatcggcgccgtgctggccctgttcatcatcgccatcttcgtgaccgtgctgctgacccccagaaagaagagacccagctacctggacaaggtgatcgacctgccccccacccacaagcccccccccctgtacgaggagagaagcccccccctgccccagaaggacctgttccagcccgagcacctgcccctgcagacccagttcaaggagagagaggtgggcaacctgcagcacagcaacggcctgaacagcagaagcttcgactacgaggacgagaaccccgtgggcgaggacggcatccagcagatgtaccccctgtacaaccagatgtgctaccaggacagaagccccggcaagcaccaccagaacaacgaccccaagagagtgtacatcgaccccagagagcactacgtgtag

SEQ ID NO: 93699 - DNA, 1533 bp, synthetic construct
  misc_feature 1..1533: note = Description of Artificial Sequence: Synthetic coding sequence
  source 1..1533: mol_type = other DNA
atgcccctgagcctgggcgccgagatgtggggccccgaggcctggctgctgctgctgctgctgctggccagcttcaccggcagatgccccgccggcgagctggagaccagcgacgtggtgaccgtggtgctgggccaggacgccaagctgccctgcttctacagaggcgacagcggcgagcaggtgggccaggtggcctgggccagagtggacgccggcgagggcgcccaggagctggccctgctgcacagcaagtacggcctgcacgtgagccccgcctacgagggcagagtggagcagccccccccccccagaaaccccctggacggcagcgtgctgctgagaaacgccgtgcaggccgacgagggcgagtacgagtgcagagtgagcaccttccccgccggcagcttccaggccagactgagactgagagtgctggtgccccccctgcccagcctgaaccccggccccgccctggaggagggccagggcctgaccctggccgccagctgcaccgccgagggcagccccgcccccagcgtgacctgggacaccgaggtgaagggcaccaccagcagcagaagcttcaagcacagcagaagcgccgccgtgaccagcgagttccacctggtgcccagcagaagcatgaacggccagcccctgacctgcgtggtgagccaccccggcctgctgcaggaccagagaatcacccacatcctgcacgtgagcttcctggccgaggccagcgtgagaggcctggaggaccagaacctgtggcacatcggcagagagggcgccatgctgaagtgcctgagcgagggccagcccccccccagctacaactggaccagactggacggccccctgcccagcggcgtgagagtggacggcgacaccctgggcttcccccccctgaccaccgagcacagcggcatctacgtgtgccacgtgagcaacgagttcagcagcagagacagccaggtgaccgtggacgtgctggacccccaggaggacagcggcaagcaggtggacctggtgagcgccagcgtggtggtggtgggcgtgatcgccgccctgctgttctgcctgctggtggtggtggtggtgctgatgagcagataccacagaagaaaggcccagcagatgacccagaagtacgaggaggagctgaccctgaccagagagaacagcatcagaagactgcacagccaccacaccgaccccagaagccagcccgaggagagcgtgggcctgagagccgagggccaccccgacagcctgaaggacaacagcagctgcagcgtgatgagcgaggagcccgagggcagaagctacagcaccctgaccaccgtgagagagatcgagacccagaccgagctgctgagccccggcagcggcagagccgaggaggaggaggaccaggacgagggcatcaagcaggccatgaaccacttcgtgcaggagaacggcaccctgagagccaagcccaccggcaacggcatctacatcaacggcagaggccacctggtgtag

SEQ ID NO: 93700 - DNA, 660 bp, synthetic construct
  misc_feature 1..660: note = Description of Artificial Sequence: Synthetic coding sequence
  source 1..660: mol_type = other DNA
atgctgaagtgcctgagcgagggccagcccccccccagctacaactggaccagactggacggccccctgcccagcggcgtgagagtggacggcgacaccctgggcttcccccccctgaccaccgagcacagcggcatctacgtgtgccacgtgagcaacgagttcagcagcagagacagccaggtgaccgtggacgtgctggacccccaggaggacagcggcaagcaggtggacctggtgagcgccagcgtggtggtggtgggcgtgatcgccgccctgctgttctgcctgctggtggtggtggtggtgctgatgagcagataccacagaagaaaggcccagcagatgacccagaagtacgaggaggagctgaccctgaccagagagaacagcatcagaagactgcacagccaccacaccgaccccagaagccagagcgaggagcccgagggcagaagctacagcaccctgaccaccgtgagagagatcgagacccagaccgagctgctgagccccggcagcggcagagccgaggaggaggaggaccaggacgagggcatcaagcaggccatgaaccacttcgtgcaggagaacggcaccctgagagccaagcccaccggcaacggcatctacatcaacggcagaggccacctggtgtag

SEQ ID NO: 93701 - DNA, 2058 bp, synthetic construct
  misc_feature 1..2058: note = Description of Artificial Sequence: Synthetic coding sequence
  source 1..2058: mol_type = other DNA
atggagctgctgagaaccatcacctaccagcccgccgccagcaccaagatgtgcgagcaggccctgggcaagggctgcggcgccgacagcaagaagaagagacccccccagccccccgaggagagccagcccccccagagccaggcccaggtgccccccgccgccccccaccaccaccaccaccacagccacagcggccccgagatcagcagaatcatcgtggaccccaccaccggcaagagatactgcagaggcaaggtgctgggcaagggcggcttcgccaagtgctacgagatgaccgacctgaccaacaacaaggtgtacgccgccaagatcatcccccacagcagagtggccaagccccaccagagagagaagatcgacaaggagatcgagctgcacagaatcctgcaccacaagcacgtggtgcagttctaccactacttcgaggacaaggagaacatctacatcctgctggagtactgcagcagaagaagcatggcccacatcctgaaggccagaaaggtgctgaccgagcccgaggtgagatactacctgagacagatcgtgagcggcctgaagtacctgcacgagcaggagatcctgcacagagacctgaagctgggcaacttcttcatcaacgaggccatggagctgaaggtgggcgacttcggcctggccgccagactggagcccctggagcacagaagaagaaccatctgcggcacccccaactacctgagccccgaggtgctgaacaagcagggccacggctgcgagagcgacatctgggccctgggctgcgtgatgtacaccatgctgctgggcagaccccccttcgagaccaccaacctgaaggagacctacagatgcatcagagaggccagatacaccatgcccagcagcctgctggcccccgccaagcacctgatcgccagcatgctgagcaagaaccccgaggacagacccagcctggacgacatcatcagacacgacttcttcctgcagggcttcacccccgacagactgagcagcagctgctgccacaccgtgcccgacttccacctgagcagccccgccaagaacttcttcaagaaggccgccgccgccctgttcggcggcaagaaggacaaggccagatacatcgacacccacaacagagtgagcaaggaggacgaggacatctacaagctgagacacgacctgaagaagaccagcatcacccagcagcccagcaagcacagaaccgacgaggagctgcagccccccaccaccaccgtggccagaagcggcacccccgccgtggagaacaagcagcagatcggcgacgccatcagaatgatcgtgagaggcaccctgggcagctgcagcagcagcagcgagtgcctggaggacagcaccatgggcagcgtggccgacaccgtggccagagtgctgagaggctgcctggagaacatgcccgaggccgactgcatccccaaggagcagctgagcaccagcttccagtgggtgaccaagtgggtggactacagcaacaagtacggcttcggctaccagctgagcgaccacaccgtgggcgtgctgttcaacaacggcgcccacatgagcctgctgcccgacaagaagaccgtgcactactacgccgagctgggccagtgcagcgtgttccccgccaccgacgcccccgagcagttcatcagccaggtgaccgtgctgaagtacttcagccactacatggaggagaacctgatggacggcggcgacctgcccagcgtgaccgacatcagaagacccagactgtacctgctgcagtggctgaagagcgacaaggccctgatgatgctgttcaacgacggcaccttccaggtgaacttctaccacgaccacaccaagatcatcatctgcagccagaacgaggagtacctgctgacctacatcaacgaggacagaatcagcaccaccttcagactgaccaccctgctgatgagcggctgcagcagcgagctgaagaacagaatggagtacgccctgaacatgctgctgcagagatgcaactag

SEQ ID NO: 93702 - DNA, 1164 bp, synthetic construct
  misc_feature 1..1164: note = Description of Artificial Sequence: Synthetic coding sequence
  source 1..1164: mol_type = other DNA
atggagctgctgagaaccatcacctaccagcccgccgccagcaccaagatgtgcgagcaggccctgggcaagggctgcggcgccgacagcaagaagaagagacccccccagccccccgaggagagccagcccccccagagccaggcccaggtgccccccgagatcagcagaatcatcgtggaccccaccaccggcaagagatactgcagaggcaaggtgctgggcaagggcggcttcgccaagtgctacgagatgaccgacctgaccaacaacaaggtgtacgccgccaagatcatcccccacagcagagtggccaagccccaccagagagagaagatcgacaaggagatcgagctgcacagaatcctgcaccacaagcacgtggtgcagttctaccactacttcgaggacaaggagaacatctacatcctgctggagtactgcagcagaagaagcatggcccacatcctgaaggccagaaaggtgctgaccgagcccgaggtgagatactacctgagacagatcgtgagcggcctgaagtacctgcacgagcaggagatcctgcacagagacctgaagctgggcaacttcttcatcaacgaggccatggagctgaaggtgggcgacttcggcctggccgccagactggagcccctggagcacagaagaagaaccatctgcggcacccccaactacctgagccccgaggtgctgaacaagcagggccacggctgcgagagcgacatctgggccctgggctgcgtgatgtacaccatgctgctgggcagaccccccttcgagaccaccaacctgaaggagacctacagatgcatcagagaggccagatacaccatgcccagcagcctgctggcccccgccaagcacctgatcgccagcatgctgagcaagaaccccgaggacagacccagcctggacgacatcatcagacacgacttcttctgcagagccagcctgagaaccgactgcctgctggccgtggtgatccagttccagatcagcacctaccaggcccagctgagaatcagcctgagaaagcagctgctgctgttcctggtggccaagaagaccaagcaggacatcctgacccacatcatcgagtgcctgaagaagatgaagaccagcaccagcctgggcatgatctag

SEQ ID NO: 93703 - DNA, 1140 bp, synthetic construct
  misc_feature 1..1140: note = Description of Artificial Sequence: Synthetic coding sequence
  source 1..1140: mol_type = other DNA
atggagctgctgagaaccatcacctaccagcccgccgccagcaccaagatgtgcgagcaggccctgggcaagggctgcggcgccgacagcaagaagaagagacccccccagccccccgaggagagccagcccccccagagccaggcccaggtgccccccgccgccccccaccaccaccaccaccacagccacagcggccccgagatcagcagaatcatcgtggaccccaccaccggcaagagatactgcagaggcaaggtgctgggcaagggcggcttcgccaagtgctacgagatgaccgacctgaccaacaacaaggtgtacgccgccaagatcatcccccacagcagagtggccaagccccaccagagagagaagatcgacaaggagatcgagctgcacagaatcctgcaccacaagcacgtggtgcagttctaccactacttcgaggacaaggagaacatctacatcctgctggagtactgcagcagaagaagcatggcccacatcctgaaggccagaaaggtgctgaccgagcccgaggtgagatactacctgagacagatcgtgagcggcctgaagtacctgcacgagcaggagatcctgcacagagacctgaagctgggcaacttcttcatcaacgaggccatggagctgaaggtgggcgacttcggcctggccgccagactggagcccctggagcacagaagaagaaccatctgcggcacccccaactacctgagccccgaggtgctgaacaagcagggccacggctgcgagagcgacatctgggccctgggctgcgtgatgtacaccatgctgctgggcagaccccccttcgagaccaccaacctgaaggagacctacagatgcatcagagaggccagatacaccatgcccagcagcctgctggcccccgccaagcacctgatcgccagcatgctgagcaagaaccccgaggacagacccagcctggacgacatcatcagacacgacttcttcctgcagggcttcacccccgacagactgagcagcagctgctgccacaccgtgcccgacttccacctgagcagccccgccaagaacttcttcaagagagccgccgagcacatcatcagcgtgggccaccagatgggctag

SEQ ID NO: 93704 - DNA, 1476 bp, synthetic construct
  misc_feature 1..1476: note = Description of Artificial Sequence: Synthetic coding sequence
  source 1..1476: mol_type = other DNA
gtggacctgctgagagccggcgaggtgcccaagcccttccccacccactacaaggacctgtgggacaacaagcacgtgaagatgccctgcagcgagcagaacctgtaccccgtggaggacgagaacggcgagagaaccgccggcagcagatgggagctgatccagaccgccctgctgaacaagttcaccagaccccagaacctgaaggacgccatcctgaagtacaacgtggcctacagcaagaagtgggacttcaccgccctgatcgacttctgggacaaggtgctggaggaggccgaggcccagcacctgtaccagagcatcctgcccgacatggtgaagatcgccctgtgcctgcccaacatctgcacccagcccatccccctgctgaagcagaagatgaaccacagcatcaccatgagccaggagcagatcgccagcctgctggccaacgccttcttctgcaccttccccagaagaaacgccaagatgaagagcgagtacagcagctaccccgacatcaacttcaacagactgttcgagggcagaagcagcagaaagcccgagaagctgaagaccctgttctgctacttcagaagagtgaccgagaagaagcccaccggcctggtgaccttcaccagacagagcctggaggacttccccgagtgggagagatgcgagaagcccctgaccagactgcacgtgacctacgagggcaccatcgaggagaacggccagggcatgctgcaggtggacttcgccaacagattcgtgggcggcggcgtgaccagcgccggcctggtgcaggaggagatcagattcctgatcaaccccgagctgatcatcagcagactgttcaccgaggtgctggaccacaacgagtgcctgatcatcaccggcaccgagcagtacagcgagtacaccggctacgccgagacctacagatggagcagaagccacgaggacggcagcgagagagacgactggcagagaagatgcaccgagatcgtggccatcgacgccctgcacttcagaagatacctggaccagttcgtgcccgagaagatgagaagagagctgaacaaggcctactgcggcttcctgagacccggcgtgagcagcgagaacctgagcgccgtggccaccggcaactggggctgcggcgccttcggcggcgacgccagactgaaggccctgatccagatcctggccgccgccgccgccgagagagacgtggtgtacttcaccttcggcgacagcgagctgatgagagacatctacagcatgcacatcttcctgaccgagagaaagctgaccgtgggcgacgtgtacaagctgctgctgagatactacaacgaggagtgcagaaactgcagcacccccggccccgacatcaagctgtaccccttcatctaccacgccgtggagagctgcgccgagaccgccgaccacagcggccagagaaccggcacctag

SEQ ID NO: 93705 - DNA, 579 bp, synthetic construct
  misc_feature 1..579: note = Description of Artificial Sequence: Synthetic coding sequence
  source 1..579: mol_type = other DNA
tgaaccgagcagtacagcgagtacaccggctacgccgagacctacagatggagcagaagccacgaggacggcagcgagagagacgactggcagagaagatgcaccgagatcgtggccatcgacgccctgcacttcagaagatacctggaccagttcgtgcccgagaagatgagaagagagctgaacaaggcctactgcggcttcctgagacccggcgtgagcagcgagaacctgagcgccgtggccaccggcaactggggctgcggcgccttcggcggcgacgccagactgaaggccctgatccagatcctggccgccgccgccgccgagagagacgtggtgtacttcaccttcggcgacagcgagctgatgagagacatctacagcatgcacatcttcctgaccgagagaaagctgaccgtgggcgacgtgtacaagctgctgctgagatactacaacgaggagtgcagaaactgcagcacccccggccccgacatcaagctgtaccccttcatctaccacgccgtggagagctgcgccgagaccgccgaccacagcggccagagaaccggcacctag

SEQ ID NO: 93706 - DNA, 468 bp, synthetic construct
  misc_feature 1..468: note = Description of Artificial Sequence: Synthetic coding sequence
  source 1..468: mol_type = other DNA
atggccgagagcagcgacaagctgtacagagtggagtacgccaagagcggcagagccagctgcaagaagtgcagcgagagcatccccaaggacagcctgagaatggccatcatggtgcagagccccatgttcgacggcaaggtgccccactggtaccacttcagctgcttctggaaggtgggccacagcatcagacaccccgacgtggaggtggacggcttcagcgagctgagatgggacgaccagcagaaggtgaagaagaccgccgaggccggcggcgtgaccggcgtgtacatcctgggccagcacggccacagcgcccccaccctgaagctgcccggcggccccagactgagagagcagagcaagcccccccccgcctgccccctgccccacgtgcagatcaagagaatggtgcccatgctgttccagcagcacctgctggacagcgccagcagcgtggcctag

SEQ ID NO: 93707 - DNA, 327 bp, synthetic construct
  misc_feature 1..327: note = Description of Artificial Sequence: Synthetic coding sequence
  source 1..327: mol_type = other DNA
atggccgagagcagcgacaagctgtacagagtggagtacgccaagagcggcagagccagctgcaagaagtgcagcgagagcatccccaaggacagcctgagaatggccatcatggtgcagagccccatgttcgacggcaaggtgccccactggtaccacttcagctgcttctggaaggtgggccacagcatcagacaccccgacgtggaggtggacggcttcagcgagctgagatgggacgaccagcagaaggtgaagaagaccgccgaggccggcggcgtgaccgagccccccatcccctgcggcatcgaggtgatgggcagatag

SEQ ID NO: 93708 - DNA, 327 bp, synthetic construct; identical to SEQ ID NO: 93707
  misc_feature 1..327: note = Description of Artificial Sequence: Synthetic coding sequence
  source 1..327: mol_type = other DNA

SEQ ID NO: 93709 - DNA, 3045 bp, synthetic construct
  misc_feature 1..3045: note = Description of Artificial Sequence: Synthetic coding sequence
  source 1..3045: mol_type = other DNA
atggccgagagcagcgacaagctgtacagagtggagtacgccaagagcggcagagccagctgcaagaagtgcagcgagagcatccccaaggacagcctgagaatggccatcatggtgcagagccccatgttcgacggcaaggtgccccactggtaccacttcagctgcttctggaaggtgggccacagcatcagacaccccgacgtggaggtggacggcttcagcgagctgagatgggacgaccagcagaaggtgaagaagaccgccgaggccggcggcgtgaccggcaagggccaggacggcatcggcagcaaggccgagaagaccctgggcgacttcgccgccgagtacgccaagagcaacagaagcacctgcaagggctgcatggagaagatcgagaagggccaggtgagactgagcaagaagatggtggaccccgagaagccccagctgggcatgatcgacagatggtaccaccccggctgcttcgtgaagaacagagaggagctgggcttcagacccgagtacagcgccagccagctgaagggcttcagcctgctggccaccgaggacaaggaggccctgaagaagcagctgcccggcgtgaagagcgagggcaagagaaagggcgacgaggtggacggcgtggacgaggtggccaagaagaagagcaagaaggagaaggacaaggacagcaagctggagaaggccctgaaggcccagaacgacctgatctggaacatcaaggacgagctgaagaaggtgtgcagcaccaacgacctgaaggagctgctgatcttcaacaagcagcaggtgcccagcggcgagagcgccatcctggacagagtggccgacggcatggtgttcggcgccctgctgccctgcgaggagtgcagcggccagctggtgttcaagagcgacgcctactactgcaccggcgacgtgaccgcctggaccaagtgcatggtgaagacccagacccccaacagaaaggagtgggtgacccccaaggagttcagagagatcagctacctgaagaagctgaaggtgaagaagcaggacagaatcttcccccccgagaccagcgccagcgtggccgccacccccccccccagcaccgccagcgcccccgccgccgtgaacagcagcgccagcgccgacaagcccctgagcaacatgaagatcctgaccctgggcaagctgagcagaaacaaggacgaggtgaaggccatgatcgagaagctgggcggcaagctgaccggcaccgccaacaaggccagcctgtgcatcagcaccaagaaggaggtggagaagatgaacaagaagatggaggaggtgaaggaggccaacatcagagtggtgagcgaggacttcctgcaggacgtgagcgccagcaccaagagcctgcaggagctgttcctggcccacatcctgagcccctggggcgccgaggtgaaggccgagcccgtggaggtggtggcccccagaggcaagagcggcgccgccctgagcaagaagagcaagggccaggtgaaggaggagggcatcaacaagagcgagaagagaatgaagctgaccctgaagggcggcgccgccgtggaccccgacagcggcctggagcacagcgcccacgtgctggagaagggcggcaaggtgttcagcgccaccctgggcctggtggacatcgtgaagggcaccaacagctactacaagctgcagctgctggaggacgacaaggagaacagatactggatcttcagaagctggggcagagtgggcaccgtgatcggcagcaacaagctggagcagatgcccagcaaggaggacgccatcgagcacttcatgaagctgtacgaggagaagaccggcaacgcctggcacagcaagaacttcaccaagtaccccaagaagttctaccccctggagatcgactacggccaggacgaggaggccgtgaagaagctgaccgtgaaccccggcaccaagagcaagctgcccaagcccgtgcaggacctgatcaagatgatcttcgacgtggagagcatgaagaaggccatggtggagtacgagatcgacctgcagaagatgcccctgggcaagctgagcaagagacagatccaggccgcctacagcatcctgagcgaggtgcagcaggccgtgagccagggcagcagcgacagccagatcctggacctgagcaacagattctacaccctgatcccccacgacttcggcatgaagaagccccccctgctgaacaacgccgacagcgtgcaggccaaggtggagatgctggacaacctgctggacatcgaggtggcctacagcctgctgagaggcggcagcgacgacagcagcaaggaccccatcgacgtgaactacgagaagctgaagaccgacatcaaggtggtggacagagacagcgaggaggccgagatcatcagaaagtacgtgaagaacacccacgccaccacccacaacgcctacgacctggaggtgatcgacatcttcaagatcgagagagagggcgagtgccagagatacaagcccttcaagcagctgcacaacagaagactgctgtggcacggcagcagaaccaccaacttcgccggcatcctgagccagggcctgagaatcgccccccccgaggcccccgtgaccggctacatgttcggcaagggcatctacttcgccgacatggtgagcaagagcgccaactactgccacaccagccagggcgaccccatcggcctgatcctgctgggcgaggtggccctgggcaacatgtacgagctgaagcacgccagccacatcagcaagctgcccaagggcaagcacagcgtgaagggcctgggcaagaccacccccgaccccagcgccaacatcagcctggacggcgtggacgtgcccctgggcaccggcatcagcagcggcgtgaacgacaccagcctgctgtacaacgagtacatcgtgtacgacatcgcccaggtgaacctgaagtacctgctgaagctgaagttcaacttcaagaccagcctgtggtag

SEQ ID NO: 93710 - DNA, 753 bp, synthetic construct
  misc_feature 1..753: note = Description of Artificial Sequence: Synthetic coding sequence
  source 1..753: mol_type = other DNA
atggccgagagcagcgacaagctgtacagagtggagtacgccaagagcggcagagccagctgcaagaagtgcagcgagagcatccccaaggacagcctgagaatggccatcatggtgcagagccccatgttcgacggcaaggtgccccactggtaccacttcagctgcttctggaaggtgggccacagcatcagacaccccgacgtggaggtggacggcttcagcgagctgagatgggacgaccagcagaaggtgaagaagaccgccgaggccggcggcgtgaccggcaagggccaggacggcatcggcagcaaggccgagaagaccctgggcgacttcgccgccgagtacgccaagagcaacagaagcacctgcaagggctgcatggagaagatcgagaagggccaggtgagactgagcaagaagatggtggaccccgagaagccccagctgggcatgatcgacagatggtaccaccccggctgcttcgtgaagaacagagaggagctgggcttcagacccgagtacagcgccagccagctgaagggcttcagcctgctggccaccgaggacaaggaggccctgaagaagcagctgcccggcgtgaagagcgagggcaagagaaagggcgacgaggtggacggcgtggacgaggtggccaagaagaagagcaagaaggagaaggacaagaagaagaagaagaagaagaagaaggagagaaagaagaagaagaagaagagaaagaagaagtag

SEQ ID NO: 93711 - DNA, 2133 bp, synthetic construct
  misc_feature 1..2133: note = Description of Artificial Sequence: Synthetic coding sequence
  source 1..2133: mol_type = other DNA
atggacttcagcatggtggccggcgccgccgcctacaacgagaagagcgagaccggcgccctgggcgagaactacagctggcagatccccatcaaccacaacgacttcaagatcctgaagaacaacgagagacagctgtgcgaggtgctgcagaacaagttcggctgcatcagcaccctggtgagccccgtgcaggagggcaacagcaagagcctgcaggtgttcagaaagatgctgacccccagaatcgagctgagcgtgtggaaggacgacctgaccacccacgccgtggacgccgtggtgaacgccgccaacgaggacctgctgcacggcggcggcctggccctggccctggtgaaggccggcggcttcgagatccaggaggagagcaagcagttcgtggccagatacggcaaggtgagcgccggcgagatcgccgtgaccggcgccggcagactgccctgcaagcagatcatccacgccgtgggccccagatggatggagtgggacaagcagggctgcaccggcaagctgcagagagccatcgtgagcatcctgaactacgtgatctacaagaacacccacatcaagaccgtggccatccccgccctgagcagcggcatcttccagttccccctgaacctgtgcaccaagaccatcgtggagaccatcagagtgagcctgcagggcaagcccatgatgagcaacctgaaggagatccacctggtgagcaacgaggaccccaccgtggccgccttcaaggccgccagcgagttcatcctgggcaagagcgagctgggccaggagaccacccccagcttcaacgccatggtggtgaacaacctgaccctgcagatcgtgcagggccacatcgagtggcagaccgccgacgtgatcgtgaacagcgtgaacccccacgacatcaccgtgggccccgtggccaagagcatcctgcagcaggccggcgtggagatgaagagcgagttcctggccaccaaggccaagcagttccagagaagccagctggtgctggtgaccaagggcttcaacctgttctgcaagtacatctaccacgtgctgtggcacagcgagttccccaagccccagatcctgaagcacgccatgaaggagtgcctggagaagtgcatcgagcagaacatcaccagcatcagcttccccgccctgggcaccggcaacatggagatcaagaaggagaccgccgccgagatcctgttcgacgaggtgctgaccttcgccaaggaccacgtgaagcaccagctgaccgtgaagttcgtgatcttccccaccgacctggagatctacaaggccttcagcagcgagatggccaagagaagcaagatgctgagcctgaacaactacagcgtgccccagagcaccagagaggagaagagagagaacggcctggaggccagaagccccgccatcaacctgatgggcttcaacgtggaggagatgtacgaggcccacgcctggatccagagaatcctgagcctgcagaaccaccacatcatcgagaacaaccacatcctgtacctgggcagaaaggagcacgacatcctgagccagctgcagaagaccagcagcgtgagcatcaccgagatcatcagccccggcagaaccgagctggagatcgagggcgccagagccgacctgatcgaggtggtgatgaacatcgaggacatgctgtgcaaggtgcaggaggagatggccagaaagaaggagagaggcctgtggagaagcctgggccagtggaccatccagcagcagaagacccaggacgagatgaaggagaacatcatcttcctgaagtgccccgtgccccccacccaggagctgctggaccagaagaagcagttcgagaagtgcggcctgcaggtgctgaaggtggagaagatcgacaacgaggtgctgatggccgccttccagagaaagaagaagatgatggaggagaagctgcacagacagcccgtgagccacagactgttccagcaggtgccctaccagttctgcaacgtggtgtgcagagtgggcttccagagaatgtacagcaccccctgcggcagatgccagtgcctgatcatcggcgccaccctgtggaacctggtgagctag

SEQ ID NO: 93712 - DNA, 2460 bp, synthetic construct
  misc_feature 1..2460: note = Description of Artificial Sequence: Synthetic coding sequence
  source 1..2460: mol_type = other DNA
atggacttcagcatggtggccggcgccgccgcctacaacgagaagagcgagaccggcgccctgggcgagaactacagctggcagatccccatcaaccacaacgacttcaagatcctgaagaacaacgagagacagctgtgcgaggtgctgcagaacaagttcggctgcatcagcaccctggtgagccccgtgcaggagggcaacagcaagagcctgcaggtgttcagaaagatgctgacccccagaatcgagctgagcgtgtggaaggacgacctgaccacccacgccgtggacgccgtggtgaacgccgccaacgaggacctgctgcacggcggcggcctggccctggccctggtgaaggccggcggcttcgagatccaggaggagagcaagcagttcgtggccagatacggcaaggtgagcgccggcgagatcgccgtgaccggcgccggcagactgccctgcaagcagatcatccacgccgtgggccccagatggatggagtgggacaagcagggctgcaccggcaagctgcagagagccatcgtgagcatcctgaactacgtgatctacaagaacacccacatcaagaccgtggccatccccgccctgagcagcggcatcttccagttccccctgaacctgtgcaccaagaccatcgtggagaccatcagagtgagcctgcagggcaagcccatgatgagcaacctgaaggagatccacctggtgagcaacgaggaccccaccgtggccgccttcaaggccgccagcgagttcatcctgggcaagagcgagctgggccaggagaccacccccagcttcaacgccatggtggtgaacaacctgaccctgcagatcgtgcagggccacatcgagtggcagaccgccgacgtgatcgtgaacagcgtgaacccccacgacatcaccgtgggccccgtggccaagagcatcctgcagcaggccggcgtggagatgaagagcgagttcctggccaccaaggccaagcagttccagagaagccagctggtgctggtgaccaagggcttcaacctgttctgcaagtacatctaccacgtgctgtggcacagcgagttccccaagccccagatcctgaagcacgccatgaaggagtgcctggagaagtgcatcgagcagaacatcaccagcatcagcttccccgccctgggcaccggcaacatggagatcaagaaggagaccgccgccgagatcctgttcgacgaggtgctgaccttcgccaaggaccacgtgaagcaccagctgaccgtgaagttcgtgatcttccccaccgacctggagatctacaaggccttcagcagcgagatggccaagagaagcaagatgctgagcctgaacaactacagcgtgccccagagcaccagagaggagaagagagagaacggcctggaggccagaagccccgccatcaacctgatgggcttcaacgtggaggagatgtacgaggcccacgcctggatccagagaatcctgagcctgcagaaccaccacatcatcgagaacaaccacatcctgtacctgggcagaaaggagcacgacatcctgagccagctgcagaagaccagcagcgtgagcatcaccgagatcatcagccccggcagaaccgagctggagatcgagggcgccagagccgacctgatcgaggtggtgatgaacatcgaggacatgctgtgcaaggtgcaggaggagatggccagaaagaaggagagaggcctgtggagaagcctgggccagtggaccatccagcagcagaagacccaggacgagatgaaggagaacatcatcttcctgaagtgccccgtgccccccacccaggagctgctggaccagaagaagcagttcgagaagtgcggcctgcaggtgctgaaggtggagaagatcgacaacgaggtgctgatggccgccttccagagaaagaagaagatgatggaggagaagctgcacagacagcccgtgagccacagactgttccagcaggtgccctaccagttctgcaacgtggtgtgcagagtgggcttccagagaatgtacagcaccccctgcgaccccaagtacggcgccggcatctacttcaccaagaacctgaagaacctggccgagaaggccaagaagatcagcgccgccgacaagctgatctacgtgttcgaggccgaggtgctgaccggcttcttctgccagggccaccccctgaacatcgtgcccccccccctgagccccggcgccatcgacggccacgacagcgtggtggacaacgtgagcagccccgagaccttcgtgatcttcagcggcatgcaggccatcccccagtacctgtggacctgcacccaggagtacgtgcagagccaggactacagcagcggccccatgagacccttcgcccagcacccctggagaggcttcgccagcggcagccccgtggactag

SEQ ID NO: 93713 - DNA, 2106 bp, synthetic construct
  misc_feature 1..2106: note = Description of Artificial Sequence: Synthetic coding sequence
  source 1..2106: mol_type = other DNA
atggcccaggccggcgtggtgggcgaggtgacccaggtgctgtgcgccgccggcggcgccctggagctgcccgagctgagaagaagactgagaatgggcctgagcgccgacgccctggagagactgctgagacagagaggcagattcgtggtggccgtgagagccggcggcgccgccgccgcccccgagagagtggtgctggccgccagccccctgagactgtgcagagcccaccagggcagcaagcccggctgcgtgggcctgtgcgcccagctgcacctgtgcagattcatggtgtacggcgcctgcaagttcctgagagccggcaagaactgcagaaacagccacagcctgaccaccgagcacaacctgagcgtgctgagaacccacggcgtggaccacctgagctacaacgagctgtgccagctgctgttccagaacgacccctggctgctgcccgagatctgccagcactacaacaagggcgacggcccccacggcagctgcgccttccagaagcagtgcatcaagctgcacatctgccagtacttcctgcagggcgagtgcaagttcggcaccagctgcaagagaagccacgacttcagcaacagcgagaacctggagaagctggagaagctgggcatgagcagcgacctggtgagcagactgcccaccatctacagaaacgcccacgacatcaagaacaagagcagcgcccccagcagagtgccccccctgttcgtgccccagggcaccagcgagagaaaggacagcagcggcagcgtgagccccaacaccctgagccaggaggagggcgaccagatctgcctgtaccacatcagaaagagctgcagcttccaggacaagtgccacagagtgcacttccacctgccctacagatggcagttcctggacagaggcaagtgggaggacctggacaacatggagctgatcgaggaggcctactgcaaccccaagatcgagagaatcctgtgcagcgagagcgccagcaccttccacagccactgcctgaacttcaacgccatgacctacggcgccacccaggccagaagactgagcaccgccagcagcgtgaccaagcccccccacttcatcctgaccaccgactggatctggtactggagcgacgagttcggcagctggcaggagtacggcagacagggcaccgtgcaccccgtgaccaccgtgagcagcagcgacgtggagaaggcctacctggcctactgcacccccggcagcgacggccaggccgccaccctgaagttccaggccggcaagcacaactacgagctggacttcaaggccttcgtgcagaagaacctggtgtacggcaccaccaagaaggtgtgcagaagacccaagtacgtgagcccccaggacgtgaccaccatgcagacctgcaacaccaagttccccggccccaagagcatccccgactactgggacagcagcgccctgcccgaccccggcttccagaagatcaccctgagcagcagcagcgaggagtaccagaaggtgtggaacctgttcaacagaaccctgcccttctacttcgtgcagaagatcgagagagtgcagaacctggccctgtgggaggtgtaccagtggcagaagggccagatgcagaagcagaacggcggcaaggccgtggacgagagacagctgttccacggcaccagcgccatcttcgtggacgccatctgccagcagaacttcgactggagagtgtgcggcgtgcacggcaccagctacggcaagggcagctacttcgccagagacgccgcctacagccaccactacagcaagagcgacacccagacccacaccatgttcctggccagagtgctggtgggcgagttcgtgagaggcaacgccagcttcgtgagaccccccgccaaggagggctggagcaacgccttctacgacagctgcgtgaacagcgtgagcgaccccagcatcttcgtgatcttcgagaagcaccaggtgtaccccgagtacgtgatccagtacaccaccagcagcaagcccagcgtgacccccagcatcctgctggccctgggcagcctgttcagcagcagacagtag

SEQ ID NO: 93714 - DNA, 393 bp, synthetic construct
  misc_feature 1..393: note = Description of Artificial Sequence: Synthetic coding sequence
  source 1..393: mol_type = other DNA
atgttcctggccagagtgctggtgggcgagttcgtgagaggcaacgccagcttcgtgagaccccccgccaaggagggctggagcaacgccttctacgacagctgcgtgaacagcgtgagcgaccccagcatcttcgtgatcttcgagaagaccagaagcacccagagcatgagcagcagcaccccccccccccccagccccagaagccacccccccagctgctggccctgggccccctgcagcgccgccgacagcgagagaaccggcgtgttccaggccttccacctgctgtgcctggagatggccatctgggccttccccttcctgttcaagcagaagctgctgatgaactgcagcctgaacatcgacctgagcatgaagctgtgcagctag

SEQ ID NO: 93715 - DNA, 849 bp, synthetic construct
  misc_feature 1..849: note = Description of Artificial Sequence: Synthetic coding sequence
  source 1..849: mol_type = other DNA
atgagcaagctggccagcttcctgggcttcagcaagcagagcccccagaagaagaaccacctggtgctggagaagaagaccgagagcgccaccttcagagtgtgcggcgagaacgtgacctgcgtggagtacgccatcagctggctgcaggacctgatcgagaaggagcagtgcccctacaccagcgaggacgagtgcatcaaggacttcgacgagaaggagtaccaggagctgaacgagctgcagaagaagctgaacatcaacatcagcctggaccacaagagacccctgatcaaggtgctgggcatcagcagagacgtgatgcaggccagagacgagatcgaggccatgatcaagagagtgagactggccaaggagcaggagagcagagccgactgcatcagcgagttcatcgagtggcagtacaacgacaacaacaccagccactgcttcaacaagatgaccaacctgaagctggaggacgccagaagagagaagaagaagaccgtggacgtgaagatcaaccacagacactacaccgtgaacctgaacacctacaccgccaccgacaccaagggccacagcctgagcgtgcagagactgaccaagagcaaggtggacatccccgcccactggagcgacatgaagcagcagaacttctgcgtggtggagctgctgcccagcgaccccgagtacaacaccgtggccagcaagttcaaccagacctgcagccacttcagaatcgagaaggtgaacgtgatgatcagagcctgcagccccagctactgggaggccgaggtggagggcctgcacgagcccagaagcctgacccccgtgtgggtgacctag

SEQ ID NO: 93716 - DNA, 2394 bp, synthetic construct
  misc_feature 1..2394: note = Description of Artificial Sequence: Synthetic coding sequence
  source 1..2394: mol_type = other DNA
atgtacctgagaagactgctgagacccctgcagatgctgctggtgaaggagggcgtgcagaacgccaagaccgacgtggtggtgaacagcgtgcccctggacctggtgctgagcagaggccccctgagcaagagcctgctggagaaggccggccccgagctgcaggaggagctggacaccgtgggccagggcgtggccgtgagcatgggcaccgtgctgaagaccagcagctggaacctggactgcagatacgtgctgcacgtggtggcccccgagtggagaaacggcagcaccagcagcctgaagatcatggaggacatcatcagagagtgcatggagatcaccgagagcctgagcctgaagagcatcgccttccccgccatcggcaccggcaacctgggcttccccaagaacatcttcgccgagctgatcatcagcgaggtgttcaagttcagcagcaagaaccagctgaagaccctgcaggaggtgcacttcctgctgcaccccagcgaccacgagaacatccaggccttcagcgacgagttcgccagaagagccaacggcaacctggtgagcgacaagatccccaaggccaaggacacccagggcttctacggcaccgtgagcagccccgacagcggcgtgtacgagatgaagatcggcagcatcatcttccaggtggccagcggcgacatcaccaaggaggaggccgacgtgatcgtgaacagcaccagcaacagcttcaacctgaaggccggcgtgagcaaggccatcctggagtgcgccggccagaacgtggagagagagtgcagccagcaggcccagcagagaaagaacgactacatcatcaccggcggcggcttcctgagatgcaagaacatcatccacgtgatcggcggcaacgacgtgaagagcagcgtgagcagcgtgctgcaggagtgcgagaagaagaactacagcagcatctgcctgcccgccatcggcaccggcaacgccaagcagcaccccgacaaggtggccgaggccatcatcgacgccatcgaggacttcgtgcagaagggcagcgcccagagcgtgaagaaggtgaaggtggtgatcttcctgccccaggtgctggacgtgttctacgccaacatgaagaagagagagggcacccagctgagcagccagcagagcgtgatgagcaagctggccagcttcctgggcttcagcaagcagagcccccagaagaagaaccacctggtgctggagaagaagaccgagagcgccaccttcagagtgtgcggcgagaacgtgacctgcgtggagtacgccatcagctggctgcaggacctgatcgagaaggagcagtgcccctacaccagcgaggacgagtgcatcaaggacttcgacgagaaggagtaccaggagctgaacgagctgcagaagaagctgaacatcaacatcagcctggaccacaagagacccctgatcaaggtgctgggcatcagcagagacgtgatgcaggccagagacgagatcgaggccatgatcaagagagtgagactggccaaggagcaggagagcagagccgactgcatcagcgagttcatcgagtggcagtacaacgacaacaacaccagccactgcttcaacaagatgaccaacctgaagctggaggacgccagaagagagaagaagaagaccgtggacgtgaagatcaaccacagacactacaccgtgaacctgaacacctacaccgccaccgacaccaagggccacagcctgagcgtgcagagactgaccaagagcaaggtggacatccccgcccactggagcgacatgaagcagcagaacttctgcgtggtggagctgctgcccagcgaccccgagtacaacaccgtggccagcaagttcaaccagacctgcagccacttcagaatcgagaagatcgagagaatccagaaccccgacctgtggaacagctaccaggccaagaagaagaccatggacgccaagaacggccagaccatgaacgagaagcagctgttccacggcaccgacgccggcagcgtgccccacgtgaacagaaacggcttcaacagaagctacgccggcaagaacgccgtggcctacggcaagggcacctacttcgccgtgaacgccaactacagcgccaacgacacctacagcagacccgacgccaacggcagaaagcacgtgtactacgtgagagtgctgaccggcatctacacccacggcaaccacagcctgatcgtgccccccagcaagaacccccagaaccccaccgacctgtacgacaccgtgaccgacaacgtgcaccaccccagcctgttcgtggccttctacgactaccaggcctaccccgagtacctgatcaccttcagaaagtag

SEQ ID NO: 93717 - DNA, 5163 bp, synthetic construct
  misc_feature 1..5163: note = Description of Artificial Sequence: Synthetic coding sequence
  source 1..5163: mol_type = other DNA
atggccgtgcccggcagcttccccctgctggtggagggcagctggggccccgacccccccaagaacctgaacaccaagctgcagatgtacttccagagccccaagagaagcggcggcggcgagtgcgaggtgagacaggaccccagaagccccagcagattcctggtgttcttctaccccgaggacgtgagacagaaggtgctggagagaaagaaccacgagctggtgtggcagggcaagggcaccttcaagctgaccgtgcagctgcccgccacccccgacgagatcgaccacgtgttcgaggaggagctgctgaccaaggagagcaagaccaaggaggacgtgaaggagcccgacaccatcagattcgtggacgactgcaccaagcaccacagcatcaagcagctgcagctgagccccagactgctggaggtgaccaacaccatcagagtggagaacctgccccccggcgccgacgactacagcctgaagctgttcttcgagaacccctacaacggcggcggcagagtggccaacgtggagtacttccccgaggagagcagcgccctgatcgagttcttcgacagaaaggtgctggacaccatcatggccaccaagctggacttcaacaagatgcccctgagcgtgttcccctactacgccagcctgggcaccgccctgtacggcaaggagaagcccctgatcaagctgcccgcccccttcgaggagagcctggacctgcccctgtggaagttcctgcagaagaagaaccacctgatcgaggagatcaacgacgagatgagaagatgccactgcgagctgacctggagccagctgagcggcaaggtgaccatcagacccgccgccaccctggtgaacgagggcagacccagaatcaagacctggcaggccgacaccagcaccaccctgagcagcatcagaagcaagtacaaggtgaaccccatcaaggtggaccccaccatgtgggacaccatcaagaacgacgtgaaggacgacagaatcctgatcgagttcgacaccctgaaggagatggtgatcctggccggcaagagcgaggacgtgcagagcatcgaggtgcaggtgagagagctgatcgagagcaccacccagaagatcaagagagaggagcagagcctgaaggagaagatgatcatcagccccggcagatacttcctgctgtgccacagcagcctgctggaccacctgctgaccgagtgccccgagatcgagatctgctacgacagagtgacccagcacctgtgcctgaagggccccagcgccgacgtgtacaaggccaagtgcgagatccaggagaaggtgtacaccatggcccagaagaacatccaggtgagccccgagatcttccagttcctgcagcaggtgaactggaaggagttcagcaagtgcctgttcatcgcccagaagatcctggccctgtacgagctggagggcaccaccgtgctgctgaccagctgcagcagcgaggccctgctggaggccgagaagcagatgctgagcgccctgaactacaagagaatcgaggtggagaacaaggaggtgctgcacggcaagaagtggaagggcctgacccacaacctgctgaagaagcagaacagcagccccaacaccgtgatcatcaacgagctgaccagcgagaccaccgccgaggtgatcatcaccggctgcgtgaaggaggtgaacgagacctacaagctgctgttcaacttcgtggagcagaacatgaagatcgagagactggtggaggtgaagcccagcctggtgatcgactacctgaagaccgagaagaagctgttctggcccaagatcaagaaggtgaacgtgcaggtgagcttcaaccccgagaacaagcagaagggcatcctgctgaccggcagcaagaccgaggtgctgaaggccgtggacatcgtgaagcaggtgtgggacagcgtgtgcgtgaagagcgtgcacaccgacaagcccggcgccaagcagttcttccaggacaaggccagattctaccagagcgagatcaagagactgttcggctgctacatcgagctgcaggagaacgaggtgatgaaggagggcggcagccccgccggccagaagtgcttcagcagaaccgtgctggcccccggcgtggtgctgatcgtgcagcagggcgacctggccagactgcccgtggacgtggtggtgaacgccagcaacgaggacctgaagcactacggcggcctggccgccgccctgagcaaggccgccggccccgagctgcaggccgactgcgaccagatcgtgaagagagagggcagactgctgcccggcaacgccaccatcagcaaggccggcaagctgccctaccaccacgtgatccacgccgtgggccccagatggagcggctacgaggcccccagatgcgtgtacctgctgagaagagccgtgcagctgagcctgtgcctggccgagaagtacaagtacagaagcatcgccatccccgccatcagcagcggcgtgttcggcttccccctgggcagatgcgtggagaccatcgtgagcgccatcaaggagaacttccagttcaagaaggacggccactgcctgaaggagatctacctggtggacgtgagcgagaagaccgtggaggccttcgccgaggccgtgaagaccgtgttcaaggccaccctgcccgacaccgccgccccccccggcctgccccccgccgccgccggccccggcaagaccagctgggagaagggcagcctggtgagccccggcggcctgcagatgctgctggtgaaggagggcgtgcagaacgccaagaccgacgtggtggtgaacagcgtgcccctggacctggtgctgagcagaggccccctgagcaagagcctgctggagaaggccggccccgagctgcaggaggagctggacaccgtgggccagggcgtggccgtgagcatgggcaccgtgctgaagaccagcagctggaacctggactgcagatacgtgctgcacgtggtggcccccgagtggagaaacggcagcaccagcagcctgaagatcatggaggacatcatcagagagtgcatggagatcaccgagagcctgagcctgaagagcatcgccttccccgccatcggcaccggcaacctgggcttccccaagaacatcttcgccgagctgatcatcagcgaggtgttcaagttcagcagcaagaaccagctgaagaccctgcaggaggtgcacttcctgctgcaccccagcgaccacgagaacatccaggccttcagcgacgagttcgccagaagagccaacggcaacctggtgagcgacaagatccccaaggccaaggacacccagggcttctacggcaccgtgagcagccccgacagcggcgtgtacgagatgaagatcggcagcatcatcttccaggtggccagcggcgacatcaccaaggaggaggccgacgtgatcgtgaacagcaccagcaacagcttcaacctgaaggtgggcgtgagcaaggccatcctggagtgcgccggccagaacgtggagagagagtgcagccagcaggcccagcagagaaagaacgactacatcatcaccggcggcggcttcctgagatgcaagaacatcatccacgtgatcggcggcaacgacgtgaagagcagcgtgagcagcgtgctgcaggagtgcgagaagaagaactacagcagcatctgcctgcccgccatcggcaccggcaacgccaagcagcaccccgacaaggtggccgaggccatcatcgacgccatcgaggacttcgtgcagaagggcagcgcccagagcgtgaagaaggtgaaggtggtgatcttcctgccccaggtgctggacgtgttctacgccaacatgaagaagagagagggcacccagctgagcagccagcagagcgtgatgagcaagctggccagcttcctgggcttcagcaagcagagcccccagaagaagaaccacctggtgctggagaagaagaccgagagcgccaccttcagagtgtgcggcgagaacgtgacctgcgtggagtacgccatcagctggctgcaggacctgatcgagaaggagcagtgcccctacaccagcgaggacgagtgcatcaaggacttcgacgagaaggagtaccaggagctgaacgagctgcagaagaagctgaacatcaacatcagcctggaccacaagagacccctgatcaaggtgctgggcatcagcagagacgtgatgcaggccagagacgagatcgaggccatgatcaagagagtgagactggccaaggagcaggagagcagagccgactgcatcagcgagttcatcgagtggcagtacaacgacaacaacaccagccactgcttcaacaagatgaccaacctgaagctggaggacgccagaagagagaagaagaagaccgtggacgtgaagatcaaccacagacactacaccgtgaacctgaacacctacaccgccaccgacaccaagggccacagcctgagcgtgcagagactgaccaagagcaaggtggacatccccgcccactggagcgacatgaagcagcagaacttctgcgtggtggagctgctgcccagcgaccccgagtacaacaccgtggccagcaagttcaaccagacctgcagccacttcagaatcgagaagatcgagagaatccagaaccccgacctgtggaacagctaccaggccaagaagaagaccatggacgccaagaacggccagaccatgaacgagaagcagctgttccacggcaccgacgccggcagcgtgccccacgtgaacagaaacggcttcaacagaagctacgccggcaagaacgccgtggcctacggcaagggcacctacttcgccgtgaacgccaactacagcgccaacgacacctacagcagacccgacgccaacggcagaaagcacgtgtactacgtgagagtgctgaccggcatctacacccacggcaaccacagcctgatcgtgccccccagcaagaacccccagaaccccaccgacctgtacgacaccgtgaccgacaacgtgcaccaccccagcctgttcgtggccttctacgactaccaggcctaccccgagtacctgatcaccttcagaaagtag

SEQ ID NO: 93718 - DNA, 5406 bp, synthetic construct
  misc_feature 1..5406: note = Description of Artificial Sequence: Synthetic coding sequence
  source 1..5406: mol_type = other DNA
atggccgtgcccggcagcttccccctgctggtggagggcagctggggccccgacccccccaagaacctgaacaccaagctgcagatgtacttccagagccccaagagaagcggcggcggcgagtgcgaggtgagacaggaccccagaagccccagcagattcctggtgttcttctaccccgaggacgtgagacagaaggtgctggagagaaagaaccacgagctggtgtggcagggcaagggcaccttcaagctgaccgtgcagctgcccgccacccccgacgagatcgaccacgtgttcgaggaggagctgctgaccaaggagagcaagaccaaggaggacgtgaaggagcccgacgtgagcgaggagctggacaccaagctgcccctggacggcggcctggacaagatggaggacatccccgaggagtgcgagaacatcagcagcctggtggccttcgagaacctgaaggccaacgtgaccgacatcatgctgatcctgctggtggagaacatcagcggcctgagcaacgacgacttccaggtggagatcatcagagacttcgacgtggccgtggtgaccttccagaagcacatcgacaccatcagattcgtggacgactgcaccaagcaccacagcatcaagcagctgcagctgagccccagactgctggaggtgaccaacaccatcagagtggagaacctgccccccggcgccgacgactacagcctgaagctgttcttcgagaacccctacaacggcggcggcagagtggccaacgtggagtacttccccgaggagagcagcgccctgatcgagttcttcgacagaaaggtgctggacaccatcatggccaccaagctggacttcaacaagatgcccctgagcgtgttcccctactacgccagcctgggcaccgccctgtacggcaaggagaagcccctgatcaagctgcccgcccccttcgaggagagcctggacctgcccctgtggaagttcctgcagaagaagaaccacctgatcgaggagatcaacgacgagatgagaagatgccactgcgagctgacctggagccagctgagcggcaaggtgaccatcagacccgccgccaccctggtgaacgagggcagacccagaatcaagacctggcaggccgacaccagcaccaccctgagcagcatcagaagcaagtacaaggtgaaccccatcaaggtggaccccaccatgtgggacaccatcaagaacgacgtgaaggacgacagaatcctgatcgagttcgacaccctgaaggagatggtgatcctggccggcaagagcgaggacgtgcagagcatcgaggtgcaggtgagagagctgatcgagagcaccacccagaagatcaagagagaggagcagagcctgaaggagaagatgatcatcagccccggcagatacttcctgctgtgccacagcagcctgctggaccacctgctgaccgagtgccccgagatcgagatctgctacgacagagtgacccagcacctgtgcctgaagggccccagcgccgacgtgtacaaggccaagtgcgagatccaggagaaggtgtacaccatggcccagaagaacatccaggtgagccccgagatcttccagttcctgcagcaggtgaactggaaggagttcagcaagtgcctgttcatcgcccagaagatcctggccctgtacgagctggagggcaccaccgtgctgctgaccagctgcagcagcgaggccctgctggaggccgagaagcagatgctgagcgccctgaactacaagagaatcgaggtggagaacaaggaggtgctgcacggcaagaagtggaagggcctgacccacaacctgctgaagaagcagaacagcagccccaacaccgtgatcatcaacgagctgaccagcgagaccaccgccgaggtgatcatcaccggctgcgtgaaggaggtgaacgagacctacaagctgctgttcaacttcgtggagcagaacatgaagatcgagagactggtggaggtgaagcccagcctggtgatcgactacctgaagaccgagaagaagctgttctggcccaagatcaagaaggtgaacgtgcaggtgagcttcaaccccgagaacaagcagaagggcatcctgctgaccggcagcaagaccgaggtgctgaaggccgtggacatcgtgaagcaggtgtgggacagcgtgtgcgtgaagagcgtgcacaccgacaagcccggcgccaagcagttcttccaggacaaggccagattctaccagagcgagatcaagagactgttcggctgctacatcgagctgcaggagaacgaggtgatgaaggagggcggcagccccgccggccagaagtgcttcagcagaaccgtgctggcccccggcgtggtgctgatcgtgcagcagggcgacctggccagactgcccgtggacgtggtggtgaacgccagcaacgaggacctgaagcactacggcggcctggccgccgccctgagcaaggccgccggccccgagctgcaggccgactgcgaccagatcgtgaagagagagggcagactgctgcccggcaacgccaccatcagcaaggccggcaagctgccctaccaccacgtgatccacgccgtgggccccagatggagcggctacgaggcccccagatgcgtgtacctgctgagaagagccgtgcagctgagcctgtgcctggccgagaagtacaagtacagaagcatcgccatccccgccatcagcagcggcgtgttcggcttccccctgggcagatgcgtggagaccatcgtgagcgccatcaaggagaacttccagttcaagaaggacggccactgcctgaaggagatctacctggtggacgtgagcgagaagaccgtggaggccttcgccgaggccgtgaagaccgtgttcaaggccaccctgcccgacaccgccgccccccccggcctgccccccgccgccgccggccccggcaagaccagctgggagaagggcagcctggtgagccccggcggcctgcagatgctgctggtgaaggagggcgtgcagaacgccaagaccgacgtggtggtgaacagcgtgcccctggacctggtgctgagcagaggccccctgagcaagagcctgctggagaaggccggccccgagctgcaggaggagctggacaccgtgggccagggcgtggccgtgagcatgggcaccgtgctgaagaccagcagctggaacctggactgcagatacgtgctgcacgtggtggcccccgagtggagaaacggcagcaccagcagcctgaagatcatggaggacatcatcagagagtgcatggagatcaccgagagcctgagcctgaagagcatcgccttccccgccatcggcaccggcaacctgggcttccccaagaacatcttcgccgagctgatcatcagcgaggtgttcaagttcagcagcaagaaccagctgaagaccctgcaggaggtgcacttcctgctgcaccccagcgaccacgagaacatccaggccttcagcgacgagttcgccagaagagccaacggcaacctggtgagcgacaagatccccaaggccaaggacacccagggcttctacggcaccgtgagcagccccgacagcggcgtgtacgagatgaagatcggcagcatcatcttccaggtggccagcggcgacatcaccaaggaggaggccgacgtgatcgtgaacagcaccagcaacagcttcaacctgaaggccggcgtgagcaaggccatcctggagtgcgccggccagaacgtggagagagagtgcagccagcaggcccagcagagaaagaacgactacatcatcaccggcggcggcttcctgagatgcaagaacatcatccacgtgatcggcggcaacgacgtgaagagcagcgtgagcagcgtgctgcaggagtgcgagaagaagaactacagcagcatctgcctgcccgccatcggcaccggcaacgccaagcagcaccccgacaaggtggccgaggccatcatcgacgccatcgaggacttcgtgcagaagggcagcgcccagagcgtgaagaaggtgaaggtggtgatcttcctgccccaggtgctggacgtgttctacgccaacatgaagaagagagagggcacccagctgagcagccagcagagcgtgatgagcaagctggccagcttcctgggcttcagcaagcagagcccccagaagaagaaccacctggtgctggagaagaagaccgagagcgccaccttcagagtgtgcggcgagaacgtgacctgcgtggagtacgccatcagctggctgcaggacctgatcgagaaggagcagtgcccctacaccagcgaggacgagtgcatcaaggacttcgacgagaaggagtaccaggagctgaacgagctgcagaagaagctgaacatcaacatcagcctggaccacaagagacccctgatcaaggtgctgggcatcagcagagacgtgatgcaggccagagacgagatcgaggccatgatcaagagagtgagactggccaaggagcaggagagcagagccgactgcatcagcgagttcatcgagtggcagtacaacgacaacaacaccagccactgcttcaacaagatgaccaacctgaagctggaggacgccagaagagagaagaagaagaccgtggacgtgaagatcaaccacagacactacaccgtgaacctgaacacctacaccgccaccgacaccaagggccacagcctgagcgtgcagagactgaccaagagcaaggtggacatccccgcccactggagcgacatgaagcagcagaacttctgcgtggtggagctgctgcccagcgaccccgagtacaacaccgtggccagcaagttcaaccagacctgcagccacttcagaatcgagaagatcgagagaatccagaaccccgacctgtggaacagctaccaggccaagaagaagaccatggacgccaagaacggccagaccatgaacgagaagcagctgttccacggcaccgacgccggcagcgtgccccacgtgaacagaaacggcttcaacagaagctacgccggcaagaacgccgtggcctacggcaagggcacctacttcgccgtgaacgccaactacagcgccaacgacacctacagcagacccgacgccaacggcagaaagcacgtgtactacgtgagagtgctgaccggcatctacacccacggcaaccacagcctgatcgtgccccccagcaagaacccccagaaccccaccgacctgtacgacaccgtgaccgacaacgtgcaccaccccagcctgttcgtggccttctacgactaccaggcctaccccgagtacctgatcaccttcagaaagtag

SEQ ID NO: 93719 - DNA, 585 bp, synthetic construct
  misc_feature 1..585: note = Description of Artificial Sequence: Synthetic coding sequence
  source 1..585: mol_type = other DNA
tgagtgagaagaagagccgagctgagaatggccgtgcccggcagcttccccctgctggtggagggcagctggggccccgacccccccaagaacctgaacaccaagctgcagatgtacttccagagccccaagagaagcggcggcggcgagtgcgaggtgagacaggaccccagaagccccagcagattcctggtgttcttctaccccgaggacgtgagacagaaggtgctggagagaaagaaccacgagctggtgtggcagggcaagggcaccttcaagctgaccgtgcagctgcccgccacccccgacgagatcgaccacgtgttcgaggaggagctgctgaccaaggagagcaagaccaaggaggacgtgaaggagcccgacaccatcagattcgtggacgactgcaccaagcaccacagcatcaagcagctgcagctgagccccagactgctggaggtgaccaacaccatcagagtggagaacctgccccccggcgccgacgactacagcctgaagctgttcttcgagaacccctacaacggcggcggcagagtggccaacgtggagtacttccccgagtag

SEQ ID NO: 93720 - DNA, 1335 bp, synthetic construct
  misc_feature 1..1335: note = Description of Artificial Sequence: Synthetic coding sequence
  source 1..1335: mol_type = other DNA
atgctgcagagaatcggcctgatcttcctgcacaacatcgtggtggtgagcaactgcttctacttccaggccttcctggacgagttcaccaactggagcagaatcaaccccaacaaggccagaatccccatggccggcgacacccagggcgtggtgggcaccgtgagcaagccctgcttcaccgcctacgagatgaagatcggcgccatcaccttccaggtggccaccggcgacatcgccaccgagcaggtggacgtgatcgtgaacagcaccgccagaaccttcaacagaaagagcggcgtgagcagagccatcctggagggcgccggccaggccgtggagagcgagtgcgccgtgctggccgcccagccccacagagacttcatcatcacccccggcggctgcctgaagtgcaagatcatcatccacgtgcccggcggcaaggacgtgagaaagaccgtgaccagcgtgctggaggagtgcgagcagagaaagtacaccagcgtgagcctgcccgccatcggcaccggcaacgccggcaagaaccccatcaccgtggccgacaacatcatcgacgccatcgtggacttcagcagccagcacagcacccccagcctgaagaccgtgaaggtggtgatcttccagcccgagctgctgaacatcttctacgacagcatgaagaagagagacctgagcgccagcctgaacttccagagcaccttcagcatgaccacctgcaacctgcccgagcactggaccgacatgaaccaccagctgttctgcatggtgcagctggagcccggccagagcgagtacaacaccatcaaggacaagttcaccagaacctgcagcagctacgccatcgagaagatcgagagaatccagaacgccttcctgtggcagagctaccaggtgaagaagagacagatggacatcaagaacgaccacaagaacaacgagagactgctgttccacggcaccgacgccgacagcgtgccctacgtgaaccagcacggcttcaacagaagctgcgccggcaagaacgccgtgagctacggcaagggcacctacttcgccgtggacgccagctacagcgccaaggacacctacagcaagcccgacagcaacggcagaaagcacatgtacgtggtgagagtgctgaccggcgtgttcaccaagggcagagccggcctggtgacccccccccccaagaacccccacaaccccaccgacctgttcgacagcgtgaccaacaacaccagaagccccaagctgttcgtggtgttcttcgacaaccaggcctaccccgagtacctgatcaccttcaccgcctag

SEQ ID NO: 93721 - DNA, 2037 bp, synthetic construct
  misc_feature 1..2037: note = Description of Artificial Sequence: Synthetic coding sequence
  source 1..2037: mol_type = other DNA
atggccgcccccggccccctgcccgccgccgccctgagccccggcgcccccacccccagagagctgatgcacggcgtggccggcgtgaccagcagagccggcagagacagagaggccggcagcgtgctgcccgccggcaacagaggcgccagaaaggccagcagaagaagcagcagcagaagcatgagcagagacaacaagttcagcaagaaggactgcctgagcatcagaaacgtggtggccagcatccagaccaaggagggcctgaacctgaagctgatcagcggcgacgtgctgtacatctgggccgacgtgatcgtgaacagcgtgcccatgaacctgcagctgggcggcggccccctgagcagagccttcctgcagaaggccggccccatgctgcagaaggagctggacgacagaagaagagagaccgaggagaaggtgggcaacatcttcatgaccagcggctgcaacctggactgcaaggccgtgctgcacgccgtggccccctactggaacaacggcgccgagaccagctggcagatcatggccaacatcatcaagaagtgcctgaccaccgtggaggtgctgagcttcagcagcatcaccttccccatgatcggcaccggcagcctgcagttccccaaggccgtgttcgccaagctgatcctgagcgaggtgttcgagtacagcagcagcaccagacccatcaccagccccctgcaggaggtgcacttcctggtgtacaccaacgacgacgagggctgccaggccttcctggacgagttcaccaactggagcagaatcaaccccaacaaggccagaatccccatggccggcgacacccagggcgtggtgggcaccgtgagcaagccctgcttcaccgcctacgagatgaagatcggcgccatcaccttccaggtggccaccggcgacatcgccaccgagcaggtggacgtgatcgtgaacagcaccgccagaaccttcaacagaaagagcggcgtgagcagagccatcctggagggcgccggccaggccgtggagagcgagtgcgccgtgctggccgcccagccccacagagacttcatcatcacccccggcggctgcctgaagtgcaagatcatcatccacgtgcccggcggcaaggacgtgagaaagaccgtgaccagcgtgctggaggagtgcgagcagagaaagtacaccagcgtgagcctgcccgccatcggcaccggcaacgccggcaagaaccccatcaccgtggccgacaacatcatcgacgccatcgtggacttcagcagccagcacagcacccccagcctgaagaccgtgaaggtggtgatcttccagcccgagctgctgaacatcttctacgacagcatgaagaagagagacctgagcgccagcctgaacttccagagcaccttcagcatgaccacctgcaacctgcccgagcactggaccgacatgaaccaccagctgttctgcatggtgcagctggagcccggccagagcgagtacaacaccatcaaggacaagttcaccagaacctgcagcagctacgccatcgagaagatcgagagaatccagaacgccttcctgtggcagagctaccaggtgaagaagagacagatggacatcaagaacgaccacaagaacaacgagagactgctgttccacggcaccgacgccgacagcgtgccctacgtgaaccagcacggcttcaacagaagctgcgccggcaagaacgccgtgagctacggcaagggcacctacttcgccgtggacgccagctacagcgccaaggacacctacagcaagcccgacagcaacggcagaaagcacatgtacgtggtgagagtgctgaccggcgtgttcaccaagggcagagccggcctggtgacccccccccccaagaacccccacaaccccaccgacctgttcgacagcgtgaccaacaacaccagaagccccaagctgttcgtggtgttcttcgacaaccaggcctaccccgagtacctgatcaccttcaccgcctag

SEQ ID NO: 93722 - DNA, 1278 bp, synthetic construct
  misc_feature 1..1278: note = Description of Artificial Sequence: Synthetic coding sequence
  source 1..1278: mol_type = other DNA
atgaagcacaccgccttcctggacgagttcaccaactggagcagaatcaaccccaacaaggccagaatccccatggccggcgacacccagggcgtggtgggcaccgtgagcaagccctgcttcaccgcctacgagatgaagatcggcgccatcaccttccaggtggccaccggcgacatcgccaccgagcaggtggacgtgatcgtgaacagcaccgccagaaccttcaacagaaagagcggcgtgagcagagccatcctggagggcgccggccaggccgtggagagcgagtgcgccgtgctggccgcccagccccacagagacttcatcatcacccccggcggctgcctgaagtgcaagatcatcatccacgtgcccggcggcaaggacgtgagaaagaccgtgaccagcgtgctggaggagtgcgagcagagaaagtacaccagcgtgagcctgcccgccatcggcaccggcaacgccggcaagaaccccatcaccgtggccgacaacatcatcgacgccatcgtggacttcagcagccagcacagcacccccagcctgaagaccgtgaaggtggtgatcttccagcccgagctgctgaacatcttctacgacagcatgaagaagagagacctgagcgccagcctgaacttccagagcaccttcagcatgaccacctgcaacctgcccgagcactggaccgacatgaaccaccagctgttctgcatggtgcagctggagcccggccagagcgagtacaacaccatcaaggacaagttcaccagaacctgcagcagctacgccatcgagaagatcgagagaatccagaacgccttcctgtggcagagctaccaggtgaagaagagacagatggacatcaagaacgaccacaagaacaacgagagactgctgttccacggcaccgacgccgacagcgtgccctacgtgaaccagcacggcttcaacagaagctgcgccggcaagaacgccgtgagctacggcaagggcacctacttcgccgtggacgccagctacagcgccaaggacacctacagcaagcccgacagcaacggcagaaagcacatgtacgtggtgagagtgctgaccggcgtgttcaccaagggcagagccggcctggtgacccccccccccaagaacccccacaaccccaccgacctgttcgacagcgtgaccaacaacaccagaagccccaagctgttcgtggtgttcttcgacaaccaggcctaccccgagtacctgatcaccttcaccgcctag

SEQ ID NO: 93723 - DNA, 2565 bp, synthetic construct
  misc_feature 1..2565: note = Description of Artificial Sequence: Synthetic coding sequence
  source 1..2565: mol_type = other DNA
atggacttcagcatggtggccggcgccgccgcctacaacgagaagagcggcagaatcaccagcctgagcctgctgttccagaaggtgttcgcccagatcttcccccagtggagaaagggcaacaccgaggagtgcctgccctacaagtgcagcgagaccggcgccctgggcgagaactacagctggcagatccccatcaaccacaacgacttcaagatcctgaagaacaacgagagacagctgtgcgaggtgctgcagaacaagttcggctgcatcagcaccctggtgagccccgtgcaggagggcaacagcaagagcctgcaggtgttcagaaagatgctgacccccagaatcgagctgagcgtgtggaaggacgacctgaccacccacgccgtggacgccgtggtgaacgccgccaacgaggacctgctgcacggcggcggcctggccctggccctggtgaaggccggcggcttcgagatccaggaggagagcaagcagttcgtggccagatacggcaaggtgagcgccggcgagatcgccgtgaccggcgccggcagactgccctgcaagcagatcatccacgccgtgggccccagatggatggagtgggacaagcagggctgcaccggcaagctgcagagagccatcgtgagcatcctgaactacgtgatctacaagaacacccacatcaagaccgtggccatccccgccctgagcagcggcatcttccagttccccctgaacctgtgcaccaagaccatcgtggagaccatcagagtgagcctgcagggcaagcccatgatgagcaacctgaaggagatccacctggtgagcaacgaggaccccaccgtggccgccttcaaggccgccagcgagttcatcctgggcaagagcgagctgggccaggagaccacccccagcttcaacgccatggtggtgaacaacctgaccctgcagatcgtgcagggccacatcgagtggcagaccgccgacgtgatcgtgaacagcgtgaacccccacgacatcaccgtgggccccgtggccaagagcatcctgcagcaggccggcgtggagatgaagagcgagttcctggccaccaaggccaagcagttccagagaagccagctggtgctggtgaccaagggcttcaacctgttctgcaagtacatctaccacgtgctgtggcacagcgagttccccaagccccagatcctgaagcacgccatgaaggagtgcctggagaagtgcatcgagcagaacatcaccagcatcagcttccccgccctgggcaccggcaacatggagatcaagaaggagaccgccgccgagatcctgttcgacgaggtgctgaccttcgccaaggaccacgtgaagcaccagctgaccgtgaagttcgtgatcttccccaccgacctggagatctacaaggccttcagcagcgagatggccaagagaagcaagatgctgagcctgaacaactacagcgtgccccagagcaccagagaggagaagagagagaacggcctggaggccagaagccccgccatcaacctgatgggcttcaacgtggaggagatgtacgaggcccacgcctggatccagagaatcctgagcctgcagaaccaccacatcatcgagaacaaccacatcctgtacctgggcagaaaggagcacgacatcctgagccagctgcagaagaccagcagcgtgagcatcaccgagatcatcagccccggcagaaccgagctggagatcgagggcgccagagccgacctgatcgaggtggtgatgaacatcgaggacatgctgtgcaaggtgcaggaggagatggccagaaagaaggagagaggcctgtggagaagcctgggccagtggaccatccagcagcagaagacccaggacgagatgaaggagaacatcatcttcctgaagtgccccgtgccccccacccaggagctgctggaccagaagaagcagttcgagaagtgcggcctgcaggtgctgaaggtggagaagatcgacaacgaggtgctgatggccgccttccagagaaagaagaagatgatggaggagaagctgcacagacagcccgtgagccacagactgttccagcaggtgccctaccagttctgcaacgtggtgtgcagagtgggcttccagagaatgtacagcaccccctgcgaccccaagtacggcgccggcatctacttcaccaagaacctgaagaacctggccgagaaggccaagaagatcagcgccgccgacaagctgatctacgtgttcgaggccgaggtgctgaccggcttcttctgccagggccaccccctgaacatcgtgcccccccccctgagccccggcgccatcgacggccacgacagcgtggtggacaacgtgagcagccccgagaccttcgtgatcttcagcggcatgcaggccatcccccagtacctgtggacctgcacccaggagtacgtgcagagccaggactacagcagcggccccatgagacccttcgcccagcacccctggagaggcttcgccagcggcagccccgtggactag

SEQ ID NO: 93724 - DNA, 2334 bp, synthetic construct
  misc_feature 1..2334: note = Description of Artificial Sequence: Synthetic coding sequence
  source 1..2334: mol_type = other DNA
atgagcgtgagctgcgtgaagagcagcagaatcagcctggccgtgagcctgccctggagcctgcagttcagaaaggccaccgccaacctgtgcgtgttcagaaagatgctgacccccagaatcgagctgagcgtgtggaaggacgacctgaccacccacgccgtggacgccgtggtgaacgccgccaacgaggacctgctgcacggcggcggcctggccctggccctggtgaaggccggcggcttcgagatccaggaggagagcaagcagttcgtggccagatacggcaaggtgagcgccggcgagatcgccgtgaccggcgccggcagactgccctgcaagcagatcatccacgccgtgggccccagatggatggagtgggacaagcagggctgcaccggcaagctgcagagagccatcgtgagcatcctgaactacgtgatctacaagaacacccacatcaagaccgtggccatccccgccctgagcagcggcatcttccagttccccctgaacctgtgcaccaagaccatcgtggagaccatcagagtgagcctgcagggcaagcccatgatgagcaacctgaaggagatccacctggtgagcaacgaggaccccaccgtggccgccttcaaggccgccagcgagttcatcctgggcaagagcgagctgggccaggagaccacccccagcttcaacgccatggtggtgaacaacctgaccctgcagatcgtgcagggccacatcgagtggcagaccgccgacgtgatcgtgaacagcgtgaacccccacgacatcaccgtgggccccgtggccaagagcatcctgcagcaggccggcgtggagatgaagagcgagttcctggccaccaaggccaagcagttccagagaagccagctggtgctggtgaccaagggcttcaacctgttctgcaagtacatctaccacgtgctgtggcacagcgagttccccaagccccagatcctgaagcacgccatgaaggagtgcctggagaagtgcatcgagcagaacatcaccagcatcagcttccccgccctgggcaccggcaacatggagatcaagaaggagaccgccgccgagatcctgttcgacgaggtgctgaccttcgccaaggaccacgtgaagcaccagctgaccgtgaagttcgtgatcttccccaccgacctggagatctacaaggccttcagcagcgagatggccaagagaagcaagatgctgagcctgaacaactacagcgtgccccagagcaccagagaggagaagagagagaacggcctggaggccagaagccccgccatcaacctgatgggcttcaacgtggaggagatgtacgaggcccacgcctggatccagagaatcctgagcctgcagaaccaccacatcatcgagaacaaccacatcctgtacctgggcagaaaggagcacgacatcctgagccagctgcagaagaccagcagcgtgagcatcaccgagatcatcagccccggcagaaccgagctggagatcgagggcgccagagccgacctgatcgaggtggtgatgaacatcgaggacatgctgtgcaaggtgcaggaggagatggccagaaagaaggagagaggcctgtggagaagcctgggccagtggaccatccagcagcagaagacccaggacgagatgaaggagaacatcatcttcctgaagtgccccgtgccccccacccaggagctgctggaccagaagaagcagttcgagaagtgcggcctgcaggtgctgaaggtggagaagatcgacaacgaggtgctgatggccgccttccagagaaagaagaagatgatggaggagaagctgcacagacagcccgtgagccacagactgttccagcaggtgccctaccagttctgcaacgtggtgtgcagagtgggcttccagagaatgtacagcaccccctgcgaccccaagtacggcgccggcatctacttcaccaagaacctgaagaacctggccgagaaggccaagaagatcagcgccgccgacaagctgatctacgtgttcgaggccgaggtgctgaccggcttcttctgccagggccaccccctgaacatcgtgcccccccccctgagccccggcgccatcgacggccacgacagcgtggtggacaacgtgagcagccccgagaccttcgtgatcttcagcggcatgcaggccatcccccagtacctgtggacctgcacccaggagtacgtgcagagccaggactacagcagcggccccatgagacccttcgcccagcacccctggagaggcttcgccagcggcagccccgtggactag

SEQ ID NO: 93725 - DNA, 2460 bp, synthetic construct; identical to SEQ ID NO: 93712
  misc_feature 1..2460: note = Description of Artificial Sequence: Synthetic coding sequence
  source 1..2460: mol_type = other DNA

SEQ ID NO: 93726 - DNA, 1440 bp, synthetic construct
  misc_feature 1..1440: note = Description of Artificial Sequence: Synthetic coding sequence
  source 1..1440: mol_type = other DNA
atgagcgacggcttcgacagagcccccggcgccggcagaggcagaagcagaggcctgggcagaggcggcggcggccccgagggcggcggcttccccaacggcgccggccccgccgagagagccagacaccagcccccccagcccaaggcccccggcttcctgcagcccccccccctgagacagcccagaaccacccccccccccggcgcccagtgcgaggtgcccgccagcccccagagacccagcagacccggcgccctgcccgagcagaccagacccctgagagccccccccagcagccaggacaagatcccccagcagaacagcgagagcgccatggccaagccccaggtggtggtggcccccgtgctgatgagcaagctgagcgtgaacgcccccgagttctaccccagcggctacagcagcagctacaccgagagctacgaggacggctgcgaggactaccccaccctgagcgagtacgtgcaggacttcctgaaccacctgaccgagcagcccggcagcttcgagaccgagatcgagcagttcgccgagaccctgaacggctgcgtgaccaccgacgacgccctgcaggagctggtggagctgatctaccagcaggccaccagcatccccaacttcagctacatgggcgccagactgtgcaactacctgagccaccacctgaccatcagcccccagagcggcaacttcagacagctgctgctgcagagatgcagaaccgagtacgaggtgaaggaccaggccgccaagggcgacgaggtgaccagaaagagattccacgccttcgtgctgttcctgggcgagctgtacctgaacctggagatcaagggcaccaacggccaggtgaccagagccgacatcctgcaggtgggcctgagagagctgctgaacgccctgttcagcaaccccatggacgacaacctgatctgcgccgtgaagctgctgaagctgaccggcagcgtgctggaggacgcctggaaggagaagggcaagatggacatggaggagatcatccagagaatcgagaacgtggtgctggacgccaactgcagcagagacgtgaagcagatgctgctgaagctggtggagctgagaagcagcaactggggcagagtgcacgccaccagcacctacagagaggccacccccgagaacgaccccaactacttcatgaacgagcccaccttctacaccagcgacggcgtgcccttcaccgccgccgaccccgactaccaggagaagtaccaggagctgctggagagagaggacttcttccccgactacgaggagaacggcaccgacctgagcggcgccggcgacccctacctggacgacatcgacgacgagatggaccccgagatcgaggaggcctacgagaagttctgcctggagagcgagagaaagagaaagcagtag

SEQ ID NO: 93727 - DNA, 1104 bp, synthetic construct
  misc_feature 1..1104: note = Description of Artificial Sequence: Synthetic coding sequence
  source 1..1104: mol_type = other DNA
atggccaagccccaggtggtggtggcccccgtgctgatgagcaagctgagcgtgaacgcccccgagttctaccccagcggctacagcagcagctacaccgagagctacgaggacggctgcgaggactaccccaccctgagcgagtacgtgcaggacttcctgaaccacctgaccgagcagcccggcagcttcgagaccgagatcgagcagttcgccgagaccctgaacggctgcgtgaccaccgacgacgccctgcaggagctggtggagctgatctaccagcaggccaccagcatccccaacttcagctacatgggcgccagactgtgcaactacctgagccaccacctgaccatcagcccccagagcggcaacttcagacagctgctgctgcagagatgcagaaccgagtacgaggtgaaggaccaggccgccaagggcgacgaggtgaccagaaagagattccacgccttcgtgctgttcctgggcgagctgtacctgaacctggagatcaagggcaccaacggccaggtgaccagagccgacatcctgcaggtgggcctgagagagctgctgaacgccctgttcagcaaccccatggacgacaacctgatctgcgccgtgaagctgctgaagctgaccggcagcgtgctggaggacgcctggaaggagaagggcaagatggacatggaggagatcatccagagaatcgagaacgtggtgctggacgccaactgcagcagagacgtgaagcagatgctgctgaagctggtggagctgagaagcagcaactggggcagagtgcacgccaccagcacctacagagaggccacccccgagaacgaccccaactacttcatgaacgagcccaccttctacaccagcgacggcgtgcccttcaccgccgccgaccccgactaccaggagaagtaccaggagctgctggagagagaggacttcttccccgactacgaggagaacggcaccgacctgagcggcgccggcgacccctacctggacgacatcgacgacgagatggaccccgagatcgaggaggcctacgagaagttctgcctggagagcgagagaaagagaaagcagtag

SEQ ID NO: 93728 - DNA, 1203 bp, synthetic construct
  misc_feature 1..1203: note = Description of Artificial Sequence: Synthetic coding sequence
  source 1..1203: mol_type = other DNA
atgagcgacggcttcgacagagcccccgagcagaccagacccctgagagccccccccagcagccaggacaagatcccccagcagaacagcgagagcgccatggccaagccccaggtggtggtggcccccgtgctgatgagcaagctgagcgtgaacgcccccgagttctaccccagcggctacagcagcagctacaccgagagctacgaggacggctgcgaggactaccccaccctgagcgagtacgtgcaggacttcctgaaccacctgaccgagcagcccggcagcttcgagaccgagatcgagcagttcgccgagaccctgaacggctgcgtgaccaccgacgacgccctgcaggagctggtggagctgatctaccagcaggccaccagcatccccaacttcagctacatgggcgccagactgtgcaactacctgagccaccacctgaccatcagcccccagagcggcaacttcagacagctgctgctgcagagatgcagaaccgagtacgaggtgaaggaccaggccgccaagggcgacgaggtgaccagaaagagattccacgccttcgtgctgttcctgggcgagctgtacctgaacctggagatcaagggcaccaacggccaggtgaccagagccgacatcctgcaggtgggcctgagagagctgctgaacgccctgttcagcaaccccatggacgacaacctgatctgcgccgtgaagctgctgaagctgaccggcagcgtgctggaggacgcctggaaggagaagggcaagatggacatggaggagatcatccagagaatcgagaacgtggtgctggacgccaactgcagcagagacgtgaagcagatgctgctgaagctggtggagctgagaagcagcaactggggcagagtgcacgccaccagcacctacagagaggccacccccgagaacgaccccaactacttcatgaacgagcccaccttctacaccagcgacggcgtgcccttcaccgccgccgaccccgactaccaggagaagtaccaggagctgctggagagagaggacttcttccccgactacgaggagaacggcaccgacctgagcggcgccggcgacccctacctggacgacatcgacgacgagatggaccccgagatcgaggaggcctacgagaagttctgcctggagagcgagagaaagagaaagcagtag

SEQ ID NO: 93729 - DNA, 507 bp, synthetic construct
  misc_feature 1..507: note = Description of Artificial Sequence: Synthetic coding sequence
  source 1..507: mol_type = other DNA
atggccaagccccaggtggtggtggcccccgtgctgatgagcaagctgagcgtgaacgcccccgagttctaccccagcggctacagcagcagctacaccgagagctacgaggacggctgcgaggactaccccaccctgagcgagtacgtgcaggacttcctgaaccacctgaccgagcagcccggcagcttcgagaccgagatcgagcagttcgccgagaccctgaacggctgcgtgaccaccgacgacgccctgcaggagctggtggagctgatctaccagcaggccaccagcatccccaacttcagctacatgggcgccagactgtgcaactacctgagccaccacctgaccatcagcccccagagcggcaacttcagacagctgctgctgcagagatgcagaaccgagtacgaggtgaaggaccaggccgccaagggcgacgaggtgaccagaaagagattccacgccttcgtgctgttcctgggcgagctgtacctgaactag

SEQ ID NO: 93730 - DNA, 603 bp, synthetic construct
  misc_feature 1..603: note = Description of Artificial Sequence: Synthetic coding sequence
  source 1..603: mol_type = other DNA
atggccaagccccaggtggtggtggcccccgtgctgatgagcaagctgagcgtgaacgcccccgagttctaccccagcggctacagcagcagctacaccgagagctacgaggacggctgcgaggactaccccaccctgagcgagtacgtgcaggacttcctgaaccacctgaccgagcagcccggcagcttcgagaccgagatcgagcagttcgccgagaccctgaacggctgcgtgaccaccgacgacgccctgcaggagctggtggagctgatctaccagcaggccaccagcatccccaacttcagctacatgggcgccagactgtgcaactacctgagccaccacctgaccatcagcccccagagcggcaacttcagacagctgctgctgcagagatgcagaaccgagtacgaggtgaaggaccaggccgccaagggcgacgaggtgaccagaaagagattccacgccttcgtgctgttcctgggcgagctgtacctgaacctggagatcaagggcaccaacggccaggtgaccagagccgacatcctgcaggtgggcctgagagagctgctgaacgccctgttcagcaaccccatgtag

SEQ ID NO: 93731 - DNA, 1056 bp, synthetic construct
  misc_feature 1..1056: note = Description of Artificial Sequence: Synthetic coding sequence
  source 1..1056: mol_type = other DNA
atgagcgacggcttcgacagagcccccgagcagaccagacccctgagagccccccccagcagccaggacaagatcccccagcagaacagcgagagcgccatggccaagccccaggtggtggtggcccccgtgctgatgagcaagctgagcgtgaacgcccccgagttctaccccagcggctacagcagcagctacaccgagagctacgaggacggctgcgaggactaccccaccctgagcgagtacgtgcaggacttcctgaaccacctgaccgagcagcccggcagcttcgagaccgagatcgagcagttcgccgagaccctgaacggctgcgtgaccaccgacgacgccctgcaggagctggtggagctgatctaccagcaggccaccagcatccccaacttcagctacatgggcgccagactgtgcaactacctgagccaccacctgaccatcagcccccagagcggcaacttcagacagctgctgctgcagagatgcagaaccgagtacgaggtgaaggaccaggccgccaagggcgacgaggtgaccagaaagagattccacgccttcgtgctgttcctgggcgagctgtacctgaacctggagatcaagggcaccaacggccaggtgaccagagccgacatcctgcaggtgggcctgagagagctgctgaacgccctgttcagcaaccccatggacgacaacctgatctgcgccgtgaagctgctgaagctgaccggcagcgtgctggaggacgcctggaaggagaagggcaagatggacatggaggagatcatccagagaatcgagaacgtggtgctggacgccaactgcagcagagacgtgaagcagatgctgctgaagctggtggagctgagaagcagcaactggggcagagtgcacgccaccagcacctacagagaggccacccccgagaacgaccccaactacttcatgaacgagcccaccttctacaccagcgacggcgtgcccttcaccgccgccgaccccgacacctggatgatcctgatgatgagatggacccagagatag

SEQ ID NO: 93732 - DNA, 288 bp, synthetic construct
  misc_feature 1..288: note = Description of Artificial Sequence: Synthetic coding sequence
  source 1..288: mol_type = other DNA
atggccaagccccaggtggtggtggcccccgtgctgatgagcaagctgagcgtgaacgcccccgagttctaccccagcggctacagcagcagctacaccgagagctacgaggacggctgcgaggactaccccaccctgagcgagtacgtgcaggacttcctgaaccacctgaccgagcagcccggcagcttcgagaccgagatcgagcagttcgccgagaccctgaacggctgcgtgaccaccgacgacgccctgcaggagctggtggagctgatctaccagcagtag

SEQ ID NO: 93733 - DNA, 384 bp, synthetic construct
  misc_feature 1..384: note = Description of Artificial Sequence: Synthetic coding sequence
  source 1..384: mol_type = other DNA
atgaaggaccccagcagaagcagcaccagccccagcatcatcaacgaggacgtgatcatcaacggccacagccacgaggacgacaaccccttcgccgagtacatgtggatggagaacgaggaggagttcaacagacagatcgaggaggagctgtgggaggaggagttcatcgagagatgcttccaggagatgctggaggaggaggaggagcacgagtggttcatccccgccagagacctgccccagaccatggaccagatccaggaccagttcaacgacctggtgatcagcgacggcagcagcctggaggacctggtggtgaagagcaacctgaaccccaacgccaaggagttcgtgcccggcgtgaagtacggcaacatctag

SEQ ID NO: 93734 - DNA, 384 bp, synthetic construct; identical to SEQ ID NO: 93733
  misc_feature 1..384: note = Description of Artificial Sequence: Synthetic coding sequence
  source 1..384: mol_type = other DNA

SEQ ID NO: 93735 - DNA, 282 bp, synthetic construct
  misc_feature 1..282: note = Description of Artificial Sequence: Synthetic coding sequence
  source 1..282: mol_type = other DNA
atgaaggaccccagcagaagcagcaccagccccagcatcatcaacgaggacgtgatcatcaacggccacagccacgaggacgacaaccccttcgccgagtacatgtggatggagaacgaggaggagttcaacagacagatcgaggaggagctgtgggaggaggagttcatcgagagatgcttccaggagatgctggaggaggaggaggagcacgagtggttcatccccgccagagacctgccccagaccatggaccagatccaggaccagttcaacgactag

SEQ ID NO: 93736 - DNA, 384 bp, synthetic construct; identical to SEQ ID NO: 93733
  misc_feature 1..384: note = Description of Artificial Sequence: Synthetic coding sequence
  source 1..384: mol_type = other DNA

SEQ ID NO: 93737 - DNA, 372 bp, synthetic construct
  misc_feature 1..372: note = Description of Artificial Sequence: Synthetic coding sequence
  source 1..372: mol_type = other DNA
atgaacggcagcaacatggccaacaccagccccagcgtgaagagcaaggaggaccagggcctgagcggccacgacgagaaggagaaccccttcgccgagtacatgtggatggagaacgaggaggacttcaacagacaggtggaggaggagctgcaggagcaggacttcctggacagatgcttccaggagatgctggacgaggaggaccaggactggttcatccccagcagagacctgccccaggccatgggccagctgcagcagcagctgaacggcctgagcgtgagcgagggccacgacagcgaggacatcctgagcaagagcaacctgaaccccgacgccaaggagttcatccccggcgagaagtactag

SEQ ID NO: 93738 - DNA, 1896 bp, synthetic construct
  misc_feature 1..1896: note = Description of Artificial Sequence: Synthetic coding sequence
  source 1..1896: mol_type = other DNA
atgaaccccagcacccccagctaccccaccgccagcctgtacgtgggcgacctgcaccccgacgtgaccgaggccatgctgtacgagaagttcagccccgccggccccatcctgagcatcagaatctgcagagacctgatcaccagcggcagcagcaactacgcctacgtgaacttccagcacaccaaggacgccgagcacgccctggacaccatgaacttcgacgtgatcaagggcaagcccgtgagaatcatgtggagccagagagaccccagcctgagaaagagcggcgtgggcaacatcttcgtgaagaacctggacaagagcatcaacaacaaggccctgtacgacaccgtgagcgccttcggcaacatcctgagctgcaacgtggtgtgcgacgagaacggcagcaagggctacggcttcgtgcacttcgagacccacgaggccgccgagagagccatcaagaagatgaacggcatgctgctgaacggcagaaaggtgttcgtgggccagttcaagagcagaaaggagagagaggccgagctgggcgccagagccaaggagttccccaacgtgtacatcaagaacttcggcgaggacatggacgacgagagactgaaggacctgttcggcaagttcggccccgccctgagcgtgaaggtgatgaccgacgagagcggcaagagcaagggcttcggcttcgtgagcttcgagagacacgaggacgcccagaaggccgtggacgagatgaacggcaaggagctgaacggcaagcagatctacgtgggcagagcccagaagaaggtggagagacagaccgagctgaagagaaccttcgagcagatgaagcaggacagaatcaccagataccaggtggtgaacctgtacgtgaagaacctggacgacggcatcgacgacgagagactgagaaaggccttcagccccttcggcaccatcaccagcgccaaggtgatgatggagggcggcagaagcaagggcttcggcttcgtgtgcttcagcagccccgaggaggccaccaaggccgtgaccgagatgaacggcagaatcgtggccaccaagcccctgtacgtggccctggcccagagaaaggaggagagacaggcctacctgaccaacgagtacatgcagagaatggccagcgtgagagccgtgcccaaccagagagccccccccagcggctacttcatgaccgccgtgccccagacccagaaccacgccgcctactacccccccagccagatcgccagactgagacccagccccagatggaccgcccagggcgccagaccccaccccttccagaacaagcccagcgccatcagacccggcgcccccagagtgcccttcagcaccatgagacccgccagcagccaggtgcccagagtgatgagcacccagagagtggccaacaccagcacccagaccgtgggccccagacccgccgccgccgccgccgccgccgccacccccgccgtgagaaccgtgcccagatacaagtacgccgccggcgtgagaaacccccagcagcacagaaacgcccagccccaggtgaccatgcagcagctggccgtgcacgtgcagggccaggagaccctgaccgccagcagactggccagcgcccccccccagaagcagaagcagatgctgggcgagagactgttccccctgatccaggccatgcaccccaccctggccggcaagatcaccggcatgctgctggagatcgacaacagcgagctgctgtacatgctggagagccccgagagcctgagaagcaaggtggacgaggccgtggccgtgctgcaggcccaccaggccaaggaggccacccagaaggccgtgaacagcgccaccggcgtgcccaccgtgtag

SEQ ID NO: 93739 - DNA, 1896 bp, synthetic construct
  misc_feature 1..1896: note = Description of Artificial Sequence: Synthetic coding sequence
  source 1..1896: mol_type = other DNA
atgaacgccgccgccagcagctaccccatggccagcctgtacgtgggcgacctgcacagcgacgtgaccgaggccatgctgtacgagaagttcagccccgccggccccgtgctgagcatcagagtgtgcagagacatgatcaccagaagaagcctgggctacgcctacgtgaacttccagcagcccgccgacgccgagagagccctggacaccatgaacttcgacgtgatcaagggcaagcccatcagaatcatgtggagccagagagaccccagcctgagaaagagcggcgtgggcaacgtgttcatcaagaacctggacaagagcatcgacaacaaggccctgtacgacaccttcagcgccttcggcaacatcctgagctgcaaggtggtgtgcgacgagaacggcagcaagggctacgccttcgtgcacttcgagacccaggaggccgccgacaaggccatcgagaagatgaacggcatgctgctgaacgacagaaaggtgttcgtgggcagattcaagagcagaaaggagagagaggccgagctgggcgccaaggccaaggagttcaccaacgtgtacatcaagaacttcggcgaggaggtggacgacgagagcctgaaggagctgttcagccagttcggcaagaccctgagcgtgaaggtgatgagagaccccaacggcaagagcaagggcttcggcttcgtgagctacgagaagcacgaggacgccaacaaggccgtggaggagatgaacggcaaggagatcagcggcaagatcatcttcgtgggcagagcccagaagaaggtggagagacaggccgagctgaagagaaagttcgagcagctgaagcaggagagaatcagcagataccagggcgtgaacctgtacatcaagaacctggacgacaccatcgacgacgagaagctgagaaaggagttcagccccttcggcagcatcaccagcgccaaggtgatgctggaggacggcagaagcaagggcttcggcttcgtgtgcttcagcagccccgaggaggccaccaaggccgtgaccgagatgaacggcagaatcgtgggcagcaagcccctgtacgtggccctggcccagagaaaggaggagagaaaggcccacctgaccaaccagtacatgcagagagtggccggcatgagagccctgcccgccaacgccatcctgaaccagttccagcccgccgccggcggctacttcgtgcccgccgtgccccaggcccagggcagacccccctactacacccccaaccagctggcccagatgagacccaaccccagatggcagcagggcggcagaccccagggcttccagggcatgcccagcgccatcagacagagcggccccagacccaccctgagacacctggcccccaccggcaacgcccccgccagcagaggcctgcccaccaccacccagagagtgggcgtgcccaccgccgtgcagaacctggcccccagagccgccgtggccgccgccgcccccagagccgtggccccctacaagtacgccagcagcgtgagaagcccccaccccgccatccagcccctgcaggccccccagcccgccgtgcacgtgcagggccaggagcccctgaccgccagcatgctggccgccgcccccccccaggagcagaagcagatgctgggcgagagactgttccccctgatccagaccatgcacagcaacctggccggcaagatcaccggcatgctgctggagatcgacaacagcgagctgctgcacatgctggagagccccgagagcctgagaagcaaggtggacgaggccgtggccgtgctgcaggcccaccacgccaagaaggaggccgcccagaaggtgggcgccgtggccgccgccaccagctag

SEQ ID NO: 93740 - DNA, 1935 bp, synthetic construct
  misc_feature 1..1935: note = Description of Artificial Sequence: Synthetic coding sequence
  source 1..1935: mol_type = other DNA
atgaacgccgccgccagcagctaccccatggccagcctgtacgtgggcgacctgcacagcgacgtgaccgaggccatgctgtacgagaagttcagccccgccggccccgtgctgagcatcagagtgtgcagagacatgatcaccagaagaagcctgggctacgcctacgtgaacttccagcagcccgccgacgccgagagagccctggacaccatgaacttcgacgtgatcaagggcaagcccatcagaatcatgtggagccagagagaccccagcctgagaaagagcggcgtgggcaacgtgttcatcaagaacctggacaagagcatcgacaacaaggccctgtacgacaccttcagcgccttcggcaacatcctgagctgcaaggtggtgtgcgacgagaacggcagcaagggctacgccttcgtgcacttcgagacccaggaggccgccgacaaggccatcgagaagatgaacggcatgctgctgaacgacagaaaggtgttcgtgggcagattcaagagcagaaaggagagagaggccgagctgggcgccaaggccaaggagttcaccaacgtgtacatcaagaacttcggcgaggaggtggacgacgagagcctgaaggagctgttcagccagttcggcaagaccctgagcgtgaaggtgatgagagaccccaacggcaagagcaagggcttcggcttcgtgagctacgagaagcacgaggacgccaacaaggccgtggaggagatgaacggcaaggagatcagcggcaagatcatcttcgtgggcagagcccagaagaaggtggagagacaggccgagctgaagagaaagttcgagcagctgaagcaggagagaatcagcagataccagggcgtgaacctgtacatcaagaacctggacgacaccatcgacgacgagaagctgagaaaggagttcagccccttcggcagcatcaccagcgccaaggtgatgctggaggacggcagaagcaagggcttcggcttcgtgtgcttcagcagccccgaggaggccaccaaggccgtgaccgagatgaacggcagaatcgtgggcagcaagcccctgtacgtggccctggcccagagaaaggaggagagaaaggcccacctgaccaaccagtacatgcagagagtggccggcatgagagccctgcccgccaacgccatcctgaaccagttccagcccgccgccggcggctacttcgtgcccgccgtgccccaggcccagggcagacccccctactacacccccaaccagctggcccagatgagacccaaccccagatggcagcagggcggcagaccccagggcttccagggcatgcccagcgccatcagacagagcggccccagacccaccctgagacacctggcccccaccggcagcgagtgccccgacagactggccatggacttcggcggcgccggcgccgcccagcagggcctgaccgacagctgccagagcggcggcgtgcccaccgccgtgcagaacctggcccccagagccgccgtggccgccgccgcccccagagccgtggccccctacaagtacgccagcagcgtgagaagcccccaccccgccatccagcccctgcaggccccccagcccgccgtgcacgtgcagggccaggagcccctgaccgccagcatgctggccgccgcccccccccaggagcagaagcagatgctgggcgagagactgttccccctgatccagaccatgcacagcaacctggccggcaagatcaccggcatgctgctggagatcgacaacagcgagctgctgcacatgctggagagccccgagagcctgagaagcaaggtggacgaggccgtggccgtgctgcaggcccaccacgccaagaaggaggccgcccagaaggtgggcgccgtggccgccgccaccagctag

SEQ ID NO: 93741 - DNA, 1983 bp, synthetic construct
  misc_feature 1..1983: note = Description of Artificial Sequence: Synthetic coding sequence
  source 1..1983: mol_type = other DNA
atgaacgccgccgccagcagctaccccatggccagcctgtacgtgggcgacctgcacagcgacgtgaccgaggccatgctgtacgagaagttcagccccgccggccccgtgctgagcatcagagtgtgcagagacatgatcaccagaagaagcctgggctacgcctacgtgaacttccagcagcccgccgacgccgagagagccctggacaccatgaacttcgacgtgatcaagggcaagcccatcagaatcatgtggagccagagagaccccagcctgagaaagagcggcgtgggcaacgtgttcatcaagaacctggacaagagcatcgacaacaaggccctgtacgacaccttcagcgccttcggcaacatcctgagctgcaaggtggtgtgcgacgagaacggcagcaagggctacgccttcgtgcacttcgagacccaggaggccgccgacaaggccatcgagaagatgaacggcatgctgctgaacgacagaaaggtgttcgtgggcagattcaagagcagaaaggagagagaggccgagctgggcgccaaggccaaggagttcaccaacgtgtacatcaagaacttcggcgaggaggtggacgacgagagcctgaaggagctgttcagccagttcggcaagaccctgagcgtgaaggtgatgagagaccccaacggcaagagcaagggcttcggcttcgtgagctacgagaagcacgaggacgccaacaaggccgtggaggagatgaacggcaaggagatcagcggcaagatcatcttcgtgggcagagcccagaagaaggtggagagacaggccgagctgaagagaaagttcgagcagctgaagcaggagagaatcagcagataccagggcgtgaacctgtacatcaagaacctggacgacaccatcgacgacgagaagctgagaaaggagttcagccccttcggcagcatcaccagcgccaaggtgatgctggaggacggcagaagcaagggcttcggcttcgtgtgcttcagcagccccgaggaggccaccaaggccgtgaccgagatgaacggcagaatcgtgggcagcaagcccctgtacgtggccctggcccagagaaaggaggagagaaaggcccacctgaccaaccagtacatgcagagagtggccggcatgagagccctgcccgccaacgccatcctgaaccagttccagcccgccgccggcggctacttcgtgcccgccgtgccccaggcccagggcagacccccctactacacccccaaccagctggcccagatgagacccaaccccagatggcagcagggcggcagaccccagggcttccagggcatgcccagcgccatcagacagagcggccccagacccaccctgagacacctggcccccaccggcaacgcccccgccagcagaggcctgcccaccaccacccagagagtgggcagcgagtgccccgacagactggccatggacttcggcggcgccggcgccgcccagcagggcctgaccgacagctgccagagcggcggcgtgcccaccgccgtgcagaacctggcccccagagccgccgtggccgccgccgcccccagagccgtggccccctacaagtacgccagcagcgtgagaagcccccaccccgccatccagcccctgcaggccccccagcccgccgtgcacgtgcagggccaggagcccctgaccgccagcatgctggccgccgcccccccccaggagcagaagcagatgctgggcgagagactgttccccctgatccagaccatgcacagcaacctggccggcaagatcaccggcatgctgctggagatcgacaacagcgagctgctgcacatgctggagagccccgagagcctgagaagcaaggtggacgaggccgtggccgtgctgcaggcccaccacgccaagaaggaggccgcccagaaggtgggcgccgtggccgccgccaccagctag

SEQ ID NO: 93742 - DNA, 390 bp, synthetic construct
  misc_feature 1..390: note = Description of Artificial Sequence: Synthetic coding sequence
  source 1..390: mol_type = other DNA
atgaacgccgccgccagcagctaccccatggccagcctgtacgtgggcgacctgcacagcgacgtgaccgaggccatgctgtacgagaagttcagccccgccggccccgtgctgagcatcagagtgtgcagagacatgatcaccagaagaagcctgggctacgcctacgtgaacttccagcagcccgccgacgccgagagagccctggacaccatgaacttcgacgtgatcaagggcaagcccatcagaatcatgtggagccagagagaccccagcctgagaaagagcggcgtgggcaacgtgttcatcaagaacctggacaagagcatcgacaacaaggccctgtacgacaccttcagcgccttcggcaacatcctgagctgcaagtag

SEQ ID NO: 93743 - DNA, 207 bp, synthetic construct
  misc_feature 1..207: note = Description of Artificial Sequence: Synthetic coding sequence
  source 1..207: mol_type = other DNA
tgactgatccagaccatgcacagcaacctggccggcaagatcaccggcatgctgctggagatcgacaacagcgagctgctgcacatgctggagagccccgagagcctgagaagcaaggtggacgaggccgtggccgtgctgcaggcccaccacgccaagaaggaggccgcccagaaggtgggcgccgtggccgccgccaccagctag

SEQ ID NO: 93744 - DNA, 120 bp, synthetic construct
  misc_feature 1..120: note = Description of Artificial Sequence: Synthetic coding sequence
  source 1..120: mol_type = other DNA
atgaacgccgccgccagcagctaccccatggccagcctgtacgtgggcgacctgcacagcgacgtgaccgaggccatgctgtacgagaagttcagccccgccggccccgtgctgagctag

SEQ ID NO: 93745 - DNA, 1149 bp, synthetic construct
  misc_feature 1..1149: note = Description of Artificial Sequence: Synthetic coding sequence
  source 1..1149: mol_type = other DNA
atgggcagcggcgagcccaaccccgccggcaagaagaagaagtacctgaaggccgccctgtacgtgggcgacctggaccccgacgtgaccgaggacatgctgtacaagaagttcagacccgccggccccctgagattcaccagaatctgcagagaccccgtgaccagaagccccctgggctacggctacgtgaacttcagattccccgccgacgccgagtgggccctgaacaccatgaacttcgacctgatcaacggcaagcccttcagactgatgtggagccagcccgacgacagactgagaaagagcggcgtgggcaacatcttcatcaagaacctggacaagagcatcgacaacagagccctgttctacctgttcagcgccttcggcaacatcctgagctgcaaggtggtgtgcgacgacaacggcagcaagggctacgcctacgtgcacttcgacagcctggccgccgccaacagagccatctggcacatgaacggcgtgagactgaacaacagacaggtgtacgtgggcagattcaagttccccgaggagagagccgccgaggtgagaaccagagacagagccaccttcaccaacgtgttcgtgaagaacatcggcgacgacatcgacgacgagaagctgaaggagctgttctgcgagtacggccccaccgagagcgtgaaggtgatcagagacgccagcggcaagagcaagggcttcggcttcgtgagatacgagacccacgaggccgcccagaaggccgtgctggacctgcacggcaagagcatcgacggcaaggtgctgtacgtgggcagagcccagaagaagatcgagagactggccgagctgagaagaagattcgagagactgagactgaaggagaagagcagaccccccggcgtgcccatctacatcaagaacctggacgagaccatcaacgacgagaagctgaaggaggagttcagcagcttcggcagcatcagcagagccaaggtgatgatggaggtgggccagggcaagggcttcggcgtggtgtgcttcagcagcttcgaggaggccaccaaggccgtggacgagatgaacggcagaatcgtgggcagcaagcccctgcacgtgaccctgggccaggccagaagaagatgctag

SEQ ID NO: 93746 - DNA, 657 bp, synthetic construct
  misc_feature 1..657: note = Description of Artificial Sequence: Synthetic coding sequence
  source 1..657: mol_type = other DNA
atgaacggcgtgagactgaacaacagacaggtgtacgtgggcagattcaagttccccgaggagagagccgccgaggtgagaaccagagacagagccaccttcaccaacgtgttcgtgaagaacatcggcgacgacatcgacgacgagaagctgaaggagctgttctgcgagtacggccccaccgagagcgtgaaggtgatcagagacgccagcggcaagagcaagggcttcggcttcgtgagatacgagacccacgaggccgcccagaaggccgtgctggacctgcacggcaagagcatcgacggcaaggtgctgtacgtgggcagagcccagaagaagatcgagagactggccgagctgagaagaagattcgagagactgagactgaaggagaagagcagaccccccggcgtgcccatctacatcaagaacctggacgagaccatcaacgacgagaagctgaaggaggagttcagcagcttcggcagcatcagcagagccaaggtgatgatggaggtgggccagggcaagggcttcggcgtggtgtgcttcagcagcttcgaggaggccaccaaggccgtggacgagatgaacggcagaatcgtgggcagcaagcccctgcacgtgaccctgggccaggccagaagaagatgctag

SEQ ID NO: 93747 - DNA, 1053 bp, synthetic construct
  misc_feature 1..1053: note = Description of Artificial Sequence: Synthetic coding sequence
  source 1..1053: mol_type = other DNA
atgctgtacaagaagttcagacccgccggccccctgagattcaccagaatctgcagagaccccgtgaccagaagccccctgggctacggctacgtgaacttcagattccccgccgacgccgagtgggccctgaacaccatgaacttcgacctgatcaacggcaagcccttcagactgatgtggagccagcccgacgacagactgagaaagagcggcgtgggcaacatcttcatcaagaacctggacaagagcatcgacaacagagccctgttctacctgttcagcgccttcggcaacatcctgagctgcaaggtggtgtgcgacgacaacggcagcaagggctacgcctacgtgcacttcgacagcctggccgccgccaacagagccatctggcacatgaacggcgtgagactgaacaacagacaggtgtacgtgggcagattcaagttccccgaggagagagccgccgaggtgagaaccagagacagagccaccttcaccaacgtgttcgtgaagaacatcggcgacgacatcgacgacgagaagctgaaggagctgttctgcgagtacggccccaccgagagcgtgaaggtgatcagagacgccagcggcaagagcaagggcttcggcttcgtgagatacgagacccacgaggccgcccagaaggccgtgctggacctgcacggcaagagcatcgacggcaaggtgctgtacgtgggcagagcccagaagaagatcgagagactggccgagctgagaagaagattcgagagactgagactgaaggagaagagcagaccccccggcgtgcccatctacatcaagaacctggacgagaccatcaacgacgagaagctgaaggaggagttcagcagcttcggcagcatcagcagagccaaggtgatgatggaggtgggccagggcaagggcttcggcgtggtgtgcttcagcagcttcgaggaggccaccaaggccgtggacgagatgaacggcagaatcgtgggcagcaagcccctgcacgtgaccctgggccaggccagaagaagatgctag

SEQ ID NO: 93748 - DNA, 957 bp, synthetic construct
  misc_feature 1..957: note = Description of Artificial Sequence: Synthetic coding sequence
  source 1..957: mol_type = other DNA
atgcccaagagaggcaagaagggcgccgtggccgaggacggcgacgagctgagaaccgagcccgaggccaagaagagcaagaccgccgccaagaagaacgacaaggaggccgccggcgagggccccgccctgtacgaggacccccccgaccagaagaccagccccagcggcaagcccgccaccctgaagatctgcagctggaacgtggacggcctgagagcctggatcaagaagaagggcctggactgggtgaaggaggaggcccccgacatcctgtgcctgcaggagaccaagtgcagcgagaacaagctgcccgccgagctgcaggagctgcccggcctgagccaccagtactggagcgcccccagcgacaaggagggctacagcggcgtgggcctgctgagcagacagtgccccctgaaggtgagctacggcatcggcgacgaggagcacgaccaggagggcagagtgatcgtggccgagttcgacagcttcgtgctggtgaccgcctacgtgcccaacgccggcagaggcctggtgagactggagtacagacagagatgggacgaggccttcagaaagttcctgaagggcctggccagcagaaagcccctggtgctgtgcggcgacctgaacgtggcccacgaggagatcgacctgagaaaccccaagggcaacaagaagaacgccggcttcaccccccaggagagacagggcttcggcgagctgctgcaggccgtgcccctggccgacagcttcagacacctgtaccccaacaccccctacgcctacaccttctggacctacatgatgaacgccagaagcaagaacgtgggctggagactggactacttcctgctgagccacagcctgctgcccgccctgtgcgacagcaagatcagaagcaaggccctgggcagcgaccactgccccatcaccctgtacctggccctgtag

SEQ ID NO: 93749 - DNA, 891 bp, synthetic construct
  misc_feature 1..891: note = Description of Artificial Sequence: Synthetic coding sequence
  source 1..891: mol_type = other DNA
atggccgccgccgccgccgccgccgccgccgccggcgccgccggcggcagaggcagcggccccggcagaagaagacacctggtgcccggcgccggcggcgaggccggcgagggcgcccccggcggcgccggcgactacggcaacggcctggagagcgaggagctggagcccgaggagctgctgctggagcccgagcccgagcccgagcccgaggaggagccccccagacccagagccccccccggcgcccccggccccggccccggcagcggcgcccccggcagccaggaggaggaggaggagcccggcctggtggagggcgaccccggcgacggcgccatcgaggaccccgagctggaggccatcaaggccagagtgagagagatggaggaggaggccgagaagctgaaggagctgcagaacgaggtggagaagcagatgaacatgagccccccccccggcaacgccggccccgtgatcatgagcatcgaggagaagatggaggccgacgccagaagcatctacgtgggcaacgtggactacggcgccaccgccgaggagctggaggcccacttccacggctgcggcagcgtgaacagagtgaccatcctgtgcgacaagttcagcggccaccccaagggcttcgcctacatcgagttcagcgacaaggagagcgtgagaaccagcctggccctggacgagagcctgttcagaggcagacagatcaaggtgatccccaagagaaccaacagacccggcatcagcaccaccgacagaggcttccccagagccagatacagagccagaaccaccaactacaacagcagcagaagcagattctacagcggcttcaacagcagacccagaggcagagtgtacagaagcggctag

SEQ ID NO: 93750 - DNA, 1557 bp, synthetic construct
  misc_feature 1..1557: note = Description of Artificial Sequence: Synthetic coding sequence
  source 1..1557: mol_type = other DNA
atgagctgcgtgaagctgtggcccagcggcgcccccgcccccctggtgagcatcgaggagctggagaaccaggagctggtgggcaagggcggcttcggcaccgtgttcagagcccagcacagaaagtggggctacgacgtggccgtgaagatcgtgaacagcaaggccatcagcagagaggtgaaggccatggccagcctggacaacgagttcgtgctgagactggagggcgtgatcgagaaggtgaactgggaccaggaccccaagcccgccctggtgaccaagttcatggagaacggcagcctgagcggcctgctgcagagccagtgccccagaccctggcccctgctgtgcagactgctgaaggaggtggtgctgggcatgttctacctgcacgaccagaaccccgtgctgctgcacagagacctgaagcccagcaacgtgctgctggaccccgagctgcacgtgaagctggccgacttcggcctgagcaccttccagggcggcagccagagcggcaccggcagcggcgagcccggcggcaccctgggctacctggcccccgagctgttcgtgaacgtgaacagaaaggccagcaccgccagcgacgtgtacagcttcggcatcctgatgtgggccgtgctggccggcagagaggtggagctgcccaccgagcccagcctggtgtacgaggccgtgtgcaacagacagaacagacccagcctggccgagctgccccaggccggccccgagacccccggcctggagggcctgaaggagctgatgcagctgtgctggagcagcgagcccaaggacagacccagcttccaggagtgcctgcccaagaccgacgaggtgttccagatggtggagaacaacatgaacgccgccgtgagcaccgtgaaggacttcctgagccagctgagaagcagcaacagaagattcagcatccccgagagcggccagggcggcaccgagatggacggcttcagaagaaccatcgagaaccagcacagcagaaacgacgtgatggtgagcgagtggctgaacaagctgaacctggaggagccccccagcagcgtgcccaagaagtgccccagcctgaccaagagaagcagagcccaggaggagcaggtgccccaggcctggaccgccggcaccagcagcgacagcatggcccagcccccccagacccccgagaccagcaccttcagaaaccagatgcccagccccaccagcaccggcacccccagccccggccccagaggcaaccagggcgccgagagacagggcatgaactggagctgcagaacccccgagcccaaccccgtgaccggcagacccctggtgaacatctacaactgcagcggcgtgcaggtgggcgacaacaactacctgaccatgcagcagaccaccgccctgcccacctggggcctggcccccagcggcaagggcagaggcctgcagcaccccccccccgtgggcagccaggagggccccaaggaccccgaggcctggagcagaccccagggctggtacaaccacagcggcaagtag

SEQ ID NO: 93751 - DNA, 2223 bp, synthetic construct
  misc_feature 1..2223: note = Description of Artificial Sequence: Synthetic coding sequence
  source 1..2223: mol_type = other DNA
atgctgggcagaagaggcagcgactgggccgtgcccgcccccgagaccatgcccttccccgtgaccacccagggcagccagcagacccagcccccccagaagcactacggcatcaccagccccatcagcctggccgcccccaaggagaccgactgcgtgctgacccagaagctgatcgagaccctgaagcccttcggcgtgttcgaggaggaggaggagctgcagagaagaatcctgatcctgggcaagctgaacaacctggtgaaggagtggatcagagagatcagcgagagcaagaacctgccccagagcgtgatcgagaacgtgggcggcaagatcttcaccttcggcagctacagactgggcgtgcacaccaagggcgccgacatcgacgccctgtgcgtggcccccagacacgtggacagaagcgacttcttcaccagcttctacgacaagctgaagctgcaggaggaggtgaaggacctgagagccgtggaggaggccttcgtgcccgtgatcaagctgtgcttcgacggcatcgagatcgacatcctgttcgccagactggccctgcagaccatccccgaggacctggacctgagagacgacagcctgctgaagaacctggacatcagatgcatcagaagcctgaacggctgcagagtgaccgacgagatcctgcacctggtgcccaacatcgacaacttcagactgaccctgagagccatcaagctgtgggccaagagacacaacatctacagcaacatcctgggcttcctgggcggcgtgagctgggccatgctggtggccagaacctgccagctgtaccccaacgccatcgccagcaccctggtgcacaagttcttcctggtgttcagcaagtgggagtggcccaaccccgtgctgctgaagcagcccgaggagtgcaacctgaacctgcccgtgtgggaccccagagtgaaccccagcgacagataccacctgatgcccatcatcacccccgcctacccccagcagaacagcacctacaacgtgagcgtgagcaccagaatggtgatggtggaggagttcaagcagggcctggccatcaccgacgagatcctgctgagcaaggccgagtggagcaagctgttcgaggcccccaacttcttccagaagtacaagcactacatcgtgctgctggccagcgcccccaccgagaagcagagactggagtgggtgggcctggtggagagcaagatcagaatcctggtgggcagcctggagaagaacgagttcatcaccctggcccacgtgaacccccagagcttccccgcccccaaggagaaccccgacaaggaggagttcagaaccatgtgggtgatcggcctggtgttcaagaagaccgagaacagcgagaacctgagcgtggacctgacctacgacatccagagcttcaccgacaccgtgtacagacaggccatcaacagcaagatgttcgaggtggacatgaagatcgccgccatgcacgtgaagagaaagcagctgcaccagctgctgcccaaccacgtgctgcagaagaagaagaagcacagcaccgagggcgtgaagctgaccgccctgaacgacagcagcctggacctgagcatggacagcgacaacagcatgagcgtgcccagccccaccagcgccaccaagaccagccccctgaacagcagcggcagcagccagggcagaaacagccccgcccccgccgtgaccgccgccagcgtgaccaacatccaggccaccgaggtgagcgtgccccaggtgaacagcagcgagagcagcggcggcaccagcagcgagagcatcccccagaccgccacccagcccgccatcagccccccccccaagcccaccgtgagcagagtggtgagcagcaccagactggtgaaccccccccccagaagcagcggcaacgccgccaccagcggcaacgccgccaccaagatccccacccccatcgtgggcgtgaagagaaccagcagcccccacaaggaggagagccccaagaagaccaagaccgaggaggagcagctggacaccgagaccagcaccacccagagcgagaccatccagaccgccgccagcctgctggccagccagaagaccagcagcaccgacctgagcgacatccccgccctgcccgccaaccccatccccgtgatcaagaacagcatcaagctgagactgaacagatag

SEQ ID NO: 93752 - DNA, 858 bp, synthetic construct
  misc_feature 1..858: note = Description of Artificial Sequence: Synthetic coding sequence
  source 1..858: mol_type = other DNA
atgcccttccccgtgaccacccagggcagccagcagacccagcccccccagaagcactacggcatcaccagccccatcagcctggccgcccccaaggagaccgactgcgtgctgacccagaagctgatcgagaccctgaagcccttcggcgtgttcgaggaggaggaggagctgcagagaagaatcctgatcctgggcaagctgaacaacctggtgaaggagtggatcagagagatcagcgagagcaagaacctgccccagagcgtgatcgagaacgtgggcggcaagatcttcaccttcggcagctacagactgggcgtgcacaccaagggcgccgacatcgacgccctgtgcgtggcccccagacacgtggacagaagcgacttcttcaccagcttctacgacaagctgaagctgcaggaggaggtgaaggacctgagagccgtggaggaggccttcgtgcccgtgatcaagctgtgcttcgacggcatcgagatcgacatcctgttcgccagactggccctgcagaccatccccgaggacctggacctgagagacgacagcctgctgaagaacctggacatcagatgcatcagaagcctgaacggctgcagagtgaccgacgagatcctgcacctggtgcccaacatcgacaacttcagactgaccctgagagccatcaagctgtgggccaagagacacaacatctacagcaacatcctgggcttcctgggcggcgtgagctgggccatgctggtggccagaacctgccagctgtaccccaacgccatcgccagcaccctggtgcacaagttcttcctggtgttcagcaagtggtacgtgttcagactgtactag

SEQ ID NO: 93753 - DNA, 1911 bp, synthetic construct
  misc_feature 1..1911: note = Description of Artificial Sequence: Synthetic coding sequence
  source 1..1911: mol_type = other DNA
atgcccttccccgtgaccacccagggccccccccagcccgcccccccccccaacagatacggcgtgagcagccccatcagcctggccgtgcccaaggagaccgactgcctgctgacccagagactgatcgagaccctgagacccttcggcgtgttcgaggaggaggaggagctgcagagaagaatcctggtgctggagaagctgaacaacctggtgaaggagtggatcagagagatcagcgagagcaagagcctgccccagagcgtgatcgagaacgtgggcggcaagatcttcaccttcggcagctacagactgggcgtgcacaccaagggcgccgacatcgacgccctgtgcgtggcccccagccacgtggacagaagcgacttcttcaccagcttctacgccaagctgaagctgcaggaggaggtgaaggacctgagagccgtggaggaggccttcgtgcccgtgatcaagctgtgcttcgacggcatcgagatcgacatcctgttcgccagactggccctgcagaccatccccgaggacctggacctgagagacgacagcctgctgaagaacctggacatcagatgcatcagaagcctgaacggctgcagagtgaccgacgagatcctgcacctggtgcccaacatcgacaacttcagactgaccctgagagccatcaagctgtgggccaagtgccacaacatctacagcaacatcctgggcttcctgggcggcgtgagctgggccatgctggtggccagaacctgccagctgtaccccaacgccgtggccagcaccctggtgagaaagttcttcctggtgttcagcgagtgggagtggcccaaccccgtgctgctgaaggagcccgaggagagaaacctgaacctgcccgtgtgggaccccagagtgaaccccagcgacagataccacctgatgcccatcatcacccccgcctacccccagcagaacagcacctacaacgtgagcatcagcaccagaatggtgatgatcgaggagttcaagcagggcctggccatcacccacgagatcctgctgagcaaggccgagtggagcaagctgttcgaggcccccagcttcttccagaagtacaagcactacatcgtgctgctggccagcgccagcaccgagaagcagcacctggagtgggtgggcctggtggagagcaagatcagaatcctggtgggcagcctggagaagaacgagttcatcaccctggcccacgtgaacccccagagcttccccgcccccaaggagaaccccgacatggaggagttcagaaccatgtgggtgatcggcctgggcctgaagaagcccgacaacagcgagatcctgagcatcgacctgacctacgacatccagagcttcaccgacaccgtgtacagacaggccgtgaacagcaagatgttcgagatgggcatgaagatcaccgccatgcacctgagaagaaaggagctgcaccagctgctgccccaccacgtgctgcaggacaagaaggcccacagcaccgagggcagaagactgaccgacctgaacgacagcagcttcgacctgagcgccggctgcgagaacagcatgagcgtgcccagcagcaccagcaccatgaagaccggccccctgatcagcagcagccagggcagaaacagccccgccctggccgtgatgaccgccagcgtggccaacatccaggccaccgagttcagcctgcagcaggtgaacaccaacgagagcagcggcgtggccctgaacgagagcatcccccacgccgtgagccagcccgccatcagccccagccccaaggccatggtggccagagtggtgagcagcacctgcctgatcagccaccccgacctgcaggagacccagcagcagacctacctgatcctgtag

SEQ ID NO: 93754 - DNA, 1737 bp, synthetic construct
  misc_feature 1..1737: note = Description of Artificial Sequence: Synthetic coding sequence
  source 1..1737: mol_type = other DNA
atggacttcctgctgttccagttcggcctgtgcaccttcaagtacgactacaccgacagcaagtacatcaccaagagcttcaacttctacgtgttccccaagcccttcaacagaagcagccccgacgtgaagttcgtgtgccagagcagcagcatcgacttcctggccagccagggcttcgacttcaacaaggtgttcagaaacggcatcccctacctgaaccaggaggaggagagacagctgagagagcagtacgacgagaagagaagccaggccaacggcgccggcgccctgagctacgtgagccccaacaccagcaagtgccccgtgaccatccccgaggaccagaagaagttcatcgaccaggtggtggagaagatcgaggacctgctgcagagcgaggagaacaagaacctggacctggagccctgcaccggcttccagagaaagctgatctaccagaccctgagctggaagtaccccaagggcatccacgtggagaccctggagaccgagaagaaggagagatacatcgtgatcagcaaggtggacgaggaggagagaaagagaagagagcagcagaagcacgccaaggagcaggaggagctgaacgacgccgtgggcttcagcagagtgatccacgccatcgccaacagcggcaagctggtgatcggccacaacatgctgctggacgtgatgcacaccgtgcaccagttctactgccccctgcccgccgacctgagcgagttcaaggagatgaccacctgcgtgttccccagactgctggacaccaagctgatggccagcacccagcccttcaaggacatcatcaacaacaccagcctggccgagctggagaagagactgaaggagacccccttcaacccccccaaggtggagagcgccgagggcttccccagctacgacaccgccagcgagcagctgcacgaggccggctacgacgcctacatcaccggcctgtgcttcatcagcatggccaactacctgggcagcttcctgagcccccccaagatccacgtgagcgccagaagcaagctgatcgagcccttcttcaacaagctgttcctgatgagagtgatggacatcccctacctgaacctggagggccccgacctgcagcccaagagagaccacgtgctgcacgtgaccttccccaaggagtggaagaccagcgacctgtaccagctgttcagcgccttcggcaacatccagatcagctggatcgacgacaccagcgccttcgtgagcctgagccagcccgagcaggtgaagatcgccgtgaacaccagcaagtacgccgagagctacagaatccagacctacgccgagtacatgggcagaaagcaggaggagaagcagatcaagagaaagtggaccgaggacagctggaaggaggccgacagcaagagactgaacccccagtgcatcccctacaccctgcagaaccactactacagaaacaacagcttcaccgcccccagcaccgtgggcaagagaaacctgagccccagccaggaggaggccggcctggaggacggcgtgagcggcgagatcagcgacaccgagctggagcagaccgacagctgcgccgagcccctgagcgagggcagaaagaaggccaagaagctgaagagaatgaagaaggagctgagccccgccggcagcatcagcaagaacagccccgccaccctgttcgaggtgcccgacacctggtag

SEQ ID NO: 93755 - DNA, 1782 bp, synthetic construct
  misc_feature 1..1782: note = Description of Artificial Sequence: Synthetic coding sequence
  source 1..1782: mol_type = other DNA
atggagatcatcagaagcaacttcaagagcaacctgcacaaggtgtaccaggccatcgaggaggccgacttcttcgccatcgacggcgagttcagcggcatcagcgacggccccagcgtgagcgccctgaccaacggcttcgacacccccgaggagagaagcagccccgacgtgaagttcgtgtgccagagcagcagcatcgacttcctggccagccagggcttcgacttcaacaaggtgttcagaaacggcatcccctacctgaaccaggaggaggagagacagctgagagagcagtacgacgagaagagaagccaggccaacggcgccggcgccctgagctacgtgagccccaacaccagcaagtgccccgtgaccatccccgaggaccagaagaagttcatcgaccaggtggtggagaagatcgaggacctgctgcagagcgaggagaacaagaacctggacctggagccctgcaccggcttccagagaaagctgatctaccagaccctgagctggaagtaccccaagggcatccacgtggagaccctggagaccgagaagaaggagagatacatcgtgatcagcaaggtggacgaggaggagagaaagagaagagagcagcagaagcacgccaaggagcaggaggagctgaacgacgccgtgggcttcagcagagtgatccacgccatcgccaacagcggcaagctggtgatcggccacaacatgctgctggacgtgatgcacaccgtgcaccagttctactgccccctgcccgccgacctgagcgagttcaaggagatgaccacctgcgtgttccccagactgctggacaccaagctgatggccagcacccagcccttcaaggacatcatcaacaacaccagcctggccgagctggagaagagactgaaggagacccccttcaacccccccaaggtggagagcgccgagggcttccccagctacgacaccgccagcgagcagctgcacgaggccggctacgacgcctacatcaccggcctgtgcttcatcagcatggccaactacctgggcagcttcctgagcccccccaagatccacgtgagcgccagaagcaagctgatcgagcccttcttcaacaagctgttcctgatgagagtgatggacatcccctacctgaacctggagggccccgacctgcagcccaagagagaccacgtgctgcacgtgaccttccccaaggagtggaagaccagcgacctgtaccagctgttcagcgccttcggcaacatccagatcagctggatcgacgacaccagcgccttcgtgagcctgagccagcccgagcaggtgaagatcgccgtgaacaccagcaagtacgccgagagctacagaatccagacctacgccgagtacatgggcagaaagcaggaggagaagcagatcaagagaaagtggaccgaggacagctggaaggaggccgacagcaagagactgaacccccagtgcatcccctacaccctgcagaaccactactacagaaacaacagcttcaccgcccccagcaccgtgggcaagagaaacctgagccccagccaggaggaggccggcctggaggacggcgtgagcggcgagatcagcgacaccgagctggagcagaccgacagctgcgccgagcccctgagcgagggcagaaagaaggccaagaagctgaagagaatgaagaaggagctgagccccgccggcagcatcagcaagaacagccccgccaccctgttcgaggtgcccgacacctggtag

SEQ ID NO: 93756 - DNA, 1920 bp, synthetic construct
  misc_feature 1..1920: note = Description of Artificial Sequence: Synthetic coding sequence
  source 1..1920: mol_type = other DNA
atggagatcatcagaagcaacttcaagagcaacctgcacaaggtgtaccaggccatcgaggaggccgacttcttcgccatcgacggcgagttcagcggcatcagcgacggccccagcgtgagcgccctgaccaacggcttcgacacccccgaggagagataccagaagctgaagaagcacagcatggacttcctgctgttccagttcggcctgtgcaccttcaagtacgactacaccgacagcaagtacatcaccaagagcttcaacttctacgtgttccccaagcccttcaacagaagcagccccgacgtgaagttcgtgtgccagagcagcagcatcgacttcctggccagccagggcttcgacttcaacaaggtgttcagaaacggcatcccctacctgaaccaggaggaggagagacagctgagagagcagtacgacgagaagagaagccaggccaacggcgccggcgccctgagctacgtgagccccaacaccagcaagtgccccgtgaccatccccgaggaccagaagaagttcatcgaccaggtggtggagaagatcgaggacctgctgcagagcgaggagaacaagaacctggacctggagccctgcaccggcttccagagaaagctgatctaccagaccctgagctggaagtaccccaagggcatccacgtggagaccctggagaccgagaagaaggagagatacatcgtgatcagcaaggtggacgaggaggagagaaagagaagagagcagcagaagcacgccaaggagcaggaggagctgaacgacgccgtgggcttcagcagagtgatccacgccatcgccaacagcggcaagctggtgatcggccacaacatgctgctggacgtgatgcacaccgtgcaccagttctactgccccctgcccgccgacctgagcgagttcaaggagatgaccacctgcgtgttccccagactgctggacaccaagctgatggccagcacccagcccttcaaggacatcatcaacaacaccagcctggccgagctggagaagagactgaaggagacccccttcaacccccccaaggtggagagcgccgagggcttccccagctacgacaccgccagcgagcagctgcacgaggccggctacgacgcctacatcaccggcctgtgcttcatcagcatggccaactacctgggcagcttcctgagcccccccaagatccacgtgagcgccagaagcaagctgatcgagcccttcttcaacaagctgttcctgatgagagtgatggacatcccctacctgaacctggagggccccgacctgcagcccaagagagaccacgtgctgcacgtgaccttccccaaggagtggaagaccagcgacctgtaccagctgttcagcgccttcggcaacatccagatcagctggatcgacgacaccagcgccttcgtgagcctgagccagcccgagcaggtgaagatcgccgtgaacaccagcaagtacgccgagagctacagaatccagacctacgccgagtacatgggcagaaagcaggaggagaagcagatcaagagaaagtggaccgaggacagctggaaggaggccgacagcaagagactgaacccccagtgcatcccctacaccctgcagaaccactactacagaaacaacagcttcaccgcccccagcaccgtgggcaagagaaacctgagccccagccaggaggaggccggcctggaggacggcgtgagcggcgagatcagcgacaccgagctggagcagaccgacagctgcgccgagcccctgagcgagggcagaaagaaggccaagaagctgaagagaatgaagaaggagctgagccccgccggcagcatcagcaagaacagccccgccaccctgttcgaggtgcccgacacctggtag

SEQ ID NO: 93757 - DNA, 624 bp, synthetic construct
  misc_feature 1..624: note = Description of Artificial Sequence: Synthetic coding sequence
  source 1..624: mol_type = other DNA
atggagatcatcagaagcaacttcaagagcaacctgcacaaggtgtaccaggccatcgaggaggccgacttcttcgccatcgacggcgagttcagcggcatcagcgacggccccagcgtgagcgccctgaccaacggcttcgacacccccgaggagagataccagaagctgaagaagcacagcatggacttcctgctgttccagttcggcctgtgcaccttcaagtacgactacaccgacagcaagagcagccccgacgtgaagttcgtgtgccagagcagcagcatcgacttcctggccagccagggcttcgacttcaacaaggtgttcagaaacggcatcccctacctgaaccaggaggaggagagacagctgagagagcagtacgacgagaagagaagccaggccaacggcgccggcgccctgagctacgtgagccccaacaccagcaagtgccccgtgaccatccccgaggaccagaagaagttcatcgaccaggtggtggagaagatcgaggacctgctgcagagcgaggagaacaagaacctggacctggagccctgcaccggcttccagagaaagctgatctaccagaccctgagctggaagagaagcgacatctag

SEQ ID NO: 93758 - DNA, 1395 bp, synthetic construct
  misc_feature 1..1395: note = Description of Artificial Sequence: Synthetic coding sequence
  source 1..1395: mol_type = other DNA
atggagatcatcagaagcaacttcaagagcaacctgcacaaggtgtaccaggccatcgaggaggccgacttcttcgccatcgacggcgagttcagcggcatcagcgacggccccagcgtgagcgccctgaccaacggcttcgacacccccgaggagagataccagaagctgaagaagaaggagagatacatcgtgatcagcaaggtggacgaggaggagagaaagagaagagagcagcagaagcacgccaaggagcaggaggagctgaacgacgccgtgggcttcagcagagtgatccacgccatcgccaacagcggcaagctggtgatcggccacaacatgctgctggacgtgatgcacaccgtgcaccagttctactgccccctgcccgccgacctgagcgagttcaaggagatgaccacctgcgtgttccccagactgctggacaccaagctgatggccagcacccagcccttcaaggacatcatcaacaacaccagcctggccgagctggagaagagactgaaggagacccccttcaacccccccaaggtggagagcgccgagggcttccccagctacgacaccgccagcgagcagctgcacgaggccggctacgacgcctacatcaccggcctgtgcttcatcagcatggccaactacctgggcagcttcctgagcccccccaagatccacgtgagcgccagaagcaagctgatcgagcccttcttcaacaagctgttcctgatgagagtgatggacatcccctacctgaacctggagggccccgacctgcagcccaagagagaccacgtgctgcacgtgaccttccccaaggagtggaagaccagcgacctgtaccagctgttcagcgccttcggcaacatccagatcagctggatcgacgacaccagcgccttcgtgagcctgagccagcccgagcaggtgaagatcgccgtgaacaccagcaagtacgccgagagctacagaatccagacctacgccgagtacatgggcagaaagcaggaggagaagcagatcaagagaaagtggaccgaggacagctggaaggaggccgacagcaagagactgaacccccagtgcatcccctacaccctgcagaaccactactacagaaacaacagcttcaccgcccccagcaccgtgggcaagagaaacctgagccccagccaggaggaggccggcctggaggacggcgtgagcggcgagatcagcgacaccgagctggagcagaccgacagctgcgccgagcccctgagcgagggcagaaagaaggccaagaagctgaagagaatgaagaaggagctgagccccgccggcagcatcagcaagaacagccccgccaccctgttcgaggtgcccgacacctggtag

SEQ ID NO: 93759 - DNA, 1071 bp, synthetic construct
  misc_feature 1..1071: note = Description of Artificial Sequence: Synthetic coding sequence
  source 1..1071: mol_type = other DNA
atggacgccggcgtgaccgagagcggcctgaacgtgaccctgaccatcagactgctgatgcacggcaaggaggtgggcagcatcatcggcaagaagggcgagagcgtgaagagaatcagagaggagagcggcgccagaatcaacatcagcgagggcaactgccccgagagaatcatcaccctgaccggccccaccaacgccatcttcaaggccttcgccatgatcatcgacaagctggaggaggacatcaacagcagcatgaccaacagcaccgccgccagcagaccccccgtgaccctgagactggtggtgcccgccacccagtgcggcagcctgatcggcaagggcggctgcaagatcaaggagatcagagagagcaccggcgcccaggtgcaggtggccggcgacatgctgcccaacagcaccgagagagccatcaccatcgccggcgtgccccagagcgtgaccgagtgcgtgaagcagatctgcctggtgatgctggagaccctgagccagagcccccagggcagagtgatgaccatcccctaccagcccatgcccgccagcagccccgtgatctgcgccggcggccaggacagatgcagcgacgccgccggctacccccacgccacccacgacctggagggcccccccctggacgcctacagcatccagggccagcacaccatcagccccctggacctggccaagctgaaccaggtggccagacagcagagccacttcgccatgatgcacggcggcaccggcttcgccggcatcgacagcagcagccccgaggtgaagggctactgggccagcctggacgccagcacccagaccacccacgagctgaccatccccaacaacctgatcggctgcatcatcggcagacagggcgccaacatcaacgagatcagacagatgagcggcgcccagatcaagatcgccaaccccgtggagggcagcagcggcagacaggtgaccatcaccggcagcgccgccagcatcagcctggcccagtacctgatcaacgccagactgagcagcgagaagggcatgggctgcagctag

SEQ ID NO: 93760 - DNA, 957 bp, synthetic construct
  misc_feature 1..957: note = Description of Artificial Sequence: Synthetic coding sequence
  source 1..957: mol_type = other DNA
atggacaccggcgtgatcgagggcggcctgaacgtgaccctgaccatcagactgctgatgcacggcaaggaggtgggcagcatcatcggcaagaagggcgagagcgtgaagaagatgagagaggagagcggcgccagaatcaacatcagcgagggcaactgccccgagagaatcatcaccctggccggccccaccaacgccatcttcaaggccttcgccatgatcatcgacaagctggaggaggacatcagcagcagcatgaccaacagcaccgccgccagcagaccccccgtgaccctgagactggtggtgcccgccagccagtgcggcagcctgatcggcaagggcggctgcaagatcaaggagatcagagagagcaccggcgcccaggtgcaggtggccggcgacatgctgcccaacagcaccgagagagccatcaccatcgccggcatcccccagagcatcatcgagtgcgtgaagcagatctgcgtggtgatgctggagagcccccccaagggcgtgaccatcccctacagacccaagcccagcagcagccccgtgatcttcgccggcggccaggcctacaccatccagggccagtacgccatcccccagcccgacctgaccaagctgcaccagctggccatgcagcagagccacttccccatgacccacggcaacaccggcttcagcgccggcctggacgccagcgcccagaccaccagccacgagctgaccatccccaacgacctgatcggctgcatcatcggcagacagggcgccaagatcaacgagatcagacagatgagcggcgcccagatcaagatcgccaaccccgtggagggcagcaccgacagacaggtgaccatcaccggcagcgccgccagcatcagcctggcccagtacctgatcaacgtgagactgagcagcgagaccggcggcatgggcagcagctag

SEQ ID NO: 93761 - DNA, 1098 bp, synthetic construct
  misc_feature 1..1098: note = Description of Artificial Sequence: Synthetic coding sequence
  source 1..1098: mol_type = other DNA
atggacaccggcgtgatcgagggcggcctgaacgtgaccctgaccatcagactgctgatgcacggcaaggaggtgggcagcatcatcggcaagaagggcgagagcgtgaagaagatgagagaggagagcggcgccagaatcaacatcagcgagggcaactgccccgagagaatcatcaccctggccggccccaccaacgccatcttcaaggccttcgccatgatcatcgacaagctggaggaggacatcagcagcagcatgaccaacagcaccgccgccagcagaccccccgtgaccctgagactggtggtgcccgccagccagtgcggcagcctgatcggcaagggcggctgcaagatcaaggagatcagagagagcaccggcgcccaggtgcaggtggccggcgacatgctgcccaacagcaccgagagagccatcaccatcgccggcatcccccagagcatcatcgagtgcgtgaagcagatctgcgtggtgatgctggagaccctgagccagagcccccccaagggcgtgaccatcccctacagacccaagcccagcagcagccccgtgatcttcgccggcggccaggacagatacagcaccggcagcgacagcgccagcttcccccacaccacccccagcatgtgcctgaaccccgacctggagggcccccccctggaggcctacaccatccagggccagtacgccatcccccagcccgacctgaccaagctgcaccagctggccatgcagcagagccacttccccatgacccacggcaacaccggcttcagcggcatcgagagcagcagccccgaggtgaagggctactggggcctggacgccagcgcccagaccaccagccacgagctgaccatccccaacgacctgatcggctgcatcatcggcagacagggcgccaagatcaacgagatcagacagatgagcggcgcccagatcaagatcgccaaccccgtggagggcagcaccgacagacaggtgaccatcaccggcagcgccgccagcatcagcctggcccagtacctgatcaacgtgagactgagcagcgagaccggcggcatgggcagcagctag

SEQ ID NO: 93762 - DNA, 1008 bp, synthetic construct
  misc_feature 1..1008: note = Description of Artificial Sequence: Synthetic coding sequence
  source 1..1008: mol_type = other DNA
atggacaccggcgtgatcgagggcggcctgaacgtgaccctgaccatcagactgctgatgcacggcaaggaggtgggcagcatcatcggcaagaagggcgagagcgtgaagaagatgagagaggagagcggcgccagaatcaacatcagcgagggcaactgccccgagagaatcatcaccctggccggccccaccaacgccatcttcaaggccttcgccatgatcatcgacaagctggaggaggacatcagcagcagcatgaccaacagcaccgccgccagcagaccccccgtgaccctgagactggtggtgcccgccagccagtgcggcagcctgatcggcaagggcggctgcaagatcaaggagatcagagagagcaccggcgcccaggtgcaggtggccggcgacatgctgcccaacagcaccgagagagccatcaccatcgccggcatcccccagagcatcatcgagtgcgtgaagcagatctgcgtggtgatgctggagaccctgagccagagcccccccaagggcgtgaccatcccctacagacccaagcccagcagcagccccgtgatcttcgccggcggccaggcctacaccatccagggccagtacgccatcccccagcccgacctgaccaagctgcaccagctggccatgcagcagagccacttccccatgacccacggcaacaccggcttcagcggcatcgagagcagcagccccgaggtgaagggctactgggccggcctggacgccagcgcccagaccaccagccacgagctgaccatccccaacgacctgatcggctgcatcatcggcagacagggcgccaagatcaacgagatcagacagatgagcggcgcccagatcaagatcgccaaccccgtggagggcagcaccgacagacaggtgaccatcaccggcagcgccgccagcatcagcctggcccagtacctgatcaacgtgagactgagcagcgagaccggcggcatgggcagcagctag

SEQ ID NO: 93763 - DNA, 906 bp, synthetic construct
  misc_feature 1..906: note = Description of Artificial Sequence: Synthetic coding sequence
  source 1..906: mol_type = other DNA
atggacaccggcgtgatcgagggcggcctgaacgtgaccctgaccatcagactgctgatgcacggcaaggaggtgggcagcatcatcggcaagaagggcgagagcgtgaagaagatgagagaggagagcggcgccagaatcaacatcagcgagggcaactgccccgagagaatcatcaccctggccggccccaccaacgccatcttcaaggccttcgccatgatcatcgacaagctggaggaggacatcagcagcagcatgaccaacagcaccgccgccagcagaccccccgtgaccctgagactggtggtgcccgccagccagtgcggcagcctgatcggcaagggcggctgcaagatcaaggagatcagagagagcaccggcgcccaggtgcaggtggccggcgacatgctgcccaacagcaccgagagagccatcaccatcgccggcatcccccagagcatcatcgagtgcgtgaagcagatctgcgtggtgatgctggagagcccccccaagggcgtgaccatcccctacagacccaagcccagcagcagccccgtgatcttcgccggcggccaggacagatacagcaccggcagcgacagcgccagcttcccccacaccacccccagcatgtgcctgaaccccgacctggagggcccccccctggaggcctacaccatccagggccagtacgccatcccccagcccgacctgaccaagctgcaccagctggccatgcagcagagccacttccccatgacccacggcaacaccggcttcagcggcatggacaccagcgtgttcatcagcgtgagatgcagcgccagagagagacccgtgcccagaagccagctggacatctgcctgaagcagaccagcctgagcagcatcctgctggtgtag

SEQ ID NO: 93764 - DNA, 1089 bp, synthetic construct
  misc_feature 1..1089: note = Description of Artificial Sequence: Synthetic coding sequence
  source 1..1089: mol_type = other DNA
atggacaccggcgtgatcgagggcggcctgaacgtgaccctgaccatcagactgctgatgcacggcaaggaggtgggcagcatcatcggcaagaagggcgagagcgtgaagaagatgagagaggagagcggcgccagaatcaacatcagcgagggcaactgccccgagagaatcatcaccctggccggccccaccaacgccatcttcaaggccttcgccatgatcatcgacaagctggaggaggacatcagcagcagcatgaccaacagcaccgccgccagcagaccccccgtgaccctgagactggtggtgcccgccagccagtgcggcagcctgatcggcaagggcggctgcaagatcaaggagatcagagagagcaccggcgcccaggtgcaggtggccggcgacatgctgcccaacagcaccgagagagccatcaccatcgccggcatcccccagagcatcatcgagtgcgtgaagcagatctgcgtggtgatgctggagagcccccccaagggcgtgaccatcccctacagacccaagcccagcagcagccccgtgatcttcgccggcggccaggacagatacagcaccggcagcgacagcgccagcttcccccacaccacccccagcatgtgcctgaaccccgacctggagggcccccccctggaggcctacaccatccagggccagtacgccatcccccagcccgacctgaccaagctgcaccagctggccatgcagcagagccacttccccatgacccacggcaacaccggcttcagcggcatcgagagcagcagccccgaggtgaagggctactgggccggcctggacgccagcgcccagaccaccagccacgagctgaccatccccaacgacctgatcggctgcatcatcggcagacagggcgccaagatcaacgagatcagacagatgagcggcgcccagatcaagatcgccaaccccgtggagggcagcaccgacagacaggtgaccatcaccggcagcgccgccagcatcagcctggcccagtacctgatcaacgtgagactgagcagcgagaccggcggcatgggcagcagctag

SEQ ID NO: 93765 - DNA, 996 bp, synthetic construct
  misc_feature 1..996: note = Description of Artificial Sequence: Synthetic coding sequence
  source 1..996: mol_type = other DNA
atggacaccggcgtgatcgagggcggcctgaacgtgaccctgaccatcagactgctgatgcacggcaaggaggtgggcagcatcatcggcaagaagggcgagagcgtgaagaagatgagagaggagagcggcgccagaatcaacatcagcgagggcaactgccccgagagaatcatcaccctggccggccccaccaacgccatcttcaaggccttcgccatgatcatcgacaagctggaggaggacatcagcagcagcatgaccaacagcaccgccgccagcagaccccccgtgaccctgagactggtggtgcccgccagccagtgcggcagcctgatcggcaagggcggctgcaagatcaaggagatcagagagagcaccggcgcccaggtgcaggtggccggcgacatgctgcccaacagcaccgagagagccatcaccatcgccggcatcccccagagcatcatcgagtgcgtgaagcagatctgcgtggtgatgctggagagcccccccaagggcgtgaccatcccctacagacccaagcccagcagcagccccgtgatcttcgccggcggccaggcctacaccatccagggccagtacgccatcccccagcccgacctgaccaagctgcaccagctggccatgcagcagagccacttccccatgacccacggcaacaccggcttcagcggcatcgagagcagcagccccgaggtgaagggctactgggccggcctggacgccagcgcccagaccaccagccacgagctgaccatccccaacgacctgatcggctgcatcatcggcagacagggcgccaagatcaacgagatcagacagatgagcggcgcccagatcaagatcgccaaccccgtggagggcagcaccgacagacaggtgaccatcaccggcagcgccgccagcatcagcctggcccagtacctgatcaacgtgagactgagcagcgagaccggcggcatgggcagcagctag

SEQ ID NO: 93766 - DNA, 1101 bp, synthetic construct
  misc_feature 1..1101: note = Description of Artificial Sequence: Synthetic coding sequence
  source 1..1101: mol_type = other DNA
atggacaccggcgtgatcgagggcggcctgaacgtgaccctgaccatcagactgctgatgcacggcaaggaggtgggcagcatcatcggcaagaagggcgagagcgtgaagaagatgagagaggagagcggcgccagaatcaacatcagcgagggcaactgccccgagagaatcatcaccctggccggccccaccaacgccatcttcaaggccttcgccatgatcatcgacaagctggaggaggacatcagcagcagcatgaccaacagcaccgccgccagcagaccccccgtgaccctgagactggtggtgcccgccagccagtgcggcagcctgatcggcaagggcggctgcaagatcaaggagatcagagagagcaccggcgcccaggtgcaggtggccggcgacatgctgcccaacagcaccgagagagccatcaccatcgccggcatcccccagagcatcatcgagtgcgtgaagcagatctgcgtggtgatgctggagaccctgagccagagcccccccaagggcgtgaccatcccctacagacccaagcccagcagcagccccgtgatcttcgccggcggccaggacagatacagcaccggcagcgacagcgccagcttcccccacaccacccccagcatgtgcctgaaccccgacctggagggcccccccctggaggcctacaccatccagggccagtacgccatcccccagcccgacctgaccaagctgcaccagctggccatgcagcagagccacttccccatgacccacggcaacaccggcttcagcggcatcgagagcagcagccccgaggtgaagggctactgggccggcctggacgccagcgcccagaccaccagccacgagctgaccatccccaacgacctgatcggctgcatcatcggcagacagggcgccaagatcaacgagatcagacagatgagcggcgcccagatcaagatcgccaaccccgtggagggcagcaccgacagacaggtgaccatcaccggcagcgccgccagcatcagcctggcccagtacctgatcaacgtgagactgagcagcgagaccggcggcatgggcagcagctag

SEQ ID NO: 93767 - DNA, 1086 bp, synthetic construct
  misc_feature 1..1086: note = Description of Artificial Sequence: Synthetic coding sequence
  source 1..1086: mol_type = other DNA
atggacaccggcgtgatcgagggcggcctgaacgtgaccctgaccatcagactgctgatgcacggcaaggaggtgggcagcatcatcggcaagaagggcgagagcgtgaagaagatgagagaggagagcggcgccagaatcaacatcagcgagggcaactgccccgagagaatcatcaccctggccggccccaccaacgccatcttcaaggccttcgccatgatcatcgacaagctggaggaggacatcagcagcagcatgaccaacagcaccgccgccagcagaccccccgtgaccctgagactggtggtgcccgccagccagtgcggcagcctgatcggcaagggcggctgcaagatcaaggagatcagagagagcaccggcgcccaggtgcaggtggccggcgacatgctgcccaacagcaccgagagagccatcaccatcgccggcatcccccagagcatcatcgagtgcgtgaagcagatctgcgtggtgatgctggagagcccccccaagggcgtgaccatcccctacagacccaagcccagcagcagccccgtgatcttcgccggcggccaggacagatacagcaccggcagcgacagcgccagcttcccccacaccacccccagcatgtgcctgaaccccgacctggagggcccccccctggaggcctacaccatccagggccagtacgccatcccccagcccgacctgaccaagctgcaccagctggccatgcagcagagccacttccccatgacccacggcaacaccggcttcagcggcatcgagagcagcagccccgaggtgaagggctactggggcctggacgccagcgcccagaccaccagccacgagctgaccatccccaacgacctgatcggctgcatcatcggcagacagggcgccaagatcaacgagatcagacagatgagcggcgcccagatcaagatcgccaaccccgtggagggcagcaccgacagacaggtgaccatcaccggcagcgccgccagcatcagcctggcccagtacctgatcaacgtgagactgagcagcgagaccggcggcatgggcagcagctag

SEQ ID NO: 93768 - DNA, 1056 bp, synthetic construct
  misc_feature 1..1056: note = Description of Artificial Sequence: Synthetic coding sequence
  source 1..1056: mol_type = other DNA
ctgagccccggcgacgccttctgggcccccagcgtgctgccccacagcaccctgagcaccctgagccaccacccccagccccagttcggcagaagaatggagagcaaggtgagcgagggcggcctgaacgtgaccctgaccatcagactgctgatgcacggcaaggtgagaggcgccgccatcgtgagcaagggcgagaccgtgaagaagatgagagaggagagcggcgccagaatcaacatcagcgagggcaactgccccgagagaatcgtgaccatcaccggccccaccgacgccatcttcaaggccttcgccatgatcgcctacaagttcgaggaggacatcatcaacagcatgagcaacagccccgccaccagcaagccccccgtgaccctgagactggtggtgcccgccagccagtgcggcagcctgatcggcaagggcggcagcaagatcaaggagatcagagagagcaccggcgcccaggtgcaggtggccggcgacatgctgcccaacagcaccgagagagccgtgaccatcagcggcacccccgacgccatcatccagtgcgtgaagcagatctgcgtggtgatgctggagagcccccccaagggcgccaccatcccctacagacccaagcccgccagcacccccgtgatcttcgccggcggccaggcctacaccatccagggccagtacgccatcccccaccccgaccagctgaccaagctgcaccagctggccatgcagcagacccccttcccccccctgggccagaccaaccccgccttccccggcctggacgccagcccccccgccagcacccacgagctgaccatccccaacgacctgatcggctgcatcatcggcagacagggcaccaagatcaacgagatcagacagatgagcggcgcccagatcaagatcgccaacgccaccgagggcagcagcgagagacagatcaccatcaccggcacccccgccaacatcagcctggcccagtacctgatcaacgccagactgaccagcgaggtgaccggcatgggcaccctgtag

SEQ ID NO: 93769 - DNA, 969 bp, synthetic construct
  misc_feature 1..969: note = Description of Artificial Sequence: Synthetic coding sequence
  source 1..969: mol_type = other DNA
ccccagccccagttcggcagaagaatggagagcaaggtgagcgagggcggcctgaacgtgaccctgaccatcagactgctgatgcacggcaaggaggtgggcagcatcatcggcaagaagggcgagaccgtgaagaagatgagagaggagagcggcgccagaatcaacatcagcgagggcaactgccccgagagaatcgtgaccatcaccggccccaccgacgccatcttcaaggccttcgccatgatcgcctacaagttcgaggaggacatcatcaacagcatgagcaacagccccgccaccagcaagccccccgtgaccctgagactggtggtgcccgccagccagtgcggcagcctgatcggcaagggcggcagcaagatcaaggagatcagagagagcaccggcgcccaggtgcaggtggccggcgacatgctgcccaacagcaccgagagagccgtgaccatcagcggcacccccgacgccatcatccagtgcgtgaagcagatctgcgtggtgatgctggaggcctacaccatccagggccagtacgccatcccccaccccgaccagctgaccaagctgcaccagctggccatgcagcagacccccttcccccccctgggccagaccaaccccgccttccccggcgagaagctgcccctgcacagcagcgaggaggcccagaacctgatgggccagagcagcggcctggacgccagcccccccgccagcacccacgagctgaccatccccaacgacctgatcggctgcatcatcggcagacagggcaccaagatcaacgagatcagacagatgagcggcgcccagatcaagatcgccaacgccaccgagggcagcagcgagagacagatcaccatcaccggcacccccgccaacatcagcctggcccagtacctgatcaacgccagactgaccagcgaggtgaccggcatgggcaccctgtag
